United States Patent Application Publication US 2004/0214272 A1 - sequence listing, part 58

SEQ ID NO: 324845 - protein, 38 aa, Zea mays
  Clone ID: MRT4577_59329C.1.pep
DQKKGAKMTPTGNGRVQTALKQVWIQARVGSELVRTRG

SEQ ID NO: 324846 - protein, 114 aa, Zea mays
  Clone ID: MRT4577_5932C.1.pep
MHLYYFCLYHSVSASPFIPRNPKRQKQISSDLPFRFYAMLQQVLELAGNAARDNKKTRIVPRHIQLAVRNDEELTKLLGGATIASGGVMPNIHQHLLPKKAGSSKASTVDDDDN

SEQ ID NO: 324847 - protein, 41 aa, Zea mays
  Clone ID: MRT4577_59330C.1.pep
TFVSDQVAGLVPPHIAQRVAAICGLQQPTPCPYAAAGGVPH

SEQ ID NO: 324848 - protein, 98 aa, Zea mays
  Clone ID: MRT4577_59331C.1.pep
YKLLHLHGSRLVVMERNFVPQAPSTVISSLMQQVEYFHASPEEVKATEEAEELDPFPQTDALVSTPTPTPVTPPWPCPARQSLRRRPGAGAGGRASSS

SEQ ID NO: 324849 - protein, 521 aa, Zea mays
  Clone ID: MRT4577_59332C.1.pep
RVGPAAWADAWVGRRNTVDANPKWCCTYLLDPSDSLFIDMGQAFIRQQIKEYGDVTNIYNCDTFNENTPPTDEPAYISSLGSAIYEAMSRGNKNAVWLMQGWLFYSDAAFWKEPQMKALLHSVPIGKMIVLDLFADVKPIWKMSSQFYGVPYIWCMLHNFGGNIEMYGILDSISSGPIDARTSYNSTMIGVGMCMEGMRHNPVVYELMSEMAFHNKKVEVEDWLKTYSYRRYGQANADIEKAWRYLYHTIYNCTDGIADHNKDYIVEFPDISPSSVTYQVSKRRGMSITRNHRRFFLSEVSGILPQPHLWYSTKEAVKALELFLDAGSTFSESLTYRYDLVDLTRQCLSKLANEVYLDAMSSYQKKDSYGLNAHARKFLEIIVDIDTLLAADDNFLLGPWLESAKSLAITEKERQQYEWNARTQVTMWYDNTETEQSKLHDYANKFWSGLLKSYYLPRASKYFAYLTRSLQENRSFQLEEWRKDWISYSNEWQSGKEVYAVKATGDALAIARSLYRKYLRP

SEQ ID NO: 324850 - protein, 167 aa, Zea mays
  unsure (1)..(167): unsure at all Xaa locations
  Clone ID: MRT4577_59333C.1.pep
RYRSGIPGPTHASGYNSTMIGVGMCMEGIEHNPVVYELMSEMAFHNKKVEXVRSGLIEVFCLELNVDLCIREGLSKTPNICNLCSFLVDMLSATLXHEDWLKTYSCRRYGQANADIEKAWRYLYHTIYNCTDGIADHNKDYILDFRDISSSSTTYVFKRRGMSLREP

SEQ ID NO: 324851 - protein, 202 aa, Zea mays
  Clone ID: MRT4577_59334C.1.pep
MLLLQVILLGLLSLHAPSNSATATDTVSPGNGLAGSSRLVSNNSKFALGFFRMDSKSFNYATNPYTYLGIWFNKVPKLTPLWSANGESPVMDPASPELATAGDGNLVILDQATRSVIWSTHANTTTNDTVAVLQNNGNLVLRSSSNSSTVFWQSFDYPTDTFFAGAKIGWDKVTGLNRRLVSRKNLIDQAPGLYTGEIKRMG

SEQ ID NO: 324852 - protein, 167 aa, Zea mays
  Clone ID: MRT4577_59335C.1.pep
QESIWQKVFKSFNVTDRDLDDFFGGPAFLAWARMGNLHGWGGPLSQNWLDQQLALQKKILSRMIELGMVPVLPSFSGNVPAIFAKLFPSANITRLGDWNTVDANPKWCCTYLLDPSDSLFIDVGQAFIRQQIKEYGDVTNIYNCDTFNENTPPTDEPAYISSLGSAI

SEQ ID NO: 324853 - protein, 107 aa, Zea mays
  unsure (1)..(107): unsure at all Xaa locations
  Clone ID: MRT4577_59336C.1.pep
TTLLVILPMQMQAFKVILTLAILSSHSSHKEYIGXRLXPSWQAKPMFNAAFXKIAGRIKEIEGFGSECNNSLHLKNLCGARIVPYELLKPFSXPGVTGRGFPSSISK

SEQ ID NO: 324854 - protein, 47 aa, Zea mays
  Clone ID: MRT4577_59337C.1.pep
SYHCLCLAVQQTWSHHSMYASYQIYGSMYWAIKIYFGLWFLLDNYIM

SEQ ID NO: 324855 - protein, 120 aa, Zea mays
  unsure (1)..(120): unsure at all Xaa locations
  Clone ID: MRT4577_59338C.1.pep
FSIGTSVKAAAAYFGTALVKLDCXATLLKVPDNDXYDPXHELLKVAIGSIDAVGLYFALTQMTHRNISHNYKFQAVGLGWAIAASILHRLAPFWIVAKXLELTWEYISQGLEVNAISVMT

SEQ ID NO: 324856 - protein, 40 aa, Zea mays
  Clone ID: MRT4577_59339C.1.pep
YKPREIALDCPAVSHTIYIVRIHRYPSVSRPIVHGRGTNN

SEQ ID NO: 324857 - protein, 135 aa, Zea mays
  unsure (1)..(135): unsure at all Xaa locations
  Clone ID: MRT4577_5933C.1.pep
SVFGGCCPLRSVCXGRARGASASAXPAPCGSRPCWCVLGLXXXFVCCAPSXPAPGCGARLLFFSSGVXFXLPAAXXVLRVFXGXSGSCXXXLGXXXXRXSCFXXXGARPXGAAXPXSSXXGRPWAGRLSSGPFVL

SEQ ID NO: 324858 - protein, 77 aa, Zea mays
  Clone ID: MRT4577_59340C.1.pep
MFTHIVKILGPDKDLEVEDIVNTLPTKNLVIRCDRVMKTVRPGKKKLSSWPAHLEIHNGYNPLLLRGPSHQVISQEE

SEQ ID NO: 324859 - protein, 53 aa, Zea mays
  Clone ID: MRT4577_59341C.1.pep
LDQHTSATIPHGPRGGGLICTISLIFIWTTTCACYSKDRCSGKQFDFAQNITI

SEQ ID NO: 324860 - protein, 94 aa, Zea mays
  unsure (1)..(94): unsure at all Xaa locations
  Clone ID: MRT4577_59342C.1.pep
MLVFFSRSALHDRGLLARDQDLLDHRXRLAVANGLITTSAXYALAMIVHLQTRRDRHCAVLIMSRCAGSELLVRDQNKSHHFTGGTCSYGDYSR

SEQ ID NO: 324861 - protein, 89 aa, Zea mays
  Clone ID: MRT4577_59343C.1.pep
MDAPAMFTRKHVPEDIGLRNIGVGEAEDDGAGGQAQLHRDEKQHKPVLKKVKEKVKKIKSTLAGHGHGHDGEHGGDERMGDEDAYAGSD

SEQ ID NO: 324862 - protein, 129 aa, Zea mays
  Clone ID: MRT4577_59344C.1.pep
MAPGKRGKAKGAAPPPPTAAASTGAVGFPGCLRLMPPSTVAISIHAKPGSKVATITEIGDEAVGVQIDAPARDGEANAALVDFISSVLGVKKREVSIGSGSKSREKVVLVQDATLEGVYDALKKSCNCA

SEQ ID NO: 324863 - protein, 127 aa, Zea mays
  Clone ID: MRT4577_59345C.1.pep
PGKRGKAKGAAPPPPTAAASTGAVGFPGCLRLMPPSTVAISIHAKPGSKVATITEIGDEAVGVQIDAPARDGEANAALVDFISSVLGVKKREVSIGSGSKSREKVVLVQDATLEGVYDALKKSCNCA

SEQ ID NO: 324864 - protein, 105 aa, Zea mays
  Clone ID: MRT4577_59346C.1.pep
PSLSRISRGGFYLSAPSKGGGSLLSQESSGGENKRGIGATPERVQFQELLFFVFGGCLGATVCGSPRSSLCRELVNRLTPGWKKGQVGGLNQCLRPLVFLFLLLR

SEQ ID NO: 324865 - protein, 58 aa, Zea mays
  unsure (1)..(58): unsure at all Xaa locations
  Clone ID: MRT4577_59347C.1.pep
GQKLKPTVPLSEHQYLIXVYXRTFPLPKFQKLYYAIEYDLHADYTITIFLGNNYNTYT

SEQ ID NO: 324866 - protein, 167 aa, Zea mays
  Clone ID: MRT4577_59348C.1.pep
VGPSTKPTQVKPSTLRRMKRARRVTKMSNRVANSILSGVLKVTGFVTSTVLNSKPAQKFFKLMPGEVILASLDGFGKIWDAVEVSGKNVMQTSSVVTTSVVTHRYGEQAGEATHNYLHATGNVLGAAWAVFKIRKALDPKGNMKKSSFVSQAAHAVAKESVARQKKK

SEQ ID NO: 324867 - protein, 129 aa, Zea mays
  Clone ID: MRT4577_59349C.1.pep
MAPGKRGKAKGAAAPLPTAAASTGAVGFPGCLRLMPPSTVAISIHAKPGSKVATITEIGDEAVGVQIDAPARDGEANAALVDFISSVLGVKKREVSIGSGSKSREKVVLVQDATLEGVYDALKKSCNCA

SEQ ID NO: 324868 - protein, 431 aa, Zea mays
  Clone ID: MRT4577_5934C.1.pep
MRCLPFLHGDTKEKDPVTKSASLRSMSTTSTERDVRSGSDFTSLNVSDMSAESIRRTQYPSFTDRPSNLRVFSFAELKSATRNFSRSLMVGEGGFGCVYRGVIKTSDEPNERIEIAVKQLNRKGLQGQKEWLTEMNVLGIVDHPNLVKLIGYCAEDDERGVQRLLVYEYMPNGSVDDHLSSRSTSTLSWPMRLKVALDSARGLKYLHEEMEFQVIFRDLKTSNILLDENWNAKLSDFGLARHGPAEGLTHVSTAVVGTLGYAAPEYMQTGRLTAKSDIWSYGVLLYELITGRRPIDRNRPKSEQKLLDWVKPYISDVKRFPIIVDPRLEGHYNLKSMTKLSSVANRCLVRMPKSRPKMSEVYDMVQKIVDCVGTGPPQPPLLHYHGSASEPGPGDKRARKGSVKRRRLWELRFGCRHIVWRGWKPAIVKDL

SEQ ID NO: 324869 - protein, 251 aa, Zea mays
  Clone ID: MRT4577_59350C.1.pep
MPCCPPSLLGVGPRLRSFLRDYDALQSLALVLIYLQIGCALIGSLGALFNGVLVINLVIGLFAVVAIESSSQRLGRTYAVLLFFAVVLDVAWFILFSHAIWTINPDDKYGQLFVFSLRLALWMQIIGFSVRFLSSFLWIQMYRLGPSFTTPTYFETNHEARTSFLSPRSDSVRRNSMADHALGGSIYDPSYYSSLFEDVRNNACNHQGDKQSGSNDSGSTSAGQSPRLKSFACRSLLANDVESGLRRPLNS

SEQ ID NO: 324870 - protein, 108 aa, Zea mays
  unsure (1)..(108): unsure at all Xaa locations
  Clone ID: MRT4577_59351C.1.pep
IGCALIGSLGALFNGVLVINLVIGLFSVVAIESSSQRLGRTYAALLFFAVVLDVAWFILFSHAIWTINPDEKYGELFXVFSLRLTLGMQIIGFSVRFLLHSYGFKSIE

SEQ ID NO: 324871 - protein, 64 aa, Zea mays
  Clone ID: MRT4577_59352C.1.pep
CRYGEQAGEATHNYLHATGNVLGAAWAVFKIRKALDPKGNMKKSFVSQAAHAVAKESVARQKKK

SEQ ID NO: 324872 - protein, 342 aa, Zea mays
  Clone ID: MRT4577_59353C.1.pep
LLSCSPALLLAGTAFSDDTVPIPLLERFKAWQAEYNRTYATPEEFQQRFMVYSENVRFIKTMNQLSTGSSYELGENQFTDLTEEEFKDTYLMKLDEQPPAAEAMAPTVGTMSTAGMSNGNNTGEAPNSVDWRTKGAVTPVKNQQQCGSCWAFATVASIEGVHKIKTGRLVSLSEQEIVDCDRGGNNHGCHGGHSSSAMEWVTRNGGLTTESDYPYVGRQGQCMSDKLGHHAAKIRGRQAVQGKNEGALQHAVAGRPVAVSINASRAFQFYKRGIFSGPCNTTRNHAVTVVGYGANASGHKYWIVKNSWGERWGEKGYVRMQRGVRAREGVCGIAIAPFYAVM

SEQ ID NO: 324873 - protein, 56 aa, Zea mays
  Clone ID: MRT4577_59354C.1.pep
MGLFRGSFTLLVGMGCGVYIAQNYNVPNVKKLFNTYVFLAKHIEETYRKPKKKDDD

SEQ ID NO: 324874 - protein, 106 aa, Zea mays
  unsure (1)..(106): unsure at all Xaa locations
  Clone ID: MRT4577_59355C.1.pep
RSLARLTPPFPTNNADSRCGGRGMLXEESESLPTEQTLAHGRSDPIECLGQDRLSAPAXLCSSTISGALSRTFEAPLETIYTHXIVGYINVYSIDRVCHWIIQNDR

SEQ ID NO: 324875 - protein, 487 aa, Zea mays
  Clone ID: MRT4577_59356C.1.pep
MAFASSNAKQSLYPDVDQSHPDLNTPFFSAPTTSTCAGAGAATGNSLYPTVDPNELAQNLFPETVEEDAAPPPPTTEETIIAVPGAQLHLIDPDRSVDLGAGTLSIVRLRQGDHSVAVLARLIHEKPHHRRGLFRLFSSGRSDAGAEQEPVQWPLARDVAAVKLDPAHYFFSLHVPHTDHPDDKDDADGAEADAEAALSYGLTVVGKGQEEVLAELDRVLEEYTTFSVKQVETAAKEKSEVMDARAVAEITPEEAVGDKKEVVEEKSAAFWTTIAPNVDDYSSSVARLIARGSGQLVRGIIWCGDITAGGLRRGEEVMKKSVGPSTKPTQVKPSTLRRMKRARRVTKMSNRVANSILSGVLKVTGFVTSPVLNSKPAQKFFKLMPGEVILASLDGFGKIWDAVEVFGKNVMQTSSVVPPSVVTPRYGEQAGEAPPNSLPATGNVFGAAWAVFKIRKAPHPKGNMKKFFVSQAAPPVVKESVARQKKK

SEQ ID NO: 324876 - protein, 475 aa, Zea mays
  Clone ID: MRT4577_59357C.1.pep
HELEVPASPPMNSESCKTPKARSLVKSPSSMMLLSYLNKAPSNQGYSPQKAYGSRPRPRSKSPLPSIAPSEVFREAKSTSKRFASPPPQRRGSEKSIYGKSFARQVSDIGQSPDWCSTPVVSGKHKSQKNSAWSRKSSGGRRISAVNPADDRRAQMVRMNQAVQTTFDWTLDPSKLLVGHRFASGACSRLYKGFYDEKPVAIKFIRQPDDDDNGKMAAMLEKQYNSEINSLSHLYHKNVIKLVAAYKCPPVFYIITEFLPGGSIRSYLNNPENHPIPLERTISIALDVARGLEYIHSQGIVHRDIKPENILFDENLCVKIADFGIACQEALCDVLVEDEGTYRWMAPEMIKQKAYNRKVDVYSFGLLLWEMVSGRIPYENLTPYQVAYAVANRKLTPTISPECPPALRSLIEECCALRPDKRPDFWQIVKVLEQFHSVLLEGGCLDTPKSGPGTCQDPKKRLMRWIQKLKPKHST

SEQ ID NO: 324877 - protein, 117 aa, Zea mays
  Clone ID: MRT4577_59358C.1.pep
MKTWTMAGSTDSLFDDESRKAIMLLKGLKGTRLFIPRIVIRELDSMKQREGLFRRSTKATSILQWIEECMARESWWIHVQSSADMFPVAPTPPATPSAQRIYEEIEISSGSFNPMMA

SEQ ID NO: 324878 - protein, 45 aa, Zea mays
  Clone ID: MRT4577_5935C.1.pep
HAYGEELFKGYATSCVAVRRGILRVVKDRLYIVYEKALVIISSLH

SEQ ID NO: 324879 - protein, 130 aa, Zea mays
  Clone ID: MRT4577_59360C.1.pep
ALLVSRVRSNEKVVVLSNSVTLEIKAMAEGLPCEGAKEFRESLVDPSSRRFMWAASAPRGSAWSCLDASALAENYYNSRHHAMKRRVLVAARPSESEAAKGLKLILRHNSLYAQATDAVNKTPLVSLATV

SEQ ID NO: 324880 - protein, 49 aa, Zea mays
  unsure (1)..(49): unsure at all Xaa locations
  Clone ID: MRT4577_59361C.1.pep
ACGCSELASKQHLXNAILTYIINHLICTCWVPASFHEKFTFLQQSSAFE

SEQ ID NO: 324881 - protein, 285 aa, Zea mays
  Clone ID: MRT4577_59362C.1.pep
MLWRPSPKVLLTEAVHTFLFTVIRELDSMKQREGLFRRSTKATSILQWIEECMARESWWIHVQSSADMFPVAPTPPATPSAQRIDEEIEISSGSFNPMMALFGPRSSAALADMISPRPEDRVLDCALLVSRVRSNEKVVVLSNSVTLKIKAMAEVSTVTTQTQPCLLAVCVRTEPGCVALPAAQGLPCEGAKEFRESLVDPSSRRFMWAASAPRGSAWSCLDASALAENYYNSRHHAMKRRVLVAARPSESEAAKGLKLILRHNSLYAQATDAVNKTPLVSLAAV

SEQ ID NO: 324882 - protein, 83 aa, Zea mays
  Clone ID: MRT4577_59363C.1.pep
CTSTAAAITRAAALANAWLTGTSNQPHFAYINSYQRHHTHTNITHHQSQIDTLTNLHTEYTTATSIPLRQVYLLREPTNTNCT

SEQ ID NO: 324883 - protein, 97 aa, Zea mays
  Clone ID: MRT4577_59364C.1.pep
RYFSDVLLEIKNLTKLVEHKAIESNRTTYGHRMSQPLRVERDRIHEAGFIAKHRTILTQEFAQFRNIGGRLVSSGYVAVCHSIRSQVQTVVNAFPYH

SEQ ID NO: 324884 - protein, 103 aa, Zea mays
  unsure (1)..(103): unsure at all Xaa locations
  Clone ID: MRT4577_59365C.1.pep
HIQGGQDGNQIDANLWEAVCEEHXLDTTCQPTDASDLXLQRVNDYYNEAYCGXRSETSSLQMDLGPETIYSVRTEPYRQIFRTNNSVYRNSRAGNNWDNGHYT

SEQ ID NO: 324885 - protein, 98 aa, Zea mays
  unsure (1)..(98): unsure at all Xaa locations
  Clone ID: MRT4577_59366C.1.pep
HPPTTPTPHQHKPXXNHNVXHTATSQKXFNQTHNQXSVHTKIIQFKNKXSISKSDWPKXIRIPPHEYXSLLKXNQPPPPPKGILXXSQKRIEFXTQXH

SEQ ID NO: 324886 - protein, 82 aa, Zea mays
  Clone ID: MRT4577_59367C.1.pep
MVKYSREPDNPTKSCKARGADLRVHFKITRETAFAIRKLPLVKAKRYLEDVLAHKLAIPFRRFCRGVGRTAQAKNRHSNGQG

SEQ ID NO: 324887 - protein, 59 aa, Zea mays
  Clone ID: MRT4577_59368C.1.pep
KVWVFSRMIDRIGTDFFSCPRVFITQLWAFLLVLGFVVGFCYEKPRNQLSCNMYNIIIH

SEQ ID NO: 324888 - protein, 47 aa, Zea mays
  Clone ID: MRT4577_59369C.1.pep
DTGRRLLSRVGSLHLGGRWNQEPSLPPRRPHSGLARRFPLGPLTPRP

SEQ ID NO: 324889 - protein, 45 aa, Zea mays
  Clone ID: MRT4577_5936C.1.pep
AKNPFKRGAGPSEAGQGLIGTNPIFKSRQKFFRNKLLLNLGEGDL

SEQ ID NO: 324890 - protein, 203 aa, Zea mays
  Clone ID: MRT4577_59370C.1.pep
MPFNTELTRALGIRVPVVQGGMQWVGYAELASAVSNAGGLGILTALTQPTPEDLRKEIRRCRTMTNKPFGVNLTLLPAMVPPDYGAYARVIIEEKVNIVETAGNSPGPVIRQLKAAGTIILHKCTTIRHAQSAVKLGVDFLSIDGFECAGHVGETDITNFILLSRARQSLGVPFIASGGFADGQGLAAALALGACGINMGTRF

SEQ ID NO: 324891 - protein, 40 aa, Zea mays
  unsure (1)..(40): unsure at all Xaa locations
  Clone ID: MRT4577_59371C.1.pep
GNVSARIGWLLLLTSRVSQXXPYLEDALERMKDSLPPKHY

SEQ ID NO: 324892 - protein, 58 aa, Zea mays
  Clone ID: MRT4577_59372C.1.pep
PIVAPRRKYTIRLGDRLVGEFQLMSGPGEESFPFPTDFTNHGTCKGSFFSSLFCSPSI

SEQ ID NO: 324893 - protein, 60 aa, Zea mays
  Clone ID: MRT4577_59373C.1.pep
DTSGFDKINEVALCSGLFSLAASRFPLIQGVFAQSLFFDLNGWGWTLYLINPPPQIKLGL

SEQ ID NO: 324894 - protein, 59 aa, Zea mays
  Clone ID: MRT4577_59374C.1.pep
GPFFFKNVFFISPPPNKKPPHTVLSHFPAGPFFFLPPPLRAEVFYNPRPPLVLFPRPTC

SEQ ID NO: 324895 - protein, 179 aa, Zea mays
  Clone ID: MRT4577_59375C.1.pep
MEGKEEDVRLGANRYSEHQPIGTAAQGGGADEKDYKEPPPAPFFEAGELTSWSFYRAGIAEFLATFLFLYISVLTVMGVVGNPSGSKCGTVGIQGIAWSFGGMIFVLVYCTAGISGGHINPAVTFGLFLARKLSLTRAVFYIVMQCLGAICGAGVVKGFQTTLYQGNGGGANSVAPGYT

SEQ ID NO: 324896 - protein, 78 aa, Zea mays
  Clone ID: MRT4577_59376C.1.pep
SNVMYFYFFIRCIMEHILINSISCPLANLHRKFVDIPIFFLECVVRIIILRRKDLLAYLFAMFFSPNTLVVSASAVLT

SEQ ID NO: 324897 - protein, 49 aa, Zea mays
  Clone ID: MRT4577_59377C.1.pep
YQIIIFLLFFVHIWNNNIHHAVLRKNRRIPNSIASKPPMIKWPLQEEEL

SEQ ID NO: 324898 - protein, 484 aa, Zea mays
  Clone ID: MRT4577_59378C.1.pep
MTRLCPLHLLLIAAAAASASGADEAHVSVAVAEKGLAFAKDVLISEAVRSLTPLLLPGVEKAVRVPFLGGIRVAASNITLFHLDVGDNSTIFPGDSGLLVVASGITANISMHWSYCYDSWLFPIEITDSGTASILVQGMEVGITMVIKNKNGSLALSVSQCGCYVKDLVISLDGGASWFYQGFINAFEDHIKAAVEKAVPENIIEGAWKLDSFLQGLPRTISLDDVAAFNLTFINDPHYGNSSIEFDINGLITSAVAETANLQKHPQLSLACGGASKMLLLSLDEDVFNSALEVHFKAGSMHWVVDKVPDQSLLNTANWKFIIPRLYWNYPNDDILLNISMASSPVIRVTSEKIEATINGDMIIDVVDNKEIVPVACISVIVSASGVVDASGNKVYGRVGLDNFSLALKWSKIGNFHMSLIQGVIRVLLNTVCMPYLNSRLGNGLILPVVHGFTLQDVYVLTSAEQLTLCSDVTFNASSMASLL

SEQ ID NO: 324899 - protein, 70 aa, Zea mays
  Clone ID: MRT4577_59379C.1.pep
MARAYVFLVVLLLAAVIVAPFAGATRVDVVEGRSMASADAPEAAAPSPGPDSASSPDSSSDAPSSSSSSD

SEQ ID NO: 324900 - protein, 69 aa, Zea mays
  unsure (1)..(69): unsure at all Xaa locations
  Clone ID: MRT4577_5937C.1.pep
MANSNLPWRIIKETQPLLSEPAPGISASPSEENMRHLNIMGLGPAQXTYESGALKAEPSLPEEYSMAAP

SEQ ID NO: 324901 - protein, 112 aa, Zea mays
  unsure (1)..(112): unsure at all Xaa locations
  Clone ID: MRT4577_59380C.1.pep
RPAKSSEPPRTAGNAQKSALYPWFPPPALFFFFLFLFFCFPFSXFFFFFFFFFSFFFFYNRVLIWFLGRLKVNVAVQCEYEFHFQLNSLYGPRIRAHYVCRSKGHQIVKLTT

SEQ ID NO: 324902 - protein, 314 aa, Zea mays
  Clone ID: MRT4577_59381C.1.pep
GFQVCHSLGGGTGSGMGTLLISKIREEYPDRMMLTFSVFPSPKVSDTVVEPYNATLSVHQLVENADECMVLDNEALYDICFRTLKLTTPSFGDLNHLISATMSGVTCCLRFPGQLNSDLRKLAVNLIPFPRLHFFMVGFAPLTSRGSQQYRALTVPELTQQMWDAKNMMCAADPRHGRYLTASAMFRGKMSTKEVDEQMINVQNKNSSYFVEWIPNNVKSSVCDIPPRGLSMASTFIGNSTSIQEMFRRVSEQFTAMFRRKAFLHWYTGEGMDEMEFTEAESNMNDLVSEYQQYQDATADEEAEYEDEEAIQDE

SEQ ID NO: 324903 - protein, 58 aa, Zea mays
  Clone ID: MRT4577_59382C.1.pep
RFCELHLIHALTSVPMQEMEFTEAESNMNDLVSEYQQYQDATADEEAEYEDEEAIQDE

SEQ ID NO: 324904 - protein, 229 aa, Zea mays
  unsure (1)..(229): unsure at all Xaa locations
  Clone ID: MRT4577_59383C.1.pep
MREILHIQGGQCGNQIGSKFWEVVCDEHGIDPTGRYVGTSDLQLERVNVYYNEASCGRFVPRAVLMDLEPGTMDSVRTGPYGQIFRPDNFVFGQSGAGNNWAKGHYTEGAELIDSVLDVVRKEAENCDCLQGFQVCHSLGGGTGSGMGTLLISKIREEYPDRMMLTFSVFPSPKVSDTVVEPYNATLSVHQLVENADECMVLDNEALYDICFRTLKLTTXSFGDXNHLI

SEQ ID NO: 324905 - protein, 445 aa, Zea mays
  Clone ID: MRT4577_59384C.1.pep
MREILHIQGGQCGNQIGSKFWEVVCDEHGIDPTGRYVGTSDLQLERVNVYYNEASCGRFVPRAVLMDLEPGTMDSVRTGPYGQIFRPDNFVFGQSGAGNNWAKGHYTEGAELIDSVLDVVRKEAENCDCLQGFQVCHSLGGGTGSGMGTLLISKIREEYPDRMMLTFSVFPSPKVSDTVVEPYNATLSVHQLVENADECMVLDNEALYDICFRTLKLTTPSFGDLNHLISATMSGVTCCLRFPGQLNSDLRKLAVNLIPFPRLHFFMVGFAPLTSRGSQQYRALTVPELTQQMWDAKNMMCAADPRHGRYLTASAMFRGKMSTKEVDEQMINVQNKNSSYFVEWIPNNVKSSVCDIPPRGLSMASTFIGNSTSIQEMFRRVSEQFTAMFRRKAFLHWYTGEGMDEMEFTEAESNMNDLVSEYQQYQDATADEEAEYEDEEAIQDE

SEQ ID NO: 324906 - protein, 165 aa, Zea mays
  unsure (1)..(165): unsure at all Xaa locations
  Clone ID: MRT4577_59385C.1.pep
LESDRGKNHFHQYILDTSVYPREPESMKELREITAKHPWNLMTTSADEGQFLNMLIKLIGAKKTMEIGVYTGYSLLATALALPEDGXDKDDYLNYHERLLKLVKLGGLIGYDNTLWNGSVVLPDDAPMRKYIRFYRDFVLVLNKALAADDRVEICQLPVGDGVTL

SEQ ID NO: 324907 - protein, 38 aa, Zea mays
  Clone ID: MRT4577_59386C.1.pep
TTVKFYSIKYCISPCTWIGWLTRRKRALYGILLLYSPA

SEQ ID NO: 324908 - protein, 445 aa, Zea mays; identical to SEQ ID NO: 324905
  Clone ID: MRT4577_59387C.1.pep

SEQ ID NO: 324909 - protein, 231 aa, Zea mays
  unsure (1)..(231): unsure at all Xaa locations
  Clone ID: MRT4577_59388C.1.pep
YHGRRKWTLCWPSTSSSSPSPTHAAAGAADPALVQAAVAVAVEDLVVVVVKRVGDGSVYPRXPESMKELREITAKHPWNLMTTSADEGQFLNMLIKLIGAKKTMEIGVYTGYSLLATALALPEDGTILAMDINRENYELGLPCINKAGVGHKIDFREGPALPVLDDLVADKEQHGSFDFAFVDADKDNYLSYHERLLKLVRXXRLIGYDNTLWNGSVVLPDDAPMRKYIRF

SEQ ID NO: 324910 - protein, 286 aa, Zea mays
  Clone ID: MRT4577_59389C.1.pep
PDRMMLTFSVFPSPKVSDTVVEPYNATLSVHQLVENADECMVLDNEALYDICFRTLKLTTPSFGDLNHLISATMSGVTCCLRFPGQLNSDLRKLAVNLIPFPRLHFFMVGFAPLTSRGSQQYRALTVPELTQQMWDAKNMMCAADPRHGRYLTASAMFRGKMSTKEVDEQMINVQNKNSSYFVEWIPNNVKSSVCDIPPRGLSMASTFIGNSTSIQEMFRRVSEQFTAMFRRKAFLHWYTGEGMDEMEFTEAESNMNDLVSEYQQYQDATADEEAEYEDEEAIQDE

SEQ ID NO: 324911 - protein, 121 aa, Zea mays
  unsure (1)..(121): unsure at all Xaa locations
  Clone ID: MRT4577_5938C.1.pep
DQSHALHQGHSHEQQHQLQFQGHGKQQLLQQPQQYQQGQXISQQLQCHCQEXQQATRCSYNCYSSSXIYPYCHAFLTDQSSPLAAPFPVAXLIPPSPYQVFLIFGISSSNPLLPSIHATMQ

SEQ ID NO: 324912 - protein, 117 aa, Zea mays
  Clone ID: MRT4577_59390C.1.pep
MEVEAPLEAVQLEAEAFKVDRAEACRHLVSPIVVKLEDKFCDQNARALVAEREDCTLMTEAVVALATDYSKENIPVLHENIQANVDASSLVEVLTQKLSSISLGEDNSNVALRSCSE

SEQ ID NO: 324913 - protein, 445 aa, Zea mays; identical to SEQ ID NO: 324905
  Clone ID: MRT4577_59391C.1.pep

SEQ ID NO: 324914 - protein, 445 aa, Zea mays
  unsure (1)..(445): unsure at all Xaa locations
  Clone ID: MRT4577_59392C.1.pep
MREILHIQGGQCGNQIGSKFWEVVCDEHGIDPTGRYVGTSDLQLERVNVYYNEASCGRFVPRAVLMDLEPGTMDSVRTGPYGQIFRPDNFVFGQSGAGNNWAKGHYTEGAELIDSVLDVVRKEAENCDCLQGFQVCHSLGGGTGSGMGTLLISKIREEYPDRXMMLTFSVFPSPKVSDTVVEPYNATLSVHQLVENADECMVLDNEALYDICFRTLKLTTPSFGDLNHLISATMSGVTCCLRFPGQLNSDLRKLAVNLIPFPRLHFFMVGFAPLTSRGSQQYRALTVPELTQQMWDAKNMMCAADPRHGRYLTASAMFRGKMSTKEVDEQMINVQNKNSSYFVEWIPNNVKSSVCDIPPRGLSMASTFIGNSTSIQEMFRRVSEQFTAMFRRKAFLHWYTGEGMDEMEFTEAESNMNDLVSEYQQYQDATADEEEYEDEEEVHDE

SEQ ID NO: 324915 - protein, 64 aa, Zea mays
  Clone ID: MRT4577_59393C.1.pep
FFFFFKGSRVQHLAPSISMKDAVGMNQHVFTVTIIHASLLSYHYSPPPWIHSMKNLSSILVTVH

SEQ ID NO: 324916 - protein, 98 aa, Zea mays
  Clone ID: MRT4577_59394C.1.pep
QSELQRCDVHHTVVSFRVKSARLMHAVAIITSRTPYQARVLCIHPNQGPAFNTFSNPDTISVRVDLLALTSSRLSSRPRYLFPGSDVQVSCGAQLGES

SEQ ID NO: 324917 - protein, 69 aa, Zea mays
  Clone ID: MRT4577_59395C.1.pep
MADWGPVIVATVLFVVLTPGLLCTLPGRGRVAEFGSMHTSGLAILVHAVLYFALITIFLIAIGIHVYAG

SEQ ID NO: 324918 - protein, 71 aa, Zea mays
  Clone ID: MRT4577_59396C.1.pep
PGGAPGAPGARAQRPPMAPSPIPPPIVFFSSQVNNPVTPPPFSCEASPIFFAWSSLCFGCIYHRARLMLKR

SEQ ID NO: 324919 - protein, 57 aa, Zea mays
  Clone ID: MRT4577_59397C.1.pep
LNSQTMSSLFIKAAILFYYTNLLSKSGPSVYFQTLEPFHVHFNWLFFFASPEIQIGF

SEQ ID NO: 324920 - protein, 131 aa, Zea mays
  Clone ID: MRT4577_59398C.1.pep
LVRVESPPGNSDIFEGGGEVWIDGSGEKKLFLSFGRSKLYKSSVNITNLASLFLKFSGNGMFLLDSNLSGFSPAPLRFVSDLIWRSQRNKWFFFFFFFFFFFFFFFFFFFFFFFNNHRQGSCQKSTGRKYF

SEQ ID NO: 324921 - protein, 51 aa, Zea mays
  Clone ID: MRT4577_59399C.1.pep
SVISHDRGALNTIHKLIHNNNVLWVHPDNALLHLLTITSPFDTYQTPDTVT

SEQ ID NO: 324922 - protein, 42 aa, Zea mays
  Clone ID: MRT4577_5939C.1.pep
VVLTASKPRPCYSPEYLSVNPFKKASISFMRDSAVIIASQPA

SEQ ID NO: 324923 - protein, 165 aa, Zea mays
  Clone ID: MRT4577_593C.1.pep
MGSEKGGAKVIGGGGIFNLFDWKRKSRKKLFSNSPEGSKLVKRSEETLLSGRLHLGDDDEGIGVSSFKGSSDYSCASSVTDEEVREMKAPGVVARLMGLDAMPTSGVPEPYCTPFRDTRLFRDSHSLKRSPEYSMNDQFSHVPRVDGYIRKPLDLRAPKMPSSPD

SEQ ID NO: 324924 - protein, 196 aa, Zea mays
  Clone ID: MRT4577_59400C.1.pep
LVGYNTDYVGAISAIEDGIKASESEPTDPDKSPLAGRLFVVIGAGGAGKALAYGAKEKGARVVIANRTFARAQELANLIGGPALTLADLENYHPEEGMILANTTAIGMHPNVNETPLSKQALRSYAVVFDAVYTPKETRLLREAAECGATVVSGLEMFIRQAMGQFEHFTGMPVDDYKFRAIASSLDNPNTMKPRL

SEQ ID NO: 324925 - protein, 74 aa, Zea mays
  Clone ID: MRT4577_59401C.1.pep
LTRWWAKQGLPISGSQHTAPTVRGFKQYGVLELKDRTPQRRILQALESALPSSMIQVRRYELTRGNGHTSSTTI

SEQ ID NO: 324926 - protein, 576 aa, Zea mays
  unsure (1)..(576): unsure at all Xaa locations
  Clone ID: MRT4577_59402C.1.pep
SMVCVPATARAPREMAAELAAAAALGADVAELRLDCLAGFAPRRDLPVILAKPRPLPALVTYRPKWEGGEYEGDDESRFEALLLAMELGAEYVDVELKVADKFMKLISGRKPDNCKLIVSSHNYETTPSSEELANLVAQIQATGADIVKIATTATEIVDVAKMFQILVHCQRAVTAHSATIQPEGGAQDVTRERAAYNEGIFLTKPEICPRLGSNLGPESXSEALTIMLEVLSQEKQVPIIGLVMNDRGFISRVLCPKYGGFLTFGSLKKGKESAPAQPTAADLINLYNIRQIGPDTKVFGIIGKPVGHSKSPILHNEAFRSVGFNAVYVPFLVDDLAKFLDTYSSPDFAGFSCTIPHKEAAVRCCDEVDPIARDIGAVNTIVRRPDGKLVGYNTDYVGAISAIEDGIKASESEPTDPDKSPLAGRLFVVIGAGGAGKALAYGAKEKGARVVIANRTFARAQELANLIGGPALTLADLENYHPEEGMILANTTAIGMHPNVNETPLSKQALRSYAVVFDAVYTPKETRLLREAAECGATVVSGLEMFIRQAMGQFEHFTGMPAPDSLMRDIVLTKT

SEQ ID NO: 324927 - protein, 96 aa, Zea mays
  unsure (1)..(96): unsure at all Xaa locations
  Clone ID: MRT4577_59403C.1.pep
DDEKGLPIRKINSQASTQILMISKVKDGLTGLAKAEXEVDIXIFRYLLYVDKVGANDEGLEDAYSAHIKDEPSAWQSADHIDVDLLGGRQMNWPPG

SEQ ID NO: 324928 - protein, 65 aa, Zea mays
  Clone ID: MRT4577_59404C.1.pep
CFCVCYQGESGKIGLITGVLLIMKGEGCFVKVVLVIIKVPLWFIMCLWVPLVRYIVTGPCRLSGV

SEQ ID NO: 324929 - protein, 107 aa, Zea mays
  Clone ID: MRT4577_59405C.1.pep
PCCFVPRTWGGSLPGASPVTLAGFTAKLSRFPHKAVCPSSWPGAHPRAIAGSAVDPRWPCPPHPYPPGTCALHRATTTETSTHTAALDRVLTLAGGAHVTHCDVGLL

SEQ ID NO: 324930 - protein, 72 aa, Zea mays
  unsure (1)..(72): unsure at all Xaa locations
  Clone ID: MRT4577_59406C.1.pep
MRQTPVRMNAVGYALSPFQQTVLPGVWKXITAKIHHTVTENWICSTLLLIRVFCTYQDAMWYKEQEKLSYRY

SEQ ID NO: 324931 - protein, 54 aa, Zea mays
  Clone ID: MRT4577_59407C.1.pep
PPDLVSPPRPSSAFPPGVVLSVPSSGRTDAGGWMSLRSELRVCLVPRPRPGGSP

SEQ ID NO: 324932 - protein, 47 aa, Zea mays
  Clone ID: MRT4577_59408C.1.pep
ISHDASTSVIIFIRNSGLWLILQVLRRGGLLLTAYCDRRRLPYMYWP

SEQ ID NO: 324933 - protein, 153 aa, Zea mays
  unsure (1)..(153): unsure at all Xaa locations
  Clone ID: MRT4577_59409C.1.pep
AASPRSSXAXRXRARGXRAGXRWXGXPXASRXXPXPSCXGPPSRSXXXRXGRRSPSXVFXRXXGWPAAXPPCXAXPXPXSSXXCAAVSSVRAPRRXVRPAXAAXAXXXGCGVGXWGPVRXCPVAGFGVCXXPGRXWVXCXAAVXLXPPPPVCA

SEQ ID NO: 324934 - protein, 50 aa, Zea mays
  unsure (1)..(50): unsure at all Xaa locations
  Clone ID: MRT4577_5940C.1.pep
LKXQPTXPPNXTXITLSQITNHYSPPLLXXPLKHXXNLSXSLKINSXLXY

SEQ ID NO: 324935 - protein, 87 aa, Zea mays
  Clone ID: MRT4577_59410C.1.pep
GATYTLITWHTPFNRKLVDTGENIFFVLGSFRATYYALGGFLYATYTHITRKGKQKMKPKLGGGANGPIQSSRTMHACMGCIGPDRP

SEQ ID NO: 324936 - protein, 40 aa, Zea mays
  unsure (1)..(40): unsure at all Xaa locations
  Clone ID: MRT4577_59411C.1.pep
CHRGFGADVIMTPGSXKNGSEHXCDVLKKLDKHXDIVVNI

SEQ ID NO: 324937 - protein, 90 aa, Zea mays
  Clone ID: MRT4577_59412C.1.pep
ALLSPSLVRRWRPPPLLLITCASFKRKANLPTTSSSTPIYNNHCSSGDLAISFQCGVLWWNISNNGACISDRRTARGDNHHHPTTCLSQV

SEQ ID NO: 324938 - protein, 92 aa, Zea mays
  Clone ID: MRT4577_59413C.1.pep
HHCCCFSFFTWRRAHLTGLRTPCWVPMAMWLLLVEPDPLTKKLHLLLWRPNELGNTVLQILPLACPLAPRSRICLTKAKEFHPGHRFGLCTT

SEQ ID NO: 324939 - protein, 68 aa, Zea mays
  Clone ID: MRT4577_59414C.1.pep
FKKKKKKKKKKKKKKKKKKKKKKKKKKKKKKKKVRKYLKKQRVASFLGVPFFVPLFCHLFVFFWGPFF

SEQ ID NO: 324940 - protein, 69 aa, Zea mays
  unsure (1)..(69): unsure at all Xaa locations
  Clone ID: MRT4577_59415C.1.pep
MKGDIDLVVCLALSAASASAMQMPCPCALLQGXYGAGAGLTTMMGAGGLHPYAEYLRQPXCSPLAATPY

SEQ ID NO: 324941 - protein, 329 aa, Zea mays
  Clone ID: MRT4577_59416C.1.pep
MLRLPTLTALKPSTPALSLNRVGCSHGRRRRKLIFVSSAPPPSSSSSRPPKPTSNPEPPKPTHEARNRNPDGSTEAGFPTTKPRKPRRGRRSESAAVEDFVRNRLEQVFASIQERNPDVLEGKGDILKPKADVERLPDDEGEGEGEGGEQKPVVEEEDPSWPLDADVGWGIRASEYFDKHSIRNVTVDGVEIDWEGDVDEGWVKEINCLEWESFAFHPSPLVVLVFERYNRAADNWKFLQELEKAAKVYWNAKDRLPPRTVKVDINIERDLAYALQVRECPQLLFLRGNKILYREKEIRTADELVQMIAHFYYNAKRPSCVNPEAVASF

SEQ ID NO: 324942 - protein, 236 aa, Zea mays
  Clone ID: MRT4577_59417C.1.pep
MAGGGDDELKLLGAWASPFVLRVKLALSFKGLSYEDVEEDLSGGKSELLLESNPVHKKVPVLLHNGKPVCESQIIVQYIDEAFAGTGPSLLPADPHQRAVARFWGAYIDDKLLAFWLQSARAKTQEEKAEALKQALAAAENLEAAFTEISEGKPFFGGDSVGYLDVTLGALVAWVHAAEKLYGMRLFDATRTPRLSAFVERFGALGAAKAVLPDVDGLVEYAKQRQADAAAAASDS

SEQ ID NO: 324943 - protein, 143 aa, Zea mays
  unsure (1)..(143): unsure at all Xaa locations
  Clone ID: MRT4577_59418C.1.pep
AQTRHAFAPKRGGAGGDDXGNDXPEGGHDARGARAPXRENRKDNPQPDSPTEHPXTNXEDKQRARGGQSPQGXAPRSPRPAEAEEXGSNPGNSDDDNEQPXADASPREDSRAXKAERDXPRXDASXTGRPQPDTQRRQRXXAR

SEQ ID NO: 324944 - protein, 85 aa, Zea mays
  Clone ID: MRT4577_59419C.1.pep
HCCVSLAFHADPHGGCTRVTYLLALFHDPVYSCFGRGFGDSHGSILMPLLVEPVKASSTQRTHVAAVSWHGRRHDAPLQGHKEFA

SEQ ID NO: 324945 - protein, 90 aa, Zea mays
  Clone ID: MRT4577_5941C.1.pep
HGPTQASRGHLSIASDDHSNSVRLQSCSSSSTACVNLLAKAKKKKKKKKKKKKKKKKKKKKKKKKKKKKKKKKKKKKKKKKGGAPQKVQT

SEQ ID NO: 324946 - protein, 61 aa, Zea mays
  unsure (1)..(61): unsure at all Xaa locations
  Clone ID: MRT4577_59420C.1.pep
RLLSSASSYRTPARAQALMPCVPTELPRDGVLCIPLHAAWSPXNCMSLXTCEDRLAIAYDN

SEQ ID NO: 324947 - protein, 176 aa, Zea mays
  Clone ID: MRT4577_59421C.1.pep
SYGEIEEGPLGLDKQTGKFRGFALFVYKTPEGAQASLVDTVKVIDGHQLVCKLALDGKKEKQGQSQQPGPGNHHQQQILPGGPQDIQGGLGLGSQMGAQYGVPGTGMPSFGFGGVGGGFGGPNPYGNMPSSMGGGGAGGLGSMGSQVPSGLASAGAGAFGPGGLGGGSYGVSSQFG

SEQ ID NO: 324948 - protein, 182 aa, Zea mays
  unsure (1)..(182): unsure at all Xaa locations
  Clone ID: MRT4577_59422C.1.pep
AISIIYHRKCERRANWTRAVYSDSCHVSTARTPSRCSPSSSFPRRTPRSRSRIPPARXVLHPERRPPXARRRAPASSPVPRRXADHAPXWRGCCPAARRTSPPARRRPRCRSPSRRRRIRATTAAPPPAAQRAGPRRRRRRPAWPSCSLALHPSRPGYFAWRVDVSERDERNDVPGRPRGSQ

SEQ ID NO: 324949 - protein, 135 aa, Zea mays
  unsure (1)..(135): unsure at all Xaa locations
  Clone ID: MRT4577_59423C.1.pep
NQIIXXNLSPHSQQQQFLPFNQLSTLNPPXYFHQQLLPFNQLTTXYSQQQQLLPFNQXXXLNPXXYFXQQILLPFNXLTXTNXXSFXTQQQXLPFYQQFXXNPXTLLQLQQFFPFXQLXXTPPPPSPTKKKKNPF

SEQ ID NO: 324950 - protein, 351 aa, Zea mays
  Clone ID: MRT4577_59424C.1.pep
FYVALLGNKTAVTGGSRKVINSKADDHIFIYYSDHGGPGVLGMPNLPYLYAGDFMKVLREKHASNSYAKMVIYIEACESGSIFEGLMPEDLNIYVTTASNAEESSWGTYCPGMEPPPPSEYITCLGDLYSVSWMEDSETNNLKEETIKEQYEVVKKRTSDFNSYGAGSHVMEYGDKTFKGEKLYLYQGFDPANANVTNKLLWSGQEAVVNQRDADILFLWKRYELLHEKSEEKQEVLREITGTVRHRKHLDNSINFIGKLLFGAEKGPSTLEAVRPPGQPLVDDWDCLKQMVRIFESHCGSLTQYGMRHMRAFANICNSGTPGASMKRASMGACGGYNSARWSPLAQGYSA

SEQ ID NO: 324951 - protein, 341 aa, Zea mays
  Clone ID: MRT4577_59425C.1.pep
MEDSETNNLKEETIKEQYEVVKKRTSDPGVLGMPNLVMQYGDNTLKVLREKHASNSYAKMVIYIEACESGSIFEGLMPEDLNIYVTTASNAEESSWGTYCPGMEPPPPSEYITCLGDLYSVSWMEDSETNNLKEETVKEQYEVVKKRTSDFNSYGAGSHVMEYGDKTFKEEKLYLYQGFDPANANVTNKLLWSGQEAVVNQRDADILFLWKRYELLHEKSEEKQEVLREITGTVRHRKHLDNSINFIGKLLFGAEKGPSTLEAVRPPGQPLVDDWDCLKQMVRIFESHCGSLTQYGMRHMRAFANICNSGTPGASMKRASMGACGGYNSARWSPLAQGYSA

SEQ ID NO: 324952 - protein, 55 aa, Zea mays
  Clone ID: MRT4577_59426C.1.pep
LGRLWSSLVVDAPLCRLFIVKEYSMFVVQYLTPRRRRIVVMCSAATVASPTPRLR

SEQ ID NO: 324953 - protein, 100 aa, Zea mays
  Clone ID: MRT4577_59427C.1.pep
MERHAEKPLLVLPSCLLFLVLLLAPLVSAVPTPRSLRLGSHQQQQPPALKLSSSQDTTAIAAAMMKNTGRPTARVDVEVNDYQPSGPNNRHDPPKGPGRP

SEQ ID NO: 324954 - protein, 87 aa, Zea mays
  unsure (1)..(87): unsure at all Xaa locations
  Clone ID: MRT4577_59428C.1.pep
KIASKLPADDKTKIADAMGADISCLDTNQLAEADEFEDKMNELESLXNHIIAKMYQGAGEDMGDSGSMDEDAHVGSDHPGPKIEEVD

SEQ ID NO: 324955 - protein, 72 aa, Zea mays
  Clone ID: MRT4577_59429C.1.pep
FCLCDRRKPAPGEPQQQHPPALKLSSSQETTAIAAAMMNTGRPTARMDVEVNDYQPSGPNNRHDPPKGPGRT

SEQ ID NO: 324956 - protein, 89 aa, Zea mays
  Clone ID: MRT4577_5942C.1.pep
EDLAARELLYQHQHNKRMSCPAMAQLLSNTLDYKRFFPYYAFNVLGGLDSEGKGCVSSYGGMGPWHRACYRTHDIASRPFVNAGAVHAY

SEQ ID NO: 324957 - protein, 108 aa, Zea mays
  unsure (1)..(108): unsure at all Xaa locations
  Clone ID: MRT4577_59430C.1.pep
SPTRPHPGVADAAVVGRPNEYWCEMPCSFVTLTEGADGXACAPXEVVAFCHARLPWYMTPRTVVVXVDELPNTATGKVQMFALRDHANAMGSISSSEHHDGARTRSKL

SEQ ID NO: 324958 - protein, 71 aa, Zea mays
  Clone ID: MRT4577_59431C.1.pep
EESLGLILRGDVLVWVERDELFGFYSVIDSHVVNGGLILRGDVLVWVERDELFGFYSVIDSHVVNGALRLL

SEQ ID NO: 324959 - protein, 83 aa, Zea mays
  Clone ID: MRT4577_59432C.1.pep
YSRGALSNQMLKWTFPQSSMKSYFPSPPHNSFLISHSYNDSDTNILFLLPTHIAWNTLWCGVLSAAGDNFSPLYICFIHALLI

SEQ ID NO: 324960 - protein, 82 aa, Zea mays
  unsure (1)..(82): unsure at all Xaa locations
  Clone ID: MRT4577_59433C.1.pep
GDPGVRLYINASLQHLFFFNQLTISNGAAYLQQRQXLLNPLSVANPFAAAFLQQQQLLPYNQFSLINPFLSRHQPTFGGPIF

SEQ ID NO: 324961 - protein, 78 aa, Zea mays
  unsure (1)..(78): unsure at all Xaa locations
  Clone ID: MRT4577_59434C.1.pep
AGNYPAYFQQPLMMPVSQLAGVSPPPFVARPQLYRSSSTSAPSXGTVQQVQHLLPFIHLALANPAVFYQHPIXGGALF

SEQ ID NO: 324962 - protein, 64 aa, Zea mays
  Clone ID: MRT4577_59435C.1.pep
HQQFSMVQIISYASPWGSLGRLRITKKANYSLTTQINRQEKPCQKANYSFTTQNSPREEALVSG

SEQ ID NO: 324963 - protein, 80 aa, Zea mays
  unsure (1)..(80): unsure at all Xaa locations
  Clone ID: MRT4577_59436C.1.pep
MKLVLVVIAFTGLVIRGSWTQTGGCSCGQQQSLVQXHYSQQHYSQKQQHYSPPQHYLXEEHQQQHVYMLPQKHLYQQEVH

SEQ ID NO: 324964 - protein, 75 aa, Zea mays
  unsure (1)..(75): unsure at all Xaa locations
  Clone ID: MRT4577_59437C.1.pep
TSSLIITSFELLPSXPKTHKIYQQFIHIIFHXPNHQNYFPHYTHINXNFFQNLFIIFSILYQTYXNNFFKLNXIX

SEQ ID NO: 324965 - protein, 56 aa, Zea mays
  Clone ID: MRT4577_59438C.1.pep
GFFQYYLGMSTTCNDVSGLQQMDYLFHECSNTKIHFKILQSRFSTTYMSLLVDKGS

SEQ ID NO: 324966 - protein, 97 aa, Zea mays
  Clone ID: MRT4577_59439C.1.pep
ATCYEEDISVIYTGEHLPSNHFWGGGGKTENEIRLLLGDTHHHFIEPIHQITGWGFPLAAVYAGGEKKRGGHVTALLGWAEGHKPSKMKNCGGKPFF

SEQ ID NO: 324967 - protein, 141 aa, Zea mays
  Clone ID: MRT4577_5943C.1.pep
DVPWERAKGKGICVRHDYAETTCNARPPWCIRPRSDGGQRCISMPAKKQAMCYGGLHIRASGYVSLQEAAAGVSMTNNLPTVRSHPTMLLCIGSHRMTGPLQIAINSKESQTLADLYANERGTGNHRPTIDSGGVNVPGLG

SEQ ID NO: 324968 - protein, 90 aa, Zea mays
  Clone ID: MRT4577_59440C.1.pep
ELDSDPVRKSPASASITSSPLCPVVSPLTKCTHRRQRRGPAKARSTPVGRTPVKLERRIARGEGESSQEYDRSSCASRIADLNGVSRDRP

SEQ ID NO: 324969 - protein, 102 aa, Zea mays
  Clone ID: MRT4577_59441C.1.pep
GGIQIYVMLKGYIHKIKGPAQIIKHCLEQKEKHAQTHNNTSNSHYCISNQRASKHRTLFRGGHVQWRYMQEGGRPRCQGFTSNGRTWPSGGLAQVLQRHMQK

SEQ ID NO: 324970 - protein, 61 aa, Zea mays
  Clone ID: MRT4577_59442C.1.pep
KKKKKKKKKKKKKKKKKKKKKKKKKKKKKKKKKKKKKNPFFSLSHSPRGGFLPLWGGKQGP

SEQ ID NO: 324971 - protein, 94 aa, Zea mays
  Clone ID: MRT4577_59443C.1.pep
ERKEEREERKKARGPKKERRVKKVCVRTPPCRCCPASPMFFRPTATGSTHGISSPRPMVPAGSKHCIWFPITRSVSPYSSRDCARGGFCLALYI

SEQ ID NO: 324972 - protein, 141 aa, Zea mays
  Clone ID: MRT4577_59444C.1.pep
GRGMPAQLAWQVATLALPVGVSLTPYPAAERRLQLSPSLHVRLSLSSEVAVAALSLALISGPLSTSLVQGAGSQQSSTSKARSPGASGKAVKQPAQGASSKHITAGLHEDCFPVLLLSWTHGKKLCLVCYLALMFSITCYM

SEQ ID NO: 324973 - protein, 122 aa, Zea mays
  unsure (1)..(122): unsure at all Xaa locations
  Clone ID: MRT4577_59445C.1.pep
AREQIYKKAQATTVLLVSLRRDEYNKVSGLDNAKQIWDTVKISHEGNNATMITKMELVEGXLGRFAMIKGEEPTQTYNRLKTLVNKIXSYGITTWTDHDVVPLMLRLFTAIDPYFVNLIFEN

SEQ ID NO: 324974 - protein, 72 aa, Zea mays
  unsure (1)..(72): unsure at all Xaa locations
  Clone ID: MRT4577_59446C.1.pep
YELSGGLGKXLVTLWHMASPCLTLHVLMCLNLGDWKGPDSPCLPLPPYELVSTGKFQSFTTILERKSTKPMS

SEQ ID NO: 324975 - protein, 68 aa, Zea mays
  Clone ID: MRT4577_59447C.1.pep
ELQCQKEFNFASALGHSRGSSHDAQPKLAGMRYPIVLKDTICEPRAGNRQLPRCGGLAGTAHSILPSV

SEQ ID NO: 324976 - protein, 78 aa, Zea mays
  Clone ID: MRT4577_59448C.1.pep
PPPPQSQRSVVTSRQMPPLTVSLILTPATERSPTDIPADTPYETATSYPESGASSGTMSRNSSSLSATSHSSTMSTTT

SEQ ID NO: 324977 - protein, 62 aa, Zea mays
  unsure (1)..(62): unsure at all Xaa locations
  Clone ID: MRT4577_59449C.1.pep
MAGVNSIVVGLKPVAAVPQADAASSPAKRVQLAAPEGRRAVLLDLADVFAVTVTTXSAKATI

SEQ ID NO: 324978 - protein, 55 aa, Zea mays
  Clone ID: MRT4577_5944C.1.pep
DVFSGLHYSNSLIFLICPKVHMLKSTTLRLILYQLSLIHKHRKVVPRRSYSCTVV

SEQ ID NO: 324979 - protein, 74 aa, Zea mays
  Clone ID: MRT4577_59450C.1.pep
NWHHSTMCSQLRLLLIASAVHRNHCHGANRIDYCLIIHLKSSKAAAYQILRACSLSSTHLPAMSKLGNLLVTGS

SEQ ID NO: 324980 - protein, 54 aa, Zea mays
  Clone ID: MRT4577_59451C.1.pep
VSGVREGTVDDERFVLALCRVSMMGLVPPHDVLVIGSGCVRCRIVLSMSMVLRT

SEQ ID NO: 324981 - protein, 137 aa, Zea mays
  unsure (1)..(137): unsure at all Xaa locations
  Clone ID: MRT4577_59452C.1.pep
AEGRPKRQPTRPRTRGRPRGGCQRFIRDVRSTKVDSAVRDARIHEDDPLRGIVXLPLERVFHKRSQINQMFPLAGSVRYGRIRISMVFRSVHVQLPRDMLGWDYGTVDIKPSVKAIDVPEDLKPLRLKVRTPLERAK

SEQ ID NO: 324982 - protein, 55 aa, Zea mays
  Clone ID: MRT4577_59453C.1.pep
WMTLRIPMVSCASASGYALGFCTISIAGEGSVGNCWPLKIASKVGGGSPGRVPNP

SEQ ID NO: 324983 - protein, 111 aa, Zea mays
  Clone ID: MRT4577_59454C.1.pep
TAPSLAPKTQSVLRVFLFPVLLFFCQSFSPPVPVFPHCCGSNTSRALFFFFPFFSAVLVFLFVGDLGPGLFSFAHPVACSGIGFGRPFFPPPFAACVPKCSGSLANLFPVF

SEQ ID NO: 324984 - protein, 457 aa, Zea mays
  Clone ID: MRT4577_59455C.1.pep
MKNLPSPEMEGVDTLLMYLYRALHLVDDMEKLASSQNSCIVDELESLLDDSGHLRTLAFLYGSKGMCSKALSIWRVLARNYSAGLWKDLSENDSCGTLVTKRSGEEIAAVEAAKILKALSDEDLVLEHLGWVADIDQDLAIAVLTSETRENQLSPEKVVASVDTEKVVIHQRYLQWLIEGQGCDDPHYHTSYALSLAKSAIEAVDMESKYRGKDDSEIDSDAQFVYSVRESLQLFLQASDLYDPEDVLDVIAESELWLEKAILYRKMGQENIVLQILALKLEDSEAAEQYCAEIGRDDAYIQLLGLYLDPQNGKEPMFTAAVRLLHNHGESLDPIQVLEKLSPDMPLQLASDTILRTLRARVHHHRQGQIVHNLSRATNLDVRLTRLEERSRHVQLTDESICDSCRARLGTKLFAMYPNDSVVCYRCYRSQQGEFSSGHGRSMRKYVIFKQSWLVSK

SEQ ID NO: 324985 - protein, 152 aa, Zea mays
  Clone ID: MRT4577_59456C.1.pep
MAQLVDKAKGFVADKLANIQKPEAELADVTVGHVGRDGATLAGRVDVRNPYSHAIPVCEVTYTLRSAGRTVASGTVPDPGSLAGDGATTRLDVPVKVPYDFLVSLAKDAGRDWDIDYEMRVGLTVDLPVVGKLTLPLTKSGELKLPTLSSIF

SEQ ID NO: 324986 - protein, 88 aa, Zea mays
  Clone ID: MRT4577_59457C.1.pep
IVHNLSRATNLDVRLTRLEERSRHVQLTDESICDSCRARLGTKLFAMYPNDSVVCYRCYRSQQGESSSGHGRSMRKDVIFKQSWLVSR

SEQ ID NO: 324987 - protein, 143 aa, Zea mays
  Clone ID: MRT4577_59458C.1.pep
RYLNLQLINSANIILIPKKEGAEVAGDFRPISLIHSFIKIITKTLALRLAPRMNELVSPCQSAFIQKRSIHENFLAVRSAVRRFQRINSPTLFLKLDIEKAFDSVRWDYLIALLRNLGFPVRWTDWIASILSTSTSRVLVNGG

SEQ ID NO: 324988 - protein, 54 aa, Zea mays
  Clone ID: MRT4577_59459C.1.pep
SHRSTWGLANRSCSDHMNCGAMIAYPHYCDPSNFPSCEAKRVLNRLGYKRKRER

SEQ ID NO: 324989 - protein, 219 aa, Zea mays
  Clone ID: MRT4577_5945C.1.pep
LFPQAWYSIWIDGKMELIVDPLLILERYLWRGKYAFAVAVHKHHRSIYEEGDAIKRRKRYARPLVDLQMKMYYYEGMEPWSPKKKMPSGRRRPPRCSRPRSPPHRCTHAPGCSSSRGSRRSSHPRRRMSASLRRHHQLRRGHRTGGGGVQRLLHRRQAAAVADVRGPEPGGGDDLGTAEESLDRTRLYRARHGAAGRHAAVLALLGVLLAALACPSTAD

SEQ ID NO: 324990 - protein, 77 aa, Zea mays
  Clone ID: MRT4577_59460C.1.pep
QSAPHWLQDVTLFLGANLGVHKMVPTVWLGHLKKSRRSNVNSEMSILYPFQCGGLYKFLFASFNVVCAFAPYALLKK

SEQ ID NO: 324991 - protein, 107 aa, Zea mays
  Clone ID: MRT4577_59461C.1.pep
SYSFFLLFFFFIFLYRPLIERRGTKRPKKHQGGGHKQIMNISGVFAGGQKHAELSLKSGGRNQRGDGALKHALMFERGAPLYTKGSRLGSPPNHSPNSMVREVVMGS

SEQ ID NO: 324992 - protein, 61 aa, Zea mays
  unsure (1)..(61): unsure at all Xaa locations
  Clone ID: MRT4577_59462C.1.pep
VDXHISLHQFKFNYTCALKLLKKKKKKKKTKKKKKKWTARTDRTSAPPFWVLALIRGNTCS

SEQ ID NO: 324993 - protein, 43 aa, Zea mays
  Clone ID: MRT4577_59463C.1.pep
NFWVLFPGKGFFRLNTCRKHQVGLQARLSTIVFYQYFKNLHAL

SEQ ID NO: 324994 - protein, 59 aa, Zea mays
  Clone ID: MRT4577_59464C.1.pep
EGVMLTVSVAVKEVFVVQVPSFTWKECVFYEKQFISRHKKKASGTVLSFKVVVLSQGHV

SEQ ID NO: 324995 - protein, 89 aa, Zea mays
  Clone ID: MRT4577_59465C.1.pep
KRGLALAYLNVLLIAAVATVVVVNTGNYSRVDKRVEFRDSWDLSCTVGEVSAAIKVIVCPSASRTLLGLTFAFAPMDGPILTAFVITNE

SEQ ID NO: 324996 - protein, 85 aa, Zea mays
  Clone ID: MRT4577_59466C.1.pep
LLSVCKGIQGDSISFNSNRGVLIHFKTFQFLPIQAVPLNAILDDRACGSPGIVVPGIVLTERVNKAKKTNKYEQGKHTSETIQKE

SEQ ID NO: 324997 - protein, 221 aa, Zea mays
  unsure (1)..(221): unsure at all Xaa locations
  Clone ID: MRT4577_59467C.1.pep
MCDAMEXLQSGVQKLKTDVYDNKPALFNPFTAVQVPEYMVLDCSDSRLCPSQDLDLPPXRSSSMRNIAVMVPAYYKTTYTGIXSAIXEYDACALNEYVLAVIGHLCCGVIRALLSLHXSAPHYFHFXRTDTRSASLPRSXVKKEXALVLFYDQCSLLXNEAENASLQNLETYXPFIXERLDKATLNLISAHYDFWSVNFLVWLTYATLRSAHGFVTTSISS

SEQ ID NO: 324998 - protein, 93 aa, Zea mays
  Clone ID: MRT4577_59468C.1.pep
PLAASAEDADPPEPRVRRRRLHHLRCFLLLGLLHVMFCCVHLPLALPVCVHLLCSSNGGMHRAQHSRTERDPTTASQALLHSVCTTTSRLYIH

SEQ ID NO: 324999 - protein, 47 aa, Zea mays
  unsure (1)..(47): unsure at all Xaa locations
  Clone ID: MRT4577_59469C.1.pep
FDXXXGYVPSTKHDAXXFSIILVFFFGLTCXLYMKTRYVYQAGCHFR

SEQ ID NO: 325000 - protein, 119 aa, Zea mays
  unsure (1)..(119): unsure at all Xaa locations
  Clone ID: MRT4577_5946C.1.pep
IIDALGPEISNVSXFWVAASFMSLRXASPSSLNVSLCSVXKGXTLPLGECLRRXFXVVCRVLRGSFRRYSSVGFWAVLLVFGFLPLWVPPLLVPVPVVAFCLSFLWFVVPSWVCSGLAC

SEQ ID NO: 325001 - protein, 129 aa, Zea mays
  Clone ID: MRT4577_59470C.1.pep
MAKYNVVQKNKRQCNQDRKRAAHGEPGTGKLKQRTAPVSMSGKRKKKLERRLNRKQKEAAMIKALENNMGDVDMVSVEESSEAAKGKSQVKFSVKKNSRIQIKRLKGKGTTVLKLIVIHQLKHHFPSWK

SEQ ID NO: 325002 - protein, 88 aa, Zea mays
  unsure (1)..(88): unsure at all Xaa locations
  Clone ID: MRT4577_59471C.1.pep
XAHVXAPIXGSIVXAAVLXLKXGGYGXIXLXXILXPLTKXIAYXFLVLXLXGIIITSSICXRRTXLKSLIGXXSISXIALVXXAILXQ

SEQ ID NO: 325003 - protein, 129 aa, Zea mays
  Clone ID: MRT4577_59472C.1.pep
MAKYNVVQKNKRQCNQDRKRAAHGEPGTGKLKQRTAPVSMSGKRKKKLERRLNRKQKEAAMIKALENNMGDVDMVSVEESSEAAKGKSQVKFSVKKNSRIQIKRLKGKGRKKAKNAKPPAKEKVDAMVA

SEQ ID NO: 325004 - protein, 35 aa, Zea mays
  Clone ID: MRT4577_59473C.1.pep
LLVLLYMHRCTWLEIQFIFWMHTDGYRCNDLDNFA

SEQ ID NO: 325005 - protein, 129 aa, Zea mays
  Clone ID: MRT4577_59474C.1.pep
MAKYNVVQKNKRQCNQDRKRAAHGEPGTGKLKQRTAPVSMSGKRKKKLERRLNRKQKEAAMIKALENNMGDVDMISVEGSSEAAKGKSQVKFSVKKNSRIQIKRLKGKGRKKAKNAKPPAKERVDAMVE

SEQ ID NO: 325006 - protein, 128 aa, Zea mays
  Clone ID: MRT4577_59475C.1.pep
EKQFFSFHPLGSLNFAFFLQQQQIPFSQVPFASPPQFFSFSPLAALDFPGFFQQQQFFPFSQVGGVGPAPFFSQPQLFPFFQPVGPNGGPLFQLPQLLPFHPLGFSNPPGFFPKPLFGGPPLLIFFGV

SEQ ID NO: 325007 - protein, 34 aa, Zea mays
  Clone ID: MRT4577_59476C.1.pep
STSVINSIAESIRTVCILRHRRRRVCPCVGSGVP

SEQ ID NO: 325008 - protein, 57 aa, Zea mays
  Clone ID: MRT4577_59477C.1.pep
IVILDLAFVVPSTPHWFKTTKSALIINSLYRLTWSSDPIRARRQSIQYCSGKKKKKH

SEQ ID NO: 325009 - protein, 112 aa, Zea mays
  unsure (1)..(112): unsure at all Xaa locations
  Clone ID: MRT4577_59478C.1.pep
QRRNRKNPGGTQLNRLKEQPPYTSGRKKKKARTKHPSQQKRNLKGKRDPPRSGAXNPEGEGDTPKKTATLAKAQKPAPMEXFPSYIDKDASLPQKAQKGGPPKRAQKNPNKT

SEQ ID NO: 325010 - protein, 65 aa, Zea mays
  Clone ID: MRT4577_59479C.1.pep
NPNPKGPCRKQKPPKTESRNRPRDFIIKYKCARKNNTPDRTPRKNTQGARALGQRAPPPAGKKPP

SEQ ID NO: 325011 - protein, 152 aa, Zea mays
  unsure (1)..(152): unsure at all Xaa locations
  Clone ID: MRT4577_5947C.1.pep
VRRIEEEYFSLSESRAXXDXGRGFVFGLGGGQDXDRGPRGRGRRGGRASEETKWVPVTKLGRLVADNKITKLEQIYLHSLPVKEYQIIDHLVGPTLKDEVIKIMLVQKQTRAGQRTRFKAFVVVGDGNGHVGLGVKLSKEVATAIRGAIIFA

SEQ ID NO: 325012 - protein, 50 aa, Zea mays
  Clone ID: MRT4577_59480C.1.pep
DKRTITQAQVQRLKLATVTSKGLHKTRHTTITAGMNAEIKPPTLHETKVP

SEQ ID NO: 325013 - protein, 81 aa, Zea mays
  Clone ID: MRT4577_59481C.1.pep
CIQLSKSNKSWYYAYCIIMVVLFFSLLIFHWHKLFLLCFHIHYVTHVLLFVENYNLCSSQCCSSQNKRHIRVCPIFCIRAS

SEQ ID NO: 325014 - protein, 55 aa, Zea mays
  Clone ID: MRT4577_59482C.1.pep
LTSRRPPFFLFYTTVRLFELSAICCAFLSTIHGEGSYCGTRYQLSRLTGNHIGCG

SEQ ID NO: 325015 - protein, 108 aa, Zea mays
  Clone ID: MRT4577_59483C.1.pep
MARPTRALLLPLLLLLVLARASGDVPAAASLGWDLRVVGAGEDEEFGFPGGDSVACRVLQGGGYLSYGALRRDNVPCSVRGASYYNCRPGGQANPYSRGCSAITRCRG

SEQ ID NO: 325016 - protein, 142 aa, Zea mays
  Clone ID: MRT4577_59484C.1.pep
ERLLPRRTATKTTTERMTVISTSSHSWLGLSITMHNNLRPRPKDTKNTITTNNSRRHKTNSRRIMITKSPTTSLPPRTTISLSLRSRMTHLTILTRHINRMKHRKSTKTKRRKQPRIRITITLMRKHKHINKHINQPKGSKP

SEQ ID NO: 325017 - protein, 41 aa, Zea mays
  Clone ID: MRT4577_59485C.1.pep
FFSCFQFSSNQNSYIILAGNFTLKPGNPNNELTHKIALHLL

SEQ ID NO: 325018 - protein, 45 aa, Zea mays
  Clone ID: MRT4577_59486C.1.pep
SVQQCKHIDVRSVRTVKAHCLCQKKPLLSTDGGGRIGRYSGSSFP

SEQ ID NO: 325019 - protein, 62 aa, Zea mays
  Clone ID: MRT4577_59487C.1.pep
MQPDQPVISLRPGGGGGPRAGRLFSPAFATSVSGDFLRPHGGGASGISKVRKARSGWMTCYP

SEQ ID NO: 325020 - protein, 54 aa, Zea mays
  Clone ID: MRT4577_59488C.1.pep
KQGYFCSHRTRTSLPRLGAACICTVIQAMSIQHPNPSYNFRYGLPGGFKSMRAP

SEQ ID NO: 325021 - protein, 376 aa, Zea mays
  Clone ID: MRT4577_5948C.1.pep
MASKEVLAIVFLSILLHGAVTTKVVDGANVIDRCWRGQPNWAANRQRLAACSVGFAGKMRQNRGPGVIPYTVTDPGDDPVRPRPGTLRYGATVLGGKVWITFQRDMHIRLAQPLFVKSFTAIDGRGADVHIAGGAGIVLHRVSSVIIHGLHIHGCRSQPEGLAVRPGGAVQPAGGMDGDAIRLVSSAKVWIDHNSLSRCASGLLDVTVGSTDVTISNNWFFNHDKVMLLGHDDGHAEDRRMRVTVAFNRFGPSVNQRMPRIRHGYAHVVNNVYLGWKDYAIGGSMGPSVKSQGNLFVASAAADNKKVTRRMPVAGREWDWASIGDSFLNGAVFKQTGSRVRPNYNKHQAFAAASSNQVKSLTKDAGVLRCSVGSAC

SEQ ID NO: 325022 - protein, 346 aa, Zea mays
  Clone ID: MRT4577_59490C.1.pep
MNLASAVRVFLSYYLLVQRWMGSEQGGGVFDQGGHSVSLTRLDEARAPPRCAVRSSPSSAASLPPKPLLVAAPRETGEYPVILFLHGYLAVNSFYSQLFEHVASHGFIVVGPQLYTISGADTTEEINSAAAVIDWLATGLPSTLPLGVRANLTKVSISGHSRGGKVAFALALGHAKAKLAVPLAAVVAVDPVDGMGVGKQTPPPILTGRHGSLHVGAPAMVIGTGLGELPRGSLLPPCAPRGVSHAAFYDELHGAAPACHLVVRDYGHTDMMDDDTPGARGMLTRTICRSGGARAPMRRFVAGATVAFLKKWVAGDAAAMDSITARPDQAPVALSVVEFGDEKAIA

SEQ ID NO: 325023 - protein, 56 aa, Zea mays
  Clone ID: MRT4577_59491C.1.pep
ACAMERREMRSLFVIESSLRISEPSCRVGGRLPHGRVLGVPLFLSAPPCVRPLHLS

SEQ ID NO: 325024 - protein, 52 aa, Zea mays
  Clone ID: MRT4577_59493C.1.pep
WSKNNHIIMGGMNNYICLGIIKVWVLWKKDVEKKKKKLWKKKKKLIDKKIIK

SEQ ID NO: 325025 - protein, 236 aa, Zea mays
  Clone ID: MRT4577_59494C.1.pep
MEASGRRIVAVLNRPRMKLENPAGSQLPPVALQRIHEEYAADSQRSSVRHGKKKDGSQSGPTCKRHKRKRKGKSVEWAGAGEKEPHSHDTPLYLLNLFCHGIQSAINEGRLKFQEMQVDTEPFSMNMIDFEGKRVLIRPSTADEGKNKEIIINAREANENHNISYRKVVAEKTPDGGETLKVTITTFSTGGQAHTKEQEPVLRILDGPTHRCKRSRTTPDGPENSSGWSGYTQDPQ

SEQ ID NO: 325026 - protein, 63 aa, Zea mays
  Clone ID: MRT4577_59495C.1.pep
ILVVSQFWFMRANHVVLSFYSFKNEGTILFFGIFVLNWLPYLEKHNKLVILQKNIMSSPVLTV

SEQ ID NO: 325027 - protein, 108 aa, Zea mays
  Clone ID: MRT4577_59496C.1.pep
MEASGRRIVAVLNRPRMKPENTAGSQLPPVALQRIHEEYGADIQRTSVRHGKKKDGSQSGPTCKRHKRKRKGKSVEWAGAGEKITQQLIPLNQRSKLDKYHKNKHSSI

SEQ ID NO: 325028 - protein, 135 aa, Zea mays
  Clone ID: MRT4577_59497C.1.pep
LSLYRAKVEQVRQHRAQLKREISDSVAEVAAICATIGEPPSTVHTACSSLQGTGSLKEELGLIAPELAEMRRRRDERRREFADVTQRVARIQEELNLQLGGGQGQSEAHAAAVIVDVDGSDLTTTKLDELRAYLQ

SEQ ID NO: 325029 - protein, 69 aa, Zea mays
  unsure (1)..(69): unsure at all Xaa locations
  Clone ID: MRT4577_59498C.1.pep
GGGGHFALYLDADPLIGSSFNSKTFNNGGLLHFSNFSMKKVXLWGFVYPSQNQEKLTLFRTXKPGICRW

SEQ ID NO: 325030 - protein, 132 aa, Zea mays
  Clone ID: MRT4577_59499C.1.pep
MAFPTGLKDLMYADSHEWGKVGGDSATGGITDYAQYQLGELVVVDLPKVGIRVSQGKTFGSVESVNGASDIYSPVSGEVVEVNEKLSDLPGGVNTSPYEKGWIMKVKLSNSGELNSLMDDDKYSKYCEEGNH

SEQ ID NO: 325031 - protein, 92 aa, Zea mays
  Clone ID: MRT4577_5949C.1.pep
TIKLWNTLGDCKFTITEKGHTEWVSCVRFSPNPQNPVIVSAGWDKLVKVWELASCRLQTDHIGHTGYINTVTISPDGSLCASGGKDGTTMLW

SEQ ID NO: 325032 - protein, 98 aa, Zea mays
  Clone ID: MRT4577_594C.1.pep
LHKVCLGQGRTSACSRNRNLSGRSLTSFSSAASTALYVYLYSIYYYHVKTKMSGFFQTSFYFGYTLMFCLGLGILCGAIGYLGSTLFVRRIYRNIKCD

SEQ ID NO: 325033 - protein, 160 aa, Zea mays
  unsure (1)..(160): unsure at all Xaa locations
  Clone ID: MRT4577_59500C.1.pep
MAMAAASSRLLWASRAAAYLRISTFPRAFSTVLKDLKYADTHEWVKVEGDSATVGITDHAQDHLGDVVFXVELPEVGISVSQGKNFGAVESVKATSDINSPVSGEVVEVNEKLSEEPGLVNASPYEKGWIIKVKLSNSGDLNSLMDDDKYSKFCEEEDNH

SEQ ID NO: 325034 - protein, 94 aa, Zea mays
  Clone ID: MRT4577_59501C.1.pep
WVGEAFSPQLSVDVIPTSGYMGFFYGFPPLIFFGRHASIQGLLKVYTRLKFYQQKFVALYMEPWVVRSFLKYGPVLYFCFMNQFERFGLGWGAF

SEQ ID NO: 325035 - protein, 194 aa, Zea mays
  unsure (1)..(194): unsure at all Xaa locations
  Clone ID: MRT4577_59502C.1.pep
MQISWCFCEWLRFFSKKKKKKKKKKRGHQLTAERKRRRATNPSPRPPPSPRTMSMAASSRLLWASRAAAYLKISTFPRAFSTVLKDLKYADTHEWVKVEGDSATVGITDHAQDHLGDVVFVELPEVGISVSQGKNFGAVESVKATSDINSPVSGEVVEVNEKLSEEPGMGNASPYEXGWDIKGKLNNLGTLNRL

SEQ ID NO: 325036 - protein, 112 aa, Zea mays
  unsure (1)..(112): unsure at all Xaa locations
  Clone ID: MRT4577_59503C.1.pep
MCPWAFHGGNDGAQIALSGCYAGPLFNXVIGLGVPLVISSLAEYPGVYIIPSDNSLLEPLGFLMVGLLWALVIMPKKKMRLDKLVGGGLLAIYLCFLSLRLARVFGVLDTDR

SEQ ID NO: 325037 - protein, 51 aa, Zea mays
  Clone ID: MRT4577_59504C.1.pep
KTGVAKVFLIYHTTWFPQNLQACKISPLLPTAHKQTGWEENLMWTLPHQRS

SEQ ID NO: 325038 - protein, 78 aa, Zea mays
  unsure (1)..(78): unsure at all Xaa locations
  Clone ID: MRT4577_59505C.1.pep
SGNRFSRNFLPLHPPPRRQQYSVAEYKAKPYSLXLRTRAKSSGSRHLSQGRRSGGWRSKRRPPSFSVPNSXAVQKRSY

SEQ ID NO: 325039 - protein, 44 aa, Zea mays
  Clone ID: MRT4577_59506C.1.pep
ARWAGGLSQWHRPFGREQPNLGGCRPTSKASVSRLDSYLQAFTS

SEQ ID NO: 325040 - protein, 93 aa, Zea mays
  unsure (1)..(93): unsure at all Xaa locations
  Clone ID: MRT4577_59507C.1.pep
LGDLRPQPLDRRLTYQQLRAHLALPHPPRSSPAPPPPRTXLSLFXSPXXXXPPPPPQKKPRPPPASGLPLRMLRRSHLNSTKGASAMLRTRMS

SEQ ID NO: 325041 - protein, 59 aa, Zea mays
  unsure (1)..(59): unsure at all Xaa locations
  Clone ID: MRT4577_59508C.1.pep
KKKEEIKKGKISPRPDPPPPSCSDFFSGLIFYARAQPSSSSRRTDKLFSISXRALVXCG

SEQ ID NO: 325042 - protein, 88 aa, Zea mays
  unsure (1)..(88): unsure at all Xaa locations
  Clone ID: MRT4577_59509C.1.pep
VPDTSRXEXAXDLRPCPLLVSLLPXPYRGQEACRALVPQGPLIGQPAPXXRACPTWRCRWLWGPARPPWPEGRGXGRATTSDXFLGPG

SEQ ID NO: 325043 - protein, 48 aa, Zea mays
  unsure (1)..(48): unsure at all Xaa locations
  Clone ID: MRT4577_5950C.1.pep
VWVFLXSQTGLWHRFVLGXQPASFPPVKMRAARLFYVFSALCVFFESF

SEQ ID NO: 325044 - protein, 105 aa, Zea mays
  Clone ID: MRT4577_59510C.1.pep
GFLGIIGLILGNVSNIGALKAPGPLKGMAPQKRLGGLGMEKGKGMGSPFLYFGESRGRVLLCLFVPVNSWGGGEKRIASCGGWAFEKDLFSLFFLVSWAGFQGPC

SEQ ID NO: 325045 - protein, 76 aa, Zea mays
  unsure (1)..(76): unsure at all Xaa locations
  Clone ID: MRT4577_59511C.1.pep
RTRADSLYXALHSLLDGLGRATDAMIAVKVACFXRYRDVFQGRALSFTEGGAHVISIDTDSFCSLLALTEAVDVCP

SEQ ID NO: 325046 - protein, 55 aa, Zea mays
  Clone ID: MRT4577_59512C.1.pep
PESRRGIARGFFNQARNSSPRGIEPGTWVLLGSIDHYARGLNHYLLIMIVYVFKL

SEQ ID NO: 325047 - protein, 240 aa, Zea mays
  Clone ID: MRT4577_59513C.1.pep
MVTLGNIGFLCDAESEEFVVADLMILPKHDDASHHDDTPVVAGLCIFRSCSPGEDWKASKPRICHKEGQGGELIWWHTDVVVPHGVSLCYIDYFRGILFLDILSKCPRLLYVRLPLMNPVGDPYDSETGRGCPSAFRSVCVTNGGTMKFVEVVTRTVFLSGSQSAAASSFAIKVWRLREHGMTWEKESTIQDTELWSLQGYGDLLRVPPTFPVVSMRNPDVIFCVLSNGCFGDANVTWIA

SEQ ID NO: 325048 - protein, 76 aa, Zea mays
  Clone ID: MRT4577_59514C.1.pep
AKYNSSVLALFVSVQLKSLLDQNSEGPSKSKTESRESLTNTGFHSTWPPHIWYGLFLVPKTPGLHTSIYSCWYHKL

SEQ ID NO: 325049 - protein, 272 aa, Zea mays
  Clone ID: MRT4577_59515C.1.pep
PAGPGSDIYRCDELVYWPEKVFQSLVSLRRLWIGNCKNLIGYAAANVPDQATSGRSELLPHLEYLEIWGCQNLVELFNSSPALKRMEVRECCKLESLYGNQLLDEAASSTDDVTASAHVEEKLSPSSLESLTILDCDRLTEVVNLPSSLRVIDIQGCFKLRFMSGQLDALNTLAITNCPELRSLETCIVDLTSLEILALCGCKSLSSLPSARAGGRQEYSSLRQLTITVAGRQCPGIKSLPSTLQQRLDNGLLDFTNLDSRRREDRPPRRLL

SEQ ID NO: 325050 - protein, 142 aa, Zea mays
  Clone ID: MRT4577_59516C.1.pep
PTRPYQSGSFRTIASAFFNPHRHATSTRWPTMMLPLLPVVLWSSVLLLSLLKNAARLPAKKLRAWRLRASRPSAVTLRAWSRSDAMLTPMPWSPPAKLLRLLLLFMLKQRRSSTSSLSFPSSSTSRRRTSTDGVASSSTLSS

SEQ ID NO: 325051 - protein, 56 aa, Zea mays
  Clone ID: MRT4577_59517C.1.pep
EWNLKRLLEMVKGVFSANLNELHFCLEITRNTDFGIKKYVPIASLFGYLNILILYF

SEQ ID NO: 325052 - protein, 49 aa, Zea mays
  Clone ID: MRT4577_59518C.1.pep
SRVQRMYSHTLIINKHQHHHGLLNYEELTLTIDAQHHIFLLTVKSDYCF

SEQ ID NO: 325053 - protein, 52 aa, Zea mays
  Clone ID: MRT4577_59519C.1.pep
TQEFTFVAHNAIPFVLSRLPPKLNLEPYLEWYQRLILKLRKLQSQNVLLLPT

SEQ ID NO: 325054 - protein, 110 aa, Zea mays
  Clone ID: MRT4577_5951C.1.pep
MQAAAAAANGAGDVQKPPPPQFAPTHFVPFHAVAPPRAAAVALGSPAPHQPGQEENKSVWVGDLHYWMDENYLHSCFGYTGEVVAIKVIRNKQTGQSEGYGFVEFYSHAG

SEQ ID NO: 325055 - protein, 51 aa, Zea mays
  Clone ID: MRT4577_59520C.1.pep
HSSLLPGFIQVLSMSRLGAPGAVLPLLAESQTEVPNLLISFNFQESLQKYC

SEQ ID NO: 325056 - protein, 66 aa, Zea mays
  Clone ID: MRT4577_59521C.1.pep
RWSTKTPLIVFWKWVVSYSPKAGRLVFKKNGWSPILDTVPGKKKTVCPQKKKKKKKKKKKKKKTHN

SEQ ID NO: 325057 - protein, 90 aa, Zea mays
  Clone ID: MRT4577_59522C.1.pep
RLELSTYKIAEQDFTYFYPDDPPTFIFSPANRRRGRPHKRIHISQEDNVANKQTLASYRSKATKESDKLMNQAEMKSLAFAKAKLKRENA

SEQ ID NO: 325058 - protein, 360 aa, Zea mays
  unsure (1)..(360): unsure at all Xaa locations
  Clone ID: MRT4577_59523C.1.pep
EPSDGEAAKVFLCNNATCGHFYHPKCVAQQLHPIDIDEASELEKKITEGFSFTCPIHWCFHCKGLEDRTQEPLQFAVCRRCPKSYHRKCLPSEISFDENEEDDIIIRAWELSKRILIYCLDHEIDSELETPVRDHIKFPKIEKPLQFVKKGASLLPKKRKRTYSESVREQPPRDTVKRKSXVRMQESEQNKQDTREVSVKSFTQNVVDTPVKKKGKLKEXQLPYVAKDHFVSSPKSVKEQEQELVPLPLSGIRKSSFPKVDSEIEKRVISILGNEISSLTIKDVTRNCSLPSTHVYSGRPTDKMPLGKIERSVQAVEAALKKLKNGGSVNDAKAVCEPDVLRQLARWHSKQICNRCGSDF

SEQ ID NO: 325059 - protein, 60 aa, Zea mays
  unsure (1)..(60): unsure at all Xaa locations
  Clone ID: MRT4577_59524C.1.pep
HYFDFKPXFTLRHVSTYSVRDLDLRKPTPSKNPPRRQFKTTTADVLNNTYFNNVIFLYNF

SEQ ID NO: 325060 - protein, 120 aa, Zea mays
  unsure (1)..(120): unsure at all Xaa locations
  Clone ID: MRT4577_59525C.1.pep
PRVHPTSSHSYARSGTRIHAKSLFDKPHELALLVLMDVAYSHSCINTVDGLNGIDGTNTHYCHRGAPAHHSMXDSRLFTYGIWLVSRFHLSNATWXLADYKSDGCAYSAVTDMILPHEGL

SEQ ID NO: 325061 - protein, 192 aa, Zea mays
  Clone ID: MRT4577_59526C.1.pep
MDVDPAADQRRKNKGGLESELERHYDDLQREMMLMAADRPHKQLQQHRRHGHRPDLLQNCDLPPPAKLFGPVPTLQRLETAAAKDHKADDGLLRALRLSQSRAREAEDKLAAAGATNVDLAALLVRDSVALSAHRRWVMMLEAENSLLRGPRRDADGPEPDHGAGGVAAWWVALAVCVGVAGVGLALGRFLC

SEQ ID NO: 325062 - protein, 77 aa, Zea mays
  Clone ID: MRT4577_59527C.1.pep
HLKIGRVVQQDGLGLPAPRLPNILIILGGRVGLIIILGGGGGLLPIDTLLVELFPLLKLLHHLIHRFWQRLFEHGKI

SEQ ID NO: 325063 - protein, 78 aa, Zea mays
  Clone ID: MRT4577_59528C.1.pep
PPPPRIAVGISCLMWRYLFSFLTRWVATSLSYTTVDSTWMYTDVSALRLQDSILLREAGHRLWHQEPRGDRYGVPGGD

SEQ ID NO: 325064 - protein, 63 aa, Zea mays
  Clone ID: MRT4577_59529C.1.pep
AYPRRRSTRVSATTHASGARRSSVSSSAGIRNPRTPSFTIKRKKKVMPSLFKLIKQRKDERAS

SEQ ID NO: 325065 - protein, 75 aa, Zea mays
  Clone ID: MRT4577_5952C.1.pep
NNILVLILYTIVNYSSSYFKTKTIVFYNCITKQTIKCNGTVSRFFLGRVHFCLSLSAQLWPSYGLNPCGRGRLLR

SEQ ID NO: 325066 - protein, 211 aa, Zea mays
  Clone ID: MRT4577_59530C.1.pep
NANAEIAATLALMQQSVKEGEGANTAEAAAMKKLKAAVEGTMQARASRRSGTITISRFEYEYLSGRAALVRVVADKKVSAAQAWVQALKAGEKELAARAEATERVTAELRAREAEAAAEAESAAGEQKALEQELYDLNAVAERDGLLCAYPRRRSTRVSATMRRTRARRSSVSSSAGIRNPRTPSFTIKRKKKVMPSLFKLIKQRKDERAS

SEQ ID NO: 325067 - protein, 528 aa, Zea mays
  Clone ID: MRT4577_59531C.1.pep
WKTRSAASDPGDDENSIAMEFLASLDGEENDFFKDRRAKKLEKNKICEVADATSKTSSQGSSKNPVVPNHKEEAELLATEELEEFDDQENKSSMMLQEETDESCNSQLSGIGNKSSTGGWFVSEGEAVLLAHGDGTCSYYDIANHEFKSEYKPPSLVSNNMWGDCWLIRAPGVDGCSGRFVVAASAGNALEPGFCSWDYYTREVKSFHVEEEASQTFAPTSRAILGALSNVGSSRSSSALSNTERQQWWYKPCGPLLLSTASKQKMVTAYDIRDGDVVMKWEVSNLVMGMEYSSPLQWRSRGKVVIAGSESIGLWDVNSLNPQPLLSVASGKKVYCLHVNNTDAEVGGGVRQRVSSSEVEGNDGVFSTQESVNVFDFRVPAGIGLKIARHGGTANSIFSRGDSVFIGSTEGRLQIKGGSRSRVQQYSLRKGKLVATYELPEFNAHIHHSAITQVWGDSNLVLAACGMGLFAFDTFKEDTQPTYSFDRGNTIAAREAIGPDDLYCPTFDYSSSRVLLVSRDRPAHWRYL

SEQ ID NO: 325068 - protein, 82 aa, Zea mays
  Clone ID: MRT4577_59532C.1.pep
SRFGRTRPVSWRRHTFVRKTITLTRALPCGVVLREGTTHITGPLVCLVTTTHYITYHPSSVLYKAAICCSNISSGTYYDCMP

SEQ ID NO: 325069 - protein, 63 aa, Zea mays
  Clone ID: MRT4577_59533C.1.pep
ILTRPRGKNLFLFKGKGSIISPAAVRALDRLNRYLGQSKTVGNKPDRGYFTLEFTWSHWHFVA

SEQ ID NO: 325070 - protein, 47 aa, Zea mays
  Clone ID: MRT4577_59535C.1.pep
RKLLFYLLLSTFTISLLKPYSVSWALLSLSTTFPYIHHTVHFENYTT

SEQ ID NO: 325071 - protein, 92 aa, Zea mays
  unsure (1)..(92): unsure at all Xaa locations
  Clone ID: MRT4577_59536C.1.pep
RPYAPENRXIKILTGHQHNFEKNLLKCSWSPDNRKVTAGSADRMVYIWDTTSRRILYKLPGHNGSVNETAFHPTEPIIGSCGSDKQIFLGEL

SEQ ID NO: 325072 - protein, 92 aa, Zea mays
  Clone ID: MRT4577_59537C.1.pep
HMGKFSTAVNLWAVIWTTFASVIFFFPTSRPVTGETMNYAIVFMAFIMLCAMVYWYVRGKKFYAGPLKETTIQGENTGGIWESVPVETEKTN

SEQ ID NO: 325073 - protein, 75 aa, Zea mays
  Clone ID: MRT4577_59538C.1.pep
DAWVASESATINNAYPAGVRDTRGWVRQYRERRQSMISMHQDLSSKLFGSTLKPCISGRGNEITGFNDLFHFKAH

SEQ ID NO: 325074 - protein, 75 aa, Zea mays
  Clone ID: MRT4577_59539C.1.pep
CYIVSSYDSTAGIHLSEVDKQTGESLLCCYIVSSYDSLASVFFLLHEDHCNSFMVDCYMPKCVFQVQNNVLLCCY

SEQ ID NO: 325075 - protein, 44 aa, Zea mays
  Clone ID: MRT4577_5953C.1.pep
MYYAAPPFYNGYGYPAAAPFPDPGMYAAPAFGAYPFYGNQQQVS

SEQ ID NO: 325076 - protein, 37 aa, Zea mays
  Clone ID: MRT4577_59540C.1.pep
QILVANRVVSSMFNTVWGGKIAILRFALKKDTRDTRE

SEQ ID NO: 325077 - protein, 95 aa, Zea mays
  Clone ID: MRT4577_59541C.1.pep
FDVVQASAGIGKQLVKSTQAGRICPRYFRVNLSLFFFSKFACMVWFDVGITYGRITIGNGNLVLPINCYCKPLTKVKYRSCTRRVNKNTSLPFII

SEQ ID NO: 325078 - protein, 45 aa, Zea mays
  Clone ID: MRT4577_59542C.1.pep
MVGVVRGFEKKKKKKKKKKKKKPKKKTKKKKKKKKKKKKKKKKTR

SEQ ID NO: 325079 - protein, 54 aa, Zea mays
  Clone ID: MRT4577_59543C.1.pep
MLHSAIQHLQRLKELHAKEPSSEGKMLRLSVEAGGCSGFQYSFALDDKKNSDDR

SEQ ID NO: 325080 - protein, 123 aa, Zea mays
  Clone ID: MRT4577_59544C.1.pep
MGLSVGKEMGGDGGVGIGLEGASVTKLERASARTSLFMGDEDERQGGEGEGSYQRRSRGKVQRVAAEEDNPGDTADSQGPTPGQARQREGLGGLLQTQVRRAGGERPWRERQQGVGRAPWQKR

SEQ ID NO: 325081 - protein, 101 aa, Zea mays
  Clone ID: MRT4577_59545C.1.pep
HIALLAGLHSPLAPGHGARPSSTSQALSLTAALSSTCSSPPSPPLPMVAPPGSLPARAPCSPWLSASPTSSSSREHGLPPLMRSGAELLLQHRPRCLPCTN

SEQ ID NO: 325082 - protein, 258 aa, Zea mays
  Clone ID: MRT4577_59546C.1.pep
MLVYVALSYSTLGRAPSGSSEVRRWDPIVAKPRPCSAPTANPSRAQGHHSPDTEAVAKQTSKSRQVWNGPTDPTRSNRIALVVVCHRATDYPAAAASAAAMASSLSRALLRRVAELARGRLRANHRMLSSASSTAAIERASQLPAEAQAVRMTEGCVRRLKELHAKKPSAEGKMLRLSVEAGGCSGFQYSFALDDKKNADDRFFETDGVRLVVDDISYNFVKGATVDYEEELIRSTFVVSTNPSAVGGCSCKSSFMVK

SEQ ID NO: 325083 - protein, 55 aa, Zea mays
  Clone ID: MRT4577_59547C.1.pep
TGVSPICYQEKPNQYEEKLHVTRTNSRGVTQNHKPRHDEDFRGKVTKQTLCSEKE

SEQ ID NO: 325084 - protein, 59 aa, Zea mays
  Clone ID: MRT4577_59548C.1.pep
CTDKRWGTIYRLTTLTLMGRQPNSGAGPRTQSNRDDHVTENRDMIIASHIIPKPNTTLV

SEQ ID NO: 325085 - protein, 104 aa, Zea mays
  unsure (1)..(104): unsure at all Xaa locations
  Clone ID: MRT4577_59549C.1.pep
GPCFGSIRWSAPDIAVPEGGASGRAARGSRSIRFFRRVVVDGREIMPAEVPQALAAPISCVRKAFNFDLGSFTLSTLDPSDIPFIYLSRSIDSQVTMLCCTXRP

SEQ ID NO: 325086 - protein, 410 aa, Zea mays
  unsure (1)..(410): unsure at all Xaa locations
  Clone ID: MRT4577_5954C.1.pep
MQAAAAANGAGDVQKPQQQPLVAGAPPPPPAAAVVPPHWVAMPFAPPPGATAMVMQPHHMAPPPPQFAPTHFVPFHAVAPPRAQSVPAAVALGSPAPHQPGQEENKSVWVGDLHYWMDENYLHSCFGYTGEVVAIKVIRNKQTGQSEGYGFVAFYSHAAAEKVLEGFSGHIMPNTDQPFSLNWAVIGVRLLGSYSASDHSIYVGDLASDANDATLLEAFSSRYCSVKGAKVVIDDNNGGSKGYGFVRFGAESEKTQAMTEMNSVYCSSWPMRIGTATTMKSSGTSGSNGSAAXGKEDXSGEISFVRILNRKQCEEDLRQTFSQYGEISSVKIPIRKQXGYVRLSQGRNAENEQLRGDDGNQWNNGGMYYAAPPFYNGYGYPAAAPFPDPGMYAAPAYGAYPFYGNQQQVS

SEQ ID NO: 325087 - protein, 46 aa, Zea mays
  Clone ID: MRT4577_59550C.1.pep
HAYDHSYDHASKVLNQTGRVFSFLMLIHYNLEIDPELVQSFEHVTT

SEQ ID NO: 325088 - protein, 106 aa, Zea mays
  Clone ID: MRT4577_59551C.1.pep
GTQLSGGQKQRVAIARAILKDPKILLLDEATSALDAEGEHIVQDALDQVMVSRTTIVVAHRLSTIKGADMIVVMKDGEVAEKGKHEYLVGKGGVYASLVELHSKSA

SEQ ID NO: 325089 - protein, 67 aa, Zea mays
  Clone ID: MRT4577_59552C.1.pep
MGLEDVRRMLTGSGDPKEEEEEELVDPLTTVREHCEQLEKCVAARERLESCDRRVSSRSQTEEDCTE

SEQ ID NO: 325090 - protein, 516 aa, Zea mays
  Clone ID: MRT4577_59553C.1.pep
MELNSDTLLFLTTIISAAILVVCSLSRRKPSPGPKKKRPPGPWRLPLIGNLLHLATSQPHVALRDLARKHGPVMYLRLGQIDAVVISSPAAAQEVLRDKDVAFASRPNLLVADIILYGSMDMSFAPYGAYWRMLRKLCMSELLSTHKVRQLLAVRDSETISLVRKVRAAGGQSGEPVNLGRLVLSCSMAITGRATFGQLCGDELMSVVDVAVLYGGGFCAGDLFPSLSFVDVVTGLTRRLWRARRHLDGIFDKIIAECEARQRQAKTTTGTTNGDGDGLLSVLLRIRDEGETGISMTSIKAILFDMLAGGTETTSSAAEWIMSELMRNPEAMAKAQAEVRRVLDGKSPQDHEGQMDKLSYTRMVVKEGLRLHPVFPLLLPRLCRETCDVGGFEVAQGTKVIVNAWALARSPEHWKHPEEFWPERFADDTSVAAAADYVGSQFEYIPFGSGRRMCPGNTFGLAALELMVARLLYYFDWSLPDGMRPDELDMDTVVGSTMRRRNHLHLVASPCKEIES

SEQ ID NO: 325091 - protein, 65 aa, Zea mays
  Clone ID: MRT4577_59554C.1.pep
ETWLTEHCPPLWDITERCLMGNISNTSCFWVPFGFFFFTLDLMGQAMTEDHFLPPPPFFFFVSPF

SEQ ID NO: 325092 - protein, 80 aa, Zea mays
  Clone ID: MRT4577_59555C.1.pep
TAVCWYASSVTGCPRTRSGTHSGSGPCRRRRRRRRFLPPALAANCSLASVCLGAVACGDETKDSGAGDGELKQKSQRPRC

SEQ ID NO: 325093 - protein, 167 aa, Zea mays
  Clone ID: MRT4577_59556C.1.pep
MHSFGHRANAVATFAVTILAAMCFAASFSDNFNTLTPTASVKILNINWFQKEANGNDEVSMTLNISADLSSLFTWNTKQVFVFVAAEYETRQNALNQVSLWDGIIPAKEHAKFLIHTTNKYRFIDQGSNLKGKEFNLTMHWHIMPKTGKMFADKIVMTGYQLPEQYR

SEQ ID NO: 325094 - protein, 88 aa, Zea mays
  Clone ID: MRT4577_59557C.1.pep
KVPPARVHVPPWVTVKVGVPCYQRLINVAAMELLAPRLGRFVKLLLNLRQGPVLIFPPELFGNVGLSPGVGLPGKKKVGGSFAGENPA

SEQ ID NO: 325095 - protein, 42 aa, Zea mays
  Clone ID: MRT4577_59558C.1.pep
WNLRKVWCLLRLSACPATGCLSIAPAILNDPSSIQMLLADVL

SEQ ID NO: 325096 - protein, 95 aa, Zea mays
  Clone ID: MRT4577_59559C.1.pep
SSNVPSSSQNITLALDHELQHLSLESKLKNSKTNVKKTASVSHYKPEPWMLQSENQEIRNQLSLAIVGHVDSGKSTLCGRLRHALGLISKKQMHK

SEQ ID NO: 325097 - protein, 85 aa, Zea mays
  unsure (1)..(85): unsure at all Xaa locations
  Clone ID: MRT4577_5955C.1.pep
RRVVHGFTFATSRSFFLGYLAHRPMGNGLSPCLCPRAERGETARLVFWGGSARMADERLSITAXDVTAHSPTSTSSAARTPSSSA

SEQ ID NO: 325098 - protein, 79 aa, Zea mays
  Clone ID: MRT4577_59560C.1.pep
EGSQSTSSETAKNRVKIKVPYCYTYMSYLRTTQVISVDQQLRTTSDAAMPAPVKKSHPECRQQPLGLTSFASPRMSSNL

SEQ ID NO: 325099 - protein, 197 aa, Zea mays
  Clone ID: MRT4577_59561C.1.pep
MSFLTKLLRPFSTMSNAPAQPMTVPSGAHTATLAAGCFWGVEHMYRKEYKDKGLYDARVGYIGGDTENPGYRAVCSGRTGHAEALQVVYDPTKVTYRSLLEFFYKMHDPTTPNRQGPDVGTQYRSAIFYHDAEQEKIAREVTDKVNKQWWKGAVATEILPAGKWWDAEEYHQLYLDHNPGGYECPSHFLRKFPPLED

SEQ ID NO: 325100 - protein, 54 aa, Zea mays
  Clone ID: MRT4577_59562C.1.pep
RTLVAGNVLIIYHLTTGNSRLNLHIINLTRHATYVYLKIMYATKKSSPTIHRPN

SEQ ID NO: 325101 - protein, 98 aa, Zea mays
  Clone ID: MRT4577_59563C.1.pep
FLICFVCSFYFFSFGLIQTCPSRRRNKLSGCITLSRLRNNKEAWNMACIKALYLSKNSSTKIRLKQRPIPLHPCERGLANQRELTPALGITPLHDLLN

SEQ ID NO: 325102 - protein, 105 aa, Zea mays
  Clone ID: MRT4577_59564C.1.pep
EGVHKVHGRETPHLSFSDLYPTHGERFINYSAPNPEKIYLNQRGLQRQQSSIQVKVDKTSFQTNPGRTISSKPTKPRFILQQETSGSIIACKIPALLFELLCLRW

SEQ ID NO: 325103 - protein, 73 aa, Zea mays
  Clone ID: MRT4577_59565C.1.pep
PVWIRVIPSSECWCISPDSQREAADYHAQEAPAVGEDGSSEPRTLVCTNSVSVIATVEWRSWTMYDVCPRVVE

SEQ ID NO: 325104 - protein, 134 aa, Zea mays
  unsure (1)..(134): unsure at all Xaa locations
  Clone ID: MRT4577_59566C.1.pep
RAPRPPKRSWARANTPSGSVPTNEATATGTRIGGQPGAARHQPRPQQSASITRQGGRDYGGFRHTEPATXXXEXGRPHRTARANRLQQALATSAKQQAXKQQKHRXKGXQTRRDHRNATATTXPTTTDATTRGE

SEQ ID NO: 325105 - protein, 120 aa, Zea mays
  Clone ID: MRT4577_59567C.1.pep
SLLTTLHYSLSSFFSSQADILIVVPTKAHLQLISAKMRFSIFTLVALVSASSASLVRRVDVNVPAMTNADGVVVPFDTAGVVQPAKKRDLEQKKRDLAQRKRHVSHKRRAVSQEKQQQKQ

SEQ ID NO: 325106 - protein, 132 aa, Zea mays
  unsure (1)..(132): unsure at all Xaa locations
  Clone ID: MRT4577_59568C.1.pep
KGLLAWMTTDAKTADNDKVKTAPISRPSTTGLQXVFGPIHRQLKLRTQAHGLLGXAIAVVYFDVILNHLTDDALELTGHPRVDLNDKRIIHQTLQTAHPXDXALDTLMKVTIXSGRVIMYIHNSLIYKYSCV

SEQ ID NO: 325107 - protein, 99 aa, Zea mays
  Clone ID: MRT4577_59569C.1.pep
FYPINRLQTSHLQRSVHATTNPMQRNGFSISPSIIYISFNFSSVLHLTTYVLLCSMREICVSFLLTADHWGCSTMTFACMHQKTKTKKKMHGEIREAGN

SEQ ID NO: 325108 - protein, 117 aa, Zea mays
  Clone ID: MRT4577_5956C.1.pep
MDRRPPARRRPGDPHRRGAAMHGAVEQQKQHRGRRPQGTVPPQQPPPAGYFTAELLLAFVFVAVSLAFLPLVLPPLSPPPFLLLLVPVGLLAVLLALAFVPLDAHSHLVVVGSGSSR

SEQ ID NO: 325109 - protein, 403 aa, Zea mays
  unsure (1)..(403): unsure at all Xaa locations
  Clone ID: MRT4577_59570C.1.pep
LYCEAPPSSHGFPHDAGDGQAETARQRLRITRRGRRCWRRTQPLHRVRFQPPLHLQVLRSRGGVYEVGSALCGALWSESRVCVFXQQTSDVTVNSENEETXRPPTRPPTRPPTRPRTRGFTSDVMLPNDQGLLCVTADQQFLFYCPKRTDDGAFELSLYRRLIGYNDEILDLKFIGEEEQYLAVATNLEQVRVYDVASMSCSYVLAGHTEIIVCIDTCVSXKTWSSASGKTLVVTGSKDNTVRLWDAERKSCIGIGKGHLGAVGSVAFSKKTKDFFVSGSSDRTIKVWTWDNTLGDAEDEVPLKAKAVVAAHDKDINYLAISPNDGLVCSGSEDXRTACIWKLPNLVLSVALKGHKRGIWSVEFSPVEQCVMTSSGDRTIKIWSVADGSCLKTFEGHTSSVLR

SEQ ID NO: 325110 - protein, 57 aa, Zea mays
  unsure (1)..(57): unsure at all Xaa locations
  Clone ID: MRT4577_59571C.1.pep
NTTLKSKPRASPLLVNRNLRTXVRNCVRSWLPAHVIRLFPNLLYLNQTSRRSLTTSR

SEQ ID NO: 325111 - protein, 109 aa, Zea mays
  Clone ID: MRT4577_59572C.1.pep
AGMAFGGEEVELQHGEIQAAKWARIWSSRCANEGIWRSRSRLSIRSETRCRFSSGLNLRSRLADSSLAVRRASNRTCLGSGKDSIRASVGRSSRTLPDGLPAAVRMAFS

SEQ ID NO: 325112 - protein, 87 aa, Zea mays
  Clone ID: MRT4577_59573C.1.pep
LKSFPMNQKQINISKQGVQHASLKISKKKALGTTLKLNHRGKPSKSLLGLKKLQGVFFPHRKSFPKNWSLEWKRTKLIGGNPLLSRG

SEQ ID NO: 325113 - protein, 90 aa, Zea mays
  Clone ID: MRT4577_59574C.1.pep
NRTPKQTPRVAEDKNKQLRKQLKRNQKRRGKHKKRHKRKVKYERRGKISLYHTPPLKTAQRTSLLYTQKKLLRPAVQHGDNLLPRPKSGG

SEQ ID NO: 325114 - protein, 49 aa, Zea mays
  Clone ID: MRT4577_59575C.1.pep
PNLPFSRSISNPFFYTTTTLHMPKQLNHTDRTSYRVKPIPPIYSLHPQL

SEQ ID NO: 325115 - protein, 54 aa, Zea mays
  Clone ID: MRT4577_59576C.1.pep
VWNYSASLTRLRKRLSRVCWINRSQGEALAKINLYFCRSSLLKGVLTFNLLMPY

SEQ ID NO: 325116 - protein, 91 aa, Zea mays
  Clone ID: MRT4577_59577C.1.pep
SLGFNSQSRRRSRRLPSSRQTRHPRLDPHLTSLPQTSIEGRRRSCIPKKSQESGEDEVSSAIFPKRSTNYLDRKITTDLAASCQLLKRYVN

SEQ ID NO: 325117 - protein, 213 aa, Zea mays
  Clone ID: MRT4577_59578C.1.pep
QAGALSPLLQALHIASDQDLHDSVLRAIHALTSAPAATRILCSSPLFFARLTDLICSSGSFLLQQMAADMIADLAPTVSDDTKRCMAPCIGTLIKLMEVAKPATIQESAGRALLALFTLKSNRKGFVRDEKSLTIFVRMLDPRFQETDKKYPLSIFLVLAMGGGNGTRRRLVDAGSCQHLQKLADADVPGAKKALQRISNNRLKSLFSIGWQN

SEQ ID NO: 325118 - protein, 72 aa, Zea mays
  Clone ID: MRT4577_59579C.1.pep
GVLKTGSGSRRPRAQIHHRPASCHGGYTLLSPPLHAHLVLSYSGLSLPEARLTHDEACDQLKGPRSTSLHTR

SEQ ID NO: 325119 - protein, 109 aa, Zea mays
  Clone ID: MRT4577_5957C.1.pep
PAHGTTRVNGLQRAIKTPQCIIPSPATLHASRNDHMKATNTTIPAVVRYGSQFPPAWYGAEVPPSSGSRFRPRLATTPKQSPRREQVNTFRQAQGQNPGGTMHDNNAQV

SEQ ID NO: 325120 - protein, 39 aa, Zea mays
  Clone ID: MRT4577_59580C.1.pep
MNAYVCALSYLWTHGVYIAPPVGSRCNVNHDVMFDLEPN

SEQ ID NO: 325121 - protein, 71 aa, Zea mays
  unsure (1)..(71): unsure at all Xaa locations
  Clone ID: MRT4577_59581C.1.pep
TKQNGCSPHLKMWVGTFFGYFGFFTKGVGWFKNKTSRGPFVKGDSEFFGFVSRKKPKKKTXXXXXXXXXKR

SEQ ID NO: 325122 - protein, 159 aa, Zea mays
  Clone ID: MRT4577_59582C.1.pep
GWGFFFFFFFFLVFFFFFFFFFFFFSPPQKGRKIGFSSHNKGITLNNKGGGGGNYLSFWGDKKSIGGKRVSTIQHQRVKRGEGGIHLRVNTQHQRVNGQGKIGGIIRHQENFQGILGGKQDTWLSRNKSFREKKLGGLKPDIIKGRIGSNGILEILASS

SEQ ID NO: 325123 - protein, 145 aa, Zea mays
  Clone ID: MRT4577_59583C.1.pep
PSSIRSIEEVLRLIRRPSPPALNTINSSTKLKPGINTRLVFVRWRPLDDQPLFRYLLRPSIFGLIHQYYLAEKLTLSSILWSTQFWSSFPQLTRIREIGSDFPVQAICRALGEYGAASFVFTRFLGFLADARNDDDFELKSGASW

SEQ ID NO: 325124 - protein, 136 aa, Zea mays
  Clone ID: MRT4577_59584C.1.pep
PALGVDLSHLPHHVINYRTVSTADTNHEIGSDFLIQAIYRALGEYRVASFVFTRFLGFLDDARNYDEIESGASRRDGSMVDDWRPLQAGVGVNCVQRSGSDSAAEQTRPSSESKQRGRAGSWTEPSSGDWVRSGLG

SEQ ID NO: 325125 - protein, 56 aa, Zea mays
  unsure (1)..(56): unsure at all Xaa locations
  Clone ID: MRT4577_59585C.1.pep
GLSAICVRVESNYIIIVERVQIWFVLLGWXWKKDRKPRNHTQMKQYMNRTIDXGVF

SEQ ID NO: 325126 - protein, 114 aa, Zea mays
  unsure (1)..(114): unsure at all Xaa locations
  Clone ID: MRT4577_59586C.1.pep
SRPAGPGFKLSVRRTPLEPTWQRGRSERAAGVLPRRKGRRRAAGDEKGTAGRKRRRRDXRRRQQDPAAGNSGAPHDNNNKRRNAGKNGPGETPRDGGTAKDTGEXTEEDPNKPP

SEQ ID NO: 325127 - protein, 125 aa, Zea mays
  Clone ID: MRT4577_59587C.1.pep
QKPIIFSGMLRVSQWPSLHNREGTAIRIDYTQLRISNHTTYVALNPCICQPATGVLKTGSGSRKPRAQIHHRPASCHGGYTLLSPPLHAHFVLSYSGLSLPEARLTHDEACDQLKGPRSSSLHTR

SEQ ID NO: 325128 - protein, 28 aa, Zea mays
  Clone ID: MRT4577_59588C.1.pep
FQFNTTLANLTDIRAFCNWLKRDFHSLH

SEQ ID NO: 325129 - protein, 83 aa, Zea mays
  Clone ID: MRT4577_59589C.1.pep
TRPPLLVTSSSLESSLDSCPRQPAPYSISSSFRASAKDPKNRVKTKLAALYSPSARQLSGSENHHRFRGFESAIKTVLTLRCC

SEQ ID NO: 325130 - protein, 115 aa, Zea mays
  Clone ID: MRT4577_5958C.1.pep
HSTHSIPPIYPNHHFNKSHKQKLKLTQLSLVTILYLPPKKDTFPPYKVNSHSYFPARPHQNQKYNLSFKATTLTNYLNNSLLTVARTSLFGLPPAFHTPSFTPPRHFNLASCPYL

SEQ ID NO: 325131 - protein, 101 aa, Zea mays
  Clone ID: MRT4577_59590C.1.pep
VSDQVFISEKLRRSESINTQLRISNHTTYVALNPCICQLSTGFLKTRLGSHQPRAQIHHRPASCHGGYTLLTPSLHSHCMLAFLVLVCLRQSLPMTRHVTN

SEQ ID NO: 325132 - protein, 112 aa, Zea mays
  Clone ID: MRT4577_59591C.1.pep
PSIHNHEGTAIRIDYTQLRIFNHTTYVALNPCICQLATGVLKTRSGSRQPRAQIHHRPASCHGGYTLLSPSLHSHCVVSYSGISLLEAKLTHDEVCDQLKGPRSSSLHRHGP

SEQ ID NO: 325133 - protein, 59 aa, Zea mays
  Clone ID: MRT4577_59592C.1.pep
NYRPVKFKLDFIYFTAFCFCIFFFFILFSFFFFFFFFFFFFFFFFFFVYLTGFHPRTRG

SEQ ID NO: 325134 - protein, 72 aa, Zea mays
  Clone ID: MRT4577_59593C.1.pep
IELRRSQQRDIYQVRDQKARTSCATQVQFVKIIQSKKRSSAIDYQRKEGSWMTSTGTRSRACDYCVELVRVR

SEQ ID NO: 325135 - protein, 148 aa, Zea mays
  Clone ID: MRT4577_59594C.1.pep
RPCVPLTQCVPLTSRRHSGRAATFPLPLTDPRRRATAALPLLPSHTYEDERGQLLPLCVRRPVIPPTSRVPMQRSCSRTGKTDTSPTPQISCSRTCSRLEIIRHEALRTRFQLSKRVQNEEVPMAEEALAVNINQTNLISWKFDSSDE

SEQ ID NO: 325136 - protein, 119 aa, Zea mays
  Clone ID: MRT4577_59595C.1.pep
PGRPGGMEAVLWLFNPTSLGLGTWLAAYVVHTAAKSVLEHLLLFVIKLLGTPVLPSRVKEVSPFLVKMVTLDYVFLFTNSWIEFLFTQHTFLYAISGPVALSLSELSLLNTLVAFFLLF

SEQ ID NO: 325137 - protein, 51 aa, Zea mays
  Clone ID: MRT4577_59596C.1.pep
IHEDTMLVAKVRIMLLGCTNHKTAAILTVQEHDQHGQVWSNWQGRDHSPYS

SEQ ID NO: 325138 - protein, 64 aa, Zea mays
  Clone ID: MRT4577_59597C.1.pep
LTRQNQNYSGANLKQTGVDSGRGKPKQTCRRVYTHMAGGLNPQFTRLPLDGLVPNHIPRPTLAS

SEQ ID NO: 325139 - protein, 58 aa, Zea mays
  unsure (1)..(58): unsure at all Xaa locations
  Clone ID: MRT4577_59598C.1.pep
MATGADNRDGMGYQTRXGLRLADALSFPPPFPASNFDFYPLSLHVALRLLASGAGGAT

SEQ ID NO: 325140 - protein, 686 aa, Zea mays
  Clone ID: MRT4577_59599C.1.pep
MASISPEDIGGDVNLSKIPVEEVFKTLKCDRKGLSSTEGENRLRTFGPNKLEEKKENNLLKFLGFMWNPLSWVMEMAAIMAIALANGGGRAPDWQDFVGIVSLLFINSTISYIEEANAGNAAAALMAGLAPKTKLLRDGRWEEQDASILVPGDIISIKLGDIIPADARLLEGDPLKIDQSALTGESLPVNKHPGQEVFSGSTVKQGEIEAVVIATGVRTFFGKAAHLVDSTNNVGHFQQVLTAIGNFCIISIAAGMLVEVIVMYPIQHRAYRDGIDNLLVLLIGGIPIAMPTVLSVTMAIGSHRLSQQGAITKRMTAIEEMAGMDMLCSDKTGTLTLNKLTVDKSLIEVYSKGVDRDMVLLYAARASRVENQDAIDTCIVNMLADPKEARAGIQEVHFLPFNPVEKRTAITYIDGNGDWHRVSKGAPEQIIELCNMGAEAEKKVHALIDGYADRGLRSLGVSYQQVPEKSKESAGDPWQFIGLLPLFDPPRHDSAETIRRALHLGVNVKMITGAVPPTRHHQPGAHLRDAVPELVVRGAAGLPPALRLLRRPAGGDVHRGVRRLGLLPHPGDRLGVGRRHLDVQHRHLHPARRAQVHDPRRAQRQGHGQQRPQQVIRFSGCLSRTAFRNKDCGKGRRSRGTVGGRAETLHGPQPARHHLLLRPSRQQGLACSPSSPRRPAKVARYT

SEQ ID NO: 325141 - protein, 121 aa, Zea mays
  unsure (1)..(121): unsure at all Xaa locations
  Clone ID: MRT4577_5959C.1.pep
YKCEVAAIEGGKLMANADACEFWGLFGGFASLPKKTFSELNGKDSTFTLKLLCVNKGQFAPIDCEILKRELLDSTKWYLLDWGSEXYVWMGRETTLEERKPGGLTSWGLLRGGNRQKSYII

SEQ ID NO: 325142 - protein, 105 aa, Zea mays
  Clone ID: MRT4577_595C.1.pep
RSCLCLVVLPRWCSGFAPSGTVRSSGVTTTPPAVGGRGDHDGVAFFSTASECGCGSENSGRWSPPVSGRPCAAGRSSARQQQQHAAARHSENRDMAWLGRSHGGR

SEQ ID NO: 325143 - protein, 57 aa, Zea mays
  Clone ID: MRT4577_59600C.1.pep
MAADEAAAAKAKAKAKARAVSRGALLTAREAEGPQRRGKGRAGSVLALGPQGGGLTQ

SEQ ID NO: 325144 - protein, 625 aa, Zea mays
  unsure (1)..(625): unsure at all Xaa locations
  Clone ID: MRT4577_59601C.1.pep
DQGSDKTGPXTLSHLGRDKTHTQLAANRLDQHLLLRPSARDALAYSPDAPEEARKGRLADPKEARAGIKEVHFLPFNPVEKRTAITYIDGNGDWHRVSKGAPEQIIELCRMSKDAEKKIHALIDGYADRGLRSLGVSYQLVPEKSKESAGEPWQFIGLLPLFDPPRHDSAETIRRALHLGVNVKMITGDQLAIGKETARRLGMGSNMYPSTTLLGDNKTGEMGGLNIDELIEKADGFAGVFPEHKYEIVKRLQDRKHICGMTGDGVNDAPALKKADIGIAVDDATDAARSASDIVLTEPGLSVIVSAVLTSRAIFQRMKNYTIYAVSITIRIVLGFLLVALVWKFDFAPFMVLIIAILNDGTIMTISKDRVKPSPTPDSWKLKEIFATGIVLGTYMALATALFFYLAHDTDFFTNAFGVRSIKENDKELMAALYLQVSIISQALIFVTRSRSWSFVERPGALLVIAFLAAQLVATCIAVYANWEFCKMQGIGWGWGGAIWAFSVVTYFPLDVLKFAIRYALSGKAWNNINNKTAFTNRTDYGKGEREAQWATAQRTLHGLNQATATSDLFGDNQGYRELSELAEQAAKRAEVARLRELHTLKGHVESVVKLKGLDIDTIQQSYTV

SEQ ID NO: 325145 - protein, 143 aa, Zea mays
  unsure (1)..(143): unsure at all Xaa locations
  Clone ID: MRT4577_59602C.1.pep
MTQSTERTEYDVNPXEDSQDYSSHINCSAKMKLAERDDIVKTARFEEIPPYDPDCNYVRTASVEKKIYYXEGITAVEFIKIXAAQIRNVYRATHFYYSRCCXARNMLEQLHNMVIIDDNPEAELLINNDARRDLDPQAGRVTA

SEQ ID NO: 325146 - protein, 29 aa, Zea mays
  Clone ID: MRT4577_59603C.1.pep
DYYDLHNSIHSVEIYTSSTGFNSNRPVPH

SEQ ID NO: 325147 - protein, 211 aa, Zea mays
  unsure (1)..(211): unsure at all Xaa locations
  Clone ID: MRT4577_59604C.1.pep
SSYADSWPWELPTPSPMALGLPAPPQPRARRALPLPMATPRPAPSVFPGARWSFLPISLASLGTSLVVLTPALCSSTPAARSSPPCSMARPPVFCSLAHGSEPPGGRASSPSQPSSSPSSLPXSLAPARPALFPMVAGCLTPAPCRRTPIPPWPXSSLCCLLRRAPXPPAEVSSLPSPSRTPPYSALSRLPVPARRRLAARLACAVLCPCA

SEQ ID NO: 325148 - protein, 78 aa, Zea mays
  Clone ID: MRT4577_59605C.1.pep
FLKISSFFRTTGRGRSCNCGSSFSCCSSCKRGPKYPHLEVTSTYRQSSVVLTFYPNKKGTPGFVEACKAFMPSSYFWQ

SEQ ID NO: 325149 - protein, 60 aa, Zea mays
  Clone ID: MRT4577_59606C.1.pep
RRFWVCPTDVKIEVVLNRWILSLRDNFFLDYILFFIFWRWLATAGRLTAAQTTDSGKNPN

SEQ ID NO: 325150 - protein, 39 aa, Zea mays
  Clone ID: MRT4577_59607C.1.pep
GEYNLYYNVKASLILRIFRGFTKYQSNNTNEVSLFKIVP

SEQ ID NO: 325151 - protein, 217 aa, Zea mays
  unsure (1)..(217): unsure at all Xaa locations
  Clone ID: MRT4577_59608C.1.pep
SLSSAPSFPQVRPSPHWSRVRNPCRATHFSPQLGSAASSVRPFAAAHSFFVCRAQRVELPHRRLVVHKIRPATASTNCETPSPWALASATADSAIKFATTPCSVRLAVGDFSTLQIRAARPACAHSSSIGFLAGFAFWRRVVKPVILCSTPLRQLAPDIIPSSFCASGEDEASRVIFTECATKSSNQSSIASTTTXIQDSTVPIILPRGPSNPSPRP

SEQ ID NO: 325152 - protein, 101 aa, Zea mays
  unsure (1)..(101): unsure at all Xaa locations
  Clone ID: MRT4577_59609C.1.pep
CINMHMXQDQLQVVCTCYQLYCLEHGIQPDGXAPEDRDCXHYDDDFSTFCSTTVAAKHAHHAVFTELEHTRRDEGRTRTLHRLYLPGQMITDTHCAANSCT

SEQ ID NO: 325153 - protein, 211 aa, Zea mays
  Clone ID: MRT4577_5960C.1.pep
MVSLKLQKRLASSVLKCGKGKVWLDPNEVNEISMANSRQNIRKLVKDGFIIRKPQKIHSRSRARRAHEAKQKGRHSGYGKRRGTREARLPTKILWMRRMRVLRRLLRKYREAKKIDKHMYHDMYLKVKGNMFKNKRVLMESIHKSKAEKAREKTLSDQFEAKRAKSKASRERKHARREERLAQGPRDHAPAPAAAAPAPAAAAPKKAKAKK

SEQ ID NO: 325154 - protein, 72 aa, Zea mays
  Clone ID: MRT4577_59610C.1.pep
APVPSARPSSPPAVRRRSVPAHQHQQVVMHRHAGTSMPSIAILVYTKDPRRLDAEENKLVRGGKILDVEEEV

SEQ ID NO: 325155 - protein, 117 aa, Zea mays
  Clone ID: MRT4577_59611C.1.pep
PSLHNREGTAIRINYTQLRISDHTTYVALNPCICQPATGILKTRTGSREPRAQIHHRPASCHRGYTLLSPPLHAHSVLSYSCLSLPEARLTHDEACDQLKGPRSAHLHTHSILNKPG

SEQ ID NO: 325156 - protein, 109 aa, Zea mays
  Clone ID: MRT4577_59612C.1.pep
SRVESSPMLMRSCSNLSCRVVITFCHELDSRCHRALCVLAFAVESLNPSSPAQPYPASSLQIQSRYRPARHQESQESGEDEASSAIFPKRSTIAWIGKSLPISRIRVGY

SEQ ID NO: 325157 - protein, 167 aa, Zea mays
  Clone ID: MRT4577_59613C.1.pep
MAAKLPSSFPPRFALCSLAPLSSSVPFSSARSGHGIHPRAVPWKSQLGSVFSRRFSLMRAQPCRSSARKFSVGHARSSLFAADFAIEFSSSPTLQLIVIAKSFPSPRHKIHSDTISSSFRASVKKSQESGEDEASSAIFPKRSTNCLDRKIATDLVDSCQLWKRYVN

SEQ ID NO: 325158 - protein, 82 aa, Zea mays
  Clone ID: MRT4577_59614C.1.pep
KKQKTPSLPPSSSENQKETLYPTAFIKKQIPPKKNRQANVANFKTHNRPSKLQTLCWLPKTRSGQACRDPLSAPLFIPPETW

SEQ ID NO: 325159 - protein, 42 aa, Zea mays
  Clone ID: MRT4577_59615C.1.pep
SLIQPCSFYCACVNNPILSSSISVKFQSRSFTDWSTLRFFFT

SEQ ID NO: 325160 - protein, 75 aa, Zea mays
  Clone ID: MRT4577_59616C.1.pep
VTQITHTNIVAAEILLPNFTGYKIFTLFYRSDYKSISLKYMLAQEIILNKKIKTGYTYIRRPSPPALNTITTAQG

SEQ ID NO: 325161 - protein, 52 aa, Zea mays
  Clone ID: MRT4577_59617C.1.pep
VEGRRRVTACGAALVNGGLAVGKKNGLALPITDRIKLAEDKTTDAVLSQKPS

SEQ ID NO: 325162 - protein, 152 aa, Zea mays
  unsure (1)..(152): unsure at all Xaa locations
  Clone ID: MRT4577_59618C.1.pep
RSSFLRINLSXGISAKDKLYLPISRAKHFFVNHILILHQKYLYRYGYQGRQCIKGFPSNSYKPNAHSLDLSVRKVFKNKEGVACTGACLGNTRLVLLDDDHLTIILCLRIAPITRLQINPSASSCGLVHPLGHLGVDSALFVHITWSINIPK

SEQ ID NO: 325163 - protein, 114 aa, Zea mays
  Clone ID: MRT4577_59619C.1.pep
PVESPPPAAAACRSCRTGTRAGTGTRSRTYGRASATAAAWGRSPAPPCPPGKYEHGPMGLVSRSRTPATPRHTSSKGTRRNDVSHARCNQPPRETDTYRHSTLMIEQVATRCST

SEQ ID NO: 325164 - protein, 47 aa, Zea mays
  Clone ID: MRT4577_5961C.1.pep
NYIMMTFHYFYIGIKLPPVHRQDCHRHLVPLISSPAMQSQHSPDPHH

SEQ ID NO: 325165 - protein, 112 aa, Zea mays
  Clone ID: MRT4577_59620C.1.pep
QSLHNREGTAIRIDYTQLRISNHTTYVALNPCICQPATGVLKTRSGSRQPRAQIHHRPASCDGGYTLLSPPLHAHSVLSYSGLSLPEARLTHDEACDQLKGPRSAGLHRHGP

SEQ ID NO: 325166 - protein, 66 aa, Zea mays
  Clone ID: MRT4577_59621C.1.pep
AFGKSVATDASPFLQIDKASMLDEAIEYLKTLQLQVQVTLKPPNWKCSTVLSDRCKHKCTDKMVAI

SEQ ID NO: 325167 - protein, 30 aa, Zea mays
  Clone ID: MRT4577_59622C.1.pep
KLLFNIDSVQPCTPLGSIYPHSVFSATRIC

SEQ ID NO: 325168 - protein, 363 aa, Zea mays
  Clone ID: MRT4577_59623C.1.pep
MDQSNISNKHMTMTTLMLLLCVIAIADCICHAAVAARVEPSTTVGRTTGGDEAMMMARYKKWMAQYRRKYKDDAEKAHRFQVFKANAEFIDRSNAGGKKKYVLGTNQFADLTSKEFAAMYTGLRKPAAVPSGAKQIPAAGSKYQNFTRLDDDVQVDWRQQGAVTPVKNQGQCGCCWAFSAVGAMEGLIMITTGNLVSLSEQQILDCDESDGNQGCNGGYMDNAFQYVINNGGVTTEDAYPYSAVQGTCQNVQPAATISGFQDLPSGDENALANAVANQPVSVGVDGGSSPFQFYQGGIYDGDGCGTDMNHAVTAIGYGADDQGTQYWILKNSWGTGWGENGFMQLQMGVGACGISTMASYPTP

SEQ ID NO: 325169 - protein, 109 aa, Zea mays
  unsure (1)..(109): unsure at all Xaa locations
  Clone ID: MRT4577_59624C.1.pep
LSLITISIIYFIAQKNPKGTGRVLLVALSLLALTASAISXTHSNECCCCQTPAAFHLPTTRHYTPHDDLPPTMHLPPAVHLPPPFHLSPQAHVPPPDHLTTAPYQLHNQ

SEQ ID NO: 325170 - protein, 177 aa, Zea mays
  unsure (1)..(177): unsure at all Xaa locations
  Clone ID: MRT4577_59625C.1.pep
RAWAATCDPRIIHRDIKSANILLDNDFEAMVADFGLAKLTNVNHTHVSTRVMGTFGYLAPEYASSGKLTEKSDVFSYGVMLLELLTGRRPGDRSSYGQDGLVDWARQALPRALADGNYDALVDPRLRGDYDPTEAARVVASAAASVRHAVRRRPKMSQIVLALQGGMPLEDLSDXAP

SEQ ID NO: 325171 - protein, 58 aa, Zea mays
  Clone ID: MRT4577_59626C.1.pep
KIPAPAPPGGGTRPAPVNSPRKLSTVGGAKQGYEVTHMLRASPGGGPPPPPVVRSSQL

SEQ ID NO: 325172 - protein, 55 aa, Zea mays
  Clone ID: MRT4577_59627C.1.pep
KKTPIQKSPTLSIPGKINHPICLKLSLSSKTSTPFFENLPMDPKIFFHNPPHFTN

SEQ ID NO: 325173 - protein, 89 aa, Zea mays
  Clone ID: MRT4577_59628C.1.pep
DRHPGPSLTVHRPNHTGRSRELPDGHQLLEQSLLLIAHHRHLAPHYRCVLIGHLPHHALPLAFPRIPLIFTILHARSTNCCTCAFTFLL

SEQ ID NO: 325174 - protein, 82 aa, Zea mays
  Clone ID: MRT4577_59629C.1.pep
SYVISCITILYERHIAFCLAGSRLRALYDSINSSTQGCTPCPISCFCVLCFRRSYHSLFPIYNSAKSVAPPVEHITIYKSID

SEQ ID NO: 325175 - protein, 96 aa, Zea mays
  Clone ID: MRT4577_5962C.1.pep
CKQKPGVNPCVCGSKQEQTKGTTGVPTPNPKAERTLTQGQKRTVTRTDRRIRELTRSQDRPTHQALEAAAAATEAAPPPSGRRAERPHGPYRATRG

SEQ ID NO: 325176 - protein, 115 aa, Zea mays
  unsure (1)..(115): unsure at all Xaa locations
  Clone ID: MRT4577_59630C.1.pep
RWQAAAASLGSRRRRPRSGAGPQTNWNPSGSWSGPIPNLFSFFSXLPVGGGRCXXWASPRGSGGGRGPGEGHXGGGEARVGGAGTHRLRAAAGLGPWGGAAAPAPRRPAGGAPLS

SEQ ID NO: 325177 - protein, 93 aa, Zea mays
  Clone ID: MRT4577_59631C.1.pep
GRDLHANQRLAHLRHLLSIYEFPRCRKYRSAYVFCDRSMSRLSNKHICKASINAVKHAITRSEAQERQRSVVVVRRIHIVRLEVLRNDLKHQE

SEQ ID NO: 325178 - protein, 107 aa, Zea mays
  unsure (1)..(107): unsure at all Xaa locations
  Clone ID: MRT4577_59632C.1.pep
MEQVQVVGVTCLGMYGALLAHKKFDTCIMDEAGQITLPVLLGPLMLATKLGLVGDHYXLSPLVHSSEARENVMGISLFCRLTXVHFQAISVLLCLYRMISGIMELLI

SEQ ID NO: 325179 - protein, 62 aa, Zea mays
  Clone ID: MRT4577_59633C.1.pep
GPVPGPSPGRHSTARSRRASSSSIPPAADGFGSGTPEPNRQSRSFSISYGSALPTVPSDAWT

SEQ ID NO: 325180 - protein, 59 aa, Zea mays
  Clone ID: MRT4577_59634C.1.pep
YIVFIFFFFFFFFFFFFFFFFFFFFFFKQAYRLVMAARNVIAIVCLFARCPRQHYCIPC

SEQ ID NO: 325181 - protein, 45 aa, Zea mays
  Clone ID: MRT4577_59636C.1.pep
KNPGVTQLNPLEKKPLFSNWRKRKKAPTNPPSKKLPTLKGKWPPP

SEQ ID NO: 325182 - protein, 89 aa, Zea mays
  Clone ID: MRT4577_59637C.1.pep
WGPEKQKALFLRPITSLNNTLPSPQPGCPHCESFIQVRIKNDPPCDRNSLITPLIFSRPLQYALPYGPLQYFKKAISLGSNRKGTDSSN

SEQ ID NO: 325183 - protein, 119 aa, Zea mays
  Clone ID: MRT4577_59638C.1.pep
PPVFFHHHLFPFTQLVFPYFHQQQLFPFNQLAPLNPPAFFHHQILLPFTQLVPPTRASFFTQHQFLPFSHQFWATPPPLFQLHQLLPFVPLALTDRAAPSPQPLLGGALLLDCFLVVIP

SEQ ID NO: 325184 - protein, 64 aa, Zea mays
  Clone ID: MRT4577_59639C.1.pep
VFSHCDKFLRLSLQLISRYATWLSCGLSARKASDRSPNSPADAEWALSIPIEDFIYVSYICNNV

SEQ ID NO: 325185 - protein, 58 aa, Zea mays
  Clone ID: MRT4577_5963C.1.pep
KKTFSRLCGGIRAKHHPLIFLYWSQMKRWRRGSDDQTGNLLGMPRSTTPGLPASLTTV

SEQ ID NO: 325186 - protein, 71 aa, Zea mays
  Clone ID: MRT4577_59640C.1.pep
PDLLIFRMSSEWVRFSDGWAMTAVAGGLAWTARFSSEFHTSGSFFSVLQFQSCLLPEVHTITLRGFSVHNT

SEQ ID NO: 325187 - protein, 133 aa, Zea mays
  unsure (1)..(133): unsure at all Xaa locations
  Clone ID: MRT4577_59641C.1.pep
ASAGESARRSERRENRSAERSXGRAGSRGSRPSEARKIGRNDRPWRDREIRARHRGXSGSGNRETARANREQRARRERDRARRGSRAGSLNPSRSPSAMGARDHSPASTEAGTPAWRSLTRRWACVVSRQASS

SEQ ID NO: 325188 - protein, 234 aa, Zea mays
  unsure (1)..(234): unsure at all Xaa locations
  Clone ID: MRT4577_59642C.1.pep
LATHEEEKKPTPRLSSTTSPDPQPPXSPSPSNAHLPISPSPSDAHLSPTPPPPXSPPTPPSGKSPPPPHPXPAPPASRAPPCPPFPLTDLLLPPPSTPWEHPXPPPRPQPVTRPPPXAAVTPLPPTPLQHRPQPMTRHTTCWSTSGSPDPTRILHRPSLAGNHEHYRRLDTILQLEKRLNFSSRSQRPAAGRRERPLPQPTADPSSVVASARALSDTPKCRPSYLNGVPAHPRR

SEQ ID NO: 325189 - protein, 147 aa, Zea mays
  Clone ID: MRT4577_59643C.1.pep
VGDQVSTLRGYNSDPNRFTQLRISNHTTYVSRKPCMSTIPTDPPLQEQVRATREHTTLFRRSFARRVRDTLAISPLPVRDCLFMYGIAGFKLTLSHFQGMWLVKIVLDQQAYIHIQSLIDPGRASPVPSPSRELNTSILRIVLCSLG

SEQ ID NO: 325190 - protein, 72 aa, Zea mays
  Clone ID: MRT4577_59644C.1.pep
LNRIHPSVPRTPDKPLTTRIARLSNTNHTHQYFCSGNLITKFYKLQKIYIILSEWLQKYKFEIYASSSDHPH

SEQ ID NO: 325191 - protein, 123 aa, Zea mays
  Clone ID: MRT4577_59645C.1.pep
TLMSTIPTDPPLHEQVRATREYTTPFRRSVARRVRVTLAISPRQVRDCLFMYGIAGFKLTLSHSQGMWLDRIVLDQQAYIRIQSLIDPGGASPVPSPSLDLSTSILRIVYVPRMKRASQGTLQ

SEQ ID NO: 325192 - protein, 241 aa, Zea mays
  Clone ID: MRT4577_59646C.1.pep
YLVLSVYRARSFLQHDIPLQLIPAHSTSCSLPRPWPLCPSSFHSRLRARPARSWRGHQTSSLVLAPLQPSSSYLSLASSSPCHGRRSSAARPWLSDESLPSLLDIFELGSCVRAALLPWRVPAPGWISLLSSVTCLGTVFCTLAGFFASISRGNVLLLAPLVATRVVFLAGHQRVVEGRFFTIASPRPSPSMAGVPLSSIAAMLPRSCCSPWPTASNPCSMSPHFASSPSWFLEFVVMRCR

SEQ ID NO: 325193 - protein, 133 aa, Zea mays
  Clone ID: MRT4577_59647C.1.pep
RFQGAEDWEIKHRERTSALMAGAGRGLLGDGEMETSGRGRKQAARGEDARRRYWETSEAEQGKGSGERTAGELRAYKMNRAAAKISRSQIFFSLFFLSVIEDILITISSDNKKVDRIATQFDSIRNLINLPVV

SEQ ID NO: 325194 - protein, 129 aa, Zea mays
  Clone ID: MRT4577_59648C.1.pep
QHLCLVHAPLCRAVSLHASSSRAESSPMLMRSCSNLSCRVVITFCHELDSRCHRALCVLAFAVESLNPSSPAQPYPASSLQIQSRYRPARHQESQESGEDEASSAIFPKRSTIAWIGKSLPISRIRVGY

SEQ ID NO: 325195 - protein, 69 aa, Zea mays
  Clone ID: MRT4577_59649C.1.pep
ILVKPWAHKPGARLITQCVTPDRFLGFQNAMVNINKRPPLSCVHHPPWSPPPSRLFMGFLFFFPSQLLW

SEQ ID NO: 325196 - protein, 265 aa, Zea mays
  Clone ID: MRT4577_5964C.1.pep
RGSDSGGEFLSDNFRQILSLEGTLAQLSCPGAHAQNGVAERKHRHIIESARTLLISSFVPSHFWSEAVSTAVYLINRQPSSKLSGKTPGEILFGTSPRYDHLRVFGCLCYVLLPPREQTKLTAQSVECVFLGYSPEHKGYRCYDPSTRRIRISRDVSFNENRPFFYNKSTYPSYYPTESTSFMCLPSVPDFSSEPSSFTTTPDVLIPITSPSISTSSYSSKPPITQTYIRRSCSIPTAGPDTDPVPDSCANILSLMMFFIRISSS

SEQ ID NO: 325197 - protein, 188 aa, Zea mays
  Clone ID: MRT4577_59650C.1.pep
MMTTQGGLQPTSNEANLCTNDNGSQLSTRIVDEIMAGKNVFFDLPDKLTGEMWTLKFHCIGAQPGKEIVTVNIDKAYVAFYNVVYIKSKLGYSGRDFLFYKKRCGIDRSRLLALDYIHQEETMLSDNIDERKISFVLTKDPPSDLEVSITPIKRPRQRTNVDEETIEVSIDAYKEWLAIILFKCRFNG

SEQ ID NO: 325198 - protein, 183 aa, Zea mays
  unsure (1)..(183): unsure at all Xaa locations
  Clone ID: MRT4577_59651C.1.pep
PLAAARISGSLXMSIHTGGLIETVTGLGADVRWRCCNILYTQDHAAAGIARDSGRVFACKGETLEEYWWCTERCLDWGEAGGPDLIVDDGGDATLLIHEGVKAEEDYEKTGKIPDPESTDNAEFKIVLTIIRDGLKADPKKYRKMKERLVGVSEETTTGVKRLYQMQETGALLFPAINVNDSV

SEQ ID NO: 325199 - protein, 102 aa, Zea mays
  Clone ID: MRT4577_59652C.1.pep
IGRRSVLEDNTTAGSRPEAQEEEKRYVQNKSTHTLSSNLLHNIPLLLIHKLDSSNRRHLPQQTAKRRRRSRVRGTETPLHLRFSALRHTPSQAHKSAQSSKP

SEQ ID NO: 325200 - protein, 294 aa, Zea mays
  unsure (1)..(294): unsure at all Xaa locations
  Clone ID: MRT4577_59653C.1.pep
GLIQRGGSTRKLDTPWRAENFVRALGEFHTGSRGEQQAPSCAQARDGYGKEAARAGRLLVRQAEQGSRAMGRSSARRGKQTPANPRARXGDSVGARPSRNGARQTPWASRAQGAPARRAGRARHXETWGXIKKRDAQREAAARRHRRRAPSKQRRRGAIRAPRHTGRXKSGSARRSGQVRSXRSLWRAMGASRARSXGREGATERRLPRRAPTSSRARPWMEPGWSWRELGWDWSEGRGSRKEQGGRRGRGDEQRTRLEQSWETQSSRAGKKNGAPWHHSTGSRPEREKGVAAR

SEQ ID NO: 325201 - protein, 39 aa, Zea mays
  Clone ID: MRT4577_59655C.1.pep
CYSGSNFVLLLMVLSAGGLGLLISLSNPSILLIEDDPLS

SEQ ID NO: 325202 - protein, 229 aa, Zea mays
  Clone ID: MRT4577_59656C.1.pep
MAEETDTRPASAGSRGRPAPEDDDREEGEITDLACAPSPPATHPLEHSWTFWFDNPQSKSKQAAWGSSIRPIHTFSTVEEFWGLYNEFGPSKPFAGARISGSLHMTIQTAVLIETLTALGAEVRWCSCNIFSTQDHAAAAIARDSAAVFAWKGETLEEYWWCTERCLDWGEAGGPDLIVDDGGDATLLIHEGVKAEEDYEKTGKIPDPESTDNAEFKIVLTIIRDGLKA

SEQ ID NO: 325203 - protein, 142 aa, Zea mays
  Clone ID: MRT4577_59657C.1.pep
MPVEGRKKGVPALGWWLMLVGSLRLASVWFGFFDIWALRVAVFSQTDMTDVHGRTFGVWTLLTCTLCFLCALNLENRPLYLATFLSFVYALGHFLTEYLIYHTMAAANLSTVGFFAGTSIIWMLLQWNYHVNPHGAQAVKQS

SEQ ID NO: 325204 - protein, 70 aa, Zea mays
  unsure (1)..(70): unsure at all Xaa locations
  Clone ID: MRT4577_59658C.1.pep
CAPGFRYELQARFCPLYPGSDVTSVCPKSRMYAIRARXFTVTGKAFFHPVYGVAMGYHKFSATPEYMVHN

SEQ ID NO: 325205 - protein, 100 aa, Zea mays
  Clone ID: MRT4577_59659C.1.pep
SVVSRLLEPFLSRKAPLRSFPIGLVCSQLTPKLLNGCTVVRVLIRLNIFEEHFFLPWYLAAMCFPKSLAVSSFWVLKIFHYALLIVSMLHKCCGVLVPEK

SEQ ID NO: 325206 - protein, 367 aa, Zea mays
  Clone ID: MRT4577_5965C.1.pep
MADSPNPSSGDLPAGPGGSPEKPVLADRRVAALAGAGARYKAMSPARLPISREPCLTIPAGFSPGALLESPVLLNNFKVEPSPTTGTLSMAAIINKSTHMDIMPSPRDNSAGSGQEDGGSRDFEFKPHLNSHLAAPSVNNQNHHDTMQKYSSNHTTPSSNLKTENKPLCSRESSHTAHASIAPNQTVSIVCPSDNMPAEVGTSEMHQINSSENATQETQIENVAEKSAEDGYNWRKYGQKHVKGSENPRSYYKCTHPNCEVKKLLERSLDGQVTEVVYKGRHNHSKPQPNRRLAGGAVPSSQGEERYDGVATIEDKPSNIYSNLCNQVHSAGMIDTVPGPASDDDVDAGGGRSYPGDDANDDDLDSK

SEQ ID NO: 325207 - protein, 79 aa, Zea mays
  Clone ID: MRT4577_59660C.1.pep
VTMANKEWKQHIPAPVTKIITAFCAMALCTDFMADKTRQVSCIQIIHRSNVACNTIYATTVLNSRLCKALDPFLDPMRP

SEQ ID NO: 325208 - protein, 63 aa, Zea mays
  Clone ID: MRT4577_59661C.1.pep
SPPSRCAICQVAQEPFEGLMEENGGSHCFSPYAPWGGPYLCLECRKKKDAMEGKRPSCSTACR

SEQ ID NO: 325209 - protein, 224 aa, Zea mays
  Clone ID: MRT4577_59662C.1.pep
MEDGDESAAAAVAAALGLSPQLFVNEVHGIIADISAEAFEYCLQAAAAPGVGAATAAEKATDLQRGLNAIHHVVKDRLDKRMANWEKFCFRHCFDVPEGFVAADDDSSCANESQKDGISDSDLDLELDSLRRKFESANKESENLERELSSLERQATFKRRLDSSVSEIEKLFEEKMVQGNLKDLVKAIPVLHQKIIDANQRRTEIRSLVDQQAWNTKRSRDSKP

SEQ ID NO: 325210 - protein, 113 aa, Zea mays
  unsure (1)..(113): unsure at all Xaa locations
  Clone ID: MRT4577_59663C.1.pep
RSRSPSLQCAVLVVVCSPAQVEVYWHIDVDGAVLHARVVGPVACLLLLQLVPVCLIRIRYRRAASQVRQPAFLVAACVGRNGPGPPAGPPIRIEDPPPIVKPPPPFFFSAGXQ

SEQ ID NO: 325211 - protein, 239 aa, Zea mays
  Clone ID: MRT4577_59664C.1.pep
MVAFMASSGAMKASSRPTFVTPRSFFNWGKSARETETPPPQLQFSYHDVEPPFPMSLVAKTHLRDRELRCCYKATVDGFSATDFHRRCDFKGPCVVVGYTDGGFRFGGFSPEGYRSTDDYYDTLDAFLFYWAESTEVSAPPVVLPKVGGSGAALFDYSRGGPQFGADGLLIGPPLTAVMGVFTGPDSSAGVGDLRSARSRLGLSYARRPDGKESLFGDEGRAQLVEVLVFCNPQIASLY

SEQ ID NO: 325212 - protein, 105 aa, Zea mays
  Clone ID: MRT4577_59665C.1.pep
LRVALEIFLLPVPFYFKFSLKGYSLKIIASSSQLNPIGFSWLFVEDVLDTNERERERERERERERERERERERERCVQQTSGATLRPEVTVLKLQVRYALLLVLA

SEQ ID NO: 325213 - protein, 50 aa, Zea mays
  Clone ID: MRT4577_59666C.1.pep
QTAPVHLTWDLFFYRPSFKGSRYTCASYLLPESMKGDLPAADIFTIASAA

SEQ ID NO: 325214 - protein, 116 aa, Zea mays
  unsure (1)..(116): unsure at all Xaa locations
  Clone ID: MRT4577_59667C.1.pep
IFSLARLDRVKXNMTGLIXLYSKNTRLXELVNLLIVAGHHGKESKDXQDRACFNYIFSLLIECKLNAHFQGILLQVNRTSNCERGRYICDTKGPSLQTGHYQSRXLAFIDSITSGT

SEQ ID NO: 325215 - protein, 57 aa, Zea mays
  Clone ID: MRT4577_59668C.1.pep
RHQCHCSSIHRYGLSCTLVRPETAINSQPLEDPVPVYDLDNIDSARFGRYDASDSSW

SEQ ID NO: 325216 - protein, 68 aa, Zea mays
  Clone ID: MRT4577_59669C.1.pep
RRNSKTKSSRNIVDRNHDQKEEQLVQSLRELLLASKQLPDKFDDYYVLLRYAHFIYFLENLCYILSLD

SEQ ID NO: 325217 - protein, 125 aa, Zea mays
  Clone ID: MRT4577_5966C.1.pep
LSILYVLSVRIHSACLFTHSASLFIYIMNGLVRVSVPSLRKPSCVSLPPPFNLFLTIVSNGMGCVLLQSPAHSQAWLEIREWLIYQSAPPLVSTDRPTVCFFHTWTASLVGGKKKKKKKKKKIKQ

SEQ ID NO: 325218 - protein, 110 aa, Zea mays
  Clone ID: MRT4577_59670C.1.pep
PSLHNREGTAIRIDYTQLRISNHTTYVALNPCICQPATGVLKTGSGSRKPRAQIHHRPASCHGGYTLLSPPLHAHFVLSYSGLSLPEARLTHDEACDQLKGPRSARLHTR

SEQ ID NO: 325219 - protein, 97 aa, Zea mays
  Clone ID: MRT4577_59671C.1.pep
PRPALPRTERSASIRSWLCSAAAPCPSRTHLRASRSSPSVNMASACGFQLGAESTRGFVAGSDASAPDLNFFGRASGRALRAAQRSAVADSDGSVER

SEQ ID NO: 325220 - protein, 110 aa, Zea mays
  Clone ID: MRT4577_59672C.1.pep
PSLHNREGTAIRIDYTQLRISNHTTYVALNPCICQPATEFLKTRSGSRKPRAQIHHRPASCHGGYTLLSPPLHAHFVLSYSGLSLPEARLTHDEACDQLKGPRSARLHTH

SEQ ID NO: 325221 - protein, 160 aa, Zea mays
  unsure (1)..(160): unsure at all Xaa locations
  Clone ID: MRT4577_59673C.1.pep
MDSTGTVSGGKAKKAAPARXVGGPRKKSLXRCEKDGLQIPAGRXIGRYLNNGLYPHRGGTGAPEYLAAALQYLGPEVLELPGHAARDNQNTPIIPPHGLLAIRNHDXLGKLLGSVTIAHGVVLPNINPDLLSNNTGXHEARVWSKERQSPQKVAQSPKNA

SEQ ID NO: 325222 - protein, 139 aa, Zea mays
  unsure (1)..(139): unsure at all Xaa locations
  Clone ID: MRT4577_59674C.1.pep
TLLFYPQPNSSPSSSXTSAPSASSMCCTQVPCSAPIFSSTGCSSLPQPASNFQPAGAPSPLASAQPTRSPSSSSSGAVKLPGVALPFLDHSSEPLHGCRRSCLSCPCQAPAQALFFPGTRRLTARPCAFPFSVLVLAVP

SEQ ID NO: 325223 - protein, 48 aa, Zea mays
  Clone ID: MRT4577_59675C.1.pep
RPLLNFYLRWLGQCFCLKKKKKKKKKKKKKKKKKKKKKKKQKKKKKSG

SEQ ID NO: 325224 - protein, 112 aa, Zea mays
  unsure (1)..(112): unsure at all Xaa locations
  Clone ID: MRT4577_59676C.1.pep
GKNAQTNQKAQEGTNGSQKRRKXXXXXARAGTXTXXPQGXQXPRXXXXPPDHAPAXXXXGENPXXEPDRXQQAXAXGSEXXKPGXRQQXTAQKQQXPXEQRRAQNRRAQQQQ

SEQ ID NO: 325225 - protein, 193 aa, Zea mays
  Clone ID: MRT4577_59677C.1.pep
QQLKSAIPISSASDFFTVCLGAVCVAFFKLWPSVSPCSSGLAEQLALSSRASCSPRPPAPSSLSPWRRSLFPAGGRPVSARSCPAHLHGRAWSLFKLGSALYSSSPSLLFSLLGRSAARRRPWPPLTFLLTPISLPCVRELAGDLGSNSDLASVRRPRALLSVGAIIANDSFLLRCVGRACRGQDTNLPQAWA

SEQ ID NO: 325226 - protein, 64 aa, Zea mays
  Clone ID: MRT4577_59678C.1.pep
EGDWCIVRLSSHRHHLQSLLHHPLARTCPAGRLRTCLVHLSHSQLLVTLGLHAYDLDLGRDPGR

SEQ ID NO: 325227 - protein, 76 aa, Zea mays
  unsure (1)..(76): unsure at all Xaa locations
  Clone ID: MRT4577_59679C.1.pep
QIMELLKPALYRAQNFAEGGTRQSLLCRVPDKKHSAKAWIPIVTCFLHYFYFFFSNNIIYFLKXXXXKKKXXXKRA

SEQ ID NO: 325228 - protein, 271 aa, Zea mays
  Clone ID: MRT4577_5967C.1.pep
CSGSPGYVYDHSGGGRPYPGDDSNDDDDLDSKRRKMESAGIDAALMGKPNREPRVVVQTVSEVDILDDGYRWRKYGQKVVKGNPNPRSYYKCTNTGCPVRKHVERASHDPKSVITTYEGKHNHEVPVSRNASHEMSTAPMKPAVHPINSNMPGLGGMMRACDARAFNNQYSQAAESDTISLDLGVGISPNHSDATNQMQPSVPEPMQYQMRHMAPVYGSMGLPGMPVPAIPGSMYGSREEKGNEGFTFKAAPLDRSANLCYSSAGNLVMGP

SEQ ID NO: 325229 - protein, 127 aa, Zea mays
  Clone ID: MRT4577_59680C.1.pep
MNGQREQEVHDGSREVGTQGRTAAEQELELHRRAERKAARAGELSAERTQGDVELARRAEERARRQSRSAERERAGRRGTRAGARRDGQRWSEQRQLGRRRPHTKDKQPARENIKRAAFPAGLEGPN

SEQ ID NO: 325230 - protein, 105 aa, Zea mays
  Clone ID: MRT4577_59681C.1.pep
IDYTQLRISDHTTYVALNPCICQPTTGVLKTRSGSREPRAQIHHRPASCHGRYTLLSPPLHAHSVLSYSGLSLPEIRLTHDEACDQLKGPRSACLHTHSILNQPG

SEQ ID NO: 325231 - protein, 82 aa, Zea mays
  Clone ID: MRT4577_59682C.1.pep
KTTKKKKKKKKSLVHLPGRPVGQVQAFFFFFFFYAQNMSSLLSGTICIIASRWEAETSFDQATSCNMRGAQNTVEASFLDIA

SEQ ID NO: 325232 - protein, 154 aa, Zea mays
  Clone ID: MRT4577_59683C.1.pep
LLVVELLYCAREVLCSPRRVKFPRRVSPRVLFPARQRALSARSALKSLSRRRPRHDLVRPSCWSLFHIVPISSDPVLARRCVIHSPVVKLVIFCSTPPHQLAQDYNRRSSSIRASSSNLKNRVKTNLAARYFSSARQIAWIGKSLPISRIRVSC

SEQ ID NO: 325233 - protein, 57 aa, Zea mays
  Clone ID: MRT4577_59684C.1.pep
KIPLILVNGEKFLKKKNVWALAKVCPARSRKTFSSIFKGALWSNPWLKGLKKTPGAV

SEQ ID NO: 325234 - protein, 105 aa, Zea mays
  Clone ID: MRT4577_59685C.1.pep
MAPKKAKRRAAAEGSSNVFSMFDQTQIQEFKEAFTVIDQNRDGIIDKEDLRDTFAAMGRLNVKNEELDAMMKEASGPINFTVFLTMFGEKLKGADPEDVITGAFK

SEQ ID NO: 325235 - protein, 81 aa, Zea mays
  Clone ID: MRT4577_59686C.1.pep
STQTETLHRDSLLVQVNHPVSALSFKTQSLVPGRGTSFLMLNPSWPLTDPPSSLFFVKIPIHYEASPFVFKTKHFVFLKQG

SEQ ID NO: 325236 - protein, 60 aa, Zea mays
  Clone ID: MRT4577_59687C.1.pep
FFFFFPPDQDPIQYLNRKNVLIRLVYLSFVLIWNRDWNALLCLIVNSICLIPLARSLPSY

SEQ ID NO: 325237 - protein, 53 aa, Zea mays
  Clone ID: MRT4577_59688C.1.pep
FKEITLNYYKLFIVLKYMLGQVTILNKKIKTGYTYIRRPSPPALNTINNITRL

SEQ ID NO: 325238 - protein, 71 aa, Zea mays
  Clone ID: MRT4577_59689C.1.pep
LEAIFGIKRTTKIFLASFNTWNEHINVSYYTHHGTSAWLYYGTIHYGAEKYWYELTACEKQTTLWQPHMLG

SEQ ID NO: 325239 - protein, 511 aa, Zea mays
  Clone ID: MRT4577_5968C.1.pep
MADSPNPSSGDLPAGAGCSPEKPVLADRRVSALAGAGARYKAMSPARLPISREPCLTIPTGFSPGALLESPVLLNNFKVEPSPTTGTLSMAANMNKSTHPDILPSPRDNSADSGQEDGGSREFEFKPHLNSQSSATAVNNQNHHDIPMQNHGSNHASPSSNLMTENKPLCSRESSHTANVSSAPNQPVSIVCPSDNMPAEVGTSEMHLINSSENAAQETQTENVAEKSAEDGYNWRKYGQKHVKGSENPRSYYKCTHPNCEVKKLLERSLDGQITEVVYKGHHNHPKPQPNRRLAAGAVPSSQAEERYDGVAPIEDKPSNIYSNLCNQAHSAGMVDNVPGPASDDDVDAGGGRPYPGDDSNDDDDLDSKRRKMESAGIDAALMGKPNREPRVVVQTVSEVDILDDGYRWRKYGQKVVKGNPNPRSYYKCTHTGCPVRKHVERASHDPKSVITTYEGKHNHEVPVSRNASHEMSTAPMKPAVHPINSNMPGLGGMMRACDARGLHQSIFSGS

SEQ ID NO: 325240 - protein, 52 aa, Zea mays
  Clone ID: MRT4577_59690C.1.pep
THTTFFAAEILLPNFTGYKNFTLFYQSDYKSINLKYMLAQVTILNKKNRRST

SEQ ID NO: 325241 - protein, 39 aa, Zea mays
  Clone ID: MRT4577_59691C.1.pep
KKHSPLMLKACFGTWWWPSGFAFKLKLGNLKNRPCVFQL

SEQ ID NO: 325242 - protein, 44 aa, Zea mays
  unsure (1)..(44): unsure at all Xaa locations
  Clone ID: MRT4577_59692C.1.pep
XXXPXYLDFXIXLXDLXNFXFFLGNKLTNEXRSFAFSVXLNMKS

SEQ ID NO: 325243 - protein, 120 aa, Zea mays
  Clone ID: MRT4577_59693C.1.pep
MESRALALVSVLFLSLLRAATATTAGTADGTQWWGYVEVRPKAHLFWWYYKSPQAQRVSTPTKPWPTVLWLQGGPGASGVGVGNFLEVGPLNGDMKPRSSTWLHKGNLIFVDKPVGVGYS

SEQ ID NO: 325244 - protein, 110 aa, Zea mays
  Clone ID: MRT4577_59694C.1.pep
MGDAVNLLESLPLDVLIKILCKVNYSDLRHLLLVSKQVKEATIYARELHFKFSTPSAKSVFRDEETGGDDDNCPCAPKQHRAAKSRLRSQNLESIAVNLSASFESMLPEV

SEQ ID NO: 325245 - protein, 66 aa, Zea mays
  Clone ID: MRT4577_59695C.1.pep
LRCPLRRSLTSCWTAPPSIAPARAPSYRRAAFSWSGRDASPRIPPPLPPREASRASVGGGWSPFEP

SEQ ID NO: 325246 - protein, 64 aa, Zea mays
  unsure (1)..(64): unsure at all Xaa locations
  Clone ID: MRT4577_59696C.1.pep
TFQRVALLVGLVARHLCIGGVFGWVDSVSVGMMSWPGYGETKSPISVREVXPGRPRGTHSXXLN

SEQ ID NO: 325247 - protein, 84 aa, Zea mays
  Clone ID: MRT4577_59697C.1.pep
VTSHPRSPITPVLPSAIHFSAPVHAHPIAPELATGAFGVPPLVRDVVPKLSELHVRIEKKFLTELKKMGFRQVDLNRGNPQTKQ

SEQ ID NO: 325248 - protein, 60 aa, Zea mays
  Clone ID: MRT4577_59698C.1.pep
MARDQGEHRQRDVRPTTAVKMARPSAGKRERRRAAQKKGQGRRPSNRGEREGLERGTGRE

SEQ ID NO: 325249 - protein, 75 aa, Zea mays
  Clone ID: MRT4577_59699C.1.pep
DQHCSRIRARALEPASQVPIAALALVSERSGLVGACGAPAVPSVIRGCHQHCGPHTRMSYHLQTRNPCQANPSAP

SEQ ID NO: 325250 - protein, 73 aa, Zea mays
  unsure (1)..(73): unsure at all Xaa locations
  Clone ID: MRT4577_5969C.1.pep
PISRLWRWAGLALFLRVVVVVSILPLVEATRASRALHTLALHLVGFRHVLGXSPHSISGGRGRXXRIAGCALA

SEQ ID NO: 325251 - protein, 73 aa, Zea mays
  Clone ID: MRT4577_596C.1.pep
YPFGSHLCPMSYAQSELVPSMVRLVEHICLSQHAFHSSACMHATDLCVSPCQLSPTQMHTLIYHASRLKTRLS

SEQ ID NO: 325252 - protein, 80 aa, Zea mays
  Clone ID: MRT4577_59700C.1.pep
CFCSPPLLVRVCITWHSFLYIPIWLYLEREEEVEVPEEKTTPPLESQAGSRLYFNICGPETNSSINKGKPRCMQPLSLCF

SEQ ID NO: 325253 - protein, 74 aa, Zea mays
  Clone ID: MRT4577_59701C.1.pep
LDAGGHWRAVHAEASAQAGAISAQSRAGGGAQCSYPTHRFRTQVSLYYALIAKLLHHYLTFRLPSLRGRGLQHG

SEQ ID NO: 325254 - protein, 89 aa, Zea mays
  Clone ID: MRT4577_59702C.1.pep
NKNRRRLCGVLLNIERFQKLWMEKKVKLRSVLVSCLIEDFNQRLSSFPQTLNQVDNGTLINRVIRKTSQVDPKRGLIRRMMLMDEPEDG

SEQ ID NO: 325255 - protein, 75 aa, Zea mays
  Clone ID: MRT4577_59703C.1.pep
AQELYSPFRGLKIELETGRKPHWTLPFKLAEMGRCPMNLSSMQWSCVLRVSATHALHYVAHMLTATQVHSTAQRH

SEQ ID NO: 325256 - protein, 99 aa, Zea mays
  Clone ID: MRT4577_59704C.1.pep
PSLHNREGTAIRIDYTQLRISNHTTYVALNPCICQLATGVLKTRSGSRKPRAQIHHRPASCHRGYTLSRHRSTPISCYLILALVCPRQSLPCPISRVCG

SEQ ID NO: 325257 - protein, 87 aa, Zea mays
  Clone ID: MRT4577_59705C.1.pep
RTASIFFLESIRFLFALGILVGARSIVGVHHGCCRGCMPCHKSSTCFGVGDAVLRWNDVAIVHFLYLALSLKNTSGGVPSLFVICAP

SEQ ID NO: 325258 - protein, 100 aa, Zea mays
  Clone ID: MRT4577_59706C.1.pep
PGSHPVAQLDSVHTPARPLCLFSLLGRVCSAAESDPLICTAHLHAVRPNSQSVVVASRRPCSDSISLARSRLDLVVVPRVIKDPKNRVKTKLAARYSPSV

SEQ ID NO: 325259 - protein, 102 aa, Zea mays
  Clone ID: MRT4577_59707C.1.pep
TLAVNDDRPASFLETNVCKQAQPSSHLDKSVGSQGQYEAGTRAALEETDGAVRRESLRHSNVILSMTIANPKPGYVDYAVCANACKTHTEGRGNAASDSPDC

SEQ ID NO: 325260 - protein, 72 aa, Zea mays
  Clone ID: MRT4577_59708C.1.pep
LNRIRPIASRTSDKPRTTRTAGLSNTNHIHQPFCSGILTTKFYKLQKFYIILSEWLQKYKFEIYASSNDHPQ

SEQ ID NO: 325261 - protein, 93 aa, Zea mays
  Clone ID: MRT4577_59709C.1.pep
LGRLLLSAARRRVVCRRVVKHVIPCSTPTSPARSKHDLVVDPRCAHDVLVDFDDLISNFVLLMSTLGTPRRTRPRKSPSRRQSVRQQEIPRIG

SEQ ID NO: 325262 - protein, 49 aa, Zea mays
  Clone ID: MRT4577_5970C.1.pep
VFPLYLVLLIVGRFLVLLFFSGRHCACVRPCGSASKFSQIVYMPRIYSN

SEQ ID NO: 325263 - protein, 46 aa, Zea mays
  Clone ID: MRT4577_59710C.1.pep
EESKAPSFLLNANPRYVLQMNAPYASLTLRLSPGPRSHLIYSATSR

SEQ ID NO: 325264 - protein, 228 aa, Zea mays
  Clone ID: MRT4577_59711C.1.pep
AALRLAFASDAVFFPCWEPWSSHTCFFPCRSPPRCPTMLAHGRRSQDQPPSAVRLSAWALSLTRAQLLARVSGAQPPSSLCSRRTPSLSQELEFLYFFPQPRAVLLLCSLVAMAMAAELPCRGFQLPRRARSVPSFPAVTPPWCFLALSLPQLPFVVVTSRRPCSDSISPARSRLDLVVIPCVIKKSQESGEDEASNAIFLKRSTNGLDQKIATDLADSCHLLKRCDN

SEQ ID NO: 325265 - protein, 262 aa, Zea mays
  Clone ID: MRT4577_59712C.1.pep
MADAYWRYAAAAPRQQQQQQQPPPSAGGGVAHPGMGVGAPQMAPAGGQQQPMKRPRPTEFSDVPGAPDTAGYYPRDEERAGYRAARDTESLNASYERFLRTGQIQSFGGGHAGEPIRPAVGGNAAYPVDDRSMMAARGMDSRNIGFVGGMPEPPLPPDASNTLYIEGVPSDCTRREVSHIFRPFVGFREVRLVNKEPKHPGGDPIVLCFVDFAEPTQSAIALDALQGYKFDEHDRNSPNLRLQFARFAGPKGNSGPGGRGRR

SEQ ID NO: 325266 - protein, 117 aa, Zea mays
  Clone ID: MRT4577_59713C.1.pep
MARLFLACMLVLLLGIATAARTTADDPPAGDCDQDLQDLMSSCQQYVHFPADPKIPPSPACCSVVQRVNIPCLCSKVTPTVEALICMDKVVYVASYCKRPLQPGSTCGSYHVPGALA

SEQ ID NO: 325267 - protein, 124 aa, Zea mays
  Clone ID: MRT4577_59714C.1.pep
EKHFGCIGEKHDATIRMHARPIASSQILPTYYGNSVLYRWHTYDSHGILLVVSYKYVSGLVYLQKIFITAQFPMMQFKHDSLSQFILHILLYGGQLIIKRRATHRRRCHTLTIGQLIMVTHLFT

SEQ ID NO: 325268 - protein, 53 aa, Zea mays
  Clone ID: MRT4577_59715C.1.pep
LLRKTMKIKNIHYNLTEDQWKGKNLSQVVLAGQLLLMHSIWIRICYFRSCKFD

SEQ ID NO: 325269 - protein, 48 aa, Zea mays
  Clone ID: MRT4577_59716C.1.pep
ISPLAQKAAHGSCAAPFAPTTAVGDVVAAEGGTATNCPSPYPATHHRP

SEQ ID NO: 325270 - protein, 80 aa, Zea mays
  unsure (1)..(80): unsure at all Xaa locations
  Clone ID: MRT4577_59717C.1.pep
VKSERIGSEVDSESQSMAXVAAALRAVGYGFLRMQERRLKLSLQMXSLCMQSEMKRTQTXMLDAQQLFLEAFLCQRLQLS

SEQ ID NO: 325271 - protein, 116 aa, Zea mays
  Clone ID: MRT4577_59718C.1.pep
DSSYQDDLQILETSRGSAQGQTATHYGSPTRSSSRGGRAVSAQRRTHRKHPRQGQLHWRVSQRQKGMSSAPWPCPRELPHRATAHFPPPSSPPSAPLSSNGNESFSSAGGNWRTRA

SEQ ID NO: 325272 - protein, 47 aa, Zea mays
  Clone ID: MRT4577_59719C.1.pep
LCESCDASGENASGTRACRRTKEHHQASCFGCHSWTSTVLYIVSSWS

SEQ ID NO: 325273 - protein, 65 aa, Zea mays
  Clone ID: MRT4577_5971C.1.pep
SIKSFIFVHSIVRLISFDLFCPLIVFFLFLLISSLSTHLIIKNEEFLPACIFYSENTLGSSMRCM

SEQ ID NO: 325274 - protein, 39 aa, Zea mays
  Clone ID: MRT4577_59720C.1.pep
TLTRLLIIVNKIIIVHLLILFIKHLIQASSFKIIIYLKF

SEQ ID NO: 325275 - protein, 69 aa, Zea mays
  Clone ID: MRT4577_59721C.1.pep
VILLTIFCRQILGPSIAVLSACLCILPVQSVINGGNKDMIEPRVHCIYSMQDVSRLKQEELLERDTPGV

SEQ ID NO: 325276 - protein, 252 aa, Zea mays
  unsure (1)..(252): unsure at all Xaa locations
  Clone ID: MRT4577_59722C.1.pep
MNGKGGDGGSDHDDMDMRKPLLVNTGSWYKMGSSLTAGSSSMAIICESHVSALLCTLIVALGPIQFGFTGGFSSPTQDAITRDLGLSISEFSVFGSLSNIGAMVGAIASGQMVEHVGHKGALMIAAVPNILGWLAISLAKDTTFLYTGRLLEGFGVGIISYTVPVYIAEISPRNKRGALGCVNPLSVTLGXVLAYVLGMLVPWRMLALIGTLPCTILIPGLLFIPESPRWLAKMNKMDDFEXSLQVLRGSET

SEQ ID NO: 325277 - protein, 64 aa, Zea mays
  Clone ID: MRT4577_59723C.1.pep
HPGGRCVCLLHMAGRGASFSWGCHGDHWFFHQNCIFIHRLPSPSLTVHNQTFKQNNLFKNLSCV

SEQ ID NO: 325278 - protein, 430 aa, Zea mays
  Clone ID: MRT4577_59724C.1.pep
MAMLSRAASSAARRPLLPPPRLLAVRAMASSLFGHVEPAPKDPILGVTEAFLADPSSDKVNVGVGAYRDDNGQPVVLSCVREAERRIAGNLNMEYLPMGGSVKMIEESLKLAYGEDSDFIKDKRIAAVQALSGTGACRLFADFQKRFLPDSQIYIPTPTWSNHHNIWRDAQVPQKTFTYYHPESRGLDFSGLMNEIKNAPDGSFFLLHACAHNPTGVDPTEEQWREISHQFKVKKHFPFFDMAYQGFASGDPERDAKAIRIFLEDGHQIGCAQSYAKNMGLYGQRAGCLSILCEDEMQAVAVKSQLQQIARPMYSNPPVHGALVVSIILSDPELKSLWLKEVKGMADRIIGMRKALKENLEKLGSPLSWDHITNQIGMFCYSGMTPEQVDRLTNEYHIYMTRNGRISMAGVTTGNVGYLANAIHEVTKPN

SEQ ID NO: 325279 - protein, 66 aa, Zea mays
  Clone ID: MRT4577_59725C.1.pep
MFRPFVLLSPSLNHIRFLSGPAHFLISCVQYLFFLISVISIPMNMYASTAFRGSVFREDLLSDRSR

SEQ ID NO: 325280 - protein, 153 aa, Zea mays
  unsure (1)..(153): unsure at all Xaa locations
  Clone ID: MRT4577_59726C.1.pep
MLQRPHPACSQADLCYVLQTNLSPWQYLVYENQVVKPYSIQHAKRDHLLPXNTGSCIHTSYLLQXLPLVHLLXQNIMAHQLQQLVLTNLAAYSQQQQIVPFNQLTAXNSASYLQQQQLPISQLPDAYPRQLPPFNQLAAPNSPASLQQQQLLP

SEQ ID NO: 325281 - protein, 91 aa, Zea mays
  Clone ID: MRT4577_59727C.1.pep
SCVIHMKKDNENTIRLARRCRALVPCMQHSSGQCRGHESRHDRDALSAGGQDDGMKNLMSEMIGVLIDKPKSMTLSRDIPRSPPTGSILCC

SEQ ID NO: 325282 - protein, 72 aa, Zea mays
  Clone ID: MRT4577_59728C.1.pep
MEKRAVLIGVPGPRFPGKSFHRGFRRPPGIFWRGHRFFNPPPKRKKKKKKKKKKKKKKKKKPKKKKKKKKKY

SEQ ID NO: 325283 - protein, 116 aa, Zea mays
  Clone ID: MRT4577_5972C.1.pep
MSQLSPAGHMAATLLLILLASAAAAAVSADQQVSACQNDIDALWRSCKQFVQKEGPKMPPSEDCCKTIKALDAHASCICDYVGSPDARNKLDLDKVFFVTKQCGVTVPKGCGSKQD

SEQ ID NO: 325284 - protein, 77 aa, Zea mays
  Clone ID: MRT4577_59730C.1.pep
NPHYLRYPHTTIHLHNHKTNNNIRSMAYANVLKTYFLTNILQYCTTKQLTRLKNTTDINLILATDYVYKLFYTPKSI

SEQ ID NO: 325285 - protein, 97 aa, Zea mays
  Clone ID: MRT4577_59731C.1.pep
GLVYSSQQSMRFYVSKGLGKRFLGGAFFEYSVGKRMTVVVITWFQMAQQSHQTHCCGRVRFCGCFLYCLWSSNTSNVVCRVSFLVRGSQFRKVPCVK

SEQ ID NO: 325286 - protein, 140 aa, Zea mays
  unsure (1)..(140): unsure at all Xaa locations
  Clone ID: MRT4577_59732C.1.pep
RPGATKRTAIPAQKLAVHTTDAHEPPFVSSLRTLCLAXMPCVSKEESKAIHAKTSGPAAPSHITKPGASRNAQTHSTKDVQXEWASACGGTAKQTILIPKGDFLVGQLYFTGPCKGDATIQTYGNLLATTDLSPHKDHGN

SEQ ID NO: 325287 - protein, 61 aa, Zea mays
  Clone ID: MRT4577_59733C.1.pep
ENCKFVRLNLCRGTVVVEILFSNILVFIPRKKGFALPRYKVAPFVPYSSPMNPVGFHIYWR

SEQ ID NO: 325288 - protein, 140 aa, Zea mays
  Clone ID: MRT4577_59734C.1.pep
MIILMHASVLSTLRHPNLVTLIGTCPEAFGLLYELFPNGILEDCLGCKNNTRPLTWQTRTRIIGEMCSALIFLHSNKPHPVVHGDLKPDHILLDANYSSKLGDFGISRLLIQTNTCSTNFYRTTNPRETFSYMDPEFLTT

SEQ ID NO: 325289 - protein, 109 aa, Zea mays
  Clone ID: MRT4577_59735C.1.pep
KPGKGVFWGKPLVSFGVGVFWPRFCGFFNPFPFLFFGRLFRGSFPPHIFFSPPLFPKHGWWGGKLNSILFWPPGFKRGPRLAFFLLKKIINFGGFPRIYFLFFTFLGAG

SEQ ID NO: 325290 - protein, 89 aa, Zea mays
  Clone ID: MRT4577_59736C.1.pep
IYLLHSLSVRRLFFDHLFFSFNELLLSNFYLLGTRILNDLLVLLAKDCQKSGGVLSGGADLFMQWRIRGNGRHMQELQETYVVWLEILS

SEQ ID NO: 325291 - protein, 169 aa, Zea mays
  Clone ID: MRT4577_59737C.1.pep
RPLDDQPLFRYSLRLSISSFVHQHRLVVDSVLVLRIAWLIHVPFPQLTRIHEIGSAFPIQAIYRALREYRAASFVFTRFLVFLLTRGTTTTQESDVYRAAPATRDANRWNRRRDWELKPSEPRGRTGEQKTCEYKTGKTMGSTIRETATVESEQSVGEFDEHDHSRELT

SEQ ID NO: 325292 - protein, 86 aa, Zea mays
  Clone ID: MRT4577_59738C.1.pep
LGPWLCLFLLVEVCLFWSSALLYLFPPFAPCLVLRSSECLVCRALHVLLVWGGGVKPLWFHQAPPLFLWAVGAMNWVRSSLEPNSE

SEQ ID NO: 325293 - protein, 128 aa, Zea mays
  Clone ID: MRT4577_59739C.1.pep
TTTTWRSSFCSDTCFVCPSSVSSVSIILWRNSRATTSCGRLSSDPPYHVVNKRTTKLCELAKISRYTKIIGSASRRTPKTTTAMTQSAETCYKDLKLLATASSRSEGASRQWKRGERRPWKVTAVEKQ

SEQ ID NO: 325294 - protein, 119 aa, Zea mays
  unsure (1)..(119): unsure at all Xaa locations
  Clone ID: MRT4577_5973C.1.pep
QARRSFRLVVARIDDEAMPILVDPLXRRMIVYLDFTNSLAHDERRYAIYDXDFATXKNCHKXDLLSVLTGHPDTXRTRRKMLCAXSNDQLRTELDGITREIRATDPNNMTLDIVKNRTS

SEQ ID NO: 325295 - protein, 197 aa, Zea mays
  unsure (1)..(197): unsure at all Xaa locations
  Clone ID: MRT4577_59740C.1.pep
MREQRGRRAARAHGQQRRARRAASWNWSVAMGEVEHGQRASTKELARYTGRTGGHQGERPGARDXREPAMETEGAGHDELEYRGHGTEQIERREMELGSGELGWASRXRREQRQTAMDGAGEKEPRALRERSRGGGGRGHGSGRTERRPSSGHEGSSGHRGTQGAQEAPSGGDAQGRIEHGRIFFSRLPAGPRRGYP

SEQ ID NO: 325296 - protein, 65 aa, Zea mays
  Clone ID: MRT4577_59741C.1.pep
AAEILLPNFTGYKNFTLFYRSDYKSISLKYIPSSLRSIEELLRLIRRSSPPALNNIISSTKLYPG

SEQ ID NO: 325297 - protein, 156 aa, Zea mays
  Clone ID: MRT4577_59742C.1.pep
MHSRPRSLRQGQVHVGPITWEVLPQQGAGARILFTAHGGEHLRYALQLLFPAFNNATEYEALIHGLNIAISLGIKRLMVYGDSLVVISPINKEWDCSTDSMGKYCTAVRKLMTLNFDLALPLKLKPRLTLYWSGPTNKFQITQKLQKYGECLLMVR

SEQ ID NO: 325298 - protein, 89 aa, Zea mays
  Clone ID: MRT4577_59743C.1.pep
MLPILLIKFLAFLFQIRHLLQYATTRQSNPRFTHPILHDLCTLGFAARTVIKSFCNGEPTAVKSIFSRFLLHVYPGETLSTEMWLDGQK

SEQ ID NO: 325299 - protein, 102 aa, Zea mays
  Clone ID: MRT4577_59744C.1.pep
LLAQRVVELPHHHRLCHKLVSHRSAPDCGHVHRIRQRFVVDSTIVASRVVEPVVFPVLYSRPVSCSPACPLGSLDFKIPISSSTSPRLSSSVVLVTIPYCAY

SEQ ID NO: 325300 - protein, 112 aa, Zea mays
  unsure (1)..(112): unsure at all Xaa locations
  Clone ID: MRT4577_59745C.1.pep
MATSSKPAAPVDPMVVLAHEFPEVSFDYDERDVALYALGVGACGDDAVDEKELHFVYHRDGQPHIKXFDASLLLHGQQYXIEIYRPIPSYASVVNRVKVAGLHDKGTCSHSS

SEQ ID NO: 325301 - protein, 141 aa, Zea mays
  Clone ID: MRT4577_59746C.1.pep
MYVAAGIDLFDSTYIYQLTMGGFALIFPVDMVEREMQNGVLNTTDGDSTKINLRATTYRKDTSRLVDSCNCFTCQNHTRAYLNHLLNVHEMLAQILLEIHNTHHYLRFFHSIREAIKVGEFDLFRQEFVKKRRTHFAAVVV

SEQ ID NO: 325302 - protein, 109 aa, Zea mays
  Clone ID: MRT4577_59747C.1.pep
YFTRSIYKRDGFQGRQCIEGFPSNFYKPNAHFTRLKVCKNNLKTQGRGCMHRGLSGRNTRLVLLDDVHLTIILVLILVSSIHLPDCPSTSSCGLARAWDRLGSSSASRD

SEQ ID NO: 325303 - protein, 323 aa, Zea mays
  unsure (1)..(323): unsure at all Xaa locations
  Clone ID: MRT4577_59748C.1.pep
MATSSKPAAPVDPMVVLAHEFPEVSFNYDERDVALYALGVGACGDDAVDEKELHFVYXRDGQPHIKTLPTFVSLFPNKNSNGLGFVDVPGLNFDASLLLHGQQYIEIYRPIPSYASVVNRVKVAGLHDKGKATILELETTTSLKESGEILCMNRSTIYLRGAGGFSDSSQPYSYATYPAYQVSRISIPNSAPSAVCDDXTKQSQALLYRLSGDYNPLHSDLDIAQLAGLFFLSTCPXSICGNVDNLRTRFTHPILHDLCTLGFAARTVIKSFCNGEPTAVKSIFSRFLLHVYPGETLSTEMWLDGQKVHYQTKANDILTFIPF

SEQ ID NO: 325304 - protein, 127 aa, Zea mays
  Clone ID: MRT4577_59749C.1.pep
MVAGRGHGLPISHIARLNRASRAIPCGGVRPTRPPTRPPTRPPTRPPTRPPTRPPTRPPTRPARFRLPRPCARRGAPARIQSCTQPLFIFLLSSLRRTAQGRAPSSAVSSSPCSLLLARSSSLIAAP

SEQ ID NO: 325305 - protein, 75 aa, Zea mays
  unsure (1)..(75): unsure at all Xaa locations
  Clone ID: MRT4577_5974C.1.pep
GATTAISCHEXGLELIYQSKTXGPXDMDFISLIERNIQTPGRASNQCQRSASKSKLSNVHHTHTCLIASNMYPQM

SEQ ID NO: 325306 - protein, 187 aa, Zea mays
  Clone ID: MRT4577_59750C.1.pep
CAGKATILELETTTSLKESGEILCMNRSTIYLRGAGGFSDSSRPYSYATYPANQVSRISIPNSAPSAVCDDQTKQSQALLYRLSGDYNPLHSDPDIAQLAGFTRPILHGLCTLGFAARAVIKSFCNGEPTAVKSIFGRFLLHVYPGETLSTEMWLDGQKVHYQTKAKERNRAVLSGYVLLQHIPSSL

SEQ ID NO: 325307 - protein, 69 aa, Zea mays
  Clone ID: MRT4577_59751C.1.pep
ETRFCARKLYIYIRVSKESPFGIVLCLTVFVHTTSFAVVCANPPTSCLVILRFSSNSSVLFFLWPNQKP

SEQ ID NO: 325308 - protein, 81 aa, Zea mays
  Clone ID: MRT4577_59752C.1.pep
GSHPDLGCRAAIKSPLSGDITAIRIDLLQLRISNHTSYVALRSCICLPFPRILYCMNRSAPLESAPDVLGGPSPRGYVRLE

SEQ ID NO: 325309 - protein, 72 aa, Zea mays
  Clone ID: MRT4577_59753C.1.pep
ILTGLKGMGGNSLGKRPTNLEPHTWVLQKHGDNRIFLPVPVFFSRKGPTTSVKNKVICLPPLAREDCPGALN

SEQ ID NO: 325310 - protein, 96 aa, Zea mays
  Clone ID: MRT4577_59754C.1.pep
ERGQVYERTKLKEQSVTRRHHRYPKGLQHQIYTTECKRSRRPDKRARYATSTATHFSVISLIRLNTILSTGYGASPRPARDGAQRFGFLHRSPEEG

SEQ ID NO: 325311 - protein, 163 aa, Zea mays
  Clone ID: MRT4577_59755C.1.pep
MIWLDAGLLRVALVLIAAAATWAAALDDPAGLLRRAKEAEFMDWMVGVRRRIHENPELGYEEFATSELVRRELDAMEIPYRHPFAVTGVVATVGTGGPPFVALRADMDALPMQESVEWEHKSKVPGKMHGCGHDAHVAMLLGSAQILHEHRDKLEGTCSPSFS

SEQ ID NO: 325312 - protein, 97 aa, Zea mays
  unsure (1)..(97): unsure at all Xaa locations
  Clone ID: MRT4577_59756C.1.pep
LRSVAANILLVVNIFGGHXIEDELHDXVPDAIRSIRTADIQAWTLAXDKLDTAVSTRYSCQLHDTDMAHIVIAHNSSASCHTSLVEALATTKELTAA

SEQ ID NO: 325313 - protein, 73 aa, Zea mays
  Clone ID: MRT4577_59757C.1.pep
PPRGGKKFKPIGKGNNRGYPHLGKFCFPWGKPQNLKCLLFGKIRFICFWAPKTTGDGCLFPSWVEKKKEGFFF

SEQ ID NO: 325314 - protein, 107 aa, Zea mays
  Clone ID: MRT4577_59758C.1.pep
AAAASLFFIWGLDLRVCGWVKQFAKIQNEKGQNMDLYIPRKCSATNRLITSKDHASVQINVGHLDELGRYTGTFSTFALCGFVRAQGDADSALDRLWQKKKAEVRQQ

SEQ ID NO: 325315 - protein, 67 aa, Zea mays
  Clone ID: MRT4577_59759C.1.pep
ISHALWFWIHCVPHTEVFHAYSVVDDIFFMKILLINMCVSLYDLLHISFNYASWSLIAYASITCIVS

SEQ ID NO: 325316 - protein, 131 aa, Zea mays
  Clone ID: MRT4577_5975C.1.pep
RTRGVRGQDEFEHEMSQLGNLSHPNLVAFQGYYWSSSMQLLLSEFVASGSLYDHLHGSHPHAFSESSSRGAGGELSWEQRFNVALGAARALAYLHHDCRPQILHLNIKSSNIMLDGKYEAKLSDYGLGKLL

SEQ ID NO: 325317 - protein, 254 aa, Zea mays
  unsure (1)..(254): unsure at all Xaa locations
  Clone ID: MRT4577_59760C.1.pep
MESFLPAALGELMARHINFVINKCFKPHTMAMEESLQRALLRAQVIDEEAMGRHITNQAMIQQLGMLRDAMHRGYYALDAFRYQPHCGEDCNDPAIRGMLSLSKVPSPKEPYFFSQTAQSRVQLQDALDGLSSMIVDLNESVMFLMSYPRLYRQPYSMHILLANCMFGRHMEAELVVKFLLRXHPLTXSRELEVMPIVGPPRVGKSTLVAHVCKDERVCDYFSEILWLCESDFTSDELADRQGCGMKRQNVCQT

SEQ ID NO: 325318 - protein, 51 aa, Zea mays
  Clone ID: MRT4577_59761C.1.pep
RLSISHWWWWWTGHGESGDERLRVQVPSPIKRRTEWAWRVVERNDMRAVFL

SEQ ID NO: 325319 - protein, 96 aa, Zea mays
  Clone ID: MRT4577_59762C.1.pep
MASLLSLYCGDAAGGRMTMSRGRGTAPAPVRRLLTKLRSSFIRPSAARPMTKAAAMFAYYLRSYSQNFDDCVISSSAPAATARAYLRLQYDSASSV

SEQ ID NO: 325320 - protein, 245 aa, Zea mays
  Clone ID: MRT4577_59763C.1.pep
MEDASGSSSSPAVLRNKYWVLRHGRSVPNERGLIVSSLENGTKPEFGLAPQGVEQARAAGEKFRKELDEIGVPVGSVKIRYSPFSRTTETARVVAGVLGIPFEAPSCEAVLGLRERYFGPSYELLSHDKYADIWSVDEAHPCMAPEGGESVADVASRFSAVLLSAETQFHGSAILIVSHGDPLQIFQAVLSGAKENMSFLDDLTNLKVKDTDDLTNLEVKDTMVASILSQHRKFALITGELRRVV

SEQ ID NO: 325321 - protein, 226 aa, Zea mays
  Clone ID: MRT4577_59764C.1.pep
MEDSSGCSSSPAVLRNKYWVLRHGRSVPNERGLIVSSLENGTKPEFGLAPQGVEQARAAGEKFRKELDEIGVPVGSVKIRYSPFSRTTETARVVAGVLGIPFEAPSCEAVLGLRERYFGPSYELLSHDKVGFLLWIQLYCFSRNERTFLSYEHLLRYLIQVQFYNMNWSVKSKWCIFIYNLRIISPSTISRLCSSKMLAMGTHYKSFKLSSVEPRRTCLSLTISPT

SEQ ID NO: 325322 - protein, 239 aa, Zea mays
  unsure (1)..(239): unsure at all Xaa locations
  Clone ID: MRT4577_59765C.1.pep
EHYWVLRHGRSVPNERGLIVSSLENGTKPEFGLAPQGVEQARAAGEKFRKELDEIGVPVGSVKIRYSPFSRTTETARVVAGVLGIPFEAPSCEVXLIEGLLQAVLGLRERYFGPSYELLSHDKYADIWSVDEAHPCMAPEGGESVADVASRFSAVLSSTETHFHGSAILIASHGDPLQIFQAVLSGAKENMSFLHDLTNLKAKDTDDLTNLEVEDTMGASILSQHCKFALITGELRRVV

SEQ ID NO: 325323 - protein, 72 aa, Zea mays
  Clone ID: MRT4577_59766C.1.pep
QDLALATLHQEIKPGSQLPKGDLQLHNSYDISKTSAASAKDYDVLRPTISLFSPSSLATSFFSAALAKTRMY

SEQ ID NO: 325324 - protein, 275 aa, Zea mays
  Clone ID: MRT4577_59767C.1.pep
CPPPRAFLLPPRIPRTAPSPAPRTAPPARAPRTAPSHARPLPSPSPSPSTALPSVMAGSTDAYQSGTHYLSMEGEAPTICRWKVIDAVMVCGQHRRHPRPTSRSSRPPSPRESAVVVPDRLPRPLGHRPLVACPADGKAWRVGAAVWEVGRWLPRCRIAAATARARCSISARPSTMKASRRSVTIPRICRWRRAADGQHLRPPASTRVSTPRRQKTPAPPSPSLPSPALHDCKQRQKGCFRDMEPGRIPWRNSLQWKYRKRSSLMASFQLVESQR

SEQ ID NO: 325325 - protein, 61 aa, Zea mays
  Clone ID: MRT4577_59768C.1.pep
TGQNRARRLHGEPRNRLRAGGRGPRAQSEQQGDGAQERGKQGLGASSARRVRSSTASRGEA

SEQ ID NO: 325326 - protein, 77 aa, Zea mays
  Clone ID: MRT4577_59769C.1.pep
IPCLVPTGWYPPLLMGTSQPTNACPPPPKKNPPAPINSIFATQLLESLGKKIGTNLCFPKPTSMVRKPLEWYYRVQQ

SEQ ID NO: 325327 - protein, 198 aa, Zea mays
  unsure (1)..(198): unsure at all Xaa locations
  Clone ID: MRT4577_5976C.1.pep
MAGRRQAVWCLVVIALAVMLAVASAQPVQPRVGGPGKKGAKMPPGKFETVTFAKNNKRKYEVACTDNRGPPCVVSCPKTCPNKCLAFCEYCMTFCMCDMFPGTSCGDPRFTGGDGNTFYFHGKKDQEFCIVSDKDLHINAHFIGNHNPNMKRDFTWVQALGVTFVHGGADHRLYVGAKKVVEXDEEEDHVQITLDGVP

SEQ ID NO: 325328 - protein, 486 aa, Zea mays
  unsure (1)..(486): unsure at all Xaa locations
  Clone ID: MRT4577_59770C.1.pep
GPHGIGDLGDEALAFLHWLRDAGCTLWQVLPLVPPGRTAGEDGSPYSGQDANCGNTLLLSLEELVKDGLLMSDELPDPVDTEYVEFDTVANLKEPLIAKAAERLLLSXESSEHNMTASKKIQIYLLVGTLGRQFSSLXFRRWXDNPHLPHNHEMDQVVYTXEHMITIQFLAGGKIYQRKXITWAKVXPRKYAXKTLRISIMGDMPLYAGYHSAYVWANRKSFLLDKNGFPTFVSGVPPDAFSETGQLWNSPLYDWKAMEADCFSWWIKRIKRALDLYDEFRIDHFRGLAGFWAVPSDAKVALVGSWRAGPRNSFFDTLFKAVGRIDIIAEDLGVITEDVVQLRKSIGAPGMAVLQFAFGGGSDNPHLPHNHEMDQVVYTGTHDNDTVLGWWQNLPEEEKKIVIKYLPEAENIDITWTLITAALSSVARTSVVTMQDILGLDSSARMNTPATQKGNWRWRIPSSVGFDSLSPEAAKLKELLALYNRQ

SEQ ID NO: 325329 - protein, 64 aa, Zea mays
  Clone ID: MRT4577_59771C.1.pep
MKIQCDACEGAAATVVCCADEAALCARCDVEIHAANKLASKHQRLPLEALSAKLPRCEEHHPCT

SEQ ID NO: 325330 - protein, 225 aa, Zea mays
  Clone ID: MRT4577_59772C.1.pep
YPRVRPGFPSLRLEGEREREKRERREREREEWETRERLAPDAAPCSLAQQAHRALGRAPWLLLGRCFSLKLSHARVTAFSAPPVLGPRNPLALSHGGAPIPQAPCHGRHLPWKLRPAELPALQPSPNSSLLAELPLPASHGARPYLLSLRLRLAGAPPCAQPCLRGPLLLHPTRLLLCAHARAKLFAHRGSIPSSRARSGSPSARRALPVLCSTMEVAVPSSLCS

SEQ ID NO: 325331 - protein, 72 aa, Zea mays
  Clone ID: MRT4577_59773C.1.pep
SIFNGLTLVILGVVALFTVPLLYRQHQAQIDQYVGLVTSQLSHIKAKIRAKIPGTGTLAPAASVSGSKAKAE

SEQ ID NO: 325332 - protein, 110 aa, Zea mays
  unsure (1)..(110): unsure at all Xaa locations
  Clone ID: MRT4577_59774C.1.pep
MPALGTPTSLAATMGNPEKLLNQIFNLKFTYKSLHRQARKCKKEEMEHKLTVKKAIVKGTMVGARIYTENAIRKLTXLMNYFRLDSGLDAVVARLDTQAMMQVMGKIMQS

SEQ ID NO: 325333 - protein, 110 aa, Zea mays
  Clone ID: MRT4577_59775C.1.pep
PSLHNREGTAIRIDYTQLRISNHTTHVALNPCICQPATGVLKTRSGSRKPRAQIHHRPASCHGGYTLLSPPLHTHFVLSYSGLSLPEARLTHDEACDQLKGPRSSSLHTR

SEQ ID NO: 325334 - protein, 178 aa, Zea mays
  unsure (1)..(178): unsure at all Xaa locations
  Clone ID: MRT4577_59776C.1.pep
GRTRLAGQMIMGSTLELRQQALDRFLAYQXCDFEGXNRAMDGLPATITTXLDPALHKFLPEGTXRDIVXSELCAXETGANQKDALLRIEKLXIINPLLVLRGCRLVILYPELTEMQALSILKAAITMTNNGDQVLPKIINDLVGTPQELRNXVTIIHQDSEKVICNDDKTIVYKGETM

SEQ ID NO: 325335 - protein, 294 aa, Zea mays
  Clone ID: MRT4577_59777C.1.pep
RDLTRPGQALARIPGVFFPAPVLFFSAQDLEPLPWPQARSAPCFSWPRRPCSSSPGRSISPLARSHSFFSLWYASSRVVPWRSIFFSARELCVSQLCSSRVRCSSPLPRLPPCSLREPRAPHGRTWPDLLAEPLFFIFLCVTELGSRPVSSACSAPVSYGVWRPFLSARRVFFIYSPSFQSWCALPARLAGAPCALLAHGVCRAPFLLGRAPTESPMAAPWDLPESASLAARCFFPWHDCPALLDGRAVAQLAELPCRGRRVPARSSAPAARPCCVCRTLLVRARKSFRVEPPR

SEQ ID NO: 325336 - protein, 193 aa, Zea mays
  Clone ID: MRT4577_59778C.1.pep
AERSGAARTHAQGASQARQQGDGRARCRGGRRGWARHGSDGRALGRSQGRDHGRAGRAPGRWGAQGELGCARHGRARQRAPAGEHAQESSAQGSWSLGTPWRPSAASGASRAPSREARRELQGTTTGRRRKTRGHGQRLAASEQRSWARLGKRGAGSSGEEISTCEEKSREKIRKRRREGEDVDSRPASRYPM

SEQ ID NO: 325337 - protein, 134 aa, Zea mays
  Clone ID: MRT4577_59779C.1.pep
ELSARTSLAPSAVRQRQGRRSTTRLGIKAERAERAHWRTGNRTRHMRTDPANSDAESKARSRPGELYYADCFVVWTAVAMHTTSPSHDTTTTRLGHGRDDEQERRVARIPARDLQKNTRATPRTRARCNISSPA

SEQ ID NO: 325338 - protein, 74 aa, Zea mays
  Clone ID: MRT4577_5977C.1.pep
FYRTLQAGNPSKTNRLFRKYKTLRGAGPSTLGAFSTKPAHRLLFLREKKCAPPFSNGLYQKHLLDANTPERQVP

SEQ ID NO: 325339 - protein, 36 aa, Zea mays
  unsure (1)..(36): unsure at all Xaa locations
  Clone ID: MRT4577_59780C.1.pep
GGHAPCGVRRXDERGXTQRAACXLRLHSGPAGXRRV

SEQ ID NO: 325340 - protein, 40 aa, Zea mays
  Clone ID: MRT4577_59781C.1.pep
MASTCKIIFSFGAWWDLTAKVPYDALFILRNTNNPKGGNT

SEQ ID NO: 325341 - protein, 76 aa, Zea mays
  Clone ID: MRT4577_59782C.1.pep
LTRSTHQPAHISLWRILGGKEDIDGGVDVHINRRIEVWNACRENLEFNLRWTRRTIALVILFSLGLRTPLYTSMGS

SEQ ID NO: 325342 - protein, 65 aa, Zea mays
  Clone ID: MRT4577_59783C.1.pep
QSSPGSDKSYEQADSTPAPRPNKASDCSGAAEPSTARNQGHGMLALARITRAQKPERQPSQLGAG

SEQ ID NO: 325343 - protein, 113 aa, Zea mays
  Clone ID: MRT4577_59784C.1.pep
RSRRRADQTKTIRHRPAHGLENGGRRNPSWARRREFDWRAGTERACEGARRGCLWSDHGGQRRAEIGRDGVLSCWKGKSWVSARHVQEIGGTRSDGQRAKWSSAATTASEQRE

SEQ ID NO: 325344 - protein, 81 aa, Zea mays
  Clone ID: MRT4577_59785C.1.pep
RQRGQLTVALLPRRLKRRMIRMHVQGPNRHCESEHTCIPSRARLLLATSVQVQQLHENHSYPPLPTQKWTTATTSRTYARQ

SEQ ID NO: 325345 - protein, 112 aa, Zea mays
  Clone ID: MRT4577_59786C.1.pep
PSLHNREGTAIRIDCTQLRISNHTTYVALNPCICQPATGVLKTGSGSRKPRAQLHHRPASCHGGYTLLSPPLHAHFVLSYSGLSLPEARLTHDEACDQLKGPRSSSLHRDDP

SEQ ID NO: 325346 - protein, 112 aa, Zea mays
  Clone ID: MRT4577_59787C.1.pep
PSLHNREGTAIRIDYTQLRISNHTTYVALNPCICQPATGVLKTRSGSRKPRAQIHHRPASCYGGYTLLSPPLHTHFVLSYSGLSLPEARLTHDEACDQLKGPRSSSLHRQGA

SEQ ID NO: 325347 - protein, 76 aa, Zea mays
  Clone ID: MRT4577_59788C.1.pep
ITGPTHAFKQYLHPLSPLLHHISLTLTKVARPTYHAPLLHPYKIYHHHGPGTGTSTNCSHSCYITRRGHRMRYPLP

SEQ ID NO: 325348 - protein, 213 aa, Zea mays
  Clone ID: MRT4577_59789C.1.pep
MVCVGSKAIRPKGSTINGLGDGALDDSSHKKRTRKDTSEKHGKGGHSSSKGPSVGKPRHVKDRKQRNDDGKKGKGRRKDHHSGSSVMVNPRTKNLNNQDAVPSSDTSKPVQNVLRKRVDPETAKYFMEISNLFDNKEIDFEERSTICANALEETRGKEHELATDAVISHTLQVLIEGCELEQLCTFLRNCIDYFSVIAVDKNGSHVAEAALSH

SEQ ID NO: 325349 - protein, 222 aa, Zea mays
  unsure (1)..(222): unsure at all Xaa locations
  Clone ID: MRT4577_5978C.1.pep
MEGRLFDKPLNPNKLLKEQFVSNLTGSSLLEIAALPTVVPALVVLRKWSSRDNSRKESAKKNDDQVHTVRKDWMQYFSTLGVDYLTVVLPIILVFTVLSEWVFMCAISLVILISIYIMFKRSQFHLKDGFSQLPLLRADISSYRVSVVLVTCLCILAVDFKIFPRRYAKAXTYGSGIMDLGVGSFVVANALVSRQARNIASMSFKAXLLXSISPLLSLGFAR

SEQ ID NO: 325350 - protein, 178 aa, Zea mays
  Clone ID: MRT4577_59790C.1.pep
MAPGGEGKPSTGGGGGGGGVKGGRKRKFLPHGKPVRKGAYPLRPGVQGFFITCDGGREHQATREALSLLDSFYEDLVDGKGSDEKPKNIPDKPLNKKIKFEDTDSSDDEDEDNSGEEADNGNDVEKGETAPSEKQPEVLDTSNTASKDNTALSENKRRCLTPPIPGVRTMTHQSAPAD

SEQ ID NO: 325351 - protein, 159 aa, Zea mays
  Clone ID: MRT4577_59791C.1.pep
MPEAPARAAAAGGGASAPADVDVVTSSGRRKITAHSSVLASASPVLETVLERRLQRLRESGKGGRAVVRIRGVTDDVAAAFVRLLYAGSRHGEGEVEEDVEKYAEQLLVLAHAYRVPWLKLWCQEAIGSRLTPGTVVDVLQLADLCDAAQLHLRCMGLL

SEQ ID NO: 325352 - protein, 93 aa, Zea mays
  Clone ID: MRT4577_59792C.1.pep
LLGHRDLTLGRILKFTAHFRFHWLPKKSSALPGVSPKQATFLAWAVRCWGPRRGKGNNGNRTGSGKTPQSLDFLGGGGHANLRWNTTVGHKGG

SEQ ID NO: 325353 - protein, 78 aa, Zea mays
  unsure (1)..(78): unsure at all Xaa locations
  Clone ID: MRT4577_59793C.1.pep
MGTKHLALCLLVLLSIGMGMDIPAANRILGXGPRGGGGGGVTGGRSGYGGPCVWSGSRYSHGGECASAAGGYGHGGGG

SEQ ID NO: 325354 - protein, 69 aa, Zea mays
  Clone ID: MRT4577_59794C.1.pep
TCHELVTASSMRLILRYLFLTSDLRFQVPTCSSDDTCPHGVDSADTRAREEEQNQHVVQRRRGIPPQLV

SEQ ID NO: 325355 - protein, 154 aa, Zea mays
  unsure (1)..(154): unsure at all Xaa locations
  Clone ID: MRT4577_59795C.1.pep
LLDVVRRLQGLARTTQVDPRRVLLKCQIGETNTHLGXNTYLVGHAVTIVDIGLTCNLYHGRARNLNKTLTSHFSDVARNLWTMVNKAFSRKVIGXSKVMDHVTAMTQYGGVXQEPVAKDVKKEGAKEATKAKEAVELAEEEAXPRXQPMNPLDL

SEQ ID NO: 325356 - protein, 146 aa, Zea mays
  unsure (1)..(146): unsure at all Xaa locations
  Clone ID: MRT4577_59796C.1.pep
YFHDILTTHHLNDGLKHHTELSYRXLKLALAASAXQQPRVQSLLSSLSHLTXLQTVEPQLQQQQQFXPSLYHXLPAENPCPYLQQLLFASNPLALVNVAAYQQQLQMPQRMPVXISLLAMANPAGYLQLLISSPLAAGNAPTYLQQ

SEQ ID NO: 325357 - protein, 147 aa, Zea mays
  unsure (1)..(147): unsure at all Xaa locations
  Clone ID: MRT4577_59797C.1.pep
NVEQETTKPVSQEYGESIAGMNGLLMLTDXKSSIAAIXMLLWNSXDLMMSQAIKSETKRVEYLRTGSDCFTRTMKLLDNSMAVKNTYXRSGGTKSLVSXDVDYYYVYGLSAXLQNVRKCWVRLDDIDXLPSHYDALADYVKEPDVNV

SEQ ID NO: 325358 - protein, 91 aa, Zea mays
  Clone ID: MRT4577_59798C.1.pep
RFQGAEDWEIKHRERTSALMARAGRGLLGDGEMEMSGRGRKQAARGEDAGRRYRETLEAEEGKGSGELRAYKTNRAAAKISRSQVQWLRRG

SEQ ID NO: 325359 - protein, 205 aa, Zea mays
  Clone ID: MRT4577_59799C.1.pep
MGALRQRRTPTSTQGSRTGAIGAMEVELKDDGDLGELQGETGSRGTEEQGLATMGKSFGRRETTEQRASRAGIRRVRMEEFERADWGQGERRAEEGDGCAGEARAKEAPPASREDAEQRSTDSTETQRQRRENGRSMTREGPQSRIEEKGDWASRKGRASSTRGLDAKRHGRSERAGESRVRGGRRTQRAGRRAAGDIAGSAPRV

SEQ ID NO: 325360 - protein, 77 aa, Zea mays
  unsure (1)..(77): unsure at all Xaa locations
  Clone ID: MRT4577_5979C.1.pep
AGXARPRFPLTQHRGSRRRRWHGGRACLGAYRRSASSSVISPRSASLIFILLLIISXXSSFFFLFXSSFSFFFXFFF

SEQ ID NO: 325361 - protein, 366 aa, Zea mays
  unsure (1)..(366): unsure at all Xaa locations
  Clone ID: MRT4577_597C.1.pep
MGNCCSDEVSHAGAHPVGSATAKAASAASAAADRFLRSRGAGASTQIELSLSASNLGDQEYFPKSKPMVVVYSKKRDGTLEEIGRSEVILNSLNPFWTTKISVQYQFEVLQQLVFQVFDIHQQFHEVSEKMLKLEEQEFLGEATCLLSEVITKRDRLLTLKLGVSEHNLPNPNNFGELTVQAEESSGSKAIMEMIFRCSDLEIKDLLTKSDTFLLISGISDSGMPVPICKTEVRKNDLNPRWRPVSLNLQQIGSKENPLIVECFNFSSNGKHDLVGKIVKSVAELENMYHRKNGENFFVPASNAHECHSKEVLKSQLYVEKYVESNRHTFLDYISVGCQLNFMVGVDFTASNGNPRLXDSLHYIDP

SEQ ID NO: 325362 - protein, 46 aa, Zea mays
  Clone ID: MRT4577_59800C.1.pep
MFICIHMHNAFHSGTLINRVMRKKNQVDPKRGLICKLKLMNQPEDG

SEQ ID NO: 325363 - protein, 69 aa, Zea mays
  unsure (1)..(69): unsure at all Xaa locations
  Clone ID: MRT4577_59801C.1.pep
GKTNRPTISKRRHVKFMEGKEXEKNRHVDTVTDDKRIQEVPAMKVTDLRFTETARARIDNANGECHTFN

SEQ ID NO: 325364 - protein, 200 aa, Zea mays
  unsure (1)..(200): unsure at all Xaa locations
  Clone ID: MRT4577_59802C.1.pep
MSDESQLPGLPGFDRNNIQPWTVEVVVSMTLLALVSCGLRLYSRHLKAQKLWWDDYVILFSMAWNLVVVGFIFAMHSSGMGLHADKVPVDQIVMMAKWLVVAEVLYAWNLGWTKLSLLLMYYRIFRVPYFKKMAWIVGTFVFAWVITITFLFIFICVPVAKLWYPTLPGHCINQVGTWIANAASTILXDVGILWLPIPPI

SEQ ID NO: 325365 - protein, 128 aa, Zea mays
  Clone ID: MRT4577_59803C.1.pep
EGNNPSRRESCFTHDRNEPPSEGSRKQLHYERLDAQANLHEVTSMTPLAKNSQCLMDRYRHAFTDRIRTGNKNQTSFYPFVPHEISAIVQLILEHLRYLLTDVRAQSNSAHDNVLLPRSAPNRHLLGA

SEQ ID NO: 325366 - protein, 150 aa, Zea mays
  unsure (1)..(150): unsure at all Xaa locations
  Clone ID: MRT4577_59804C.1.pep
SSCRRCPGSALPSPLWXXPXPPRWVRPLXRAAXRXLFXXXLGXXXXPCCCXPXPAXXRRRCRXXCCXXXXXXAWPXPASXSLPCGXWXXCSWSPRCXXXPRXXCXXWVPRGPGXXPPCAXWLPXLXXXGXLAFPPRPWGPGAGXXSPALG

SEQ ID NO: 325367 - protein, 172 aa, Zea mays
  unsure (1)..(172): unsure at all Xaa locations
  Clone ID: MRT4577_59805C.1.pep
ARSRRRLSFMYADARDVPVLRQTVRHEGAPVTRPSRYQVPAVGMLRXRVLSTYYAACGRGILHAXLCTSXXRLTFCLLRQPXLAWXGHLRXHHXGXIALAWQPVWXSXGXYXXXXQLPXXXXXTRXGGWVSAGTVPPLLXDTXXSVAMXXYPCQVKXXHWTHSVPATELKAL

SEQ ID NO: 325368 - protein, 59 aa, Zea mays
  Clone ID: MRT4577_59806C.1.pep
VILSREGVMNWYHVQGMDHMMFYLGYGDLTDLVSTSNEERDTTAHEDVQYKEGGPVPPK

SEQ ID NO: 325369 - protein, 551 aa, Zea mays
  unsure (1)..(551): unsure at all Xaa locations
  Clone ID: MRT4577_59807C.1.pep
MADPPPVAASASPAQPDQLAAAASVSTPQNPNPLLSPQIPPSPTVSDLSAHISSPQQLDQAAAAADASGGGGSMDYLPRPPQLQAPSPTQAGVGAAGFAQIPRSGSTSRLSTATQLQQYAARMYGGQMSFSGGGGLVGQQQLAGRAPMLGQGQLGMLQGQGNAASAAHFGLQSQMLAQARQKVMAQNTQLNNANTAQVLQGMQPMGVMGAMGMNQTRPNVTIPYGAQQRFAQAQMRPQASQQPALSPQKVPGQGLSRXSINYRIKFTTVWIITKWTDGGNVYASATATAAAMVEANATIHGLTTFPTATISEPAEAPVDAASSAEDRIEPTTTSPXQQQHPHLNVQQLIKQQQFLKQFQQQQPLQSPRVLASGSQKSANLTGSQPGTPLSGGTMTGGSGSQGAEGTSQLLGKRKIQDLVAQVDPLGKVDPEVEDLLLEIADDFIGSVTAFACTLAKHRKSSVVEAKDVLLHLEKNWNLSIPGFSRGDKNPQRNSAKQLVDPQHSESDVTGIRGTSNKLGANNSVGNHQIRPPMAEPSAMPTMGPLSKAPRF

SEQ ID NO: 325370 - protein, 67 aa, Zea mays
  Clone ID: MRT4577_59808C.1.pep
CTPRHLRHPPIPQTKDHLTNPHHVDSICHHVPGHHSPFCRVALKPRDPQDKLYGFSSFFFVPPPDDL

SEQ ID NO: 325371 - protein, 38 aa, Zea mays
  Clone ID: MRT4577_59809C.1.pep
ATGLYPSSPSVSVVVWQCQSNAFHTALVLASRLVRARS

SEQ ID NO: 325372 - protein, 56 aa, Zea mays
  Clone ID: MRT4577_5980C.1.pep
PLRLVLLATSRKLTSVPRTERSRTDPPSTHTGRPIEPRSYMHADVDRYLSHSHVDE

SEQ ID NO: 325373 - protein, 519 aa, Zea mays
  unsure (1)..(519): unsure at all Xaa locations
  Clone ID: MRT4577_59810C.1.pep
MADPPPVAASALPAQPDQVAASVSTPQNPNPNPLLSPQIPPSPTVSDLSAHISSPQQLDPVAAAAAASGGGGSMDYPPRPPQLQAPSPTQAGPGAAGFGQIPRSGSASRLSTASQLQQYAARMYGGQMSFSGGGGLVGQQQQLAGRAPVLGQGQLGMLQGQGNAGSAAHFGLQSQMMAQARQKGMAQGTQLNNANTAQALQGMQHMGVMGTMGMNQMRPNGTIPYGAQQRFAHAQMRPQASQQPALSPQKVPGQGLSRXSINCSIKFTTVWIITKWTDGGNVYASATAVVEANTIIHGLTSFPTATISTAEAPVYAATAAEDRIEPTTTSPXQQQHPHLTAQQLIQQQQILQQFQQQQLLQSPRVSASGSQKSANLTGSQPGTPLSGGTMTGGSASQGAEGTSQLLGKRKIQDLVAQVDPLGKVDPEVEDLLLEIADDFIDSKEIGIYLFLVSQGRIRIPKEILQKVDGTVICNRNFGCADSGLSIESPSLLRVMLLFPIERKIPPSEGFRTIYVENSP

SEQ ID NO: 325374 - protein, 274 aa, Zea mays
  unsure (1)..(274): unsure at all Xaa locations
  Clone ID: MRT4577_59811C.1.pep
LPEQRHGHRGGAGAGAGVGAXPAAGYWSVVGARPCDACAAEPARLHCRADGAFLCPGCDARAHGAGSRHARVWLCEVCEHAPAAVTCRADAAALCAACDADIHSANPLARRHERLPVAPLFGALADAPQPFPSPAPAQGEAVAEDYGSSEAEAASWLLPEPDNSHEDSAADTFFADSDAYLGADLDFARCMDGVKAIGVPVAPPELDIGAGSFCYPEHSMNHILSSSSEVAVVPDAQAAGLPVVVVVSRGEEREARLMRYREKRKNRRFDKTIR

SEQ ID NO: 325375 - protein, 129 aa, Zea mays
  Clone ID: MRT4577_59812C.1.pep
VRIVRRDNGAKVDIPVTNLVEDVKVLLDEIQKNLFKTAQERRDACVQVVSSWDEFTTALNNKRLILAPWCDEEEVEKNVKARTKGELGAAKTLCTPFEQPELPEVLMSSQLKKVIDSSGHYFRVLMLQG

SEQ ID NO: 325376 - protein, 65 aa, Zea mays
  Clone ID: MRT4577_59813C.1.pep
GGRFYRLSLSPRMGFSPRPPLVCSGLSRGKAGGSPGPGPQSLGRPPLLLEQSHNSQIELSKKQQT

SEQ ID NO: 325377 - protein, 45 aa, Zea mays
  unsure (1)..(45): unsure at all Xaa locations
  Clone ID: MRT4577_59814C.1.pep
SRSCGRFCCCCCLESSSSFCNRAVLKSLNXASHRIAFGQLSTFLA

SEQ ID NO: 325378 - protein, 90 aa, Zea mays
  unsure (1)..(90): unsure at all Xaa locations
  Clone ID: MRT4577_59815C.1.pep
HTQSGGRFSSWGGDFQQNACPGDPNKPFLSGIINRGSYSLGVPQILMPESPWPGAAVVFFXGLRLPFFGAPSEPWLPRVGSSRWGVLFLG

SEQ ID NO: 325379 - protein, 51 aa, Zea mays
  Clone ID: MRT4577_59816C.1.pep
SIILPMHMTSSLHTRTSSAVHYDDAITDYACDRLHFEPNFSLPFVLNLHCS

SEQ ID NO: 325380 - protein, 378 aa, Zea mays
  Clone ID: MRT4577_59817C.1.pep
MASSTSEMAEGKEKLKRSGSLGSNDTYVRADKIDLTSLDIQLENQLTKTWGKANLKSQGPKEEWEIDLAKLEIRYVIAQGTYGTVYRGTYDGQDVAVKLLDWGEDGFATEAETAALRTSFKTEVAVWHKLSHPNVTKFVGASMGTTDLKIPSNNSNGAARTNLPARACCVVVEYLAGGTLKQYLIKNSRRKLAYKVVVQLALDLARGLSYLHSRKIVHRDVKSENMLLTPQRNLKIADFGVARVEAQNPKDMTGATGTLGYMAPEVLDGKPYNRKCDVYSFGICLWEIYCCDMPYPDLSFADVSSAVVHQNLRPDIPRCCPSAFANVMRKCWDANPDKRPDMDEVVQLLEALDTSKGGGMIPDGQSSGCLCFTKARGP

SEQ ID NO: 325381 - protein, 41 aa, Zea mays
  Clone ID: MRT4577_59818C.1.pep
KISRFFTRRYVFNHTCVLIRVINIGLSNRRSFIRICSSGTS

SEQ ID NO: 325382 - protein, 70 aa, Zea mays
  Clone ID: MRT4577_59819C.1.pep
QGSPGFPPGIGFSPKGKGPKGLCRGGPRPGPFCLAARKREGPNPPHLTRWDPPFHGAIISPLQGQGFYKG

SEQ ID NO: 325383 - protein, 91 aa, Zea mays
  unsure (1)..(91): unsure at all Xaa locations
  Clone ID: MRT4577_5981C.1.pep
TAHFVDQATXEPSFVTGVMGVALVAPHPRGGKVGLFGGAXVRXTALIMXAMNHXAEGHGCCCCSCCEGERPRVGNDLDRKTIDSAGVIPDN

SEQ ID NO: 325384 - protein, 111 aa, Zea mays
  Clone ID: MRT4577_59820C.1.pep
HIFFFQVNFFFFLREVSCFSMPQDLVLEVLKVSVRPLNFGGPQLLSFLIGCPQKLNLGCLSLLLLRLLWFFVFNLSSCPFFSLKLFSYFLFFPIFFFLIKEVLVPKKKKYI

SEQ ID NO: 325385 - protein, 78 aa, Zea mays
  Clone ID: MRT4577_59821C.1.pep
TKNLVSLIDIILPNHTNFQDQLHPFYEIKKDKMSDIQISCPFALLIPRFCISQPMWSLDLPFCMVSYNNLIGRWQVFQ

SEQ ID NO: 325386 - protein, 115 aa, Zea mays
  Clone ID: MRT4577_59822C.1.pep
PLPVGWPSLFCGRVDCFLYLKVVFVFAPISLGFFPLWASRGFLFIGADGFLCGIVWGFFFPPGFFFFSWFPRVFFSLLLWIFGFLPVPVVCSGGVPRLKPPLVCAFSVKKKKIFY

SEQ ID NO: 325387 - protein, 57 aa, Zea mays
  Clone ID: MRT4577_59823C.1.pep
RYHARGYYALDRFRSMRPPARGGRGEKSGSDCWLGAILVSDGKPGCVSSRGEGGDKE

SEQ ID NO: 325388 - protein, 62 aa, Zea mays
  Clone ID: MRT4577_59824C.1.pep
ILGRPLTEEEYFKAATLGWMTELLQAFFLDSDDIMDGSITRRGQPCWYRSEGVGMIAINDSF

SEQ ID NO: 325389 - protein, 117 aa, Zea mays
  Clone ID: MRT4577_59825C.1.pep
RVNPPAVRFPFPPPRCRARRREQARKPFSAAPICRPARGATLLGPTPEANLDKSILPYPVPCGSNPQKRGGWDERNKSGDREWSAHGLENGGLSREKRRGGRRERARPHPIPTTGLR

SEQ ID NO: 325390 - protein, 269 aa, Zea mays
  unsure (1)..(269): unsure at all Xaa locations
  Clone ID: MRT4577_59826C.1.pep
PARDKIITAYRCHPFAVLRGGTIKGVIAELLGRKDGISKGKGGSMHMFTPTFFGGNGIVGAQVPVGAGIAFAQQYLNTTNATFAMYGDGASNQGQVFEAYNMAKLWNLPAVFVCENNKYGMGTAAERSSMNTAYYTRGDVIPGLQVNAMDVLAVVAATKHTAKWTAVDGNGPLLMELVTYRYGGHSMSDPGTTYRTRDEIQTMRSSSDPIQGLKARMLDXGVVEEAELKKIDKRKKXGVDHAVEEAKKSHGDAKGSVGHIYYRARADYM

SEQ ID NO: 325391 - protein, 58 aa, Zea mays
  Clone ID: MRT4577_59827C.1.pep
QFIKFKTAHFEILRGFYKWSAKRGCTSKQTVYTNYDSPEVLQPFKRDNLLVRFLFSDN

SEQ ID NO: 325392 - protein, 64 aa, Zea mays
  unsure (1)..(64): unsure at all Xaa locations
  Clone ID: MRT4577_59828C.1.pep
GLPDRADDVFLSHGGSPGAHLMMQLPDGNEKDGILVPIPQYPLYSGSIALPGESLVPXYLHEST

SEQ ID NO: 325393 - protein, 54 aa, Zea mays
  unsure (1)..(54): unsure at all Xaa locations
  Clone ID: MRT4577_59829C.1.pep
LXTRVPLSLXXLLSLLASFXRWGVPPKXPFINPHVIGPQDRTDNCRAREGSLFF

SEQ ID NO: 325394 - protein, 147 aa, Zea mays
  unsure (1)..(147): unsure at all Xaa locations
  Clone ID: MRT4577_5982C.1.pep
ASNAEVSPAAFGAHQPLXPSHPHAMPTAGTLXHRQQRAAIPPTRLDKLNSVPPPTHQRWGPLXERAGXNSPQPPAAPDTSFXASXXXXPPPPPKIXXXXPVKKKRRMRXAARRAGARREKSXVGGRDPVKKPPPPXKKKKKTPQTAA

SEQ ID NO: 325395 - protein, 105 aa, Zea mays
  unsure (1)..(105): unsure at all Xaa locations
  Clone ID: MRT4577_59830C.1.pep
CLGFSKGGPNQVKKTFFVQASQIWQISPKMVGILITPGFPCALKKLVFKFLPEVFGKKIXKFSSSFFPLXKVFFPKVKILKAPQFFFGKFMGVHGASKKDVGVKL

SEQ ID NO: 325396 - protein, 76 aa, Zea mays
  Clone ID: MRT4577_59831C.1.pep
AFVVMFGRVFLLGSFGSIMPPKKSFLLSVNLYISFKVFHKVGGFCPFVFQWGLLTVFRSNRFFLPLGELVLEFFGV

SEQ ID NO: 325397 - protein, 246 aa, Zea mays
  unsure (1)..(246): unsure at all Xaa locations
  Clone ID: MRT4577_59832C.1.pep
GVSTIMVSYXSWNGKKMHANHHLITDFLKNKLKFRGFVISDWQGIDRITTPEHLNYSYSIEAGVGAGIDMIMVPFAYTEFIDELTSQVKKNIIPMSRIDDAVYRILRVKFTMGLFENPYADPSLAGELGKQEHREIAREAVRKSLVLLKNGKSAYTPLLPLPKKAGKILVAGSHADNLGNQCGGWTITWQGLTGNDNTTGTTILSAIKSTVDPSTQVVFSENPDSAAVDSGKYDYAVVVIGEPPYA

SEQ ID NO: 325398 - protein, 47 aa, Zea mays
  Clone ID: MRT4577_59833C.1.pep
GNKTKALVPGEQSAPRALARFGMKIGCIQDVTPVFLDSTRRKHGRRA

SEQ ID NO: 325399 - protein, 58 aa, Zea mays
  Clone ID: MRT4577_59834C.1.pep
MDKANKLSTGAGEKATKSRSHGSTALFVAVDYAFLLVFAGFLAYLVGSRILPSAAGSA

SEQ ID NO: 325400 - protein, 127 aa, Zea mays
  unsure (1)..(127): unsure at all Xaa locations
  Clone ID: MRT4577_59835C.1.pep
KIRHRKSSRAGGPXFGAKIPGGGSGGSVFVIGKNFLKNSEEILXIQKRFKTGAGVLPTVFYGSFSGAGKFWFLKIWGRFPFPFYLRRRRKSFFWLAGPPRLFLLFCFPPASPQMPINGAKICRPLLF

SEQ ID NO: 325401 - protein, 80 aa, Zea mays
  Clone ID: MRT4577_59836C.1.pep
ARQAATGTGQSPNKQRASHITIILKTWGSVESQNQARQCALPSGGHNVSVCAASRPGSQSLRERTLLLLLPVDRCSCLCP

SEQ ID NO: 325402 - protein, 58 aa, Zea mays; identical to SEQ ID NO: 325399
  Clone ID: MRT4577_59837C.1.pep

SEQ ID NO: 325403 - protein, 57 aa, Zea mays
  Clone ID: MRT4577_59838C.1.pep
RFAPSRISVLLHFVGKCRSAFGPSSVFTAAALKRMCLELFGLGTPGFCCGDGVRKRP

SEQ ID NO: 325404 - protein, 58 aa, Zea mays
  Clone ID: MRT4577_59839C.1.pep
MDKANKLSAGAGEKATKSRSHGSTALFVAVDYAFLLAFAGFLAYLVGSRILPSAAGSA

SEQ ID NO: 325405 - protein, 77 aa, Zea mays
  unsure (1)..(77): unsure at all Xaa locations
  Clone ID: MRT4577_5983C.1.pep
EVTLQSDMTVAYSQDTPXIELLTLDEQTHNMYQCETICLTNHLHQTCAKHRPKFTLMHALLLDHQPELVDEDPLMDL

SEQ ID NO: 325406 - protein, 37 aa, Zea mays
  Clone ID: MRT4577_59840C.1.pep
WLLEARAGRTLDHGVTVVGYGCEGWHGLLDREELVGH

SEQ ID NO: 325407 - protein, 83 aa, Zea mays
  Clone ID: MRT4577_59841C.1.pep
MSSCCGGKCGCGSSCSCGSGCNGCGMYPDVETAATSSVKTTVLAAPTTKASAGGFEAATEGGGCDCNTCKCGTSCGCSCCSCN

SEQ ID NO: 325408 - protein, 63 aa, Zea mays
  unsure (1)..(63): unsure at all Xaa locations
  Clone ID: MRT4577_59842C.1.pep
RTRHHVRSVRVPKRPVRNGSVQPWPTAQRAGPPRRSPSRTWERAEVSRDAPVDREIRXRVLPG

SEQ ID NO: 325409 - protein, 161 aa, Zea mays
  unsure (1)..(161): unsure at all Xaa locations
  Clone ID: MRT4577_59843C.1.pep
SDQASVISGAIDFVKELEQQLQSLHGATNTXRDPASAGSSGAGVTADAAARSEGAAPHEARPPAFARFFRYPQYAWRHAAAREDGVVAVEDEASGDCAVADVEVGLVVDAHASLRVMAPRRPGQLLRLVAGVQALGLAVVHLNVATAPDAMALYTLSLRAR

SEQ ID NO: 325410 - protein, 83 aa, Zea mays; identical to SEQ ID NO: 325407
  Clone ID: MRT4577_59844C.1.pep

SEQ ID NO: 325411 - protein, 84 aa, Zea mays
  Clone ID: MRT4577_59845C.1.pep
MSSCCGGKCGCGSSCSCGSGCNGCGMYPDVLETAATSSVKTTVLAAPTTKASAGGFEAATEGGGCDCNTCKCGTSCGCSCCSCN

SEQ ID NO: 325412 - protein, 83 aa, Zea mays
  unsure (1)..(83): unsure at all Xaa locations
  Clone ID: MRT4577_59846C.1.pep
LKIHKKICIAYPSVFVRVIGGCGSKGTGKGKIKRXVIDLAEKDXIEWRKDNYGHIALXLGGPKKYWFLEHESNYVQVGNFNID

SEQ ID NO: 325413 - protein, 91 aa, Zea mays
  Clone ID: MRT4577_59847C.1.pep
MELRFLHCVVFHTSTKKKQLRKRMPLDNSYNYANINPTSNVKIPDTYKTPTDDTNHENFCCNNTAIFAFPADRELPHENAVICSDYLGRQP

SEQ ID NO: 325414 - protein, 89 aa, Zea mays
  Clone ID: MRT4577_59848C.1.pep
GADSPALRPDGPRLWAGRSAHALNRLGFRVSRCVCWRKSRDLLGVLLVTGPAPLLYKSRGLRPIKYNESNQQHCYFALLWRSRGADSMN

SEQ ID NO: 325415 - protein, 78 aa, Zea mays
  unsure (1)..(78): unsure at all Xaa locations
  Clone ID: MRT4577_59849C.1.pep
MADQLTDDQISXFKEASILYCKDGYGCITTKELWTGMRSLGQNPTDADLHYMINEGYAYLNRTIDFPECLNLMARKKK

SEQ ID NO: 325416 - protein, 181 aa, Zea mays
  unsure (1)..(181): unsure at all Xaa locations
  Clone ID: MRT4577_5984C.1.pep
RKLRPAHRTFRISKGLATKAXSGPRGVSHRFRLNSAXEGRYNATRAVWRAWALGFDGERMVKSFMTKGNVVVVCDNFIGPCKGDVTIQVDGNLLATTDLSQYKEHGNWIEILRVDNLVITGKGNLDGQGPAVWSKNSCTKKYDCKILPNSLVMDFVSSGEVCAYHCCLAAGVYLLCYKIRA

SEQ ID NO: 325417 - protein, 204 aa, Zea mays
  unsure (1)..(204): unsure at all Xaa locations
  Clone ID: MRT4577_59851C.1.pep
ATRKRRRRRAGXEEIYARLARPVPFGDGKKEFWLDKNKGMICMALSSKALVITGIDDRRYXQHMPTSESRXYGFDITFTNICLFNLCQFSENKDGLLALIAMECAEDIYSXSXVAYLQQIWWFEVVGEVDFCFPVGTYSLYFRVHLGKFYRRFGRRQCTSEHVHGWDKKPVRFQLSTSDGQXALSQCYLEEPGELVLYHAGDFV

SEQ ID NO: 325418 - protein, 66 aa, Zea mays
  Clone ID: MRT4577_59852C.1.pep
SLARTLCRAHRHLSHCCTPMATLASKNCLCSCSYSFDDPDPIEYSTSTASATTRSHTYVCFQSTLY

SEQ ID NO: 325419 - protein, 100 aa, Zea mays
  unsure (1)..(100): unsure at all Xaa locations
  Clone ID: MRT4577_59853C.1.pep
LFIIGVASLTKGNVHPLPVYIQDPIKSPYNPYITYLESFFPNVNYLKKKLSTDLSTKMIHHKIPFNXILSHFKKIYLIXTSKISISYFYLTAIIQLLHIT

SEQ ID NO: 325420 - protein, 467 aa, Zea mays
  Clone ID: MRT4577_59854C.1.pep
MAVDTMESVAVVAVPFPAQGHLNQLLHLSLLLASRGLSVHYAAPPPHVRQARARVHGWDPRALGSIRFHDLDVPPYDSPAPDLAAPSPFPNHLMPMFEAFAAAARAPLAALLQRLSTSYRRVAVVFDRLNPFAATEAARLANADAFGLQCVAISYNVGWLDPGHRLLSDYGLQFLPPDACMSREFVDLVFRMEEEEQGAPVAGLVMNTCRALEGEFLDVVAAQPPFQGQRFFAVGPLNPLLLDADAPTTPPGQARHECLEWLDRQPPESVLYVSFGTTSCLHADQVAELAAALKGSKQRFVWVLRDADRADIYAESGESRHAMFLSEFTRETEGTGLVITGWAPQLEILAHGATAAFMSHCGWNSTIESLSHGKPVLAWPMHSDQPWDSELLCKYFKAGLLVRPWEKHAEIVPAQAIQKVIEEAMLSDSGMAVRQRAKELGEAVRASVADGGNSRKDLDDFIGYITR

SEQ ID NO: 325421 - protein, 102 aa, Zea mays
  Clone ID: MRT4577_59855C.1.pep
AYSPLGSFAARHMRHTVAVGVIKSVNKKDPTDATVTNAAAKKKLCHPAPGLALPSPHHNKVCLYTVLELCELISSWNGCTNIYVWETYRYFTFCIKNRTAFM

SEQ ID NO: 325422 - protein, 113 aa, Zea mays
  Clone ID: MRT4577_59856C.1.pep
DPRGRPGLLVGPFVKAGPLRNTEIAGQAGSLAAGGLVVILSLCLTIYGISSFNEGAPSTAPSLTLTGRKKEPDQLQTADGWAKFTGGFFFGGISGVIWAYFLLYVLDLPYYIK

SEQ ID NO: 325423 - protein, 229 aa, Zea mays
  Clone ID: MRT4577_59857C.1.pep
RATTEPDLESFFGMPSRSSSLPRSYNNTTTNPFDVQPGNAGSGGVRRTPSGSGFPFTQPSSSNLMDGLSSIFGAPLPSAVFQEVDGGGEERRKARLERHQRTMERAAKALAEKNERDLQAQQEQEERHRIGESLDFEIKRWAAGKEGNLRALLTTLQYILWPECGWRPVSLTDLITAASVKKEYRKATLCIHPDKVQQKGANLQQKYIAEKVFDLLKEAWKKFNSEELF

SEQ ID NO: 325424 - protein, 86 aa, Zea mays
  Clone ID: MRT4577_59858C.1.pep
KRGYLGKNRGGNQNKGVNIRGGAPKRAPRGKNKTRGRPTPPPPLGKRPKTTPGLGGGRIPPFFQKKKKKNPPLLFVKTLCQNPPFF

SEQ ID NO: 325425 - protein, 68 aa, Zea mays
  Clone ID: MRT4577_59859C.1.pep
PRVGGAETPYGLKGAKTTKELGPPKPKKIEKPTVTSGGFFKKGTGGNKTASSGEKGVMPGGPPPGVIG

SEQ ID NO: 325426 - protein, 75 aa, Zea mays
  Clone ID: MRT4577_5985C.1.pep
QSLSVLIAMYVSQKVIAGVMQWGIKIVCHHARDYLKREFIVVSLYEQESPYVFSLVAMKDPVYVLMDLHALDESQ

SEQ ID NO: 325427 - protein, 74 aa, Zea mays
  Clone ID: MRT4577_59860C.1.pep
KAHAILVFILLVSSLLIFHVPLFGSVLPCSCSLILSQKLPGSWKKKGKKKKKKKMKKKKKKKKKKKGLCVVTTA

SEQ ID NO: 325428 - protein, 37 aa, Zea mays
  Clone ID: MRT4577_59861C.1.pep
QILSIIRSGKVSTYICHYIVFNLGRAAIDKYLGRDHA

SEQ ID NO: 325429 - protein, 123 aa, Zea mays
  Clone ID: MRT4577_59862C.1.pep
KPPRERKHRPLVRPGKGEKKLGGTKGGGALVDVYGACPCLGEGEVSGAPPGGGAQTAPARVNGEQRGAINPGGGGSGKQVGPTFQGTQPLTRTLKNTYPPVFFWAKAKKKWGGSLTPPPGGPK

SEQ ID NO: 325430 - protein, 64 aa, Zea mays
  Clone ID: MRT4577_59863C.1.pep
QKPITLLLTTQLIFISIIYLYTNLPLFIIKNYFNLNTYIKTIINYYKTLHLIIFAQLKTFFFFN

SEQ ID NO: 325431 - protein, 147 aa, Zea mays
  Clone ID: MRT4577_59864C.1.pep
SRPSRLIPPSLWLDRVFMARSVAAVAFLAGSTATPPFVPLACTATLTSADTCAVVGFPGGGSSTTGHEKKQEGPHHCCPFCVALPTVDARTSTPPEARGCCCMSPSHSNAPPRVRLSRHPGAIIYMECTPVSTLAATLAPSRCCDCG

SEQ ID NO: 325432 - protein, 58 aa, Zea mays
  Clone ID: MRT4577_59865C.1.pep
LHYSSSSHASLSDTSERSDLAISNFRTAREGQPHEDSASFGQSKVALRRYTTYEAHDR

SEQ ID NO: 325433 - protein, 126 aa, Zea mays
  Clone ID: MRT4577_59866C.1.pep
WGGCFFFSVRKKKVLLGKKKFVSPNPFSPRTLWPFFGLKKCSPKAPALKKWVVYQSKTYGFGLEPKKIEETVFGPTFRAFKKKGRVFPGVGGGSCLPPFPFFSLIFYVAQGQIRECSGAIQGKNLL

SEQ ID NO: 325434 - protein, 147 aa, Zea mays
  Clone ID: MRT4577_59867C.1.pep
MAAGAGDDLKLLGMWASPAVLRVRLALSIKGISSYEYQEEDFANKSELLLRSNPVHKMVPVLIHAGKPVCESTIIVQYLDEAFAGDALLPARPYERAVARFWAAFIDDTLLKAMYQASWSKTEEEKAEGKKKVAAALTTLDGALRDV

SEQ ID NO: 325435 - protein, 71 aa, Zea mays
  Clone ID: MRT4577_59868C.1.pep
GRACKSLWINPQLRWWGCISREEQVYSGSGVVRKLLWLGKIGCQWFGGCFFLPQGQCHWAVLFGRRGDEKV

SEQ ID NO: 325436 - protein, 118 aa, Zea mays
  Clone ID: MRT4577_59869C.1.pep
RACWMKKEKKLRQQRWRRATAVSSRRTRSPLPREGEAPMRWRRAGIVSNTYCSGRGRKGEDAPTTYARAILARGLSSVRCAGVVQRAVHSGCATAMANLYAPEPGCRRLMLQMYTTLK

SEQ ID NO: 325437 - protein, 98 aa, Zea mays
  Clone ID: MRT4577_5986C.1.pep
RTILQLTPFMSCKSSRPVTYSRVSLTIECMRALLSVLSMGVILNRKRFPSAPSLCGPIGFAVGCCFLRGKKPALWCCMSAKGGRGVSLPLKNPNKVDG

SEQ ID NO: 325438 - protein, 167 aa, Zea mays
  unsure (1)..(167): unsure at all Xaa locations
  Clone ID: MRT4577_59870C.1.pep
MLVYXDLLSGYELMRYXFTYKEIENGVLWEGEGKRDTQGPVDVDIGANPSVEAGEDESADDTTAKVGDIVDTFRLQEQPTFDMKSLEYYIKTYIKTLTVVLEPEKANEFIKGEEGATKLLLSKLKDLQFFDGEFMKEDATVVLGYYKDAATNPTFLYSSNGLMDIKG

SEQ ID NO: 325439 - protein, 141 aa, Zea mays
  Clone ID: MRT4577_59871C.1.pep
MQDPRDDDFLAPKLHKKKVVYRPQPSGHLKGEPELLRREFPQSSGMVQKPPKRSLKGEPRTPPSDRGTPDSLPESGPTDEYRALRRKYLMLEEENFALDKELSMEDEEMKALEDEKLALLDQLVVLEGLVEPSQLQSQPRP

SEQ ID NO: 325440 - protein, 188 aa, Zea mays
  Clone ID: MRT4577_59872C.1.pep
FGSRNYQRANRRQMELQTQALGSQYTQHEHYNASPSTSYGSQPLTLEDLSRRHFQQDLRRPLRPHPRVGVLGSLLQQEIANWSGNCGPQSGYRLGDCKGTRPPDANRAGNYETLSSAGWNTLQLGSVSSAANLEYRFPWYGTGQPSTSGNGRTIHPLDKLVRKDICVTNRNPADFTVISDKNEYMRTL

SEQ ID NO: 325441 - protein, 86 aa, Zea mays
  unsure (1)..(86): unsure at all Xaa locations
  Clone ID: MRT4577_59873C.1.pep
MXSSMLSATTVPLQQGGXLSXFSGLXSSASLPMRRNATSDDFMXXVSFRXXXVXTXXGXXXAXTXXXLNVAINGXXXXGXNFLRCG

SEQ ID NO: 325442 - protein, 88 aa, Zea mays
  unsure (1)..(88): unsure at all Xaa locations
  Clone ID: MRT4577_59874C.1.pep
KKGAIFFYPSWARKKGFPFNHNPGGHGGTLPFAFGAKCEPGFLPPSGDPPGPKTQKEWGGESQNPKGKISQXNPALILLVLPFFFFFF

SEQ ID NO: 325443 - protein, 79 aa, Zea mays
  Clone ID: MRT4577_59875C.1.pep
RASHPSTSCSGPSRACWRPTTASKSASKSLTRLMLGPAPPLSIETWWSATFSVSMSTYCSKMCLVIILPGLSTGSSVLG

SEQ ID NO: 325444 - protein, 178 aa, Zea mays
  unsure (1)..(178): unsure at all Xaa locations
  Clone ID: MRT4577_59876C.1.pep
MKMVIVLVGGLVLSVASAFAMQMPCPCAGLQGLYGAGPGLTTMMGAGGLYPYPEYLRQPQCNPLGGAPYYPGWGQPSAMFQPLRKQCCQQQMRMMDVQSVPQQLQMMMQLERAAAANKNLYKPVLMQQQQQLLAAQGLNPMAMMMAQNMPAMGGLYQYQLPSYRTNPCXVSAAIPPYY

SEQ ID NO: 325445 - protein, 32 aa, Zea mays
  unsure (1)..(32): unsure at all Xaa locations
  Clone ID: MRT4577_59877C.1.pep
KNXNLGPPPAESPSPYYRGRLPIIKKLQPRVF

SEQ ID NO: 325446 - protein, 123 aa, Zea mays
  Clone ID: MRT4577_59878C.1.pep
HPQCSPLAGAPKNTGCGQTSAMYQPLRQQFCQQQIRMMDVQSVAQQLQMMMQLEGAAAASNSLYEPALMQQQQQLLAAQGFNPMAMMMAQNMPAMGGLYQYQYQLPSYRTNPCGVSAAIPPYY

SEQ ID NO: 325447 - protein, 54 aa, Zea mays
  Clone ID: MRT4577_59879C.1.pep
VPRAFDTWGCSSNLISAVAWLLPLSSGFPFLTSGRKVHFFEFKKIAKGRNYYGF

SEQ ID NO: 325448 - protein, 161 aa, Zea mays
  unsure (1)..(161): unsure at all Xaa locations
  Clone ID: MRT4577_5987C.1.pep
PGRGGSCLFSRLLWWLGLAACLGLGGGGCGAPRLCXCPPAWVXXPPSLLRGRLCXVWXRXCCVLCCCLSLLFWGPALXRWSSXCXLWVRXPCAAPPRCCRSXFXPCCGLGXCCFGRSAXVGVAGFSACXGAVFVSASFPRLGRWXPWLWXXLVGPRAWFLG

SEQ ID NO: 325449 - protein, 53 aa, Zea mays
  unsure (1)..(53): unsure at all Xaa locations
  Clone ID: MRT4577_59880C.1.pep
PPTHPLAAQGPPPMPITMAXNIPAMGVLFQFQFHLSSFRTNPCGVSAAIPPYY

SEQ ID NO: 325450 - protein, 90 aa, Zea mays
  unsure (1)..(90): unsure at all Xaa locations
  Clone ID: MRT4577_59881C.1.pep
QQQISIMLVQSVAQHLXIIIQLECPASVSSSLFEPALMQQQQQLLAAQGFNPXAIIMAQNIPAMGGLHQYQYQLPSYRTNPCGVSAAIPP

SEQ ID NO: 325451 - protein, 104 aa, Zea mays
  unsure (1)..(104): unsure at all Xaa locations
  Clone ID: MRT4577_59882C.1.pep
SAMYQPLRQQXCQQQIRIMDVQSVAQQLQMIMQLXGAASASSSLFEPVFIQQQQQLLAAQGFNPMTLMMGKNIPSMGGFYQYQYQVLSFRSNPCGVSAAIPPYY

SEQ ID NO: 325452 - protein, 163 aa, Zea mays
  Clone ID: MRT4577_59883C.1.pep
MAKPEEKLRCTKEPFIEDVGTRRIKSIRFSVLSGSEIRKSAEVQVWNNRIYDRDMTPVPNGLLDPRMGIPTKRGKCNTCHGEFSDCPGHFGYLKLALPVFNVGFFNCILDVLKCICKSCSRVLLIEKDRREFLKKMRNPRADALREKCYNEKSEGQMQTILLP

SEQ ID NO: 325453 - protein, 136 aa, Zea mays
  unsure (1)..(136): unsure at all Xaa locations
  Clone ID: MRT4577_59884C.1.pep
VPHTRTLYINPAPRRRRRGRSLGAAPYYCGCGQXNAMIQPLRQQSCQXQMMMMDVQSVAQQLQMMMQLERAAAVSSSLYEPALMQQQQQLLAAQGLNPMAMMMAQNMPAMGRLYQYQLPSYRTNPCGVSAAIPPYY

SEQ ID NO: 325454 - protein, 121 aa, Zea mays
  unsure (1)..(121): unsure at all Xaa locations
  Clone ID: MRT4577_59885C.1.pep
QRQSYAETAPTQATLRSNWASKEHYTPPIGLPALFCSATNGVIIPQCSLAHSAIIRQFLPPVTSMGFEHAAVQAXRLQQALAESVLEQPIAQLQQQSLGHLTIHTIATQQQQALSQLTVVN

SEQ ID NO: 325455 - protein, 628 aa, Zea mays
  Clone ID: MRT4577_59886C.1.pep
MGNSLRCCLACVLPCGSFDVIRIVHLSGHIEEYARPVTAGEVIAAHPNHVLSRPCSQGGARRILIVAPDSELKRGCFYFLVPASSVPEKKRRPQPQQKKARPQKTPPPSAAVAKEAKDNGDRYLAEVLSEGKASLKRRRSSRSTEVVLPPEIILNAIIFVGHNDLAVGDYFDLLTDNIYEVTDKRLVALREIENDKVIVTKAYNKKIKAKSFQIRDLPAASTKNPSRPNSVLLAPALVLSSSDDVLSGASSRRLDMCAPPPSQGRTTALPFCSVYVTKSTTSSLLQQGGNSGEPSSVNSASVTQKTSNAIKSDDPTWEHCFVLDMSKKHAIQCKYCDKVIHGGITRVKYHLANIGGFNVTKCKKVPAPVKQEMEALLTKKTGEKEQRKKEKQRERDEIDLDKSDGSNEEDNKHENDVIMLKSTRVTLPSFGHMLEAIGAFGRGLRGPSAYEMSGPFLKRAKQKVLDRFKNHQESWQLIGCSVMTDAWTDRKGRGVMNLVVHSAHGVCFLDSVECSAVKKDGKYVFDLVDRCIQEIGEENVVQVVTDNASVNTTTTSLLAAKRPSIFWTGCAAHCLDLMLEDIGKLGPIEQTIASAKQVTTFLYAHTRVLDLMRKFLGNDLVRSGVTRF

SEQ ID NO: 325456 - protein, 178 aa, Zea mays
  Clone ID: MRT4577_59887C.1.pep
MKMVIVLVVWLALSAASASAMQMPCPCAGLQGLYGAGAGLTTMMGAGGLYPYAEYLRQPQCSPLAAAPYYAGCGQTSAMYQPLRQQCCQQQMRMMDVQSVAQQLQMMMQLERAAAASSSLYEPALMQQQQQLLAAQGLNPMAMMMAQNMPAMGGLYQYQLPSYRTTSCGVSAAIPPYY

SEQ ID NO: 325457 - protein, 76 aa, Zea mays
  Clone ID: MRT4577_59888C.1.pep
PARTRRAWFSQTKKDIFFLPSRDSAKRGTGSSFYITSYQSHPPIKFLQTNAAGKEINPGRSSGLKREEGNKEFHGK

SEQ ID NO: 325458 - protein, 139 aa, Zea mays
  Clone ID: MRT4577_59889C.1.pep
ETRSSTRIRPRPPAVRSCARRRQGGGARAGDREEPSEPARACRGQGVSQRARRRSRWPRSPEIRPRRRTPEIGTRAPHAWDPPSTPRTPETGTRRACLEAARATHAGSPASPHVGDRHGVGRAAAKRQSTGASVPSSLV

SEQ ID NO: 325459 - protein, 59 aa, Zea mays
  Clone ID: MRT4577_5988C.1.pep
NGFTLLEIITNKTYPCIQREHKNTTGITVNIITLLKSSTHAWGTFTTFYAYIKELRIRT

SEQ ID NO: 325460 - protein, 178 aa, Zea mays
  Clone ID: MRT4577_59890C.1.pep
MKMVIVLVVCLALSAASASAMQMPCPCAGLQGLYGAGAGLTTMMGAGGLYPYAEYLRQPQCSPLAAAPYYAGCGQPSAMFQPLRQQCCQQQMRMMDVQSVAQQLQMMMQLERAAAASSSLYEPALMQQQQQLLAAQGLNPMAMMMAQNMPAMGGLYQYQLPSYRTNPCGVSAAIPPYY

SEQ ID NO: 325461 - protein, 122 aa, Zea mays
  Clone ID: MRT4577_59891C.1.pep
MDWLGQKRAEMLMQVLLVASAVVAFLVGYVRADFQLMLLVYAGGVVLTALVTVPNWPFYNRNPLKWLDAAEAERHPRPQVSAAPAAGGEEEVREEQVVGPMCGVLGRPDSTCLRSIRRTNQL

SEQ ID NO: 325462 - protein, 57 aa, Zea mays
  Clone ID: MRT4577_59892C.1.pep
PAGSKRGCAFRNLSYHHLHVELWFPRPFLSSVPMPWSEVMVGPSRNLAIIEADYYKC

SEQ ID NO: 325463 - protein, 47 aa, Zea mays
  Clone ID: MRT4577_59893C.1.pep
ICFSGDHDMCVPYTGTEAWSASLGYAVVDPWRQWIVDEQVAGYVSGF

SEQ ID NO: 325464 - protein, 57 aa, Zea mays
  Clone ID: MRT4577_59894C.1.pep
KLGFCGFSTWAFLIDKKPNSSYPNQGFFFQGFFRAPGRGLTPMFNPNLSNPKKKIFL

SEQ ID NO: 325465 - protein, 60 aa, Zea mays
  Clone ID: MRT4577_59895C.1.pep
HVEQLLHTTSLFCSTLSTSRLQVLSTSMCKGCALPIELISTVLTPLESSPQRSSVACCCC

SEQ ID NO: 325466 - protein, 1153 aa, Zea mays
  Clone ID: MRT4577_59896C.1.pep
MAASGSGGNEPSGRPWTATSTWTPGPAGGAVADAVSFETSDDDAEASPAGVVLCHPSADSDRDMTPCPCEVTVSFRGKYEIHRVYVRSTARIYELYHSPDAKGTSKDYLCTVRCGLAVKETQRCGEESMSQWTGSALNSDKREHEAKSVSSASDEDSWVDVKIPESPAGNKTPESQERSVIRTCRENTLPHYEATAEMTDVNPCVSLTVRLLSLQSKTSVHIEEIYIFADPVEPTDDVSVRGPVNMGGSSLLAMLVPGLMQMSKSRNLKIDDSYFSDGSRNQESSKCESFTQEAGPCSTNDSKHTSAGIENGMNSTVGVSASDDKSSQGEFHFKDPDSLPLPVQTLESTQAPSVKNQHELNTGYLANPIMSENLTPSNHIERKLDTLLSKVENMELFCSRFEDSMIKPLGSIEARLQRLEEQFSSFAVDIQSLRDYSAFRSAPDGMPNTKSSQEEAHNDANDRSTSTSDRKPGLVVRAPDFVSDDSCGCNVITNGSRVNCHGPNVVPRILVKAPDFISQPELTDENLHDGHALSSEKECKTSPGLVVKVPELPDDDDDDGVEDKKQAEVCGDGDDHTRSDDTLRKSTAGNTKSKKSVSINGALASALEALLTSTIGTSYSKPTICATSNLSAENINGFFSCSPCPEKTGEMSTKDGSAVQILGTSGDPNLVGAFISSQEIDTAPHNSLSKEMLDSKVEINEQNCDINTENVAFVAITEPLDVPSQADTVEESINDGSWVNRQNYGSNLNAMPYAMNVEPLDPPKPPTVSEPVDSGVQVNEDRPSISLVEFLAARNASSCKNGTSEVCLGNVAAEKLSFERTSAGAGKNSKNISQLLVKKALEVDADKIFFLFSVPIGPKFEGSSSPTPRTSGHNINNTEEAVSDKECGVKDTKNGFRPSLGMDSIFSQYHATDSKKNLSENSSSDRILDESFSKQNGEHSRSSLSSMVSFSGASATEPVVPGSGTSENYVEDLTGVRDRPVATLNSGEELQKVCDLLYEFKDEMLRASVAKCTNKSSPSLEALLAESSDSEAQISDLEGTDSGAGIGSGRLFSTLSSSDDDDASAADEPLVDVADLTTPPERYTSVPSDEPLVDIADLTNPSGIDASSVNEPPADVVDLLHTSNEPLVSLDGLPNHPEMCFGGSSGEHTDSLI

SEQ ID NO: 325467 - protein, 132 aa, Zea mays
  Clone ID: MRT4577_59897C.1.pep
LNKKKKQKNKTIKKKKKKKNKKKKKKKKKKKLNLWPLPLLGRLLQNSRTFLPPGAPPLGGPFSPWLPPRGAPGAAFGAPLPRDGRGFPPLARPFPTPVLAGPPLPSGGSPVGLSPFAPGGLLVVTAPVPPCS

SEQ ID NO: 325468 - protein, 96 aa, Zea mays
  Clone ID: MRT4577_59898C.1.pep
RQKKPAILYPNDNPTNPARRAWKIPFFRPKVFGFPILQKKSFRALNKLKRGTKRETWENPNSLPGFFQKRQNGPPTLYGAIPAHFQNLPWLVTNFP

SEQ ID NO: 325469 - protein, 70 aa, Zea mays
  Clone ID: MRT4577_59899C.1.pep
PDLNTQKPYTTIFSWRELIPLKQPPHPWPWRTNTGHRQGGPYIKKHKMSCMPSPKPQICLFFPPRTEQHS

SEQ ID NO: 325470 - protein, 96 aa, Zea mays
  Clone ID: MRT4577_5989C.1.pep
SPFGPLSAWQKNPEKFVPRTLRGRFLGPQQLASGGAPKKIKVGEKNLNPVVIFLPPPSHRECSFPVGFPRKGKGPPKKKLPPTLKGFGFFQNPFFS

SEQ ID NO: 325471 - protein, 596 aa, Zea mays
  Clone ID: MRT4577_598C.1.pep
MLPSSGSGWGRGRGRHLLLGRALALAALLALASASESDHKYKTEEPVKLWVNKVGPYNNPQETYNYYSLPFCQPSENPTHKWGGLGEVLGGNELIDSQLEIKFLKNVEKGFICTLELDAKKVQQFADAIESSYWFEFFIDDLPLWGFVGESDKNSENKHYLYTHKNILVKYNDNRIIHVNLTQESPKLLEDGKKLEMTYSVKWVATDVSFARRFEVYLDYPFFEHQIHWFSIFNSFMMVIFLTGLVSMILMRTLRNDYAKYAREDDDLESLERDVNEESGWKLVHGDVFRPPRSLMFLSALVGIGTQLAALILLVIVLAIVGMLYIGRGAIITTFIVCYALTSFISGYVSGGLYSRSGGKNWIKAMVLTASLFPFLCFSIGFMLNTIAIFYRSLAAIPFGTMVVMFVLWAFISFPLVLLGTVVGRNWSGAPNNPCRVKTIPRPIPEKKWYLTPSVISLMGGLLPFGSIFIEMYFVFTSFWNYKVYYVYGFMLLVFVILLIVTICVTIVGTYFLLNAENYHWQWTSFSSAASTALYVYLYSIYYYHVKTKMSGFFQTSFYFGYTLMFCLGLGILCGAIGYLGSTLFVRRIYRNIKCD

SEQ ID NO: 325472 - protein, 108 aa, Zea mays
  Clone ID: MRT4577_59900C.1.pep
YLGVFFYFFPVFFSRGPQKKPFTNLFGQEGPGFKFPPIFFPYFFGPFVFSTKKMDKFGFTGEKKGGGRVTNKPGTLGRKKLGGPGHQGGGLGLPAKGPGRTPFRDRGG

SEQ ID NO: 325473 - protein, 103 aa, Zea mays
  unsure (1)..(103): unsure at all Xaa locations
  Clone ID: MRT4577_59901C.1.pep
MEPGLRIESGSAIRVAVVPVGGPIPPSRLREYAALVARNARVYLASVRTYYAEHQKSPFQHQPWETGCLRLKFVLSCCLPSPWDDFQSSXKVFAVIGFCHFPS

SEQ ID NO: 325474 - protein, 59 aa, Zea mays
  Clone ID: MRT4577_59902C.1.pep
ISYTLCSARRQNEKYIYACLRTVFGRYPCIGIVHGRCWYSVPSHGVYDSERGREPLESA

SEQ ID NO: 325475 - protein, 109 aa, Zea mays
  Clone ID: MRT4577_59903C.1.pep
MCGSNFSTAWSSWGLARRASTTGGGSPRGWGFRGRGSFRGLGTGMDSVGNTQKITEAMKLGAAAKVRPAQEAVVSFGLFWEALGGGLYTMNQEIQTGDMDLPLTGTGPV

SEQ ID NO: 325476 - protein, 78 aa, Zea mays
  Clone ID: MRT4577_59904C.1.pep
FWYKVSLLVFCKSPTPKRRSRRKTVLTEVRGALAGNCDRLPLVMLLGPCKDRPARNPEERELAGLAEESDFFLSLAAR

SEQ ID NO: 325477 - protein, 152 aa, Zea mays
  Clone ID: MRT4577_59905C.1.pep
MAAPSPTTTAAATTHHRVLLPSARPRAAPSSLRLPLRAQPHAHAHAQRARLAAPVAAAAASTASPESPASGAVPGKPTVLVAEKLGAAGLALLREFANVDCSYGLSPEDLRAKISLCDALIVRSGTKVGRDVFEASGGRLRVVGRAGVWIDN

SEQ ID NO: 325478 - protein, 44 aa, Zea mays
  Clone ID: MRT4577_59906C.1.pep
RLNMYVKIAATPQKIHQLNAVNIGKPFIRTGSIQHAMHHSTPNA

SEQ ID NO: 325479 - protein, 59 aa, Zea mays
  Clone ID: MRT4577_59907C.1.pep
YTSTCRLMRLNKSLAEPCTNGVEWCGKVQLYTLYVRVHRSNSSCVCSTARASYGSVAYI

SEQ ID NO: 325480 - protein, 202 aa, Zea mays
  Clone ID: MRT4577_59908C.1.pep
PAGRFQRRRRRKPSVLSFTYAWSSSLYLHSPLHRSESSLYGYTFLCKVVHHSGLGRERRLEPQKDGQPDHMIHHGAPLPVRQLRFYVAPECPTAPLETTRAELMRKNARIRSRIWVSRVEDRLPHLYTRLMDLLDRKRTTLLHQGIPLERSTRRPPRTMCRVLVKFDCVLQLLLLSPLLYLWLDPSQTSIFHWLIIPAKINW

SEQ ID NO: 325481 - protein, 62 aa, Zea mays
  Clone ID: MRT4577_59909C.1.pep
TQFAVTNLRVSQNVTLWKAWRCHSGAVCPLQLNSPCPSGVRPQKIEKLRACPPGWSWCSLQA

SEQ ID NO: 325482 - protein, 85 aa, Zea mays
  Clone ID: MRT4577_5990C.1.pep
SAGRFFRVRPCVCLSVLVLEVSSWLVLRCVHTDSGGRSSIASLHADMLLYVLSRAGPSSVLVLTSGVALLKLARASRRGWLIKDL

SEQ ID NO: 325483 - protein, 78 aa, Zea mays
  Clone ID: MRT4577_59910C.1.pep
TSLGFKKKNPGFPRGGKTPPKGSWGLKKFKPPSRGVFFVGKKIYCLAKKGNFWAPPFPFMGAVGNLPIKPPKGNPPPP

SEQ ID NO: 325484 - protein, 59 aa, Zea mays
  Clone ID: MRT4577_59911C.1.pep
RWISQNFRPPFNLMPAVEINRNYNLFYCSLVIKDYESCLMLKAYVLDAICLKKMWILFL

SEQ ID NO: 325485 - protein, 105 aa, Zea mays
  unsure (1)..(105): unsure at all Xaa locations
  Clone ID: MRT4577_59912C.1.pep
FLWVQAYVRRFLRLRAQAPTVPNEIVIEAMIKGLRPGPSAQYFARKPPHTLEKLFQKMDEYIRADNDFRQRREEAFRFXSEMTRGFXGRFYPWHVCVIHYSAQTD

SEQ ID NO: 325486 - protein, 179 aa, Zea mays
  unsure (1)..(179): unsure at all Xaa locations
  Clone ID: MRT4577_59913C.1.pep
WVPRGRPGFASAIENDMLMGITRRGLXMTPNILIEARXFPDATXSTCEIGSDKALGSEHCDIGRVPFRKYHVIVRECISLYSDXAYPDTYTXXVYHDSAXGQLQXNPHLIISNYXDENPGSELLAQKMGVTQXTIAHVXQNTRYANSDLYXKKFEYHYHFSRHLTADXIAMNHVDFIIT

SEQ ID NO: 325487 - protein, 92 aa, Zea mays
  unsure (1)..(92): unsure at all Xaa locations
  Clone ID: MRT4577_59914C.1.pep
PRSFYQAGAAQDTGEILRRRRGYASSPSPERKVDILGAADGIGQPLSLLMKLNPLVSSLXSLYDSAGTPGDGADVSHINSPAXLKAYMGDDH

SEQ ID NO: 325488 - protein, 88 aa, Zea mays
  unsure (1)..(88): unsure at all Xaa locations
  Clone ID: MRT4577_59915C.1.pep
TPQPQNPNPPHVPPLLPPPEGLAQGRWRPPSHSIRRSSSNPFKGRVESRRPPPPPWRAPPRGKADQKEDHECGLKVREGERPLPPXGN

SEQ ID NO: 325489 - protein, 126 aa, Zea mays
  Clone ID: MRT4577_59916C.1.pep
MGHHGEGRVQCRAGTQAEHQGDEAVRNSVVAIDREGGGGRLPAKKPPSLYASEGGRRDRRAGPSQQPRGVKGLAGGPGCQREGERMGARARALAGGAWLVVAKREHMHGLVIAREEAGVGAGPESA

SEQ ID NO: 325490 - protein, 81 aa, Zea mays
  Clone ID: MRT4577_59917C.1.pep
LSSQWYIHDDTYKLRHLYLLQGTTTAETVHNNGRKEMTTHATHSAKGNNFTTWLKFVSVVRSTIRHSSQVVKLLPLAECVA

SEQ ID NO: 325491 - protein, 92 aa, Zea mays
  Clone ID: MRT4577_59918C.1.pep
TLFYFLFGGCQKLPVSITHNKRGHKEPFVGRNCYSPPKSFFPGPFLNPMANGLGFKRTKGMVRKNWFCNYDGEKKKKKQKTKKKKKKKKKKD

SEQ ID NO: 325492 - protein, 58 aa, Zea mays
  unsure (1)..(58): unsure at all Xaa locations
  Clone ID: MRT4577_59919C.1.pep
LNWGVFLRTERNLKTGDGFLLPMRGKGQGALVPGSAKLKGSSDTQGGGXGFFAIFHRG

SEQ ID NO: 325493 - protein, 63 aa, Zea mays
  Clone ID: MRT4577_5991C.1.pep
FSTHSSSYTSFHLHNLYISFYLQYISKVSYKPTTILKYSTLYPTILQKHINTLQLNHHITYFY

SEQ ID NO: 325494 - protein, 70 aa, Zea mays
  Clone ID: MRT4577_59920C.1.pep
QGARYVPRRCGPQKDQPCQVLQKGVPRVQGLSLKARKTCDRRSVTNACSCKNVAIVFMVKTNKRPRMVLS

SEQ ID NO: 325495 - protein, 75 aa, Zea mays
  Clone ID: MRT4577_59921C.1.pep
TLLAGSSFKLGGGKTVFVPGQKLLAYIAQVGKKKFVRFQGIILRGLHGGPLDDVHKLRLQRSSPDKKTIDIGVGC

SEQ ID NO: 325496 - protein, 55 aa, Zea mays
  unsure (1)..(55): unsure at all Xaa locations
  Clone ID: MRT4577_59922C.1.pep
FLFLGEPHASSTNTRPRHLEGNSSPWRRYRGPSPVTRLGFNKNXKDXXPPPPPPP

SEQ ID NO: 325497 - protein, 122 aa, Zea mays
  Clone ID: MRT4577_59923C.1.pep
TGAGDYETTISGNLSAVSAPSQKGGKKKERYRTTNLEKDNRPPHNKAGCCQANFYPRTKPAWHGLQLQRGLPKPFIILFSGNFVWSSSQALIKHTHPAPGLLCGNSQPPGRESSCPQGHSQP

SEQ ID NO: 325498 - protein, 61 aa, Zea mays
  unsure (1)..(61): unsure at all Xaa locations
  Clone ID: MRT4577_59924C.1.pep
LIKVTHIGSVIHSIQAEKMSKRAALGXITSHRSGKAENTISLDLAVGLLTGQIKSSAPFRS

SEQ ID NO: 325499 - protein, 74 aa, Zea mays
  Clone ID: MRT4577_59925C.1.pep
RDIGKPVQCLSLVLFSDGRGRYTSETREHNGESGASIGDVMHRSAYGMLLAGLLYHGTHLASPGACSIVLESLA

SEQ ID NO: 325500 - protein, 437 aa, Zea mays
  unsure (1)..(437): unsure at all Xaa locations
  Clone ID: MRT4577_59926C.1.pep
GLLERLREXEVLQKKCGPYTDSYKKAIEQLNSGQDIMVGDCNYLVWVSYSGLGNRILTIASAFLYAILTNRVLLVDGDKGTADLFCEPFPETSWVLPPDFPITKFKNFSIGSPESYGNMAKTEAIHSDGSFKGPKPAFLYLHLAHDYDDHDKLFFCEHSQQHLQKIPWLILRSDNYFVPSLFLISSYQEELTRLFPQKDVVFHHLGRYLFHPTNAVWGLITRYYDSYLARADVRLGIQIRVFDTETGPFQHVLDQVLDCTLKEXILPEINAQQPIISTGGEXRSIFFLITSLNSGYYERIRNMYWEHPTENGEMISFHQPSHEEHQDSDKTMHNMKAWAEIYLLSLSDAMVTSAWSTFGYVAQGLSGSKTWLLFKPENRTAPNPPCRQVMSIEPCFHAPPFYDCKTRKGTDTGKLVPHVRHCEDMSWGLKLVDTGEL

SEQ ID NO: 325501 - protein, 200 aa, Zea mays
  unsure (1)..(200): unsure at all Xaa locations
  Clone ID: MRT4577_59927C.1.pep
GCARWRPPPRTRSTPGRRRRRARRSARRRRTRSGPAARRRRAPGCRARRXRRQRADPGQERQXPSPPAXRXRTPSPCRWCPSPPWTPAAPSTPPARRTRTPPXLLARVPAVSAVVRRARRRAIVHCELRLGAGRRRRRGQQQEPRRGRSHQRRSDGPVVVPWLRREPQRLQGRGCGSRLLRRGGRGACGGEERGRHAREE

SEQ ID NO: 325502 - protein, 155 aa, Zea mays
  Clone ID: MRT4577_59928C.1.pep
AMINGYAMHGRSREALEAFGQLRAQGLWPTDITFIGVLNACSHSGLVDEGRALLAAMEEEYGIVPKVEHYGCMVDLLGRAGRVEEAFDLVRSMKAKPDAAMWASLLGACRLHKNLALGQRVADYLVANGLANSGTYVLLSNMYAAAGKWREVGRV

SEQ ID NO: 325503 - protein, 99 aa, Zea mays
  unsure (1)..(99): unsure at all Xaa locations
  Clone ID: MRT4577_59929C.1.pep
MPKIIMRSICEKGSFKDSITDSVNGLTKSISYEXXLYNYHIMDKKVHACILCGQXLITXDVDRYIMLYSLDKIEKKIQXQNYKERRIGEDVHMNIEVAL

SEQ ID NO: 325504 - protein, 123 aa, Zea mays
  unsure (1)..(123): unsure at all Xaa locations
  Clone ID: MRT4577_5992C.1.pep
TAARRRRRQSRAASGTHHRPAKKRTNAGTGAASNQDTSEDHQHGWAPHARGKQRSXXXXHPPPPHNXASSAAEKKQRRGRQKKGQGDRPFIQSVFLRKWKGQDRRAREGEAPPPHPSXAXTTP

SEQ ID NO: 325505 - protein, 393 aa, Zea mays
  Clone ID: MRT4577_59930C.1.pep
MPSPSLTRLRPGWPRRWRSATPGSRWTPGLTTATTKSNCRFFTYEELYQITNCFSSQNLLGEGGFGSVYKGCLADGREVAVKKLKDGGGQGEREFHAEVDIISRVHHRHLVSLVGYCISDDERFLVYDFVPNVILLFHLLGRGVPVLEWPARVKIAAGSARGIAYLHEDCQPRIIHRDIKSSNILLDNNFEALVADFGLARLAMDACTHVTTRVMGTFGYLAPEYASSGKLTERSDVFSFGVVLLELITGRKPVDASKPLGDESLVEWARPLLTQALETGNAGELVDARLNKNYNEVEMFRMIEAAAACIRHSASRRPRMSQVVRVLDSLADVDLTNGVQPGKSEMFNVASTAEIRLFQRMAFGSQDFTTDFSQSSWNNSQSRGLDASGSRPL

SEQ ID NO: 325506 - protein, 166 aa, Zea mays
  unsure (1)..(166): unsure at all Xaa locations
  Clone ID: MRT4577_59931C.1.pep
IGTLEAGQVFSFGVVLLXELITGRKPVDASKPLGDESLVEWARPLLTQALETGNAGELVDARLNKNYNEVEMFRMIEAAAACIRHSASRRPRMSQVVRVLDSLADVDLTNGVQPGKSEMFNVANTAEIRLFQRMAFGSQDFTTDFSQSSWNNSQSRGLDASGSRPL

SEQ ID NO: 325507 - protein, 59 aa, Zea mays
  Clone ID: MRT4577_59932C.1.pep
PWEILPLLGINLFGPSRQFQPSWRKRRAFMPVLGGPPLRRRELQGSCQLSLTLLGINAF

SEQ ID NO: 325508 - protein, 50 aa, Zea mays
  unsure (1)..(50): unsure at all Xaa locations
  Clone ID: MRT4577_59933C.1.pep
IRPLLSRSPVSVXSXLFLXSXXAMGKXKIGXNGFGRNXRXVXRXXLXSED

SEQ ID NO: 325509 - protein, 54 aa, Zea mays
  Clone ID: MRT4577_59934C.1.pep
IPGIRRMIICSDLMGICNNSQMQGILAYSLVVHQDCNHMFPAPHPIPVRVKKHF

SEQ ID NO: 325510 - protein, 92 aa, Zea mays
  Clone ID: MRT4577_59935C.1.pep
FGLARQYSFTIGSYASERPHPLHSMFNSSFRSGSRERSQVFGATASVDPDFVAMILVSVVFTDHDTGAFVRHMLFIRTHHDRQLLWRVISDR

SEQ ID NO: 325511 - protein, 160 aa, Zea mays
  Clone ID: MRT4577_59936C.1.pep
IGCRVETRFKLVPCPARKDARLKRQPFSFLNCSGRKQELSDSVVTDEDEAARGPGARETPLKGYTSSQQESPYTMRRVDSKPTTVHGCEDDARSTLTSSRSTADDLTRTCRSETGYPKGVREQGRSDGTQRSLTYSRTASRERSSFRRSCCLLAQRTPSV

SEQ ID NO: 325512 - protein, 94 aa, Zea mays
  unsure (1)..(94): unsure at all Xaa locations
  Clone ID: MRT4577_59937C.1.pep
DVACAARRGWVCWLSPRXPXCXXXRACXWYXTHDXVSCCGRCAVMKEXTALSTRXRXXREEHHASVVEXSCFLVRLYYVXWSLIIVVCXACVLI

SEQ ID NO: 325513 - protein, 130 aa, Zea mays
  unsure (1)..(130): unsure at all Xaa locations
  Clone ID: MRT4577_59938C.1.pep
INESWGAXMKXXLEXXRRXXHXXALXXVNXAXXMPVWYTPYXPAXEAGKAXQRGRXVTXPWVGGPIQAASIAQXXGHRARRVNREGXXGGATSWGXHEEGXXAPCGSGSEXARSPPPPALSPWLCGRXRR

SEQ ID NO: 325514 - protein, 70 aa, Zea mays
  unsure (1)..(70): unsure at all Xaa locations
  Clone ID: MRT4577_59939C.1.pep
MKTFDRGPVFFLREWKRXRTFLTLFIITGFIITNMTTNFTEEDLKNSKFVQEHKKRSPTGNRPNRLLMKN

SEQ ID NO: 325515 - protein, 127 aa, Zea mays
  Clone ID: MRT4577_5993C.1.pep
AVVLAGSIFLNSVQPVLSGVAIGAGWQALVAFVNIGSYYFVGIPLAALFGFKLGMDAMGIWLGMTLGTLLQTAILVFISYRTKWEKQAMRAEERVREWGGRADALPSATQVAPAAEDAGPPSNASAT

SEQ ID NO: 325516 - protein, 65 aa, Zea mays
  Clone ID: MRT4577_59940C.1.pep
SRRRLYLLIIARCSFYTRTLFFWNCVHGQASGNVNVSVYTHPFEVSLGPKIKIVVYTTELLNNYI

SEQ ID NO: 325517 - protein, 276 aa, Zea mays
  unsure (1)..(276): unsure at all Xaa locations
  Clone ID: MRT4577_59941C.1.pep
RFPIIIXELXIFGPFVIFGLFGFLWVLVWIPAISGTPGEHAQISAYELKYITKGQKLVKPQIGSEKXKKFPPFSKLLSKWPTWALICANAMHSWGYFVILSWMPVYFKTIYHVNLREAAWFSALPWVMMAVLGYVAGVVSDMLIRNGTDITLTRKIMQSIGFLGPGIALLCLNAAKSPIIASAWLTVAVGLKSFGHSGFLVNLQEIAPQYAGVLHGMSNTAGTFAAILGTIGAGFFVDRMGSFRGFLILTSLLYFSSALFWDIFATGERVDFDGTG

SEQ ID NO: 325518 - protein, 137 aa, Zea mays
  unsure (1)..(137): unsure at all Xaa locations
  Clone ID: MRT4577_59942C.1.pep
MGTSAALCTVANPTQLYRARASLGKPVNGLCLSMGRQRAQRTIVCHAGSRISSHRVPDMEKQKLMNLLLLGAISLPTGGMVRPYGAYFEPAGSGNPSGGTYPKDKLGNNITVEAWLNTHGPXNRTLEQGXKGDPTYL

SEQ ID NO: 325519 - protein, 82 aa, Zea mays
  Clone ID: MRT4577_59943C.1.pep
GCEAKIGIQVFFPGCPRLVFFGDGQGLLTVSGPRWAGAACIVWFLGPTVVAVRLNLFVPVNSEPVGFVKIGPLPEVPSICNP

SEQ ID NO: 325520 - protein, 105 aa, Zea mays
  Clone ID: MRT4577_59944C.1.pep
PARRLRIRGGGVHAPLPEVAGPRGARLRGGPVSSPPSGLGCMPLAIPSVLREARRLALRALGGVPVPMPRHGRAGGSGNAEGEARREWGGGPWGRRLGACVFAFA

SEQ ID NO: 325521 - protein, 76 aa, Zea mays
  Clone ID: MRT4577_59945C.1.pep
QCPVRNLSDLGSIKWAQSGQVVEVGPGPPFVPLQLGSLCFILLPGQQLHGKSVWDRVFHAASIFFGLKFLLFVWVI

SEQ ID NO: 325522 - protein, 88 aa, Zea mays
  Clone ID: MRT4577_59946C.1.pep
KHFHAFKRHEPIKPRGSTSDLRAFNTNTIQIPKHFFGHSFFLKDLNVFPNLPVSSSENWKLNLPQLTLQTIIKKKTQFRINMTLITEV

SEQ ID NO: 325523 - protein, 64 aa, Zea mays
  Clone ID: MRT4577_59947C.1.pep
IGPTCAHWGNLGCYGWYLKAYITYYIGYCILYAIRCNIGGPLIKPCWLQRGQSFYKRPAYLLFH

SEQ ID NO: 325524 - protein, 51 aa, Zea mays
  Clone ID: MRT4577_59948C.1.pep
RVGGGGSSFLEDPPPYGARIAYAAGHGPPHGNDFNNINRQLQHHSDPNLFQ

SEQ ID NO: 325525 - protein, 127 aa, Zea mays
  unsure (1)..(127): unsure at all Xaa locations
  Clone ID: MRT4577_59949C.1.pep
IRIAVEPSYPIXTGENPPNPGPTPPSPAPPSSVCDSYNECPASTTCCCIYEYGKECFAWGCCPLEGATCCDDHYSCCPHNYPICNTQQGTCLAAKDSPLSVKAQRRTLAKPIGAFSGIATDGKKSSA

SEQ ID NO: 325526 - protein, 179 aa, Zea mays
  unsure (1)..(179): unsure at all Xaa locations
  Clone ID: MRT4577_5994C.1.pep
MVASADGPAIGIDLMTTXACVHARDCDRVNIMANDRCSRTTXPRTVAFTXDSRVACISSIAWQATQSAIMTPPSTXLLMPRRLIERMLTDAYAHSDIMVRTCKDMSETGDNTMNDDLHDAEEKHPAAVNISSMNLIDMREIAEXYLVNTINNAAMTVAVYFNDSLNDTAKDAGMIADPN

SEQ ID NO: 325527 - protein, 332 aa, Zea mays
  Clone ID: MRT4577_59950C.1.pep
MLRLEQYLRLLPATSHATAPALISGYSFLSSPLPRLSALRLARSRPPPLRGKTSSPVRASAEPDSTVKRAPEMAQREVARVVADQAVARLGARLLPSAVPADVVEFRNAAGNAVGSLDVQRGSPGSSIDFMLQSSLHCEVPNGAIDITSILIFLNASTDAPHFLLELIQGSSTSMVVILDLLPRKDLAFHPDYLQKYYEETGMDEQRRKIEELPQARPYRSPSLFVRSACSPTAIMVSIDCGQGGEKALEEIIHGQLAKVIQEALQTWLDNCVDSTIEMDEAERDCLLKRDRIVRSKSIEVDLTANLPRMFGPDVSSRVITEIRKAFGVQEP

SEQ ID NO: 325528 - protein, 89 aa, Zea mays
  Clone ID: MRT4577_59951C.1.pep
RAPLCCRPQTFIPFHSLRAGPPDLHCQPPRSSAFSASAPSDQACGPATTSSPCAAPLCMNRCARAHIQGLHQVLVPLTPPLFTVGRRST

SEQ ID NO: 325529 - protein, 99 aa, Zea mays
  unsure (1)..(99): unsure at all Xaa locations
  Clone ID: MRT4577_59952C.1.pep
VDEKIRXKXKXQRGREXSHSGSSYXXGGAGNXTXLQPTVTLNIXSLXRTIKTXEIQQFVGRAXXGGXWVWQTKKXKXXXTXXXXXCTSXDLHIQNINHK

SEQ ID NO: 325530 - protein, 98 aa, Zea mays
  Clone ID: MRT4577_59953C.1.pep
TTMPLPAEWHQRSRGSFEEQKKLQAVFIGKQGPQRGGPSIFTPKGKQGSYIPQGEKGGAEGTLKRIAAAAGAVFSWETRKKQPPHCLNKKQNTFFFPS

SEQ ID NO: 325531 - protein, 74 aa, Zea mays
  Clone ID: MRT4577_59954C.1.pep
GPPPPSGGRSASSVERDGCTLVRVRVSSECSYSLFAIFVQASQYLLRYGRVLAVCISWQYSKNARRHHRIVRGL

SEQ ID NO: 325532 - protein, 66 aa, Zea mays
  unsure (1)..(66): unsure at all Xaa locations
  Clone ID: MRT4577_59955C.1.pep
TILPQCIQAPIATLLAPYYXPIATSVCGNSIIKLHTIQHAISNIKSPLTPLFLQHSLSIIHKPHFM

SEQ ID NO: 325533 - protein, 182 aa, Zea mays
  Clone ID: MRT4577_59956C.1.pep
GGNAYSHLNFSNNAEGLIPSTLSILLPIDSPYVYFARIGETPTLSYAISLFRVGILETKHNLETKQTPQNHLQVRTQLRKVEISIPTLIRLFSCLRTCEKPHSYQHPRRTLHLLRYYPKPGIFSYASQQLTFITNNNYYQRETLPYNVYKLGIKTQFHNNTTTYGSFVLHTEEDDRYLRLSR

SEQ ID NO: 325534 - protein, 88 aa, Zea mays
  unsure (1)..(88): unsure at all Xaa locations
  Clone ID: MRT4577_59957C.1.pep
KCDSPISSQKASPMLYYAGLTTGEPPFTLCITXXTLGKLGNRHHPSKGTSFMMATRHEPPNASQNTRLQYIVPYTGFSERAAQGDRGN

SEQ ID NO: 325535 - protein, 402 aa, Zea mays
  Clone ID: MRT4577_59958C.1.pep
MAKPPNSIGRSSMPRSNEGLRLIFSAVIGIMLGYLFGISFPTVNITKLHFPSSIISYIEDRNSGITTQTLLNHAWASANNRKKNSSESNTDEIPKIYVPTNPKGAERLPPGIVVSETDLYPRRLWGDPSEDLTSEPRYLVTFTVGIGQKANIDAAVKKFSDKFTIMLFHYDGRTTEWDEFEWSKRAIHVSVRKQTKWWYAKRFLHPDVVARYDYIFIWDEDLGVEHFNAEKYIELVRKHGLEISQPGLQPDKGLTWQMTKRRGDQEVHKVTEERPGWCTDPHLPPCAAFVEIMATVFSRNAWRCVWHMIQNDLVHGWGLDFALRKCVEPAHEKIGVVDAQWIVHQAVPSLGNQGKSDNGRAPWEGVRARCRKEWGIFQTRLADAEKAYYLERGITPPNSTVV

SEQ ID NO: 325536 - protein, 155 aa, Zea mays
  unsure (1)..(155): unsure at all Xaa locations
  Clone ID: MRT4577_59959C.1.pep
MAKPLNGSGRSMPRSNEGMRLIFSAVVGVMLGYLFGISFPTVNITKXIDTLASLVFVSHILALEKGENTTLMWLXLHFPSSIISYIEDRNSGITTQTLLNHAWASANNHKKNSSESNTDEIPEVLQHTTAFLCCHISCILICLYWAKLGIVFVIF

SEQ ID NO: 325537 - protein, 48 aa, Zea mays
  unsure (1)..(48): unsure at all Xaa locations
  Clone ID: MRT4577_5995C.1.pep
XXQRWGTILFSFHFNCPFTALLTLTLPPMVMPDTLLLNHRRLMTQLAC

SEQ ID NO: 325538 - protein, 404 aa, Zea mays
  unsure (1)..(404): unsure at all Xaa locations
  Clone ID: MRT4577_59960C.1.pep
MAKPLNGSGRSMPRSNEGMRLIFSAVVGVMLGYLFGISFPTVNITKLHFPSSIISYIEDRNSGITTQTLLNHAWASANNHKKNSSESNTDEIPEIYVPTNPKGAERLPPGIVVSETDLYPRRLWGDPSEDLTSEPRYLVTFTVGIGQKANIDAAVRKFSDKFTIMLFHYDGRTTEWDEFEWSKRAIHVSARKQXTKWWYAKRFLHPDVVARYDYIFIXWDEXDLGVEHFNAEKYIELVRKHGLEISQPGLQPDRGLTWQMTKRRGDQEVHKVTEERPGWCTDPHLPPCAAFVEIMATVFSRNAWRCVWHMIQNDLVHGWGLDFALRKCVEPAHEKIGVVDAQWIVHQSVPSLGNQGKSDNGRPPWEGVRARCRKEWGIFQTRLADAEKAYYLERGITPPNSTSV

SEQ ID NO: 325539 - protein, 72 aa, Zea mays
  Clone ID: MRT4577_59961C.1.pep
CKAPQKKVTVLGRFIIRSAMGPSYTSEPSGKKQNSDAKPRKTSSTWGRIINPKTALVGVKLISNFRAHRCKN

SEQ ID NO: 325540 - protein, 157 aa, Zea mays
  unsure (1)..(157): unsure at all Xaa locations
  Clone ID: MRT4577_59962C.1.pep
HRVTEERPGWCTDPHLPPCAAFVEIMATVFSRNAWRCVWHMIQXTQYANALVCLKCSMLTHCFMQNDLVHGWGLDFALRKCVEPAHEKIGVVDAQWIVHQAVPSLGNQGKSDNGRAPWEGVRARCRKEWGIFQTRLADAEKAYYLERGITPPNSTVV

SEQ ID NO: 325541 - protein, 127 aa, Zea mays
  Clone ID: MRT4577_59963C.1.pep
MIFPPAFLQDSSSWNDNQQQQHHQQQQGHGHLLVAVSGSGDANHELLQQPIMGGALPDGGGGGGGGGQVGGPAKPMSMAERARLARIPLPEPGLKCPRCDSTNTKFCYFNNYSLTQPRHFCRACRRY

SEQ ID NO: 325542 - protein, 68 aa, Zea mays
  unsure (1)..(68): unsure at all Xaa locations
  Clone ID: MRT4577_59964C.1.pep
MTTKILALLTLVALXGASTNAFIIAHCXLAPSASIAQILAPSHXMFLEHPFERAYRLQLALAMSALLQ

SEQ ID NO: 325543 - protein, 313 aa, Zea mays
  Clone ID: MRT4577_59965C.1.pep
MGGALPDGGGGGGGGGQVGGPAKPMSMAERARLARIPLPEPGLKCPRCDSTNTKFCYFNNYSLTQPRHFCRACRRYWTRGGALRNVPVGGGYRRHAKRAKPKQQQQHAAAGTGAANGAMQQPPAGSMASSAAACTATTTMTTNALDAGPGGGMLPMLPPLLRLADFDAMSLGSSFSGISSMGKPGSIGAACYPHSVGGLEQWRVQQMQSFPFLHAMDQGPLGPPLAMAMAAPGGMFQLGLDTTSDNSRGGGGGGGEDGSSAGEALHMMQAATKRESYPAPPRAMYGDQHHNHLAAAGGYTSYSTNAAAGNHLL

SEQ ID NO: 325544 - protein, 83 aa, Zea mays
  Clone ID: MRT4577_59966C.1.pep
LRSICALGVFIVVAALRRSVGAYIFSLPPVVRGGGFFFFFCLPLSLRSFVCGGVLCCSLWCACLPPSCLSCCAGVFSGPSGAA

SEQ ID NO: 325545 - protein, 134 aa, Zea mays
  unsure (1)..(134): unsure at all Xaa locations
  Clone ID: MRT4577_59967C.1.pep
MREELAVLALLALAASATXAYISAECXAIHTATIHQPLPAHTPMGVDXPAVQDYTPQQXLAATVQQPPTAHVQQXGLXHPTIRTIATQQQRAQTHLEAXTASAYMQQPMRAXSNPLTCGDVGAYQLQQQVQRLI

SEQ ID NO: 325546 - protein, 136 aa, Zea mays
  Clone ID: MRT4577_59968C.1.pep
MTKINPSVASSRRKSRAAHFKAPSDQRRVIMSAPLSKELREQYNVRSIPIRKDDEVTIVRGSNKGREGKITSVYRLKYVVHVERVTRDKANGQSVPLGIHPSNCVITKLKLDKDREDILRRSKVGRELAANNKVTA

SEQ ID NO: 325547 - protein, 68 aa, Zea mays
  Clone ID: MRT4577_59969C.1.pep
GTGRPQGWDDWSDSSRQSRSRTAFYGQYQCYGEGSRTDGRVAWSHDLSQAEAAPFITKVWVGGQEWLR

SEQ ID NO: 325548 - protein, 40 aa, Zea mays
  Clone ID: MRT4577_5996C.1.pep
IKIESAQVEFFYAWGDVANLPASTAWLMHNNLYQGICFII

SEQ ID NO: 325549 - protein, 73 aa, Zea mays
  unsure (1)..(73): unsure at all Xaa locations
  Clone ID: MRT4577_59970C.1.pep
XQGRGETKENXKIMXTITHAADGTLRNAWSIFSETKKIVYDCLTSKSAQYYVQCSYMFILAHKHSQTCKKMSP

SEQ ID NO: 325550 - protein, 36 aa, Zea mays
  Clone ID: MRT4577_59971C.1.pep
QLLAECKSNAAVSRSCDNVCHYCQMTECSYMSGSYV

SEQ ID NO: 325551 - protein, 82 aa, Zea mays
  Clone ID: MRT4577_59972C.1.pep
SSSAQDTYNRLQALPQIIEHFPVQMKMRAHTQKISPHTHYSAFLTCVHIRRALYSAVGVAHGHISRIMRAHALHSRTSSSSI

SEQ ID NO: 325552 - protein, 43 aa, Zea mays
  Clone ID: MRT4577_59973C.1.pep
LLWSISLQSNLNKLSTHHIQRIYALAQTWADASRCLCSSMMLT

SEQ ID NO: 325553 - protein, 128 aa, Zea mays
  Clone ID: MRT4577_59974C.1.pep
MVEIPVVDLRLAGAQPEESARLRDACERLGCFRVSGHGVPAALQAEMKAAVRALFDLPDEAKRRNADIIAGSGYVAPSPANPLYEAFGLLDAADPADVDAFCARLDAPPRARETVKSYAEAMHELIVD

SEQ ID NO: 325554 - protein, 465 aa, Zea mays
  Clone ID: MRT4577_59975C.1.pep
MDPANSSAGAELDDASEWRTRALGGTEYSWLRAVPGGTGTTLLALRLSHGDAAEAALRSLRDAHPVLRARLRTSSPSGPTLAFPDPAPPFLLAPIPAPGSAPDFHALLEHELNRNPWADDPASSDDAPVLFATLYELPAATGGAALFVRIHTVACDRSAASALARELVALLAGAGGEEPDPEDAAAEAGLEARIPQRDIWKPFWARGLDMVGYSINGLRTSTLPFVETGTERSTQMLRLGLGLDETTRLLDACKENGVRLCSAVAAATMLAARQSKPMESGQQETYSVVTLINCRKFLEPVLEDRNVGFFYSAITNTHTIHGGEGLWELAKRCQDSYTSAKSNKKHLTDISDLNFLMCRAIENPQLTTAGALRTALVSVFEDPVVADVAEAQSKAGVEDCVCCATVHGIGPSIGVFDSIKDGKLDWACVYPSPLHSRKQVQEIFDKVKQILRHAAAAEENFEDCT

SEQ ID NO: 325555 - protein, 118 aa, Zea mays
  unsure (1)..(118): unsure at all Xaa locations
  Clone ID: MRT4577_59976C.1.pep
MLTLRDTALTDTANFLLSVTEDFTKPARNLPYVNTFFGRPSARYSNTRNLLYFFTKAFGLPYAPTYLSTGNFQNAAYFATGARTGLNGSLFRERXVQTTCKPHSLEEQMEXFKKLLTS

SEQ ID NO: 325556 - protein, 237 aa, Zea mays
  Clone ID: MRT4577_59977C.1.pep
MSFLDKFRTAAQKAGVQANAFAQQTGRAINEQAATARAGFSLPKECERAATILQAFVADPDHPDSALNAIPKAVLQQAKGLAVFSVIKAGFVWSGKIGSGVVIARLPDGSWSAPSCIGTGAVGFGLQIGADLTEFVIVMNSEEAVKAFAHAGNLTIGGSLSAAAGPIGTGGAINAAIRDPAPLFTYSRSKGLFAGISLEGTVLVERKETNKDFYGQPIPALDLLTGKVPAPEAASAM

SEQ ID NO: 325557 - protein, 587 aa, Zea mays
  Clone ID: MRT4577_59978C.1.pep
MDPANSSAGAELDDASEWRTRALGGTEYSWLRAVPGGTGTTLLALRLSRGDAAEAALRSLRDAHPVLRARLRTSSPSGPTLAFPDPAPPFPLAPLPAPGSAPDFHALLEHELNRNPWADDPASSDDAPVLFATLYELPAATGDAALFVRIHTVACDRSAASALARELVALLAGAGGEEPDPEDAAAEAGLEARIPQRDTWKPFWARGLDMVGYSINGLRTSTLPFVETGTERSTQMLRLGLGLDETTRLLDACKENGVRLCSAVAAATMLAARQSKPLESGQQETYSVVTLINCRKFLEPVLEDRNVGFFYSAITNTHTIHGGEGLWELAKRCHDSYTSAKSNKKHLTDINDLNFLMCRAIENPQLTTAGALRTALVSVFEDPVVADVAEVQSKAGVEDCVCCATVHGIGPSIGVFDSIKDGKLDWACVYPSPLHSRKQVQEIFDKAVDPARRSGMAAAEQLKELGEKLQAVVPAPADELAKLLEMTEEKVGRIFIGGLSCNTTKRTLERTFGQYGKVIEAQSYNFILIAAADSQRLQSVQFLHVRKLAKLLEKKFTNHNQIPVFGLLALKITAASFRTQKNHHRHG

SEQ ID NO: 325558 - protein, 125 aa, Zea mays
  unsure (1)..(125): unsure at all Xaa locations
  Clone ID: MRT4577_59979C.1.pep
DAASRDPCSLKKIIAPPKSKGPPFPGQTKKRHPGAGGPPTPTKRGNQNHPPEPHPLTTXPTTSPQKPIWPGVPGPPPPGETPWRTRGPGPGKRPQTQTPPPWGRQTGPTGAPWPFPPXRGXPAGP

SEQ ID NO: 325559 - protein, 61 aa, Zea mays
  Clone ID: MRT4577_5997C.1.pep
RSSFTSPVTKETILYSRSPSPKQSTSHLLTLRETTQDIQSDRLALLLYSRYSDKSAATKLI

SEQ ID NO: 325560 - protein, 120 aa, Zea mays
  Clone ID: MRT4577_59980C.1.pep
LEADGYILCQPMTTLPPLPAPITRNILPLRLPESEPQDLLYVSRHASPETDSFTSTITLLPLSKKKKKSLHAPSSHYGTLQGGLVAALAETVSIGVSGVKLESSRYPCLSTDCKTLIVYA

SEQ ID NO: 325561 - protein, 120 aa, Zea mays
  Clone ID: MRT4577_59981C.1.pep
AGAGPPNPPGGKKKPPRAKKKPTKKKPPTPDKNENPGPTKEGGGGKKPRKEKGNRAPKTKKGPKNKRKGGKQPPGGRRDPQKTVSPPKPWKPAGPGEKPPPGGQKPTPGEKKTPEGKKGS

SEQ ID NO: 325562 - protein, 65 aa, Zea mays
  unsure (1)..(65): unsure at all Xaa locations
  Clone ID: MRT4577_59982C.1.pep
LRAERSQXXTXAPXRHLNPTNXATRPREAPSHRXXVHPSRPQNEXXKNRASEENQLKARRRGTRR

SEQ ID NO: 325563 - protein, 264 aa, Zea mays
  Clone ID: MRT4577_59983C.1.pep
RSTQRPRTRGRTRGRTRGSRFQPTNTQSTSSPTVHDETASSTASPSVANNALPPHDPPAPPVRVSPEEQVMSDLLALTVSSNPSPSSYTPVTPEPGRLNQSSAPTGELPRAYHGDQGHVSAPYVAPWAQPQSQTAGSQQPTRTQAQVSYSSFAYPPPPWASQDSTESNPFVAAASSQQYQSTSRTPTMPPNLRPLLQQSHSFGVPLPTASLDSPINGNLKQPLSAGARRPSYVSSNKFFDDLFERNSDGSLKVGSTRHGDVYGK

SEQ ID NO: 325564 - protein, 222 aa, Zea mays
  unsure (1)..(222): unsure at all Xaa locations
  Clone ID: MRT4577_59984C.1.pep
MAFVTLMALASPVLLLLLRAAWVALSCYILTPLRIRRIMARQGVHGPPPRPLIGNLRDVSALMAQATADDMPALSHDIVGRLMPHYVLWSRTYGKLFVYWYGSEPRLCLTDAAQIKEFLSSKYAANATGKSWLQRQGTRHFIGRGVLMANGAHWSHQRHVVAPXAFMPDKLKGRVGHMXVECTKQTIRALQMQRRRPSSGGGRRPEVEICGYMTRLTGDIIS

SEQ ID NO: 325565 - protein, 64 aa, Zea mays
  Clone ID: MRT4577_59985C.1.pep
PRLRPLGDKFRKRIGGLVPPPWGKGTFPVLKTKGRGPPRVKFLGQLGGGLNPCTPGRVGRTGAH

SEQ ID NO: 325566 - protein, 186 aa, Zea mays
  unsure (1)..(186): unsure at all Xaa locations
  Clone ID: MRT4577_59986C.1.pep
NSARGYFSRPPPSHPPKPAVRAMRSHVPPPPGPRYRASARRLPPIPAIPAPSPRAMPVHAPPPQSPPQXAAPPPPPPSSPXPLHARVASSSLRSAPAPPPPPHAHTRLTPRRGAQPLRRRRGLGVELVALGRGWCRRRRWLWLVGRGRLRRVLLFLAARAVVVCPLVRAVWRGAVRGVRVLLLGPV

SEQ ID NO: 325567 - protein, 54 aa, Zea mays
  unsure (1)..(54): unsure at all Xaa locations
  Clone ID: MRT4577_59987C.1.pep
LKLYXLTLTYXLIFIFFFXXXYRTYFGDLSGGINNLKHLIEGKRMYDGLTSLIN

SEQ ID NO: 325568 - protein, 77 aa, Zea mays
  Clone ID: MRT4577_59988C.1.pep
LEAGRDTFQKGERDLHILRERIAWSPDDGEPDAALPYGHVSNPKIGRAASTTRERSPREGTTQSVQGSPAPSPKEHT

SEQ ID NO: 325569 - protein, 68 aa, Zea mays
  Clone ID: MRT4577_59989C.1.pep
FFFFFFFFKGIIDDVLKNKVLNHGAAWKLYITGKKREMGLYLSSPLFPCYAYIVWLILNHPRPILPLT

SEQ ID NO: 325570 - protein, 71 aa, Zea mays
  Clone ID: MRT4577_5998C.1.pep
RRRPPGGRSVRARYPMRGVNPRSRSEGEGDGSGRERRGLGMELQAVTAGGEREEQRCGAAGQGELESGRVG

SEQ ID NO: 325571 - protein, 65 aa, Zea mays
  Clone ID: MRT4577_59990C.1.pep
AAAGRRLACGGCHAKRAATGWAFYRCPGPWRPFCPRIGSDMYKGLHCSPNTPCLWPLIHKPENVF

SEQ ID NO: 325572 - protein, 158 aa, Zea mays
  Clone ID: MRT4577_59991C.1.pep
MSSHLAAALVQREKQQQTMRSLSSRDLGPSAARASALGSPLSSSWSKWGSPSGTPDWGINGEELGKLRRSSSFELRSGGDDPDLSWVHTLVKESPPEKQVTTAESISSVGPSPLMPPGMNNGDGSGLSTQLDGHDQAAVIGALLEQMQLDQQIGSLAT

SEQ ID NO: 325573 - protein, 111 aa, Zea mays
  Clone ID: MRT4577_59992C.1.pep
KLSKGTFPFHEDIPSTFEHTENEVEALDEVIAGHGDLYALLASRGTAAAFMKAGCTHAKIVNRPTFSLSPTYLVDIPSEARSIGNRFITQIWAKGGRELPGDEARNLLKPV

SEQ ID NO: 325574 - protein, 68 aa, Zea mays
  unsure (1)..(68): unsure at all Xaa locations
  Clone ID: MRT4577_59993C.1.pep
YDINGLCFRSTKSKVIHPDAAYNIGVIARVVDAYSHDFNYYRTIQDVIEYSYTKNXNLKARVVCVVTT

SEQ ID NO: 325575 - protein, 72 aa, Zea mays
  Clone ID: MRT4577_59994C.1.pep
DKVVRHTFIRYMQLNLHKWGYHRGDVPSAFSCRAPRTQATVTICGGAQNACRSLELSSIVQQGCVCRRLSFE

SEQ ID NO: 325576 - protein, 74 aa, Zea mays
  Clone ID: MRT4577_59995C.1.pep
HLIRYSTRRPPTSIAPPEQYAAYKKHLMDEGIKIKFEYEVIKGYAVWLNQSQLQAIKKDPRVKTIEEDSTVHTV

SEQ ID NO: 325577 - protein, 126 aa, Zea mays
  unsure (1)..(126): unsure at all Xaa locations
  Clone ID: MRT4577_59996C.1.pep
MAAAGWLRRAAAVSLPRLPSGLPLIPPPPSGPLTEAQSLVVPGLGAAAGPAMELMAVPKKKVSKYKKGLRNGPKALKPVPVIVRCRXLKAMFANTSIXFDXCCGRVKLPHFYCCSGERGNPSESNS

SEQ ID NO: 325578 - protein, 53 aa, Zea mays
  Clone ID: MRT4577_59997C.1.pep
LGGEPGIFCPFLNWEHFFLYGSVFYLWGNLLNSAPCGKIFFPGIFTKPLNREH

SEQ ID NO: 325579 - protein, 102 aa, Zea mays
  Clone ID: MRT4577_59998C.1.pep
MLHPPPLFFNFYKKAPILSPPKRQQRNPLNLPVIPSGLSPMVETCPKPPPPPQKLFFVHRPIDLFLLILQNRFVESKKKKKKKKKKKKKKKKKKKKKKKTPP

SEQ ID NO: 325580 - protein, 248 aa, Zea mays
  Clone ID: MRT4577_59999C.1.pep
PTRPSKESFVFRSSCCEAAEPAKGADDDDDGRCQRRRDVGTETTPLGSSCHTPLKSASPARHNTPASRSSGPLVPYAGGGGGTDISELAGFRLAKLDLGARFGAHATLVGWSSKEEEEDDEDVSKSLRHFEATVGGIACDRRGGDCRWDDDDRAKSCIRYQREEAKIQAWVNLESAKAEAQSRKLEVKIQKMRCNLEEKLMRRMTTVQRRAGEWRATALAQHLQQLRRITRDWRGLRDNLFIFLSILS

SEQ ID NO: 325581 - protein, 41 aa, Zea mays
  unsure (1)..(41): unsure at all Xaa locations
  Clone ID: MRT4577_5999C.1.pep
MPVKGGTKCIKYLLFGFXWLAGIAVLAIGLWLRFDSQTKSI

SEQ ID NO: 325582 - protein, 595 aa, Zea mays
  unsure (1)..(595): unsure at all Xaa locations
  Clone ID: MRT4577_599C.1.pep
MLPSTVGGRGRGRYLMLGIALALAALLALASASESDHKYKTEEPVKLWVNKVGPYNNPQETYNYYSLPFCQPSENPTHKWGGLGEVLGGNELIDSQLEIKFLKNVEKGFICTLELDAKKVQQFADAIESSYWFEFFIDDLPLWGFVGETDKNSENKHYLYTHKNILVKYNDNRIIHVNLTQESPTLLEDGKKLEMTYSVKWVATDVSFARXRFEVYLDYPFFEHQIHWFSIFNSFMMVIFLTGLVSMILMRTLRNDYAKYAREDDDLESLERDVNEESGWKLVHGDVFRPPQSLMFLSALVGIGTQLAALILLVIVLAIVGMLYIGRGAIITTFIVCYALTSFISGYVSGGLYSRNGGKNWIKAMVLTASLFPFLCFSIGFALNTIAIFYRSLAAIPFGTMVVMFVLWAFISFPLVLLGTVVGRNWSGAPNNPCRVKTIPRPIPEKKWYLTPSVISLMGGLLPFGSIFIEMYFVFTSFWNYKVYYVYGFMLLVFVILLIVTICVTIVGTYFLLNAENYHWQWTSFSSAASTALYVYLYSIYYYHVKTKMSGFFQTSFYFGYTLMFCLGLGILCGAIGYLGSTLFVRRIYRNIKCD

SEQ ID NO: 325583 - protein, 56 aa, Zea mays
  Clone ID: MRT4577_5C.1.pep
ASYIIYIYVCMCGNLDDAALDIKGYIYMDHAYISDHQSYRVLPSRLARRQYIIRKD

SEQ ID NO: 325584 - protein, 132 aa, Zea mays
  unsure (1)..(132): unsure at all Xaa locations
  Clone ID: MRT4577_60000C.1.pep
SRRRLRRRYAPDVACFHRLEMTKGTLKEGMVGDYETRYSAHXSVRTNNMVVFQSYQDXIASPEERRVYMTRAFVPPEDGELLQILHYRSVEKYEPHYDYCHDKEIIALGGRLIATVLMCLSNVEKGGETIFP

SEQ ID NO: 325585 - protein, 80 aa, Zea mays
  Clone ID: MRT4577_60001C.1.pep
MDYAKNLKKLAPARKIRKKTKSQGCQTEQKKGAPPALPPAGIRNSSNTEEMSLASLDDLLKEFGDTLEKEFGSTLDSTRM

SEQ ID NO: 325586 - protein, 53 aa, Zea mays
  Clone ID: MRT4577_60002C.1.pep
SHKQADVAHHGRPLRLSRARTPKLPEHPYITLMSATKLTPNTCCLTVSSDRLE

SEQ ID NO: 325587 - protein, 61 aa, Zea mays
  Clone ID: MRT4577_60003C.1.pep
SEVFFYFQFYANTGNIYQPTQANLNAHNARILKHRDLLDHLSKRFTTRKHYSLAQNYTTQK

SEQ ID NO: 325588 - protein, 113 aa, Zea mays
  Clone ID: MRT4577_60004C.1.pep
APDGVRRRRCGGPAPDARRPRSKPPGGRWSDRHRLGPPRDRAGALAGSRRCETCGLRVRRSEATGASSFAQPAAAICGSATRAPIVKVEASGSTATPLCSGASGDDHLSAYCY

SEQ ID NO: 325589 - protein, 131 aa, Zea mays
  unsure (1)..(131): unsure at all Xaa locations
  Clone ID: MRT4577_60005C.1.pep
QNYRLLYDTNGLLLLHPITDDVAYYKLCEERYVHSAKKXIPYLNTYYSRTIRIHNPLMNDNDTINIDLXTNKIIYFIKHDLSNVIIATASSNTERVGVIKNKDEHKGGFYTIHVEDFMNQQFPTQMVNIFT

SEQ ID NO: 325590 - protein, 215 aa, Zea mays
  Clone ID: MRT4577_60006C.1.pep
MATAVPAACLRAPCSSPAAVARRLGAGGPSLRKRHCAVAPVAAACGPAPPRLLDNVAAEAKKGFLPVVDKKAGYSFLYPFGWEEVAVQGQDKVYKDVIEPLESVSVNSIPTSKEDIRDLGPPDKVAEALIKKVLAPSTQKTKLIEAKENDVDGRAYYTFEFTAQAPNYTRHALGAIVIANGKFYTLTTGANERRWEKMKDRLHTVVDSFKIENRI

SEQ ID NO: 325591 - protein, 129 aa, Zea mays
  unsure (1)..(129): unsure at all Xaa locations
  Clone ID: MRT4577_60007C.1.pep
PGGEGGPFLFTVKQLVAPGKPKSFGGPFLGPSYRGSSFLDPKGRGGSPGXDNPVALPPGGKGAEEELPKENIKNPPSPPGNIPLRVPKSNPETGGVIGVFERGHPSDPALGAKGPKDVKIPGVWSPPPE

SEQ ID NO: 325592 - protein, 154 aa, Zea mays
  unsure (1)..(154): unsure at all Xaa locations
  Clone ID: MRT4577_60008C.1.pep
MHKLASLSPCWGRARMDXSTXRTEKDGCPPELVQDYSLHLPRSVQMDVPXEWTLINTDRYEELPPYEPDXQYLHHACIAWKIYLPKGIHVCGFLKNYLRRPTNESLPPHFFQSXGWLXRNILHELHIKYIIHLYPYQGRLIPHQPRNDLYQPTG

SEQ ID NO: 325593 - protein, 242 aa, Zea mays
  Clone ID: MRT4577_60009C.1.pep
MATAVPAACLRAPCSSPAAVARRLGAGGPSLRKRHCAVAPVAAACGPAPPRMLDNEEAVCSVRRRVLVAGAAAFLSRPNPAAFAAEAKKGFLPVVDKKAGYSFLYPFGWEEVAVQGQDKVYKDVIEPLESVSVNSIPTSKEDIRDLGPPDKVAEALIKKVLAPSTQKTKLIEAKENDVDGRAYYTFEFTAQAPNYTRHALGAIVIANGKFYTLTTGANERRWEKMKDRLHTVVDSFKIENRI

SEQ ID NO: 325594 - protein, 232 aa, Zea mays
  unsure (1)..(232): unsure at all Xaa locations
  Clone ID: MRT4577_6000C.1.pep
RAGDCSSLVTPPIPAPCSQAAIASXLLPPYLPXMLPSHSETPMVXTFKLITSIENXQVPLVPLYVXKTPSLSLGQSLXDTITAQHLQNLELPVTNPDPLENLSPYSHQQHXLPFCQLSTLNPAAYLQQQLLPFSQLATGYSHQQQLLPFNQLAALNPAAYLQQQILLPFNELAAANRASFLTQQQLLPFYQQFAANPATLLQLQQLWPFVQXALTXDPAGFYPTHIIXGAPF

SEQ ID NO: 325595 - protein, 56 aa, Zea mays
  Clone ID: MRT4577_60010C.1.pep
YTRERESYIEHTRSGKTWQRRPCTGHKKTLCFQIQLTYEASRCLLHTMLSDHKHLR

SEQ ID NO: 325596 - protein, 107 aa, Zea mays
  Clone ID: MRT4577_60011C.1.pep
NHLPKGEEFNHKMKELKTLCNPIIPKMYQGAGPKMEVSGGMDENPPAENGAPGPKIKKVDKTVCDSIVCQIKWLAGPVPAQLMVVVPVKPRKNLLLVNKIIVARVFG

SEQ ID NO: 325597 - protein, 86 aa, Zea mays
  Clone ID: MRT4577_60012C.1.pep
VFWKTSSPPLAPPLLLGLGKKTVKRGALVLGFPKRTRVSRGKIENLRGGKKTRTGKIQGALVPREKMVGNPFWKNPPLGPRELNPL

SEQ ID NO: 325598 - protein, 61 aa, Zea mays
  Clone ID: MRT4577_60013C.1.pep
TLPLTIRCYISYVYSLAELERSNYIVSCVAGGDYLCIYEGGWSCCREVILRLARVLRGLIL

SEQ ID NO: 325599 - protein, 75 aa, Zea mays
  Clone ID: MRT4577_60014C.1.pep
KNQVRVQKCKLALSISLKMLHFPPCPKSNVLVSILPSHIMWWAVDFIGDPCRIYASHHVYWIMLSMLVTFLPRVR

SEQ ID NO: 325600 - protein, 92 aa, Zea mays
  Clone ID: MRT4577_60015C.1.pep
FTDVQGSHHRGNAQVQADPSQETRSSGSGWRQLEDARGDALLRAVKRLTCTQDVVPRITCSLPSHVELSSTRKSGSLKIFIFCAIVSERPYQ

SEQ ID NO: 325601 - protein, 104 aa, Zea mays
  Clone ID: MRT4577_60016C.1.pep
GRPQGRVPCASGGQVTGLGAPERVAKGLPLGPPPGQGRQPLPQRRHPGAAFRGIFRPCAPKKGIFGSGPGVTPPLELTTVFFLFVTRHSHTKRRKHKKLKKKPK

SEQ ID NO: 325602 - protein, 65 aa, Zea mays
  Clone ID: MRT4577_60017C.1.pep
INKKNKEKPAPIKFTPRGEKKTKNFLWEGQAKLPWVGPREGLKGESLQFNNKLHRPLEGGKPPQP

SEQ ID NO: 325603 - protein, 67 aa, Zea mays
  Clone ID: MRT4577_60018C.1.pep
PTPRSGEPGAPFIVALSVGLFRGQIKRGAPSRFGGLAKYTHLFRIEKKLGYPPVSPGAKFRAPVDPF

SEQ ID NO: 325604 - protein, 136 aa, Zea mays
  unsure (1)..(136): unsure at all Xaa locations
  Clone ID: MRT4577_60019C.1.pep
QQQFLPFTQKAAVNXAYHLQQQQLPFSEFXDAYPQQFFPFMQVTALNSPVYXQKQRLLPLRQLAGVSPVTFLTQPQLLPFHQHAAPETGTLLQLQQLLPLNLLVLTKPSAFHQHPISGGACFTFSRSESTKYSHSS

SEQ ID NO: 325605 - protein, 79 aa, Zea mays
  Clone ID: MRT4577_6001C.1.pep
CETAQCWRRGRRISGCAQRRRRPSPPPSHCSTMSMSLRDHIRKRREEEDDDMMLFIFPALYLMGSTRSGGTKEETPYIR

SEQ ID NO: 325606 - protein, 69 aa, Zea mays
  Clone ID: MRT4577_60020C.1.pep
SLLFVLGWGGYKSCVTEYWHLLLFIVKVYFIRLLGFQPYFLQGCDVKLYMFHFSLASFSSYVSILLQAP

SEQ ID NO: 325607 - protein, 135 aa, Zea mays
  unsure (1)..(135): unsure at all Xaa locations
  Clone ID: MRT4577_60021C.1.pep
TPWTCPPPAPEVAPSPRHPWRRHPPASAPRAPSRPAPSPPAPAGAPPPAAPPAAAXPTPPTPRRLCSGDGNALLEPPAAGERLRWRRGDGLRSLETDEAVAVPLSPASKEPDLGLADSISGNAAGGADSEARKRN

SEQ ID NO: 325608 - protein, 84 aa, Zea mays
  Clone ID: MRT4577_60022C.1.pep
ASNGNLCPPHYGSAPLSVVFGNRPFFLSMCRIPCTLTEYLWTTALVKKFFQATFFCQGYLNIVWFFLAFCIAPVYVLCLSGHFL

SEQ ID NO: 325609 - protein, 100 aa, Zea mays
  Clone ID: MRT4577_60023C.1.pep
MVPKPQGSAVQSATHRPLPPLPKLRVRRPNKPEVNPCLGAMSSVLGCWASSGYSMQACAQLEQKLRQCMDAPRDPNQKKNNINYHLSRMYPKIVGPHKRN

SEQ ID NO: 325610 - protein, 73 aa, Zea mays
  unsure (1)..(73): unsure at all Xaa locations
  Clone ID: MRT4577_60024C.1.pep
KKKKKKKKNKKXKKKKKKNKKKKKKKKKKKKKKKKKKKKKRGGLFRGPKFPSGGLQGNGFFMGPPKLNHRPLF

SEQ ID NO: 325611 - protein, 128 aa, Zea mays
  unsure (1)..(128): unsure at all Xaa locations
  Clone ID: MRT4577_60025C.1.pep
MKQNRAPSCSGPQGAPPPTPPPRPDDPHFIYPMSLPAPTGQPTRQPLVXAXPPTGPPPERGKNPPVRVELNKKPRPCRPPPPDPSIPPPPVPPPRAPPGHGPTRWPFGPPKGPGGPFGAPKGPVRPPG

SEQ ID NO: 325612 - protein, 120 aa, Zea mays
  Clone ID: MRT4577_60026C.1.pep
MAPIAVGDVVPDGTISFFDENDQLQTASVHSLAAGKKVILFGVPGAFTPTCSMKHVPGFIEKAEELKSKGVDEIICFSVNDPFVMKAWGKTYPENKHVKFVADGSGEYTHLLGLELDLKD

SEQ ID NO: 325613 - protein, 164 aa, Zea mays
  Clone ID: MRT4577_60027C.1.pep
MRGSGGGGSGKLGQHVSWLWRGPRRALCAARDLYVRSLTGCAGHLPGDAAFGYPTFAAAPSFGSFASSSSSRRASDADQDLRELVRAASQRRAAELERQRHPAAVPRSRSVAAAMARIDEDGPCDFASSAASAAVFPRSRSFAPGAGRVVGVAGRRGSVATLAA

SEQ ID NO: 325614 - protein, 113 aa, Zea mays
  unsure (1)..(113): unsure at all Xaa locations
  Clone ID: MRT4577_60028C.1.pep
MGDGNFYRNYGKTFKKPRGPYEKERLDAELKLVREYGLRGKRELWRGPDGLDRIPNGGRDLVPPGEKNPPRIFXGGGLFPPMNPFGLVGEGPKKLGYGLGPPGEKFPPRGVPK

SEQ ID NO: 325615 - protein, 77 aa, Zea mays
  Clone ID: MRT4577_6002C.1.pep
DAALSSYPRVTRYFCVACLRERLHGLEASAAAASAPGRKSTSAMPSLFARPFAAGSSSVSDPVEFSCGRGGHHTLTT

SEQ ID NO: 325616 - protein, 530 aa, Zea mays
  unsure (1)..(530): unsure at all Xaa locations
  Clone ID: MRT4577_60031C.1.pep
MLRTKSTRSRGGKARRAAPGAASAVKPAKADGRSPSGELSLQLEHVSLTSLLSDRRPASGLTRFEVLLEEEESGCYRADPTPWRLRLPEPQSMPPPIPTHAFTQASPVDADETMEEKDCCILSQDFFCTPDYITPEMPQVANEFDDDDKENIPCPKSPEKSANPRSKRYRTDCSPKAREVTDFSFDHQITPVLFDSLTRDDSEEEQPKQPALEKRGGYVSQSAVALRCRVMPPPCVKNPYLNTDPCIDAAVYGGRQCNSAVFSPSIGGNGLSRYRTDFHEIEKIGYGNFSVVFKVLNRIDGCLYAVKRSIKQLHNDMERRQAVKEVQAMAALGSHENIVRYFTSWFENEQLYIQMELCDRCLSMNRNQPVKRGEALELLYQICKGLDFMHERGIAHLDVKPDNIYVRNGIYKLGDFGCATLVNRSLAIEDGDSRYMPPEMLNDKYEHLDKVDIFSLGAAVYELIRGTPLPESGSHFQQRRSXDTLLLTSSPRPYRSRSAAAPDSDQSSRQREFRSLRHPSFDKLHKASSK

SEQ ID NO: 325617 - protein, 85 aa, Zea mays
  Clone ID: MRT4577_60032C.1.pep
PLPFPRWVSPYSKKHPFFPFSQWPPLSPLANFQEHIFPPFVGVRNNNLFSLLTKITRAPVFPAAGGELCYPSPICNGATHLSNLL

SEQ ID NO: 325618 - protein, 642 aa, Zea mays
  unsure (1)..(642): unsure at all Xaa locations
  Clone ID: MRT4577_60033C.1.pep
DFCILSQDFFCTGDYITPEMPQVANEFDDDDKENIPCPKSPEKSANPRSKRYRTDCSPKARDDHQITPVLFDSLTRDDSEEEQPKQPALEKRGGYVSQSAVALRCRVMPPPCVKNPYLNTDPCIDAAVYGGRQCKYEVFSPSIGGNGLSRYRTDFHEIEKIGYGNFSVVFKVLNRIDGCLYAVKRSIKQLHNDMERRQAVKEVQAMAALGSHENIVRYFTSWFENEQLYIQMELCDRCLSMNRNQPVKRGEALELLYQXWFCCLPILFLLCHRAWSRRIRGLSLNTSVFFTNNSVETWNYSFRMFHILASISINSFXLLIWFRRNVFRELIMWFTKLSQQNWRKTHXCPSLNXRDWIDVFGSLMLXRSTTPACXKSNPYKMQRNIGCMPVLXYDLRSPNMFDLCKFXIELLNXQFQSFLYQVGKYVNLCSVGHALVMFLFXPPVKFIQHHSFXISGSLLKNLSGSLHQKTFFYLILFICTLVTILTVSFVNPKICKGLDFMHERGIAHLDVKPDNIYVRNGIYKLGDFGCATLVNRSLAIEDGDSRYMPPEMLNDKYEHLDKVDIFSLGAAVYELIRGTPLPESGSHFTSIREGKIALLPGCPMQFQSLIKSMMDPDPVRRPSAKEILRHPSFDKLHKASSK

SEQ ID NO: 325619 - protein, 57 aa, Zea mays
  Clone ID: MRT4577_60034C.1.pep
GRVGRSDHWADVRPNSAEPEGDVQAAARYSMSLRCCRQRPPLKKLCAVVYPPASYLA

SEQ ID NO: 325620 - protein, 275 aa, Zea mays
  unsure (1)..(275): unsure at all Xaa locations
  Clone ID: MRT4577_60035C.1.pep
PYFCLGDLWEAFNEWSFYGAGVPLVISGSESVIQYYVPYLSAIQLYADPLKFQSKIRHSWEESDGESMDTSSEGSSETDXPIKKLNCGSYISIGWWLSKGXDEMHSPSTRPIFEYLETDPPFGREPLTDKVSVLASRFPDLKKFRSCDLLPTSWMSVAWYPIYRIPTGPTLKDLDACFLTFHYLSTPSKDTDPSTPPCPNLGGLNCNMNAAGKLTLPVFGLASYKLKSSIWSSNRPEEQQLAASLTQTADDWLRHRQVYHPDFRFFLTHFNTALR

SEQ ID NO: 325621 - protein, 407 aa, Zea mays
  Clone ID: MRT4577_60036C.1.pep
DCCILSQDFFCTPDYITPEMPQVANEFDDDDKENIPCPKSPEKSANPRSKRYRTDCSPKARDDHQITPVLFDSLTRDDSEEEQPKQPALEKRGGYVSQSAVALRCRVMPPPCVKNPYLNTDPCIDAAVYGGRQCNSAVFSPSIGGNGLSRYRTDFHEIEKIGYGNFSVVFKVLNRIDGCLYAVKRSIKQLHNDMERRQAVKEVQAMAALGSHENIVRYFTSWFENEQLYIQMELCDRCLSMNRNQPVKRGEALELLYQICKGLDFMHERGIAHLDVKPDNIYVRNGIYKLGDFGCATLVNRSLAIEDGDSRYMPPEMLNDKYEHLDKVDIFSLGAAVYELIRGTPLPESGSHFASIREGKIALLPGCPMQFQSLIKSMMDPDPVRRPSAKEILRHPSFDKLHKASSK

SEQ ID NO: 325622 - protein, 68 aa, Zea mays
  Clone ID: MRT4577_60037C.1.pep
MDAAGKLTLPVFGLASYKLNSSIWSSNRPEEHQLVASLMQTADDWLRHRQVYHPDFRFFLTHYNTALR

SEQ ID NO: 325623 - protein, 73 aa, Zea mays
  Clone ID: MRT4577_60038C.1.pep
WWTLEAVEFVADGEHHRRYVGGIVGEVRVVAGGDYDDLEDGLERGHVQLHAHAPPASCVLRSRSSRILTCACR

SEQ ID NO: 325624 - protein, 133 aa, Zea mays
  unsure (1)..(133): unsure at all Xaa locations
  Clone ID: MRT4577_60039C.1.pep
IPISTANPLRSFDRTGGADQEGRTRMEQYPNAVPKTADKLRALRTAETRLAQYGPPVQYMRSTVHQLVREVMCQGGDLTGVPGTCLQCIYGASVCHEKALRKPTARGGFCMANAVHNSNGCQLFXCTASDRWL

SEQ ID NO: 325625 - protein, 154 aa, Zea mays
  unsure (1)..(154): unsure at all Xaa locations
  Clone ID: MRT4577_6003C.1.pep
MADQGNQPTVLHKLGGQFHLRSISLKGXRARNICPSVSSYERRFDTKNYMTHSLLMPSMSVSDDINVPEMRTPLCANAPADTGSKNSMIDIMMSAASAAVSNTAAAPIQRVKLLIQNQDEMIKSGRLSXPYKTIADCFKSPINDEXVTSLWTAN

SEQ ID NO: 325626 - protein, 266 aa, Zea mays
  Clone ID: MRT4577_60040C.1.pep
GTAKCPNCGEKDLPVCELADKIREEIMELFHRRRRIGQRLQGRILPSVVHILHARTRGLGHLTVKKVDNYVAEVRDNNHVHSKHIVNVDLRQCSCNEWQHTGKPCHHALCLTTTQQFKDVRIEDFVDDYYSVEKFVKVYSRVVEPIGDKSFWPRVSFAKEVGAPIGMWGDGRQRKNKIKGCVEGGSGKKANENENVTSKKMIRGRFKCPNCGEFGHRKASYKCPFNGTKKRKRRPRKNVTKGWFPKDFEASSQLVLQENEVHPLAT

SEQ ID NO: 325627 - protein, 95 aa, Zea mays
  unsure (1)..(95): unsure at all Xaa locations
  Clone ID: MRT4577_60041C.1.pep
MGKRKSXAAKPSPKKRMDMLDTXVFPCPXCIHWSSVECRIDSARYLIGXEPSCGICHENFSTXTVNALTEPIDLYXEWXIDECERVYTVEGHDDA

SEQ ID NO: 325628 - protein, 92 aa, Zea mays
  unsure (1)..(92): unsure at all Xaa locations
  Clone ID: MRT4577_60042C.1.pep
QKXXTXRETGAKHTXXSQXPHXQATXKQAPXQQHXXHPPXRRKHTRERTGXRTTXTXXQXDRATGRTXXPDGADHTNPKGGNTGHASRAGGT

SEQ ID NO: 325629 - protein, 92 aa, Zea mays
  Clone ID: MRT4577_60043C.1.pep
VREFCSGFVVSLCSSVPSPWPSILSSDQVVQKHRTSDGHTISLVDRILILVHPYGVPKGGPNFTLLLLLVPCIQTTQDDRCSRLNCSHLSFH

SEQ ID NO: 325630 - protein, 231 aa, Zea mays
  Clone ID: MRT4577_60044C.1.pep
KHSIQDYIDSSRRLPKARIQDLFQRKNMYAVTVGVGLMIFQQLGGINALGFYTSYIFSSAGFSGKLGTTLIGVIQIPITFFGALLMDRSGRRALLLVSSSGTFLGCFLTGLSFYFKAQGLCTQLVPTLALCGILVYYAAYSVGMGPVPWVIMSEIFSIDMKAIAGGFVTLASWIGSFAISYSFNFLMDWNPAGTFFLFSAASLVTVLFVAKLVPETKGRTLEEIQTLLKAT

SEQ ID NO: 325631 - protein, 99 aa, Zea mays
  Clone ID: MRT4577_60045C.1.pep
ASDVYAAWLTERLALPSLLPYASIQIRILASKKHVLLIILKPPPPPRVTGGRRLPHLPSDGCAITYRSFQRTSPATIILKPLPLPRMNGGCCLPRLQVT

SEQ ID NO: 325632 - protein, 57 aa, Zea mays
  Clone ID: MRT4577_60046C.1.pep
MFLFYFQISVRATIPSKPKPATSTDKIKAPSKTAAGNKKPAKAGIKQGSIMSFFKKA

SEQ ID NO: 325633 - protein, 57 aa, Zea mays
  Clone ID: MRT4577_60047C.1.pep
YQMSPYTHYITTDHNTATGSCAIPRRGAKFLRTIYGHVVRPLLSPRLARQARAGRVG

SEQ ID NO: 325634 - protein, 64 aa, Zea mays
  unsure (1)..(64): unsure at all Xaa locations
  Clone ID: MRT4577_60048C.1.pep
PKLSTPFPPPITSLHKKKNFFSITITITNIIIFHITNPFQYKLYPPPLYXNTTQPPQKKKKNGL

SEQ ID NO: 325635 - protein, 130 aa, Zea mays
  unsure (1)..(130): unsure at all Xaa locations
  Clone ID: MRT4577_60049C.1.pep
DYIESVRRLPKARIQDLFQRKNMYAVTVGVGLMIFQQLGGINALGFYTSYIFSSAGXKLDKFCPLKKRGIYSSFXTSGFSGKLGTTLIGVIQIPITFFGALLMDRSGRRALLLVSSSGTFLGCFLTGLSF

SEQ ID NO: 325636 - protein, 36 aa, Zea mays
  Clone ID: MRT4577_6004C.1.pep
EFMIAHLERFFKLFQYKTHRCSKIRQSVRTRGRTRE

SEQ ID NO: 325637 - protein, 70 aa, Zea mays
  Clone ID: MRT4577_60050C.1.pep
GPPLIVLGQSNGWGMPGCYYAFETLNPLLKVVLRGAGKMPTTSYFQGYRMKSNSKIEWLVAYQNFTHDVH

SEQ ID NO: 325638 - protein, 141 aa, Zea mays
  unsure (1)..(141): unsure at all Xaa locations
  Clone ID: MRT4577_60051C.1.pep
LYVCLFHARHYVYLLPALGPQVQGFVEDNNGNKASFLIGMWDESIYCSNSDTSKVKSADQLKGASLLWEKNKPAPNPTRYNLSSFAITLNELTPXLQEKLPPTDSRLRPDQRHLENGEYEKANAEKLRLERRQRMVSALAS

SEQ ID NO: 325639 - protein, 588 aa, Zea mays
  unsure (1)..(588): unsure at all Xaa locations
  Clone ID: MRT4577_60052C.1.pep
MPPRRERENRRLVAHPRLHAQNPKFPIPIPRALFFVYLSPDSEGNPRRHARVLEPSLPTPRFGSPSLEGSGTFWRGRMAVVDQSLLPQIHALFSDPLRVVSYKWLSRNFSVSSNDAKRLLQDFVNKHGTDLQVIYSVSGWLKNNPQNYCVKLISGPKLEEARQIFKDSCSVQIYSIQACIPKDTAVLWNPEFVQAEELFNQPFDYENCLRDNRFCGVLNSFVKRTSNGKHVSSLPPKPLNSAAAAAQSKPSVTPKEQFVTARRQDLPVSSKQGADTKSEKDNFTVLDKAGNGPVVKEQSVDAHASKSKAQNGKALPSNGGSLANMWGRASAKPKPPSTTNSTAVASVAATADAQICAKEEADGNSSDDEHGIKYKRGSTNANNRKRRAVFDYSDDEEDDNIVSIASPELPKQHTPDPVVGIAEDAEVNQKSLENEHDVPNNGKGSSTVVDSDFTSECKIKTIDPMNDSGITLKEKSSDPPINDKKQDSAXEPASKSPKRRKVLKTRIDERGREVTEVVWENEASADDKAEQNVNTIDATASGATVPSKPKPATNADKSKAPSKTAAGNKKAAKAGAKQGSIMSFFKKA

SEQ ID NO: 325640 - protein, 97 aa, Zea mays
  Clone ID: MRT4577_60053C.1.pep
MLEEAPGPINFTQMLTLFAARMSGGSDPDDVVRAAFKAFDKDGLIDGNDLKHALLTWGDKFTKKEVNDAFDAMDIDNQGMIDTESLIQMLIGGGDEE

SEQ ID NO: 325641 - protein, 86 aa, Zea mays
  Clone ID: MRT4577_60054C.1.pep
RRLVNDRGQGSGSFSPGTIVFRSLLSIIPGGQSFLPRTSLFSIHTIINVEKKDFGANSKDTNNCIDFYYYLNNTGFNLIWMKQCIK

SEQ ID NO: 325642 - protein, 67 aa, Zea mays
  Clone ID: MRT4577_60055C.1.pep
RHDGEANYTPVPLITQLRASHSTLMVALFSRAVIQRTGPYREALEKSLESPKVSPVRHHNHNNNIVS

SEQ ID NO: 325643 - protein, 61 aa, Zea mays
  Clone ID: MRT4577_60056C.1.pep
PPAQLLEDGWKVDYQTTKYSLVINRFPWPFEIKVTETKQVNNKTMRRCYSDGFMLTGRCFV

SEQ ID NO: 325644 - protein, 100 aa, Zea mays
  unsure (1)..(100): unsure at all Xaa locations
  Clone ID: MRT4577_60057C.1.pep
LAQHSGEPGGLPPCRWDGQGNELPTETGKTRAGAKVGLPAMDLSLAFPHATPSSIFPPYAYDYYPDDDLXTSEERSNMMNVKRLMAKEIAPILLSYRENA

SEQ ID NO: 325645 - protein, 65 aa, Zea mays
  Clone ID: MRT4577_60058C.1.pep
KKLIQHRLSWLGHVQPEAPICSEILSVRYVYRSLYIVMYGNTYTRRHRARDVRRAAEKKNKITEQ

SEQ ID NO: 325646 - protein, 36 aa, Zea mays
  Clone ID: MRT4577_60059C.1.pep
HNLRHTRLVPSELKLGHKVESERLPIDASLRASYEC

SEQ ID NO: 325647 - protein, 148 aa, Zea mays
  unsure (1)..(148): unsure at all Xaa locations
  Clone ID: MRT4577_6005C.1.pep
MAARDPMDAWMNRYRAFAEGVVVMVCPVLLAIALKKVDLKSEEHGGAVPTTMLVVAAVTLVAGICPYLVCCLSKRFFNYXWELXGSPHAATMLLAPLSSTCLVALACWIVHLILDSWAFPAVGALVEQSLTSDSYRHALHNPCGTRRC

SEQ ID NO: 325648 - protein, 297 aa, Zea mays
  Clone ID: MRT4577_60060C.1.pep
CARGKEFKKPEKPINHKGTKEQVSMKPRSPPREGKHLEKPCEIVDVEQYEAVAEALRKSDEAADAKGASLKDVTRNGADEVAGQEQGREQEPVDVEDDDDGVRCAVCASTDGDPSDPIVFCDGCDLMVHASCYGNPLARAIPDGDWFCSPCVAGRGKPAAARRRSCCLCPAGGGAMKRTTEGKWAHISCALLVPEVFFRDPDGRDGIDCSRVPAHRFARGCYVCGGNNNGCALECSQPKCGLGFHVSCGLGAGLCIEYQEGKGGGGAIVAGFCREHTELWEKQQLTGKYKIVARGQE

SEQ ID NO: 325649 - protein, 88 aa, Zea mays
  Clone ID: MRT4577_60061C.1.pep
PCSQCYEASHVLWHELSNLHKTTAPVCMLTLPQSSRGGHAMTNHYSEAALRHYMLHMPMSPRSFADAYAKQYIMLFFTPLFSSCHHAR

SEQ ID NO: 325650 - protein, 105 aa, Zea mays
  unsure (1)..(105): unsure at all Xaa locations
  Clone ID: MRT4577_60062C.1.pep
RPQRGKGKXRPDPNEXSETPQXNARQNXRKPXKAGXGGGGPXKXHXRPXARRXRSAKQKGRHXXNGKRRXTREXRPPTKKPXXRRKXXXRRPRRKXRXAKKTDKH

SEQ ID NO: 325651 - protein, 165 aa, Zea mays
  Clone ID: MRT4577_60063C.1.pep
ASAHASANIEADLEFVRQKFLDVERLATGEGNMNSKEFSEALEVLHSKRDVFLEILQENRTAVSGFSGHILSHSGLQCSSYTSNAAAAAAAQPFEKEIPCGMEGVCDGMHVIPKEFEEPVPSMPPRETSVTPVAPLAPNEGKSKGSCRRSEIVVLKPNLQRKSFT

SEQ ID NO: 325652 - protein, 62 aa, Zea mays
  Clone ID: MRT4577_60064C.1.pep
DLVVLKLYKQQTKSENHELYRHVMILYIQFTESYTRQSLYRTFSRNYRVPEAFDKEAVRTRG

SEQ ID NO: 325653 - protein, 208 aa, Zea mays
  Clone ID: MRT4577_60065C.1.pep
MAAMQQLLLLFLLLVYLRPSLGQTNPQDVAALQALMNNWQNEPPSWTGSTDPCTSWVGISCSNGRVTEMRLTGMNLQGTLSNTIGQLSALKYLDLSNNQNLGGPLTPNIGNLKQLTVLILLGCTFTGNIPKEIGNLSQLTFLALNSNKFTGGIPPTLGLLSNLFWVDKSANQLSGQIPVSPGLDQLVNTRHFHFSENQLTGPMSESLF

SEQ ID NO: 325654 - protein, 142 aa, Zea mays
  unsure (1)..(142): unsure at all Xaa locations
  Clone ID: MRT4577_60066C.1.pep
PRARHDSEHVHAQATSASRVCNKHGDPHHLYERSPHKDALKSGRTTCHVGGLGVTKARSRALAEEPPRPXEAPKPFLRTATEPADQPAPHRRRPEQRGAVNRYXPSARTGSXADETVEPAQAGQTRHGFYGTELPERPKVNR

SEQ ID NO: 325655 - protein, 163 aa, Zea mays
  unsure (1)..(163): unsure at all Xaa locations
  Clone ID: MRT4577_60067C.1.pep
GRVGGRVGGRVGYRVGNGFNIIAAHTDSPCLKLKPRSATIKSGHQMVNEQTYGRGLRHTWFDRDLTLAGRLILKATEGSFKHELVKLTWPLIRVPTLAIHLNRXNTDGFMPNLETHLVPLLATKHEDTPTNSDEKSSNSTKVTHHPLLLQILSEEIGCDPDEI

SEQ ID NO: 325656 - protein, 85 aa, Zea mays
  Clone ID: MRT4577_60068C.1.pep
DPCSLLHSLSPSPSYWQHWQLSHYRSLDHNLSFNYSNSHDCSLTAHATTPDVRPVHIHTSFLAAPLLQTHIVRSSLHSLIMHLSY

SEQ ID NO: 325657 - protein, 191 aa, Zea mays
  Clone ID: MRT4577_60069C.1.pep
MARLLLLLGASVLLLASAVTAQDCLSATFSGGRTFGKCNSLPSLSASLHWTYHPENGTADVAFRAPSDPSGWVAWGINPDSGGSMEGSSVFVASQDGSGAVSILMTNLESTSPSLTNTTALKFKVPAGPAAEYSDRAYTIYATVELPRNSTQQFTVWQAGPATSNGGISPHPTAPANLASTQRLDFLSGSS

SEQ ID NO: 325658 - protein, 193 aa, Zea mays
  Clone ID: MRT4577_6006C.1.pep
MILVDWFFDALAYLGLWQKDAKILFLGLDNAGKTTLLQMLKDERLAQHQPTQHPTSEELSIGKIRFKAFDLGGHAFARRVWKDYFAKVDAVVYLVDAADRERFNETKQELDALLSAEALFNVPFLVLGNKIDIASALSEHELRYYLGLEYHTTGKGNVDLSHNGRRPLEVFMCSVVRKMGYGDGFRWMSQYIK

SEQ ID NO: 325659 - protein, 443 aa, Zea mays
  unsure (1)..(443): unsure at all Xaa locations
  Clone ID: MRT4577_60070C.1.pep
FAASFQKKKCQTGVGVVLMXQGHSLAFLSRALGPKNQGLSTYEKEYMAILLAVTQWXSYLQLVEFIIYTDHHSLTQLNEQRLNTVWQQKVYTKLAGLQYKVIYKKGTENGGGDALSRQCSDELQCCAVXHCTPEWLQELVVSYDQDSDTKELLTKLSLHSRQLDRFSLQQGVIRHKGRIWLASSPAMQLKVIRAMHDTAIGGHSGVPATYSKLKSLFYWPGMKAVVREYVQSCAICQQAIQAWHTISLDFIEGLPRSLQSNCILIVVDKFSKYGHFIPLLHPFTASKVAKVFLDNVYKLHGLPVNIVSDRDCIFTSSFWQHLFQLTDTKLCMSSVYHPQSDGQTERLNQCLETFLRCFVHTYPTRWSQWLSVAEYCYNTSFHSALGQTPFEVLYGYAPRHFGISSEVVVPVPELADWLQERELMSRIIQLHLSRAQQRMIYST

SEQ ID NO: 325660 - protein, 618 aa, Zea mays
  Clone ID: MRT4577_60071C.1.pep
MGGSNSTGRRSGSVPRAMPPVEEVDISAVRYKSPALQAPHLTGFSLRAFVWLMESPLLGRLITSVLKSQNNMPQMLQQTVIPERPMYYPEFPLQDPEPEVVLVDEDRDPVERVHEALRCLPQYDPSVRWTTEENPPFLYWKIRDFAHAYSSGITTPSVVAEYVIAGIEEWNNKKPPMPMLIYFNAEDLKKQAEASTKRFQRGNPISILDGIFVAIKDDIDCFPYPTKGATTFFDQIHTVERDAVCVARLRKCGVIFIGKANMHELGLGVTGNNPNYGTARNPHSVDRYTGGSSSGPAALVSSGLCSIAIGTDGGGSVRIPSALCGIVGFKTTYGRTDMTGVLCDSGTVEVASPLTSSVDDAILVYSAIAGSRPMDKLTLRPSPLCVPNLLSPENSNILGSVKIGKYTEWFNDVSGHEISGTCDDALKLLCSAFGCQVEEITLPELEEMRTAHVVSIGSESFCDLNPHYKAGRKTEFTLDTRTSLALFGSFTATDYVASQSIRRRIMHYHMEAFKKVNVIATPTTGITAPKIPPSALKSGESDYVVSAYLMRFIIAGNLLGLPAITVPVGHDKQGLPIGLQLIGRPWGEASLLRVASAVEELCLKKRKRPSAFYDILKA

SEQ ID NO: 325661 - protein, 36 aa, Zea mays
  Clone ID: MRT4577_60072C.1.pep
FPDSTLAKPTALSWCTTHESLIALQILLVEVALDLS

SEQ ID NO: 325662 - protein, 89 aa, Zea mays
  Clone ID: MRT4577_60073C.1.pep
KIPPSVLKSGESDYVVSAYLMRFIIAGTLFGFPAITVPVGHDKQGLPIGLQLIGRPWGEASLLRVAFAVEELCLKKRKRPFAFYDILKA

SEQ ID NO: 325663 - protein, 305 aa, Zea mays
  unsure (1)..(305): unsure at all Xaa locations
  Clone ID: MRT4577_60074C.1.pep
MSRKEAEPAGQDGSSSSATDGGGGSGSGRELADALARRRLYREVTLALHSGLRDAKADFSFLRARGLRSLLGFLRSTASAADDALLLLFRHSQSIPDLQVIPVLFQNSLHQPKQDPVVTLDHIFGTEPMKITSPPTDSEIALALRVLEGCCLLYSRCTALAHKYKAVKVLLNILASRGPTEQGVCLDTLISLMLDSPSNQMDFEEYSGLEKVAELLKDVQVEKHIRXEMWGVPIVAHWTCFCEGKLSHTXQMKNLFGXAVRITYMGSKPVRLHLGCRAKADDLANTSNESCRILGTLLGLVHSSV

SEQ ID NO: 325664 - protein, 83 aa, Zea mays
  Clone ID: MRT4577_60075C.1.pep
VIVYVFILTETAVRGNTWTEKTGADPTRRNNMLQPRQRWGTRLIVLVPHKSFQRTNILFTPSYWQPVLVMSTRQSLLNTSRGR

SEQ ID NO: 325665 - protein, 86 aa, Zea mays
  Clone ID: MRT4577_60076C.1.pep
CFISLQLLFKSPQLHHSSCSRADQSQNHQSYTNASSSSKAFRQPLQLLVSSCFKVQAFFVQNTLAACPEEVKQMMTNALTLIAART

SEQ ID NO: 325666 - protein, 86 aa, Zea mays; identical to SEQ ID NO: 325665
  Clone ID: MRT4577_60077C.1.pep

SEQ ID NO: 325667 - protein, 84 aa, Zea mays
  Clone ID: MRT4577_60078C.1.pep
GPRGLFFFFFWGEGFLAQQVEGERKPQRLTRGPGQQQRVFKTTTWLDTANGFMQVDRYSSPSAPSSLPTSEATSSKPFSTGDRP

SEQ ID NO: 325668 - protein, 113 aa, Zea mays
  Clone ID: MRT4577_60079C.1.pep
FVKAEISIMIGVLELLIAGLFELLSFYDHDILRHKYITCTFAVFQLEKTFKTTFSSFVLHMGLVSRHLKEEGNGGVKFGQYIYTSWSIGINVLNLLKFQIILVITLTIRIKSL

SEQ ID NO: 325669 - protein, 140 aa, Zea mays
  Clone ID: MRT4577_6007C.1.pep
PLVRVDKNGSHVAEAALKSLATHLEDEASRAMIEGILNKICKVIAVDAVTVMSSCYGSHVLRTLLCLCKGVPSDSLQDFHTTKRSSVLAERLSCGTNQSSRHVPKNFENGFSGMFRSFVREMLLNAKADICTLRVDKNSC

SEQ ID NO: 325670 - protein, 114 aa, Zea mays
  Clone ID: MRT4577_60080C.1.pep
GIDRLLTTGAGRGHRAPCAVAKEERSGGGRAATALTGRVARLRRYSTLAAACGKLEKKVCRLYSCRRRKLVLGGLLWAAIERRSENGEKVRAAIKVKALVIICFTSSGQAARLL

SEQ ID NO: 325671 - protein, 85 aa, Zea mays
  Clone ID: MRT4577_60081C.1.pep
RYQTSGTLDALRERMKSIQAAAIGHFDGAQARPLASMNGSNMLHGGTRLDGEPQQQSNIPPMDERALSGLQARMERLKSGSMESL

SEQ ID NO: 325672 - protein, 86 aa, Zea mays
  Clone ID: MRT4577_60082C.1.pep
SRLVLPTFLRLHIYNYIYASVPRKTKTTLTITSLLACMHNHYYNNNNKTISLIHFALPLSIMKQLYLPSLLNCVCFYSYFPISSCL

SEQ ID NO: 325673 - protein, 61 aa, Zea mays
  unsure (1)..(61): unsure at all Xaa locations
  Clone ID: MRT4577_60083C.1.pep
DALRAAADSLSVHHRGGQXTFVRLPXHXXHPXPYHTHNPLQILTIIXIILLNQXLKNTPNQ

SEQ ID NO: 325674 - protein, 116 aa, Zea mays
  unsure (1)..(116): unsure at all Xaa locations
  Clone ID: MRT4577_60084C.1.pep
WLCTINDKNYDHAYWKXRRSSGRPTSDAGRLTVSLLQARLSQSSCLAARAARLSHSIYDRCARCALSRARWASVKGDETVLYELTENCVKDVVLRLEPGGDLPDGDRQPHDPRLRV

SEQ ID NO: 325675 - protein, 64 aa, Zea mays
  Clone ID: MRT4577_60085C.1.pep
LCRLDCRVRVKISSKEHIFSRKDIFKLYTYKFGKNIGKISSIENSSGTLLNFGRLELFIKRRLD

SEQ ID NO: 325676 - protein, 126 aa, Zea mays
  Clone ID: MRT4577_60086C.1.pep
PCTHGLRHRTTFGQHQRKCGAPQLQTSSTSSPSLPSERPMHRQSHRRQAVLPRHLPSNRRHAALQVLTRHPSLLPRELPQLRHLKPPAHPTMHADPSSSTSRKSGPAAATTTGVSTPSYYTDEEMS

SEQ ID NO: 325677 - protein, 87 aa, Zea mays
  Clone ID: MRT4577_60087C.1.pep
VKVFFCNPQVKFAPKSPKDFFVFCKKNAWSLLVFNENNGPSLIDQNTVLSIMLVLIQCQKICYFANLRASLGTLNNFYFFNGNLFFF

SEQ ID NO: 325678 - protein, 83 aa, Zea mays
  Clone ID: MRT4577_60088C.1.pep
DTGPWGAISLMGNTGYNIVDPAFATIFGGPSTWGGASIFFLYTCPNVKHTLAKRYYYTPPRGRNTIVPPFRQRFLGSNIKTPF

SEQ ID NO: 325679 - protein, 90 aa, Zea mays
  Clone ID: MRT4577_60089C.1.pep
ADHRPCAGRSGKRGFAQAPQEAVVTTTTLPLFDDGWSCSDRCGGGKRALVGWPPLSFTRSRPCGGGSPKGGGGKNEGDIIGRKVDLALHT

SEQ ID NO: 325680 - protein, 163 aa, Zea mays
  unsure (1)..(163): unsure at all Xaa locations
  Clone ID: MRT4577_6008C.1.pep
HNSTDLVGRLLHKHXADTGTXISLPFRNGKAIGDRANSIWLYIVPSGMRSLMNYVKERYKSPPIYVTENGMDDGNSPFTSIKDALKDSKRVKYHNDYLTNLAASIKDDACDVRGYFAWSLLDNWEWTAGYSSRFGLYFVDYKDNLKRYPKSSVRWFKNLLASS

SEQ ID NO: 325681 - protein, 80 aa, Zea mays
  Clone ID: MRT4577_60090C.1.pep
RIKEHSLKPGYIKSIPRQKRQGLSRVHNIQRHHKLGHDSKMNHTNSLSHVKYTSPLYQCRSHTCNSCALMLILEVIVFHY

SEQ ID NO: 325682 - protein, 107 aa, Zea mays
  Clone ID: MRT4577_60091C.1.pep
MLFRGLLPLPGKVFGTQHHASGCFLDSPLPVGCLEKCNSPWPGRWCVFCCSLPRLCLVWLPFGLSKGRCFTPGFLLPVVNQPPFRYGGLGGPGFGALVWTVQCIKLL

SEQ ID NO: 325683 - protein, 50 aa, Zea mays
  Clone ID: MRT4577_60092C.1.pep
IICTPLLHMNMSKDTYPNNCTSIHNKTQRRFTHIHIAQLKYITPESIVIN

SEQ ID NO: 325684 - protein, 70 aa, Zea mays
  Clone ID: MRT4577_60093C.1.pep
VLIQTLLSKHIRLCLLVKSCVPPYKENSTEQHNGRMRPCQLAYELIDLYVTSVKCGRVCKDIGMCSTSSS

SEQ ID NO: 325685 - protein, 109 aa, Zea mays
  Clone ID: MRT4577_60094C.1.pep
YRRRGLPPLRRAPFPKSSEVVRYTVGKITPIQKREVRASDFGPRASFWMNFPKEGSRLTPSHSAEDFKWKDYCPMVFRNLREMFKIDAADYMISICGNSALRQLSFPGK

SEQ ID NO: 325686 - protein, 62 aa, Zea mays
  Clone ID: MRT4577_60095C.1.pep
ASTDYDGTVQLWDAGSGQGFTQFTEHRKRAWSVSFSQVDPTKLASGSDDCCVKVWSINQACY

SEQ ID NO: 325687 - protein, 487 aa, Zea mays
  unsure (1)..(487): unsure at all Xaa locations
  Clone ID: MRT4577_60096C.1.pep
MTAPVSLPNELEAVSHSARVELFRDASCNIENEVLASLGNGQDSTAVGATPGFRVGEIRFANGDIYSGTLLGNTPEGSGQYRWSDGCTYDGEWSKGMRHGQGKTEWPSGATYEGEYSGGYVYGEGTYKGPDKIIYKGRWKLNHKHGLGHQTYPNGDMFEGSWIQGEIVGHGKYTWANGDTYVGNMKSGKMSGKGTLTWKNGDSYEGNWIDGMMHGYGIYTWNECGYYIGTWTRGLKDGKGKFFPKGCRVPVNDEMYINNLRNRGVLPDIRRQNHGSRILHSSSVDMGNMKVGMARQSSDVLFKRNSAEQSSLKNVSLERRWSLEVAIEKFIGHESSESSGLESLENLSDSRLPILEREYMQGVLISEVVLDRSFSDSSKKTKRRQKKTVRDTKKPGETIIKGHRSYDLMLSLQLGIRYTVGKITPIQKREVRASDFGPRASFWMXLPKEGSRLTPSHSAEDFXWEDYCPMVFRNLREXVKIDAADYM

SEQ ID NO: 325688 - protein, 206 aa, Zea mays
  Clone ID: MRT4577_60097C.1.pep
PDSQLPLATHLVWIIVVLEHNLESKASLYKDAALSHLFLMNNVHYIVHKVKDSAELRGLIGDEYLRRLTGKFRQAATSYQRTAWLKILNCLRDEGLHVSGGFSSGVSKSALRERFKAFNAVFEEAHRVQSAWYVPDTQLREELRISVLEKLLPAYRSFLGRFRHHIENSRHPELYIKYSVDDLEIAMSDFFEGSPPSLHNRRRSHG

SEQ ID NO: 325689 - protein, 42 aa, Zea mays
  Clone ID: MRT4577_60098C.1.pep
RPTMKFARHSPCSLHSLVYSHHRSDVLTKITIKANVYQVLPN

SEQ ID NO: 325690 - protein, 92 aa, Zea mays
  Clone ID: MRT4577_60099C.1.pep
RIDYMKMISIRVSFGQKEAKLKAKIAADRKQKMQMVHQMMQSANMVQAIQGVNSSNMVQANGASNFSETVAHCSIQVTETEPSMSLVSQEQA

SEQ ID NO: 325691 - protein, 70 aa, Zea mays
  Clone ID: MRT4577_6009C.1.pep
RGGVHFLFCLLLMLFGYTTAGSQSASQPCPVFARNTPISYHAPNYCALDSHFSIAGYEEVRYLPWTCFEL

SEQ ID NO: 325692 - protein, 53 aa, Zea mays
  Clone ID: MRT4577_600C.1.pep
IYTNYKLSVENINIIILFEKSKCFDTPIFYRKNEPTLQRVCATNIKPRIHDSG

SEQ ID NO: 325693 - protein, 77 aa, Zea mays
  Clone ID: MRT4577_60100C.1.pep
TSTKKGGNKTLENPEILFRNKLNYFTSHLKRGTTKVIACSMGFLSRFCALQLESSILALPTVQSLINWPCLFWGALL

SEQ ID NO: 325694 - protein, 103 aa, Zea mays
  Clone ID: MRT4577_60101C.1.pep
MERFALRLPEHVRLELLMSHRLRHVTSAVASVRVMEGSAHDTSTVGGSVRSTMARLMSLFTPGAGWKGDGDDKSGKAEATAASSLRRRENSSRGAVGEEKRSV

SEQ ID NO: 325695 - protein, 44 aa, Zea mays
  unsure (1)..(44): unsure at all Xaa locations
  Clone ID: MRT4577_60102C.1.pep
ALXPTXXNEPXSFXSXSXIPGKXYYXXAPFYKXXXLVLXXEPGX

SEQ ID NO: 325696 - protein, 88 aa, Zea mays
  Clone ID: MRT4577_60103C.1.pep
YSAAASANRDLRFGHVGGTQMDEFAGEFDMDTKLLNMAIWDKSGDYLSVADSETIEVEDQGTQITKFLEGYREGRTIKKTFSGPSLMR

SEQ ID NO: 325697 - protein, 76 aa, Zea mays
  Clone ID: MRT4577_60104C.1.pep
RGLRSQGQIICPALAHVTCGLDCSTGQIAVTFMTYNYFRLIAGVFPGYEQKNFTKCYVLSTAIFVPGRAAQTVLIG

SEQ ID NO: 325698 - protein, 50 aa, Zea mays
  Clone ID: MRT4577_60105C.1.pep
ILTQSSLSTLLYSSKDISISMVNIYHHWEPENKNQITMTQLKTQLKSLLW

SEQ ID NO: 325699 - protein, 101 aa, Zea mays
  Clone ID: MRT4577_60106C.1.pep
GPPRPYQQPDMHFGRRWSRPPIRVLNTSKLTGILGQLLGHLLGLFNDGVVRPDAIGSEGPEQCVLQPMGGGLAISRFRSGKSATLGLMGEEGLLLVRCYQG

SEQ ID NO: 325700 - protein, 73 aa, Zea mays
  Clone ID: MRT4577_60107C.1.pep
QFDGVLNRFLSYVKDNVMPVGYFNLYGQKICVCFLEVLWEFSFKEIKPRPVLGVVFWKKKKKEKRKGRPLYRI

SEQ ID NO: 325701 - protein, 194 aa, Zea mays
  Clone ID: MRT4577_60108C.1.pep
MAAAASPATAAAVREAAPAHRQIGIRPGHGPAPFRIGFLAKPSSRWAAISVPPGPRRAAPAASAARERVTEEEERPVSVELEPIASEQQLDWVLGEARQLQLPIVLLWMASWCRKCIYLKPKLEKLAAEYHPRIRFYCIDVNCVPQKLVNRAGVTKMPCIQLWSDSRKQAEVIGGGHKSWLVIDDVRRMIEQEE

SEQ ID NO: 325702 - protein, 106 aa, Zea mays
  Clone ID: MRT4577_60109C.1.pep
GYLEAGRDSSVRISLSTFMIPRAPRGYVVSHAIRLTARLPSMTTSYLYLLAQARIAKSQTLQGRSDLSLLECSCTLHVFYREIGLLIVEGLGFTDKEMDVTLNAVP

SEQ ID NO: 325703 - protein, 57 aa, Zea mays
  Clone ID: MRT4577_6010C.1.pep
GSRRPASAFCTELCCTVLLCSWLCRQPLTRGQCVTSPQQKPKEKERKHGVWALLAKV

SEQ ID NO: 325704 - protein, 48 aa, Zea mays
  Clone ID: MRT4577_60110C.1.pep
AGNVINPCIIYGIAFIFAGISKNNALCSISSIIQICMGSCSYWLIARY

SEQ ID NO: 325705 - protein, 79 aa, Zea mays
  Clone ID: MRT4577_60111C.1.pep
IKTNDQTVRPAKNGVARSHYSNWRDGSLNPPGVVYPEQNVLTPEQLVKKSVGGFLPPLLALWVKIFIKKNQNFFSDSGP

SEQ ID NO: 325706 - protein, 93 aa, Zea mays
  Clone ID: MRT4577_60112C.1.pep
GNCSHVSVQNLLIFSPPCFWPARKGGNPSMHLNFEEIMCFCKLENPLHLGGRPLFFLFINQSFFLAMYHDLGGVFLPPPPRLGGGWPSPCILL

SEQ ID NO: 325707 - protein, 294 aa, Zea mays
  Clone ID: MRT4577_60113C.1.pep
ARRRAPPLAGRALPFSPLASTRAPRRTVTCFVPQDTAAPAAPVPALDEEARAAAARRVAEKEARKRSERRTYLVAAVMSSLGVTSMAVAAVYYRFSWQMEGGEVPVIETLGTFALSVGAAVGMEFWARWAHRALWHASLWHMHESHHRPREGPFELNDVFAISLLAYGFFHRGIVPGLCFGAGLGITLFGMAYMFVHDGLVHRRFPVGPIADVPYFRRVAASHKIHHMDKFGGVPYGLFLGPKELEEVGGLDELVSSPVSEATDTEDAGEEKTRPVVCVVRTSVFMGQSVPNEF

SEQ ID NO: 325708 - protein, 301 aa, Zea mays
  Clone ID: MRT4577_60114C.1.pep
ARRRAPPLAGRALPFSPLASTRAPRRTVTCFVPQDTAAPAAPVPALDEEARAAAARRVAEKEARKRSERRTYLVAAVMSSLGVTSMAVAAVYYRFSWQMEGGEVPVIETLGTFALSVGAAVGMEFWARWAHRALWHASLWHMHESHHRPREGPFELNDVFAIVNAAPAISLLAYGFFHRGIVPGLCFGAGLGITLFGMAYMFVHDGLVHRRFPVGPIADVPYFRRVAASHKIHHMDKFGGVPYGLFLGPKELEEVGGLDELVSSPVSEATDTEDAGEEKTRPVVCVVRTSVFMGQSVPNEF

SEQ ID NO: 325709 - protein, 160 aa, Zea mays
  Clone ID: MRT4577_60115C.1.pep
MASFLAARRLLSTAAARRLLPCTSPPPPATAALCWLSTDASPPPPLPAPPLEPAVDPPKKDGASFSAGSGAGGAYRTGKGAASGGRRSGGAGYEEEQQKVLRASLLHVPRMGWSESAMIAGARDVSVSPAIVGAFPRKEAALVEFFMDDCLQQLMDRVDA

SEQ ID NO: 325710 - protein, 39 aa, Zea mays
  Clone ID: MRT4577_60116C.1.pep
DSWARLPQREHVSTDGPTSVWRVLALRTYHATWECIQCG

SEQ ID NO: 325711 - protein, 36 aa, Zea mays
  Clone ID: MRT4577_60117C.1.pep
WFGRFVRSSPVSSFEELAQYVKGYCKCGYLGASGYK

SEQ ID NO: 325712 - protein, 56 aa, Zea mays
  Clone ID: MRT4577_60118C.1.pep
PTRSPTRAPTRARTRGKRKKEKKKKKKKKKKKKKKKKEEKNKKKIKIKNKYRNEIR

SEQ ID NO: 325713 - protein, 85 aa, Zea mays
  Clone ID: MRT4577_6011C.1.pep
KSCIHVSFVSECGLPEAGLDYGGLSKEFLTDLSKSAFSPEYGLFSQTSASDTSLIPSNSAKLLDNGIDMIEFLGRVVGKALYEGI

SEQ ID NO: 325714 - protein, 82 aa, Zea mays
  Clone ID: MRT4577_60120C.1.pep
FVRYTLVSRLGMFFLTLSSRKAAFVFSFNLRAFFHLLGAGPGFSLEVVKPLQLYLPSCFSRLFFQLVAFFGFLCFILLFYGF

SEQ ID NO: 325715 - protein, 164 aa, Zea mays
  Clone ID: MRT4577_60121C.1.pep
LMTKSSNNLAVFIILLLMVAASCRRRLQFTFENLHTEANDKVAAIAGAGSASVTGNNPSSSPLNDPISSVSLKIKGKKCGPEFFQKLNEMLSKDTASTAAGLAQVKEYLETYFTVSDEAWATISTSIKEKSLMTGDSVKEDRVTNIPVTSRVWTASYGDAAKNS

SEQ ID NO: 325716 - protein, 89 aa, Zea mays
  unsure (1)..(89): unsure at all Xaa locations
  Clone ID: MRT4577_60122C.1.pep
MKTPQAEVAMLVTAALMASSASAAITCLQVVSSLAPCIPYTTVRTSALPAXCCIGHKSLNSSVRTRADRQAECRCLNSLINSFKQPQHG

SEQ ID NO: 325717 - protein, 305 aa, Zea mays
  Clone ID: MRT4577_60123C.1.pep
MADIDSRPRKSVAFAEGETIVDSNGEVTQAVSETEKDTTAESHSKPDAAVDEATDDFEALALSSKKKKKSKTEDGEVDLSALKKKKKKPKAPLVDDFEAKLAAAGGDEEKVLADDAAEKQSAKVEAGLQEGDLIQGTGIWAHDETKPINYESLLSRFFLMLSDSHPDLGGSGMKSYKIPPPQCLREGNKKTIFANIAEICKRMKRTDEHVTQFLFAELGTSGSVDGSRRLVIKGRFQQKQIENVLRRYIVEYVTCKTCRSPDTELNKGENRLYFVTCNSCGSRRSVTAIKTGFSAQVGKRKRMVK

SEQ ID NO: 325718 - protein, 72 aa, Zea mays
  Clone ID: MRT4577_60124C.1.pep
KVLATLSSVSALCSAPWRVLSICMLQRARVGLSCRRSTCSISRVWPLPIPPITYMVAKTWWILSVNICLEPN

SEQ ID NO: 325719 - protein, 57 aa, Zea mays
  unsure (1)..(57): unsure at all Xaa locations
  Clone ID: MRT4577_60125C.1.pep
RIDGACWERLWRMRFEQNGFIKGGVXGLKTINFGSAPGGAGGKRLDLGVRWEAGSPR

SEQ ID NO: 325720 - protein, 76 aa, Zea mays
  unsure (1)..(76): unsure at all Xaa locations
  Clone ID: MRT4577_60126C.1.pep
PEIYPLLSKTFFFYKAILFGFFPSQNITGFVGGPPLKKSGNSGSLIXTKKKKDSKQNPKKKKKKKKKXPCGPTEAS

SEQ ID NO: 325721 - protein, 79 aa, Zea mays
  Clone ID: MRT4577_60127C.1.pep
IFLLLSFSTLHPRLTAAGCDPPIYRLIHLCLRRCRPLRQPDPRDGWKRKLCTSTIYSLIQPRYRRGSCPCRGREPCYAP

SEQ ID NO: 325722 - protein, 94 aa, Zea mays
  Clone ID: MRT4577_60128C.1.pep
MAGKGSYVPPQYIPLYSLDTEEDRVPAVEENHATRPKLNQDPTQWSSGICACFDDPQSCCIGAICPCFLFGKNAQFLGSGTLAGSCTTHCMLWG

SEQ ID NO: 325723 - protein, 122 aa, Zea mays
  unsure (1)..(122): unsure at all Xaa locations
  Clone ID: MRT4577_60129C.1.pep
LPSLSWLSHASATSTHTSSGCSCQLTPPGHLPPPVHLPPPAHLPPPVHLPPPVQLPTPVHLPPEVHVPTPVHIAPTPCPNPTXAARAQPYAQPHPCPCQQPHXAPCQLQGTLRFGSTPKLGQ

SEQ ID NO: 325724 - protein, 481 aa, Zea mays
  Clone ID: MRT4577_6012C.1.pep
MVADRLRLALLLSACLCSAWARPRLEPTIRLPSERAAADDAVGTRWAVLIAGSNGYYNYRHQADICHAYQIMKKGGLKDENIVVFMYDDIAHSPENPRPGVIINHPQGGDVYAGVPKDYTGREVNVDNFFAVLLGNKTALRGGSGKVVDSGPNDHIFVFYSDHGGPGVLGMPTYPYLYGDDLVDVLKKKHAAGTYKSLVFYLEACESGSIFEGLLPNDINVYATTASNAEESSWGTYCPGEFPSPPPEYDTCLGDLYSVAWMEDSDFHNLRTESLKQQYNLVKDRTAVQDTFSYGSHVMQYGSLELNVKHLFSYIGTNPANDDNTFIEDNSLPSFSKAVNQRDADLVYFWQKYRKLADSSHEKNEARRELLEVMAHRSHVDSSVELIGSLLFGSEDGPRVLKAVRAAGEPLVDDWSCLKSTVRTFEAQCGSLAQYGMKHMRSFANICNAGILPEAVSKVAAQACTSIPSNPWSSIHKGFSA

SEQ ID NO: 325725 - protein, 42 aa, Zea mays
  Clone ID: MRT4577_60130C.1.pep
AAHSSAASIESYGVSCTTNVTIVRGYQVEIRATFLVRRSLDC

SEQ ID NO: 325726 - protein, 61 aa, Zea mays
  Clone ID: MRT4577_60131C.1.pep
SQRHQNLSCNNIRNKTLSRQLPSKTYPTKEKTLKGMLAFGNQGKSSSIIKDSSLQKSKLTK

SEQ ID NO: 325727 - protein, 74 aa, Zea mays
  Clone ID: MRT4577_60132C.1.pep
PGAPAREQAVNLNEGLVADRTRRQVKPNHLFCGPDWIEVARPSGLLEVVFCLWNGFAEGSEHLLGGRLYSVFRR

SEQ ID NO: 325728 - protein, 58 aa, Zea mays
  Clone ID: MRT4577_60133C.1.pep
QKSKRKFQDLDQKLSLSAGTICYFISLSAGAMCYFISLSTGAMCYFTVDQASGQAKKS

SEQ ID NO: 325729 - protein, 55 aa, Zea mays
  Clone ID: MRT4577_60134C.1.pep
LVTRSPGPGLFCCWHAGSAPGSVGLARHRRRRWAGSPAGAASSCFSGSSPRAVFR

SEQ ID NO: 325730 - protein, 163 aa, Zea mays
  Clone ID: MRT4577_60135C.1.pep
MACSKDHTNIFPDNILKSVVESLTTDEQHQYEDYMRQAKEKFLSQYMVDRHQKVAKHGETDVTSLLSSLQIPNPLYGMPMNSYPGQIPSSSSLLGRSTPLDTVGLSELLPKQSDPSAYHPALPVGQSKVALGPPRGTTIVANTIGYSGLNIGQPGITLDRLAA

SEQ ID NO: 325731 - protein, 60 aa, Zea mays
  Clone ID: MRT4577_60136C.1.pep
LTVYGGHNDRWEISIKTKPGYLRSRKDLYYPLLPILHYAWGEQPFGRTGNLDPMLMCYSK

SEQ ID NO: 325732 - protein, 98 aa, Zea mays
  Clone ID: MRT4577_60137C.1.pep
MHGCHMQACLLGPRIVRRRGRLLLVALLPCCSCPGVCMDFCLIFFFQIKPSGWPRLPPIYAGRYVLSSSCMSWILNSSSGAKKKKKKKKKKKKKKETT

SEQ ID NO: 325733 - protein, 72 aa, Zea mays
  Clone ID: MRT4577_60138C.1.pep
TKQEKGPARGPKKQEELRTAPPPQGGRSNEQKKNGEEPRRGETREKTGTKREKKKKKKKKKKKKKKKKKPKT

SEQ ID NO: 325734 - protein, 198 aa, Zea mays
  unsure (1)..(198): unsure at all Xaa locations
  Clone ID: MRT4577_60139C.1.pep
QSKLGSIVLDIQGRDTNASRFLHCDGSSDQSRFSMQLHLNALNKQVRHFTGLGNTPMTYNLRPVIEEIQRSAEDSGDKRNLKMCLGMLKSMRNRCDQNFVAYRKGLGVVCNKKGGFGVDDFVVEFFGEVYPSWRWYEKQDGIKHIQNNIEDQAPEFYNIMLERPKGDRDGYDLVFVDAMXANYASRICHSCNPNCEAK

SEQ ID NO: 325735 - protein, 62 aa, Zea mays
  Clone ID: MRT4577_6013C.1.pep
KGEQRFEYLRTLIQKLLILLNPPHKTNIYTTIYKKPLFKHKHNFSVHLQETYKFVYAEMLKT

SEQ ID NO: 325736 - protein, 118 aa, Zea mays
  Clone ID: MRT4577_60140C.1.pep
CASSEDFSTGCLILCPLLSISYVAQIFQQPFARIHRRSCPNGARPPPQPWSSRASPYALCYLLFSSSQLASCPQPWRSAACSSPLLAAPGSSPRESLCCPFSRRWCYLGLIFFTLVPC

SEQ ID NO: 325737 - protein, 145 aa, Zea mays
  unsure (1)..(145): unsure at all Xaa locations
  Clone ID: MRT4577_60141C.1.pep
GMLKSMRNRCDQNFVAYRKGLGVVCNKKGGFGVNDFVVEFFGEVYPSWRWYEKQDGIKHIQNNIEDQAPEFYNIMLERPKVVLSLILMRSNLXGHFNSWSFYPXHFSSVMMXGDRDGYDLVFVDAMXANYASRICHSCNPNCEAK

SEQ ID NO: 325738 - protein, 115 aa, Zea mays
  Clone ID: MRT4577_60142C.1.pep
VTSGISDGGVHRVWQNGLCDVHDEHRVRFALEPPSATLCSTQGALWTSEVHLKVVARGVEEDAEFLGGEGDHSGEDDGVSISYVQMYGVEVTVDSAVEFFAKQSTMYSWTVSSEV

SEQ ID NO: 325739 - protein, 154 aa, Zea mays
  unsure (1)..(154): unsure at all Xaa locations
  Clone ID: MRT4577_60143C.1.pep
PPPPPPPPFSFFFFFFFFWRKEKRKNKPPPPPPRRREERKYFFFFFXPXPPPPGEEQHPPPPSFFFFFRKNFFFPPQESKLWGGGDFFCAATPKRKRFVVRSFFLKEGGPPPKKIFFSSPPPVFSPPKVFCVPGGKFFVGGGGETPLSRGPETP

SEQ ID NO: 325740 - protein, 52 aa, Zea mays
  Clone ID: MRT4577_60144C.1.pep
LMLLSLHRQEETYSRRNGLHECNGKKGSLFFNKRDRILELVPVTQTRVIGQA

SEQ ID NO: 325741 - protein, 88 aa, Zea mays
  Clone ID: MRT4577_60145C.1.pep
AAFFFFFLAQCNTLKLIVLFTENKTRTENVSFSGSVFLYNCFSTHPSLSSDGSGSQVVDTGNQISSNCSSMFGSKGNGGGWRGLISLP

SEQ ID NO: 325742 - protein, 347 aa, Zea mays
  Clone ID: MRT4577_60146C.1.pep
MALLSDLINLDLSGRTGKIIAEYIWVGGSGMDVRSKARVMCDCYEPNGEPIPSNKRHGAAKIFSHPDVKAEEPWFGIEQEYTLLQKDTKWPLGWPLGGYPGPQGPYYCAVGADKSYGRDIVDAHYKACLYAGIDISGINGEVMPGQWEFQVGPAVGVSAGDQLWVARYILEVDGRPLDLLPHAGCVQFFFFFFRPDMAWSRITEIAGVVVSFDPKPIPGDWNGAGAHTNYSTKSMRSDGGYEVIKKAIGKLGLRHREHIAAYGDGNERRLTGRHETADINTFVWGVANRGASVRVGRDTEKEGKGYFEDRRPASNMDPYVVTSLIAETTMLWEPSHSNGDGKGAAAP

SEQ ID NO: 325743 - protein, 360 aa, Zea mays
  Clone ID: MRT4577_60147C.1.pep
MALLSDLINLDLSGRTGKIIAEYIWSKARTLSGPVDDPSKLPKWNFDGSSTGQAPGDDSEVILCPRAIFRDPFRKGQNILVMCDCYEPNGEPIPSNKRHGAAKIFSHPDVKAEEPWFGIEQEYTLLQKDTKWPLGWPLGGYPGPQGPYYCAVGADKSYGRDIVDAHYKACLYAGIDISGINGEVMPGQWEFQVGPAVGVSAGDQLWVARYILERITEIAGVVVSFDPKPIPGDWNGAGAHTNYSTKSMRSDGGYEVIKKAIGKLGLRHREHIAAYGDGNERRLTGRHETADINTFVWGVANRGASVRVGRDTEKEGKGYFEDRRPASNMDPYVVTSLIAETTMLWEPSHSNGDGKGAAAP

SEQ ID NO: 325744 - protein, 409 aa, Zea mays
  unsure (1)..(409): unsure at all Xaa locations
  Clone ID: MRT4577_60148C.1.pep
MALLSDLINLDLSDRTGKIIAEYIWVGGSGMDVRSKARTLSGPVDDPSKLPKWNFDGSSTGQAPGDDSEVILCPRAIFRDPFRKGQNILVXRPTLLQILCTACMKVDHGYGEERDHSSIFIFIFXLCVXMCDCYEPNGEPIPSNKRHGAAKIFSHPDVKAEEPWFGIEQEYTLLQKDTKWPLGWPLGGYPGPQGPYYCAVGADKSYGRDIVDAHYKACLYAGIDISGINGEVMPGQWEFQVGPAVXGVSAGDQLWVARYILERITEIAGVVVSFDPKPIPGDWNGAGAHTNYSTKSMRSDGGYEVIKKAIGKLGLRHREHIAAYGDGNERRLTGRHETADINTFVWGVANRGASVRVGRDTEKEGKGYFEDRRPASNMDPYVVTSLIAETTMLWEPSHSNGDGKGAAAP

SEQ ID NO: 325745 - protein, 111 aa, Zea mays
  Clone ID: MRT4577_60149C.1.pep
TICLSRHAPSLIWSVSNDPSNTHRDARESTTRVAVVLMQHSFFFFFYRLDPGPAHTIMHRDFQLDPSYSSLACPTRQVDVITVTKTKLACPVLVLNYLLVSSCPLADLVGL

SEQ ID NO: 325746 - protein, 485 aa, Zea mays
  Clone ID: MRT4577_6014C.1.pep
MVADRLRLALLLSACLCSAWARPRLEPTIRLPSERAAADETDDDAVGTRWAVLIAGSNGYYNYRHQADICHAYQIMKKGGLKDENIVVFMYDDIAHSPENPRPGVIINHPQGGDVYAGVPKDYTGREVNVDNFFAVLLGNKTALRGGSGKVVDSGPNDHIFVFYSDHGGPGVLGMPTYPYLYGDDLVDVLKKKHAAGTYKSLVFYLEACESGSIFEGLLPNDINVYATTASNAEESSWGTYCPGEFPSPPPEYDTCLGDLYSVAWMEDSDFHNLRTESLKQQYNLVKDRTAVQDTFSYGSHVMQYGSLELNVKHLFSYIGTNPANDDNTFIEDNSLPSFSKAVNQRDADLVYFWQKYRKLADSSPEKNEARRELLEVMAHRSHVDSSVELIGSLLFGSEDGPRVLKAVRAAGEPLVDDWSCLKSTVRTFEAQCGSLAQYGMKHMRSFANICNAGILPEAVSKVAAQACTSIPSNPWSSIHKGFSA

SEQ ID NO: 325747 - protein, 371 aa, Zea mays
  unsure (1)..(371): unsure at all Xaa locations
  Clone ID: MRT4577_60150C.1.pep
MALLSDLINLDLSGRTGKIIAEYIWVGGSGMDVRSKARTLSGPVDDPSKLPKWNFDGSSTGQAPGDDSEVILCPRAIFRDPFRKGQNILVMCDCYEPNGEPIPSNKRHGAAKIFSHPDVKAEEPWFGIEQEYTLLQKDTKWPLGWPLGGYPGPQGPYYCAVGADKSYGRDIVDAHYKACLYAGIDISGINGEVMPGQWEFQVGPAXVGVSAGDXQLWVARYILERITEIAGVVVSFDPKPIPGDWNGAGAHTNYSTKSMRSDGGYEVIKKAIGKLGLRHREHIAAYGDGNERRLTGRHETADINTFVWGVANRGASVRVGRDTEKEGKGYFEDRRPASNMDPYVVTSLIAETTMLWEPSHSNGDGKGAAAP

SEQ ID NO: 325748 - protein, 46 aa, Zea mays
  Clone ID: MRT4577_60151C.1.pep
VELILGHMRYLLTDVPRQPPSPPENASRSDRPGEAGTNGRVGGRVG

SEQ ID NO: 325749 - protein, 33 aa, Zea mays
  Clone ID: MRT4577_60152C.1.pep
PRVRIRSYMIMWHTHHRTIHALRDSINILGTLL

SEQ ID NO: 325750 - protein, 86 aa, Zea mays
  Clone ID: MRT4577_60153C.1.pep
MNAQFRAHVSRPLWLSNTHASSIIASHPYIKARVCVLVLLFCRCLRIKAPPLTLANDMEWVKWKPSLLVSSSGEMVSVEEYYLSPL

SEQ ID NO: 325751 - protein, 107 aa, Zea mays
  unsure (1)..(107): unsure at all Xaa locations
  Clone ID: MRT4577_60154C.1.pep
MAAKILRVLMLFAVCESAATYTIMPLCSQAPIASVRAQTPYTLVSXTCGNPILQPYMIQHAIAAGILPLSPLFLQQSSALLQQLCWVALWAQNIMAQQLQQLVGPSL

SEQ ID NO: 325752 - protein, 109 aa, Zea mays
  Clone ID: MRT4577_60155C.1.pep
NFFKTPKRRPLIHHNPHCWSYNHQEITGHSLPGATSTWPTRFGATKHGYTNAPRTYKRVYTIGCSIPPNVGHFKAPVTGTLSRCPRTSSSTCRQARFPLRAVQRACPWA

SEQ ID NO: 325753 - protein, 68 aa, Zea mays
  unsure (1)..(68): unsure at all Xaa locations
  Clone ID: MRT4577_60156C.1.pep
XLFFFFFFFFFCFLSRNHPIFIGKHLIDKANHIRAPANNYQRKTRKATKPEGRGQKKSLYCCHCRQKP

SEQ ID NO: 325754 - protein, 78 aa, Zea mays
  unsure (1)..(78): unsure at all Xaa locations
  Clone ID: MRT4577_60157C.1.pep
MSEEKHHHHLFHXKXERXXXGXSEEVDYEKKEKRHKRMEQVGQLXGIADGRYALHEEHKAKKEPENEHGDRVEGEVPA

SEQ ID NO: 325755 - protein, 135 aa, Zea mays
  unsure (1)..(135): unsure at all Xaa locations
  Clone ID: MRT4577_60158C.1.pep
MDHEVHVKMHSXNDLAVKEETVCRLRLGTNMYPFSXIDGAKXAATLDVLPVNELITKVNRYTTLLLXHNRKIVNRLHDKNHIMGTTXDGANDAPGANNADICIDDTDSTDPDNIIADIPLTDPYLTIIINACLTT

SEQ ID NO: 325756 - protein, 78 aa, Zea mays
  Clone ID: MRT4577_60159C.1.pep
SFENITTSNTIFHTIYSWVALHCFVINLLANLQDNIIFSFFRSPGRDCFSFVSNIFCFDFSMFYFTYYLQISCFEASS

SEQ ID NO: 325757 - protein, 69 aa, Zea mays
  unsure (1)..(69): unsure at all Xaa locations
  Clone ID: MRT4577_6015C.1.pep
PTPNYLRERTRPPTAGVXIQMMLRVSASPAAAVANQLSGGAADPAPARVTAQRNGVSLDRALIGKGKEV

SEQ ID NO: 325758 - protein, 45 aa, Zea mays
  Clone ID: MRT4577_60160C.1.pep
MGVCQWDEKPQTLVLKGNLFLKKGPSFFNPKPALGEAPSFPGGAF

SEQ ID NO: 325759 - protein, 44 aa, Zea mays
  Clone ID: MRT4577_60161C.1.pep
MWTSGRSFKAGNLKVCDISLLLNFSVLILVIALLTFAKKFPLHR

SEQ ID NO: 325760 - protein, 95 aa, Zea mays
  Clone ID: MRT4577_60162C.1.pep
DSKPFRFPCSARSRCTPSWRGPRAGFFAEGGAAGSRRKTWLAKGGHPWGGGYSLEKLDSLPTGFISNTRTEKGQLGTFLWGQILEGSYIGFKKVK

SEQ ID NO: 325761 - protein, 45 aa, Zea mays
  Clone ID: MRT4577_60163C.1.pep
LKMRTIHLEQLLQAHIVIRIVIHKKPIITISYSKTDIVISESKYF

SEQ ID NO: 325762 - protein, 48 aa, Zea mays
  Clone ID: MRT4577_60164C.1.pep
MFLWIARRFSDSGQEHRRVIHSAVRVMIFRSGVEKYSRRMYSAAWAHP

SEQ ID NO: 325763 - protein, 78 aa, Zea mays
  Clone ID: MRT4577_60165C.1.pep
HACRFRTSEILFVVQFDMPWPDNRCVGHSDSQSSAALDHSTYNKLHYTRLGTVFNSPKKPAWLTFFLFFFYRELLLSA

SEQ ID NO: 325764 - protein, 152 aa, Zea mays
  Clone ID: MRT4577_60166C.1.pep
MMVLASVATTSFTILIIFSLPSCLRLRATPFSAEGVGVGDSSPYLSDTDSRSGYCTSTRTFHSMHAPSFLLSSDIPLVFSAFALFFLPNLLPPPTVAAVNRPTLINVGTGRVGLAPSLSPCVSTRRTWCLLPRLCYLGDGESRSEILDTQCP

SEQ ID NO: 325765 - protein, 430 aa, Zea mays
  Clone ID: MRT4577_60167C.1.pep
MGISARWLKSLVGLRKVEQQPRKESADVGRMFHFQNQRSQDDSSIAAQEEIPEVPYGNDPPEDDSNAPSCLEPTYSSADVPLFQTEEELKEIWAATIIQTTFRAFLARRAHRALKGLVRLQALVRGHIVRKQADTTLRCMQALVRVQARVRARRVRMALENQTDQQNTSPEHTTVARVREIEDGWCDSIGSVEDIQAKLLKRQEAAAKRERAMAYALAHQWQASSRQITAFEPDKNSWGWNWLERWMAVRPWESRFLGTYTADGIFVVNETKQPDRSATKTPYRKPVKKHDSTLQSNMLNQKGFPSNSEGVGSSTNRPSGLVSTKSRLKVLPREGSEEAPSRPSPLVRSASNPKERTSGINSKERTGDLDCQVHKRFSLPGIGSEAGRHLTKKGTVNRSLKATKDSHMLGSRHHLASCIDPVPTRVELET

SEQ ID NO: 325766 - protein, 97 aa, Zea mays
  unsure (1)..(97): unsure at all Xaa locations
  Clone ID: MRT4577_60168C.1.pep
NPXRRFSMRAYIHSPSLVRRLFGLAPPRLVGWGQVMDVLHGHMVAGGAIITYFGDASSLAVTLVEFTVLAEVYIWRVGMSGRFPDIYRVHVVEDRVE

SEQ ID NO: 325767 - protein, 68 aa, Zea mays
  Clone ID: MRT4577_60169C.1.pep
RHGDGHGCQGQRREHSVHAMQKGQETMTSAKDKATNTEQRGMDAVRSAQDKASKHAHQGKETVKSTKA

SEQ ID NO: 325768 - protein, 64 aa, Zea mays
  Clone ID: MRT4577_6016C.1.pep
PGSGVVSQPIVLVGGLWIPQEQSSSQSGSPHGPLHFSTSGIAVSSAGTVSCEEEDGRSESYGWK

SEQ ID NO: 325769 - protein, 70 aa, Zea mays
  Clone ID: MRT4577_60170C.1.pep
ASCLPPVIHFRPTGMRRAVKLVRPGARQHFAMETTPEIIIPMVQMPRSVKSYANPTLNPDHPAATYNLQA

SEQ ID NO: 325770 - protein, 59 aa, Zea mays
  Clone ID: MRT4577_60171C.1.pep
PMLPGQGRLSSQDYSFEYAVKFYRFCACPSTLYHNPTREKIIPSLSQLQFSLTLAIWWI

SEQ ID NO: 325771 - protein, 72 aa, Zea mays
  Clone ID: MRT4577_60172C.1.pep
QKIQHFVLTWDTKTFFFFSLSLSAHCLNLRKLPELRPHKIGLGRPKNFYGGPYLGPNLKGTMDRVPQKLLFR

SEQ ID NO: 325772 - protein, 103 aa, Zea mays
  Clone ID: MRT4577_60173C.1.pep
PAKSTRKASIKPVCFRPKQRLLVLGFILPGPQDGQGNHFFRVGAGSMTLLLNHKWGPPTQWALNQHVQGQPGCQIDKYFYTSLQTEILGDQYPPHPIREGRFG

SEQ ID NO: 325773 - protein, 253 aa, Zea mays
  unsure (1)..(253): unsure at all Xaa locations
  Clone ID: MRT4577_60174C.1.pep
KPKKSLNSAPDPSVAARLPWQPSAPPLATALLISFAALLLRALVSVGPYSGQGAAPKFGDYEAQRHWMELTLHLPSSDWYRNTSDNDLAYWGLDYPPLSAYQSRLHARLINASLPDAVALRSSRGFESXIGKLLMRWTVLSSDLLVFFPAALWFVWAYIKLGVGVSGEERWEGWRWLLAMVLSSPCLVLIDHGHFQCNCVSLGLALGAIAGVLSRNELVAADLFTLAINHKQAFYYCWSLPLMEIRLMLIRTL

SEQ ID NO: 325774 - protein, 95 aa, Zea mays
  unsure (1)..(95): unsure at all Xaa locations
  Clone ID: MRT4577_60175C.1.pep
VRVFFPGPRALASSAPLFVWCSLAWGFVGAGCLVRSVSGLSCCVALEACGCPWGFWEQCAALRVRLLQAFFFLRCCRQGLCHPGAXLAGPSSHPP

SEQ ID NO: 325775 - protein, 55 aa, Zea mays
  Clone ID: MRT4577_60176C.1.pep
GHCLCAQSNIHPVNHCRLVRSTPHGAQCADHSMCIRSHSQSHSVSEYFMISRCKP

SEQ ID NO: 325776 - protein, 202 aa, Zea mays
  unsure (1)..(202): unsure at all Xaa locations
  Clone ID: MRT4577_60177C.1.pep
QCINRSRRYGEQTVDLSSTAFDCKAVNVSSWSAFCEARVTMRNTVGKCEPSAVSGRPCYGPXDRVLYLGPLSGEAPSYLMGEFPXEYLWNTAXLPADPETFAKNRYLEVIDSRWDMLGALGCVXFPELLXRNDDKFGKAECLKVVSXIFFEGXLHYLGNPILIHAQRILVICTCQVLLMGADNDYRISGGPLXGNVMHPLYP

SEQ ID NO: 325777 - protein, 86 aa, Zea mays
  Clone ID: MRT4577_60178C.1.pep
MRPGRRQSLLRSCHTMDHIQHPSVMQKVAVQLLSSSTSLDFQRYDRSFKKPALYQGHFAYRQYSNAGMHYPIVSSTTTAICVLAPA

SEQ ID NO: 325778 - protein, 251 aa, Zea mays
  unsure (1)..(251): unsure at all Xaa locations
  Clone ID: MRT4577_60179C.1.pep
MRHWLCCNGRSGDDDDRHEVEHSKAQGNKIDGKQKSSKPADQPEPDISPPTIDVPELSFEDLKEKTDNFGSSSLIGEGSYGRVYHATMDDGRQAAIKKFDASENEPNDEFLKQVSLVSRXKHENLVEMLGYYVEGNYRILAYEFATMGSLHDVLHGRKGVQGAQPGPVLDWMQRVKIAIEAAKGIEYLHEKVQPSIIHRDIRSSNVLLVEGLQAKXADFNLXNQAPDMAARLHSTRVLGTFGYHAPEYAMT

SEQ ID NO: 325779 - protein, 274 aa, Zea mays
  unsure (1)..(274): unsure at all Xaa locations
  Clone ID: MRT4577_6017C.1.pep
RTAVQDTFSYGSHVMQYGSLELNVKHLFSYIGTNPANDDNTFIEDNSLPSFSKAVNQRDADLVYFWQKXVDHEKATHLDCSQKNLFTSLISFQQFMHSFRRTNQLIGFFISHXYRKLADSSPEKNEARRELLEVMAHRSHVDSSVELIGSLLFGSEDGPRVLKAVRAAGEPLVDDWSCLKSTVXLLTMPAAKAXKALVPLSFFAYLITNLCICFXRTFEAQCGSLAQYGMKHMRSFANICNAGILPEAVSKVAAQACTSIPSNPWSSIHKGFSA

SEQ ID NO: 325780 - protein, 271 aa, Zea mays
  Clone ID: MRT4577_60180C.1.pep
PTPPHRYDYLYCGSSLYGNLSAARVREWMAYHARFFGARSHFVFHDAGGVGPAVRAALEPWVRAGRATLQDVRAQAEYDGWYHNQFLVVNDCLHRYRHAAKWTFFFDVDEYMFLPDGRALEDVLAELEPYTQFTIEQNPMSSKLCVDDPAADYSNQWGFEKLVFRNSITGVRRDRKYAIQAKNAYATGVHMSENVIGNTTHKTEHLIRYYHYHNTINVLGEVCREFVSVPPKKGGGLTWSEKTPWYYDGSMKRVAGAVREFERETIGDVRL

SEQ ID NO: 325781 - protein, 277 aa, Zea mays
  unsure (1)..(277): unsure at all Xaa locations
  Clone ID: MRT4577_60181C.1.pep
MSAVVCGKRSSSIFGDELVPSPSSXLRPLPTTITPPRGPAAPRPAGGXLLHHLLTLFPDMDPQLLEKALEASGDDLDSAIKRLNELRLESAGAILSATVCESEKDISSAHNLLAEGTTSNGHLDIATENPPAIDNSQTSHHSSEWVDLFVKEMMSSSDIDDARARASRALEVFEKSIMDRVGPEAVQNLHRENVMLKEQLAIILRENAVLKRGVAIQHERQKEFDVRTQEVDSLKQLVLQYQEQIKTLEINNYALRVHLKQAQQGNSMHGRFPPDVF

SEQ ID NO: 325782 - protein, 69 aa, Zea mays
  Clone ID: MRT4577_60182C.1.pep
QDQGFGFNLQAWHPKRPMGMKLFGVIPSSLNPNPEINSYCVSTAKPPVRLCGFQIPTSMISWGFRSWPE

SEQ ID NO: 325783 - protein, 222 aa, Zea mays
  Clone ID: MRT4577_60183C.1.pep
MGDWPARGRPGACSPVPPAAACSLACTRHTPSFLPCSSRALPSVSVGVGDDWQPPYARCPNLYLRYLRRRRASPGFLLIMAQRVMCLLRRSIGFTVPPAQRALSTTATPAAEGAAVAEATAKEAKKRKKKNLFDVVQFLPGWGVGYKVAKTTWRDVSYQITKINLYKDGRHGKAWGFRYKAGVQAADAPTRISGVNKRGWKYIKESQKKLHDAPKVDVAIAG

SEQ ID NO: 325784 - protein, 47 aa, Zea mays
  Clone ID: MRT4577_60184C.1.pep
DVVHNDSSDDVVKVRPNDLEWLTIKSRIASRFFLKKKKKKKKKNSSP

SEQ ID NO: 325785 - protein, 698 aa, Zea mays
  unsure (1)..(698): unsure at all Xaa locations
  Clone ID: MRT4577_60185C.1.pep
IRRQGRSGRGAMHVKGCSPIPKEKLDTAETRKPTKGGRPGSEKNESKLGRPPMKKASDRKASSWHSQALNSDITDITGEPEDDQEELLAAVNAARSAIVSAYSGPFWKKMEPMLTFMSSENFSFLKNQINLVEELEVSMSCMSDSEHDIIASVGHRRMSKMEEHSSQGLVPSNFSPSSQQSKTNGVGAKGLVGCFSHGDKIHTGPQKLEADKWFNEMAPMTHRLLSALIMEDDLPDSNGVQRDILVEFPNSHNPYTVNRYLENELQASAITSNFGXSVDFVHSNSTSVVHQSMCNGFTASSNFINSNSENSVHSENLSDGLNFTVYPESGPLHDLIPLTPRQCQNPGKDFPLSPYEYQYGQMSMEDKILIELQSIGICPETVPKLDDGEDEDINKMISELRKRLHDQVNQKKCRLHKLDKSIQDTKNIEERSLEQHAMNKLVERAYRKLKGGRIGSSHKAGVSKSANKAAKQLALAFAKRTLVRCHKFDETGKSCFSEPSLWSVLSAPLPSSDARFTEGVERLKHQKLDRTPFDQGGAKWKKGDRERDHSRDASAKGSGLKSGRHSSGGSGRSGGGERKNKTKPKQKLAQLSTSGNVLGRVVEPFSSPAAQAQEPPEPASEKKTQHPSRNVAPRLTVDAGLPALPGLDDILDVPGGLDGQGNDISSWFTDGLDDSLQDIDLSGALEIPDDDLTQLGFI

SEQ ID NO: 325786 - protein, 49 aa, Zea mays
  Clone ID: MRT4577_60186C.1.pep
KGINILSNLAISIQIHFLHAKVTSNHCSPRTAHLLEPRRTCITYFDQLV

SEQ ID NO: 325787 - protein, 55 aa, Zea mays
  Clone ID: MRT4577_60187C.1.pep
YCGVRSMHQETTIRITVYVEHYVLPTPNHVRENDYHPRYDSPTRGRRTGHRRRAG

SEQ ID NO: 325788 - protein, 498 aa, Zea mays
  Clone ID: MRT4577_60188C.1.pep
MTIARRLLRSNAPAQASSLLKHVTGTASLQGHAHSPLDASVRHFSSAPSAQSDTTEENGFKGHGMLAPFTAGWQSNDLHPLIIERSEGSYVYDINGNKYLDSLAGLWCTALGGSEPRLVKAATEQLNNLPFYHSFWNRTTKPSLDLAQEILSMFTAREMGKVFFTNSGSEANDSQVKLVWYYNNALGRPDKKKFIARSKAYHGSTLISASLTGLPALHQKFDLPAPFVLHTDCPHYWRYHLPGETEEEFATRLATNLENLILKEGPETIAAFIAEPVMGAGGVIPPPKTYFDKVITAFGRLGTMFGCDYYNIKPDLVSLAKALSNAYVPIGATLVSPEISEVIHSQSNKLGSFAHGFTYSGHPVACAVAIEALKLYRERDIPGHVKQIAPKFQDGIRALADSPIIGEIRGLGMIMGTEFTNNKSPADLFPAEWGVGAIFGEECQKRGMLVRVAGDAIMMSPTLIMTPGEVDELVSIYGEALRATEERVSDLKMKSEKN

SEQ ID NO: 325789 - protein, 33 aa, Zea mays
  unsure (1)..(33): unsure at all Xaa locations
  Clone ID: MRT4577_60189C.1.pep
KMKSLRFKFCNRMXXVDPDKANLYNSPCTILQS

SEQ ID NO: 325790 - protein, 373 aa, Zea mays
  unsure (1)..(373): unsure at all Xaa locations
  Clone ID: MRT4577_6018C.1.pep
MRRWFCCTRFNASYREHENERPITPEEKEGNGFSVKSDPIKAPPSIEVPELSFEELKEKTDNFGSMALIGEGSYGRVYYAILDSGKHVAVKKLDASTDPELDNEFLTQVSIASKLKHDNFVEMLGYCVEGNQRLVVYEFATMGSLHDILHGRKGVPGAQPGPALDWMQRVKIAIDAAKGLEYLHEKVQPSIVHRDIRSSNILLFEDYRAKIADFNLSNQSPDMAARLHSTRVLGTFGYHAPEYAMTGQLTQKSDVYSFGVVLLELLTGRKPVDHTMPRGQQSLVTWATPRLTEDTVKQCVDPRLKGEYPPKGVAKXGFNHSIPCLAAVAALCVQYESEFRPSMSIVVKALSPLLQHKPQPPAATTDATAPSDA

SEQ ID NO: 325791 - protein, 104 aa, Zea mays
  unsure (1)..(104): unsure at all Xaa locations
  Clone ID: MRT4577_60190C.1.pep
RVYGALLCAVGKSXYQRLTTIXDLLYPLMHSLXSSNERAVTNNPHXRKSRTDLSASQPPLNNIATDTTDNSMVXFHAXNMQGALDGSPNQLGYPGMMPTSSCGQ

SEQ ID NO: 325792 - protein, 181 aa, Zea mays
  unsure (1)..(181): unsure at all Xaa locations
  Clone ID: MRT4577_60191C.1.pep
LDSLAGLWCTALGGSEPRLVKAATEQLNKLPFYHSFWNRTTKPSLDLAQEILSMFTAREMGKVFFTNSGSEANDSQVKLVWYYNNALGRPNKKKFIARSKAYHGSTLISASLTGXTVILEKLVCQHNIYSNETHKXLQYFPDCNSIXLPALHQKFDLPAPFVLHTDCPHYWRYHLPGETEE

SEQ ID NO: 325793 - protein, 509 aa, Zea mays
  Clone ID: MRT4577_60192C.1.pep
MMIARRLLRPNAPAQASSLLKHVTGTASLQGNADSLLDATVRHFGSAPSAQPEENGFKGHGMLAPFTAGWQSNDLHPLIIERSEGSYVYDINGNKYLDSLAGLWCTALGGSEPRLVKAATEQLNKLPFYHSFWNRTTKPSLDLAQEILSMFTAREMGKVFFTNSGSEANDSQVKLVWYYNNALGRPNKKKFIARSKAYHGSTLVSASLTGLPALHQKFDLPAPFVLHTDCPHYWRYHLPGETEEDFATRLATNLENLILKEGPETIAAFIAEPVMGAGGVIPPPKTYFDKVQAIVKKYDILFIADEVITAFGRLGTMFGCDYYNIKPDLVSLAKALSNAYVPIGATLVSPEISDVIHSQSNKLGSFAHGFTYSGHPVACAVAIEALKLYRERDIPGHVKQIAPKFQDGIRALADSPIIGEIRGLGMIMGTEFTNNKSPTDLFPAEWGVGAIFGEECQKRGMLVRVAGDAIMMSPTLIMTPGEVDELVRIYGEALKATEERVAALQSKKN

SEQ ID NO: 325794 - protein, 67 aa, Zea mays
  Clone ID: MRT4577_60193C.1.pep
VYIIFSRKLTFHKIYKHITIKSLQPTLSEDSDKGETQNHKLTALSFKICACVYNLIFSLIPDCEVCI

SEQ ID NO: 325795 - protein, 99 aa, Zea mays
  Clone ID: MRT4577_60195C.1.pep
SPQHSCTHNFPIAMEERCQDGTCLPVSSAQVCGYQRKSHSQPLPTTIPFLGSWRSLASCSVVEAARKAGESHQLQPSMPLTLPHPSTFTLLLTLQGYLS

SEQ ID NO: 325796 - protein, 89 aa, Zea mays
  unsure (1)..(89): unsure at all Xaa locations
  Clone ID: MRT4577_60196C.1.pep
RDTAILTPASNVYEINRPLGGSERRGTTDREEQMLELLLLREXTQCLXHIMLVDLLRNAFDQGCKPGSETVGGELTIDSNYHDMHIIPT

SEQ ID NO: 325797 - protein, 190 aa, Zea mays
  Clone ID: MRT4577_60197C.1.pep
MFKNTFQSGFLSILYSLGTKPLQIWDKEVVNGHIKRPQDEDIQSNVLEIVGTNVQSTYITCPADPSATLGIKLPFLAIIVKNLKKYFTFEIQVLDDKNVRRRFRASNFQSVTRVKPYICTMPLKLDDGWNNIQLNLADLTKRAYGTNYVETLRVQVHANCRLRRIYFSDRLYSEEELPPEFKLYLPIQKS

SEQ ID NO: 325798 - protein, 163 aa, Zea mays
  Clone ID: MRT4577_60198C.1.pep
GNDNGCRGGSPRSAMEWVTRNGGLTTESDYPYVGSQRQCMSGKLGHHAARIRGYQAVQRNNEAELERPVAGQPVAVFVDASRAFQFYKSGVFSGPCDTTTVNHVVTVVGYGSTGSDSGGRKYWIVKNSWGQGWGENGYVRMARRVRAREGMCAIAIEPYYPVM

SEQ ID NO: 325799 - protein, 145 aa, Zea mays
  unsure (1)..(145): unsure at all Xaa locations
  Clone ID: MRT4577_60199C.1.pep
KTRGGGGVFSTANELLELADKVGPEICLLKXHVDILADFTLIFXFFPRTXAGFFCGGGFEXRTFAFFWYAGAMQSXGGLFRVFGWADIINAPFFFGPGIVDGLKLNGLPXGRGLLLLAXMSSSGNLAFGDFPAAAVXIAARLSDF

SEQ ID NO: 325800 - protein, 481 aa, Zea mays
  Clone ID: MRT4577_6019C.1.pep
MVADRLRLALLLSACLCSAWARPRLEPTIRLPSERAAADDAVGTRWAVLIAGSNGYYNYRHQADICHAYQIMKKGGLKDENIVVFMYDDIAHSPENPRPGVIINHPQGGDVYAGVPKDYTGREVNVDNFFAVLLGNKTALRGGSGKVVDSGPNDHIFVFYSDHGGPGVLGMPTYPYLYGDDLVDVLKKKHAAGTYKSLVFYLEACESGSIFEGLLPNDINVYATTASNAEESSWGTYCPGEFPSPPPEYDTCLGDLYSVAWMEDSDFHNLRTESLKQQYNLVKDRTAVQDTFSYGSHVMQYGSLELNVKHLFSYIGTNPANDDNTFIEDNSLPSFSKAVNQRDADLVYFWQKYRKLADSSPEKNEARKELLEVMAHRSHVDSSVELIGSLLFGSEDGPRVLKAVRAAGEPLVDDWSCLKSTVRTFEAQCGSLAQYGMKHMRSFANICNAGILPEAVSKVAAQACTSIPSNPWSSIHKGFSA

SEQ ID NO: 325801 - protein, 83 aa, Zea mays
  Clone ID: MRT4577_601C.1.pep
ALVCFPLRAHMCVRGPTCQLVMVPWILVFEMLLTSRQVHFNLCVGESMLQRPYTVHFFVHEPLVDIRDIVVVAAKDPCAATLI

SEQ ID NO: 325802 - protein, 56 aa, Zea mays
  Clone ID: MRT4577_60200C.1.pep
FLSSFLPASVAVLYPRSGCHGRPAHRLTYLRFQGGLHPLLQVLLQLHHHQLTMLCD

SEQ ID NO: 325803 - protein, 189 aa, Zea mays
  unsure (1)..(189): unsure at all Xaa locations
  Clone ID: MRT4577_60201C.1.pep
ERFGIQQLLNIPFLVGVLICGASTFLLLALQIYGVRKIELIGVIFMLLIAISFFVELSTVNPPMGEVIQGLFIPRLRGVYAVSDAIALFSVLVVPHNLFLHSSLVVSRKISPSPKGFKGLYVPIILSWLTTXNACSGLTLNSASVLLKNMFGRSTSKIYGLTLLASGQSNTMTTSYSGQYIMQGFSGMR

SEQ ID NO: 325804 - protein, 59 aa, Zea mays
  Clone ID: MRT4577_60202C.1.pep
MGPLFFTPPKTRFGFFPKKKKKKKKKKKKKKKKKKKKKKKKKKKKKKKKKKKKKKKKKK

SEQ ID NO: 325805 - protein, 337 aa, Zea mays
  unsure (1)..(337): unsure at all Xaa locations
  Clone ID: MRT4577_60203C.1.pep
VLICGASTFLLLALQIYGVRKIELIGVIFMLLIAISFFVELSTVNPPMGEXHNLFLHSSLVVSRKISPSPKGFKDTSTFFLIENAFAMLLVLLVNVAIVSTTGTICANNTQLVDNNNACSGLTLNSASVLLKNMFGRSTSKIYGLALLAPGQSNTMTTSYSGQYIMQGFSGMRKCIVFIIAPCFTVIPSLIICSVAGAPHVRQLINVXAIILAFVLPFSLVPLLKFSSSCAAKVPYKNSFXIVQVAWILSIVIMGINIYFFCNSFISWLVHSELPRIVNVIISTLVFPFMAAYIAALIYLAFRKVNAAGIFPSVSASTGTEVEAWRQDGNIDDIGVH

SEQ ID NO: 325806 - protein, 68 aa, Zea mays
  unsure (1)..(68): unsure at all Xaa locations
  Clone ID: MRT4577_60204C.1.pep
NGLXXXPKRWWXXQKKKQTPPRSGLPKXKRNXHIITXKNRXKHXRELSLIXTTSQFKLLILYLGRDHA

SEQ ID NO: 325807 - protein, 51 aa, Zea mays
  Clone ID: MRT4577_60205C.1.pep
RDAGAGAATTSSVATTAAKASSIGLLLVVVAIMRAVDLLASSLDHTHSTWS

SEQ ID NO: 325808 - protein, 66 aa, Zea mays
  unsure (1)..(66): unsure at all Xaa locations
  Clone ID: MRT4577_60206C.1.pep
HHLFFFFFFFLKNKNYVQILRVKMVCSPCYNCIKVCIYTCIQLAHSVCLFEFRXHGTPTNHSVVTR

SEQ ID NO: 325809 - protein, 100 aa, Zea mays
  unsure (1)..(100): unsure at all Xaa locations
  Clone ID: MRT4577_60207C.1.pep
KDRDRGGGASLPATASAVAPSLVAFVHLLDGEGGSPSAPAFSSASSATRPPRTKRPARGGPAFIERQSLACPLESVRTQHRSGGALPPAPHAGTDEXPAR

SEQ ID NO: 325810 - protein, 42 aa, Zea mays
  Clone ID: MRT4577_60208C.1.pep
IDTFTTTNVHHRFNITNIQHKLTMNPIFNAYNCSSSQSKGIE

SEQ ID NO: 325811 - protein, 298 aa, Zea mays
  Clone ID: MRT4577_60209C.1.pep
MPSSLSCSLTWPLSIHLQQHPVRSGVPLLLLVTEQCIGNVAREGAELRSTLLVPGALWPLARSMLSNRGFTTRTAVWALSNIAASSFEHKKLVFASEVTQNEAAPLAAKYRRQGFQTLKLKIGNNFNSDIEVLASIRLDHPDYSFILHANEEYTYGSLNFFGLDTNTQYDMVCPYCDSGFVAELDDANALMSHFDGMDPDFHRDPRFGIMEVISVVMQHDMARMNKEVDVTGRPNFFSDLEIEFVIKIRDSPPMSLEALLETISCLSVHNFLSWFGIPVELMPCIGLRASRFLRRGEC

SEQ ID NO: 325812 - protein, 485 aa, Zea mays
  Clone ID: MRT4577_6020C.1.pep
MVADRLRLALLLSACLCSAWARPRLEPTIRLPSERAAADETDDDAVGTRWAVLIAGSNGYYNYRHQADICHAYQIMKKGGLKDENIVVFMYDDIAHSPENPRPGVIINHPQGGDVYAGVPKDYTGREVNVDNFFAVLLGNKTALRGGSGKVVDSGPNDHIFVFYSDHGGPGVLGMPTYPYLYGDDLVDVLKKKHAAGTYKSLVFYLEACESGSIFEGLLPNDINVYATTASNAEESSWGTYCPGEFPSPPPEYDTCLGDLYSVAWMEDSDFHNLRTESLKQQYNLVKDRTAVQDTFSYGSHVMQYGSLELNVKHLFSYIGTNPANDDNTFIEDNSLPSLSKAVNQRDADLVYFWQKYRKLADSSPEKNEARRELLEVMAHRSHVDSSVELIGSLLFGSEDGPRVLKAVRAAGEPLVDDWSCLKSTVRTFEAQCGSLAQYGMKHMRSFANICNAGILPEAVSKVAAQACTSIPSNPWSSIHKGFSA

SEQ ID NO: 325813 - protein, 43 aa, Zea mays
  Clone ID: MRT4577_60210C.1.pep
VVQNTQRSPALLKKLGPFDIYVRAKQTRSEFGGLNGNMKVILS

SEQ ID NO: 325814 - protein, 94 aa, Zea mays
  unsure (1)..(94): unsure at all Xaa locations
  Clone ID: MRT4577_60211C.1.pep
LVGAARVLRLVVLAGRGGSRPCACGGAPSLAPRSXARGGRWSGPCRAPCGXSGGSSXRGGCASWRRLGWXLLLXWEAVSCEAGFLSAXPKXPRP

SEQ ID NO: 325815 - protein, 84 aa, Zea mays
  Clone ID: MRT4577_60212C.1.pep
AKGGIARMMIDMEGLIGDWKSVLRAKAAGTEDSTEEPTYDGARGRRLAGVSSKPAGQLNLSYRGQGHIGLTEGTSDGDRLAHDH

SEQ ID NO: 325816 - protein, 176 aa, Zea mays
  Clone ID: MRT4577_60213C.1.pep
MGQLSKKLLLASMVAAVLAVAAVELCSAIPLEDNDLESEEALWDLYERWQTAHRVPRHHAEKHRRFGTFKSNVHFIHSHNKRGDRPYRLRLNRFGDMDQAEFRATFAGSRVSDRRRDGPATPPSVPGFMYAAVNVSDLPRSVDWRQKGAVTPIKCSGLCRSALPFLLRRAPRPPPP

SEQ ID NO: 325817 - protein, 96 aa, Zea mays
  unsure (1)..(96): unsure at all Xaa locations
  Clone ID: MRT4577_60214C.1.pep
WEVIHSRWAILGALVCVFPQPLTRXNGVEVRDSSVWFRXGSQHVYAXGGLDYGGNLSLXHAQSILASWARQIVLPPATEGYRVDKEPVRRGGDSEG

SEQ ID NO: 325818 - protein, 71 aa, Zea mays
  Clone ID: MRT4577_60215C.1.pep
TGTSRCGSSCAWCPRYRLQCLRTCFGHRSRPFRSCSHNCPRRVIRDNACIGARCSCRQHTCHRLCCKAGLW

SEQ ID NO: 325819 - protein, 200 aa, Zea mays
  unsure (1)..(200): unsure at all Xaa locations
  Clone ID: MRT4577_60216C.1.pep
MEAAAALPPERDTSADWGDGVVPLGFRVKASSRESPSQKAGNVLEADLRSHWATATNTKEWILLELQEPCLLSHIRIYNKSVLEWELTAGLRYKPDAFVKLRXRCEAPKRDVVYPANHTPCRYLRISCLRGNPIAIFFIQLFGIPVPGLEPELQPLLSYLLPQITSSKQPLSHNMHLQVLFSYYFVSSFIFDPSASFTIS

SEQ ID NO: 325820 - protein, 82 aa, Zea mays
  unsure (1)..(82): unsure at all Xaa locations
  Clone ID: MRT4577_60217C.1.pep
MSGSSAAGEDIVQHLSSNSNPSSSKLAKLEARMAGKAVSAPSSPPHHPMAAPASAPAISFMDXEELPETSSSDDDNCEEVLI

SEQ ID NO: 325821 - protein, 106 aa, Zea mays
  Clone ID: MRT4577_60218C.1.pep
LLSAPVPYTSSAPTASSLPVSGWLHQVCGVVQRLRRATRTLRDAVAAGAPLASVLGRSAGSGDAAVMLGSTFRITPSMVSPSVLCPSSRVTWTPRAAAMPASIPAR

SEQ ID NO: 325822 - protein, 33 aa, Zea mays
  Clone ID: MRT4577_60219C.1.pep
MSGSSAAGEDIVQHLSSNSNPSSSKLAKLEARM

SEQ ID NO: 325823 - protein, 87 aa, Zea mays
  unsure (1)..(87): unsure at all Xaa locations
  Clone ID: MRT4577_6021C.1.pep
YQASNCRAPPFRFISFLILFPPFFFFFFFFSFLLFXFLFFFFXQANLFIQNEHEYQCSVGLAHDYRMSMSTLGFVWDHGVPTSRSRT

SEQ ID NO: 325824 - protein, 347 aa, Zea mays
  Clone ID: MRT4577_60220C.1.pep
MALSSSSPVVAPSPCRFLCPRATTASHDLLSFATTATRRRLLLSTATTTIAAAMAASSSCKVIDSHLHVWATPQQAKEEYPYFPGQEPTLRGDADFLLECMSEAGVDGAVIVQPINHMFDHSLVTSVLKKYPSKFVGCCLANPADDGTGIKQLEHLIVQEKYRAVRFNPNLWPSGQKMTNEVGRSLFSKAGELGVPLGIMTMKGVGPYIQEIEELCRDYPATTVILDHMAFCKPPTNDEEEKAFSSFLSLSRFPQVYVKYSALFRITREAYPYEDTAQLLSSVISHYGASRVMWGSDFPYVVPECGYKGGREAISHVASKIPVSQSDLEWILGKTVSQLFQGAWVTP

SEQ ID NO: 325825 - protein, 118 aa, Zea mays
  unsure (1)..(118): unsure at all Xaa locations
  Clone ID: MRT4577_60221C.1.pep
MFDDDFDIISWWREHKNTYPILSILAKDVLTVPXVVTVPVSTISFESVFSLTGRVLEERRRCLTSEMVETLTCLKDWQMGDDREQHNLENPELQQAFENQYLDGDGDDNQDAQPVIVA

SEQ ID NO: 325826 - protein, 275 aa, Zea mays
  unsure (1)..(275): unsure at all Xaa locations
  Clone ID: MRT4577_60222C.1.pep
MATSPPQNPSSGEPSDASSLAAAALEAPVRVWRSLVARFPPLPDSSSFLAGVSDLQLRYFGNSRPRRRRRSALPLPLRPVAAHSARIAGEMPKAFVILDDVVQHTLTNLHSIHKSLLFWQAKAEGTNSQKVYFMIFERGPRAFVDATYQTLTRLGSNGRPVQYILHSASDMVSTKLAALTSMQHCLAAFLAEVXFFSLTTGNSEVDKCREGLTENSDKSLHTLFIVLNTTFSKLEVSLRNACEGQDELFIDDGNLHELFXEIPEVDVXKSEWTEA

SEQ ID NO: 325827 - protein, 108 aa, Zea mays
  Clone ID: MRT4577_60223C.1.pep
WISDPSCLSAGCERSYHRWHRRSMTVTKETLSLGELCPRHRSPSAADSPRYASFSITLMILLLMTLAGGLPEQLTTTPTIKRKTTPDIPLHPSSTLSGHSGVLPGQSP

SEQ ID NO: 325828 - protein, 85 aa, Zea mays
  unsure (1)..(85): unsure at all Xaa locations
  Clone ID: MRT4577_60224C.1.pep
PLARCGQQNYTCMLSFGDWLTDTGNLIESSLVSXHIVGRYPYGITYFDRPTGRCSDGRLVGDFLGQAFGLPMLEPYLQNRGKDLR

SEQ ID NO: 325829 - protein, 503 aa, Zea mays
  Clone ID: MRT4577_60225C.1.pep
MLTVAAATDAYGYLTPRCRRRTRPRPPPPASPIPLARARSPPVVQQLESSHTSAKMREILHIQGGQCGNQIGAKFWEVVCDEHGIDTTGRYTGTSDLQLERVNVYYNEASCGRFVPRAVLMDLEPGTMDSVRTGPYGQIFRPDNFVFGQSGAGNNWAKGHYTEGAELIDSVLDVVRKEAENCDCLQGFQVCHSLGGGTGSGMGTLLISKIREEYPDRMMLTFSVFPSPKVSDTVVEPYNATLSVHQLVENADECMVLDNEALYDICFRTLKLTTPSFGDLNHLISATMSGVTCCLRFPGQLNSDLRKLAVNLIPFPRLHFFMVGFAPLTSRGSQQYRALTVPELTQQMWDAKNMMCAADPRHGRYLTASAMFRGKMSTKEVDEQMINVQNKNSSYFVEWIPNNVKSSVCDIPPRGLSMASTFVGNSTSIQEMFRRVSEQFTAMFRRKAFLHWYTGEGMDEMEFTEAESNMNDLVSEYQQYQDATADDDEEAEYEDEEEPADGM

SEQ ID NO: 325830 - protein, 448 aa, Zea mays
  Clone ID: MRT4577_60226C.1.pep
MREILHIQGGQCGNQIGAKFWEVVCDEHGIDTTGRYTGTSDLQLERVNVYYNEASCGRFVPRAVLMDLEPGTMDSVRTGPYGQIFRPDNFVFGQSGAGNNWAKGHYTEGAELIDSVLDVVRKEAENCDCLQGFQVCHSLGGGTGSGMGTLLISKIREEYPDRMMLTFSVFPSPKVSDTVVEPYNATLSVHQLVENADECMVLDNEALYDICFRTLKLTTPSFGDLNHLISATMSGVTCCLRFPGQLNSDLRKLAVNLIPFPRLHFFMVGFAPLTSRGSQQYRALTVPELTQQMWDAKNMMCAADPRHGRYLTASAMFRGKMSTKEVDEQMINVQNKNSSYFVEWIPNNVKSSVCDIPPRGLSMASTFVGNSTSIQEMFRRVSEQFTAMFRRKAFLHWYTGEGMDEMEFTEAESNMNDLVSEYQQYQDATADDDEEAEYEDEEEPADGM

SEQ ID NO: 325831 - protein, 448 aa, Zea mays; identical to SEQ ID NO: 325830
  Clone ID: MRT4577_60227C.1.pep

SEQ ID NO: 325832 - protein, 496 aa, Zea mays
  Clone ID: MRT4577_60228C.1.pep
MLAAVTAAYGYFNPALLPTPHSPPASSRLPDLARSAPVASQFGSSHTSAKMREILHIQGGQCGNQIGAKFWEVVCDEHGIDPTGRYTGNSDLQLERVNVYYNEASCGRFVPRAVLMDLEPGTMDSVRTGPYGQIFRPDNFVFGQSGAGNNWAKGHYTEGAELIDSVLDVVRKEAENCDCLQGFQVCHSLGGGTGSGMGTLLISKIREEYPDRMMLTFSVFPSPKVSDTVVEPYNATLSVHQLVENADECMVLDNEALYDICFRTLKLTTPSFGDLNHLISATMSGVTCCLRFPGQLNSDLRKLAVNLIPFPRLHFFMVGFAPLTSRGSQQYRALTVPELTQQMWDAKNMMCAADPRHGRYLTASAMFRGKMSTKEVDEQMINVQNKNSSYFVEWIPNNVKSSVCDIPPRGLSMASTFIGNSTSIQEMFRRVSEQFTAMFRRKAFLHWYTGEGMDEMEFTEAESNMNDLVSEYQQYQDATADEEEYEDEEEVQADDM

SEQ ID NO: 325833 - protein, 67 aa, Zea mays
  Clone ID: MRT4577_60229C.1.pep
MDPPRAVAVLLILLPVLAPVASGVPFVVLHGIGDECGNDGLSSFTKMLGEWSGSKGYCIRKNQKRRM

SEQ ID NO: 325834 - protein, 107 aa, Zea mays
  unsure (1)..(107): unsure at all Xaa locations
  Clone ID: MRT4577_6022C.1.pep
IFWPGWWGRFPRGGGAAPVVGKXGSQMGAPSSGEAKGNRVAIAGGADEGVGDKGMTLEDFVKLREGKRKALFALGVVERNVDVDRVLKPLHPFXSRKENEEVLLRRG

SEQ ID NO: 325835 - protein, 449 aa, Zea mays
  unsure (1)..(449): unsure at all Xaa locations
  Clone ID: MRT4577_60230C.1.pep
MREILHIQGGQCGNQIGAKFWEVVCDEHGIDPTGRYTGNSDLQLERVNVYYNEASCGRFVPRAVLMDLEPGTMDSVRTGPYGQIFRPDNFVFGQSGAGNNWAKGHYTEGAELIDSVLDVVRKEAENCDCLQGFQVCHSLGGGTGSGMGTLLISKIREEYPDRMMLTFSVFPSPKVSDTVVEPYNATLSVHQLVENADECMVLDNEALYDICFRTLKLTTPSFGDLNHLISATMSGVTCCLRXFPGQLNSDLRKLAVNLIPFPRLHFFMVGFAPLTSRGSQQYRALTVPELTQQMWDAKNMMCAADPRHGRYLTASAMFRGKMSTKEVDEQMINVQNKNSSYFVEWIPNNVKSSVCDIPPRGLSMASTFIGNSTSIQEMFRRVSEQFTAMFRRKAFLHWYTGEGMDEMEFTEAESNMNDLVSEYQQYQDATADDDEEAEYEDEEEPADGM

SEQ ID NO: 325836 - protein, 44 aa, Zea mays
  Clone ID: MRT4577_60231C.1.pep
KVQFFNTFDYTMETLKAVFTEVFAEHAYLAVLALTGLCYAWMMW

SEQ ID NO: 325837 - protein, 78 aa, Zea mays
  Clone ID: MRT4577_60232C.1.pep
LVHFLFSWFLGLSDTVTPSLALPLLKSNCWVEKCISTSSLPLLWYSWQPNLIMLNQKALSLYVMCSLHYANNVSLLEG

SEQ ID NO: 325838 - protein, 93 aa, Zea mays
  Clone ID: MRT4577_60233C.1.pep
MSSRRSSSSSSHGNISEDEMNELVSKLQALLPSSRRRRGSGQASTAKLLKETCSYIKSLQREVDDLSDRLSDLLSTMDHNSPAAEIIRSILRS

SEQ ID NO: 325839 - protein, 46 aa, Zea mays
  Clone ID: MRT4577_60234C.1.pep
IRQTGNCSTALTDRVPELFIEAACVEHSRPYIIIGTASDGVHGCYR

SEQ ID NO: 325840 - protein, 78 aa, Zea mays
  Clone ID: MRT4577_60235C.1.pep
MHACSPFSSFKRLKCARRGGDMTCIMQASTAKLLKETCSYIKSLQREVDDLSDRLSDLLSTMDHNSPAAEIIRSILRS

SEQ ID NO: 325841 - protein, 377 aa, Zea mays
  Clone ID: MRT4577_60236C.1.pep
MAPVSNETFLPTAAWGEATLRPSFVRDEDERPKVAHDRFSDAVPVISLDGIDGARRAEIRDRVAAACEGWGIFQVVDHGVDADLIADMTRLSREFFALPAEDKLRYDMSGGKKGGFIVSSHLQGEAVQDWREIVTYFSYPVKARDYGRWPEKPAGWRAVVERYSERLMGLSCKLLGVLSEAMGLESEALAKACVDMDQKVVVNFYPRCPQPDLTLGLKRHTDPGTITLLLQDLVGGLQATRDGGKTWITVQPISGAFVVNLGDHGHFMSNGRFKNADHQAVVNGESSRLSIATFQNPAPDARVWPLAVREGEEPILEEPITFAEMYRRKMERDLDLAKRKKQAKDQLMQQQLQLQQQQAVAAAPMPAATKSLNEILA

SEQ ID NO: 325842 - protein, 63 aa, Zea mays
  unsure (1)..(63): unsure at all Xaa locations
  Clone ID: MRT4577_60237C.1.pep
FCIQNSLDSQSKLVSIPLNTYQVVLGVCVPTLKNDELWYSNPXGLYVHXNNLITGRVNIVYCK

SEQ ID NO: 325843 - protein, 148 aa, Zea mays
  Clone ID: MRT4577_60238C.1.pep
MIGFRTDDTTEAVAMKTLTTFCGYHPLEMVMHPLGLFPAEKKDDPMWCNRVSHVKDVLAMYPNLVGRITVQCMSVMYRLQAQQSNAMAHLANLAQTTKLTLDSREDFMVDLSSELAEKDLQVERLSQCITTLEQQVEIRYNTIDVLEN

SEQ ID NO: 325844 - protein, 49 aa, Zea mays
  Clone ID: MRT4577_60239C.1.pep
GAASRAKTQEASRPNQGPTESSCAGSSLPSNQCGGAAALNDGKGGRGEK

SEQ ID NO: 325845 - protein, 60 aa, Zea mays
  unsure (1)..(60): unsure at all Xaa locations
  Clone ID: MRT4577_6023C.1.pep
SXSXXLXLXRAXXXAXXXAXLAXSXWXCGACXRALDGRRSCLXRXGXGGAVGXREVCGAG

SEQ ID NO: 325846 - protein, 36 aa, Zea mays
  Clone ID: MRT4577_60240C.1.pep
NYSLTLYFFCNCNPFFTFLDWYKSKPGLVSLSVPIS

SEQ ID NO: 325847 - protein, 190 aa, Zea mays
  Clone ID: MRT4577_60241C.1.pep
SRPAGFLFLSVTRFSWRALSSLQSPSRVSAGPAVTKLTRNLSRFEAAHVRLQVSPRKGSYCRNKLASFVMEGAQGSSNVTKHNKRQSPVQRWRPVSTEAVPQHQQDDIIETSNSGSKKIIEDCIASSENLPPDGTTNVVEVTTNDASSSKNNLSFGYNSTKVIIEDNAELSGFNKDLAGSNVFRTYSSSG

SEQ ID NO: 325848 - protein, 67 aa, Zea mays
  Clone ID: MRT4577_60242C.1.pep
QLFPFSQLVGVSPATFLTQPQLLPFYQQVAPNAGPLLQLQQLLPFNQLVLTNPAVFYQQPIMGGPPF

SEQ ID NO: 325849 - protein, 425 aa, Zea mays
  Clone ID: MRT4577_60243C.1.pep
MFACRSLLARASRLTRPAIPSAAGSPLRYLHQGSYCRNKLASFVMEGAQGSSIVTKHNKRQSPVQRWRPVSTEAVPQHQQDDIIETSNSGSKKIIEDCIASSENLPPDGTTNVVEVTANDASSSKNNLSFGYSSTKVVIEDHAELSGFNKDLAGSNVFGTHSSSVEAVQSRQLDYSHFISLPLALHPDLVNKLNYFQSSILGEENSNKDGSQSEGSIDEMDYDHKQAEAKMGAKGSQSDFGIDKSIFIKPETFHLTVLMLKLWNKERIDKASDVLQSVSTQVNEALENRPISIQLRGLTCMKGFPAKARVVYVPVLEVGSEGRLAHACKVITDAFIKAGLVFERDVRELKLHATVMNVRHRKSRNKRNTWTDSFDARGIFGRFGKAEWGAYPIHEIHLSQRFKFDRSGYYYCCSSIPLPAEMHTE

SEQ ID NO: 325850 - protein, 122 aa, Zea mays
  Clone ID: MRT4577_60244C.1.pep
MAPFTPRGGARGGRGGARGGGRGGFGGDRGGFGGGRGGARGGRGGGRGGFGDRGGRGGRGGRGGAPRGGRGGAAGAKGGAKVIVEPHRHPGVFVVRGGKEDGLATRNTTPGESVYGEKRISV

SEQ ID NO: 325851 - protein, 220 aa, Zea mays
  Clone ID: MRT4577_60245C.1.pep
RILSSSSYSPHKGRSLNHLRLGSHQSNSSLSLFVSGRASRLTRPAIPSAAGSPLRYLHQGSYCRNKLASFVMEGAQGSSIVTKHNKRQSPVERWRPVSTEAVPQHHQDDIIETSNSGSKKIIEDCIASSENLPPDGTTNIVEVATNDASSSKNNLSFGYNSTKVVIEDHAELSGFNKDLAGSNVFGTYSSSVEAVQSRQLDYSHFISLPLALHPDLVNKL

SEQ ID NO: 325852 - protein, 65 aa, Zea mays
  Clone ID: MRT4577_60246C.1.pep
FKLGYPKCNLLPIWKAKIEPKCRFLGWTLLHNKILTAENLQKKGWSNDPICRLCKQEPKAVTPLF

SEQ ID NO: 325853 - protein, 73 aa, Zea mays
  Clone ID: MRT4577_60247C.1.pep
GSHDGYIHDCRGCHLGATTHIVHASSRMHEESPIHEVVKPLLMSVKPITEPMPSKNRFSTASIVSSAHDTSPR

SEQ ID NO: 325854 - protein, 205 aa, Zea mays
  Clone ID: MRT4577_60248C.1.pep
MDYDHKHAPTKMGAKGSQSNFGIDKSIFIKPETFHLTVLMLKLWNKDRIDKASDVLQSVSTQVNEALENRPISIQLRGSTCTKGFPAKARVVYVPVLEVGSEGRLARACIITDAFIKAGLVFERDVKELKLHATVMNVRHRKSRNKRNTWTNSFDARGIFGRFGKAEWGAYPIHEIPLFQRFKFDKSGYYYCCSSIPLPAEMHTE

SEQ ID NO: 325855 - protein, 86 aa, Zea mays
  Clone ID: MRT4577_60249C.1.pep
PLFANNNKYNNGVLIYQHTPNNLCSYLLINTHPFRAWGLIYFESSMHISIDGRIISFTPKNKNIPARSPTPAGTFDPSNPPFNGPP

SEQ ID NO: 325856 - protein, 53 aa, Zea mays
  Clone ID: MRT4577_6024C.1.pep
SPSIPVAGPRQFENKTAALSRAFDHVKSGFVLPEQCVMEIGSVRYLILLPPFR

SEQ ID NO: 325857 - protein, 91 aa, Zea mays
  unsure (1)..(91): unsure at all Xaa locations
  Clone ID: MRT4577_60250C.1.pep
RNLSFLTLFRHVYGVLIVGLDFTRIASYALKAFAXYKYRWASILSHKIATLSVYMVMFYTFRPTYNSHYFSLDDNEQEAPEMFLLQEEFEL

SEQ ID NO: 325858 - protein, 55 aa, Zea mays
  unsure (1)..(55): unsure at all Xaa locations
  Clone ID: MRT4577_60251C.1.pep
KXKETKAXXRPDNSFVFIXQPVLAXILNNKLKHXXILPTXXIFKKPXXPXPXKXN

SEQ ID NO: 325859 - protein, 142 aa, Zea mays
  unsure (1)..(142): unsure at all Xaa locations
  Clone ID: MRT4577_60252C.1.pep
PPCPRVPALAWWGLSXXLRRVLPLGGSXXSLVPRLCVPXXLPLVLGSXAWAASPRPGFCSCCWPXGLSLGLCGGPPXCGPCWPAXXXXPLGGAPSWGLPLSPGLAAGXXXPAGVPPAFAPLGXRAFSLGPVXFXGPLPPXPF

SEQ ID NO: 325860 - protein, 88 aa, Zea mays
  Clone ID: MRT4577_60253C.1.pep
KVLYVGHCSSIYRGNEPPLYEFTIMSIKFLNKLFTNDMRTIKYFLRLRLCGSQPILFGNLPSSSCLKLLPSGAIFATCVHMKHLCILL

SEQ ID NO: 325861 - protein, 275 aa, Zea mays
  Clone ID: MRT4577_60254C.1.pep
SAGALGNLSHLLSETAQSSMLMPVYDKNRAETPNLARPKVPPKELFLEQLTAGHESPSTCRSSGQTLYFPFQQPLGYNSESGSGDGANMNSLWFNQSDFNCSTISTVMPPASPSALSTSMGLNLPPDNSRHGGTGIGSTAVDSFYWDGTNPSSSSSTGSRGSNSMGFEPQSTSSILENSVFQWTDIGQEKDTRAHLVEELKWPDLLHGTFAETTTAMQNQSQTLYDDVIKAESQFSMEGICASWFQNQQPQQQLQATPDMYDKDLQRMQLSFENI

SEQ ID NO: 325862 - protein, 137 aa, Zea mays
  unsure (1)..(137): unsure at all Xaa locations
  Clone ID: MRT4577_60255C.1.pep
MGRHSCCYKQKLRKGLWSPEEDEKLMNHITKHGHGCWSSIPKLAXNYLNSRRQIVAGLQRCGKSCRLRWINYLRPDLKRGAFSQDEEDLIIELHAVLGNRWSQIAAQLPGRTDNEIKNLWNSCIKKKFRQKGIDPHT

SEQ ID NO: 325863 - protein, 172 aa, Zea mays
  unsure (1)..(172): unsure at all Xaa locations
  Clone ID: MRT4577_60256C.1.pep
MGRHSCCYKQKLRKGLWSPEEDEKLMNHITKHGHGCWSSIPKLAGLQRCGKSCRLRWINYLRPDLKRGAFSQDEEDLIIELHAVLGNRWSQXAAQLPGRTDNEIKNLWNSCIKKKLRQKGIDPNTHKPLTEADRSGAAPTISIERTSGSSEVNPSSAGALGNLSPLLSETAQ

SEQ ID NO: 325864 - protein, 426 aa, Zea mays
  Clone ID: MRT4577_60257C.1.pep
MGRHSCCYKQKLRKGLWSPEEDEKLMNHITKHGHGCWSSVPKLAGLQRCGKSCRLRWINYLRPDLKRGAFAQDEEDLIIELHAVLGNRWSQIAAQLPGRTDNEIKNLWNSCIKKKLRQKGIDPNTHKPLTEADRSGAAPTISTERTSGSSDINPSSAGALGNLSHLLSETAQSSMLMPVYDKNRAETPNLARPKLPPKELFLEQLTAGHESPSTCHSSGQTLYFPFQQPLGYNSESGSSDGANMNSLWFNQSDFNCSTISTVMPPVSPSALSTSMGLNLPPDNPRHGGTGIGSTAVDSFYWDGTNPSSSSSTGSRGSNSMGFEPQSTSTILENSVFPWTDIGQEKDTRAHLVAELKWPDSFAETTTAMQNQSQTLYDDVIKAESQFNIEGICASWFQNQQPQQQLQVAPDMYDKDLQRMQLSFENI

SEQ ID NO: 325865 - protein, 81 aa, Zea mays
  unsure (1)..(81): unsure at all Xaa locations
  Clone ID: MRT4577_60258C.1.pep
EQYIYIGXVQITCGTAKKISLSFSCHYHNWRDQHSRSGAPPRVHPGFRLHRQDSYSTIAVPSTVKSLNPTGRPTFTNLVKL

SEQ ID NO: 325866 - protein, 142 aa, Zea mays
  Clone ID: MRT4577_60259C.1.pep
LKFIIFLFNSSSLPFFSFPFAKLIISNNIRCTDVWNFADYFPQAVINILCSYELLPGIQRQVLLPHQVTPAPSAPPIHGSYCASMASTYLCLRPLLHQPLVSNLHPPINAVRLSPTVLLISPDLPGPNVGGTVSPERLQRSP

SEQ ID NO: 325867 - protein, 55 aa, Zea mays
  Clone ID: MRT4577_6025C.1.pep
MKNEYGPFFRMKGNHYNIYIILPMFQVIVRFTFVLSLKKTRPSVGDSHMSGATAT

SEQ ID NO: 325868 - protein, 75 aa, Zea mays
  unsure (1)..(75): unsure at all Xaa locations
  Clone ID: MRT4577_60260C.1.pep
NHLVXXHDASPSGTSRRCCSATXXGTRYRTSSRPSRATPTAPXNXGSLLCLLRCVRFLSCCCVRTRGSTREFRTG

SEQ ID NO: 325869 - protein, 36 aa, Zea mays
  Clone ID: MRT4577_60261C.1.pep
MRGVIAPPSIFNGCGSPNGAVIQLPRSNWRSLYLVS

SEQ ID NO: 325870 - protein, 102 aa, Zea mays
  Clone ID: MRT4577_60262C.1.pep
MAEKGALQSAREWVVDHKLRAVGTLWLSGIVGSIAYNWSRPGMKTSVKIIHARLHAQALTLAALAGSALVEYYDHQQGSGSKVHQYAKQFLSSDSNSGQQKE

SEQ ID NO: 325871 - protein, 115 aa, Zea mays
  Clone ID: MRT4577_60263C.1.pep
RPGFPPDTETPGLEEEHKRRPELTNIIAGLSGGMKADDVAKKALDGIKSAKFIVPCNFEGTILAVATAGLSPQSSALMAFIEVIGTGLMRFAALCFQWNWFSTIESYYAKNKKSE

SEQ ID NO: 325872 - protein, 56 aa, Zea mays
  Clone ID: MRT4577_60264C.1.pep
TFSRTTEPSTIENAVTANASKVYSLGAIPSTWNVSCTARDSLSHHLDGDRKAYSRT

SEQ ID NO: 325873 - protein, 208 aa, Zea mays
  unsure (1)..(208): unsure at all Xaa locations
  Clone ID: MRT4577_60265C.1.pep
MLLPERTRDELIKNAAYVDTPGKDILAADESTGTIGNRLSSINVENVEENRXALRELLFCCPAXLTIHLRGVILFEDTLYHNIQDDEPFDDVHLGGMRPPCYLXHQGPIVDDETDNDTTSHGHDHVAQRCPKDYQARARFAKRGPDLKIVPIEXTALPCDLNAQXLAPYGIIWHENALVPXVVXEPDILVDGPHDIDRCADFSDTVLA

SEQ ID NO: 325874 - protein, 76 aa, Zea mays
  Clone ID: MRT4577_60266C.1.pep
RAGAFCLRVSLLGRECDLSWPGTMTWSAYLAPKVPPESLISYALLELSVLASVAGRAPSPLRHPLLVPARPRKNRN

SEQ ID NO: 325875 - protein, 536 aa, Zea mays
  unsure (1)..(536): unsure at all Xaa locations
  Clone ID: MRT4577_60267C.1.pep
CFSKSAGVRAAGQCRPVHRRWEEPEPEPASQTHNLGRRGGSTQWLLPPSARRATTRLPSSSSPSPSSSSCAPPMGCRRREXGGGGGLYREILRDETVQRLKELGKISDGDGYLERTFLSPASIRATGVIVSWMKDAGLTTWVDQMGNIHGRYEPANSTRDALLIGSHMDTVVDAGMYDGALGIISAISALKVLKVTGKLQRLTRPVEVIAFSDEEGIRFQTTFLGSAAVAGTLPESILQVSDKSGTTLQDVLKMNSFEATSTAISQARYNPESVGSYVEVHMEQGPVLEALHYPLGVVKGIAGQTRLKVIVDGSQGHAGTVPMKLRRDPMVAAAELVVTLERLCKEPNSLLTYDEECSCFTEESLAGLVCTVGELNTWPSASNVIPGQVNFTVDIRAMDDQVRETIVTSFSRLVLQKCDDRLVDCKVEHKHSAAATHCDPELTSQLKRAARSTVSAMPGRTVAAGGDGDGQASAKIGMLFVRCRGGISHSPEESVMDNDVWAAGLALFNFIDQNAVSEELDAGQNVVAVALAVAES

SEQ ID NO: 325876 - protein, 519 aa, Zea mays
  unsure (1)..(519): unsure at all Xaa locations
  Clone ID: MRT4577_60268C.1.pep
RPGQPFAGGARARASQPHNLGRRGGSTQWLLPPSARRATTRLPSSSSPSPSSSSCAPPMGCRRREXGGGGGLYREILRDETVQRLKELGKISDGDGYLERTFLSPASIRATGVIVSWMKDAGLTTWVDQMGNIHGRYEPANSTRDALLIGSHMDTVVDAGMYDGALGIISAISALKVLKVTGKLQRLTRPVEVIAFSDEEGIRFQTTFLGSAAVAXGTTLQDVLKMNSFEATSTAISQARYNPESVGSYVEVHMEQGPVLEALHYPLGVVKGIAGQTRLKVIVDGSQGHAGTVPMKLRRDPMVAAAELVVTLERLCKEPNSLLTYDEECSCFTEESLAGLVCTVGELNTWPSASNVIPGQVNFTVDIRAMDDQVRETIVTSFSRLVLQKCDDRLVDCKVEHKHSAAATHCDPELTSQLKRAARSTVSAMPGRTVAAGETPVLMSGAGHDAMAMARLTKIGMLFVRCRGGISHSPEESVMDNDVWAAGLALFNFIDQNAVSEELDAGQNVVAVALAVAES

SEQ ID NO: 325877 - protein, 46 aa, Zea mays
  Clone ID: MRT4577_60269C.1.pep
YLRALPTPTCSASYDYPRVVAGQRSFKPRRHLQQHAQRRRKLIGRR

SEQ ID NO: 325878 - protein, 29 aa, Zea mays
  Clone ID: MRT4577_6026C.1.pep
KKSNRGTGHSNSPLVQVWFTFSRKSWIVT

SEQ ID NO: 325879 - protein, 383 aa, Zea mays
  unsure (1)..(383): unsure at all Xaa locations
  Clone ID: MRT4577_60270C.1.pep
TVPRDKSNISPSLLPDVFPSQQEYEQQGSAGRSDAWVSAISALKVLKVTGKLQRLTRPVEVIAFSDEEGIRFQTTFLGSAAVAGTLPESILQVXDKSGTTLQDVLKXNSFEATSTAISQARYNPESVGSYVEVHMEQGPVLEALHYPLGVVKGIAGQTRLKXAELVVTLERLCKEPNSLLTYDEECSCFTEESLAGLVCTVGELNTWPSASNVIPGQVNFTVDIRAMDDQVRETIVTSFSRLVLQKCDDRLVDCKVEHKHSAAATHCDPELTSQLKRAARSTVSAMPGGTVAAGKTPVFINGAGPHPMAMARLPKIGILFVGCPGGINPSPEESVMDDHVWAPGLALFNFIDQNAVSKKLDSGQNVVAKSLWSVAILSVGVGL

SEQ ID NO: 325880 - protein, 339 aa, Zea mays
  unsure (1)..(339): unsure at all Xaa locations
  Clone ID: MRT4577_60271C.1.pep
RPGTLSVGEGRSQSQPASHRPRRPHNLGRRGGSTQWLLPPPAARCATTRLPSSSSPSPSSSSRSXSRTADGLPEAGGGGGDGLYREILRDETVQRLKELGKISDGDGYLERTFLSPASIRATGVIVSWMKDAGLTTWVDQMGNIHGRYEPANSTRDALLIGSHMDTVVDAGMYDGALGIISAISALEVLKVTGKLQRLTRPVEVIAFSDEEGIRFQTTFLGSAAVAXFVVLSFISGTTLQDVLKMNSFEATSTAISQARYNPESVGSYVEVHMEQGPVLEALHYPLGVVKGIAGQTRLKVIVDGSQGHAGTVPMKLRRDPMVAAAELVVTLERLCKEPN

SEQ ID NO: 325881 - protein, 182 aa, Zea mays
  unsure (1)..(182): unsure at all Xaa locations
  Clone ID: MRT4577_60272C.1.pep
RLFRRLAWHRAXRQILQLNEPIEVKIYEWNTGGLLTRIEVGCSIRVCIARLDEETNDLIISEKKAWEMTYLKEGTLLQGTVCKIFPYGARVRIAGTNRSGLLHISNISRGNVVSVSDILKIDDEVKVIVIKSNVPDKIALSIADLESAPGLFLSDREKVFSEAXEMAKRYREQLPVTPQNPI

SEQ ID NO: 325882 - protein, 425 aa, Zea mays
  unsure (1)..(425): unsure at all Xaa locations
  Clone ID: MRT4577_60273C.1.pep
MPTPAPALPFVPKPQPILHVAKALVPSPRQTQPQARGRGLPQPVNCANSKRLDDALSAGFVRLLNAGQVQDADSASGTCRRYDPKPGDFAVGVVVSGTEARLDVAVGADRLATLLSKELLPLDRDSSDPPTRQALPRLGSIGVVAGPSVDDDRQKRGSRTLVAPGTVVFAEVLGRTLSGRPLLSARRLFRRLAWHRAXRQILQLNEPIEVKIYEWNTGGLLTRIEGLRAFLPKFELVDRISSFTDLKNKVGCSIRVCIARLDEETNDLIISEKKAWEMTYLKEGTLLQGTVCKIFPYGARVRIAGTNRSGLLHISNISRGNVLSVSDILKIDDEVKVIVIKSNVPDKIAVSIADLESAPGLFLSDREXTKVFSEAEEMAKRYREQLPVTPQNPILDDGLPGEKLPFDNETKLYANWQWFKFLHHS

SEQ ID NO: 325883 - protein, 59 aa, Zea mays
  Clone ID: MRT4577_60274C.1.pep
KKKKKKKKKKNIGGPVFGGPKLTFPGLRRFKFFLVGLYLNFIGRRFFSAFFLIPWGYPI

SEQ ID NO: 325884 - protein, 89 aa, Zea mays
  unsure (1)..(89): unsure at all Xaa locations
  Clone ID: MRT4577_60275C.1.pep
GTSSRPGTLQPPLFLHLPRSAGAQARXXSEXTLGTILSTGTLSPRIGYLEYINVLTLPGNNISRWHTKTIWQPLSIDKIRFGRQPDCLG

SEQ ID NO: 325885 - protein, 130 aa, Zea mays
  Clone ID: MRT4577_60276C.1.pep
RLHDDSASAMRLEQRLWVVEDDDAKELWVEHDWRENDDDVTSRQELNDDESTGDAVMKSRDTTRRLGHNRIDDRCRGPSCFYVREQDTHRLRASSWGRTTEKLARAQLGNEQGQAGRGARKQESPAAQGT

SEQ ID NO: 325886 - protein, 173 aa, Zea mays
  unsure (1)..(173): unsure at all Xaa locations
  Clone ID: MRT4577_60277C.1.pep
TPNKKAFFCDPGQGGPXSKTPPPGPPTRGGPRLAPLKKCGPLRPPPSLRGTAAPPXERKKPPNQQTPPPGRGPIRESGGAPSIPPCTRGGGGHPLMEGGAPLSPPQTGPQTPPRECRVEHCNGHPLPQXGTPRPGMLRGGXRPPQKGQKTAVNRPPPLVHSNPPVNGSIVWSA

SEQ ID NO: 325887 - protein, 190 aa, Zea mays
  Clone ID: MRT4577_60278C.1.pep
MFLDGEFLTSPATPTVARLHHVQLPGKPPAITCPSVRSPCFLAPAASLSLLVSKLCSSKLLCSSSPTARSQPVSVLLPHVKAARPSAPVVDSVMSQPPVSARPCLGPVLRTSTLFYSRLSSTLSSTCCFSVVSLDFITASPVLSSSLSSWRDVTSSSFSRQSCSTHSSFASSSSTTHNLCSNLIALAESS

SEQ ID NO: 325888 - protein, 176 aa, Zea mays
  unsure (1)..(176): unsure at all Xaa locations
  Clone ID: MRT4577_60279C.1.pep
MSGGAPLLALLLLAEAAMIAPSPGNAVVSHDHRGVAINGQRRILISPPIHYPRRTPHMRPGLLHEGQXDAMLDVVQTHAVWNRHQPARGQYYFGDRXQLLRFVKLAKQAGLYDHLRIDPYVCAQGNFRXFPVXLKQRPGISFRTDNGPFKAVMQALVGQIVAMMKSDGLFECQGRP

SEQ ID NO: 325889 - protein, 69 aa, Zea mays
  Clone ID: MRT4577_6027C.1.pep
SAKEECVEVRLVASTTSPDFLMSVVDESRHSRGVEMASGGYRGSSRSSNVGFFLASAGVIAFGEFVGTL

SEQ ID NO: 325890 - protein, 88 aa, Zea mays
  unsure (1)..(88): unsure at all Xaa locations
  Clone ID: MRT4577_60280C.1.pep
FCLLXSPMQADQTLSFFSLLVPHASRSIVFQILLYGNTLCFACRGSQKFEFCICQSGFCRVEVHAQPVAYLRFRTLLCLLALHICKSS

SEQ ID NO: 325891 - protein, 53 aa, Zea mays
  Clone ID: MRT4577_60281C.1.pep
SHPHVYVFSAHCTYRWHPLSRAPHAATLTTCFDKHTTVLPPPHHWWCPLLDIV

SEQ ID NO: 325892 - protein, 107 aa, Zea mays
  Clone ID: MRT4577_60282C.1.pep
MVQIGSPGRRTLRIPQFFQRFVIMVVMKSCGHLDLIRVLNTSIGPQHVCVAYSFALLYRPPPWFKARVLVLYVFFPGATLAINLVCRALMNQGSCTQAWTVPPLDAT

SEQ ID NO: 325893 - protein, 47 aa, Zea mays
  Clone ID: MRT4577_60283C.1.pep
RTPTIFLFMTQTLQMRFYPYTHNSYYGARPHPIRDRSSSPPMHTQMR

SEQ ID NO: 325894 - protein, 250 aa, Zea mays
  Clone ID: MRT4577_60284C.1.pep
MAGAAAAAAAVASGISIRTVAAPKISRAPRSRSVVRAAVSLGEKAYTVQKSEEIFNAAKELMPGGVNSPVRAFKSVGGQPIVFDSVKGSHMWDVDGNEYIDYVGSWGPAIIGHADDEVNAALIETLKKGTSFGAPCALENVLAQMVISAVPSIEMVRFVNSGTEACMGALRLVRAFTGREKILKFEGCYHGHADSFLVKAGSGVATLGLPDSPGVPKGATVGTLTAPYNDAEAVKKLFEDTKGEIAAVFP

SEQ ID NO: 325895 - protein, 207 aa, Zea mays
  unsure (1)..(207): unsure at all Xaa locations
  Clone ID: MRT4577_60285C.1.pep
MSFLDPLASLGLGYAIAIAFGFLVLLASVLLASYFCLRRGAASQGFGAGAGVGVXGSARHAASSASSSGHISITVPRVVFVAEDYDSPGSSSRGPAAAASPVGLDASVIASYPMVPFSKAGAGADTEVACSICLCEYKEGEMLRVMPECRHRFHLTCLDAWLRRSASCPVCRSSPIPTPVATPLSTPLSELVPLSQYAADRRRSRFG

SEQ ID NO: 325896 - protein, 78 aa, Zea mays
  unsure (1)..(78): unsure at all Xaa locations
  Clone ID: MRT4577_60286C.1.pep
MPAKEDELQKTNERQQKADKGSARVMQLKRHLEEAEEESQRINANPRKLQLELYDATEKAEAXLGEELDALKTDLGDT

SEQ ID NO: 325897 - protein, 79 aa, Zea mays
  unsure (1)..(79): unsure at all Xaa locations
  Clone ID: MRT4577_60287C.1.pep
RNIRFELLARVCPHFSGTDIRSVCPKTGMFXLRAPRKTVPKKDFLDAVPKVIKGPPKFSATXKYMGGNQAGGLHGICCF

SEQ ID NO: 325898 - protein, 40 aa, Zea mays
  Clone ID: MRT4577_60288C.1.pep
RNPYSCNMLWAFVRRQVPSCLCWIAAAALNFNFNGPPNGP

SEQ ID NO: 325899 - protein, 75 aa, Zea mays
  Clone ID: MRT4577_60289C.1.pep
RLAATSSFLPNGDPDGGIRARVCMILFCLFWRALSCPGVIAVVPRGIPFHGEGSVARGIPFHGEGILSCFISSPF

SEQ ID NO: 325900 - protein, 131 aa, Zea mays
  Clone ID: MRT4577_6028C.1.pep
MASKAFALFLAVNLVVLGVASACSPYCPTPTPTPSTPTTPTPTPSSFGRCPRDALKLGVCANVLGLIKAKVGVPPAEPCCPLLEGLVDLEAAVCLCTAIKGQILGINLNLPIDLSLILNYCGRTVPTGFKC

SEQ ID NO: 325901 - protein, 101 aa, Zea mays
  Clone ID: MRT4577_60290C.1.pep
ASQITAGSSGAACESLLVESSTSVATSLVWSVKSPVAPKSVLVSLHLSSLLWPGLSSRGSSLLKEVRLDHSSSRESIVAVGLCMSVFIRWVSFGAAKHPWG

SEQ ID NO: 325902 - protein, 238 aa, Zea mays
  unsure (1)..(238): unsure at all Xaa locations
  Clone ID: MRT4577_60291C.1.pep
KIWLKKQNTPTDRPAVRGSLTTNIVLAVAVVAALVGGGSCGPPKVPPGPNITTNYNAPWLPARATWYGQPYGSGSTDNGGACGIKNVNLPPYNGMISCGNVPIFKDGRGCGSCYEVKCEQPAACSKQPVTVFITDMNYEPISAYHFDFSGKAFGAMACPGKETELRKAGIIDMQFRRVRCKYPGGQKVTFHVEKGSNPNYLAVLVKFVADDGXDVIQMDLQEAGLPAWRPMKLXSWGA

SEQ ID NO: 325903 - protein, 357 aa, Zea mays
  Clone ID: MRT4577_60292C.1.pep
MVTENADEEHDTGPENKLRHNFRLGDITWVKYNGSSWWPSQVIDESCVGSKPKKKDKYDCLVRLYGTCQYLYVDPWKSNSEFEMMLKQENKSAMEAFREVLEKELSGVNLRSDYEDGYEEEDVNSKGGDNKGTSKKTSSRKARKQEGLKQQYNGEEDQNGGSNATTGGARKKKGGHVRQSSATHDAIDKNYSGSSAEGLRNKRQKSAAQSASVGRREGLRQRSDAKQHPDAAEGSTEPLADVPGSDGAAQGSMQHGTSAPHTEIKAMVRNILFKDIVDKEHDAEMAYVDEVINGICNATDSMVGGGGGDASAKGGRGSKQSGGGVEGESSNATERRRDEATENALAVKGNTPGEQWR

SEQ ID NO: 325904 - protein, 90 aa, Zea mays
  Clone ID: MRT4577_60293C.1.pep
PNLVSTSSLTTISHWAQHHHIAHKLLGPNRRPTPDQLMHTQHIHRKIGTLIHSPTSCKMLTTLINSRPVNRYDKSSLYCGKIRRRQMGPI

SEQ ID NO: 325905 - protein, 40 aa, Zea mays
  Clone ID: MRT4577_60294C.1.pep
LHSVFYLAHQQLPLSQLRADYPPELPSLNRTAALNSPAYL

SEQ ID NO: 325906 - protein, 90 aa, Zea mays
  Clone ID: MRT4577_60295C.1.pep
PLNPRGGGGGLPKGAGPVFFFPPWWGGKKPPALLVGPARLFPPWLSAFAISFYFFFPPLRPGSLIYLLCGATSRVPGKIICLFKKNEKKN

SEQ ID NO: 325907 - protein, 45 aa, Zea mays
  Clone ID: MRT4577_60296C.1.pep
AASASSSEFGRGVRFKRIRSVAGAAPWSVAMVSSPREEKAEASRP

SEQ ID NO: 325908 - protein, 112 aa, Zea mays
  unsure (1)..(112): unsure at all Xaa locations
  Clone ID: MRT4577_60297C.1.pep
YFSYIFLYTFLLLISFXNLYLYTRTFYFLQFLNIFLTINNFLFFYIILWCLFVSLVIFLNLLIYFIFHFFINYFYFYYCFIFIYFLFFFLLYLFLFYYISFIFFNFRFIFLS

SEQ ID NO: 325909 - protein, 82 aa, Zea mays
  Clone ID: MRT4577_60298C.1.pep
TPSPPPLHLASRSHIEVGLPPYPTPLGAWQEQRPHRGRATRPRVRPNQARLLGSAPDGGCQVLLPPPLRSIFDACYCCISLP

SEQ ID NO: 325910 - protein, 81 aa, Zea mays
  unsure (1)..(81): unsure at all Xaa locations
  Clone ID: MRT4577_60299C.1.pep
MAKAAAMLVLVALVVAAMATGGAAQCNAGSLAVCASPIISGAKPSTTCCNNLKSQXGCFCQYARNPAYSIYINSPNARKTL

SEQ ID NO: 325911 - protein, 95 aa, Zea mays
  Clone ID: MRT4577_6029C.1.pep
GFPQYHRSLRLLHANHLILNYRTAVREITLPSHAQHALRAPRQDIIECDSLFKSPQVSRLHGPGAPIPHIKLYLPFQVMQQIAQPFAQLPQHLHG

SEQ ID NO: 325912 - protein, 47 aa, Zea mays
  Clone ID: MRT4577_602C.1.pep
NCVVWKEEEWQWPQDQLLELPMQVLQALPLTVVGGRACLAHGSRMIR

SEQ ID NO: 325913 - protein, 93 aa, Zea mays
  Clone ID: MRT4577_60300C.1.pep
GVPYDARLDILCFICTQGVHLRGPRNLWKDLLRLALWSPVSLPVSPAGNISILFSVSEVWERRGFKGLTVEEESQFIPVCFMHLSLFEPPCYQ

SEQ ID NO: 325914 - protein, 110 aa, Zea mays
  Clone ID: MRT4577_60301C.1.pep
KGLETFYFAGFPPGGREIKVNQELFPKRCFSPRGFLSLKGDLGGDKGKAGPGISPQGLGLRFPGPEKPFWGGDPPGPPFLEREKGGPQEIPLGGGVNHWWGFFFFARGPF

SEQ ID NO: 325915 - protein, 73 aa, Zea mays
  Clone ID: MRT4577_60302C.1.pep
ASVYYRYVGSLTAPPCTEGVIWTIVKRVRSVSKHQLELLREAVHDDMENNARPLQEANDRDVSMFRPKPNKHY

SEQ ID NO: 325916 - protein, 68 aa, Zea mays
  Clone ID: MRT4577_60303C.1.pep
KKNGGPHFFLRGGGRQAPLKKKMLPSFPPKKRGGGHPTDQTTGGEDKNLQSTSYYKKIFLLKKPCWPP

SEQ ID NO: 325917 - protein, 74 aa, Zea mays
  Clone ID: MRT4577_60304C.1.pep
GGRQLTSVLAQAEVTTIVGVGIRMSDTYLVLEYRAVYPAIMNITTLRALYNTRVYKFTPPAAQYSAGRLPLATR

SEQ ID NO: 325918 - protein, 102 aa, Zea mays
  unsure (1)..(102): unsure at all Xaa locations
  Clone ID: MRT4577_60305C.1.pep
ILPKKGERQKLPDLKRNSSSTISSNRGQAVLLQKTGGFIGSFYGGCAPEHYSYSKNNLLXGWTRGSYIKKTGGLAAAGGCAYNISEIPIVRPPWGDSDSEPA

SEQ ID NO: 325919 - protein, 58 aa, Zea mays
  Clone ID: MRT4577_60306C.1.pep
TFKLLGEDRRSTYTLQHPSNMQIEEPAHEVHVFSGALERHLHLLELPLDLHLLLEGAE

SEQ ID NO: 325920 - protein, 43 aa, Zea mays
  Clone ID: MRT4577_60307C.1.pep
VVGPSSRHRPLWICYGPVKCQRCEIRPSQRLLEEILKSLIADS

SEQ ID NO: 325921 - protein, 243 aa, Zea mays
  unsure (1)..(243): unsure at all Xaa locations
  Clone ID: MRT4577_60308C.1.pep
MASEAKDVGILAMDIYFPPSCVLQEELETHDGVSKGKYTIGLGQENMAFCTEVEDVISMSLTVVKSLLKNYNIDPKCIGRLEVGSETVIDKSKSIKTWLMQIFEESGNTDIEGVDSSNACYGGTAALFNCVNWVESNSWDGRYGLVXVCTDSAVYAEGPARPTGGAAAIAMLIGPNAPISFESKYRGSHMAHVYDFYKPDLASEYPVVDGKLSQTCYLMALDSCYNVFCXKYEKHEGKQFSIL

SEQ ID NO: 325922 - protein, 127 aa, Zea mays
  Clone ID: MRT4577_60309C.1.pep
LGSSMPNNSTMFKPLPSSVVVALRNTDTSYSRTSTNRKCTMHPLYTGIPSSNSEGWLARFKEDSLLTKGITTCKNNAVGLGHAQNQQTRSHTNHNLLPKSHLMQSKKQGHLVPEAALLLCHRFAQLC

SEQ ID NO: 325923 - protein, 38 aa, Zea mays
  Clone ID: MRT4577_6030C.1.pep
VFAELVDVFVYKYDCCYITPQIDSQIRTQLCCQYLILR

SEQ ID NO: 325924 - protein, 269 aa, Zea mays
  unsure (1)..(269): unsure at all Xaa locations
  Clone ID: MRT4577_60310C.1.pep
MASEAKDVGILAMDIYFPPNCVLQEELETHDGVSKGKYTIGLGQESMAFCTEVEDVISMSLTVVKSLLKNYNIDPKCIGRLEVGSETVIDKSKSIKTWLMQIFEESGNTDIEGVDSSNACYGGTAALFNCVNWVESKSWDGRYGLVVCTDSAVYAEGPARPTGGAAAIAMLIGPNAPICFESKYRGSHMAHVYDFYKPDLASEYPVVDGKLSQTCYLMALDSCYNLFCKKYEKHEGKQFXSISDADYVVXHSPYNKLVQESFGRLYYND

SEQ ID NO: 325925 - protein, 160 aa, Zea mays
  Clone ID: MRT4577_60311C.1.pep
KFEFEFERRKLARDDVRELIYRETLEYHPQMLQEFLGGGVKANFVYPSGVDRFKRQFVHLEEIAAKGEKTSPQLRQHTSLPRERVNDSGDDLEKPSADYCIRLHVCDQLSSSRNFLKSESISASQCVVIKPKREKDEEPISEYASSPVDGVPPRIAQLKT

SEQ ID NO: 325926 - protein, 121 aa, Zea mays
  unsure (1)..(121): unsure at all Xaa locations
  Clone ID: MRT4577_60312C.1.pep
ARKTARGRKTGGVRSSTNGHRHYNLVPTTNAAGAGDAERASAKAQGTGXGPPTTRNWGQNWQPSAILDGQALYLRRTGSDRRTYTSWNAAPRDWRSGQTPKGKNLRDRLRAQAASGAARRN

SEQ ID NO: 325927 - protein, 148 aa, Zea mays
  unsure (1)..(148): unsure at all Xaa locations
  Clone ID: MRT4577_60313C.1.pep
NPPPTGETPRSPARNGPRCPPTQGTRPPKPXQQTPGRFATPANRARPGGCPPPTGTESGSPLFASFSSSPXQHGQPRRPLPPQEHPQKQPPPXGERGGTXPPPGGLRSEPKHARPXSPRPPAPPRRRPPKFRSPAEPPTRGRRPLFRI

SEQ ID NO: 325928 - protein, 81 aa, Zea mays
  Clone ID: MRT4577_60314C.1.pep
RMNFIYRACLNSFSCNRSTTFMNKLKYGMGKLHSECPNIYHSTQAPAPPNQVMFVYNSKGEYIQYFSCAGHFHKALLLLLL

SEQ ID NO: 325929 - protein, 498 aa, Zea mays
  Clone ID: MRT4577_60315C.1.pep
EESANTPKKISEKNEKTGNGYKANVAEFDLVMQTTKAQTHDSASCLKEQSCLPLGGHSVWTSLPPLNNGSTEHPKPLILAIASQDSASFFRDRSLGSDSPISGLIALLTAVDALSHIHGLSKLKKQLVFAVFNGEAWGYLGSRKFLQELDEGAASVNGISSLKIDQVLEIGSVGKAILEEYPSFYVHAEGNPSASKEILDALQSASKSLGSDNVKVKQAASSNPGVPPSSLMSFIRKNMSTSGVVLEDFDSHFSNRFYHSYLDNSVNINSSSIAAAAALVARSMYILASDDSVVDLITLNTIKVNVSLVEELIGCLLTCNPGLSCGLVKRFISPSNPCPSHYVGVFLDDPSGTQLPSYADDTSRFVWNFLADRTNSAGNKSSCTGKCGDEGEVCVGAEVEGGGRCVVSTTRYVPAYSTRVKFEDNAWHVLPANSSDPMGAADPVWTESFWNTIGLRVYAVQDPAYDWLILLAGLGITAASYCAVHFGRAYISKVAKLD

SEQ ID NO: 325930 - protein, 124 aa, Zea mays
  unsure (1)..(124): unsure at all Xaa locations
  Clone ID: MRT4577_60316C.1.pep
IAVFSYHQLRRIKATRTKERGRQEETQVDVEHPLXKRQREGKRSREKHPDRIAEIAEKGERSDVPDLGKKKDRGAADLTSGQSADEATKRIEVSAGKAIFIVVKNTLRPXTAALMSSICEGDED

SEQ ID NO: 325931 - protein, 46 aa, Zea mays
  unsure (1)..(46): unsure at all Xaa locations
  Clone ID: MRT4577_60317C.1.pep
SLTTFFLTGSGINPIRSLGAGXTFYKDKPCFNHFIFWVDPLVGADI

SEQ ID NO: 325932 - protein, 42 aa, Zea mays
  Clone ID: MRT4577_60318C.1.pep
RYYLLTDGSIRAYKIWAPIVRNVTLNTLVEHLCSQVGRERDE

SEQ ID NO: 325933 - protein, 100 aa, Zea mays
  Clone ID: MRT4577_60319C.1.pep
MAMSEPSSDTSCTSSCSSGPSTSTSPRAAPSAAAAAASGGGKKRPRSDDGGSSSSSAPAYRGVRMRAWGKWVSEIREPRKKSRIWLGTFPCPEMAARAHD

SEQ ID NO: 325934 - protein, 53 aa, Zea mays
  Clone ID: MRT4577_6031C.1.pep
PITFMCSDTNSMYSCFLIHTLATVHMCKLDVASWLDCTSYVGMPESYLVSTCS

SEQ ID NO: 325935 - protein, 80 aa, Zea mays
  unsure (1)..(80): unsure at all Xaa locations
  Clone ID: MRT4577_60320C.1.pep
MGGSLRFYSGGVWSGQCGTRMNHAITVVGYGAVSSSGVKYWLXRDSWGQTWGERGYLRMRKDVRQGGLCGIALDLAYPIV

SEQ ID NO: 325936 - protein, 45 aa, Zea mays
  Clone ID: MRT4577_60321C.1.pep
MILKKKKKKKKKKKKKKKKKKKKKKKKKKKKKKKKKKNKKKKKKK

SEQ ID NO: 325937 - protein, 141 aa, Zea mays
  unsure (1)..(141): unsure at all Xaa locations
  Clone ID: MRT4577_60322C.1.pep
MASHARKKSSDVDAAEEQPDAPWYKAPARTKPNADXSISLPENPSRSQGDXTNNGRXKAHKSVTENNIYIFKXHKLVHPDITITSTAMTIMNSSVNDITEKLAGEGRKFSRXSKKTTITNRQIHTSGRLVPPGYIHKHTVS

SEQ ID NO: 325938 - protein, 133 aa, Zea mays
  unsure (1)..(133): unsure at all Xaa locations
  Clone ID: MRT4577_60323C.1.pep
MAAPCGRGALRLVLIAVSAAFLTYNVLLSSRXPAPPHRLLPGRHHRLLLLVPPPRXGGTGGRRLFHTAVTASGSVYNTWQCRVMYHWFKQARRQAGGADMGGFTRILHSGKPDEFVHEIPTFVADPLPDGADQ

SEQ ID NO: 325939 - protein, 109 aa, Zea mays
  Clone ID: MRT4577_60324C.1.pep
MALSFKMPASLVAVVLLLLPTPIVRGSALDDMVPVQMPAKQLAVAISGAAATNNGGVAQLPAVPVLLQVEPWDMRDDHLLLQLQVRQRRQAQPRAGEMRLQRLRQLQLV

SEQ ID NO: 325940 - protein, 113 aa, Zea mays
  unsure (1)..(113): unsure at all Xaa locations
  Clone ID: MRT4577_60325C.1.pep
LAALKSASYLQXHHLPISQLSAAYPLLYFPFNQLSALKSLAYIQQQQLLPISQLGGVRPSTFMTQPQLFPFYQRAAPDACSLFHLRRKLPFKLLDLPNRSAFYXITIVGGALF

SEQ ID NO: 325941 - protein, 105 aa, Zea mays
  unsure (1)..(105): unsure at all Xaa locations
  Clone ID: MRT4577_60326C.1.pep
XSVAGIRTHEDVHTPCRHCCPRTPSPRVRTTHTRRRGSHWPEVHAHPLRDFSLPDELVAAARRGVHGVCRARVAARAQCRAGLHGDDSQIRPLSPSTPLLTPFPR

SEQ ID NO: 325942 - protein, 87 aa, Zea mays
  Clone ID: MRT4577_60327C.1.pep
GRPKRDGHANGRRHLPRSTAEWEAGGAGDRGSHAVLQLITAGGRGGDDDSLANSSELEIRRLRSLAGEHAKNLAIHKGDIRDTDGLK

SEQ ID NO: 325943 - protein, 72 aa, Zea mays
  unsure (1)..(72): unsure at all Xaa locations
  Clone ID: MRT4577_60328C.1.pep
FYHHKLLTGSLRRSEQTRQRSTQGKVVSLSQHCPSWRQAPLLPRCRHLVSVCKLLXGVNQLILEWLASASCX

SEQ ID NO: 325944 - protein, 89 aa, Zea mays
  unsure (1)..(89): unsure at all Xaa locations
  Clone ID: MRT4577_60329C.1.pep
RSRSRSYSPAHNRESNHPRVYQNRDFRGHNRGYRRPXYFRGRNRGFYPWGQYNRGGYGNYRSNWQNYRQAYSPRRGRSRSRSPKRRSPS

SEQ ID NO: 325945 - protein, 70 aa, Zea mays
  Clone ID: MRT4577_6032C.1.pep
SLGPTFPKKKKILRKKQHGQALFVKTTQVPSKHGFIFSKKKTFGRLLKSLYVWIQKNTHISIKPQPFYNL

SEQ ID NO: 325946 - protein, 115 aa, Zea mays
  Clone ID: MRT4577_60330C.1.pep
MGSARVAFVSLWEERNLVEVGSPAASPHQWSPKTVTTSSMVGRSKPGCGLRPALSFKDLHHPCWGGGRAESELYLPYGPAGHLLLQHSGERALTGLAEGAGFDNAGPIGRKRRQL

SEQ ID NO: 325947 - protein, 50 aa, Zea mays
  Clone ID: MRT4577_60331C.1.pep
AGILVYMALVNLLAEDFMNPRVQSRGKMQIGINASMLVGAGLMSMLAKWA

SEQ ID NO: 325948 - protein, 87 aa, Zea mays
  Clone ID: MRT4577_60332C.1.pep
REKRGGAARVHTRFQKWLFYGSVDVHIGGNLSTEGGAHQSVYDTLVKVVDIVDTFRLQCQPPFDRKLFVYYIKKYIKNLTAALYPEK

SEQ ID NO: 325949 - protein, 62 aa, Zea mays
  Clone ID: MRT4577_60333C.1.pep
GPLKNPSPKAVKKRMVKQAQGHRKPKSLPWEGPFTVKSPSQVKPSVQLEAQTKALAHDLEKR

SEQ ID NO: 325950 - protein, 110 aa, Zea mays
  Clone ID: MRT4577_60334C.1.pep
MAKVRAEMEALLRELKDGVRTKSGGTEGHGAPKDRNRESTTSSCVTDGNDQTASARLEYQLASSCVEPAGYERSSEDDGGCCARMELDVLEEGSTPSWSCFKVTMSQGHH

SEQ ID NO: 325951 - protein, 310 aa, Zea mays
  Clone ID: MRT4577_60335C.1.pep
MDAGRGSSATIFPVPQVPALALLFPPPPPAAAALPSSSLSLSSSSSSRHAPSITSFPILVLTVLGILAACVLILAYYVFVIRCCLTWHRDRSASDAVSRRPQRARARVRTSTGGTPASSAEPRGLEDAVIRALPAFTYRKKPADLPPSAPAPASECAVCLGEFEEGDSVRMLPACLHVFHVGCVDAWLQGNASCPLCRARADVDAASCCRLLPPPPPEEEEDVAAIQVVVVVPGAEEDDRQGTVPQRQRETTVAPAAAAEVEGEDPPQVGGEKERRKDGDVAPRTRSFSTDGDGGEEVQSILQRNGQGLP

SEQ ID NO: 325952 - protein, 66 aa, Zea mays
  Clone ID: MRT4577_60336C.1.pep
IEDHFGSRTVGTGESTHRFCSSCSTHNKAHADRLDPRLQGLPPTRWDHRLPHRDCLPLNSWSHRLR

SEQ ID NO: 325953 - protein, 52 aa, Zea mays
  unsure (1)..(52): unsure at all Xaa locations
  Clone ID: MRT4577_60337C.1.pep
SDHLRSXGYAYIVAYPGIPTVFYDHLYDHGGPLHADIGTLLRVRKCRDIHSR

SEQ ID NO: 325954 - protein, 130 aa, Zea mays
  Clone ID: MRT4577_60338C.1.pep
RGYHFSRSDKTWVKTNTSCTKTSPAGGGGAPVIRLAARVQFSSSPTRMHWGARHSRARGPCAHTFTTRHQPTKPSHPAGPVQVAALEVGVALPLEPAPGGRVRDPHPVAVRGGPLPRGVRVRPPVFPVRF

SEQ ID NO: 325955 - protein, 156 aa, Zea mays
  Clone ID: MRT4577_60339C.1.pep
SRMPRRPYDARHPHPGGPAPPAPLPPPHRRPAPLPSHTHSLPPSPCSAPSPSPLCLRSTSLTASDLTASPHRPNGIFASDAPIDVDAAMEDELREKEDGSPRQLERGSSCTVSGFKKFFRKNEQFRDALAKHRLLTPTTPLARQGSDDMSLVSSVI

SEQ ID NO: 325956 - protein, 115 aa, Zea mays
  Clone ID: MRT4577_6033C.1.pep
SSSSQIVTVYDLDSSADPPRAVVGDIHAVVDGHVRRKTKRCTSNSPINGAVYIGILYSELARLEDQRRSRPPSSPGRSFPTPLCRWPVHPRNCCRPGGRPPRSPPSMPSYLVAAI

SEQ ID NO: 325957 - protein, 52 aa, Zea mays
  Clone ID: MRT4577_60340C.1.pep
HASALPICFLNPLVASLCIETYGAALHLINSVACMLLSANFLSWVSNCYSCR

SEQ ID NO: 325958 - protein, 190 aa, Zea mays
  Clone ID: MRT4577_60341C.1.pep
MKTILASETMDIPEGVTVTVAAKLVTVEGPRGKLTRNFKHLNLDFQLQEAGRKLKVDAWFGTRRTMAAIRTAISHVQNLIKGVTKGYRYKMRFVYAHFPINASITNSNTAIEIRNFLGEKKVRKVDMLDGVTILRSEKVKDELILDGNDVELVSRSAALINQKCHVKKKDIRKFLDGIYVSDKGVIEEEQ

SEQ ID NO: 325959 - protein, 60 aa, Zea mays
  Clone ID: MRT4577_60342C.1.pep
MYGGFVSEKKKKKKKKKKKKKKKKKKKKKKKKKKKKKKKKKKKKKKRGRPLLKKSNFTNP

SEQ ID NO: 325960 - protein, 84 aa, Zea mays
  Clone ID: MRT4577_60343C.1.pep
HHHIILHSISIIHHIAFGKRRRHSQPSKGCFEKVTLKLYSFGIQFRGIFSRNMGELYQINIEVAKLRSIASKNVFTRHGCDSSE

SEQ ID NO: 325961 - protein, 90 aa, Zea mays
  unsure (1)..(90): unsure at all Xaa locations
  Clone ID: MRT4577_60344C.1.pep
KXXYFCSVLFKGGNAIFYSNHRKIHTPSPSFWSRLTGEILHGKNGHIPMAFELIEKKKPVQRRLKKTELLEKSPKISSGRERILLSRQGK

SEQ ID NO: 325962 - protein, 149 aa, Zea mays
  Clone ID: MRT4577_60345C.1.pep
CVELEPTCKPNADHEWLPCPPPATQTIAALATDGGISSVRDETALSPPGLPASTSKGSSSLRCHLQAPEAIAGHRNDAARLWPGRRPSSSLPAADAIQILDVEKLSLLRLAAASVTAVSHAPAFIRHPRSHADSESRLRDGPGLAGLLG

SEQ ID NO: 325963 - protein, 159 aa, Zea mays
  Clone ID: MRT4577_60346C.1.pep
MAMAAASRSRALWASRAAAYLRISTFPRAFSTVLKDLKYADTHEWVKVEGDSATVGITDHAQDHLGDVVYVELPEVGVSVSQGKNFGAVESVKATSDINSPVSGEVVEVNRKLSEEPGVVNASPYEKGWIMKVKLSNSGELNSLMDDDKYSKYCEEGNH

SEQ ID NO: 325964 - protein, 160 aa, Zea mays
  Clone ID: MRT4577_60347C.1.pep
MAMAAASRSRALWASRAAAYLRISTFPRAFSTVLKDLKYADTHEWVKVEGDSATVGITDHAQDHLGDVVYVELPEVGVSVSQGKNFGAVESVKATSDINSPVSGEVVQVNGKLSEEPGLVNASPYEKGWIIKVKLSDSGELSSLMDGDKYSKFCEEEDGH

SEQ ID NO: 325965 - protein, 107 aa, Zea mays
  unsure (1)..(107): unsure at all Xaa locations
  Clone ID: MRT4577_60348C.1.pep
TISSFYSRAQKNPIDTVRALYRAQALLPLDASATXTHTSGRCSXQPPASEHLQSAXHLPPPVHLPPTEHLLPPVHLTPTGHLPPPVQAPAQIAQQLTAMCGLQHKTP

SEQ ID NO: 325966 - protein, 85 aa, Zea mays
  Clone ID: MRT4577_60349C.1.pep
ATFNHTGTRGINCARAPQHLVLFNNVAASADGGGGAPSAELLLHPEAGALQVQADHPAGVLQAGQAPDAVHLGPHHTLLVGHGRR

SEQ ID NO: 325967 - protein, 253 aa, Zea mays
  Clone ID: MRT4577_6034C.1.pep
SEEGETTDSSKPTQPMVNSVTVSSRRPVVLADGTYATQSAATEAISTPPVTAGSLASTLNLRSLILSGDFFLAAVVACTLTKLVLRLEEVQPSKAEANKACTGALLVMTSILQLGLSSYLPQPLDNDSYDRIVLCVRLLCNTGDDVRKIWLQSCRQSFAKMLAEKQFRETEEMKAKSQISHAQPDDLIDFYHLKSRRGMSQLELEDEVQDDLKAATGGFSKETDDANRLNRILQLTGFSDPVYAEAFVTVHHY

SEQ ID NO: 325968 - protein, 153 aa, Zea mays
  unsure (1)..(153): unsure at all Xaa locations
  Clone ID: MRT4577_60350C.1.pep
LSFAESPIHPLSRCSQAPRAWYECLRFNLIANSFTVGKVDPTLFTKMIDDDLFVCEIYVDDIIFGSTXKSCCEEFSRIMVNKIEMSMMEEXLKFFLGFQIKQLKDDSQTMYTQDILNKFGXTNGHLDLDIGGNYVDQKXISVYDWFITLFMCI

SEQ ID NO: 325969 - protein, 44 aa, Zea mays
  Clone ID: MRT4577_60351C.1.pep
ILSLQLGEAYYCSRQLSWTVSQSFISFYKNYCVLDAFHLLLQLH

SEQ ID NO: 325970 - protein, 56 aa, Zea mays
  Clone ID: MRT4577_60352C.1.pep
NGKGNIKQTFLNPPQGGSGLPLWKGAAGFFKKGIYVCGFSRLQPKKPPYLLNSYFI

SEQ ID NO: 325971 - protein, 69 aa, Zea mays
  Clone ID: MRT4577_60353C.1.pep
GRRHARCRLLAVRTCGVWSPPARRGDRRSRVACRVGVRTSGAAACFGIGRSTANGKGGRWRMHRKVVAG

SEQ ID NO: 325972 - protein, 32 aa, Zea mays
  Clone ID: MRT4577_60354C.1.pep
AGRAVHNPYFAIDDEEEEAAAEALKLDDEFEL

SEQ ID NO: 325973 - protein, 42 aa, Zea mays
  Clone ID: MRT4577_60355C.1.pep
NQTEVVFMQLISSANHQRALIAINQDDHSPCWVCCVHATYKN

SEQ ID NO: 325974 - protein, 120 aa, Zea mays
  Clone ID: MRT4577_60356C.1.pep
PSSMHPRSSSRSSSVTLRARSSAVPPLRMLPAPALPSLVALDVTSTPSSASAAPARAPSCLLPADDMALLPRLLHGQSTPVYPTTTTTTYHLPSAPSQGQGGICERVAGRVGVRVVGRVG

SEQ ID NO: 325975 - protein, 75 aa, Zea mays
  Clone ID: MRT4577_60357C.1.pep
EVPEPYAPVTDEDEEMDRQALHGKNRHERIAVHEPSNIVIAREIMQCLNNQQRLNDEAINRNLDLLRERELREPR

SEQ ID NO: 325976 - protein, 69 aa, Zea mays
  Clone ID: MRT4577_60358C.1.pep
AGGSPIQRMRSPFTQLRVSSYHPSATPIRRPPLRAVTEHGKRRGLDRQPPDDTPTCMKRTGRWTASRTG

SEQ ID NO: 325977 - protein, 222 aa, Zea mays
  unsure (1)..(222): unsure at all Xaa locations
  Clone ID: MRT4577_60359C.1.pep
MLPSPPELLRPCAARASPLPPPIPKAANPNTEPGTTTTAATSEHRADTMDAETWRRRALRQRINPTGVAEVAAASXSKTRLALPHVTVQDIRWFDXAELRRAGFRGVDFDKDNTLKDPYGPAIWSPLAEEFDQGRATLPSGAVAIYSNSPRLTAXIRTIEYARGIETIIQGGHVTRHDIKKPGGLATEIERYFGCSASNHVSDVDRYFTDVDCGNRDGFLTV

SEQ ID NO: 325978 - protein, 91 aa, Zea mays
  unsure (1)..(91): unsure at all Xaa locations
  Clone ID: MRT4577_6035C.1.pep
MDADQVSPYALLADLKHFLPSNEVMVXNEDHYEALAAAAAVYAYTCYEFRNVXFKERRCSRGRSHDWTDCPYAHPGEKARRGDPRRYHYSG

SEQ ID NO: 325979 - protein, 68 aa, Zea mays
  Clone ID: MRT4577_60360C.1.pep
RHVWFTTLVTTLCLSFLPKVSYSIRTEMKIAIIRHNIVMKSTVKNLTNVVKSYQYHMEISGLFTYLKT

SEQ ID NO: 325980 - protein, 93 aa, Zea mays
  Clone ID: MRT4577_60361C.1.pep
AVVISVQGKAKQGGRLGRRDALPDRALHNITKVSLKPQIHMPSTRNGQNRHFDLNYEETLGQLTNNIENVTRHSYDLHGALTNPKPSTLWTFV

SEQ ID NO: 325981 - protein, 170 aa, Zea mays
  Clone ID: MRT4577_60362C.1.pep
PSSPVPEAPRNWTRKIYTYLSIYAEPRRKTGRNRVGAIAGARRKLSTQRGRQRSEARSKRVLELEHWASTRLQQWASSTGSKRKRKREREISRYWETNRDTVDRLWTRERPPGLRPRVASRSAAWWLLFRLCLLLLLLPLRRESERERTPAPDSRVLGNNGPAWPVSGWK

SEQ ID NO: 325982 - protein, 117 aa, Zea mays
  unsure (1)..(117): unsure at all Xaa locations
  Clone ID: MRT4577_60363C.1.pep
YXXGXXXXKXRXXDVXMKRKGVDDFFXLCDLXDGEKENXXSEVFEVXXIVXNKXMKKXVGKDXXXFXXGMRGXFXKXKGXCVRVEIGKXXXCVLXKXXNVXXXSEVLGXXKLKXXXX

SEQ ID NO: 325983 - protein, 116 aa, Zea mays
  unsure (1)..(116): unsure at all Xaa locations
  Clone ID: MRT4577_60364C.1.pep
IISFLIEIHLNTFPLNKTPLPHFPGPPPPPLTVGAGRAPSPTXAPLRPPPPPPHGRMPXVPPSPAPXPPPPRPDPLPXGRPPPPSPPPPLGLGPPPPPPRPPPSPAPPPPAPAPPP

SEQ ID NO: 325984 - protein, 159 aa, Zea mays
  Clone ID: MRT4577_60365C.1.pep
MAQRLTRSTCAGGVPNSGERDCAFPVAGVLGSSSGKLHGLLRKLPRGLDRAEEGGKRFGHSGCPRAALAGRGEVAGAMGELRGVRRGTKDATGKIAEHWGGLYSHGVGVVTGGRGRARGCIRVLGNFSPFYLHGPMAPEDDIDLHVNAQEGIATTSFLL

SEQ ID NO: 325985 - protein, 161 aa, Zea mays
  unsure (1)..(161): unsure at all Xaa locations
  Clone ID: MRT4577_60366C.1.pep
MLGLPDGSILTEVAMEGKKQPQPAVADSSATVSKVLDDDNLLVEILLRVSFPNTLVRAALVCRRWLCHVSDKAFLVRFRKLHPPRLLGFYIDTGTGPRFTPLLPLPPELXPPXDRACFCPDAWQCIRAHVLDCRNGCVLTMLLDGPRFKLGVHTALCLKET

SEQ ID NO: 325986 - protein, 58 aa, Zea mays
  Clone ID: MRT4577_60367C.1.pep
MAATSSACACAAEALAWFPFDGFTSDHYRVSDSIHRGQRYYRAVTVRCFSTSFNVVQG

SEQ ID NO: 325987 - protein, 81 aa, Zea mays
  Clone ID: MRT4577_60368C.1.pep
SMMQLPRHQPISCTRVRCRSRLMISPSQRRSIKPSRLVLGDPIKGQQRGKPAGGSDGPPRRAAPIRFFGFWVLDKEIGDEV

SEQ ID NO: 325988 - protein, 66 aa, Zea mays
  Clone ID: MRT4577_60369C.1.pep
VALHDGSITLLNSRPVRSLRIGLHNRIWICIKLQYTTAHMYPTLHLCSAYTTGPKHHPISVCAINY

SEQ ID NO: 325989 - protein, 78 aa, Zea mays
  unsure (1)..(78): unsure at all Xaa locations
  Clone ID: MRT4577_6036C.1.pep
YIYHIAKLFFSFSGNTITLFLFLSPAHTLXRFITNRTTDYFSCIPYNITLLNCLLSTCYCLPFHSLNNILKSTINDNK

SEQ ID NO: 325990 - protein, 106 aa, Zea mays
  Clone ID: MRT4577_60370C.1.pep
SFAENDCKGPYVSVRGICHFTFGRTRGPLRPRCGRRDIRRRKMITLRSTSGHGSMVRWTEKFPRPDTEIACCAPRRRRLPRGARNHDLARRCPSRFICSRNLRGGR

SEQ ID NO: 325991 - protein, 78 aa, Zea mays
  Clone ID: MRT4577_60371C.1.pep
FLLAGLPWPAPCFLPVYQFLLPHHNETTVHPQSANHTSICGLSSAHHNSEGADTPLCPESPIAYNVLVVLLTRATKTL

SEQ ID NO: 325992 - protein, 76 aa, Zea mays
  Clone ID: MRT4577_60372C.1.pep
RLPPTGSSSSSYGTVDVVKDRPVRFSSSQLSEFTANYSEKLGAGGFGVVYRGQVQLPAGGHGSSISSSLAVAVKVL

SEQ ID NO: 325993 - protein, 516 aa, Zea mays
  unsure (1)..(516): unsure at all Xaa locations
  Clone ID: MRT4577_60374C.1.pep
MAAQNAGTIIDCRQAMSPDPPAVELEVIGSSSPSIRPCPAAAALADADIDHDGCTAEFSSSTDRELQDHIREWEGPSLQGVLRRMPDGGKKMQSLVLRMKKELERRRARQRMDVTPLRQTVQAKRTGGSSGEIYNLKSDDETMDSTASKHYPNSSCTTSTKTYTQVKGAAXRTKFFKPWQICLPKEWWSNFKRVVEASIKNVRLSSKXTCSEHLYXIDRLNLAKNKASPLEIKKDVVLLDDDDDIEPARSADVQISNKWEESNIHYPSSTDPEAVELTYSDMKCLEPEEYLKSPVINFYLQYLKKARPRRDLHMFNTYFYSKLEEALSMPGHHDSEFSKLRRWWRGVDIFKKAYIILPINESMHWSLIIVCMPTKEADSGPIILHLDSLGLHSSQKLFDIVARYIQAERWHLGMDSSYDIPFSGRIWRRLSKNINREKIEVPRQRNEYDCGLFMLYYIDRFIQDAPERLTKEGLGMFGRKWFNHEEASTFRGGIRPLLIDLFHXALDDDGTSEAEL

SEQ ID NO: 325994 - protein, 37 aa, Zea mays
  Clone ID: MRT4577_60375C.1.pep
ILLAANVVCKRLHTVPGSMMLSNLFRPVRKQAPLEPN

SEQ ID NO: 325995 - protein, 93 aa, Zea mays
  Clone ID: MRT4577_60376C.1.pep
LVGAVPVYACLPKPGKSITSTQSNGYLYKVHEKWNFIEPAPAALCCSVVTVLFPVSSSPLEDSGWMSVSGMPTSSHASAHASVNPNKLHRALH

SEQ ID NO: 325996 - protein, 379 aa, Zea mays
  unsure (1)..(379): unsure at all Xaa locations
  Clone ID: MRT4577_60377C.1.pep
MDVTPLRQTVQAKRTGGSSGEIYNLKSDDETMDSTASKHYPNSSCTTSTKTYTQVKGAAYEEQSSLSHGKYAYPKNGGQISKESLRHQSKTWNLAKNKASPLEIKKDVVLLDDDDDIEPARSADVQISNKWEESNIHYPSSTDPEAVELTYSDMKCLEPEEYLKSPVINFYLQYLKKARPRRDLHMFNTYFYSKLEEALSMPGHHDSEFSKLRRWCXRPRGVDIFKKAYIILPINESMHWSLIIVCMPTKEADSGPIILHLDSLGLHSSQKLFDIVAXGRIWRRLSKNINREKIEVPRQRNEYDCGLFMLYYIDRFIQDAPERLTKEGLGMFGRRWFNHEEASAFRGGIRALLIDLFHSALDDDGPSEAELEDKDIQMD

SEQ ID NO: 325997 - protein, 199 aa, Zea mays
  unsure (1)..(199): unsure at all Xaa locations
  Clone ID: MRT4577_60378C.1.pep
GRVGGRVGGRVGGRVGGRVGLKSPVINFYLQYLKKARPRRDLHMFNTYFYSKLEEALSMPRFSKLRRWWRGVDIFKKAYIILPINEXKLLLLWIILQXKWMHWSLIIVCMPTKEADSGPIILHLDSLGLHSSQKLFDIVARYIQAERWHLGMDSSYDIPFSGRIWRRLSKNINREKIEVXIQDAPERLTKEGLGMFGRK

SEQ ID NO: 325998 - protein, 291 aa, Zea mays
  Clone ID: MRT4577_60379C.1.pep
MMRPWTVRLDKHYPNSSCTTSTKIYTQVKGAAYEEQSSLSHGKYAYPKNGGQISKESLRHQSKTCAYLPKSTCSEHLNMDIDRRKTPTLKSRNISMPGHHDSEFSKLRRWWRGVDIFKKAYIILPINESMHWSLIIVCMPTKEADSGPIILHLDSLGLHSSQKLFDIVARYIQAERWHLGMDSSYDIPFSGRIWRRLSKNINREKIEVPRQGNEYDCGLFMLYYIDRFIQDAPERLTKEGLGMFGRRWFNHEEASAFRGGIRALLIDLFHSALDDDGPSEAELEDKDIQMD

SEQ ID NO: 325999 - protein, 455 aa, Zea mays
  Clone ID: MRT4577_6037C.1.pep
DAWADACSPEERDRLVRDIESLGLPRIDRIVRCSLRSQGAPIPTFEPVPESSVSTVDDRTPEDKERWWRRGLRAISEGKLAVVLLAGGQGTRLGSSDPKGCFSIGLPSRKSLFQLQAERILCIQKLAAQCTDAPGSTVQIHWYIMTSPFTDDGRVGFFETHRYFGLEPNQVTFFQQGTIPCVSHDGRFIMETPYKVAKAPDGNGGVYAALKSKRLLDDMAAKGVKYVDCYGVDNVLVRVADPTFLGYFIDRGVSAAAKVVRKAYPQEKVGVFVQRGKGGPLSVVEYSEMDAAMTTEINQTTGRLRYCWSNICLHMFTLDFLNQVTNSLEKDSIYHLAEKRIPSVHGYTSGLKLEQFIFDVFNYSPSTALFEVLREEEFAPVKNANGATYDTPDSARLMLLRLHSRWVVAAGGFLTHSVPLYMTGVEVSPLCSYAGENLEAICSGRTFHAPSEISF

SEQ ID NO: 326000 - protein, 305 aa, Zea mays
  Clone ID: MRT4577_60380C.1.pep
MAAQNAGTIIDCRQAMSPDPPAVELEVIGSSSPSIRPCPAAAALADADIDHDGCTAEFSSSTDRELQDHIREWEGPSLQGVLRRMPDGGKKMQSLVLRMKKELERRRARQRMDVTPLRQTVQAKRTGGSSGEIYNLKSDDETMDSTASKHYPNSSCTTSTKTYTQVKGAAYEEQSSLSHGKYAYPKNGGQISKESLRHQSKTCAYLPKSTCSEHLNMDIDRRKTPTLKSRNINQQENSTIDKCTNATFGSNRRWNLAKNKASPLEIKKDVVLLDDDDDIEPARSADVQISNKWEESNIHYPSSTD

SEQ ID NO: 326001 - protein, 76 aa, Zea mays
  unsure (1)..(76): unsure at all Xaa locations
  Clone ID: MRT4577_60381C.1.pep
SGAGTESPSNGRAKDRFPKKGRVQHVKGDQMRSCLFGLVPRYICSYVSASPLFVIYQYLEVIRKWGFTCKKKXXKK

SEQ ID NO: 326002 - protein, 44 aa, Zea mays
  Clone ID: MRT4577_60382C.1.pep
RALYQYKRSQGRPLSRSVGVFALGNRLCQTVDWDSCVSIALRSF

SEQ ID NO: 326003 - protein, 255 aa, Zea mays
  Clone ID: MRT4577_60383C.1.pep
MGIFVWAVRSQGLEPSAKSFYSMHEILYETKPWGSSCPVPTFRKRWPRDWMKEWFYVKSDLKTRGDIKDIIMRPIWQRFGLRKPKVEIGEAAEGCRRAFGTVCSFIGTRDLIQEHIAFRIWPLLEKWEMPKETVTKTGEGELVRLKYSFKYGDKFDEPNDDWLKCIEATSDELLGPYSKAEDNALSAAFGSRKKKRLNRVFDAIGFMYPDYRYPSKGQKRKSTTSGKDVASAAPSEPAPKRRKVKVLTHRPCEST

SEQ ID NO: 326004 - protein, 572 aa, Zea mays
  Clone ID: MRT4577_60384C.1.pep
MSQDKKAIAETKLSEEEKLSKEKTVGFIESIAKTNIEKITREILEGLFEDTGDSDSYDVESGGEDSEDRPWQPSHAVFGKSTIKQSHLDNMRGRYFRDMSIVRADNGDRTAPVPEENEVVIFRSFFKARLRFPLSRFVVKVLKIYQIFLHQITPEAIIRMGIFVWAVRSQGLEPSAKSFCSMHELLYKTKPWGKEQYHNNFGCYSFVARSGSSYPVPTFRKRWPGDWMNEWFYVKNDLKAREDIKEIIMRPIWQRFGLRKPKVEIDEAAEGCRTAFGTVCAFIGTRDLIQEHIAFRVWPHVEKWEMSKETVTKTGEGELVRLKYTFRYGDKFDEPNDDWLKCIEATSDELLGQYSKAEDNVLSAAFGSRKKKRLNRVFDAIGFMYPDYRYPPRGQKRKSATSGKDVTSAAPSELAPKRRKVKVLTHRPRCIEPAIVPEFGGETSLATEAKEPALTQKIEEPAAMPKASSAKLAEPKANNIEEIEVERTKILEVISPSTEVTVPKAQKDLTATPKRKRMVNVLDVLETIKTSSSTPGKTAEASKTQTETKTNRSRSCKELGRDRSWAFRACQG

SEQ ID NO: 326005 - protein, 207 aa, Zea mays
  unsure (1)..(207): unsure at all Xaa locations
  Clone ID: MRT4577_60385C.1.pep
VVVASGKKLYCLHVNNTDAEVGGGVRQRVSSSEVEGNDGVFSTQESVNVFDFRVPAGIGLKIARHGGTANSIFSRGDSVFIGSTEGRLQIKGGSRSRVQHYSLRKGKLVATYELPEFSAHIHHSAITQVWGDSNLVLAACGMGLFAFDTFKEDTQPSQQQPTAXDRGNTVGVREAIGPDDLYCPTFDYSSSRVLLVSRDRPAHWRYL

SEQ ID NO: 326006 - protein, 96 aa, Zea mays
  Clone ID: MRT4577_60386C.1.pep
VFARAGTPTSLDDNYLPCRMWGNSPCTRVITPSILLIKKQEMLCLVLISYNVFVASVADVCGKRVDKISTVINSNCRCLLYGAISLRVRYGVPNLN

SEQ ID NO: 326007 - protein, 71 aa, Zea mays
  Clone ID: MRT4577_60387C.1.pep
FHQLPSTKVCMTLTQFGYGSSLIRFTMLPTYSCLNTQPCSFFHCGACKCGIHLKNYQHTHVHPTVSNIQTL

SEQ ID NO: 326008 - protein, 69 aa, Zea mays
  Clone ID: MRT4577_60388C.1.pep
NLAPGHIVPHVGQKSPPRRPMQMNHRKIRPIRGSLTRNKGQKGPGFLSRFSLNVGGLWVRSPPSKFFPP

SEQ ID NO: 326009 - protein, 107 aa, Zea mays
  unsure (1)..(107): unsure at all Xaa locations
  Clone ID: MRT4577_60389C.1.pep
MLTNLFRSYSLPSMASTSVDALDLXIVAPVISNVFSQLNQVMQGYQSSFGAAFGGIVSPFQQIVPTFQSFMQQSQQSSSSSSFSQSINPYINTMQPFIPSFGGLRGF

SEQ ID NO: 326010 - protein, 67 aa, Zea mays
  unsure (1)..(67): unsure at all Xaa locations
  Clone ID: MRT4577_6038C.1.pep
TRPCRXKKKKKKKKKKKKKKKKKKKKKKKKKKKKKKKKKKGGWGFDSRTNPESCFFWPLLLGTASAP

SEQ ID NO: 326011 - protein, 53 aa, Zea mays
  Clone ID: MRT4577_60390C.1.pep
AHQALALKKKKKKKKKKKKKKKKKKNKKKKKKKKKKLCLVTTVKGQIQKNWGP

SEQ ID NO: 326012 - protein, 46 aa, Zea mays
  Clone ID: MRT4577_60391C.1.pep
RRVGYQSWMLLRVLMIHGRRGSGCEDGRSSTSNRRPTLEQPRLTRS

SEQ ID NO: 326013 - protein, 186 aa, Zea mays
  Clone ID: MRT4577_60392C.1.pep
MGGKVLLMSAVLVGLVSLSSCRSLGELHEQKTHYGGSPTPTHGSGGDYNPTLTPTPTYGTTPTPSYGTTPTPTYGITPTPTYGTTPTPFYGTTPTPSYGTTPSTPSAPSHDVPASPKKHGFIGSCDYWKNHPDAIVAAIGSLGNIGKTFGAACSMIGGKKLGNMHDALSNTRTDGIGALIREGAAA

SEQ ID NO: 326014 - protein, 55 aa, Zea mays
  Clone ID: MRT4577_60393C.1.pep
RGRSNGRCRRGEGVRQLPSPALSRSSVSGTDAIRRPASPCSVVAGSRCGSAGRRL

SEQ ID NO: 326015 - protein, 71 aa, Zea mays
  Clone ID: MRT4577_60394C.1.pep
KPPPPFYFMPGTLGWWLNDKRGPPPAFGEKKKVVGGGKKQRGGKPQHLPGGNPFVLENLGQIAPRGEGPPK

SEQ ID NO: 326016 - protein, 82 aa, Zea mays
  unsure (1)..(82): unsure at all Xaa locations
  Clone ID: MRT4577_60395C.1.pep
WDEKRFFPLVWGPSRLGPTPLGEPAPGSPPGXPPPFGGSQRKARAFPVGKNRVPAPPGXFPLLFKGKGPQKPPTPPFVGAFF

SEQ ID NO: 326017 - protein, 177 aa, Zea mays
  unsure (1)..(177): unsure at all Xaa locations
  Clone ID: MRT4577_60396C.1.pep
EICLVVKEAVQTEKAPPALGPYSQAIKANNLVFVSGVLGLNPEXAFALSFYHFLVFFYIACISFLVFPLDEPISLLVVGEETTNMPFCFQTRKFISENVEEQTEQVMKNMGEILKASGASYSSVVKTTIMLADLQDFNKVNEIYGKYFPAPAPARSTYQVAALPLNARIEIECIAAL

SEQ ID NO: 326018 - protein, 71 aa, Zea mays
  Clone ID: MRT4577_60397C.1.pep
VLLPWARTRSRRDAKGRASKLHCYFCGDDRVPPWRQGQGQGQGLQVRLPTLNLHLRQKHLLGEKPGKIYEA

SEQ ID NO: 326019 - protein, 179 aa, Zea mays
  Clone ID: MRT4577_60398C.1.pep
MAWSAAAVSRFAAASPPAAPISVRLGAAASRSSLSFSSGRRRPVAASLSTSATAVKEAVQTEKAPPALGPYSQAIKANNLVFVSGVLGLNPETRKFISENVEEQTEQVMKNMGEILKASGASYSSVVKTTIMLADLQDFNKVNEIYGKYFPAPAPARSTYQVAALPLNARIEIECIAAL

SEQ ID NO: 326020 - protein, 68 aa, Zea mays
  Clone ID: MRT4577_60399C.1.pep
ILVLEAVVLLQLIFCPTQPCNPAVGGPATLQLAHEVDALGGKIGKITDRCYLQKRVLNSSKGPAICAL

SEQ ID NO: 326021 - protein, 106 aa, Zea mays
  unsure (1)..(106): unsure at all Xaa locations
  Clone ID: MRT4577_6039C.1.pep
ANGATYDTPDSARLMLLRLHSRWVVAAGGFLTHSVPLYMTGNCSPSIYVLESVSKVRIFLMGTHXVVKTLPVLPGVEVSPLCSYAGENLEAICSGRTFHAPSEISF

SEQ ID NO: 326022 - protein, 92 aa, Zea mays
  unsure (1)..(92): unsure at all Xaa locations
  Clone ID: MRT4577_603C.1.pep
GSPGFGFVGERIREAASDVEYRCFDGGLDWTTDDHSLHNTFSTYGEVLKSKIILERKTQRNRGFRXKTYYTEEAMLNIIXRINEKKLDEHYI

SEQ ID NO: 326023 - protein, 130 aa, Zea mays
  unsure (1)..(130): unsure at all Xaa locations
  Clone ID: MRT4577_60400C.1.pep
MGCYRGAAAXSRLRSRMGXEATTRGGVRGVXMXSACDLXLKAQVRELIPXQQERLKKLKAERGKTQRGNITVDMGLGGMRGMTGMRXETSLLEPEEGIRFRGLSIPEWQKVRGTAVKGGEPLAEGLLWVL

SEQ ID NO: 326024 - protein, 57 aa, Zea mays
  Clone ID: MRT4577_60401C.1.pep
ISGLNKLINGGRPQFFLFFCFSFIFFFYYFFFFFFFFFFFFFFFFIPTGTLWLLNAL

SEQ ID NO: 326025 - protein, 40 aa, Zea mays
  Clone ID: MRT4577_60402C.1.pep
ENRKSTTKNEKHVKTSKDFISQYAESQGYTTLSVYRLSSL

SEQ ID NO: 326026 - protein, 53 aa, Zea mays
  Clone ID: MRT4577_60403C.1.pep
LFGQNICTVTAVGRGLNPVVRTGFRVKLIVARCHRRQGMAPPSSGSTCLRTSG

SEQ ID NO: 326027 - protein, 244 aa, Zea mays
  Clone ID: MRT4577_60404C.1.pep
MSTVTRAYLDQRLAAANRCSREAAMAGAKAAAVAAVAAAVPTLASVRMLPWARAHLNPTGQALIVSTVAGMAYFIVAVIMVGSPTKGTRFRPLSLNVPKPLFPLAGQPMVHHHISACRRIPNLAQIYLIGFYEEREFALYVSSISNELRIPVRYLREDKPRGSAGGLYSFRDYIMEDSPAHIVLLNCDVCSSFPLPDMLEAHKKYGGMGTLLVNKVSAESANQFGELVADPETNELLHYTENQR

SEQ ID NO: 326028 - protein, 47 aa, Zea mays
  Clone ID: MRT4577_60405C.1.pep
KKKNKKKKKKKKNKKKKKKNKKGKYKKKKKNKTKYKIPKKKWCKILV

SEQ ID NO: 326029 - protein, 75 aa, Zea mays
  Clone ID: MRT4577_60406C.1.pep
TQLPHEDSQHFLDDGTYREPEPDNMLGPPNGQEGTPYSLVRNKAGRFTPSTETHSLTTVFSAALRRTLTCNNGTP

SEQ ID NO: 326030 - protein, 87 aa, Zea mays
  Clone ID: MRT4577_60407C.1.pep
ARTAVQAHAEASNWLHAYELVHGALVYRRQTHTTVGARTRAGIKDVGPLPTHGGDGTSIGKGSAPTGDSRTLTHAGTARAQNCCCGS

SEQ ID NO: 326031 - protein, 351 aa, Zea mays
  Clone ID: MRT4577_60408C.1.pep
RRWLAAAGGGGRGSAAAAAAATQQRIPAIFMFGDSIVDPGNNNNRLTEAKANFPPYGQDFPGGVATGRFSNGLVPGDLLASKLGIKELLPPFIGTDLQLEDLLTGVAFACGGSGYDPLTSKLATTLSSADQLQLFQDYKDKLAALAGEEEMERVVSQAVYFTVMGANDIVNNYFILPIRRHQYDLSSYVDFLVSSAINFTRTLNDMGAQRIAFLGVPPLGCCPSQITLAGSPSRQCDPARNQASELYNSRVSKEIERLNAERSGSGSKFVYVDIYYNLLDLIQNPASYGFKDVSEGCCGSTVLNAAIFIAYHSACPNAPDYIFWDGFHPTQKAYDIVVDKLIQQNSKYLMM

SEQ ID NO: 326032 - protein, 62 aa, Zea mays
  Clone ID: MRT4577_60409C.1.pep
CVVLANFVKGLSVDVGKYRQIGVQSVLCITTPPRLHPGTRYMGQLSRASSSHVRVRSRTPAP

SEQ ID NO: 326033 - protein, 526 aa, Zea mays
  Clone ID: MRT4577_6040C.1.pep
MANASRGRVGGGGRSSVLALLLLLSAGGARASYDGEGEAGAGAEEKEKAAAWTGGLSRRSFPKGFVFGTAASAYQVEGMAHKDGRGPSIWDAFIKIPGEIANNATADVTVDEYHRYKEDVNIMKNMGFDAYRFSISWSRIFPNGTGEVNWKGVAYYNRLINYMVKKGITPYANLYHYDLPEALEVRYGGLLSREVVRSFADYADFCFGAFGDRVKNWLTFNEPRVVAALGYDDGRFAPGRCTGCEAGGDSGTEPYVVAHHLILSHAAAVQRYRRRHQPTQRGRVGILLDFVWYEPLTADSAADRAAAQRSRDFHVGWFLHPIVYGEYPKSVRRSVKGRLPKFTAEEAGLVRGSIDYVGVNQYTAYYVRDRRPNATAAPPSYSSDWHAEFVYERDGVPIGPRANSDWLYIVPWGLYKAVTYVKEKYGNPTMLLSENGMDDPGNVTVGQGVRDAARVAYYRSYVAELKAAIDGGANCVGYFAWSLLDNFEWKLGYTSRFGLVYVDFRTLRRYPKSSAYWFRDVIAGTN

SEQ ID NO: 326034 - protein, 75 aa, Zea mays
  Clone ID: MRT4577_60410C.1.pep
GNPQQPPQNPFEGPTETKPLGYPQKKKNFGLWRKKKKPLGKKLYLRVKLGDIWVSKGKQGNPVSHKRGGSNRKGI

SEQ ID NO: 326035 - protein, 105 aa, Zea mays
  Clone ID: MRT4577_60411C.1.pep
TPRGYSFLGDAPSGLGGLFPIFLLAPWWFGWGAQRGVSFFGPLCLAPPPPLGFFSQCFPWGAGFWFKKKKKKKKKKKKKKKKKKKKKPKKKKKKKKKKYSALLPL

SEQ ID NO: 326036 - protein, 85 aa, Zea mays
  Clone ID: MRT4577_60412C.1.pep
FSVIMLFSMLFQSPARGLTPCPAFLPHFPLSHWTPPPPICTPPQQIFLCPPKRAFFPPVNFFSFSHFFPLFPLISPYFPNFFQFF

SEQ ID NO: 326037 - protein, 40 aa, Zea mays
  Clone ID: MRT4577_60413C.1.pep
QQGSGRPGREIHRSEALAPNHFSSLPWPGQFPAPCSLFSQ

SEQ ID NO: 326038 - protein, 81 aa, Zea mays
  Clone ID: MRT4577_60414C.1.pep
NIQVVGSNGICICVALLSIHERPWLGVNGLILSNVPMNWSLILGKTLCRVLCAASRHGTSPVITCSKSSWCLNKDNLCLAP

SEQ ID NO: 326039 - protein, 43 aa, Zea mays
  Clone ID: MRT4577_60415C.1.pep
FDAGAGVVHCHKNCLEWAPDVYFEDDSVFNLANELARSKRIKC

SEQ ID NO: 326040 - protein, 95 aa, Zea mays
  Clone ID: MRT4577_60416C.1.pep
AMSGVALAVAIAAAGVAALVGVLPGLDEVVHGLVLGVLAEDDGDLRGGARLVSWYRTSYGTSSFTCSFSLIRSFNTSCTLWCNHKVDLYKNQCNK

SEQ ID NO: 326041 - protein, 81 aa, Zea mays
  Clone ID: MRT4577_60417C.1.pep
FKSTPNLALLKRLCSTSKKKKNNGTKYPTIFRAKTFNIFPRKGAILEGSDPYFIIRNPERGFEMGSFTNHLGANPICFQGR

SEQ ID NO: 326042 - protein, 170 aa, Zea mays
  unsure (1)..(170): unsure at all Xaa locations
  Clone ID: MRT4577_60418C.1.pep
SGEIPSGLSQCRALTDLSLDGNCFTGNVPGDLYTLPNLRRLSLQENQLTGNLGSDLGNLSQIVQLDLSYNKFTGSIPDVFGNMRWLESVNLATNRLDGXELPASLSSCPLLKVISLRNNSLSGEIAIDFSRLPNLNTFDIGTNYLSGAIPSGIGVCTELKTLNLARTSSG

SEQ ID NO: 326043 - protein, 92 aa, Zea mays
  Clone ID: MRT4577_60419C.1.pep
FRLAEADKLNVINWRPSSAADAYAMIEECGKRFSRDERGEACDEDERVQEFLDMVKEVLPAPPKAEVETAEAEAEAEAEAVEAEAEVEAMQE

SEQ ID NO: 326044 - protein, 100 aa, Zea mays
  Clone ID: MRT4577_6041C.1.pep
FFPFNQLGAMNPSGYFQQQMVLPFGQLVTTSPASFLTQQQLLRLYQQFVANPEPLLELQQLFPFVPLALKNPAAFSPPPPIGDAFFRLLNSCNSIMKFLG

SEQ ID NO: 326045 - protein, 230 aa, Zea mays
  Clone ID: MRT4577_60420C.1.pep
MQQDLEDKKNEIITEGLENKIKEYEASLEKKDFLLQAVEGSLAEVQSENARLSRELLQKSEGFEQERKDLQAKYEAEAAKNTKRHLSLKELRNMCLNFGSCCVERLKKVFNSVGASAEKFTPSAKNISSTFKHIEGEIEALDEVIAGHGDFCALLASRGTAAAFLKASCTHAKIVNRPSFNLSSTDLTDIPGKARSIGSRFITQIWAKCGRDLAGDDARSLLKLDDDAED

SEQ ID NO: 326046 - protein, 103 aa, Zea mays
  Clone ID: MRT4577_60421C.1.pep
NFFPGFNAWINFPFLSNSFHAQLTSIREPPPFPLFSPPLFFFFKAFKGPLFPGLMAPIFLFPPVFPFLAPPPFFSPNSSPPIGPPPCTRYFRPWLLVPPLKPR

SEQ ID NO: 326047 - protein, 194 aa, Zea mays
  Clone ID: MRT4577_60422C.1.pep
SLSPGALLPQPWSSHARFSTPSPNRAPSSHLPRLLPPIRPPLLIFLPPAAPSRAVLSPCAPFLLPLLGFLLSSMAERPLHLWSTSSRARLFTGELPGAAPGSLPQDLAARACLCSAALTPAPCSAMEDASRAQVPARPSAPTCAPMSMPRSQCRAPAASLSLSMAAESLCARLAPCTDPLPLPRSRLSAQLAPA

SEQ ID NO: 326048 - protein, 44 aa, Zea mays
  Clone ID: MRT4577_60423C.1.pep
YKWHWTLVRDPLDHMMPSYKPYLTVPAAYQTSSGCHQHHYSTPS

SEQ ID NO: 326049 - protein, 125 aa, Zea mays
  Clone ID: MRT4577_60424C.1.pep
ESLLLPVYAEIMKNDLQGEIVSEEEETSQLGALLIGVLFASHDTLSKAYNGMIYNIATRPDILSRLKDECEKGGVPSKAVDLDKIEYLSHFIKEVLRLYGAGGGFRQCTAPVKLNEKITFSAGTK

SEQ ID NO: 326050 - protein, 122 aa, Zea mays
  Clone ID: MRT4577_60425C.1.pep
VRSDGSAASLGVRGIHRIREEVEISQRTVARALHGGSLQMNEEQSCLLSGGKKKNRHADGTARHGCRSWTGPAASDMVMPDRYGSSWRRGRDLGRKTTVKAKERVACLPWRWKRRRAEDLIP

SEQ ID NO: 326051 - protein, 102 aa, Zea mays
  Clone ID: MRT4577_60426C.1.pep
HTQGPFFGGTGGFQKPGGGPPWNGSWWCSTQVKKPVVQGGPLHYKGGGRLDHLVEGGGQIHPGREPKTFTGEGGRFDPHYRGLKGKKGALWGSPIFCRILFV

SEQ ID NO: 326052 - protein, 81 aa, Zea mays
  unsure (1)..(81): unsure at all Xaa locations
  Clone ID: MRT4577_60427C.1.pep
LRELKKENXVGFFNDHVKVNAPQKKFFCIIVSGGPPFAEYETIVQNAPPPPSCENTDIYGFRRLRXLYRXSFRGGVGQLKV

SEQ ID NO: 326053 - protein, 170 aa, Zea mays
  unsure (1)..(170): unsure at all Xaa locations
  Clone ID: MRT4577_60428C.1.pep
SNILLDDDMNALLSDFGITRXYANPQSIWAGSISSIGVKGTIGYIPPEYGGGGPVSTSGDVYSFGVVFLEILTGKRPTDPMFPGELDIISFVKNNFPHQIFHIIDSHLVEECEHLIQGNKVTFFEMYPCLVALLQVALFCTGSSPSQRSNMKEVARKLHTLRSQTPHKSK

SEQ ID NO: 326054 - protein, 55 aa, Zea mays
  Clone ID: MRT4577_60429C.1.pep
AGKRRRKKKRVKRCSIIFAGGRCTLLSTTSHSSSYAWRNHHGNPERGPAFRWQMR

SEQ ID NO: 326055 - protein, 86 aa, Zea mays
  Clone ID: MRT4577_6042C.1.pep
DSLAPLNPCHPMCTSCLRVLLQVPALQRFMRSRAHIHQQTGVHITSSTIYTSTLHIARVNVRDPGTINDGLGAAREADALLVQDES

SEQ ID NO: 326056 - protein, 78 aa, Zea mays
  Clone ID: MRT4577_60430C.1.pep
MASLSCASTLPWTPASYPRTSVGRCHDHSLRSGRSIRSGLAKVGAFPSLDVVPLMLTMVEHVDMSRDYVLTKSICHLT

SEQ ID NO: 326057 - protein, 59 aa, Zea mays
  Clone ID: MRT4577_60431C.1.pep
KSKAFEVKIKKNLEHLDNMFGLQCPNCIILGRCKPKKLWQWVLSYLHIWNNGTLSGITI

SEQ ID NO: 326058 - protein, 61 aa, Zea mays
  Clone ID: MRT4577_60432C.1.pep
LPRDDSCSSSPWLAAQGCYQAAVLSALILTKRPGTSVLFNILTKVLCFLLCNKGTCGWVAR

SEQ ID NO: 326059 - protein, 145 aa, Zea mays
  Clone ID: MRT4577_60433C.1.pep
MWPAGAEHPMGTGQGQGPAAPSPGSSASTAWQSPVPYYLFGGLAATLGLIALSLLALACSHWKLSVSGGSLLPAGGPDDDGGGLERQDGGGKAAGERRRERVLVIMAGDEMPTFLATPALGRGLDDARGGVGGVCGEDGRCGARS

SEQ ID NO: 326060 - protein, 76 aa, Zea mays
  unsure (1)..(76): unsure at all Xaa locations
  Clone ID: MRT4577_60434C.1.pep
CNTVCPQIMSILEHRVMNREQYIMNMFALHLLTNTFWHSPKVHIYFTLDEVTWDQAKRIFVVLTXPCWRKLPRLLW

SEQ ID NO: 326061 - protein, 61 aa, Zea mays
  Clone ID: MRT4577_60435C.1.pep
IPWPLFYTVGTGKPLVFPNLLALGHFPFPPVGDIAKGPAPLAFPNSCPSFWAMGTPPFGAY

SEQ ID NO: 326062 - protein, 62 aa, Zea mays
  Clone ID: MRT4577_60436C.1.pep
GPGGYKRAVLVFWAIAHRTRVVFQGPFFPIKPDGPLFGPFFEYALLVGLGKKKPAPPLIQLL

SEQ ID NO: 326063 - protein, 71 aa, Zea mays
  Clone ID: MRT4577_60437C.1.pep
TYCFTFTYRNTQYNLFVTSHINIRSYCLFCSFFYYLFFFFVFFFLSFFFILSFFLMRPYPRVRERVGERVR

SEQ ID NO: 326064 - protein, 62 aa, Zea mays
  Clone ID: MRT4577_60438C.1.pep
MAAHGDGRILLLACSSLPEAAEVHWDVATGNTPWLPGAEESARALEWPHGEKQRSSDDFLLR

SEQ ID NO: 326065 - protein, 218 aa, Zea mays
  Clone ID: MRT4577_60439C.1.pep
LRPAPHSLIRSYRTAGNMAIQRVKELAVSIEGKSPEEKKSLLAKCAATTLSSKLIGGEKEFFASMVVDAVLAIGNDDRLNLIGIKKVPGGTMRDSFLVNGVAFKKTFSYAGFEQQPKKFLNPKILLLNIELELKSEKENAEIRLSDPLQYQSIVDAEWNIIYDKLDKCVKSGAKIVLSRLAIGDLGTQYFADRDIFCAGRVTEEDLQRVAAATGGTVQ

SEQ ID NO: 326066 - protein, 277 aa, Zea mays
  unsure (1)..(277): unsure at all Xaa locations
  Clone ID: MRT4577_6043C.1.pep
MVRSNWNDFLHIIKDLQLPSMDHLISTIVQWFERRSKAFEPTYLYGVEKGYFLLSEGAKTRHGVRTINITISARNPCFGNRWQQLLINSIVGYDTILTNSLVNSPGHGYLYNFQTKELYDLSYGHEPPIYXEKHNPACLDSQVGVLSVXVAAWTALHLXYLIHLVCCSSLKFSVQLQHHARHHLPTFQLIFVHVIESLVFVPVMGNILWRFGVFVVCDENTFAAEFTELLYXHSLFCSDLXIMIGILFFLFEFYDDQLLAFLVLTLVWLCELFTMIR

SEQ ID NO: 326067 - protein, 68 aa, Zea mays
  Clone ID: MRT4577_60440C.1.pep
LHTIRARETYADELHVSPENLPVVRHDFVLSSNGQYRGYPPFPLKKPTLCWYCARYPRRRGWSQQYRR

SEQ ID NO: 326068 - protein, 120 aa, Zea mays
  unsure (1)..(120): unsure at all Xaa locations
  Clone ID: MRT4577_60441C.1.pep
ILALLGLLARLVSAPGAFIIPQCSLAGSAIIPQFLPPVACMGFAHPGVRAYRLGLALAARALQEAFAQLFQQSLAHLFFLFIAGFQRQRFLPSLSGXRVVFXVAYLREQLLGPPHGVWCS

SEQ ID NO: 326069 - protein, 560 aa, Zea mays
  Clone ID: MRT4577_60442C.1.pep
MSAMMQPQIILLKEGTDTSQGRAQVVSNINACTAVGDTVRTTLGPRGMDKLIHDDKGGVTISNDGATIMRLLDIVHPAAKILVDIAKSQDSEVGDGTTTVVLLAAEFLKEAKPYIEDGVHPHSLIRSYRTAGNMAIQRVKELAVSIEGKSLEEKKSLLAKCAATTLSSKLIGGEKEFFASMVVDAVLAIGNDDRLNLIGIKKVPGGTMRDSFLVNGVAFKKTFSYAGFEQQPKKFLNPKILLLNIELELKSEKENAEIRLSDPLQYQSIVDAEWNIIYDKLDKCVKSGAKIVLSRLAIGDLGTQYFADRDIFCAGRVTEEDLQRVAAATGGTVQTSVNNVINDVLGSCEVFEEKQVGNERFNIFSGCPSGQTATIVLRGGADQFIEEAERSLHDAIMIVRRALKNSTVVPGGGAIDMEISKYLRQHARTIAGKSQFFVNSFAKALEVIPRQLCDNAGFDATDVLNKLRQKHASGEGANYGVDINTGGIADSFANFVWEPAVVKINAINAATEASCLILSVDETVKNPKSESAQGEAAAGAMAGRGRGAMRGRGGRGMRRR

SEQ ID NO: 326070 - protein, 59 aa, Zea mays
  Clone ID: MRT4577_60443C.1.pep
GHLPCPNMSLMIVDTGTANKRNFPCCGCCQETYPVKKRGFAFPESILDELSEGGGDSLG

SEQ ID NO: 326071 - protein, 63 aa, Zea mays
  Clone ID: MRT4577_60444C.1.pep
YAFYMAKNNCHSSIFFTEIALSTANYKELRNNGLHSFFILHELMPIFGSLTKSLLPYLLSLPS

SEQ ID NO: 326072 - protein, 84 aa, Zea mays
  unsure (1)..(84): unsure at all Xaa locations
  Clone ID: MRT4577_60445C.1.pep
NESGRARGTKPTHAGARRQSXSKATPKPKXKAXXGQRQDRENPGXTQPKRKAAQAQTASGQKSKKARTDRXRQQXHRRKGEGDA

SEQ ID NO: 326073 - protein, 172 aa, Zea mays
  unsure (1)..(172): unsure at all Xaa locations
  Clone ID: MRT4577_60446C.1.pep
MNLYMLTQTSLLLPLLLCCASDTVRCSAAPDTNTSAETDALALLEFKRAVSDPGGALSSWNASTRLCQWKGVTCADDPNKNNGASWRVTELRLAGLGLSGAIAGSGGNLTGLRGLDLCNNRVSGRIPAVDSIRGLQVLDLSTNSVGGERPXALTNCATLTRGGGLFQRGYGG

SEQ ID NO: 326074 - protein, 80 aa, Zea mays
  Clone ID: MRT4577_60447C.1.pep
MPPKDDKKMKDAGKSAKKDKDPVNKSGGKAKKKKWSKGKVRDKLNNLVLFDKATYDKLCKEVPNYKLITPAVVSERLKIR

SEQ ID NO: 326075 - protein, 113 aa, Zea mays
  Clone ID: MRT4577_60448C.1.pep
IFLPPNQNEIAAIESMIDGPMGYTPRSNLCPPQSIQRSTAHHHPQPVSRWRTDPSSSAPCLPATRPWRAADRSAQPVDLNATASHATINVPAAMHLFRRRIACTSATPVVERP

SEQ ID NO: 326076 - protein, 56 aa, Zea mays
  Clone ID: MRT4577_60449C.1.pep
ACIYSPHRLKKTTPYKKKKKKKRKDKKKKKEKKKKKKKKKHTCTKKKKKGGLSQRI

SEQ ID NO: 326077 - protein, 87 aa, Zea mays
  unsure (1)..(87): unsure at all Xaa locations
  Clone ID: MRT4577_6044C.1.pep
KHSNLFLTKKKGNEEIHQDKMEQKLXVLSVKHYLVRLVSRNMMSFFMXNXLXIRQEPRLFFISCLVNIFCGLQFTPQVCIFKSAVDS

SEQ ID NO: 326078 - protein, 86 aa, Zea mays
  Clone ID: MRT4577_60450C.1.pep
DRCKLTALMPLSSYISVIVDIVHPTKPAMAVLVVSVTWCRSTPTSSIQVILIVQVVPLVKVLANPVIPDVEVLTVPMVQVLEVLDA

SEQ ID NO: 326079 - protein, 43 aa, Zea mays
  Clone ID: MRT4577_60451C.1.pep
ASILYSQTAFLFFFFFLYFFFCCGQYYLNRSSPERFIFTKRFH

SEQ ID NO: 326080 - protein, 103 aa, Zea mays
  Clone ID: MRT4577_60452C.1.pep
AARPNATDYMGMQNDYKMLVRVFDKSTVPNFPSHEVESRENTRDSSAAGCHDQSQLLYGIPTDKYPGQPQPPTQIRGKSVGPRMAGPFARDDGSSRLATAGPV

SEQ ID NO: 326081 - protein, 79 aa, Zea mays
  Clone ID: MRT4577_60453C.1.pep
VRFIIGSGYIEFPCIRYWIPYPALCSLLLAIAHHDLSPIGLGLVRFPIGVLLCISPFIMLAQGEMMGAHRYRRVKLSME

SEQ ID NO: 326082 - protein, 363 aa, Zea mays
  unsure (1)..(363): unsure at all Xaa locations
  Clone ID: MRT4577_60454C.1.pep
RARQETQEGSRRQREEEESNREDKSLPALLWWPFTQHNLVPQDSVTVIDSRYGENFSVYKIKDKMLIPQFDACASWWTQGPDSNLQIELARDMGYAAARYGHVMFPENVHEPALHSKFYLVGKGWASRVYYSDDPLQYCSESXIMVKRNINGSYHGDTWVRKIPVIFDEVFTGFWRLGVESASELLGCLPDIACYAKLMTGGIIPLAATLATEEVFESFESDSKLTALLHGHSYTAHAMGCTAALKAMQWYRGPSTNSNLDTDHMKLKELWDGTLVKQLSSLPNVKRVVSLGTLCAIELKAEGADAGYASLYASSLVQQLRKEDDIYIRPLGNVIYLMCGPCTPRDSCTRQLLKVHRRLCALN

SEQ ID NO: 326083 - protein, 43 aa, Zea mays
  Clone ID: MRT4577_60455C.1.pep
QGLICVICLVWAPRRSDANQLHSFSSRMLKSQQTLMVHMMESC

SEQ ID NO: 326084 - protein, 277 aa, Zea mays
  unsure (1)..(277): unsure at all Xaa locations
  Clone ID: MRT4577_60456C.1.pep
MAAAQAISKGSVVSPCGNRAAPGLLARRRGAVAARMAPSAARIGGFWRKNAFPGGRLTLRTRRSRAASPTQMNMNLALGKSMRWWEKGLQPNMREIESAQDLVDALTNAGDRLVVVDFFSPGCGGCRAFHPKICQFAEQNPDVLFLQVNYEEHKSMCHSLHVHVLPLFRFYRGAQGRLCSFSCTNTTIKKFRDALAKHKPDRCSLGPTRGLEESELLALAANKDLQFTYAKEEPELIPRGDAPGEVVAPEPAKLPAAPKPLVRLGSEERSXLVSSGR

SEQ ID NO: 326085 - protein, 156 aa, Zea mays
  unsure (1)..(156): unsure at all Xaa locations
  Clone ID: MRT4577_60457C.1.pep
METFLTAVSWTKTLQLHLSTEYSEVLDMVKASTLTSLPKKKYLHGLKSLSLTLDHNHAVLATLVSCLLNSSPNLKDLRIIELRHPGSPVPLAAEFWEKKITAVGFLYHLARRNFYNRXRFLEGHPCEGICKFLVMNARVLKRMSIVYHHSQVMPEH

SEQ ID NO: 326086 - protein, 98 aa, Zea mays
  Clone ID: MRT4577_60458C.1.pep
RPPGKKFTTPTNFSNHPQKQAWGGDDEKQAQPLVKQTPKRKKEKGRGKKKIKTPLGGEQPTVRLLAVFFFEKAPKLLKKRLVLFLLRLLGFRKKRCRF

SEQ ID NO: 326087 - protein, 176 aa, Zea mays
  Clone ID: MRT4577_60459C.1.pep
VRPLEAGRVQIGLVDSGPAGKRRRRESSIARSPPSPSHSPSRGSRAPLPQTKSRRLKLAPYAQANLTWAQHAFNEKVAEVWRVAVDAFERLKGRWACLQKRTEVKLQDLPVVLGACCVLHNICESRGEGMDPALRCDIDDDETVPENPVRSDGATKARDDIAHNLLHSGRAGTKFF

SEQ ID NO: 326088 - protein, 717 aa, Zea mays
  unsure (1)..(717): unsure at all Xaa locations
  Clone ID: MRT4577_6045C.1.pep
MCTSCSRVLTRGFKCQAPKLPPSPRGRPAGSSRSIHCGFQSRIIPIPNRFEASFLRGEGEVEGAGEALLRVRRWPAPPRGGDGRGMDPEQTFLRVHARLSGTLSQLLTPRIRLVLEYLYLAGAVALFCLLVVMHTNFVQQPGCSSEFSGIEFGEAQLVQIKIISGGLWSSRGASYIMDLQNLGRSAEKILEVNGDKFNNLASKFWSTWVGPGARRSLPDLKAAGEGSVHHPLSAKESFXSSDIFVQKMVPSCCFILEEHKATFRKYPPVNXRSNWNDFLHIIKDLQLPSMDHLISTIVQWFERRSKAFEPTYLYGVEKGYFLLSEGAKTRHGVRTINITISARNPCFGNRWQQLLINSIVGYDTILTNSLVNSPGHGYLYNFQTKELYDLSYGHEPPEGPTRFGDYFVTKCGVLLMSLFVFFTTTMSVSFTLRETQSRMLRFTVQLQHHARHHLPTFQLIFVHVIESLVFVPIMIGILFFLFEFYDDQLLAFLVLTLVWLCELFTMISVRTSISMQFFPRFFLLYFLVFHIYFFSYTYGFSYLAFSATAAFMQHLILYFWNRFEVPALQRFMRSRAHIHQQTGVHITSSTIYTSTLHIARVNVRDPGTINDGLGAAREADALLVQDESTRSQQEGQQNGISEPAANNALQYQEQNPQRAGSTPAGSGSLNPFGSLLLWLLGGGASDGIVSFFSMFRDVRDHGQDYTDPPRNGNDQVT

SEQ ID NO: 326089 - protein, 118 aa, Zea mays
  Clone ID: MRT4577_60460C.1.pep
KYSYYRTDGTGTHTMIQRYGLPSDEMVCVLEVGVRRDSVRVVKKDRWNWNTYKGLRVGINVVSRAHRSRAYLLASGPDTFLAPVSTFVTIDLTWLTPDSKSDLELESAFSSLYKLLLT

SEQ ID NO: 326090 - protein, 73 aa, Zea mays
  unsure (1)..(73): unsure at all Xaa locations
  Clone ID: MRT4577_60461C.1.pep
FRLXPXPHXGSQLXXTXQRXISLMXNGRCTPPXRVGXSHDXXXELXXGXCKXTLPIXXNGXLTAGSSAXTXXR

SEQ ID NO: 326091 - protein, 240 aa, Zea mays
  unsure (1)..(240): unsure at all Xaa locations
  Clone ID: MRT4577_60462C.1.pep
IIPRDELPRQHPRRVSAPGGGASISHLRLAVQLPRPDPESPARPLSSARLGSARRHALGRDGALASAQVAAGRAPPSPGSPASVLRCGRRNRIRVPREDLSHASLGGAPSLGSPGNAAHPSLRGGHHSVGVSGCCTRRPCAVCVVRSGCRHYXRSPVFSLDRGRCPQLPGSGGRTGVLRLRARPVRSLCRQLLRPRRLAPLSLPMPPRMCCCRPLVPLSMGTTVNGDDVGCEEEMAVTLP

SEQ ID NO: 326092 - protein, 68 aa, Zea mays
  Clone ID: MRT4577_60463C.1.pep
PRARWRALKRAQGQGAKISQLRHVSHGCIFRSGHDQRKGPVVDPPVRVVAAPVRSDGGAYPTKFVTGK

SEQ ID NO: 326093 - protein, 50 aa, Zea mays
  Clone ID: MRT4577_60464C.1.pep
LYSFFLMLIKKKRKFWFFLSKIRYRLKANQIFFLFSGQFHMEFVRIKQAG

SEQ ID NO: 326094 - protein, 82 aa, Zea mays
  Clone ID: MRT4577_60465C.1.pep
STSYSQQPPATPSALVSSCLSHQHLQCSLPCHISVNVRCPHCSCVCIRSFLSTAPGIVRENVTRRCTRCQAFCVVPRHLLPV

SEQ ID NO: 326095 - protein, 87 aa, Zea mays
  Clone ID: MRT4577_60467C.1.pep
TFLKAQNWDLLFASRARTHAAGLFVRRKRRFTFLQLDNYQNIKSKNEPDLVCLYFRLEDAIRPARLGDFRLPGKRWTNRGRTLRGTP

SEQ ID NO: 326096 - protein, 89 aa, Zea mays
  Clone ID: MRT4577_60468C.1.pep
KNFPIFFFIKLSRFFPPKKLNFCIPLRAPRVTIYFPQFFPFFEFEGISFFFPRKFFFFFLPILIILPKRRLLFSFMSSLVIFCMAHPSS

SEQ ID NO: 326097 - protein, 36 aa, Zea mays
  Clone ID: MRT4577_60469C.1.pep
SASFYAIYFVNSNNQLILERTFRAGINYHDRICSYS

SEQ ID NO: 326098 - protein, 659 aa, Zea mays
  unsure (1)..(659): unsure at all Xaa locations
  Clone ID: MRT4577_6046C.1.pep
MEKGDVLVDLDKLPMKRLEAIDETGNEHYPPDTSNEEQRLAAIRRIDFSWVIEKDAKKAKKAAEADTTQQAWPWQGLMESLQQAHQELSVVIDLIGTVEANDAVAVASTTKPKSQPNEILVDMAVCAATKLQCLRHLSRYFKQSATTMEQQFQKETRFYSSLIRLQQNWKVKRQRSVGSPGSEGFMFDLVDTSQLDTTTMPRLSPLSLIPIDQDSSGTLSVQIPQKSFRSLSLRFHGDIANNAENSAVKRKEGTLTNTTTGAENDVLENDDVNKSTKHAHSILRDIHKSIFEEQVFDMVIQETFIQSQGINVTGMCEDFLQLAIGQECSLCLSLELSGQNNNAGTVGQQDHMDTNYPGNLAVATVNGKESSNKDVRGFPNPKSLEIYLLHMFHEILRKLREKSRHVVRYQSSAQAAPDDCGLLSHFCMTVAHRIFSSKVHLELESVVSRVPYLHLCSLPTWHSRTSSWSLCLKVPQPILATDRVRRPSDYSELKCKSRSQFGTKVILKDGQISLMGEGSPSIAGSLAGKPSDGRLVNSYNCDLEDLPMMLLQQVASQVIHWLHDEAVVLGMNATIDFLCLYLDLDQGETLGLVAHVDPDDTYGCVSWYLTLDHHPTEXREDVSXSPELEERRFLGYLSPELLYSTLMDLVKLCSTGVQR

SEQ ID NO: 326099 - protein, 40 aa, Zea mays
  Clone ID: MRT4577_60470C.1.pep
MAAGCPYCAVEESSREIRSVESPPAALRPIVETTGEHQAP

SEQ ID NO: 326100 - protein, 196 aa, Zea mays
  Clone ID: MRT4577_60471C.1.pep
MAVASNRPATTLLPLAALVAVAGSLFLAGPAAATGKTGQVTVFWGRNKAEGTLREACDTGTYTIVVISFLNVSAGPGNSPPSLDLSGHPVAGIGADIKHCQSKSIMVFLSLGGGQHSLPSAEAAADLADYLWYAYFPAPAPRAGVRRPFGDAYVDGLDFFLDRGGRPPPDHLDALAARLWSYNRQFRARTPVQLSA

SEQ ID NO: 326101 - protein, 101 aa, Zea mays
  unsure (1)..(101): unsure at all Xaa locations
  Clone ID: MRT4577_60472C.1.pep
ESQMCESDPREISQATPATKACQGPKHPSGPXFFPVLSKDESTALQWPSELLIFTTAEPPISYSCNPLYFDFKLSRNKDARAKGTEKPKDVGDSSKGHLQS

SEQ ID NO: 326102 - protein, 180 aa, Zea mays
  unsure (1)..(180): unsure at all Xaa locations
  Clone ID: MRT4577_60474C.1.pep
MKTRSSARGEPRRLGNAALLALMLCSVVALSLIRGRFAPIGTDXGDAIKSEDDAAAAALSVSKAAVNVDTGDSADEAAAEAAAEEKEKEEVQPKPADGSGSGSGSGGGAAKPVCYETSRRSDTCEAAGDVRVLGSTQTVYVDSLDREWKTKPFVLSTGGFTGNPFHDYTDVLIPVFITAH

SEQ ID NO: 326103 - protein, 69 aa, Zea mays
  Clone ID: MRT4577_60475C.1.pep
DTDPANYVQCLYQLDKRWLFHHHRCTFKQALRLVFNYVMFSFKRARARINQFRGGKENVCICWHWQHHM

SEQ ID NO: 326104 - protein, 93 aa, Zea mays
  Clone ID: MRT4577_60476C.1.pep
GTGRLCHIRGKMHNKVWIAPGYMVLVVLRDYQKDKAHVILKYMTGEENLLKAYGELPQTFRLTQGVYVDGPKEDEETAVFSYIQFEDEDFDKI

SEQ ID NO: 326105 - protein, 125 aa, Zea mays
  unsure (1)..(125): unsure at all Xaa locations
  Clone ID: MRT4577_60477C.1.pep
MHNMGVPIQPVNLAIRAGSRHHPTEDPEVQEVDRSQVSNNKGKKKVAQRGKSFTKEEDRAICSAFLHVSTDPIVXTNQSAAGYYTRMHRHFMENIGVXGSNRTKVSIENRWTTIQKAVNKFCGFF

SEQ ID NO: 326106 - protein, 67 aa, Zea mays
  Clone ID: MRT4577_60478C.1.pep
KFILTALTKSEENSCDFRITIPEILEDEWFKKGYKRPEFDEKYDTPLDDVDAVFNDSEEHHVTEKKE

SEQ ID NO: 326107 - protein, 135 aa, Zea mays
  unsure (1)..(135): unsure at all Xaa locations
  Clone ID: MRT4577_60479C.1.pep
TALSCFHRPCFSSIAQVIGRKGPFCKADLFHIEYSLSKDYHLPGFRDGIHYCYNYDMVACXRKKSIFRLVSSYTQHLLARMLIYPEIMVPFLDXSAQRLTERHDRFIADLRKVGISCHGFNACLLTWMDLPIMLL

SEQ ID NO: 326108 - protein, 143 aa, Zea mays
  Clone ID: MRT4577_6047C.1.pep
LHNELSAHGRARGVLSSSCGHCSGYICWEPAWRTPPHKTTTACLEFYYEALSPKWSRLIMSHLPRIPQDGLFDSPHLRLPTNWNARWASNTEISCPDVPNQWMIYTAKCSPFEHMLGYKCAFQILLLRGEPADETATPRLAIH

SEQ ID NO: 326109 - protein, 52 aa, Zea mays
  Clone ID: MRT4577_60480C.1.pep
IIINNLIFNQKIKGKTILIKACLGNLIFQGIFIFQRKLVYFFLKGKWNSFKN

SEQ ID NO: 326110 - protein, 77 aa, Zea mays
  Clone ID: MRT4577_60481C.1.pep
TPGEEKTGTTQKKNPEKKSPFFTGQNWERKKGLVSAKGTHRHKKIYAAGGEFQNCPLRGNLRTRGRTKIPCINEPPP

SEQ ID NO: 326111 - protein, 36 aa, Zea mays
  Clone ID: MRT4577_60482C.1.pep
NWDWSIVMLGTFPSGNNSSSFLSRASVRWRPTGASS

SEQ ID NO: 326112 - protein, 77 aa, Zea mays
  Clone ID: MRT4577_60483C.1.pep
TELFVLFYLGQVITGSWDKTVKCWDPRGVSGPERTLVGTYAQPERVYSLSLVGNRLVVATAGRHVNIYDLRNMSQPE

SEQ ID NO: 326113 - protein, 107 aa, Zea mays
  unsure (1)..(107): unsure at all Xaa locations
  Clone ID: MRT4577_60484C.1.pep
LWLIVWCIWNXGSPXILGNWTMXMDGDDQGFFLIXPGLNNASPSXRRLLHHWRDATDSCREYLNSTERFLPXYGPERNLTDYGLARLAFDFYELTWRTPRAAKEAPC

SEQ ID NO: 326114 - protein, 159 aa, Zea mays
  Clone ID: MRT4577_60485C.1.pep
VPSRPAGIFLSSPRSRASLSHLVLPHRPTRPSVHGLTGVPLPRSPHSPRIPSVVSWDKTVRLYDADANVLKREFMHPGAILDCCFHDDSSGFSAGADHTIRRLVLSSSKEDVLGRHDGPVRCVEYSYAADTFISMDLLLDFFSSVSFSSARYFCSLMQL

SEQ ID NO: 326115 - protein, 343 aa, Zea mays
  Clone ID: MRT4577_60486C.1.pep
MSSAAAPAAVGSGKELANPPADGITNLRFSNHSNNLLVSSWDKTVRLYDADANVLKGEFMHPGAVLDCCFHDDSSGFSAGADHTVRRLVFSSSKEDVLGRHDGPVRCVEYSYAAGQVITGSWDKTVKCWDPRGVSGPERTLVGTYAQPERVYSLSLVGNRLVVATAGRHVNIYDLRNMSQPEQKRDSSLKYQTRCVRCFPNGTGYALSSVEGRVSMEFFDLSESAQSKKYAFKCHRKSEAGRDTVYPVNAIAFHPIYGTFATGGCDGFVNVWDGINKKRLYQYSKYASSIAALSFSKDGHLLAVASSYTYEEGEKTHEPDAIFIRTVNEVEVKPKPKALAAPQ

SEQ ID NO: 326116 - protein, 69 aa, Zea mays
  Clone ID: MRT4577_60487C.1.pep
HARNTRDDTRHYVKQRADGTRNNVHDSACHTRVNATTRANNTMPRKTHESRYRRRVYTKHLLIKTLNWH

SEQ ID NO: 326117 - protein, 111 aa, Zea mays
  Clone ID: MRT4577_60488C.1.pep
DAWADAWAVQQLVSVIITRAIAAFSVRNVDPQSSLPEDEWFLDMAKVAINKQLGTSGSESELEEPVVVHDEISDSEESSISSPSTIGSEDSFASANNDDLETPVYFTDPEA

SEQ ID NO: 326118 - protein, 47 aa, Zea mays
  Clone ID: MRT4577_60489C.1.pep
VGLLLEGLRQTRALWVMSVCCQDGAEERHTWRKAPVTLPTLNSTHQI

SEQ ID NO: 326119 - protein, 128 aa, Zea mays
  Clone ID: MRT4577_6048C.1.pep
DSWDQWLVAEIDKKKQLGLADPPAPSSAYEEPNRIRLRPRKTLSHPYGNTRLPPSASMMSACYTKRDEDGYLHRPTERAQHLPVFPDTSPLSMKITPTDTPAAISDLGIYLRIYNAAARWISRVTTHT

SEQ ID NO: 326120 - protein, 40 aa, Zea mays
  Clone ID: MRT4577_60490C.1.pep
LLITDESSYNVSRSHSIAPDVACRSYAIESSYVSDLLTAH

SEQ ID NO: 326121 - protein, 95 aa, Zea mays
  Clone ID: MRT4577_60491C.1.pep
CSRAVFIFFLLRDSFGSGDGREQEASFEVVSLVKGSYELEATSLQTPCRINAPISRGLTHYTRSGGPGVAWGRLRSQRRKKLIDRGIPGRPRGTQ

SEQ ID NO: 326122 - protein, 177 aa, Zea mays
  unsure (1)..(177): unsure at all Xaa locations
  Clone ID: MRT4577_60492C.1.pep
XPXPLPPRTQPGAPGRPEQAPSPPXPXPXQXXTPPXRARPGXKGRGXAXXXXXXRXPGGGGXGGGGGXSAXXEXXXXXXGPAAXXPXPXAXPKPEETPXPXPXPPRXXDPXERAPNRGDPXXPXPPDPADTGKQPTGKPPRKPXKPSXASGGPPPAPQPPPRAKSPTAGERGPGEAQ

SEQ ID NO: 326123 - protein, 43 aa, Zea mays
  unsure (1)..(43): unsure at all Xaa locations
  Clone ID: MRT4577_60493C.1.pep
QANERQEHYLFLWLQHIRAFVXNSSNEKHIVKVFKTQNESSIP

SEQ ID NO: 326124 - protein, 413 aa, Zea mays
  Clone ID: MRT4577_60494C.1.pep
LINGLCAEGDIERALELFNEAQAKDLKPDLVVYNSLVKGLCRQGLILHALQVMNEMVEEGCHPDIWTYNIIINGLCKMGNISDAAVVMNDAIVKGYLPDVFTFNTLIDGYCKRLKLDSALQLVERMWTYGIAPDVITYNSVLNGLCKAGKAKEVNETFEEMIQNGSRPNAITYNILIENFCKINQLEEASGVIVRMCQDGVVPDAVSFNTLIHGFCRNGDLDGAYLLFQKLDEKGYSATADTFNILIGAYSSKLNMQMAEKIFGEMISKGYKPDLYTYRILVDGLCKAANVDRAYAHLAEMISKGFVPSMATFGRMLNLLAMNHRVSEAVAIIHIMVRMGVVPEVVDTILSTDKKEIAAPKILVEELMKKGPISYRAYEVLHEGVRDNKLTRKARKADASIMFVSQHHKRSYQ

SEQ ID NO: 326125 - protein, 57 aa, Zea mays
  Clone ID: MRT4577_60495C.1.pep
HMFNMVPWRTYNYGPRRLLCHLLQRLKHLGKSELFLCVAHKVCDQSPPRRRCTPFSR

SEQ ID NO: 326126 - protein, 181 aa, Zea mays
  unsure (1)..(181): unsure at all Xaa locations
  Clone ID: MRT4577_60496C.1.pep
RTDSPSKVISMKXNMLIEYALRPETSNGEDSDDKIRVFSSTVNVGTNGAGSSDSHPKSVEKESFELRNEAHAIASMADDAEQSALQMSDSFSFLNNSDPANYIKNHSAYDDLIEHINLQMKSLEYEIEQFINSQSVEEVGSEKQRSDKWERLSDIQMLIKETREKIARILGMIVEETESGT

SEQ ID NO: 326127 - protein, 148 aa, Zea mays
  unsure (1)..(148): unsure at all Xaa locations
  Clone ID: MRT4577_60497C.1.pep
TXXXDXXXRNPXSXXGTAGAADAXXASDTXAXANTXXESRGGGGAXXXSAAXPPGXRKEEXTXEGDEGNXXXXTGQRSXXREERXGDRGHHXERXXASXXGRGHXPEDAAXDGXRAXXDAGRXTXTXPKGAAAEKPNEAPPPAEAADG

SEQ ID NO: 326128 - protein, 73 aa, Zea mays
  Clone ID: MRT4577_60498C.1.pep
AQCAGARPNWVASTSWQACTLLLVYMVYMYYRFNQLASLMPCYRLCSNNLLVAGCQHAAPSAGSLLQLRRWVP

SEQ ID NO: 326129 - protein, 97 aa, Zea mays
  Clone ID: MRT4577_60499C.1.pep
IREEINIGGMVGYCRCLVPRHWGWGRSEHGVFVRHLYSLLGVFRAWGIRPSSLFTVGGVPSTECSSIGDENTADILTKSLSNTKFKHCLNLVGVRGA

SEQ ID NO: 326130 - protein, 133 aa, Zea mays
  unsure (1)..(133): unsure at all Xaa locations
  Clone ID: MRT4577_6049C.1.pep
LGKPSDGRLVNSYNCDLEDLPMMLLQQVASQVIHWLHDEAGVLGMNVTRDFLCLYLDLDQGETLGLVAHVDPDDTHGCVSWYLTLDHHPTEEXEDVSXSPELEERRLLGYLSPELLYSTLMDLVKLCSTGVQR

SEQ ID NO: 326131 - protein, 503 aa, Zea mays
  unsure (1)..(503): unsure at all Xaa locations
  Clone ID: MRT4577_604C.1.pep
MGSDADMEDYGFEYSDEEPEEQDVDIENQYYNSKGLVETDPEGALAGFDQVVSMEPEKAEWGFKALKQTVKLYYKLGKYKEMMDAYREMLTYIKSAVTRNYSEKCINNIMDFVSGSASQNFSLLQEFYQTTLKALEEAKNERLWFKTNLKLCKIWFDMGEYGRMSKILKELHKSCQREDGSDDQKKGTQLLEVYAIEIQMYTETKNNKKLKELYQRALSIKSAIPHPRIMGIIRECGGKMHMAERQWDEAATDFFEAFKNYDEAGNPRRIQCLKYLVLANMLMESEVNPFDGQEAKPYKNDSEILAMTNLIAAYQKNDIMEFEKILKSNRRTIMDDPFIRNYIEDLLKNIRTQVLLKLIKPYTRIRIPFISQELNFPEKDVEQLLVSLILDNRIQGHIDQVNKLLERGERXGDEEVQCHRQVEYSAEVHLPNIVQQSLMRRIVXCMLCTPRIVDSLFWGFEGNCKKELYGNACSRILDLGKMRCPCKHLILVFSVILTRRMSM

SEQ ID NO: 326132 - protein, 75 aa, Zea mays
  Clone ID: MRT4577_60500C.1.pep
APYLGGGAVNLSNANLPAHLIPLLPMGSVSPEQETQGWERDLSGGNSRLMGFFQVVRGPDANISLSHDGCLARVP

SEQ ID NO: 326133 - protein, 105 aa, Zea mays
  Clone ID: MRT4577_60501C.1.pep
ASLLLFPEPKQPKRKPQFLQAAATAFAPFCSKQHHKIRLLLVLLAVGAAAVSVGILHKMRERRVLAVLLQERDQQLISFQVLLEVPGMHDSFSCIRRVREFFFFA

SEQ ID NO: 326134 - protein, 253 aa, Zea mays
  unsure (1)..(253): unsure at all Xaa locations
  Clone ID: MRT4577_60502C.1.pep
MSAAIATHPVDRKQTSTSLNTPSQVAAPKKTTPTAIVSLFSGAVAGGVEATATYPFEFAKTRAQLQVGAGGSKNPFTVLSQVAKTDGVRAIYTGCSTLIVGTAFKAGVRFLSFDSIRNRLADERGVLSPARGMLAGMLAGAVESVVAVTPTERIKTALIDNAKSGGQRYNGGFHASRVILQTDGIAGLYXRGLVSTTAKQSATSAVRMGSYMVLKEFARRKNSSRQRTPFGMVPGRGVITVYATQPFDTIKTQ

SEQ ID NO: 326135 - protein, 66 aa, Zea mays
  Clone ID: MRT4577_60503C.1.pep
MEGIEEDVRLCANMLLERQAIGTAEHGACDDKDYKEPATLPVVEPGELKCWPLYLAVICVFAATLL

SEQ ID NO: 326136 - protein, 116 aa, Zea mays
  unsure (1)..(116): unsure at all Xaa locations
  Clone ID: MRT4577_60504C.1.pep
LNPAVNPDDHLLPLIQLSTEYSNDHHHLPLLLSFNLYPAVNLDDYMLLPFLLLSTQLRASFLTQLLTLHLYLHFYHNPAAILQLLQLLPXVQLAVTDAATYYQQHFIDHIICDTVY

SEQ ID NO: 326137 - protein, 33 aa, Zea mays
  Clone ID: MRT4577_60505C.1.pep
TLLADRLRIISRAKSHKTTYPERFLSRAQILPS

SEQ ID NO: 326138 - protein, 68 aa, Zea mays
  unsure (1)..(68): unsure at all Xaa locations
  Clone ID: MRT4577_60506C.1.pep
MANPRVFFDMTVGGAPAGRIVMELYANEVPKTAXENLRALCTYERDWGGGGVPFHSQASRVHWMVRRG

SEQ ID NO: 326139 - protein, 566 aa, Zea mays
  unsure (1)..(566): unsure at all Xaa locations
  Clone ID: MRT4577_60507C.1.pep
AIRXCGVXQGGRCGIYGANSPEWVISMQACNAHGIYCVPLYDTLGAGAVEFVLCHAEVQIAFVEEKKIGEMLKTFPNATKYLKTLVSFGKVDPGHKEIVEQNGLSIYSWEEFLQLGGKEKFELPPKEKDDICTIMYTSGTTGDPKGVLISNKSIVTIVSAVDEFLSNSNEQLNMDDVYISYLPLAHIFDRVIEEVFIRHGASIGFWRGDVKLLVEDIGELKPTVFCAVPRVLDRIYGGLQDKITAGGFLKKTLFNVAYKYKQGNMLKGNKHEEAAAMFDRLVFTKVKRGLGGRVRLILSGAAPLSRHVEEYLRVVTCSHVLQGYGLTETCAGSFVSLPNNMSMLGTVGPPVPYVEVRLESVPEMGYDALSSETPRGEICIRGDTLFSGYYKREDLTKEVLVDGWFHTGDIGEWQSDGSMKIIDRKKNIFKLSQGEYVAVENLENIFGQTPAVDSIWVYGNSFESSLVAVVNPNTQALERWAESNGVTGEFATICEDPRAREFILGELTKMGKEKKLKGFELIRAVHLDPAPFDMERDLITPTYKKKRPQLLKHYQTIIDGMYNSMK

SEQ ID NO: 326140 - protein, 34 aa, Zea mays
  Clone ID: MRT4577_60508C.1.pep
GLEGGFKKVTCRFLKGRQRNNKINTGTAYVFLVM

SEQ ID NO: 326141 - protein, 317 aa, Zea mays
  unsure (1)..(317): unsure at all Xaa locations
  Clone ID: MRT4577_60509C.1.pep
NMSMLGTVGPPVPYVEVRLESVPEMGYDALSSETPRGEICIRGDTLFSGYYKREDLTKEVLVDGWFHTGTIGPCSSIPPVSDRTCPCQHHCESRKCQGKENVKGTGAFVAVLCQQFALTPGRSLITVLKEILIXLPSEMPLKFSQVXFVHCQILIFTAGDIGEWQSDGSMKIIDRKKNIFKLSQGEYVAVENLENIFGQTPAVDSIWVYGNSFESSLVAVVNPNTQALERWAESNGVTGEFATICEDPRAREFILGELTKMGKEKKLNGFELIRAVHLDPAPFDMERDLITPTYKKKRPQLLKHYQTITDGMYNSMK

SEQ ID NO: 326142 - protein, 193 aa, Zea mays
  Clone ID: MRT4577_6050C.1.pep
LCLKVPQPILATDRVRRPSDCSELKYKSRSQFGTKVILKDGQISLMGEGSPSIAGSVAGKPSDGRLVNSYNCDLEDLPMMLLQQVASQVIHWLHDEAVVLGMNVTRDFLCLCLDLDQGETLGLVAHVDPDDTYGCVSWYLTLDHPTEEGKMSAGSPELEERRLLGYLSPELLYSTLMDLVKLCSTGVQRCDSD

SEQ ID NO: 326143 - protein, 112 aa, Zea mays
  Clone ID: MRT4577_60510C.1.pep
REEDLCVNLILDCLGEASALEENWHKSCAIPIKCEVELLHEGCNILQCPPSSFPCTYLGLPISDKKLSRNILMNWVVKIADRLPNWKARLLNLAGRTALVRFVAFSHPSPRV

SEQ ID NO: 326144 - protein, 82 aa, Zea mays
  Clone ID: MRT4577_60511C.1.pep
AHQRYFNLITLYYQGKQGRGNLRRGRRHRIAGEGRDALRRRDTVQRAAVALEGVHNIHGGDGLAASVRRHRRNSAGCHCRGR

SEQ ID NO: 326145 - protein, 50 aa, Zea mays
  Clone ID: MRT4577_60512C.1.pep
PTRPGGRIRCMQVWPAYGNKKFETLSYLAALVTDDLVKQVDYLVGNGWIP

SEQ ID NO: 326146 - protein, 84 aa, Zea mays
  Clone ID: MRT4577_60513C.1.pep
ASEAPDQAKQLPLQFLQQGLSRCFCFSCSPSNLTCSFAYPTPPPPLTSPFTSAGDQTNITPSRIHSPRCWCTRRATPPTFTTSA

SEQ ID NO: 326147 - protein, 62 aa, Zea mays
  Clone ID: MRT4577_60514C.1.pep
KVANTKKTKGQKRIPDQDSRNWYNCIASSITPKIARRANTCQPESNYTRLKTKHRKKTNGDL

SEQ ID NO: 326148 - protein, 97 aa, Zea mays
  Clone ID: MRT4577_60515C.1.pep
RPGTGARIGCLQNYPADVQSMALEQVNLSPRLAAAVPSPRLPIPSPRPSPKIRLSPSLHYMGCPTPTGRRSSPKQQQFMGFYTAPPVALTLPKHKVK

SEQ ID NO: 326149 - protein, 140 aa, Zea mays
  Clone ID: MRT4577_60516C.1.pep
KKGPPNFFYPPCFWGGGEKGFKNKKPRPEPPFLKTWRRGCLNRGPLWGGYINTPPPLGTSVFLNPHMHGGGHINLIHLPQRKGGPLFRARAPSQTVSNVCFPPPQKDYLGNWDFLRPPPPLGGPSPQNFSGGLKPPFFPI

SEQ ID NO: 326150 - protein, 49 aa, Zea mays
  Clone ID: MRT4577_60517C.1.pep
NACESYTLTYLALATGSYTGKSEKTRTTHGTGTMTYTEATLQQHYVIRL

SEQ ID NO: 326151 - protein, 251 aa, Zea mays
  Clone ID: MRT4577_60518C.1.pep
PLVFAIKKKKKKKKKKNKNLVPNSASRNFPGILDLKCSPVEPVFVSAAASRRHGSTTFERTGFANLTVWHMKTWKPLTVLPLGEDPPAITSLCFNHNGKILAASATDGMIHMFDMSAGLQITGWPAHDSPVSSVLFGPAETSIFSLGSDGKILEWSLHNQGQILWSRDCSRFCNPESFKTRMHEIALDSNGKRLLVTSGLVRAPIYQVQGHESELRTLPHSSSITSVDWHPTLPMYITGSADHSVRVTSIL

SEQ ID NO: 326152 - protein, 89 aa, Zea mays
  Clone ID: MRT4577_60519C.1.pep
MSCALCPSRYILYLMPSLVCTYVLAHSILLLSKAAFFNKDIIGHAMKLISLAPPFKDPLYLENPPKLYSLTSFCIASVLTRIKSTACQC

SEQ ID NO: 326153 - protein, 39 aa, Zea mays
  Clone ID: MRT4577_6051C.1.pep
TKPVDLLSLLISQQIDESDTQVNRATKMPQLHHWSQFAA

SEQ ID NO: 326154 - protein, 133 aa, Zea mays
  Clone ID: MRT4577_60520C.1.pep
SQISPSGGRHGRASCAAAPSTWGALFTVIVCRLLAASSATWSGRGAASSVGPARHPKGSTDRSLMSFLRKSPWLLARSGAALAVPYLSSLCFSALFLWHVCRVFSPLGAPPLMALRSLRRRGDRQCSLLAMSG

SEQ ID NO: 326155 - protein, 178 aa, Zea mays
  Clone ID: MRT4577_60521C.1.pep
FPPCRKSISGAEMYDPENDVWTSIPDLHQTHNSACSGLVVNGKVHVLPKGLSTVQVLESVKLGWDVKDYGWPQGPMVVVEDVLYVMSHGLVFKQKGDTWKMVASASEFKRRIGMAMTSLSDEVLIVGGVIGPDRLNWDIKPLSDVDALTVGNDRPAWRSVAPMTRCRGTILGCTQLTI

SEQ ID NO: 326156 - protein, 50 aa, Zea mays
  Clone ID: MRT4577_60522C.1.pep
KSGTKSIAIAPNFKVQVQLGGYKSRPDYGSLCFSSNPEVPSCDTFPDAWT

SEQ ID NO: 326157 - protein, 70 aa, Zea mays
  Clone ID: MRT4577_60523C.1.pep
AADTNIGFVSRYGMRLYQGAGGIAPLGDSYFFGVLPITFYNAYIEVCTPDSIGKPTNQCKQTRKQQIDSE

SEQ ID NO: 326158 - protein, 97 aa, Zea mays
  Clone ID: MRT4577_60524C.1.pep
SVVAAEVLRAEAILKSFWITGWLILSCVSIFDLFNWTRPLALRNNRWLIHTFLQLLSVSKRPSVVGLSIFAQTGTLLPCPRGKMELKKKVPVRAVAR

SEQ ID NO: 326159 - protein, 64 aa, Zea mays
  Clone ID: MRT4577_60525C.1.pep
NELEILVILCNRTDNIFMRKQKEQLSSHFNCIAHEKKAILYCYITIQKEKETYHIVQILLSVGQ

SEQ ID NO: 326160 - protein, 101 aa, Zea mays
  unsure (1)..(101): unsure at all Xaa locations
  Clone ID: MRT4577_60526C.1.pep
TAGTHLRDXLPALEFYFAVNRQLSDRKLRTLATASPTSTLSAVSSSSTLPDIPSPRSPNAGATANGGADSWKIFTPGDNPQLVKTRLRHWAQVVACSIKHG

SEQ ID NO: 326161 - protein, 51 aa, Zea mays
  Clone ID: MRT4577_60527C.1.pep
RPGGTINITGTAMGQAYPRLALVALMAVGTGGLLRHSERERRRTRCMGEVT

SEQ ID NO: 326162 - protein, 130 aa, Zea mays
  Clone ID: MRT4577_60528C.1.pep
AHGQQNRIYRSFFLYLRTEKVEHQEHKHTESRKDEEPVRAEQLLLLGGVGFALLAEDADGGEEPAIILHPLEHTAAGLLLSRPASPPWGSARGPCRRAPTIRTPYPCQRNGNGDGGRNTAAATKESQPGR

SEQ ID NO: 326163 - protein, 97 aa, Zea mays
  Clone ID: MRT4577_60529C.1.pep
LSWAFEMFVRLVGAGAIQGRAGRLLPRNKLVYNLSSDEVIQQQHVVATFSLFDLFLFFSVAGRLRLQCSCATPPQLGYRAPCISCSRTFLRYKKKKK

SEQ ID NO: 326164 - protein, 82 aa, Zea mays
  Clone ID: MRT4577_6052C.1.pep
SVTKAPQGHLFTLKQFKSPQLHHLFLISLQLLFKSPQLPALFLNQPLKQQIGAWQAMLDMYFRRGFWIDRYLYGIMNFYMER

SEQ ID NO: 326165 - protein, 119 aa, Zea mays
  Clone ID: MRT4577_60530C.1.pep
ILFGSVGLIVFFFEHTEELYTIILGYVWLESQLEWSGFILVFENRAVLFCIWQIEQSCSIFFWLKNIIEWRHSILCLVGEPYECRGKEREKTAPVLGALASGPFGGAGAFQLFMVNFNM

SEQ ID NO: 326166 - protein, 71 aa, Zea mays
  Clone ID: MRT4577_60531C.1.pep
SRVHTRVYNALYYTQTVIWNGPMGVFEFDKFAPGTDAIAKKLAELRTTKGVTTIIRRRHSVAAVQKAGLAH

SEQ ID NO: 326167 - protein, 141 aa, Zea mays
  Clone ID: MRT4577_60533C.1.pep
RPSMKVLWGSFEAAAAAAVACEVTDSLRAFEMSMNTWAEWLERHVDRARTGLFFTSISPTHLHSDEWEEAAGSGSGAGYHRCYGEMEPITADGHRGRDTDPAFARAVDAHVARLGARGVAVRVLNVTQLSEHRKDAHPYVH

SEQ ID NO: 326168 - protein, 25 aa, Zea mays
  Clone ID: MRT4577_60534C.1.pep
STAPLNKLGGRTCVVHCSPVGVFSH

SEQ ID NO: 326169 - protein, 121 aa, Zea mays
  Clone ID: MRT4577_60535C.1.pep
RPAPDPYYLAHSVSLLPLSPVASTIDRRSRAQTLYCTCIDKLEPSPSMPSVHNIRTPHRGLPPWYRTCALPLPRAHLSHNPGTKRDDQHQLGHPLRCDSAPQHDSSCCTPCTWCSHARSWL

SEQ ID NO: 326170 - protein, 42 aa, Zea mays
  Clone ID: MRT4577_60536C.1.pep
NSFLSSLQKLWISTSDAAMISCAPTWTTTVYSFCFVSNCKPF

SEQ ID NO: 326171 - protein, 35 aa, Zea mays
  Clone ID: MRT4577_60537C.1.pep
SYSKSIYNPPTFLWLRRFSMSVSGVAQKRSKGWSL

SEQ ID NO: 326172 - protein, 83 aa, Zea mays
  Clone ID: MRT4577_60538C.1.pep
SRMGFWYSPFPRRVPATQHSSIFLKVIRGLSCRLARKFVSHAGSDQCSMSKSTTKVVPGHMNSKGFVLEKIVPKLDFLLKLEQ

SEQ ID NO: 326173 - protein, 73 aa, Zea mays
  Clone ID: MRT4577_60539C.1.pep
HRAAQEEGLKASSKPSDHEPSLDSASQAIRWLSVGDTSLCSHCEAPAYRISAGLAFDAPPAHTMNVTGVSLTQ

SEQ ID NO: 326174 - protein, 101 aa, Zea mays
  Clone ID: MRT4577_6053C.1.pep
IRLEKHASYYVIPGLSMRILKPCYNHVHLKVQGDNRLYPYFMNCIGSMDGTHVPVSRPPDQPAPSRNRSGVVGLDTVQLAGNIGHMETVLHSKMRADMSYI

SEQ ID NO: 326175 - protein, 417 aa, Zea mays
  Clone ID: MRT4577_60540C.1.pep
MLQCIFLLSDSGEVMVEKQMAAHCVDRAICAWFWDYVVAHAAGDPSKVLQVVVSPTHYLFQIYRNGVTFLACTQVEMAPLMAVEFLSRVADVLTDYLGDLNEDIIKDNFVIVYQILDEMMDNGFPLTTEPNILKEMITPPNIVNKMLNVVTGKSSTLGSKLPDAAASFVPWRRTTVKDASNEVYVNIVEELDACVNREGVLVKCEAYGEVQVNCSLPGVPELTMSFANPAIINDVTFHPCVRFRPWESNQILSFVPPDGQFKLMSYRVQKLKKTPIYVKPQLTSDSGNCRVSVMVGIRNDPGKPIDSITVQFQLPPLIVSADLTANYGTVDILADKTCLWTIGQIPKDKAPALSGNLRLEEGLAQLHALPTFQVKFRIMGVALSGLQIDKLDVKNTPNAPYKGFRAQTQAGKYEVRS

SEQ ID NO: 326176 - protein, 390 aa, Zea mays
  Clone ID: MRT4577_60541C.1.pep
MSSVAPALVHHRGVSGRAILPLHHGECRVPPGACFMGTSPTLGPMRVSLVCNASPNHHRPRNSDISRQQKGGSSRGKGKSYQDKDDSENIDEFDSDIMFSKNGPPISLASNSRPQATSAPGEREKEIVELFKRVQAQLRARGKSREDKKPEHAKVQGERGSVDSLLQLLRKHSVDQRRKNGDDKEQNSDVLRRGNDSGNRQGSTVFGTKSDIQEEKKKPPPAPFIRPASNFRRRSPVPGVKFQPVINADLDTDDDRKSIGSNAVDAVQKAKTALDERTATDEPDSMSPYEADSVIEPGNISLNDLDDILHDDEEFDADEPDDEYPEPSLGISDVTDTDESHENDSTPTGSADLSSLKVAELRELAKSRGIKGYSKKKKNELVEVLSSSMD

SEQ ID NO: 326177 - protein, 71 aa, Zea mays
  Clone ID: MRT4577_60542C.1.pep
SIRFLLICGPTVVEHIQCVSIATPLILMQESLRKCESMKLVEIFVPEWKPLFCMFEEPHESTDAEQQKLEY

SEQ ID NO: 326178 - protein, 55 aa, Zea mays
  unsure (1)..(55): unsure at all Xaa locations
  Clone ID: MRT4577_60543C.1.pep
KTTFYWDRGFEAFCQTKHDLRKPTVKNFSELGVGSPKPPLNIIYTPHXYTRPFPT

SEQ ID NO: 326179 - protein, 55 aa, Zea mays
  Clone ID: MRT4577_60544C.1.pep
SIPICRHTGKNSLFILWVGLEVWTSKIRRIPSMEARPSQAIRMHVANLGIVSCSW

SEQ ID NO: 326180 - protein, 41 aa, Zea mays
  Clone ID: MRT4577_60545C.1.pep
SVRVERVSVICLFFFLFCFFFFFWHKHFYNGLSLRVCGRVG

SEQ ID NO: 326181 - protein, 57 aa, Zea mays
  Clone ID: MRT4577_60546C.1.pep
LIGKNYLDWDPLTPHFEKGFVSYDLLGFLLTHFSHFFHPIVSRQVKKIGKVVCQLLS

SEQ ID NO: 326182 - protein, 131 aa, Zea mays
  Clone ID: MRT4577_60547C.1.pep
PHCWHRITAFKLTIDGSYWINSGSNPTHTIPDRTGVRWPSSSGCGYDGACAEGSGCQARHPGAGEEQERGLRAWVPRRCCGPDLRSSRGKHRVAVIVLDGRPDEGLAVCVAAGHEEEEDAMDPGELGFEGG

SEQ ID NO: 326183 - protein, 129 aa, Zea mays
  Clone ID: MRT4577_60549C.1.pep
VNSPQGKKIPSFQSRRINTTNSTALYKTLDLDPQLKGRTERSYESKATFCITITGPGSHEANEPPIKPEEMTPLFSLQTRRKNLQLTSCWNSSASIQDQEQEIPRTAALRLRPRRQRRSDPPSFLLVPN

SEQ ID NO: 326184 - protein, 98 aa, Zea mays
  unsure (1)..(98): unsure at all Xaa locations
  Clone ID: MRT4577_6054C.1.pep
ERKEEEKSVXHEYGDSDEKAINKKDKMVKDMKKKEDDGDSGKAEKDKNDKKAKEKDGSQFKGSSGEKQEKIKDKKGTGDGKNVGEEYKLKKIVIKDKD

SEQ ID NO: 326185 - protein, 58 aa, Zea mays
  unsure (1)..(58): unsure at all Xaa locations
  Clone ID: MRT4577_60550C.1.pep
PCWRVGAPLGLVQSSNGRPHRGWQFNPLPPKALSFGGKLFPSCCGGGXRSPYSFDNPP

SEQ ID NO: 326186 - protein, 279 aa, Zea mays
  Clone ID: MRT4577_60551C.1.pep
KDSVGVKPVNLRENKTAPVDKDSVSVILESSTENKAHQKTHNSIGEGLVTLKNAKESHGTDKCLELPSMSGASTKLDVFKDVSGSFPEARSSVNASDLGDHGNISPNFSPLAGTSQEDTTSKLVSEVSCDGGMQHTSRSNEKLQESSDVSDVAISQGSNIKSFILEELKESDVCDAFMRGPNGKGQEAENYGREKISFIDGSLLLRPHFHNKGAKMNVISEEVQKVKNEEKLGPCTHPEVTIVDLDGDCPKDLNDVILQNDDFADPEESNMPNVFEVAS

SEQ ID NO: 326187 - protein, 310 aa, Zea mays
  unsure (1)..(310): unsure at all Xaa locations
  Clone ID: MRT4577_60552C.1.pep
ARDLLSMSIGTLTLEKIQELNAEKQKLVDDVVELMNTSPKSLWLKDLDAFEKELDVLDQMDLAEEVQREKRIKEGKKGGSKAAPKKQPKKAAPIKLESSTEDNAAEPVVAKRGAQQKKAPKKAPVDEEEVDMPSLKDRLAAFNINDSSPPDHSAMETETTEQPAQKKGRGKKPAAAAVKPKAPAARKRAPTQGGKATQKKIDEMLKVTEDNTSSALSPEKKVRKXMRPSPFNKKSGSILQRGSTAASASSETIAEASPPSGSSEEPVAAAKPRRTARATKKHVYISESDPEDEVVELSDDSDFDLDADSD

SEQ ID NO: 326188 - protein, 45 aa, Zea mays
  Clone ID: MRT4577_60553C.1.pep
GGGWGVVFFFMPQGEKGGATNIAVTIIKRGSSSSSLIHHDHHTYL

SEQ ID NO: 326189 - protein, 71 aa, Zea mays
  Clone ID: MRT4577_60554C.1.pep
SLIIGREKGVNVSTRGPRLWGTPLPWSANEHVHVHFTYNKECAKNHHVRLYNSIRSNVEWFVALNVISFHA

SEQ ID NO: 326190 - protein, 74 aa, Zea mays
  unsure (1)..(74): unsure at all Xaa locations
  Clone ID: MRT4577_60555C.1.pep
QSSTLIHQVPLGHLMAPNRLGQQPPQLGLAKLGCYXLEQAVLSFQPLTALDSGSXLQQQQLPIQQLPAAYPQQF

SEQ ID NO: 326191 - protein, 180 aa, Zea mays
  Clone ID: MRT4577_60556C.1.pep
MEEVEQQLTKKQIEEFREAFSLFDKDGDGTITTKELGTVMRSLGQTPTEEELQGMVDEVDADGSGAIDFQEFLTLMARQMREASGADEEELREAFRVFDQDQNGFISREELRHVLQNLGERLSDDELAEMLREADADGDGQINYTEFTKVMLAKRRNQELEDHGSESSHSKRLCPSCTIL

SEQ ID NO: 326192 - protein, 62 aa, Zea mays
  Clone ID: MRT4577_60557C.1.pep
MFVPPASKKPLHLMSQFNVFAVMSFTYPFSCGASVILRFASLFNSFSSVAVLMYLLNNPGPC

SEQ ID NO: 326193 - protein, 35 aa, Zea mays
  Clone ID: MRT4577_60558C.1.pep
HMDPRDSAMGMRCSPNSQHIECRTYLVTGNSLHII

SEQ ID NO: 326194 - protein, 40 aa, Zea mays
  Clone ID: MRT4577_60559C.1.pep
TWGAPGLSNRSFLRRHYLVLNPTWRPFQSTSQPTLPFGPF

SEQ ID NO: 326195 - protein, 224 aa, Zea mays
  unsure (1)..(224): unsure at all Xaa locations
  Clone ID: MRT4577_6055C.1.pep
MAEQPQEGGASPKHESLMEKLADKLHVGGGKGDSSSSDSDXRRAAEAKAKVFRLFGREQPIHKALGGGKPADVFLWRNRNISAGVLGGATAIWILFELLGYHLLTFVCHGLIFSLGVLFLWSNASSFIHKSPPKIPEVVIPEDLVVNIAVSTRYEINRAFANLRQIALGRDIKKFLMVIAGLWLLSVPWSCCNLLTLVYIXVVVVLHTVPVLYEKYEDQIDTYG

SEQ ID NO: 326196 - protein, 77 aa, Zea mays
  Clone ID: MRT4577_60560C.1.pep
NFEVTCAQTKKGQVPSLDECTNHNFLLGANCLNKTRDLELAMTCKEITFHVLYQWKDGYLLTCWSITRLKPLRPFLF

SEQ ID NO: 326197 - protein, 122 aa, Zea mays
  Clone ID: MRT4577_60561C.1.pep
GVTTKTGGVKGPVKGGVHLAFRMGKSWERRSVRGFLGLSQLAKRGCGERGISWEKAGVCKGRSCKKTGSEMKLGGNKEEVRSWKEGEVRMDTIKGAPFFFFFFFFFFFFYFFFFFFPFFFFL

SEQ ID NO: 326198 - protein, 48 aa, Zea mays
  unsure (1)..(48): unsure at all Xaa locations
  Clone ID: MRT4577_60562C.1.pep
GGGTMAQGGGLPNIXPVLLPKKLAEKVSIVGNKEAKLPKKAAKSPKKA

SEQ ID NO: 326199 - protein, 59 aa, Zea mays
  Clone ID: MRT4577_60563C.1.pep
SGGHLLTRSRLLRRHVGVISWPLAEHLYLAPPTAGSRAEVPLSARRAATTTAVESPAEP

SEQ ID NO: 326200 - protein, 203 aa, Zea mays
  Clone ID: MRT4577_60564C.1.pep
MAHSRSHHHLLLLPAPMATACLLLATLLALCAAPAPTHGARVLMPGGAGAVTKAQQGGTGSGSNATADEYLAPHNQARAAVGVAPLRWNAGLASAAAGTVAQQRRQGGCAFADVGASPYGANQGWASYRARPAEVVALWVAEGRYYTHANNTCAAGRQCGTYTQVVWRNTAEVGCAQVCCATGATLTLCLYNPHGNVQGQSPY

SEQ ID NO: 326201 - protein, 191 aa, Zea mays
  unsure (1)..(191): unsure at all Xaa locations
  Clone ID: MRT4577_60565C.1.pep
MLHQANLSLTPSLMWTPIFXELLKFPEVITIVPAEPGLTCVNSDPLIDFMVNNSLYHILYILTHVKNRLKLELDLRAYDNIYIPLEIVIESSREYPQTIVLSVLHETGDLVLDRMRPLATLIRQPDTTNLEPNLSVSTEAKADHLSSNAADLITVPSPSPCETASPLQSSLLLACRHPCQLTLHLVSLVQL

SEQ ID NO: 326202 - protein, 144 aa, Zea mays
  Clone ID: MRT4577_60566C.1.pep
GGPPPASRRACGKKNHWGSRPQVLKEKTTPVVFAAGGAWFSLAPSGGGAVAGGAPAAVAGGAAPPAEEAKKDEVFLEEGCFDFFFVFRLFYYPPSPCLLFLPRVVSHSLVVPPLYCCLLLLRFFVFLLVLYGCASSRFFKLNGP

SEQ ID NO: 326203 - protein, 72 aa, Zea mays
  Clone ID: MRT4577_60567C.1.pep
SHTTASLLEDYPQGGGCNGGQLGNYREERRHTPQDLLSLGRKALVGQWCANPRTSMGRTPGKKMTSLSQDPS

SEQ ID NO: 326204 - protein, 50 aa, Zea mays
  Clone ID: MRT4577_60568C.1.pep
HYTCFHYCVVICLRIALIHSPTILCEKITIPDPYPIHEQINTCMHSFKYS

SEQ ID NO: 326205 - protein, 85 aa, Zea mays
  Clone ID: MRT4577_60569C.1.pep
MGRDEVSALFDADEPSFAEVRGAFAVFDADRDGFIGAEDLQCALARLGVRQDAAACRAMVVAAGGGRDARMSLFQFVRFLENGLC

SEQ ID NO: 326206 - protein, 242 aa, Zea mays
  unsure (1)..(242): unsure at all Xaa locations
  Clone ID: MRT4577_6056C.1.pep
DLNTLSSVIVPTTVLIAVLYFVAADVFLWRNKNISAGILGGATAIWILFELLGYHLLTFVCHGLIFALGVLFLWSNASSFIHKAPPKIPEVIIPEDLVVNIALSTRYEINRAFANLRQIALGRDLKKFLMVIAGFWLLSVLGSCCNFLTLVYIGKGSKQLLERTLLFTPPEMYLIGXLGRLLFCKKTVFVVLHTVPVLYEKYEDQIDSYGEKGWAEIKKQYAVFDEKVLSKVSRGPAKDKKH

SEQ ID NO: 326207 - protein, 78 aa, Zea mays
  Clone ID: MRT4577_60570C.1.pep
RLLLRFIYCSRLTFQFVLDRIAFCTMIARVLLQLIWTVKKLYPMITLCVPIYLVTALRQTKKKKKKKKKQALPPVTTA

SEQ ID NO: 326208 - protein, 59 aa, Zea mays
  Clone ID: MRT4577_60571C.1.pep
QYCASIGINCQILYEGKSYLLPTCFLMSSFLVVDAKGGEIVGTKAIKCYQTPNTTNLKL

SEQ ID NO: 326209 - protein, 81 aa, Zea mays
  Clone ID: MRT4577_60572C.1.pep
FYYWKEKAEDKYKEPQNGGRERGRRCLNRRSLVGRPFAACSIFLLGMLAASLVRPVVTLLHASPMGLCVDAMTAVLPNLRI

SEQ ID NO: 326210 - protein, 65 aa, Zea mays
  Clone ID: MRT4577_60574C.1.pep
TSHYLFALGSYRAFYLLNWIYRYFDDGFHEWIAIFAGIIQTVLYCDFFYLYVTKVIHGRSFRLPA

SEQ ID NO: 326211 - protein, 42 aa, Zea mays
  Clone ID: MRT4577_60575C.1.pep
IPFFPGSGIQGRYLKIIGKSGFEALPWVRYIPMAGKYELRLI

SEQ ID NO: 326212 - protein, 60 aa, Zea mays
  Clone ID: MRT4577_60576C.1.pep
GFHPMNCPQVDPTMVTHHSDDLLKARDETLRTDQIQLIPVLTDLTCVHSPFRSYDHHHIS

SEQ ID NO: 326213 - protein, 131 aa, Zea mays
  Clone ID: MRT4577_60577C.1.pep
LFGVAFNSVVNTKKGNTRTKPLPLSKRLRLEAQRVLKERVQDIADKKGIKLRFCNLRECESHIWSLDSPCEKTRAEIGWPQGVPFVHPHDLPNKAKLGFLEAYEPGWTASQQEMEEAASVIFDVLPALDMF

SEQ ID NO: 326214 - protein, 112 aa, Zea mays
  Clone ID: MRT4577_60578C.1.pep
LVPEDRLTRLPRWSPFACPSSRKVLYPPFAPWGESTLYCPRLIHDPTPKPQHESLGYSLVSCRSVEHQVHRAPHIPGTHYTCTQLINVLGAHTNGSVSMIARWEKIDHGKHH

SEQ ID NO: 326215 - protein, 75 aa, Zea mays
  Clone ID: MRT4577_60579C.1.pep
NCHIHRYLVHTKRKYCLSSNYETCAWKGDKPSRQFTHQDEQRVIHIKFFFTKKNNLFRARPNFPRRTANAPRRRD

SEQ ID NO: 326216 - protein, 283 aa, Zea mays
  Clone ID: MRT4577_6057C.1.pep
MAEQTQPQGEGGASPKHESLMEKLADKLHVGGGKADSSSSSDSDSDERPRPSAPPADELKQPSFSDAAATAAAEAKAKVFRLFGREQPIHKALGGGKPADVFLWRNKNISAGVLGGATAIWILFELLGYHLLTFVCHGLIFALGVLFLWSNASSFIHKAPPKIPEVIIPEDLVVNIALSTRYEINRAFANLRQIALGRDLKKFLMVIAGFWLLSVLGSCCNFLTLVYIVFVVLHTVPVLYEKYEDQIDSYGEKGWVEIKKQYAVFDEKVLSKVPRGPAKDKKH

SEQ ID NO: 326217 - protein, 59 aa, Zea mays
  Clone ID: MRT4577_60580C.1.pep
MYMHYPRFPFPGGYYAPPPGYVYQPVYPAPAYAAYAPPHHQPMAPQIFSDENPNACSVM

SEQ ID NO: 326218 - protein, 223 aa, Zea mays
  unsure (1)..(223): unsure at all Xaa locations
  Clone ID: MRT4577_60581C.1.pep
ARVRPRVRPVIAVVLKVHMHCEACAQGIRKRILKMKGVQSAEPDLKASEVAVKGVFEESKLAEYVYKRTGKHAAVVKSEPVPAPPPESGAGDNTGAKEEEKGQEEEKEKEGGGDGGGEEKKKEGGKEEEKKDGEKQEEEKEGGGGGEKVXKRREIKTLPLPXASMYMHYPRFPFPGGYYAPPXRVRLPAXYPAPAYAAYAPPHHQPMAPQIFSDENPNACSVM

SEQ ID NO: 326219 - protein, 44 aa, Zea mays
  Clone ID: MRT4577_60582C.1.pep
TPMFMWRITSLGLMLFYDKESVIWFVYYIHFSAPRYLFVHLNNY

SEQ ID NO: 326220 - protein, 173 aa, Zea mays
  unsure (1)..(173): unsure at all Xaa locations
  Clone ID: MRT4577_60583C.1.pep
VSIPRINKNHRRFISRDGTSNMQPVRMHRAVFLITTXISFGVLEVSQSSYKLLARHVGMSLNSVSHWAVCVIDRGLGECYCYDLMSDRLELTMVGEELLSRCSYHGLSLVNTWSSCYYIGETXKTHDEIQEIGNRHIGRNPRYSLLSNNCQHLGRQSRQGTXVXQSYQSKQAR

SEQ ID NO: 326221 - protein, 50 aa, Zea mays
  Clone ID: MRT4577_60584C.1.pep
RTYARVCDRARMGDPVPHCWGENWIPAASKILIMIMFLTKDTWSYGFNSR

SEQ ID NO: 326222 - protein, 55 aa, Zea mays
  Clone ID: MRT4577_60585C.1.pep
KDCASLLTIKLIKKNPNNTRIPVLFSYSIIINTEFNSPTLYKNSFTYHSLQRPVP

SEQ ID NO: 326223 - protein, 48 aa, Zea mays
  Clone ID: MRT4577_60586C.1.pep
KPARSVKDNIGSANLFLTPTEHMSGMNIATSMRWVPQAQLHAMCPDSI

SEQ ID NO: 326224 - protein, 105 aa, Zea mays
  Clone ID: MRT4577_60587C.1.pep
IHARGTSYQPVGSNNIYVHKLIIFMLLLNFHLNMLANGISTATSLLCFADFRRFTRFAREDKKGRCLPPSARRLQVQIHHLHALRSRRRPISCLRQEWRARADQY

SEQ ID NO: 326225 - protein, 69 aa, Zea mays
  Clone ID: MRT4577_60588C.1.pep
RLGLAPRIGNPSGPRFVAWPRPDRVQVTSGALICAASGAFCFGTSFRVPGGRFLLFLASMRGLRFGFDT

SEQ ID NO: 326226 - protein, 158 aa, Zea mays
  Clone ID: MRT4577_60589C.1.pep
MRAEPAAEEPDICENKCRPAGSEALPRGIVQDKSNFEMESLGGNPERKEKKGNGRHSKSLLAIPVGIKQKAIVDKLVSKFPDTNFIVMLFHYDGEVDGWRDLEWSGRAIHVGVRDQTKWWFAKRFLHPDLVAEYDYVFLWDEDIEVDSFDPLRYLRVV

SEQ ID NO: 326227 - protein, 279 aa, Zea mays
  Clone ID: MRT4577_6058C.1.pep
MAEQPQEGGASPKHESLMEKLADKLHVGGGKGDSSSSDSDRDEPPHPSAPPTDEVKQPSFSDSTATAAAEAKAKVFRLFGREQPIHKALGGGKPADVFLWRNRNISAGVLGGATAIWILFELLGYHLLTFVCHGLIFSLGVLFLWSNASSFIHKSPPKTPEVVIPEDLVVNIAVSTRYEINRAFANLRQIALGRDIKKFLMVIAGLWLLSVLGSCCNLLTLVYIVFVVLHTVPVLYEKYEDQIDTYGEKGWVEIKKQYAVFDEKVLSKVPRGPAKDKKH

SEQ ID NO: 326228 - protein, 60 aa, Zea mays
  Clone ID: MRT4577_60590C.1.pep
KKGFNHLLKKPPLHIWPQPIGWNPTLKFHKINLTRNVRPHAKLVLHKRKELGYQRATHHT

SEQ ID NO: 326229 - protein, 127 aa, Zea mays
  Clone ID: MRT4577_60591C.1.pep
SRVGKAEYGRGGCCLTVLASRSAGTRCVVALRDYEAGASFWTWTIHDAGGANGPVNATGAGQDGGDRGGPSVGDQSTSPGPETKGGDMTLYTRHKRGEDVVHRANTMGETWQVSRDTAKDVNGDKDK

SEQ ID NO: 326230 - protein, 79 aa, Zea mays
  unsure (1)..(79): unsure at all Xaa locations
  Clone ID: MRT4577_60592C.1.pep
DRSRNVGVVDSQYVLHRGILTLGDGGKATATAPASAXDRLAVRQRSYTELQLFNRRWKKAVAEDGCWTDPYPNPATTTG

SEQ ID NO: 326231 - protein, 468 aa, Zea mays
  unsure (1)..(468): unsure at all Xaa locations
  Clone ID: MRT4577_60593C.1.pep
QKYPSINSPTPLPLPLLLPLHFQFRLLPRITKFRLRRNFRLLAPGRKWSSSAAATSQRIRDPSAMGPVANDAWQKRFFSVAPPATLVFFFVLIFVAGAIVTLDHKESLAILQLQPRGVIAAEQMRPPATSELRAEPAAEEPDICENKCRPAGSEALPRGIVQDKSNFEMESLGGNPERKEKKGNGRHSKSLLAIPVGIKQKAIVDKLVSKFPDTNFIVMLFHYDGEVDGWRDLXWSGRAIHVGVRDQTKWWFAKRFLHPDLVAEYDYVFLWDEDIEVDSFDPLRYLRVVREERLEISQPALDRRSQIHHRLTARAARSGGVHRRYYKTSGHGRCYGNSTGPPCAGWVEMMVPVFSRAAWRCAWHMIQNDLIYAWGMDYKLGYCAQGDRSRNVGVVDSQYVLHRGIPTLGDGGKATATAAASALGTADRLAVRQRSYTELQLFNRRWKKAVAEDGCWTDPYPNPATTTG

SEQ ID NO: 326232 - protein, 50 aa, Zea mays
  Clone ID: MRT4577_60594C.1.pep
ASRCKNNINGFFRFVSKISKVTWFTTESKRTPSKEVVVLGPQLLIASRAE

SEQ ID NO: 326233 - protein, 81 aa, Zea mays
  unsure (1)..(81): unsure at all Xaa locations
  Clone ID: MRT4577_60595C.1.pep
SILMCVRLDCGKPRMIQNGFIKGENFEVGSMVQFFCNEGYELVGDSSWTCQKSGKWNKMANPKCMPAKCPEAPXLGNQLVL

SEQ ID NO: 326234 - protein, 103 aa, Zea mays
  Clone ID: MRT4577_60596C.1.pep
FPRGLVFENEEGFRHKQSECKNHIGVCCSKLLHTKGTLFLQRLFSLLFWPPNTIIFSNLCQSQITLHKILYLVRAPDVLCHNDKMQTSHILLPNYVEYTHRHN

SEQ ID NO: 326235 - protein, 61 aa, Zea mays
  Clone ID: MRT4577_60597C.1.pep
ATFHPALFFFSELLTLSVLSMLDCTHYSSLLDLLRLFFYGTLKDYKNNSGSLSSLFPVSVP

SEQ ID NO: 326236 - protein, 123 aa, Zea mays
  Clone ID: MRT4577_60598C.1.pep
NCVGARNYKYFLLFLVYTFIETVLDTLVLLPNFIEFFQDEHRRSSSPGDIAILFLAFGLRKEEVGFMEIRPRMETKLGAGLWYQKVALVCSLILHRGSAQHPRASRHGVPYSLRRNRLIACDA

SEQ ID NO: 326237 - protein, 299 aa, Zea mays
  unsure (1)..(299): unsure at all Xaa locations
  Clone ID: MRT4577_60599C.1.pep
MDCCRHVNPFRACSGLRGLGYLMVALVAAIVAVSYYAVVVYAWGPMLLAGGAAAAGAAAVIAAFHILXLFLLQLAMILWCYLMAVFTDPGAVPENWRHDAEDSGNPSFSSSDEQESAPRYCSRCQNGKPPRCHHCSVCNRCVLKMDHHCIWVVNCVGARNYKYFLLFLVYTFIETVLDTLVLLPNFIEFFQDEHRRSSSPGDIAILFLAFVLNLAFALSLLCFIGMHASLVTRNTTSIEVYERKKSVSWKYDLGWKRNLEQVFGTKKLLWFVPLYSTEDLHNIPALRGMEFPTRSDAIV

SEQ ID NO: 326238 - protein, 141 aa, Zea mays
  unsure (1)..(141): unsure at all Xaa locations
  Clone ID: MRT4577_6059C.1.pep
RRSAGHADAKRAPRGDAGGAAARAVCLTXGISFVGFAVVDRLLRHGYTVRLALETQEDXDQLPENEIFRQDRRDGGVXTVMANVMDPDGLRRAFDGCAGVFHTFAFVDPGGMSGYTKHMAALEAQAAERVIEACVRTESVR

SEQ ID NO: 326239 - protein, 495 aa, Zea mays
  unsure (1)..(495): unsure at all Xaa locations
  Clone ID: MRT4577_605C.1.pep
MGSDADMEDYGFEYSDEEPEEQDVDIENQYYNSKGLVETDPEGALAGFDQVVSMEPEKAEWGFKALKQTVKLYYKLGKYKEMMDAYREMLTYIKSAVTRNYSEKCINNIMDFVSGSASQNFTLLQEFYQTTLKALEEAKNERLWFKTNLKLCKIWFDIGEYGRMSKILKELHKSCQREDGSDDQKKGTQLLEVYAIEIQMYTETKNNKKLKELYQRALSIKSAIPHPRIMGIIRECGGKMHMAERQWAEAATDFFEAFKNYDEAGNPRRIQCLKYLVLANMLMESEVNPFDGQEAKPYKNDPEILAMTNLIAAYQKNDIMEFEKILKSNRRTIMDDPFIRNYIEDLLKNIRTQVLLKLIKPYTRIRIPFISQELNFPEKDVEQLLVSLILDNRIQGHIDQVNKLLERGERXGDEEVQCYRQVEYSAEVHLPNIVQQSLMRRIAXCVHCTPSIVDSLFCGFEGNCKELSGDACDRILDLGKVNIDYEVVSELNLVF

SEQ ID NO: 326240 - protein, 133 aa, Zea mays
  unsure (1)..(133): unsure at all Xaa locations
  Clone ID: MRT4577_60600C.1.pep
GSSYTIRGYGHGLITNKGFKGSFGGVGFSFXTSAILSVVQSLEICLLQMLLCQDNIVYSCINCYCTSLSLDFSVAPQALIQNCTTFSSFSCIMDGLNKHHSSMARTLXSDXSMAVHEKCVVLSPFTLPPIFDA

SEQ ID NO: 326241 - protein, 125 aa, Zea mays
  Clone ID: MRT4577_60601C.1.pep
PQRAAKPAGIKPSTFHNDEGGLVGSKTAPPPKSFGKPFKPAAAKKGGLWGALAAPPPGTKTRALASSGKGRGTKPGPPKIGGPKKGRTSPTGKGRAMKSKVGQKGEGFPFVPPALSLARKSFFVK

SEQ ID NO: 326242 - protein, 109 aa, Zea mays
  Clone ID: MRT4577_60602C.1.pep
PGFAAPINVYSTSTSSRKEHRYDSHAGVFARLPLACAGYSLPSATSTHTSGSCGCHPPPPDHLPPSVHVPPTVQLSTTEHVTPAGHLPSSVQLLPQVHVLSPDHLSAPP

SEQ ID NO: 326243 - protein, 53 aa, Zea mays
  Clone ID: MRT4577_60603C.1.pep
TGLAVLSIIHYSAMQSIDWLYMSDAHLPTGIFNDSCIWLAYNTCCLLLTAFLG

SEQ ID NO: 326244 - protein, 75 aa, Zea mays
  unsure (1)..(75): unsure at all Xaa locations
  Clone ID: MRT4577_60604C.1.pep
SCIPLPQTXGRLYSKDRVVXSTTIIYHTTLLTPDKQSNIFLQPLIIIILTLTLRSFPMSTLSKFTTNFHLYLQPF

SEQ ID NO: 326245 - protein, 41 aa, Zea mays
  Clone ID: MRT4577_60605C.1.pep
DWTALKYLIKLYYNKSTIHPGDSDNLHDLITAITDFTSLAT

SEQ ID NO: 326246 - protein, 120 aa, Zea mays
  unsure (1)..(120): unsure at all Xaa locations
  Clone ID: MRT4577_60606C.1.pep
TILSPVGYSVRGGCCFIHVATDYFEQQHVLRFNQLVALLPVAYLXQQILLPFIQLAVXNRAPFLTQXQLLLLYQHFAGNPXSLLHLLLLLPFAXLALADPAFSYQQHIIIVVLFYIAYYL

SEQ ID NO: 326247 - protein, 109 aa, Zea mays
  Clone ID: MRT4577_60607C.1.pep
KFCLWLPLQHACEKTGIQFVSVPGMVGKNRFWAKVVVVFHVKRVIAPMEIRLFPNCGFDDDPHPKSNPLWGFIYIVPLSPKNENVPRTCIVRLMHVKTKFFDEKPGFFL

SEQ ID NO: 326248 - protein, 55 aa, Zea mays
  Clone ID: MRT4577_60608C.1.pep
LKLTKQSKLQCLLYKIHIIIKKQFAHTHGLMALLKNLRFSASLTDELYIRVTFIS

SEQ ID NO: 326249 - protein, 120 aa, Zea mays
  unsure (1)..(120): unsure at all Xaa locations
  Clone ID: MRT4577_60609C.1.pep
TISFIYSISLNNPIDTTRGVLIALALLALAGSATSTHTSCSCCCQPPPAVHLPPAVHLXPPVHLPPTVHXPPPVHLPPSVHLSPPVHVPSPVHLPPSPCHYPTXPARPQAHSQPHTCACQ

SEQ ID NO: 326250 - protein, 343 aa, Zea mays
  Clone ID: MRT4577_6060C.1.pep
NGHSKGKQTSIFIYDGLYEVLECWQEGPKGERVFKYKLQRIAGQPELALHAVKATRKSKVREGLCLPDISQGRERIPICVINTIDDMKPAPFKYITEVIYPDWYEKEPPKGCNCTNGCSDSITCACAVKNGGEIMFNFNGAIVEARPLIYECGPSCRCPPTCHNRVSQHGVKIPLEIFKTGKTGWGVRSLSSISSGSFICEYTGELLEDEEAEKRENDEYLFDIGHNYHDKELWEGLKSVVGLGSATSSSETMEGFTIDASECGNVGRFINHSCSPNLYAQNVLWDHDDMRMPHVMFFAVENIPPLQELTYHYNYKIGEVYINGEEKVKHCYCGASDCCGRLY

SEQ ID NO: 326251 - protein, 114 aa, Zea mays
  Clone ID: MRT4577_60610C.1.pep
APAWVAPSQLSIFHYKPSISELHRHCLHRRFLSSAAMPPCGFEQRCAPRVSARWRQGSGRCWQRGRSSGRGSPGALRQALRAGGVIVHCEQGLEPKLIPPVNKMINSVPGRPRG

SEQ ID NO: 326252 - protein, 207 aa, Zea mays
  unsure (1)..(207): unsure at all Xaa locations
  Clone ID: MRT4577_60611C.1.pep
SRQDDVPADAAAGACAPGHAVAVAADEXVGPPPLPPPPLPAVDAAVIMGVLTAVLLALFLFLIYAKHCKQRGPGERPGGLGLGFAPSSCDRCRSGLSSSAVGALPAVRFGDGDVDVGRATECAVCLGAFDAAELLRVLPACRHAFHAECIDTWLLAHSTCPVCRRRVTGGHVDDSEPEDSAATRQHGRRSADDAEVQVVVHRAWDQR

SEQ ID NO: 326253 - protein, 248 aa, Zea mays
  Clone ID: MRT4577_60612C.1.pep
MDGFVDPFVPEQAWPQDAMFIGSSWPCAGAGATSLADPAGTYAYLGAQAAPGQGAGFHLQDGSSTALVPPLELHQQFLSAHLPGDDVTVTQEEGLGFEVNSALVAGMLGPVLSAPCAVSLADSAPVVCSSSNDSSGGSEQSGLPPPPRFLVLGEQPASWPSAFPRISSLAGAGEETSRSFGFGAVSDNDLLLRGSSCVADVNKYPQIGNARLHVEDDVEFTLERCCRSLLGLTLAICSSQRNSAVCVT

SEQ ID NO: 326254 - protein, 200 aa, Zea mays
  unsure (1)..(200): unsure at all Xaa locations
  Clone ID: MRT4577_60613C.1.pep
GVPIVADDDAHLTFLEKTPAARLTILEAVFSDLHTDDGLNSIEANLKGKTYVSGDSITTDDIRGFDGEPLNAGAEVPNAARCYQTDCGAGAXRSPGKAGEDNMPAGSSSEVTAHADDGEDDNHLALFGDETADDKKASDERAARXKDFSIKNESGQSSVLRDNKPWDDYTXYKKLEEAVRTVHMEAPTCGALKLVPGGYG

SEQ ID NO: 326255 - protein, 109 aa, Zea mays
  unsure (1)..(109): unsure at all Xaa locations
  Clone ID: MRT4577_60614C.1.pep
VDGDGRRTKLGDARPVLVDREVQNPTVXDPFRGRNEGHFXAAAGAKDFVHERIRRRDVLXSLTTGQGLKKEFSFRKIPKDLKKEXCSNGARGKDPVSDKGIKLRGDQRK

SEQ ID NO: 326256 - protein, 71 aa, Zea mays
  Clone ID: MRT4577_60615C.1.pep
SFSGRWDSGACSFFQRRQGPLQLLWSSRGTNFYSGAIFMGCSQKYPSHRNGPLNQSKFFLLVLADPPVGWN

SEQ ID NO: 326257 - protein, 96 aa, Zea mays
  Clone ID: MRT4577_60616C.1.pep
RDLELGPPFFFFFFFFFFFFFSRHSSPPIYRNHHSSKSHKQKLKGTQLCLGSIFYVAAKKDTFPACEVDSASYFPARRQQNQRSLPCFKGNPFQMA

SEQ ID NO: 326258 - protein, 52 aa, Zea mays
  Clone ID: MRT4577_60617C.1.pep
DCTDCFKKMADKPDMGEIASFDKAKLKKTETQEKNTLPTKETIEQEKRSEIS

SEQ ID NO: 326259 - protein, 79 aa, Zea mays
  Clone ID: MRT4577_60618C.1.pep
MLYKSSSYSFPMKLDAHQVEPSQKEDNDDYLTHLLFTEDNDKDELVNVPGSVTDVMRGAREQEAGEGIGEQLCSRIFEG

SEQ ID NO: 326260 - protein, 98 aa, Zea mays
  unsure (1)..(98): unsure at all Xaa locations
  Clone ID: MRT4577_60619C.1.pep
MLTKRIMHECIKKVVGNHEDTXEEHIXSLCKSLSSIADTMDHAKAKEQXMDAYCTLMQMMSXLDTVCSXARFVQTNTIYLMRYIWSPRRKVKWPPNTV

SEQ ID NO: 326261 - protein, 80 aa, Zea mays
  Clone ID: MRT4577_6061C.1.pep
IHESGCIHDVPEARVIESVVVRVRTRQILSAAWYRSSHCTDATSQCSYYFMIVCCIGGSSGLRGEHAADSHICHTVTYNS

SEQ ID NO: 326262 - protein, 51 aa, Zea mays
  Clone ID: MRT4577_60620C.1.pep
LVVHDILISKKLKEYVYELCIPLVLDIIFFMFINMSILFMVCKLCNVYLYL

SEQ ID NO: 326263 - protein, 61 aa, Zea mays
  Clone ID: MRT4577_60621C.1.pep
KTGPTHAYGDRSACTIPLHSATGIREGRLRLARQGRACSIQGDDSFCCVCIEGKLGANVPP

SEQ ID NO: 326264 - protein, 134 aa, Zea mays
  Clone ID: MRT4577_60622C.1.pep
MHYVSDCELDSDGEEGWAAQMPRYPFEGILPRSRHRDCSLYRNTQRWSKEFRVANRNETLLETVKLLDPTNCVFRDDGTCVLHSPHQMLQIFSLKLDKIHVDGGLVELYGYIAARDRIDRLLNHVVNFSRDEPI

SEQ ID NO: 326265 - protein, 146 aa, Zea mays
  unsure (1)..(146): unsure at all Xaa locations
  Clone ID: MRT4577_60623C.1.pep
MVDSEEHQFQSKEGPARPNSYPKKAGPGRKNRFIIINNRPCTVXEVLYXKTAKYDHXARCHYXAIDIINGKEIEHIVPSXNNCDVILLTSDVNSTDDLRLPADDTLGAHIKEGFESSKDLVVTVQTAMGXEQICALHDRAPQKLPD

SEQ ID NO: 326266 - protein, 98 aa, Zea mays
  unsure (1)..(98): unsure at all Xaa locations
  Clone ID: MRT4577_60624C.1.pep
ADKEDXGXKXXEKEGXXXXGXQKEEKXDXXXXTKGKXXEGXXTXXXXTRXPRKTHRXXRKXXXXXARXPARGXKTXAXAGQNGDHHRTRENKKXXKNG

SEQ ID NO: 326267 - protein, 409 aa, Zea mays
  unsure (1)..(409): unsure at all Xaa locations
  Clone ID: MRT4577_60625C.1.pep
MQVHLRSIRFLLHPNITVASAPMHRLSHHSPSRALLPFLASAPLWWSSALARGVFPLMAAPNLPVRRVSRSPHGYRNMTSGIGVKGKELDKPDRRLLTPSTNNKGDRTEGMHYVSDCELDSDGEEGWAAQAQMPRYPFEGILPRSRHRDCSLYRNTQRWTKEFRVANRNETLLETVKLLDPTNCVFRDDGTCVLHSPHQMLQIFSLKLDKIHVDGGLVELYGYIAARDRIDRLLNHVVNFSRDDPIIVQXGDKEQDDLQLIDGVSVKDDMSTQDRDVFTRRIRGEYGVVEISMSRLNYAVEATVQVLVSEVYSSFNMHLGCFTSGLQEEIQLFDGAVDESGVLKRSVIAVRMGTSMDLKFKVGSEASLPVEHCCSFKANQHGCVSQEIKTDRALVSVNVTWSTLPLVRL

SEQ ID NO: 326268 - protein, 77 aa, Zea mays
  Clone ID: MRT4577_60626C.1.pep
QLQRERQRSVGQAGGTYDRAQARGRQDPTKMWRGRDQNITTLSDNKRNTSIHIPQTQKNAPKLRMPVLHALRREKSG

SEQ ID NO: 326269 - protein, 88 aa, Zea mays
  Clone ID: MRT4577_60627C.1.pep
QCCPSPPPAHLGSKCVSASLMRQFDEVDVLKLKLNLLNIKGTEAYTNLLNETAALPKCEELKLRVSLRASQHNFASIMFHILRSCNNT

SEQ ID NO: 326270 - protein, 72 aa, Zea mays
  Clone ID: MRT4577_60628C.1.pep
QTSDYSNSFHLGRLQPGDLRKDNTPIIVLLGPRHHRVEDGDQDLTHLLLDLSSDLLVRHGLNLLDHKVDSSR

SEQ ID NO: 326271 - protein, 72 aa, Zea mays
  unsure (1)..(72): unsure at all Xaa locations
  Clone ID: MRT4577_60629C.1.pep
TSDARGLGAFKRFSYAQVKIQGKLVGXFLYPHLRNRKGPPKFPSIGVYPNTFSLSGAGAGLPPKGIPNSFSF

SEQ ID NO: 326272 - protein, 40 aa, Zea mays
  Clone ID: MRT4577_6062C.1.pep
EAVLTSLNKSIPPGAIGQKAIQVLHSFKSHALHDKNKSPK

SEQ ID NO: 326273 - protein, 68 aa, Zea mays
  Clone ID: MRT4577_60630C.1.pep
RVNFLWLTLYGEPNGGCKSPYHSWSAPRGVQHLSRCRNANMCNSIYPTEGAISTTVATERNAVQKPIS

SEQ ID NO: 326274 - protein, 383 aa, Zea mays
  unsure (1)..(383): unsure at all Xaa locations
  Clone ID: MRT4577_60631C.1.pep
EKNSGSGYFEHSPRLAQHHRTSMMKPDKPIDLLRKVAGNNCCADCGASEPDWASLNLGILLCIECSGVHRNMGVHISKVRSLTLDVRVWEQSVINLFQSIGNTFANSVWEEMLPSSSCVDHGDISRAVGXKTCCLVLFPSSLINPVRXCSFSPLEGRLASIHGVHMSQKEVAVLKXSALFWEKFIHAKYAEKDFVRKHGMDGIQLAEQMWDNVSSNNKKGVYSLIVGSNADVDFSYGHTSFNSALTLAKXLLLQEQXPLTSNGSSRCFDRNPLDTGIIGDSICPARLAGRTLAPYCKSSSTMPRSAARHARWSKDNPSTDSRGRTPLHHSIMKGRHVYAKLLLSRGADSQAADRDGRTALQYAIDSGTIEDEEILVLLEDPSR

SEQ ID NO: 326275 - protein, 56 aa, Zea mays
  Clone ID: MRT4577_60632C.1.pep
SSLPITVPSASSSPTPPSPSVVIPAPPIDIYHIAAPRLLHSPPRIASAHSALLSIT

SEQ ID NO: 326276 - protein, 97 aa, Zea mays
  unsure (1)..(97): unsure at all Xaa locations
  Clone ID: MRT4577_60633C.1.pep
DLRGFCPHWIATNPQHFGWAYLVGGGTPLAGDIASXLGTDHISCRKQYGDHSTIEWKLLPKXRMDKFSSELSVWXIKHDRNHLLILSSLQSTNRFKQ

SEQ ID NO: 326277 - protein, 48 aa, Zea mays
  Clone ID: MRT4577_60634C.1.pep
SPKFVFPCFSGENVESAPPPMKKGFKLGYFFFWEEETDSLEEKAGVLY

SEQ ID NO: 326278 - protein, 48 aa, Zea mays
  Clone ID: MRT4577_60635C.1.pep
QSSTIAILCQFACKVDRMHTLSCAVREAYMLSFMMLMVISMIVTAYTL

SEQ ID NO: 326279 - protein, 88 aa, Zea mays
  unsure (1)..(88): unsure at all Xaa locations
  Clone ID: MRT4577_60637C.1.pep
WGKALGSKVYYFNNMVEQELPGGGLLVFQRFFFFXNPVFSLPKFVFPCFFGEKVERVPPPFKKGFQLGYFFFWEEETDSLEEKGGGLY

SEQ ID NO: 326280 - protein, 54 aa, Zea mays
  Clone ID: MRT4577_60638C.1.pep
FKQSAGRAGDKLPMPMSTLGTRSLTASPASAATSSGDGIAPVLEVHWASYKLAA

SEQ ID NO: 326281 - protein, 73 aa, Zea mays
  Clone ID: MRT4577_60639C.1.pep
VLQNRVLSASNLRLVMALVSEDGLAGSLQRRHVGQQLAYSFPRGAGTGRHNHGLILSVPQGRGGRRPNSASIP

SEQ ID NO: 326282 - protein, 28 aa, Zea mays
  Clone ID: MRT4577_6063C.1.pep
MVRRTVLAALLVAAALVGGARAQLKEGF

SEQ ID NO: 326283 - protein, 214 aa, Zea mays
  unsure (1)..(214): unsure at all Xaa locations
  Clone ID: MRT4577_60640C.1.pep
MAGTERLHRPIDPPRPAGSRSVVVGAGGSPARWDDDNDDCGGGGRVEGLAGLHIFDQEAEESPTKNDMANSLDTNCTPIAKGCNTETTETSVESEPVNVLNLLHDHTGIWVPVSVPPMTAQASEDWHRGFRCNGGYFPEEEFSWELDEDNKEMTMWDVFADMAVAAKDKVISAAKYEYGRCGMSAMSNFLSTEAWXDMAQTLVDANTGNCNELL

SEQ ID NO: 326284 - protein, 91 aa, Zea mays
  unsure (1)..(91): unsure at all Xaa locations
  Clone ID: MRT4577_60641C.1.pep
MTKRTNNVGIVGKYATRHGASLRHQTTKMQASQHCQDFCKYCGKFAGKKKAVGIRGCXDCRKAQGGAAYAKHPANGSADRSTLRRLLHQTG

SEQ ID NO: 326285 - protein, 148 aa, Zea mays
  Clone ID: MRT4577_60642C.1.pep
DFFKSKGRWNCGWHICSNCQKPARHMCYTCTFSLCKTCMKDAKFSCVRENKGFCDTCMNTVMLIENREEAADPMEVDFDDKGSWWYLFKDYWLNLKTNLSLTVEEISAAKSRKSGELPDTNDEVNSESSSGRNLESNTSKKQKKGGRG

SEQ ID NO: 326286 - protein, 104 aa, Zea mays
  Clone ID: MRT4577_60643C.1.pep
MKLNMVNIASACQKKLEIDDDEKLRAFYVRRISQDVSAYALGEEFKVYVFKIMGGCDKQGFPMKQGVLTSGRVRLLLHRGTPCFRGYGRRNGERRRKSVRGCIV

SEQ ID NO: 326287 - protein, 50 aa, Zea mays
  Clone ID: MRT4577_60644C.1.pep
PIILLIPRLRHCLVVASTLTIILRSLNAGTLRPPTCPRRPVLFVHLPRPR

SEQ ID NO: 326288 - protein, 198 aa, Zea mays
  Clone ID: MRT4577_60645C.1.pep
RPGCEPNALAPSCVLDSLRAAAALPPSSLASARRSLLPALNLDAALPPSSLASARRSLLPPLGAGRGLRPLARRSAPPRYLLSARRWRTVLSVLGGGAPSVLSVLGAAVAYRPLGPRRWRSLRPLGPRRVGLPALCSAAPSLLSARRAPCASGSLLPCSLLPARAVAGTALLILANTLHRTKTLKKHLKDFILMTLRA

SEQ ID NO: 326289 - protein, 81 aa, Zea mays
  Clone ID: MRT4577_60646C.1.pep
NGYQTSACIVLVSLNRLSNRICDLGLMLGARALDTTQQTRVTSDMISKYCLPISLCFKMCCQSSIQLIKHESCPLYIVRGR

SEQ ID NO: 326290 - protein, 101 aa, Zea mays
  Clone ID: MRT4577_60648C.1.pep
VMKAVSDFKHISQPLSRFEDDLESNRAVRDQGWGSPQLEQNITRLEKIVEILSQDKFCYEAHILRDGAFLQRALSFYRLMILWSVNLVGGFKMPLPSQCPK

SEQ ID NO: 326291 - protein, 142 aa, Zea mays
  unsure (1)..(142): unsure at all Xaa locations
  Clone ID: MRT4577_60649C.1.pep
MFPSLRRVTARVAMADHLSDKQTYXFKEGFILFDKDDYECITTKELGTVMRXSMSQNPTEGELQDMINEADGDGNATIDFTEFLDLMAQRDGGTPXSEEELKEAFCVFDKEQNGFIXAVDLRHVMTNLREKLTSEEVDEIDH

SEQ ID NO: 326292 - protein, 253 aa, Zea mays
  unsure (1)..(253): unsure at all Xaa locations
  Clone ID: MRT4577_6064C.1.pep
PRVRAWSQSKEVRFSCAPALAAGNLHQDMPLGRPGNNMTPQGKMEXQKACEVAVATPSLCSGNGESWREQKRKSQAECSASQDDDLDDESGGMRGSGGRGTKRSRTAEVHNLSERRRRDRINEKMRALQELIPNCNKIDKASMLDEAIEYLKTLQLQVQMMAMGSGLCIPPMLLPRAMQLQIPSIAHFHHLGMGLGYGMGXVLDMNSTAAVPFQPIPGAHYTCPMIPGTPPQGLGIGMPGTNTMPVFGLPGSI

SEQ ID NO: 326293 - protein, 136 aa, Zea mays
  unsure (1)..(136): unsure at all Xaa locations
  Clone ID: MRT4577_60650C.1.pep
MRRPALGVDDCGYGGIETAVYVYEYSRGARYQSYGVEHEHFTRDDNVDKHNDRLTFAGDLATSFFALYHVIRADKDPDNAHMNEIEVGVITAIALCDSDYAIHYDRXRLTATYESKXQQDCMSALGDRHDYSYYCD

SEQ ID NO: 326294 - protein, 632 aa, Zea mays
  unsure (1)..(632): unsure at all Xaa locations
  Clone ID: MRT4577_60651C.1.pep
CREDLLDATRQLVPPTRSGRESDSDADDIELLEKLRQVKAVLEEGGHFSGIYRKVQLKPLKWIKVPKRNGDGEEERPIEALMILKYGGVLTHAGRKQAEELGRFFRNNIYPGEGTGLLRLHSTYRHDLKIYSSDEGRVQMSAAAFAKGLLDLEGQLTPILVSLVSKDSSMLDGLEDASTEMDEAKARLHEIIISSEKAKNTEGPVEFPWMVDGAGLPANASQLLPKMAKLTKEVTSQVIVLANXVDERLALTSTFSKYDQAKALGKTTIDVARIAAGLPCGSESFLLMFARWRKLERDLYNERKDRFDITQIPDVYDSCKYDLLHNAHLNLKGLEELFKVAQILADGVIPNEYGINPKQKLKIGSKIARRLLGKILIDLRNTREEAISVAEPKFIEDEALFLPTKEAEHQQKVHVRNEDGRRSSSTSEKSLDQEDEDDRETKYRLDPKYANVRTPGRHVRTRLYFTSESHIHSLMNVLRYCNLDESLQGEESLVCQSALDRLHRTRELDYMSNIVLRMFENIEVPLEDEKRFRIEMTFSRGADLSPLEDKTSESSSLLQEHTLPIMGPERLQEVGSCLTMDKFEKMVRPFAMPPEDFPPAAPPQALGYFSKGAGVLERLASLWPFHKSANGK

SEQ ID NO: 326295 - protein, 98 aa, Zea mays
  Clone ID: MRT4577_60652C.1.pep
RISPPKGVQNWGLRGPFFFFSGQFFLFLRVFLFGVLVFFFFFFFFFFFFFFFFFFFELDRGKRFLTDDGGRRRCCRYIITIKQKEEMTLPTARCHHTR

SEQ ID NO: 326296 - protein, 96 aa, Zea mays
  Clone ID: MRT4577_60653C.1.pep
EPADVRGYCCAGIGAMSWIVVLASSSWSVLSTFTSMSRLVMVSREGSVVPIRRTSRSIALSFCLFMARQSAPPRACQGAGQRNNAGVPRWIISDAW

SEQ ID NO: 326297 - protein, 62 aa, Zea mays
  Clone ID: MRT4577_60654C.1.pep
ASQPCLYGCSRLIHFGTACTPYSYSNRMDGHDPCPLTVKKKTPSSVVYKKKKKRTNAVRYTG

SEQ ID NO: 326298 - protein, 52 aa, Zea mays
  Clone ID: MRT4577_60655C.1.pep
RPGDAEIVYASTKKAERELKWKAKYGIDEMCRDQWNWASKNPYGYGDQGSTD

SEQ ID NO: 326299 - protein, 357 aa, Zea mays
  Clone ID: MRT4577_60656C.1.pep
MSHHDGSKPYQPRRGPERHPQPADGIAAPPPAAVAPSVEHLVAAAAEAEALNRFAAEQQQQLQGHEQEVGEEEEEEDEQEDEMEEEDEDEHEGAHGGIGGEHVPMDADAAAAAAAAAVSQMDPHSALVAGTVPPMATNQLTLSFQGEVYVFDSVSPDKVQAVLLLLGGRELSSLGGASSSAPYSKRLNYPHRVASLMRFREKRKERNFDKKIRYSVRKEVALRMQRNRGQFTSSKPKPDEIAASEMASADGSPNWALVEGRPPSAAECHHCGTNATATPMMRRGPDGPRTLCNACGLMWANKGLLRDVTKSPVPLQATQSAPHLDGGNGSAMSAPGSELENAAAAMTNGHESSSSGV

SEQ ID NO: 326300 - protein, 125 aa, Zea mays
  Clone ID: MRT4577_60657C.1.pep
MASPPPVATAGPHSVFVYGTLMEEEVVRVLLGRAPPSSSPALLPDHRRFSLRGRVYPAILPARAHAVSGKVIQGLTDRELHVFDMFEDEEYVKTTVEVSLTEWRKVHLKYYLEMTREFMLELGQF

SEQ ID NO: 326301 - protein, 36 aa, Zea mays
  Clone ID: MRT4577_60658C.1.pep
KKKLSCEKKKKKKKKKKKKKKKKKKKKKKKKNGPPI

SEQ ID NO: 326302 - protein, 130 aa, Zea mays
  Clone ID: MRT4577_60659C.1.pep
MASPPPVATAGPHSVFVYGTLMEEEVVRVLLGRAPPSSSPALLPDHRRFSLRGRVYPAILPARAHAVSGKVIQGLTDRELHVFDMFEDEEYVKTTVEVSLTDASEKSLAYAYIWGNQGDPDLYGEWDFEV

SEQ ID NO: 326303 - protein, 69 aa, Zea mays
  Clone ID: MRT4577_6065C.1.pep
GFGLPPFKAPKKGLGEKPVPLNFAGTRFFGGGWFFPDSHGFFFFRGELPVLTTPWLFLCVFKEPGAFPF

SEQ ID NO: 326304 - protein, 127 aa, Zea mays
  Clone ID: MRT4577_60660C.1.pep
FHISDNSFVFDCDACVWRVGVVLGKNGGALNRDLMDPISQVKDLSKELWHMVALNSFVSRIRHQLPNGRSEVFHLLDSHLRVSYGVFDIVACTRTRGRMSLGWRCGVAMDFPRFAEPLPPFLDTGED

SEQ ID NO: 326305 - protein, 153 aa, Zea mays
  Clone ID: MRT4577_60661C.1.pep
MASPPPVATAGPHSVFVYGTLMEEEVVRVLLGRAPPSSSPALLPDHRRFSLRGRVYPAILPARAHAVSGKVIQGLTDRELHVFDMFEDEEYVKTTVEVSLTDASEKSLAYAYIWGNQGDPDLYGEWDFEEWRKVHLKYYLEMTREFMLELGQF

SEQ ID NO: 326306 - protein, 97 aa, Zea mays
  unsure (1)..(97): unsure at all Xaa locations
  Clone ID: MRT4577_60662C.1.pep
DTVGCQKAAPRNTGTRGYPGSNHRWVGQTPXQSTXXAAEPLDTDRRVPTPPVCRLYCSIPSFLNERHASLTRGGVVALYRESQTSIVRVRSGVVALL

SEQ ID NO: 326307 - protein, 48 aa, Zea mays
  Clone ID: MRT4577_60663C.1.pep
FVSSPSPAPISTTAPASSSATEQRVPSAVHRPFALLFFRQSAVTSCRN

SEQ ID NO: 326308 - protein, 48 aa, Zea mays
  Clone ID: MRT4577_60664C.1.pep
HAMIRGHHSSGQGFRVLVINDQLCDVITPLISILVCPHMPMPRALNKR

SEQ ID NO: 326309 - protein, 69 aa, Zea mays
  Clone ID: MRT4577_60665C.1.pep
MGCAASRHGAVSSPPYDVSSSCSYNMSRSASASADLGSSSALSIWSRPVRLEAFDEEDDERWWVVARAP

SEQ ID NO: 326310 - protein, 264 aa, Zea mays
  Clone ID: MRT4577_60666C.1.pep
NSARGPRTRRARPVFVPPPLISPRHPWRRPRPPPTCPRRRPLPRAPPQSPPLRARERANPPFPRLSLAPRWNRHGIHGRVLRIHLHRVATVRRGRGCPDGGDLDCGQVHAYSSRRSCFSSTTSSPCALGTRHMFGVVGITVTSLTSRAAAAEVCFLAFRNEQSAGYAAAYDFLTGSPGALLIVSGPRYIHGLAGLSHATANAWSLLMSSGSCDQADAGRGDFQELDQIAATKPFAKLAVKATTILNVSRSSLPTRTNGTPAVPI

SEQ ID NO: 326311 - protein, 575 aa, Zea mays
  Clone ID: MRT4577_60667C.1.pep
MASDSTAAVTVDGSALAGRALAAAGTRHMFGVVGIPVTSLASRAAAAGVRFLAFRNEQSAGYAAAAYGFLTGSPGALLTVSGPGCVHGLAGLSHATANAWPLLMISGSCDQADAGRGDFQELDQIAATKPFAKLAVKATTIADIPRLVFQALAAAVSGRPGGCYLDIPSDVLHQTLPESEAAALIAAAAADSAASDPSPSMHKSLDEGIAKAADLLRCAERPLVVIGKGAAYARAEEAIRKLVDTTGIPFLPTPMGKGVVPDSHPLSATAARSLAIGQCDVALVIGARLNWLLHFGEPPKWSKDVKFILVDVSEEEIELRKPHVGIVGDAKRVTELINREIKDNPFCLARSHPWVEAITKKANDNVLKMEAQLAKDVVPFNFMTPLRIIRDAILAEGSPAPVVVSEGANTMDVGRAVLVQNEPRTRLDAGTWGTMGVGLGYCIAAAAAEPERLVVAVEGDSGFGFSAMEVETLVRYQLPVVVIVFNNNGVYGGDRRSPDEITGPYKDDPAPTSFVPAAGYHKMMEAFGGKGYLVETPDELKSALSESFRARKPAVINVIIDPYAGAESGRMQHKN

SEQ ID NO: 326312 - protein, 80 aa, Zea mays
  Clone ID: MRT4577_60668C.1.pep
ACWARLLFVDAPLIFSSPKSFTMEPKSFIFLFMHLWLVCVLQSSSKSFFSSASNNHNIKNYPNIDFIGQGPSPNQYPTRD

SEQ ID NO: 326313 - protein, 55 aa, Zea mays
  Clone ID: MRT4577_60669C.1.pep
ILSDIESIGDHERGRKEMRDELFPILRNRATHAAPATVMAARSPRGAVPNGSLAT

SEQ ID NO: 326314 - protein, 161 aa, Zea mays
  unsure (1)..(161): unsure at all Xaa locations
  Clone ID: MRT4577_6066C.1.pep
AKPATRTAKPGAXPKPKPAAGKPKAATRXAXHPXXXEEXKEXXTAXKERTXXSXQANAKXXGDKHGAXXPANXKKKXXXQXXGXAAKGKRXKXKXXXKXXDAXKKATPKTKXKPXKADXAKTTXPKPAKADDXKXKKAXXAKTKKAXXXXTKRKXPEKKDA

SEQ ID NO: 326315 - protein, 87 aa, Zea mays
  Clone ID: MRT4577_60670C.1.pep
SQTNQPKLTGSTLLSLLSPTPSMIQSRYTIRMPLATIWVLDNIKWLVFLIICQPVVMVPHSCANVMRCVYRKVCLIKKVIPFLPKKK

SEQ ID NO: 326316 - protein, 85 aa, Zea mays
  Clone ID: MRT4577_60671C.1.pep
PGQEHLRSCRSGVRWSQAADPPEMPGRLGVDLLDSLDFFPHYIATRTTHSCLPDLLHRRQLYITSPPIDGPHRKLPRDDDEIIHF

SEQ ID NO: 326317 - protein, 160 aa, Zea mays
  Clone ID: MRT4577_60672C.1.pep
MGKNNKRKREPTPPSEEFGDSEYSEEEFSSEPEGSPAPVSPPASSDDSDDSQGIAAEVWTYIRAVERAGLEGSDESEYSSDEEDSDGGEEGEDDDDDDDDDDDDGGSSGGGDGDGRGGTKGGSGGSTKGGGGGSRDSTKGSSRGSTKGGGGGRGRGRASG

SEQ ID NO: 326318 - protein, 64 aa, Zea mays
  Clone ID: MRT4577_60673C.1.pep
VLYCLLELSSTFNWRIFVLACGPNLISFIYGVKKGPAFVFLCKNGFCSVLNVEICFLYKNSPSP

SEQ ID NO: 326319 - protein, 37 aa, Zea mays
  Clone ID: MRT4577_60674C.1.pep
IFNFFPRETCVMFRLEKSFSATSSNSSKVDATVSSSR

SEQ ID NO: 326320 - protein, 64 aa, Zea mays
  Clone ID: MRT4577_60675C.1.pep
RRVQRVARMYLCTFRNHSVLWLTKVYVFAPLAASVDLFSAQKSEHTKGVLRSLKNWASRLHTHH

SEQ ID NO: 326321 - protein, 226 aa, Zea mays
  unsure (1)..(226): unsure at all Xaa locations
  Clone ID: MRT4577_60676C.1.pep
RGRPGAAVPHRFQGFPEPDPSSWCLFVPSSLVVSLPLALWHLLLPSLSRSVPXNPGPVKGDTFIHDPTVVKKPDGTYLAAFTANGVGLKTSTDRTTWEGXGAAFPNGASWTTTYTKGDKNLWAPDLSYHNGQYYMYYSASSFGTSRSAIFLATSKTGASGSWTNLXLVIESFANSNWNXIDPNLYVASDXKWWXAFGSFWGXLKLXELXPSTXXXXXANLISIAAR

SEQ ID NO: 326322 - protein, 77 aa, Zea mays
  Clone ID: MRT4577_60677C.1.pep
SARGSTGNFFAAGLVESTCGGGSNAGCLFSSSIKDGIVRRRAYQISALPMIIEAAIKASSNRLEGLPLGRFVDGTRI

SEQ ID NO: 326323 - protein, 130 aa, Zea mays
  unsure (1)..(130): unsure at all Xaa locations
  Clone ID: MRT4577_60678C.1.pep
PHPTPSLSPSSDRSFPRPPSPSPSPSAEGDYHHHSGTTLILFPSMAMTDTVELKVAMDCXGLSCRXKLVLMKMEGAYYYDVKIMKHNVTVNVTAAPDVDLETDTETDNKTSYCEAEARTSDSAAAAAASD

SEQ ID NO: 326324 - protein, 138 aa, Zea mays
  Clone ID: MRT4577_60679C.1.pep
WKGLERAADWKPMEISRSLRKSYPEPSTRTPSYTKEREREKLAAGSWCIKKMAKEIFSRDLGWRRWTGVFVDLVAVKLLTTCHCCQSSFPQVVDTVAKGLAIQCCFPASVIIYAVAVCSWLAGRLCRGCYILVEGLGL

SEQ ID NO: 326325 - protein, 79 aa, Zea mays
  Clone ID: MRT4577_6067C.1.pep
QSKKKPRRPGGQNFLQSKPGLFCQFPGQLHLCFGYWGPLRDGKPQVQRKFMSSSAKILLFAGQKRAKLLANASKIPCPF

SEQ ID NO: 326326 - protein, 161 aa, Zea mays
  Clone ID: MRT4577_60680C.1.pep
MASFVVHHHGSPLDREGKVKMSALALRSSLRPCEAAEEVGAGQAWCRGADMGIAAFADEFSVEDLLDLEDLCEVDKDCAELGDTVPAAESVQEGDKVSSDSHGSSVLSYELMTLPVPHPMIDLPLPAHDAEELEWVSRIMDDSLAELPPPPKLPAAPLGAA

SEQ ID NO: 326327 - protein, 116 aa, Zea mays
  Clone ID: MRT4577_60681C.1.pep
NQLNQTSDKFIRFRIESNYVASTVDPLVITENSHSEISTIFIIKKNGKRKLKTKICSCQSPSLPDFSSGVPIFSVLTRRFSVGPIFNRRSLELAASSWRSLLQPPVALDFFSAILI

SEQ ID NO: 326328 - protein, 141 aa, Zea mays
  Clone ID: MRT4577_60682C.1.pep
FSQGGPPRFFWRAPWELFSQGFFPLPGVFGFWKDVSPLGGGGTPRFFEFFFPLKSRSLASRVPLSFVLAGEKKKKKSPGRGTLACLLFCFPPIRLFCWVLGFWGLGFPKLGVLLVFFPLFGGFWAALAWFLVWWELAAPLF

SEQ ID NO: 326329 - protein, 62 aa, Zea mays
  Clone ID: MRT4577_60683C.1.pep
TDANLLKTPTANSLARGVHVFLMCCAFKHLPLSCVRNLNGYSNFGMRAFFECVVMHPPRKNL

SEQ ID NO: 326330 - protein, 72 aa, Zea mays
  Clone ID: MRT4577_60684C.1.pep
HLSHTPWRGHGRKSLRSLLPAYRVCLRSAFRKVHRDRRWDLFITFLVSIAFLDVRLILLTCSEHFFGKVDCI

SEQ ID NO: 326331 - protein, 29 aa, Zea mays
  Clone ID: MRT4577_60685C.1.pep
HLQACGFIVEILMFIVLYKHKTEQITSLL

SEQ ID NO: 326332 - protein, 95 aa, Zea mays
  Clone ID: MRT4577_60686C.1.pep
PDGVLSSQCHRAPWTCPHVQALHGRTRVQSSMMQTTQMVRGSLIDQRSSTRKDGNGEDSSDFACHSEFAPSNICTQYNSIPYHVGILYPMDIHTQ

SEQ ID NO: 326333 - protein, 107 aa, Zea mays
  Clone ID: MRT4577_60687C.1.pep
QARSSRPISYLGVLYSYESVLALATSASSVSMCCSSSAQPVAHALQPRRGRLIEPRDELRPRGAGRRALAGVSSDGRAGVGGFLRLGWRGPASPPPAPPKHLCRLAI

SEQ ID NO: 326334 - protein, 93 aa, Zea mays
  Clone ID: MRT4577_60688C.1.pep
LEQALQFWKQEFIKGKMDPDKFDKGYSYNIRHSFGKEGKRTDYTPFSCMKIILTNPPSQGDFHGCPFRHSDAELLKQKMQTYKIPASGISQIL

SEQ ID NO: 326335 - protein, 68 aa, Zea mays
  Clone ID: MRT4577_60689C.1.pep
SLERRETKRANGANQERTDPAKGKGGTVRKATEQNERQARAHKPQEKQKPANEKEHYDTTGPESWEDT

SEQ ID NO: 326336 - protein, 85 aa, Zea mays
  Clone ID: MRT4577_6068C.1.pep
MTKKTHINTLSIWLIKILLWDFMLFDNSHPTRLNLFDACSMSVFMIKACARHWCSEVWANNHVLAASGPPLVLLLMLIYLMNVDT

SEQ ID NO: 326337 - protein, 79 aa, Zea mays
  Clone ID: MRT4577_60690C.1.pep
NNQKEYTLTTGARTTKRHQKRERRKQTPSPKKNKHKHKKGRPPPAGLVYPGINHDPGHAAAQGLPKQRLLNARLNGGQL

SEQ ID NO: 326338 - protein, 35 aa, Zea mays
  Clone ID: MRT4577_60691C.1.pep
RAQLAGRHGTRCRVPPIALQLVRDVPLDGLHHEAQ

SEQ ID NO: 326339 - protein, 56 aa, Zea mays
  Clone ID: MRT4577_60692C.1.pep
TRKPAPILCNVGEANSFKLVYVGTKKNKSVPRTYNTSSLTKTPAFTVRNTSKPRTR

SEQ ID NO: 326340 - protein, 207 aa, Zea mays
  Clone ID: MRT4577_60693C.1.pep
MGSNEADKPLRRIGASFEQLAAVAKQQQPQQPAMAAGDFSRACSNVSVLFGCLGIAFKFAEMDYVAKVNDLLEASKTISTLPSMVELDIQKGTVRQAGSHTRNLLRVKRGIDMVKVLFEQILVTEGNSLKDAASKAYAQVFAPHHGWAIRKAVGAGMYALPSKSQLLKKLNEDEKSARAQMQSFVRSSGPVILYVEDSSLQELGLDW

SEQ ID NO: 326341 - protein, 125 aa, Zea mays
  unsure (1)..(125): unsure at all Xaa locations
  Clone ID: MRT4577_60694C.1.pep
PLRQGGXPPPLPPRPVPGGREKAPLRKAHAFKQPGERFRSWDPARQDRFVRGFSALLGPPKVTPELRSLWIPPLPKWDASLGMKISPRLPMKPNMWCLMLVLHNKENACMLSPGTKIEKLSPPPP

SEQ ID NO: 326342 - protein, 60 aa, Zea mays
  unsure (1)..(60): unsure at all Xaa locations
  Clone ID: MRT4577_60695C.1.pep
MSKMQSESVKDAIYQIVGDAKEKNRXFTETVELKIVLXNYEAQKDKHLSGYAKTPHIPQV

SEQ ID NO: 326343 - protein, 86 aa, Zea mays
  Clone ID: MRT4577_60696C.1.pep
SAIGYIPLGFQLVGHRDSHAKVAWFTGSCLDFIVARIVRGTVTYDSCACCHDDGQYPFMRGSMVQLKNFVRSYCKAIVVIIMCHNV

SEQ ID NO: 326344 - protein, 489 aa, Zea mays
  Clone ID: MRT4577_60697C.1.pep
MATARKDPQQVDKVNLKPSESGKGVVRRARSVPTSPDRRSSPSPAPVSDNASRPASSLNTRTTSSRSTTTSSSAASSSHGKTMRSASSSVGGASASARQTNAARRRAEKPGATSVWPAAGGAVTNASSSKDVASRAAKSPSTAAQKTRPAGVEKAAASSSVKLKTKPQKTTAGAGKTQAAPPARAPPGTVIAKKSTGAENYVPIQRTTSVPAARPTETLKNEEQEVDELLMQFDEKESISTSSIEEHLQERLPDPVDLKSVDLDSSKTTSSSSSQEECKDQEENTGDILEEKRDGKDSEDLSSTGDKACVGLGSSDINIPMEEAVDEPVKPAEAVDEAGLKRDVCCSPAEPNEAVGQNELNEAAVVGETTTEPKEAEDEAKIIKQVDCETASKEVASTGAESRDDAATMEREPLVAAAAAPQEEKAKAEEKTTQPTKAVESAKWRTKDEGRSNEATEEGRGKSTTTAATQERKNKVMALVGRFETAMSG

SEQ ID NO: 326345 - protein, 76 aa, Zea mays
  Clone ID: MRT4577_60698C.1.pep
GKKVGFGNFSPANPKKGRWVRPPKNGGDYSDFPPSPRVSLLGELNGLSPRPGAPGDLSLAGGGDPFASRGARGLSP

SEQ ID NO: 326346 - protein, 174 aa, Zea mays
  unsure (1)..(174): unsure at all Xaa locations
  Clone ID: MRT4577_60699C.1.pep
RLPPWRRTCCRLLALSLPCLPAVTAPAGSGYGAAPGVAALAEAAVAYATSETVPQQSVDEISLSLAVLRRRAPLRLLVFVLETHYEDEERDDLIRKLAFHGLVREIAQDFKIYLLFPTHAVXALQEAAEAYLVGINKDTNLCAIHAKRVTIMPKDIQLARRIRGERANPSSPGI

SEQ ID NO: 326347 - protein, 194 aa, Zea mays
  Clone ID: MRT4577_6069C.1.pep
SEGGSFEPISWNLRLRIAIGAARGLAFLHSSEKQVIYRDFKASNILLDTNYNAKLSDFGLAKNGPTGGDSHVTTRVMGTYGYAAPEYVATGHLYVKSDVYGFGVVLLEMLTGLRALDTARPAQQHNLVEWAKPYLADRRKLPRLVDPRLEGQYPSKAALQAAQLTLRCLEGDPRSRPSMAEVVLAFEAMAPAQG

SEQ ID NO: 326348 - protein, 82 aa, Zea mays
  Clone ID: MRT4577_606C.1.pep
MAWTSRRMVASALVFLLMLLAASEMGTTRVAEARHCTSQSHRFVGACMSKSNCENVCRTEGFPWGECRWHGIERKCHCKRIC

SEQ ID NO: 326349 - protein, 41 aa, Zea mays
  Clone ID: MRT4577_60700C.1.pep
KCGWMLCLQGIRVCVSGYFCVVGGFYLKKSFCWVISFVIKI

SEQ ID NO: 326350 - protein, 66 aa, Zea mays
  unsure (1)..(66): unsure at all Xaa locations
  Clone ID: MRT4577_60701C.1.pep
EDEDPIPPSTTPXIXTSVQSTGSCDTSPDTVSPSLSPGFEDLSHVQAGSPAINGXSQTDDEEMTGE

SEQ ID NO: 326351 - protein, 61 aa, Zea mays
  Clone ID: MRT4577_60702C.1.pep
FVPQLPVDVVRVTILTLVGDKEQLTQHTGFFCSQNGILQCTKSKKALELTLVSPLFLLNSG

SEQ ID NO: 326352 - protein, 40 aa, Zea mays
  Clone ID: MRT4577_60703C.1.pep
ELKNGRLAMFSMFGFFVQAIVTGKGPIEKPTERFAMRCNC

SEQ ID NO: 326353 - protein, 78 aa, Zea mays
  Clone ID: MRT4577_60704C.1.pep
SSLLTCTRDLSSRRHSRVHLSETCRARAPGICRRCHLAVVRTSWGRRRERALGIRCRSHSHLAECAPQGGHRRAGRVG

SEQ ID NO: 326354 - protein, 42 aa, Zea mays
  Clone ID: MRT4577_60705C.1.pep
ICNEADVYNNHPRHDNWDVTSRDLCCFPGKGVLNTNLLCFVQ

SEQ ID NO: 326355 - protein, 141 aa, Zea mays
  Clone ID: MRT4577_60706C.1.pep
PGSYRPPFTRSCYPSGYGWGFSGSSPGSVKGVPGVGSFCCFSRGFPLFSPVLGSMVVAFSWASAVLFLPAGPFGVFAPGGFPLFLPRFFFASPPPPFFCGAPPPLPPFCPRCLRVAGLWSFPCFSPLFSSPGWKANFPPNG

SEQ ID NO: 326356 - protein, 124 aa, Zea mays
  Clone ID: MRT4577_60707C.1.pep
FYYLKWCTSDMVQHTREPKKKLSVFSCDILGTVIQVTDLQSRRRGDELRTFSVVIILDQKIRKKKLPLLDSNGTHFFLPLLSHTIQTAEPAVRRTFCRKRALAEGSVPKWPPIATVAVLLLIFS

SEQ ID NO: 326357 - protein, 67 aa, Zea mays
  unsure (1)..(67): unsure at all Xaa locations
  Clone ID: MRT4577_60708C.1.pep
GRPFFFXFFFFFFLFFFGVFFLWYQFFPSVGSEQRAPTTRIKYQLRPRATPTELLTRSGLHYLSDSK

SEQ ID NO: 326358 - protein, 86 aa, Zea mays
  unsure (1)..(86): unsure at all Xaa locations
  Clone ID: MRT4577_60709C.1.pep
VCTPIMIRLPCNDAXTYDSATMTGDAKATITNEEQYTLGSKAGSSIANDLLDPIRGKNPWIMYAHLNHFAWSVWVLKGVTGAIMED

SEQ ID NO: 326359 - protein, 155 aa, Zea mays
  unsure (1)..(155): unsure at all Xaa locations
  Clone ID: MRT4577_6070C.1.pep
FFFFFFFFCCFFFVFGGFFPFFFFFFFFFPEKKAGGGIWKLKSQGGGPNGGGPGPPGGPXHGYKPPXQRPPPGKTLTPPRGPPRDPEGIQISPRPPRFCPPXSNKAANPPKFPKGPPGXRPSPRLGPPPLXAGGGPFWPNPESGKAPPGGGSPPP

SEQ ID NO: 326360 - protein, 391 aa, Zea mays
  Clone ID: MRT4577_60710C.1.pep
MNSRIPFLQKMHRWIIPSCGDTRQPRPSSRHRDAFPRPASASASASAAPSPQKLRKVGSEGTLVLSVPKDVEEIRTMSAYGRLKLFTYHELRKATGNFNPGQIVGEGGFGVVYRGVIDGSVRKGYPSTAVAVKVLNPQGLQGDREWLTEVSYLGQYSHPNLVELIGYCWHEDHRLLVYEFMAKGSLEHHVFRRSCSLSWTTRVAIALDVARGLAFLHGSDRPIIYRDFKSSNILLDAKFNAKLSDFGLAKEGPMGGETHVSTRVMGTYGYAAPEYVATGHLTVMSDVYGFGVVLLEMLVGRRALEPSRAGGRDGSLVDWARPILIRPKKLERILDRRMGEVCSEMGLQRVARLAYDCLSQNPKVRPSMARVVTTLEAVLAAGAGAADAPPR

SEQ ID NO: 326361 - protein, 113 aa, Zea mays
  Clone ID: MRT4577_60711C.1.pep
MKLIAAYLLAYLGGNSSPSAADVKNILDSVGAEADEEKLEFLLAELKGKDITEVIASGREKFAAVPSGGGAIAVGAPAAASGGAAAPAAESKKEEKVEEKEESDEDMGFSLFD

SEQ ID NO: 326362 - protein, 172 aa, Zea mays
  Clone ID: MRT4577_60712C.1.pep
RDNPEAAAQLPAPSTKARRVSLGNGGGYQQPLKPISRRTSLIPLPRHNSLLSIAAAAAVSPLDRITENLSSRSPSPCSPPVVSVDKGSRSRRVSSLLRRSLQKKVVIRPSVAAQAAKKAGAAAPAAQGTDSSARRAARRVPASGGGVGGQKVRQQNRDKERGWNNGTSLRNF

SEQ ID NO: 326363 - protein, 101 aa, Zea mays
  Clone ID: MRT4577_60713C.1.pep
LLQQVTQPCDIWMEGTRQPRRHRRRSCRVARPLAGVPIIVVVVGEPNKEWLLRQGHVAFLALRGLIGSVPREEIVVALLPIHTEEEPRARHHSRPASRYPM

SEQ ID NO: 326364 - protein, 45 aa, Zea mays
  Clone ID: MRT4577_60714C.1.pep
APLGDLCRLNENSWFQKKKKKKKKKKKKKKKKKKKKKKKKKKKAA

SEQ ID NO: 326365 - protein, 64 aa, Zea mays
  Clone ID: MRT4577_60715C.1.pep
TCRHSSVQADDSSAATREWIPMTVVARRCDGHVNGSLLDIHLSGSQQPVTACSLAVRSRYSLHS

SEQ ID NO: 326366 - protein, 147 aa, Zea mays
  unsure (1)..(147): unsure at all Xaa locations
  Clone ID: MRT4577_60716C.1.pep
PTRPWTHGRTLGLTYIEKPGHHFTLTASFGSVDASSYYTLAAPGXLSTKYLDLNNQVIKSVKDFAESVKPIAAICHGQXIIQXGRVLTGKNGIPYPPENLNVLLXGGGTXLEADWTHCFFTVGNLGTGCTLPXHPKFVSELMKFFGG

SEQ ID NO: 326367 - protein, 101 aa, Zea mays
  Clone ID: MRT4577_60717C.1.pep
QRRSRRAKEAWAQSKRRPAGRREVAGRASSGRDCHGSRGARRRAEGHGRTSRAPGGRNREGPTRETGASRGKRRGRGRARLVGMGDRTAGEDEDGQVSPRA

SEQ ID NO: 326368 - protein, 88 aa, Zea mays
  Clone ID: MRT4577_60718C.1.pep
SDIRETDAEILALETHLMDSLHHLLDEPDGDADTADNKTGVRGSTTRTYVLDTRAMAGTPNDTNDLPGYYAFVVDMPRLDTPDILPQV

SEQ ID NO: 326369 - protein, 121 aa, Zea mays
  Clone ID: MRT4577_60719C.1.pep
QKITPLGSRPGKDKTPGGYFNNAAPKGGGGFFSWGPVWNTKTKIRPPFIAIRNRNKGGGITFRRVNKNRSKGGFIGYTGGATTTGTTQGFLKDNFLKSGAGGLGLVPPQHQQQQGGGLNPF

SEQ ID NO: 326370 - protein, 91 aa, Zea mays
  Clone ID: MRT4577_6071C.1.pep
PCTNTTAPSTYLNNPYVRKALHIPESLPRWDMCNLMVNLQYRRLYESMNSQYLTMHSSQKYQILLYNGDVDMACNFMGDEWFVDSLNQKME

SEQ ID NO: 326371 - protein, 90 aa, Zea mays
  unsure (1)..(90): unsure at all Xaa locations
  Clone ID: MRT4577_60720C.1.pep
ATWNLQDIWXSLXCTVLEMLTGEVPYPDMEWTQALLKIGRGIPPEIPNTLSEDARDFIKKCVQANPNDRPCAAQLFEHPFVQRPLQQYGV

SEQ ID NO: 326372 - protein, 103 aa, Zea mays
  Clone ID: MRT4577_60721C.1.pep
FVVTDADFSRRLNMWFHALVSNCDSVLVPAPSFSAHSRASACYDWGNLGYYPGGAGLSSRIQTLRRLLNQMNLDHIREHARAKFLDKDDLNHAPRRRWLRSHS

SEQ ID NO: 326373 - protein, 66 aa, Zea mays
  Clone ID: MRT4577_60722C.1.pep
MARTQSVVAVFVVAPVLLLAPAATTLEAAITCGQVSSAIAPCLFYTRGTGSGPFAFCCSGVRNPLS

SEQ ID NO: 326374 - protein, 92 aa, Zea mays
  unsure (1)..(92): unsure at all Xaa locations
  Clone ID: MRT4577_60723C.1.pep
EETYKGLTKLKWLAHGGQNLLYKKGLFIGIDYSRPTTTNPQPRLKGTPILWREPSSINLFLHQSEQKLKSYEGERPSKTFXFVSSQEFKLPG

SEQ ID NO: 326375 - protein, 52 aa, Zea mays
  unsure (1)..(52): unsure at all Xaa locations
  Clone ID: MRT4577_60724C.1.pep
PTLFKDAIDNFSAIISCVLIFTSNSFIFKINETXNINTIKTSSYKSAKKFLY

SEQ ID NO: 326376 - protein, 182 aa, Zea mays
  Clone ID: MRT4577_60725C.1.pep
MGQSLSVLSSSSSQRDACACAADGRVRRQRRQQRGHARRDADARRDGVGLQPATARETAAQARRLQLHGTAQRNPTAPMLNYSTHDTVPVRGLYRTVHAHTDAWLSPRTREKTLQPTASLLHASAFSLELESSLFTLPYWMESTGPATASQVNNSQVTVGVSGSYPPPCAALDLPAAACLVP

SEQ ID NO: 326377 - protein, 44 aa, Zea mays
  Clone ID: MRT4577_60726C.1.pep
RRRRSYSSTKRWPVAGVGRINDGHDWARAQLAEASVGFCSLPGR

SEQ ID NO: 326378 - protein, 66 aa, Zea mays
  Clone ID: MRT4577_60727C.1.pep
AGPSSGAGAAPVHDADDFMYALMVQIHVAQAVCRPPGSGISVVEGTLLPELFDSVCIKTEYAGASR

SEQ ID NO: 326379 - protein, 118 aa, Zea mays
  Clone ID: MRT4577_60728C.1.pep
PPKRARKIPGKRVKAFPGKVFLRGGFPQFFQKSFWAPRSLRGSLEAPFLQLGGTHPGGVWGEPPTLLGVRAASPFFSIIRGSVWPPRGGFPPAPGTGVLVRQFGVLFLTKVGQLKAPF

SEQ ID NO: 326380 - protein, 86 aa, Zea mays
  Clone ID: MRT4577_60729C.1.pep
TGRLRGIMPLYEKYGENLGHADGVSRCALRHPYRTYVAGATPSALTRLHGLGQDGSVWIAAKERADEDWCALRFPDGHLYSTPAGG

SEQ ID NO: 326381 - protein, 218 aa, Zea mays
  Clone ID: MRT4577_6072C.1.pep
MYAPPMAQHRQRSFQSFARTWLPLAVMILMCFAASTTAQQQPPPLPQPTTTGTVPLPSVPACLPAQATLSPCVSYLIGNSSSPPTECCAQIRAMFQSQAPCLCAALASAGPAQQLGSALGQLLPTSCDLPADACSAGTTSAAPAGPASGTTSAAEPPAAATEPNAVSDDPTAPAGGAGIKSVPGLLASATAAGSSGIPAAALFVSFCWSFIYLLSTLI

SEQ ID NO: 326382 - protein, 58 aa, Zea mays
  Clone ID: MRT4577_60730C.1.pep
IIWYFPSRLFLYSSSRIYGQYLSQLMCSGVASDSARHMKCMASEEDLLVCSTKRKFVP

SEQ ID NO: 326383 - protein, 111 aa, Zea mays
  unsure (1)..(111): unsure at all Xaa locations
  Clone ID: MRT4577_60731C.1.pep
KXKKRGRKKKKGKKRGEKRRKRKKREEKEDKREEEGKKGRKEGRKEEKRREKKVKKGRKGKRRXKKEERIKEEEDRKXXXXRXXKIEDXXRKNRRKERIGNAEDCVLPSLP

SEQ ID NO: 326384 - protein, 551 aa, Zea mays
  Clone ID: MRT4577_60732C.1.pep
MEMEAVESHGGAGRRTPKRDRGISWACVFILASNCFQFIAYFAVSTNLVNYLKDRLHQGSKAAANGVTNWMGTSAITPLVAAFLADAFLGRYWTIALFLVISVLAYVVLTVSAAAALESAAFYAGLYLLALGGALQPVLSSFGADQFDEEERGRQSSFFNWFYLSINVGSLLGGTVLVWVQSSVSWGLGYGIPALFSALAVAAFLAGTATYRRHQPPAGSPLTRVAQVVVAACRKCGVHASEDAWADAWVDSGGMSAIQGSRRLAHTDQFRFLDKAASVEPSDDKSRPASAWRLCTVTQVEELKCVLRLLPVWASGIVFAAAYTQMTTTFVLQGDTLDPYVGGFRVPAAVLSVFDTLSVMLWVPLYDRLVVPLARRATGHDRGFTQLARMGVGLVVLTAAMLAAGTLEVARRRVIARYGMYDTNTGAGGDGAYLPLSIFWQVPQYVVVGASEVFTFIGQMEFFYDQAPDAMRSLCSGLSMTSFALGNYVSSALVTVVARATARGGRDGWIPDDINRAHLDNFFWLLAMLCAGNFGVYLLIARWYTYKKTVD

SEQ ID NO: 326385 - protein, 229 aa, Zea mays
  unsure (1)..(229): unsure at all Xaa locations
  Clone ID: MRT4577_60733C.1.pep
MEMEAVESHGGAGRRTPKRDRGISWACVFILASNCFQFIAYFAVSTNLVNYLKDRLHQGSKAAANGVTNWMGTSAITPLVAAFLADAFLGRYWTIALFLVISVLAYVVLTVSAAAALESAAFYAGLYLLALGGALQPVLSSFGADQFDEEERGRQSSFFNWFYLSINVGSLVGGTVLVWVQSSVSWGLGYGIPALFSALXVAAFLAGTATYRRHQPPAGXPLTRVPQVV

SEQ ID NO: 326386 - protein, 134 aa, Zea mays
  Clone ID: MRT4577_60734C.1.pep
LLVLFAWCLCISSPRPLELASSSARSRRRSVVCIAQASRSNVVGAPADRAGAGACVLRALQLLQHNSRGSNDCGFFVMSYMKSYDHNAGVISSFNQPDNSRDLRAHALHQLTFHRINKVLPLPLDIQRFMFARN

SEQ ID NO: 326387 - protein, 68 aa, Zea mays
  unsure (1)..(68): unsure at all Xaa locations
  Clone ID: MRT4577_60735C.1.pep
MALLPRTARLALGSTPRAYSAAAAAGAFPTSPAPYGGAPPPAMSKTAEFVVFKVDYLMNWALXGSIWP

SEQ ID NO: 326388 - protein, 610 aa, Zea mays
  Clone ID: MRT4577_60736C.1.pep
IDWCQLIFNDLCEAAKKWHNRITTNVSTTIYGCSIVVLLYYLDHLHTAAAPHNKSGTPRIKFFDKNSIKALTKADKRKVRHGAESFGHCEFRSSTETCYAVGPKIDRQSEPECRTNIFDAPRPGPMPRPTFNIKLPSIKEMMSSKINDLPHRHRSKFTDILAAYDLEVDKSCVAIKDSIDKIIVKQYDIADKFIELIDEVLRAESENLENETDEPQQPGNSADSAGHTVDATQPTPDMPSQASQLETQLGATQFEEIHERQQHIRTVLETFPDESDVVSDQQRGAMATEEMEQNDSGPVFDQTPTPHVDTLKGTTISGSDPPLTEQECIRSLWDLICSKDIDQSRVVIDYGDYSANCMDIYESFAEGKCLEDVFMQCFIECVRDDSKNHRRTLTSNRLILDVNVGALLNFEEQERHSKNPQSFDQNVLQNCLHNTLPALVNPDKCKSIMVPMLSRGHWTLYVINLHHRVIHILDSNPYGIQLGGTEWKDYHYDPIYLGGRKFPWARVIMSRLSKALQHVCPNAEFPKFGNFPLDMPSNCPTMRTGSNDCGFFVMSYMKSYDHNAGVISSFNQPDNSRDLRAHALHQLTFHRINKALPLPLDIQRFMFARN

SEQ ID NO: 326389 - protein, 192 aa, Zea mays
  Clone ID: MRT4577_60737C.1.pep
MSSAPLQIAPVPEHVCYVHCNFCNTILAVSVPSHSMLNIVTVRCGHCTSLLSVNLRGLIQSLPVQNHHYSQQQENFTVQNMGFTENYPEYAPSYRMPTTLSAKGDLDHMLHVRAPEKRQRVPSAYNRFIKEEIRRIKACNPDISHREAFSTAAKNWAHFPNIHFGLGPCESSNNLDEATGAMCHPQKVQDLY

SEQ ID NO: 326390 - protein, 114 aa, Zea mays
  Clone ID: MRT4577_60738C.1.pep
VVLNEYERWNVGAHTGHLVGNALSNPYLSFATALNGLTGPLRCLAKQEVLAWIISVIEETVSGVTTHELKDEVRTTLNSGKVVPAFGHGVLRQTDTPYSCQSEFASKHLPMGSL

SEQ ID NO: 326391 - protein, 107 aa, Zea mays
  unsure (1)..(107): unsure at all Xaa locations
  Clone ID: MRT4577_60739C.1.pep
GKNRPRPRKNDPKQLXKHGMKFGIQCQPKKVANIVPTHPKRXSIKNPLCVTSCSTPVWHIQLVRKDVITCRLLWFNSRNQLYLLVLQALTSLLPLHNEFGPKFKLPL

SEQ ID NO: 326392 - protein, 324 aa, Zea mays
  Clone ID: MRT4577_6073C.1.pep
MAASSRMGLSVYLAIMAAVLASALGAELTADYYSETCPQALTTIKLLVGAAILREPRMGASLVRLHFHDCFVNGCDGSILLDDTDDMVGEKTAKPNNNSVRGYDVIDTIKSAVNTICLGNVVSCADILAVAARDSIVALGGTSYDVLLGRRDATTASMDDANNDIPTPFMDLPALQDSFESHGLSLHDLVVLSGGHTLGYSRCLFFRGRLYNETGTLDPAYAGSLDERCPLTGDDDALSALDDTPTTVDADYYQGLMQGRALLHSDQQLYQAGGAAGDLVEYYAENPTKFWEDFGAAMLKLGSLSPLTADEGEVRENCRVVNQV

SEQ ID NO: 326393 - protein, 84 aa, Zea mays
  Clone ID: MRT4577_60740C.1.pep
INSEVRPRPGQKNPALPSQGSETRRREPFLRRTELAETLCGKRPNRHGCRGGPPPLSLQKAVTVQRTRRCIKGGEGVFSSSFQC

SEQ ID NO: 326394 - protein, 101 aa, Zea mays
  Clone ID: MRT4577_60741C.1.pep
MSVTVTHLQEGSGESPLQGDKIVMHYTGWLKDTSKPDNKGDKFDSSVDRNSTFDTEIGVGRVIGGWDHGVPTMKVGGKARLEITSEWAYGARGYPPIISAR

SEQ ID NO: 326395 - protein, 48 aa, Zea mays
  unsure (1)..(48): unsure at all Xaa locations
  Clone ID: MRT4577_60742C.1.pep
AVALAPPPGCMSXSSXGSCXXDFMSKAGAPRVLLQPSVFPGRRGLXPG

SEQ ID NO: 326396 - protein, 78 aa, Zea mays
  Clone ID: MRT4577_60743C.1.pep
GISPPRVAMPMRYLDLKDQLVIQFPAPVTQLSNADLSFCRSDLQLISNPYLLSHLCLNPFWFFFKATQAPIFSLNNWI

SEQ ID NO: 326397 - protein, 51 aa, Zea mays
  unsure (1)..(51): unsure at all Xaa locations
  Clone ID: MRT4577_60744C.1.pep
PDKVVXGYQLPEMSVGDWLVFDDMGAYSTSAGSRFNGFDSSEIKIYVAYSS

SEQ ID NO: 326398 - protein, 89 aa, Zea mays
  Clone ID: MRT4577_60745C.1.pep
HLFFFFFFFFFFFFFFFFFLTGNHFKHSPRLPDFQINNDNRSLETLTTEISNRQGNSPKHDSFYAKTGRWINLSRETRAPVLGEIKSKP

SEQ ID NO: 326399 - protein, 239 aa, Zea mays
  unsure (1)..(239): unsure at all Xaa locations
  Clone ID: MRT4577_60746C.1.pep
MSTTPRSRSQGSRTTRPWILSGMDFAGSRRKPNLTGKIAVAAALTVMCIIVLKQSPSFSGTSVFSRHETGVTHVLVTGGAGYIGSHATLRLLSDKYRVTIVDNLSRGNIGAVRVLQRLFPEPGRLQFIYADLGDAKAVXPLKFNNLVPPFPLHFCVDEICFALNRXQVNKIFSENAFDAVMHFAAAAYVGESTMEPLRYYHNITSNTLTVLEAMAAHNVNTLIYSXTCXTYGETDTMPI

SEQ ID NO: 326400 - protein, 26 aa, Zea mays
  Clone ID: MRT4577_60747C.1.pep
VMANQKFKISKFEILSYGINKIKGQN

SEQ ID NO: 326401 - protein, 49 aa, Zea mays
  Clone ID: MRT4577_60748C.1.pep
NFSFITQRIRLFVMIRSRNKSIGLGLESGIKNKRMAVRILKVKGLWGIV

SEQ ID NO: 326402 - protein, 221 aa, Zea mays
  Clone ID: MRT4577_60749C.1.pep
DYRIVRAPNYKDRYGTWVKPAVLKEALKTHEFVVILDSDAVFTHLQLPIEWLMNLWDITPETLISMAEDVDNKDDYDPQGNLILNTGFVIARASQRSQDMVKAWKDCPNTIEGCDTWKTKWAHEQSAFSYYIRYLFNEPNDVKNIPCDHANGNIYYSDGKGECRGVFVSHNWHSKAKTIEILSQSVKKTVVQRLYHQFQADKHTLFVDGSNHTFPIDDLII

SEQ ID NO: 326403 - protein, 76 aa, Zea mays
  unsure (1)..(76): unsure at all Xaa locations
  Clone ID: MRT4577_6074C.1.pep
AGLFLPSSVGITDTCEIGNFRVHTVMILEQQDMVCYTAQILVRILSHGGFMKILGEDGDASXLASEISTWDGVIVT

SEQ ID NO: 326404 - protein, 415 aa, Zea mays
  Clone ID: MRT4577_60750C.1.pep
MPTTPRSRSQARTTRPWILSGMDFADSRRKPNFTGKIAVAAALTVMCIIVLKQSPSFSGTSVFSRHETGVTHVLVTGGAGYIGSHATLRLLSDKYRVTIVDNLSRGNMGAVRVLQRLFPEPGRLQFIYADLGDAKAVKKIFSENAFDAVMHFAAVAYVGESTMEPLRYYHNITSNTLTVLEAMAAYNVNTLIYSSTCATYGEPDTMPIVETTPQNPINPYGKAKKMAEDIILDFTKSKKQSDMAVMILRYFNVIGSDPEGRLGEAPRPELREHGRISGACFDAALGIIPGLKVRGTDYSTADGTCIRDYIDVTDLVDAHVKALGKAQPGKVGIYNVGTGQGRSVTEFVEACKKATGASIKVEYLARRPGDYAEVYSDPSKILRDLNWTAQYTDLGQSLAQAWKWQKAHPNGYASA

SEQ ID NO: 326405 - protein, 416 aa, Zea mays
  Clone ID: MRT4577_60751C.1.pep
MSTTPRSRSQGSRTTRPWILSGMDFAGSRRKPNLTGKIAVAAALTVMCIIVLKQSPSFSGTSVFSRHETGVTHVLVTGGAGYIGSHATLRLLSDKYRVTIVDNLSRGNMGAVRVLQRLFPEPGRLQFIYADLGDAKAVNKIFSENAFDAVMHFAAVAYVGESTMEPLRYYHNITSNTLTVLEAMAAHNVNTLIYSSTCATYGEPDTMPIVETTPQNPINPYGKAKKMAEDIILDFTKSKKQSNMAVMILRYFNVIGSDPEGRLGEAPRPELREHGRISGACFDAALGIIPGLKVRGTDYSTADGTCVRDYIDVTDLVDAHVKALGKAQPGKVGIYNVGTGQGRSVTEFVEACKKATGASIKVEYLARRPGDYAEVYSDPSKIHMELNWTAQYTDLGQSLAQAWKWQKAHPNGYGPA

SEQ ID NO: 326406 - protein, 86 aa, Zea mays
  unsure (1)..(86): unsure at all Xaa locations
  Clone ID: MRT4577_60752C.1.pep
FRRQMNEFPAELMPKSSAVTEVFNGSPTPPQASNSRRHQISIFPAPPPTPNEPKLSTCNWARALISKEGEPRSHFFLKKKKIXITR

SEQ ID NO: 326407 - protein, 62 aa, Zea mays
  unsure (1)..(62): unsure at all Xaa locations
  Clone ID: MRT4577_60753C.1.pep
HSIMMHIXLAPPHMIMCVVPQQYNTQRHTGRHKGDLPNIMKQKQGETATETPQGLVRNXGSW

SEQ ID NO: 326408 - protein, 601 aa, Zea mays
  unsure (1)..(601): unsure at all Xaa locations
  Clone ID: MRT4577_60754C.1.pep
MEKIREVMAGLFQYRFRVSVARVGQSYQKPYDHLFETVPYPQGARIPEFSKFSDVYIAEFVWPAKAKSSACSSLQPVQKNRQEEIKFTFNVAKCDRIFDELLKNDNIKLTHTIPPMDKLKRCAYSDQGGAVSPNHRWRFDYLHGCRRIRFLEVLRARSLGFLSNTRGNHLVGGIIAKLPPTWRIFFMALKHKKEAMIVKSIISTLDVEEVRSKDVPRSGPMDSGTSNANVVEGKSGGKNKNKTNRKPKAKQNSDFKKKNIVDLTCFVCGESGHIARKCRNRKGKKGDGQKTVNVAIADAGNSGGGLFRLSVADDCNNVANSVSYSELNLYLVKTKDEALNCFEIYKAKVENQLAKKIKRVRSDRGGEYLSNKFGEYCVEHGIIHETTAPYSPQSNGVAERKNQTLIDLVNAMLDSSGLPKSWCGEAILATCFVLNRVPSAKGDKTPYEGWKGDTLKTLEEAYASPDAEHWKEAVHNEMESILTNGTWEICDLPVGCKXYGIKWIFKKKLKPDXLSINTRIGLWPRDLPKIKAAFLNGELDEEIYMKQSDGFVTHGQENMDLGEADVILNIKLIKGENGIILKQSHYVENIPKLLQHLLILV

SEQ ID NO: 326409 - protein, 115 aa, Zea mays
  unsure (1)..(115): unsure at all Xaa locations
  Clone ID: MRT4577_60755C.1.pep
KKIFFFFFFFFFFFWGPPVNRPFFFQLPGGNAGFFITLTTSSVGKHRVFXXGPPLPDNKKKLPPITGLGQPPGLMLAFQQTFLVLVPLVALLALLGLRAGLLVVFFVRRPVLTGP

SEQ ID NO: 326410 - protein, 76 aa, Zea mays
  Clone ID: MRT4577_60756C.1.pep
SLPVQRKKPVSSLTLLLVHLRYLLPSAAPLASYHSSRDACESITSSSILSTGPPAPTRKRDSFDGARRVRGGKRGR

SEQ ID NO: 326411 - protein, 52 aa, Zea mays
  Clone ID: MRT4577_60757C.1.pep
VSSPKWNRRAVIRCGRLFNRIVYISKVTRPFVDQDISSGGSADSHLQSLPSE

SEQ ID NO: 326412 - protein, 131 aa, Zea mays
  Clone ID: MRT4577_60758C.1.pep
HFQLNNLQDVCLHCHRFPRRRRRCCRPWSFHNTWTVKQAANSCANGQSVYCCNKVTNKPAGNSVGDGAGIANGLSLFSQCSKVDVNVIAIANNLLNKECQANAACCQDSPGTAGAGLVNAALPCVAISNLV

SEQ ID NO: 326413 - protein, 70 aa, Zea mays
  Clone ID: MRT4577_60759C.1.pep
LNNFYTYSKFECRGVGFRRIKCLYIVYCCVLLELNPTKLEWHNYSFNVISTFSIFELDLQCLAIGIKYFF

SEQ ID NO: 326414 - protein, 112 aa, Zea mays
  Clone ID: MRT4577_60760C.1.pep
PGLGHKGRGPGWGNPFLTEPPPLGWGGPPPPRGAPNGPNGLGPTFGVFPKEPAFPFCNQNRNWGSGHPGLTPPPKVPPPRFFFFRGGGFKFGGQAFLGEAGFKERKKKRDQI

SEQ ID NO: 326415 - protein, 69 aa, Zea mays
  unsure (1)..(69): unsure at all Xaa locations
  Clone ID: MRT4577_60761C.1.pep
MVLRVFGYXFLTGSPGLDFHDKILGFMKGYKSTFNLAXIDHRGTPRXHSAGTWTLXEPTTXALCWGNAY

SEQ ID NO: 326416 - protein, 193 aa, Zea mays
  unsure (1)..(193): unsure at all Xaa locations
  Clone ID: MRT4577_60762C.1.pep
PPPPXPGPPSIPPRPPRAAHPPPPKGAKGGPPPGGAPLKTGDPPGGGNSAKGPPLAFPGGDFPPPXAEPPGPPPPFXXAPPFWPKVGISLKGFFGPAXGPPAKRKGSSPPGWPPXGPKGPPEGQFSPRPRPANCFQNGQKNXFGGLRPCQMKPPPPPGPPPARFNFLEGPRKGAKKKNGKVFSPALFQKIANC

SEQ ID NO: 326417 - protein, 107 aa, Zea mays
  Clone ID: MRT4577_60763C.1.pep
LGMLVRDYLTLKGKQGGVAASIGRFSDRIVCDSFSDEGFLYPPLPKAAVGFLELVELCKGLVVNHCQLTLEVFKGLYNPGEKGTQLMGKNAQSLQSVKLVYQPCSWS

SEQ ID NO: 326418 - protein, 51 aa, Zea mays
  Clone ID: MRT4577_60764C.1.pep
CKIIIDNCWSQPNIQNSVIPVTKLIKFRYPSVNFLWKRKKTKCQKKHVPEL

SEQ ID NO: 326419 - protein, 57 aa, Zea mays
  Clone ID: MRT4577_60765C.1.pep
ILICPRDAAGDRAQLPLVCPHRAIICSDLASSCPCPSADHCHRGRLHLDVGCQSLGP

SEQ ID NO: 326420 - protein, 100 aa, Zea mays
  Clone ID: MRT4577_60766C.1.pep
KGWSPLTGPPPPKNPNGPAGFPYKVFFPNPSAPKGIPPGIPPKGFPNGFPILVLFKLRRSGGPPSCLGFPVPFREVGFPPARFCAKNQGPPPKVPPLGLL

SEQ ID NO: 326421 - protein, 289 aa, Zea mays
  Clone ID: MRT4577_60767C.1.pep
MARVFVGNLDPRVTAREIEDEFRTFGVLKSVWVARKPPGFAFIDFDDRRDAQDAIRDLDGKNGWRVELSTKDGGGRGRDRNGSDMKCYECGEVGHFARECRLRIGSGGLGSGRRRSRSPRYRSRSRSRSRSPRHRRSPSYGRRSYSPRDRSPRRRSYSRSPPRSRARSLSRSPPLPPPPPRNNSMSPRGAREMSRSSPPPPKNNSSSPREAREMSRSPPPPAKNNRSSPREAREMSRSPPPPPPRNNSRSPPGARDVSRSPPPPPDARRSYSRSPEQQPQHESPYANDA

SEQ ID NO: 326422 - protein, 67 aa, Zea mays
  Clone ID: MRT4577_60768C.1.pep
YFCPERKRHACRGRSCHRGARGHPSLPTSSSQPPRPGRQRWYATCLVHPSHKMFYLFTRFTHGTLIA

SEQ ID NO: 326423 - protein, 143 aa, Zea mays
  Clone ID: MRT4577_60769C.1.pep
MARVYVGNLDPRVTAREIEDEFRTFGVLRSVWVARKPPGFAFIDFDDRRDAQDAIRELDGKNGWRVELSTKVGGGRGRDRNGSDMKCYECGEAGHFARECRLRIGSGGLGSGRRRSRSPRYRSRSRSRSRSPRYRRSPSYSRR

SEQ ID NO: 326424 - protein, 80 aa, Zea mays
  unsure (1)..(80): unsure at all Xaa locations
  Clone ID: MRT4577_6076C.1.pep
VLPRLRAFVPLSLLLIVWAFPVYAFQCAFSSCAAGLVWVWVCLSWAGPFALSALGXGGAVWFPPYFFFTPPHWIELRWII

SEQ ID NO: 326425 - protein, 156 aa, Zea mays
  Clone ID: MRT4577_60770C.1.pep
MATRSSVLLLLTALAAATAAPSAATRKLMFLVQPQPNLLTYHNGAVLSGDIPVSILWYGRFTPAQKAVVSDFLLALSGAAPPQGSPSVAQWWSSVNQLYLSKAAAAAAVSKNGAHGGGGAKSARVVLSGQASDEGCSLGKSLKLSQLPALAAKARP

SEQ ID NO: 326426 - protein, 255 aa, Zea mays
  unsure (1)..(255): unsure at all Xaa locations
  Clone ID: MRT4577_60771C.1.pep
MARVFVGNLDPRVTAREIEDEFRXFGVLRSVWVARKPPGFAFIDFDDRRDAQDAIRELDGKNGWRVELSTKVGGGRGRDRNGSDMKCYECGEAGHFARECRLRIGSGGLGSGRRRSRSPRYRSRSRSRSRSPRYRRSPSYSRSPRDRSPRRRSYSRSPLGSPARSLSRSPPLPPPPPRNNSRSPPGAREVSRSPPPPPPRNNSRSPPAARDVSRSPPAARDVSRSPPPPPDARRSYSGSPGQQPQRDESPYANDA

SEQ ID NO: 326427 - protein, 277 aa, Zea mays
  Clone ID: MRT4577_60772C.1.pep
MARVFVGNLDPRVTAREIEDEFRTFGVLKSVWVARKPPGFAFIDFDDRRDAQDAIRDLDGKNGWRVELSTKDGGGRGRDRNGSDMKCYECGEVGHFARECRLRIGSGGLGSGRRRSRSPRYRSRSRSRSRSPRHRRSPSYGRRSYSPRDRSPRRRSYSRSPPLPPPPPRNNSMSPRGAREMSRSSPPPPKNNSSSPREAREMSRSPPPPAKNNRSSPREAREMSRSPPPPPPRNNSRSPPGARDVSRSPPPPPDARRSYSRSPEQQPQHESPYANDA

SEQ ID NO: 326428 - protein, 80 aa, Zea mays
  unsure (1)..(80): unsure at all Xaa locations
  Clone ID: MRT4577_60773C.1.pep
RSDVCRSDKVVMALFKACLGLDVCKGSRRHPSTKFGEVYAGWLGVVIWGRDGNRQTRSWWLPVWYEFPAGLRGTHRXXXR

SEQ ID NO: 326429 - protein, 91 aa, Zea mays
  unsure (1)..(91): unsure at all Xaa locations
  Clone ID: MRT4577_60774C.1.pep
ASTCLGTRISDPATLYAHLVNGFRFDMCGKAKTAMKNVATTYCSSERSTXSPXAVEPDYLDGCLIXDXYGLDTYRLTKPVENIELELDSLD

SEQ ID NO: 326430 - protein, 139 aa, Zea mays
  Clone ID: MRT4577_60775C.1.pep
HLQVPDSIPLGGKFWAWLKKKSPCCASPTLEDRYPARHPPVGSSQSGQLIGPLVMGDQGSGVFSVGTIFRSLLNIILGGRSFPPRPSFFSGTKLLTHQTCTEQMTKPNSGYHFPRQEMPHWHAQNYLMPPTFDLEANAG

SEQ ID NO: 326431 - protein, 36 aa, Zea mays
  Clone ID: MRT4577_60776C.1.pep
FALVTWKMEEHHVSGMYLFRKKDTAAARVACQVIKK

SEQ ID NO: 326432 - protein, 96 aa, Zea mays
  Clone ID: MRT4577_60777C.1.pep
SNAARRLRYDDWNGCTMPTILPIVQHIQPSQEQRKVISTGAVFTSFLNLRTAQTVTLQRIGEDQILTQLQKDKAGDTASTIVTAENAYWHMDAPIK

SEQ ID NO: 326433 - protein, 50 aa, Zea mays
  Clone ID: MRT4577_60778C.1.pep
KWDVLDLLVKVDSAMSMSKRFNNKSVFQGKVYRIMRSFVKMIGVNEICEW

SEQ ID NO: 326434 - protein, 123 aa, Zea mays
  Clone ID: MRT4577_60779C.1.pep
QADRGRTERVFAVGDRVFLKLQPYCQSSITERVNQKLSFRFFGPYTIIRQINPVAYELQLPAGSSVHPIFHVSQLKAVVGPHTPVSPSLPDSVHNLQIPKTVLDTRLRHRAGKVITQLLIKWT

SEQ ID NO: 326435 - protein, 184 aa, Zea mays
  Clone ID: MRT4577_6077C.1.pep
SFLAYKTPSKKNRREICKYLFHEGVLYAKKDYNLAKHPKLDVPNLEVIKLMQSFKSKEYVRETFSWQYYYWYLTNDGIEHLRSFLNLPSEVVPNTLKKSSKPPSRPFGSGPPGDRPRGPPRYEGDRPRFGDRDGYRGGPRGAPGDFGGDKGGAPADFQPSFRGSRPGFGRGGGGAFGAGGSSME

SEQ ID NO: 326436 - protein, 131 aa, Zea mays
  unsure (1)..(131): unsure at all Xaa locations
  Clone ID: MRT4577_60780C.1.pep
MNSKEMCQEPCDELSEISSQEASNSSGLVSLDLTLTVAAXXXXESSTTDNSNSSATPADAPAVAREPSPCPRATSPMPFLVADEAEMSFGWPGSFRPATAVAPAPAGSAVLNSAGGVAVHAREEPDLTLRL

SEQ ID NO: 326437 - protein, 96 aa, Zea mays
  unsure (1)..(96): unsure at all Xaa locations
  Clone ID: MRT4577_60781C.1.pep
SCDLVLGALVGGLVLLEVLVVGAAVGADGLPLRFGVVVPFRALLRRSPSRWWRGAVGLVCRGWCGRGRSLCLAAGXCSGFLIVFFFCSVGRSCFSV

SEQ ID NO: 326438 - protein, 252 aa, Zea mays
  Clone ID: MRT4577_60782C.1.pep
MNDKEMMCQEQCDELSETEISSQEASNSSGPVSLDLSLCTTDNSNGNNSNSGGAQADAAREPSRVFTCNYCQRKFFSSQALGGHQNAHRRERTLARRALRLDAAGPYYGYGYGYYADVASLPLYGSCLYPIGIQAHASAAALPEHEDARAGADELRRPARGLLSPMPFLVADDEEMLFGWPGSFRPDAAAPAELGRRRRRARPGGARSDAQAVKCELIRRLDWLIRQAVSFLFLNWSIGPCLALVRSRRSLA

SEQ ID NO: 326439 - protein, 218 aa, Zea mays
  Clone ID: MRT4577_60783C.1.pep
MNSKEMCQEPCDELSEISSQEASNSSGLVSLDLTLTVAAAAAESSTTDNSNSGGAPADAAAVAREPSRVFTCNYCQRKFFSSQALGGHQNAHRRERTLARRTLRLDAAGPYGYYADVASLPLYGSGLYPIGIQAHASTAAHPEQQQRHEDAAELRPARGLLSPMPFLVADEAEMSFGWPGSFRPATAVAPAPAGSAVLNSAGGVAVHAREEPDLTLRL

SEQ ID NO: 326440 - protein, 96 aa, Zea mays
  Clone ID: MRT4577_60784C.1.pep
TTPTATHSSILIEPSASDARGITLTIGSLHYICHIETLNYPLKPYDHRACHTLPVHPDHTDHIHHCIYRCAYSYIPLPLLRSCYVPFPQDEDITLA

SEQ ID NO: 326441 - protein, 73 aa, Zea mays
  unsure (1)..(73): unsure at all Xaa locations
  Clone ID: MRT4577_60785C.1.pep
MLSVVRVHLRSEIPILGCEISPYMLVWWSDGAVSTNDVPETAPADGQLLRYRWYRIQSXDXKVPICSVHLMEQ

SEQ ID NO: 326442 - protein, 59 aa, Zea mays
  Clone ID: MRT4577_60786C.1.pep
ITTTIMTNHHYPYSTPSTSLYILLPPSCNSPLFTTLSSTSYNTTSPTTFPTFLPPFIRT

SEQ ID NO: 326443 - protein, 71 aa, Zea mays
  Clone ID: MRT4577_60787C.1.pep
YSHFPEAHTHYFGCPEHDSEPLVRTLPQLLLLYRRQAHPLIFTYFTGLPVSYGGPDGLFMSFDRARALLQK

SEQ ID NO: 326444 - protein, 95 aa, Zea mays
  Clone ID: MRT4577_60788C.1.pep
MGKTRTFQKKGGLEHHLKKPPVGKKHFGIFVNGGGKFMAFGRLFWVGGEIIGDLHKRRTVCCWLMFCQWWFKAIVLKKKNKKPKKKKKKKKKKKK

SEQ ID NO: 326445 - protein, 150 aa, Zea mays
  Clone ID: MRT4577_60789C.1.pep
GRSCKLSRLGSQLAVMSSVGDIPHHGVPYGDEDSQQWRTCSLRHPLAVLERSLHSIQREAGLHGKARGESDLAQDEVGARERKIVVVVIISDARETISFDQGRFLHPQVQAARGTSRSWRSRHSMLLLPSRVVIMGEVSADPKTLSRTGR

SEQ ID NO: 326446 - protein, 38 aa, Zea mays
  Clone ID: MRT4577_6078C.1.pep
KYDFCAPQPTQVKSRWFLVSCPRLSRLALVGSLFKFVS

SEQ ID NO: 326447 - protein, 98 aa, Zea mays
  Clone ID: MRT4577_60790C.1.pep
MYIRSVERARLEGSDESKVCSDENSFGSSKERSGDDNDNEGGDSGDGDGDDGEGDGDDGKGGEGNDGGDGDGGDGGGKGGSGGVGSGNDKASGKAPLV

SEQ ID NO: 326448 - protein, 124 aa, Zea mays
  unsure (1)..(124): unsure at all Xaa locations
  Clone ID: MRT4577_60791C.1.pep
SAENILQKLDEIQXKKCGPKDPPEQIILDEEFDPQVEKAREKIVISIRDKDGHQQMGVXKDKKFDKFLKVYAKKEKLTPFDLFFVFKGKKINPSFTPRAFDLGDKKIIEVGVKKSWGHPQKRWV

SEQ ID NO: 326449 - protein, 222 aa, Zea mays
  unsure (1)..(222): unsure at all Xaa locations
  Clone ID: MRT4577_60792C.1.pep
MCRFMVMGSNRLLSSQLLDESSSDDDEDFILSAAQIIHTVSQVRTKPGGSVPGRAYIYRDREAGHARLYQDYLADIPTYGPNLFRRRFRMHRSLFIRIMNVVEQHDDYFKQKRNAAQQQGLSCLQKVTAVFRMLTYGVAADATDEYVRIGEXTALESLRRFVKVVIDVFGEEYLRAPNESDIHRLLALGDERRFPGMLGSLDCMHWRWKECPSSLXGQFSAI

SEQ ID NO: 326450 - protein, 119 aa, Zea mays
  Clone ID: MRT4577_60793C.1.pep
KHIGAPVSFGAQVSFCGFIKGGFKNRGSGGFQKPLGVFCLFWGEFHLAQRVYPGHCSKFTFPKEDPPPLFWAVLPFFTRVLFIKRAEFGQNFPPVVKPWAPNISPLCGFRQKKITMKNK

SEQ ID NO: 326451 - protein, 35 aa, Zea mays
  Clone ID: MRT4577_60794C.1.pep
SSGNNAEYAGYYICNKVAASFSALILCYVNSMSLP

SEQ ID NO: 326452 - protein, 150 aa, Zea mays
  Clone ID: MRT4577_60795C.1.pep
FPPFYPPLGFPLIKGEPGSPGDPNIPGGSPPVPLSTGPSFLNPGFAPPFLIFFPLNPARFNPPFKALCVSPPPPEAPFKGFLAPQDPPLLNTKGPSPFCPLFFKPPLFFVPPGSRVVQSVPQLGIPLLAPPGPVNFFPCTPLSSGVGLGA

SEQ ID NO: 326453 - protein, 157 aa, Zea mays
  Clone ID: MRT4577_60796C.1.pep
SCLNGRDQPTRSGTRALISAAQIEIDDLATAFYLLPRPGSNYERPGPPPRWNEWRKALRPHSSATNGTRDAEALWTQKGKILLVDLDAAALHATISAPMAMHSFVEGLHAHQLLWSPSTHDEVTGMCGMHWSSSTSAAWPLLRTWARILLWRHPRVR

SEQ ID NO: 326454 - protein, 53 aa, Zea mays
  Clone ID: MRT4577_60797C.1.pep
LSFFFFFLFLFFHMELNICSYLLLHVIWTTSYDPGRVVNYKRLRNSCNQIPPG

SEQ ID NO: 326455 - protein, 82 aa, Zea mays
  Clone ID: MRT4577_60798C.1.pep
YGIFTATSPQPSALAMGLRSHSTPLDYQAFSMPRREKETWQKGVAELHGQARLNRVSYLHFDLFDNRARTHVGDRTRCSSYR

SEQ ID NO: 326456 - protein, 136 aa, Zea mays
  Clone ID: MRT4577_60799C.1.pep
MQICVKTLTGKTITLEVESSDTIDNVKAKIQDKEGIPPDQQRLIFAGKQLEDGRTLADYNIQKESTLHLVLRLRGGMQIFVKTLTGKTITLEVESSDTIDNVKAKIQDKGGIPPDQQRLIFAGKQLEDGRTLADYN

SEQ ID NO: 326457 - protein, 87 aa, Zea mays
  unsure (1)..(87): unsure at all Xaa locations
  Clone ID: MRT4577_6079C.1.pep
MKPMLSWLPLFLAAFLYVHGVLFYGFAIAPYLLVFFALHLVSNLGGFGSSDVAPETESARRSAAGLKFEGLECSRSRXRVVETDVDA

SEQ ID NO: 326458 - protein, 75 aa, Zea mays
  Clone ID: MRT4577_607C.1.pep
RPGATARLTDDLKPGPRPTAHSPTGCTYCERISLNQASASSFSSLCHGVYAYASLTSFMHACLNDFVPQATCKQN

SEQ ID NO: 326459 - protein, 79 aa, Zea mays
  Clone ID: MRT4577_60800C.1.pep
DELKKKPGGGKRLQRPAFHGGGGTGLQGPGVKTPLKSGQKGPCNKKTKGGTQNPAGGKTNPLGQGKPHGGEKGILAGGA

SEQ ID NO: 326460 - protein, 34 aa, Zea mays
  Clone ID: MRT4577_60801C.1.pep
DQKAKSLFTHGCLVSTLQYVVAILARPSVRQVSV

SEQ ID NO: 326461 - protein, 166 aa, Zea mays
  Clone ID: MRT4577_60802C.1.pep
TRVGKQARRMRVARALHNMLTCARADAVDDAALRPLARRQAGGGDGCPPPPTPTCPGMEGCGLGVSRKKTSRPRRGGGGKDKQRKRDGEKKHDAHRPATLPRCSQCGKEFKPQELHSHMQSCRGFKERMRRSTSADRRRNWTAAGRYPAESERPSSASAVFLLTES

SEQ ID NO: 326462 - protein, 107 aa, Zea mays
  Clone ID: MRT4577_60803C.1.pep
NERSVAVTQGAAPFLFLLVTTEVVTIYSKMGIAMPIHALIMDKAKQHETENNEEKSTYKEESQCLSPSLQFEGFCFNSDRSTHACMKESFPGGECKQVFATRKCFCK

SEQ ID NO: 326463 - protein, 156 aa, Zea mays
  unsure (1)..(156): unsure at all Xaa locations
  Clone ID: MRT4577_60804C.1.pep
RRSGSRGEQSTNWQAASAAFPGRVRRRLPNLMHSWKLRHXPLGHEYLINHGLIALATIPDIRLGCGGDQGKLSRDHLGHFGGREETYDLCTVLRFREVLCFTINVHKGSKPKAGYLINFTWYNPPERRGDEHLANSRAAEEGHQGRRGQSGGLMRG

SEQ ID NO: 326464 - protein, 197 aa, Zea mays
  unsure (1)..(197): unsure at all Xaa locations
  Clone ID: MRT4577_60805C.1.pep
MADETGNDSQMFEGNEIVDPGNEAVHGDEAVQGGELVEVDELAQGDELAQGEDLTQGDELLQGNEMAITEVTTPPTTRRRRKKSLVWEHFTIEDAAGGATRACCKLCKQTFAYSSGSKIAGTSHLKRHITLGSCPKIKGQGHKLAITIGTDNDGDGTVERRSKRRYRYTGYANAAFDQDRSYSYLXKMIILHDYPLH

SEQ ID NO: 326465 - protein, 129 aa, Zea mays
  Clone ID: MRT4577_60806C.1.pep
MSFLLELLKEIRWRGLWGTFQAAKMNRLGTMKYFVGEDEFHNRYFQKVNDVMLKDRWVEYASKEFTPDPYSLPPEWHAWLHHIIDEPPTKVGFQRPKYQAQIVANRTGTTDAYFPKNNPLSKNFKGLAT

SEQ ID NO: 326466 - protein, 76 aa, Zea mays
  Clone ID: MRT4577_60807C.1.pep
SLKNPIDNTWVWGVDMTVLFFDLNTTFSHTNLECHFHPPTYVYVHSITNDELKVYLPPPVHLRPAVHITAPVHLTP

SEQ ID NO: 326467 - protein, 209 aa, Zea mays
  unsure (1)..(209): unsure at all Xaa locations
  Clone ID: MRT4577_60808C.1.pep
MGNCQAAEAEAATVLIQHPGGGGTERAYWALSAETVMAANPGHYVAAVITTAQPDAGDGAASSAAAPVKHLKLLRPDDTLLLGRVYRLVSFEEVLREFASNKRQVKLSRVTVRAKDEDEDXSRRRSIAAPVATSESARNPRGHSPRSXRQTEELEPEADPSSGPSAKHRQADTDTPADLEALLPHRALLGHRAARQWRPALQSIAEGGG

SEQ ID NO: 326468 - protein, 72 aa, Zea mays
  unsure (1)..(72): unsure at all Xaa locations
  Clone ID: MRT4577_60809C.1.pep
GGGGGFKNYFFGVFFFFLKEIRGGYIFWGLGPRSYTSACVHTLIHTIKNGGGGGAXKKKTHTYLRAHKRGGA

SEQ ID NO: 326469 - protein, 94 aa, Zea mays
  Clone ID: MRT4577_6080C.1.pep
QRVLNSSLKKADVLALLGSYRQLAMHSPLPVELFNSMRTEKWLYTSLGFRSPSDAILFDDAWVSLSPIANLPFIDDGDSCHGLGMEIHGYKDEL

SEQ ID NO: 326470 - protein, 86 aa, Zea mays
  Clone ID: MRT4577_60810C.1.pep
QAAAAAPCSYFYAAHSLPLLSVQVLRQTEELETEADPSPGPSAKYRQADTDTPADLEALLPHGALLGHRAARQWRPALQSIAEGGG

SEQ ID NO: 326471 - protein, 104 aa, Zea mays
  Clone ID: MRT4577_60811C.1.pep
RATADDKHERAQPPVSRRRPRSRQRQARAPPLGPVQSLPWHPRWRAGVSGDCRKTSMLQVLQPRREVLQATALVRGARMSHAKCSTKCSNRCEATSNFLVMLKA

SEQ ID NO: 326472 - protein, 612 aa, Zea mays
  unsure (1)..(612): unsure at all Xaa locations
  Clone ID: MRT4577_60812C.1.pep
MKFMKLGSNPDTFQDDGNEVSIAASELVSDITVRIGTTKFYLHKFPLLSKCARFQKLIPTTGDENIEIHIHDIPGGAKAFGVCAKFCYGMIVTLNAYNVIAARCAAEYLEMNETVDKGNLIYKIDVFLSSSIFRSWKDSIIVLGTTKAHLPWAEDLKLVSQCIDSVASKASIDVSKVEWSYTYNRKKLPTENGHDSPWNGVNQRQVVPKDWWVEDLTDLDFDTERKVADVPTDHPSCSKQHAVLQYRLVEKEQLDGMMTKKIRPYLMDLDSTNXELSSMEIALSLGDIMSYLKRTQSSLAIVAGSMFCSTKIQQNEFXEKIQQNEDRNNQPFMLXRKIQQKHKIFACFKILNTGDSPACNSGRXDXNDXRSSLXRALLITVAKIVDGYLAEVAKDPNIPVYKFFSLAETVSANSRPVHDGLYRAIDMYLKEHPSLGKSDKKRLCALMDCRKLSPDACAHAVQNERLPLRVVVQVLYHEQTRASAAATVRADSIGIGSYESSRSGATTNTEDEWDGVMAVEDLSLSSKTTKLEKCDAASTVSEKNHGGNKGANGRAKGGVMPKKAVGRTTMSGNKGQAGERSSSDSSDSAILPCQLEHPKRAAARSTTKSAAV

SEQ ID NO: 326473 - protein, 538 aa, Zea mays
  Clone ID: MRT4577_60813C.1.pep
MASAVERRREEHARRSRSPARGRERRGTPPRRRSSPERRKGSPARARSPAAKSSASHRDRERSPPREKVKERVRSPESPAKVSLLHKGRERSSPREKAKDQRVRSPKRKQEQSRSPSPARRHFSRSPSPRSKRTRGAQGEREAVQFTGSDRRKASHREEQDTLRHREHDEGRDASRDRKVDREAVHVTNGDRRKPSHGEERDSWGKHREHDEGRVASIDRKSDREDTRGTAKDKKYVRDDEKDHSRERGAGRDDKYGASKVALPVWDDDRHGRPNRGDWKSASSREQRLDCGDRRDSTRVKPTDHDGSNGGSGRSFRHGRSMSPEEHRHRGRHESHPSSRVSRSAAHIEDINSRGGEASRNGDPDALATMNATAEALEAKEKQKPSFELSGKLAEETNRVAGVNLLYSEPPEARKSEIRWRLYVFKDGEPLNEPLYVHRMTCYLFGRERKVADVPTDHPSCSKQHAVLQYRLVEKEQLDGMMTKKIRPYLMDLDSTNGTFINGNRIEPRRYYELFEKDTIKFGNSSREYVLLHENSTE

SEQ ID NO: 326474 - protein, 74 aa, Zea mays
  Clone ID: MRT4577_60814C.1.pep
AFRLVMIPAFFSPLLGGEYRLSFFKGAGQRIFWSPFSFLPVKFVQKTFLEIVFWQKGSGLLLVMNCDAPCMQCP

SEQ ID NO: 326475 - protein, 71 aa, Zea mays
  Clone ID: MRT4577_60815C.1.pep
RSRRGAQLGLPQACCCECWVHFCWEPWALSHQYRELKARGFAPALGWDVNAQKAPPPPPMYPPPAEGMMIR

SEQ ID NO: 326476 - protein, 55 aa, Zea mays
  Clone ID: MRT4577_60816C.1.pep
VKELGPDRMLCLECLLCCPVGFICGVVKSLVFINACVRSHLRHQVVDLDLSLDGP

SEQ ID NO: 326477 - protein, 52 aa, Zea mays
  Clone ID: MRT4577_60817C.1.pep
HLAPYGRDRKDIVSLLNPNVYVMFGKVYTRRPRRAVDRPTVGVDADKRLGED

SEQ ID NO: 326478 - protein, 119 aa, Zea mays
  Clone ID: MRT4577_60818C.1.pep
PDSRVDPASGTVATVATWFRTHLRATTRLHKATKFILLRSCPFGAHKRHYSPMLTCSRPLFTVSLSLQGFEHPLASLQATTALAAAFTTTNCQFTTIWTSNHTNHRRTAHNFYQPNQLA

SEQ ID NO: 326479 - protein, 78 aa, Zea mays
  Clone ID: MRT4577_60819C.1.pep
TVSSHLISFLHLITQPGLTNKFHRTRVAKRITSLDHAMTKEQSNPQHQLSGGEEGYGGAAADEEDPEAEEPELRPEGS

SEQ ID NO: 326480 - protein, 88 aa, Zea mays
  Clone ID: MRT4577_6081C.1.pep
YRTAFPEQMPVAPDVKGAGATVVLKTPELIRRNVVVKDPAEVSRSQDAADVHTTEVARGPAVAVVASGQRATWWNCCGLFDAFTGSGR

SEQ ID NO: 326481 - protein, 54 aa, Zea mays
  unsure (1)..(54): unsure at all Xaa locations
  Clone ID: MRT4577_60820C.1.pep
LXFRSCFNISTNSXFLGDRDIYRTMGSLSLLLLLISKNGLSHTHIPPASVQPPL

SEQ ID NO: 326482 - protein, 132 aa, Zea mays
  unsure (1)..(132): unsure at all Xaa locations
  Clone ID: MRT4577_60821C.1.pep
LRLEPKCALTAPVAKVYDTTSTLICDTGAAHALPLXVFAKLTSTVIYEVMTSTYYKLLDPRLFLREKEDAANYLARVHYTLXKRLMTGALTTCRXIVDNCNGLHGFLXVNADVVGTXSAFASLLLERQTVDY

SEQ ID NO: 326483 - protein, 65 aa, Zea mays
  Clone ID: MRT4577_60823C.1.pep
DTSAMGALRCCSLLKKSSSTLLMLLGLVHTILTQNRAFFTPDSPSPVAVFNDDVYNDLDVIVKLS

SEQ ID NO: 326484 - protein, 72 aa, Zea mays
  Clone ID: MRT4577_60824C.1.pep
GERPREEGEDPKYLGMERGMGKFMGKFVLPDNPQVDKVPPVCRDGVLPVTVKKLPPPEPKKPQTLEIKVALV

SEQ ID NO: 326485 - protein, 86 aa, Zea mays
  Clone ID: MRT4577_60825C.1.pep
AISPLSAGVFLRVSCVLLVPFADARGGMLQSPVPMGACSGGPWSDRPGLAQISPPRPMGASCDYGLGRRLRWCGVVASSSATRWTT

SEQ ID NO: 326486 - protein, 199 aa, Zea mays
  Clone ID: MRT4577_60826C.1.pep
GNRAPVVGASMYSAATQRAQGRKVLRSTRLPAAHDGSSCSRRQVPRPQGLTIKQESYELAIDAEADYTTHNHVIYNRHDQCLCKKHMHLLEYIDRPLSSDWVSDFKGREIHLKPGRYIVRGDGNLLYFDEFSTCCLYGNKVKLYNDNLKNLRSLIKGSETPNCYYVCHMTKTFATPGKRMYFPGAVLSSQPIPTYGSKQ

SEQ ID NO: 326487 - protein, 72 aa, Zea mays
  Clone ID: MRT4577_60827C.1.pep
GIRETIHKFPNYNPNKELGPLGGTELFYLVGVFSKLLTMNFSDWGHNKMQGKFYQLHLQKKKGSSPVFEQTK

SEQ ID NO: 326488 - protein, 61 aa, Zea mays
  Clone ID: MRT4577_60828C.1.pep
PTRPTGTSICVAATKTVKILSLSLYLSLSFHQGWCLVVQYFSSVYRLLQTRSSWSSSTTPR

SEQ ID NO: 326489 - protein, 280 aa, Zea mays
  unsure (1)..(280): unsure at all Xaa locations
  Clone ID: MRT4577_60829C.1.pep
PRVRRRHGRLRGAAATGHCLVSSPVASRPIVRVDSKDEVPFARPLPRFPVQRVQPQPTASLAVAGRETGMRHVPEWLPVFPDPHTYVSTEVWVEPPATKDRVDKVEQVRQRRKAEKSLLSLQQRLAMAGADGFRPVAAVAQDNAEKGKEIQAAGTKRNPFLEPALPPGEKDVSEVDMPPEKKKLSVLEAFAPAMQSRTIRDVDAXQDWMKTKXIVPKERARVHLKIGFGKKPFAAALNSRALDLREDPSFLKEEAKDDKKRRAGMILRASMENPQELPQL

SEQ ID NO: 326490 - protein, 115 aa, Zea mays
  unsure (1)..(115): unsure at all Xaa locations
  Clone ID: MRT4577_6082C.1.pep
MGRRPARCYRQIKNKPYPKGRYWRGVPDPKIRIYDVGMKRKGVDEFPYCVHLVFWEKENVFRGALEAARIACNKCMTKSAXKDSFHLRVPSHPFHSLRINKKLFCAGADRXQTGM

SEQ ID NO: 326491 - protein, 72 aa, Zea mays
  unsure (1)..(72): unsure at all Xaa locations
  Clone ID: MRT4577_60830C.1.pep
QDGIGLFVQFIYGKPKPDANTFFLVLADSCQLGLVXEGMNFFDLMDDGYKIVPEREPYFCKAELVKHASSPD

SEQ ID NO: 326492 - protein, 178 aa, Zea mays
  Clone ID: MRT4577_60831C.1.pep
CGWSLRRAPFLPPWCSPRAQLPLSPMAGDALAPCVCSISSRGFLLAWPRVKELSIAARASSPRAPPCGSPSIPLSSPHPAEALPWPCPCCSPVLAARAPSPWRSTPSHLAQACFSPALLVSRAQLTPNSCARTADQLPARAALCTRLVLAPGSHGVLCSLHAARSEASACRDLPSSPW

SEQ ID NO: 326493 - protein, 269 aa, Zea mays
  unsure (1)..(269): unsure at all Xaa locations
  Clone ID: MRT4577_60832C.1.pep
AAAQRCGAEVTEVLSSSRFARALLLPTILYPVSRHLSTPPCRRHAVHTLASGSAPVPAADAAAPSPSLARLLAAALRGGRAGRELPDLAAATTGGAGIGTLLMSTTAAAVTKARESPYLLALAANPTFVSGLLAWAAAQAAKALLTSVVERRWDLRMLFSSGGMPSSHTALCTALTASVALCHGVSDALFPVCLGFTLIVMYDATGVRRHAGMQAEVLNKIVEDLFXGHPISERXLKELLRHTPSQVFAGAILGILVAWYCCQGCIVPV

SEQ ID NO: 326494 - protein, 181 aa, Zea mays
  Clone ID: MRT4577_60833C.1.pep
WACRRSAGERRRRQARGARRGRSARRWVTGRRRGARPCGGAAAAVGGGAGAGGGCAGTTGRRQHLWASSWTWSGSSRALTCYATAAEPARPGARRTSWSRTEGCGLLRNPMSPWRRRWARGGCLRRQMARRSAGCPSAPACAAHQNMQRPSRLNVPNCNSLASEWWCFYTKKGVDSFLIKP

SEQ ID NO: 326495 - protein, 296 aa, Zea mays
  unsure (1)..(296): unsure at all Xaa locations
  Clone ID: MRT4577_60834C.1.pep
MKFMKLGSKPDAFQSDGADVRYVASDLATDVVVHVREVKFYLHKFPLISKSSRLQRLVLKATEETTDEVRIDDLPGGAKSFEICAKFCYGMVVTLSPHNVVAARCAAEYLEMTEEMEKGNLIFKIEVFMNSSILRSWKDSIIVLQRTKALSPWSEELKVVGRCIDAIASKTSVDHANVTWSYSHNNSKKGGGCAEIVESAGKPSIAPKDWWVEDLCELDVDLYRRVMVAIKSKGRMSPELIGEALKAYAVRWLPDSYDALVAEGHMRRNQCLVETLIWLLPSXDSXXSCRFLLKLL

SEQ ID NO: 326496 - protein, 180 aa, Zea mays
  unsure (1)..(180): unsure at all Xaa locations
  Clone ID: MRT4577_60835C.1.pep
MRRALPQEARRSGERYRRGRKTMEWKQEDVSLGANKFSXRQPIGTAAXGVADDHDYKESPPGPLLKPRELKSWSFYRAPIPEITACFILFXISMLTSMSVSKSTSMCSTVGIXGIAWSVXGMIFAVVYCNGGISRGHINAAVTFYLVLGKKVCLTKGLFDINMQCLEAICGAEVVNGFQQ

SEQ ID NO: 326497 - protein, 91 aa, Zea mays
  Clone ID: MRT4577_60836C.1.pep
SGLKSAGCESGWCARRRLAYGKWESGSRARKERRRRAWAAWEATPRRMSCEWCCRSTAKEVSGIGGRSRSGHGRGHEQRTLGHPRVRPRVR

SEQ ID NO: 326498 - protein, 95 aa, Zea mays
  unsure (1)..(95): unsure at all Xaa locations
  Clone ID: MRT4577_60837C.1.pep
DIRCVFGINKGLRXRIYMLIFATRILLSRAILLGLSVLPWPGEVEHEALVFVSFLVLMLATMVGIVILVYFPVADTFSIGDQEHIEMQTSCDMIL

SEQ ID NO: 326499 - protein, 88 aa, Zea mays
  Clone ID: MRT4577_60838C.1.pep
VHAEGQVTAGVVDGEAITVDGRGVELHGQHGGQTLLEASAWVERTSGTAVSRTESGALGSSLTMTRMLEPRLMWRVGTCLLPDAKIPW

SEQ ID NO: 326500 - protein, 258 aa, Zea mays
  Clone ID: MRT4577_60839C.1.pep
MAAAAGEERKKTACVTGGNGYIASLLIKMLLEKGYAVKTTVRHPEDKESNSHLEDLEKLGLGPLEVYRADLAEEGSYDEAVAGCDYAFLLAAPVNYTSKNPEKELMELGVQGTLNVMRSCVKSGTVKRVVLTSSTAAVSSKPLEDDGHGHVLDEESLSDIDYLTAKRTGLWAYPVSKVPMEKVAAEFAAAEGVSLVTLCPSVTVGEAPDRQVYTTVPAILSLLSRDEAELKVLRGIERASGSVPLVHVEDVCRAEIFV

SEQ ID NO: 326501 - protein, 340 aa, Zea mays
  Clone ID: MRT4577_6083C.1.pep
MRPALLKSTAELLRRSRGYASSANPERKVAILGAAGGIGQPLSLLMKLNPLVSSLSLYDIAGTPGVAADVSHINSPALVKGFMGDDQLGEALEGSDVVIIPAGVPRKPGMTRDDLFNINAGIVKGLCTAIAKHCPNALVNMISNPVNSTVPIAAEVFKKAGTYDEKKLFGVTTLDVVRAKTFYAGKAGVPVTEVNVPVVGGHAGITILPLFSQATPASNSLSQEDIEALTKRTQDGGTEVVEAKAGKGSATLSMAYAGAVFADACLKGLNGVPDIVECSFVQSTVTELPFFASKVRLGKNGVEEVLGLGELNEFEKKGLENLKGELKSSIDKGIKFAHGN

SEQ ID NO: 326502 - protein, 116 aa, Zea mays
  Clone ID: MRT4577_60840C.1.pep
PPRWLGPGPLKINPPGGEIPPKGGGAQGGPGTPPGWGGTPLGPGGGPTSFAPQCFGGGPPPPPKKKKKKKKKKKKKKKKKKKKKKKKKKKKKKKKKKNKKKKKKKKKSLYLPGRPL

SEQ ID NO: 326503 - protein, 309 aa, Zea mays
  Clone ID: MRT4577_60841C.1.pep
METTEPLQDIMCEFRAGKMSHEGTRVVPDTRKGLVRVGRGEEGLVHFQWLDRGQNIVEDDQIIFPDEAVFEKVTESPGRVYILKFKQDSRKFFFWMQEPNADGDSQTCMQVNAYINRSLDAEADLRVPIEAEMSEDTADDDISSRAGNLVESMTADLAGEVTSAAGPVRLEDLQRILSAIQSSGAAADPDAGVGLGDILKPDLVLPLIEDLPIEQLASHLPEGGSWSPGDIVELLQSPPLRQQLDAFTHVLRTGQIDLAQFGVDPDKYKFTVVSFLEALEDSVGRGASEAGDKDAEVERGSGNDAMDES

SEQ ID NO: 326504 - protein, 64 aa, Zea mays
  Clone ID: MRT4577_60842C.1.pep
LLQRTNVALKNYGTNGLQGQTANSAPTYTNDPDERRHAQSNADTESCRLPLTRTRTGATCTATA

SEQ ID NO: 326505 - protein, 309 aa, Zea mays
  Clone ID: MRT4577_60843C.1.pep
METTEPLQDIMCEFRAGKMSHEGTRVVPDTRKGLVRVGRGEEGLVHFQWLDRGQNIVEDDQIIFPDEAVFEKVTESPGRVYILKFKQDSRKFFFWMQERNADGDSQTCMQVNAYINRSLDAEADLRVPIEAEMSEDTADDDISSRAGNLVESMTADLAGEVTSAAGPVRLEDLQRILSAIQSSGAAADPDAGVGLGDILKPDLVLPLIEDLPIEQLASHLPEGGSWSPGDIVELLQSPPLRQQLDAFTHVLRTGQIDLAQFGVDPDKYKFTVVSFLEALEDSVGRGASEAGDKDAEVERGSGNDAMDES

SEQ ID NO: 326506 - protein, 83 aa, Zea mays
  Clone ID: MRT4577_60844C.1.pep
PQGYPARGPPPPRSLTLVFPPPPISLFRTSFWLWMRNCFFLGLGEKGFFLAKDETFLMVIMRLWVLKIFWDWGGEVFCEKKPC

SEQ ID NO: 326507 - protein, 34 aa, Zea mays
  Clone ID: MRT4577_60845C.1.pep
FAYGTCFSNKLERVKMICVAFSWILPLVARNTPI

SEQ ID NO: 326508 - protein, 105 aa, Zea mays
  unsure (1)..(105): unsure at all Xaa locations
  Clone ID: MRT4577_60846C.1.pep
EREQLNFPRVSNHPFFWESMQPEGGGLPEGGVLXQIEKDFGLFTNFREEFIRSALQLLGSGWVWLACKFLSIFFEVQTPPVQTTDFLIALSKANILLDICCSEEK

SEQ ID NO: 326509 - protein, 186 aa, Zea mays
  unsure (1)..(186): unsure at all Xaa locations
  Clone ID: MRT4577_60847C.1.pep
MAAWQGGLSQRFLKVVSYYGLTTLPYKLVCKLVGANLXDALEPYMRKRTVELHWGKHHQDYVDGLNKXLATSPLYXYTLDDLIKEAHNNGLXNHHFFWESMQPEGGGLPEGGVLXQIEKDFGLFTNFREEFIRSAKQLLGYGWVWLACKFLSIFFEVQTPPVQTTDFLIALSKANILPDICCSEEK

SEQ ID NO: 326510 - protein, 166 aa, Zea mays
  unsure (1)..(166): unsure at all Xaa locations
  Clone ID: MRT4577_60848C.1.pep
RNIQILTLLNFVLWYNVQDALEPYMRKRTVELHWGKHHQDYVDGLNKXLATSPLYXYTLDDLIKEAHNNGLXNHHFFWESMQPEGGGLPEGGVLXQIEKDFGLFTNFREEFIRSALQLLGYGWVWLACKFLSIFFEVQTPPVQTTDFLIALSKANILPDICCSEEK

SEQ ID NO: 326511 - protein, 185 aa, Zea mays
  unsure (1)..(185): unsure at all Xaa locations
  Clone ID: MRT4577_60849C.1.pep
MAASALHXLPPPQAMAGVKLQQRQLRXEPCRXLSQRFLKVVSYYGLTTLPYKLDALEPYMRKRTVELHWGKHHQDYVDGLNKXLATSPLYXYTLDDLIKEAHNNGLXNHHFFWESMQPEGGGLPEGGVLXQIEKDFGLFTNFREEFIRSALQLLGYGWVWLACKFLSIFFEVQTPPVQTTDFLIA

SEQ ID NO: 326512 - protein, 89 aa, Zea mays
  Clone ID: MRT4577_6084C.1.pep
IIKSISRGTETQDLWTSTLFRKPLIFVFKAQAKIKRDETIAMFYGILGTWKARLTFQVRAFNWPWITLGLNQVAIGCWRQWQVLQFGLT

SEQ ID NO: 326513 - protein, 88 aa, Zea mays
  Clone ID: MRT4577_60850C.1.pep
SAIQQVHGFTVDISEGQRRVRIELNRMRSPCLASVPQWRWSHVFCSEREKCDYVLARSTCTSIDATKINNMHQREDQQNASAPKGAKT

SEQ ID NO: 326514 - protein, 57 aa, Zea mays
  unsure (1)..(57): unsure at all Xaa locations
  Clone ID: MRT4577_60851C.1.pep
MXNGIXDRMSKEMXXLXTRRMKMKVVVXXERKXSVWIGGYILGXIRKLEERWIEKGE

SEQ ID NO: 326515 - protein, 108 aa, Zea mays
  Clone ID: MRT4577_60852C.1.pep
WWSWALRTFCGRCSRTTYRKLAWIQGRCLPADQIQTDTLPHYVVQKKGKPAPNVKTYIILLPVGVVFRLKGAYIMRVPHPLKGTLMSTRPKKTREGKAIRVVYVSSIT

SEQ ID NO: 326516 - protein, 175 aa, Zea mays
  Clone ID: MRT4577_60853C.1.pep
ASGAALSSPYDHGAGHIDPLRATDPGLVYDIGPQEYFEFLCTQDLSPSQLKVFTKHSNRTCKHTLAKNPGNLNYPAISALFPENTHVKAMTLRRTVTNVGPHISSYKVSVSPFKGASVTVQPKTLNFTSKHQKLSYAVTFRTRFRMKRPEFGGLVWKSTTHKVRSPVIITWLPPL

SEQ ID NO: 326517 - protein, 55 aa, Zea mays
  Clone ID: MRT4577_60854C.1.pep
EQTVQGCLIKLLAQLFASEPNQLTELSTQSFSSRTRSQPSPHTLFYPQVLNSLLI

SEQ ID NO: 326518 - protein, 386 aa, Zea mays
  Clone ID: MRT4577_60855C.1.pep
KKGFSTTYGGNNEAVLVGSYSRRVAVLQCSKGIPSTIDPSRLRTLITFDTSRALSVWYSSISSKPKYLAVLDLSSLPIETIPNSIGELFNLRLLCLNKTKVKELPKSITKLQNLQTMSLENGELVKFPQGFSKLKKLRHLMVSRLQDVTFSGFKSWEAVEPFKGLWTLIELQTLYAITASEVLVAKLGNLSQLRRLIICDVRSNLCAQLCGSLSKLCQLSRLTIRACNEDEVLQLDHLTFPNPLQTLSLDGRLSEGTFTSPFFLNHGNGLLCLMLWYSQLSENPVPRLSKLSNLTRLSLIKAYTGQELYFQAGWFLNLKELYLKDLPHLNQIHIQEGALASLERITMKHLPELREVPVGFRFLKSLKTIFFSDMHPEFESSFQKEM

SEQ ID NO: 326519 - protein, 110 aa, Zea mays
  Clone ID: MRT4577_60856C.1.pep
GAILATPGGPSLEVVYVSGFYQRPPEGPLMGGFSPFFEVWGYVPGLPGFFRSPFSPFFFFWKCPPAPFQIFTWLMDGIFFFWPSPPKWGRGFKNFNQFAKLNGFLSRFFP

SEQ ID NO: 326520 - protein, 203 aa, Zea mays
  Clone ID: MRT4577_60857C.1.pep
MESAAAAKTVERLAQRLVPPAEPTPTAPHRLSWLDRYPTQMALIESLHVFKPDPARDGLSPAETIERALARALVDYYPLAGRLAVSDSAGGLHVDCSAEGVWFIEAAVRCRLEDVDYLEYPLQIPKDELLPHPLPRPSHEEESKLILLVQVTAFACGGFVVGFRFSHAVADGLGAAKFMGAVGELARGADHVFVAPTWAPDAI

SEQ ID NO: 326521 - protein, 121 aa, Zea mays
  Clone ID: MRT4577_60858C.1.pep
PPFGTISPLDGGRVLFFPGLGFFGVGEANLWSVRVDIKKKGFWTLAPVSMFIMLNDPRWVACYGKKRVGKQWFVNYRPPPQGWQGNFPPGVLYKSGTAFGLKKKQKKKKKNPKKKKKKKKK

SEQ ID NO: 326522 - protein, 96 aa, Zea mays
  Clone ID: MRT4577_60859C.1.pep
IYMLYYILYVLWIIIFVTFREHLSPDSMLKHCVLICEPTTHYWILFLHAAMLLSWLELQVVFLVGQNDILPPTIPCCLPCASSLANTDKLSILHNE

SEQ ID NO: 326523 - protein, 340 aa, Zea mays
  Clone ID: MRT4577_6085C.1.pep
MRPSLLKSTAELLRRSRGYASSANPERKVAILGAAGGIGQPLSLLMKLNPLVSSLSLYDIAGTPGVAADVSHINSPALVKGFMGDDQLGEALEGSDIVIIPAGVPRKPGMTRDDLFNINAGIVKALCTAIAKHCPNALVNMISNPVNSTVPIAAEVFKKAGTYDEKKLFGVTTLDVVRAKTFYAGKAGVPVTEVNVPVVGGHAGITILPLFSQATPASNSLSQEDIEALTKRTQDGGTEVVEAKAGKGSATLSMAYAGAVFADACLKGLNGVPDIVECSFVQSTVTELPFFASKVRLGKNGVEEVLGLGELNDFEKKGLESLKVELKSSIEKGIKFAHGN

SEQ ID NO: 326524 - protein, 86 aa, Zea mays
  Clone ID: MRT4577_60860C.1.pep
DTIRSGQTLAFTTTSDWGSTCETGRAPSLGGSFPTMSCSGAGRHLSPRRRAAPTRWPRSGKFTLPPKVHGSFFISSWEDGALNLLL

SEQ ID NO: 326525 - protein, 144 aa, Zea mays
  Clone ID: MRT4577_60861C.1.pep
LDRPSPRGPVPAILWGPAGGGPSVIARLPPAKKNFLGAPSRNGLSLNFGGFINLPGVRGSPTFSRPVCVTPFIWVPSLFSLPWLFAFCFGLVCFLDFSPAAPFPLFSPMSIFFPFFNTPPPRGSWSAFRCRSGLPWVHSPRQNF

SEQ ID NO: 326526 - protein, 32 aa, Zea mays
  Clone ID: MRT4577_60862C.1.pep
MGRVRTNTVKKAARVILEKYYTRLGNDFHTTY

SEQ ID NO: 326527 - protein, 47 aa, Zea mays
  Clone ID: MRT4577_60863C.1.pep
NRTPSVVTYGVPENLIAANERSRDNSLIPSVFILHMIHNTLLVISFD

SEQ ID NO: 326528 - protein, 43 aa, Zea mays
  Clone ID: MRT4577_60864C.1.pep
DHWIFWVGPLLGAAIAAFYHQYILRAGAIKALGSFRSNGDRSI

SEQ ID NO: 326529 - protein, 110 aa, Zea mays
  unsure (1)..(110): unsure at all Xaa locations
  Clone ID: MRT4577_60865C.1.pep
MARGVVSAKGGAVAGKKKGSVSFTIDCTKPVEDKIMEVASLEKLGGERIKVTSGKAGKLGDSLTISRENTKVIMALXGAFSYRGLFSFKKKKKKGPEGASTTNFFSFNEG

SEQ ID NO: 326530 - protein, 153 aa, Zea mays
  Clone ID: MRT4577_60866C.1.pep
PAGLRGLIGNEYLKRLTGKFRQEATRYQRTAWLKILNCLRDEGLHVSGGFSSGISKSALRERFKAFNAAFEEAHRVQSAWYVPDTQLREELRISISEKLLPAYRSFLGRFRHHIENSRHPELYIKYSVEDLEITMADFFEGSPPPHNRRRSHG

SEQ ID NO: 326531 - protein, 77 aa, Zea mays
  Clone ID: MRT4577_60867C.1.pep
MSAPQTVAPASEAPSSAQMVGNAFVQQYYLVLHQSADLVYRFYQDVRRLARPASDAGLAGIPSHPHPHTFKGKVEVK

SEQ ID NO: 326532 - protein, 66 aa, Zea mays
  Clone ID: MRT4577_60868C.1.pep
SAASPADRRPSLWAAAAGRCERACLAGWRRGWRSSRDKMAEDTERWRLMGGLDPAHASAHASATSQ

SEQ ID NO: 326533 - protein, 75 aa, Zea mays
  Clone ID: MRT4577_60869C.1.pep
SLPGKQTHHLLTREAGPPGPPHPYRGGSTAGPPPPYRRGSPNVHDIFGWRQSWLPWGQAWLPESRTQLALPVNMT

SEQ ID NO: 326534 - protein, 99 aa, Zea mays
  Clone ID: MRT4577_6086C.1.pep
YIRCACARSTTERWIVTGISLLSCRRRAPRRHSAAVPSGDGAAMRRSIDSFGADWRRRSGEASSDALDAAAGIAAHWRRRESDVVSPTPIAWMRVDDGG

SEQ ID NO: 326535 - protein, 117 aa, Zea mays
  Clone ID: MRT4577_60870C.1.pep
PPQSSWARHHRQPQLTALAGAFTTIAHWTHPCHYPHHDAHTHNSLLTDHLPGNLHLLDSSCCSTHCSGERTAPHNNSCTVSGSSLAWEPALLTTSLPARGACPTPTTHAAQMYHSDY

SEQ ID NO: 326536 - protein, 73 aa, Zea mays
  Clone ID: MRT4577_60871C.1.pep
TPGGTGVSLAPMAAGTYPVVVYAYRYAWQALAMTMSLRYLFVRWSCETERTLVFQSPSCPSVHLLVLSYSCIA

SEQ ID NO: 326537 - protein, 96 aa, Zea mays
  Clone ID: MRT4577_60872C.1.pep
SISTLNKFLSNHPATMTFGVCKAKINTTRILNKFPANSLASKVPKPVLHRIFVAVACPCARRTGALPLLPTGFRICIPVKICPCASLSFYVHVQKQ

SEQ ID NO: 326538 - protein, 64 aa, Zea mays
  Clone ID: MRT4577_60873C.1.pep
PGNDPRSFYSQEYQTELAGSFVWWREAAAVDESWKGHVQGKDLEVISGEGLVVNILNGTFVLSH

SEQ ID NO: 326539 - protein, 136 aa, Zea mays
  unsure (1)..(136): unsure at all Xaa locations
  Clone ID: MRT4577_60874C.1.pep
NGARILCCYKLNLTKALWXPXDYEKVMKQITKDVHGCXRSIPGLSVLQRCAKKXTLMRIHYLRPELQRGAFSQDQEDFIIELHAVLGNRXDXIAAQMPRRTDNEIKNLWNSXINKKLRQKGIDLHTXHKPLLNVIP

SEQ ID NO: 326540 - protein, 527 aa, Zea mays
  Clone ID: MRT4577_60875C.1.pep
SLLIFFGEGNNARQLASPRRLSNVDFSSAAISIQDTNVWSARSLWSSDAMGSSPPCDSPDKFAGGQERSPLSSPLRSPVLKSRNPSAPPSPMHPKLFPENHVSRPDGNGSASFHPLPLPPASVSPKQTNASHQLVPKAEMPSVAGQWQKGKLLGSGTFGCVYEATNRHTGALCAMKEVNIIPDDAKSVESLKQLEQEIKFLSQFKHENIVQYYGSETIEDRFYIYLEYVHPGSIHKYVHQHCGSLTEAVIRNFTRHILKGLAFLHSQKIMHRDIKGANLLVDINGVVKLADFGMAKHLSTAAPNLSLKGTPYWMAPEVVRATLDKSAGYDLAVDIWSLGCTIIEMFTGKPPWSGLEGPAAMFKVLRTDPPIPDNLSPEGKDFLRCCFKRNPTERPTANKLLEHPFIQTLNHYSPHSVVHSFSGIKSPDTVHSSARDKVPWKSDSYMRGKHANGETSSARSSESLAYRLMTPLPNLGTNSLSPPPLSSASSSGSAAHTPNSMHFSVPYHQPSPLPKPNGKEAINLVSH

SEQ ID NO: 326541 - protein, 84 aa, Zea mays
  unsure (1)..(84): unsure at all Xaa locations
  Clone ID: MRT4577_60876C.1.pep
HQIWMIASNKHKKDVIIDNGEYXCMLMSEGLENAGDSFSRMKDNVLYSQIGRNVITYLPDMIVKRSQQDNHIADLQETFARTRG

SEQ ID NO: 326542 - protein, 112 aa, Zea mays
  Clone ID: MRT4577_60877C.1.pep
VHLLPWSVFLLICKSGDENVHVIWDFLSINPAILHSDSETSSARSSESLAYRLMTPLPNLGTNSLSPPPLSSASSSGSAAHTPNSMHFSVPYHQPSPLPKPNGKEAINLVSH

SEQ ID NO: 326543 - protein, 73 aa, Zea mays
  Clone ID: MRT4577_60878C.1.pep
KSLFLHPPPKINCPSPFSVGLGHNWKNPIFPKICHVFFHKYNFVPPGARQKPPPLCPFLDPMFNPPPGKVKCP

SEQ ID NO: 326544 - protein, 59 aa, Zea mays
  Clone ID: MRT4577_60879C.1.pep
PSFFNLLPSKTLFFPILIPLLPITFSPLYLITNSPLPFAFLNIFTSYLPNGSLPLNDLY

SEQ ID NO: 326545 - protein, 347 aa, Zea mays
  unsure (1)..(347): unsure at all Xaa locations
  Clone ID: MRT4577_6087C.1.pep
MRPALLKSTAELLRRSRGYASSANPERKVAILGAAGGIGQPLSLLMKXLRRRHHLNPLVSSLSLYDIAGTPGVAADVSHINSPALVKGFMGDDQLGEALEGSDVVIIPAGVPRKPGMTRDDLFNINAGIVKGLCTAIAKHCPNALVNMISNPVNSTVPIAAEVFKKAGTYDEKKLFGVTTLDVVRAKTFYAGKAGVPVTEVNVPVVGGHAGITILPLFSQATPASNSLSQEDIEALTKRTQDGGTEVVEAKAGKGSATLSMAYAGAVFADACLKGLNGVPDIVECSFVQSTVTELPFFASKVRLGKNGVEEVLGLGELNEFEKKGLENLKGELKSSIDKGIKFAHGN

SEQ ID NO: 326546 - protein, 208 aa, Zea mays
  unsure (1)..(208): unsure at all Xaa locations
  Clone ID: MRT4577_60880C.1.pep
YSSSSSPSTSGSKSISSSISTSSSSNSGSKSISSSSSXSADEIASLPETASHSGHGHRISQCSSAAVXTSSSSSTSSRSSWYSSSTSSSSSTSSSXSSSSSYFRRRDRAAARSTFPFRTLLLPFARRFGRGVSISSSSSSSASWYSXSSASWNTASESNPSSPAHDVLPFTGRFGHGVSISSSSSASWNTASESTPSSPAHETESSST

SEQ ID NO: 326547 - protein, 170 aa, Zea mays
  unsure (1)..(170): unsure at all Xaa locations
  Clone ID: MRT4577_60881C.1.pep
METPRPKRPVKGSTSSAGEDGLDSDAEYQEAEXEEDDEIETPRPKRPAKGSNRVRKGKVDLAAARSRRRKYEEDEDYEEEVDEDDEVEEEYHDDLEEADEEEEVAPQRPKSIVKCGARGRNVKLSLAAKRSHQRKQEDDEDMDXDPELDDEEVEIDDIDDPDVDGDEEDE

SEQ ID NO: 326548 - protein, 23 aa, Zea mays
  Clone ID: MRT4577_60882C.1.pep
TYRSTTNCSYGHLSTLPTRPLNP

SEQ ID NO: 326549 - protein, 369 aa, Zea mays
  Clone ID: MRT4577_60883C.1.pep
MGTGEGSPPARRGISGRRRRWPDEDDDEYVLEEEEEEDYVEELSASSAGEEGVDSDAEYQEAEEEDEIEKPRPKRPAKGITSSAGERGLDSDAEYQEAEEDDEIEPPRLKRPAKGSTSSAGEEGLDSDAEYQEAEEDEMETPRPKRPAKDSTSSAGEDGLDSDAEYQEAEEEDDDEIETPRPKRRAKGSNRVRKGKVDLAAARSRRRKYEEDEDYEEEVDEDDEVEEEYHDDLEEVEEEEEVAPQRPKSIVKCGARGRNVKLSLAAKRSHQRKQEDDEDMDFDPELDDEEVEIDEDIDFDPDVDGDEEDEYQDEEEEELVPARARKVTVKNPVKRKSISKRRTPKKKKKGSKVSRRKGASAKVKKFSTC

SEQ ID NO: 326550 - protein, 66 aa, Zea mays
  unsure (1)..(66): unsure at all Xaa locations
  Clone ID: MRT4577_60884C.1.pep
MNMAGSCSSCYMTTGFFWRSAVNYISVCRTALTNVVMAXAVLLTLLFLMPLLHYTLNVIYGGDHYH

SEQ ID NO: 326551 - protein, 54 aa, Zea mays
  Clone ID: MRT4577_60885C.1.pep
PYYDIIMVCILSCVLSCDNVQTILRHYYGLHIVVIWNSFIMFIPSSRYVKNKTT

SEQ ID NO: 326552 - protein, 54 aa, Zea mays
  Clone ID: MRT4577_60886C.1.pep
GCLFHLGSFSFLCFFLRHLKQKLALLFPGWEPPKGHQTLIRVGPLETLGAGNST

SEQ ID NO: 326553 - protein, 64 aa, Zea mays
  Clone ID: MRT4577_60887C.1.pep
SIYLSLSYLGIVRLRLVRPTSIADMSNTCQSMHLSMLHCANILARVQIVHLDHVDQIASTLHND

SEQ ID NO: 326554 - protein, 118 aa, Zea mays
  Clone ID: MRT4577_60888C.1.pep
VLDLDGNENLESCYLEDIGKLYQLRYLRIKASNITLLERIEELQCLVILDLLNCPNLGELPRSIVQLRNLKWLTVHRANLPDGVGNMQALEFLSLGSGDYTTSTNLLEELGSLTKLKT

SEQ ID NO: 326555 - protein, 136 aa, Zea mays
  unsure (1)..(136): unsure at all Xaa locations
  Clone ID: MRT4577_60889C.1.pep
LKPTISVYTDQSYYDDHPDSLMPELXRLXNDRADDKLRDLRPXPPEKTRITVPTLIRRNPLFNHTHSGSFTVNKSWAAHFLFTPQAXHSSSLHQRTPHTHPIRSDFHPKFPQRYMNLPPPPLTIQPGAPHRYHVCA

SEQ ID NO: 326556 - protein, 67 aa, Zea mays
  Clone ID: MRT4577_6088C.1.pep
GSREILKSELHYLKKLMENFIQAWSIFNYRRKFMLFSFTFDKLKQKHQKLLRNINPIILTKHIGINS

SEQ ID NO: 326557 - protein, 69 aa, Zea mays
  Clone ID: MRT4577_60890C.1.pep
EGLCRGLEATQRGTHVFVGDAQLIKQSPVMGGGWSGARGLAHSSCQLSPPCPPKLSLGGGRKRVKKREI

SEQ ID NO: 326558 - protein, 92 aa, Zea mays
  unsure (1)..(92): unsure at all Xaa locations
  Clone ID: MRT4577_60891C.1.pep
QKGDLGGALFWTLLGEPSMTVGGFTIGGGGNQEFFDILVIGGXKLAMFFXCXTGVTLKLGGANWPNAFLFSRGNPKNHGCKGKKKYQVPFFP

SEQ ID NO: 326559 - protein, 85 aa, Zea mays
  unsure (1)..(85): unsure at all Xaa locations
  Clone ID: MRT4577_60892C.1.pep
PPPPSCPMEWPRRNRGPLNFLKTSQWPPIQLLQPLMFQPPCGNQQGIIKITTFGIKNNYHILIVVKPQISFLHPPKKKKKKKKXX

SEQ ID NO: 326560 - protein, 124 aa, Zea mays
  unsure (1)..(124): unsure at all Xaa locations
  Clone ID: MRT4577_60893C.1.pep
MSASASAGKLAAALHRRTRRVTSALACAALEWVLIALLLVNGLLAYAVARFADYFGLIPPCLLCSRVDRLFHAXSGGGDASGAGARWLRDALCDAHAAEISXLGYCLXHPRLXEAGKMCVGCRP

SEQ ID NO: 326561 - protein, 55 aa, Zea mays
  Clone ID: MRT4577_60894C.1.pep
PRVRKHIIWGVLKSLKGMQGNKFSNHMETLMGSSPQNALNVSDTDVGQPGRHDHL

SEQ ID NO: 326562 - protein, 73 aa, Zea mays
  Clone ID: MRT4577_60895C.1.pep
TNRHTLYNSLAAPSLILETSPFRFSMLYVASASVSAGVELMVSSLRLRVLDYLLVINTSSCRFSCQSFLGCLF

SEQ ID NO: 326563 - protein, 293 aa, Zea mays
  Clone ID: MRT4577_60896C.1.pep
MAVPASASASACVRAGPPPSRRACTSTTGGTGTAAFSLICRKRLPPPTRQPIHLQLQGRASSDLRCRRRLLTARGERPAPDEDEEEAAGAGGGSFDAAVALFNRGEYHACHDVVEELWYGAEDPARTLLHGVLQCAVGFHHLFNQNHRGAMMELGEGLCKLRKLQLDSDGDSGGGGPFSRFRDEVAAVLQFLYRTQKELAACTDELCLTMDGSPSSYQLLGNFAAGQQLYRLELLEAEEDGACSSILFSAPNGGGGGGIAAQGAAPRPQRVKLPTLRATEQHLVALQCTYEYT

SEQ ID NO: 326564 - protein, 245 aa, Zea mays
  Clone ID: MRT4577_60897C.1.pep
TSSTTAVPAPISAAGDGSSRREASARPTTTTRTRNEEQTSSAGGGYGSFGAAVALFNRGEYHACHDVVEELWYSAEDPARTLLHGLLQCAVGFHHLFNQNHRGAMMELGEGLCKLRKLQLDGDGDNDGGGPFSRFRDEIAAVLQFLYRTQKELAACTDELCLTMDGSPSSYQLLGNFAAGQQLYRLELLEAEEDGACSSILFSAPNGGGGIAAQGAAPRPQRVKLPTLRATEQHLVALQCTYEYT

SEQ ID NO: 326565 - protein, 102 aa, Zea mays
  unsure (1)..(102): unsure at all Xaa locations
  Clone ID: MRT4577_60898C.1.pep
ERLPHIIDLLLSSMLILLARAGSITLNAQEDCTANNTGTLVDRIQETPGSXTTLQLQDLARFSVEEHNKKDNALLAFEKLVKAKTQVVAVTMYYLTIEVKDG

SEQ ID NO: 326566 - protein, 53 aa, Zea mays
  Clone ID: MRT4577_60899C.1.pep
TLDTWTICSSLLLEDSSSSLKIQKVSGEIKYQQFSILAMRGLTIDSRNGRVGR

SEQ ID NO: 326567 - protein, 62 aa, Zea mays
  Clone ID: MRT4577_6089C.1.pep
IHEGRCWYDQAGHCGNRRPWHKFSGGSLNSLLSVLSEILLGTGTVTTYSDCQLVRCVRLNFI

SEQ ID NO: 326568 - protein, 83 aa, Zea mays
  unsure (1)..(83): unsure at all Xaa locations
  Clone ID: MRT4577_608C.1.pep
LLLPSLFFLAVVNLVVGVXQQLLASNPLAMANCCXAYQYQQXLQHFMPALSQLAMENPVSYLQQLQLLLFSPISCVXALTYLL

SEQ ID NO: 326569 - protein, 108 aa, Zea mays
  unsure (1)..(108): unsure at all Xaa locations
  Clone ID: MRT4577_60900C.1.pep
VLIGGNNGSLVFIVGNLRVVLVXKINFKENVGFNSKVVFDEDELRVGVNDSNILMSEKDFLNAEGDKXGVNLSKKGSYIFYCVINEGNGMVGKVNVKVIFLKNLFCKS

SEQ ID NO: 326570 - protein, 81 aa, Zea mays
  Clone ID: MRT4577_60901C.1.pep
IAFGNAQDADYPIRGGFVACVVLPAEVLVMVSGPVGLVLGEAVSSVPLPYHMCLVLLSLPLCVRPPFHTCLLQPSCCAESI

SEQ ID NO: 326571 - protein, 168 aa, Zea mays
  Clone ID: MRT4577_60902C.1.pep
GFIVFFCFLCLYLERKGSVFVHPNPGGDRGNPGTGPGGEPGPPPGRNAKPRGKKGKGGVPGEKGSGTKKHKKNQPGRKRRNPGGPKGGAKQQKREEPHGPEGNGKTRNANGFKKTRNTRGGGVPPRGTGEGNLITRRTGKKRRDWTTGPTKSTTKRSKRCCPNGPKNP

SEQ ID NO: 326572 - protein, 95 aa, Zea mays
  Clone ID: MRT4577_60903C.1.pep
PSTCPSASIPCVNPGDYNDEATVNYTGTLDCKHKHGRELKAVPLETNEYGMVGPSIIHIDHANNPLNGNYDTQTLIMSGWEKDEPTAERALLNNW

SEQ ID NO: 326573 - protein, 105 aa, Zea mays
  unsure (1)..(105): unsure at all Xaa locations
  Clone ID: MRT4577_60904C.1.pep
ACNPTNIHGRPPFSYMPYRPSSQLSCKKFGVDARTSRITCSLQDVTIRYIDATNLADFSLSTYSLLVXDASAYSTPNRLTYDEIHSKTYIYVKGTRTVNQFPTIY

SEQ ID NO: 326574 - protein, 57 aa, Zea mays
  Clone ID: MRT4577_60905C.1.pep
FCSSDKTSTKPAQYLPTLLCWFCSSDKTSTKVWVDIVLVLFRSQDQHKSVGRYCAGL

SEQ ID NO: 326575 - protein, 57 aa, Zea mays
  Clone ID: MRT4577_60906C.1.pep
IMWCAPSFWLDHPLTVHRLAPSVFVRALAIPFVHVFARRRPLTSAPSSPSTILCSKT

SEQ ID NO: 326576 - protein, 519 aa, Zea mays
  Clone ID: MRT4577_60907C.1.pep
MEMAETLHVLPDDANGSAAVQTEPYCHEDAIEDMESFLDEVNDRVHVSGIVTGAIIKGILSDVRQEAASQIALKDAEISSLNQKLQQPVNGSLSLSEGRDKRHDEFYSLRQQLDSISKSLLNSEWGLSGSQHNFEDSENASKQQDKENSSRNGVAKTIHPGDSKEEVFGDPKLLDHMDKVALIAHFNKSMNEMKRQHDSVLYQRTEEIFKLKREILKKDGSNPFHLRNNKELEQTRKKIEEVISKLDVLLLENKRASVRIKSNAIPGQQDKNNVLGSEIEQLESGASNNEDYHCSIPTHSSHFASREADHELNIVRPQFDVEDARIAATFREEIERIIIKEFISEINIELHGYEIEGGMKQEVCSIIHNEAIARAMSNIDSLLLKYEEKKGHAEEESLHKQKIEKLKLIVDSFTEVLSEKEKFVSQIGLEAMQTRVESMCCELDLLRDKVAKQDSYLSEKNREFDAIMCRLEQAQQHVQHNDVTLVELNDRLRTISNSLKDLEKQNQALHYAMEEKRRC

SEQ ID NO: 326577 - protein, 63 aa, Zea mays
  Clone ID: MRT4577_60908C.1.pep
RRKRSSIICHMLYFTGSIWLSKDLACGSAHSHDDMQMQCISIVSNQHASGLNNVTPKCYFHRI

SEQ ID NO: 326578 - protein, 103 aa, Zea mays
  unsure (1)..(103): unsure at all Xaa locations
  Clone ID: MRT4577_60909C.1.pep
LLRNTMTGFLLRFTTNEQDTDNYQLTAAANVLVNVAVDRDAYLREVHLNTTAATRTLRCCQQYAPLLSRIWESETPGGDCLIRPAMLMMCALLTTTXWXTGCW

SEQ ID NO: 326579 - protein, 90 aa, Zea mays
  Clone ID: MRT4577_6090C.1.pep
IPRHFRNYRLPSSDPSTSTEKLTLVVPDSYNRYLAIAARVVRRSLKDDKRIVAERRGEMDLRFSKWENGKQGEMQNLAKANAAIAAENAA

SEQ ID NO: 326580 - protein, 101 aa, Zea mays
  Clone ID: MRT4577_60910C.1.pep
PSANMFLRHASSLATHIRDRSPLRRHGYLIEMEVCISPNPDVVILLPFLIQDLPVLFPPLLSLGNWNGFNLNLFMCVCTCSVCFIWRSVHSPCSFSLHPLR

SEQ ID NO: 326581 - protein, 64 aa, Zea mays
  unsure (1)..(64): unsure at all Xaa locations
  Clone ID: MRT4577_60911C.1.pep
IIRQFHXXTPPXPPPPPTHKSYLQQQTQTHVTVCHPQQSWLDPTLVGIDFVFSSSCWYSDLHSD

SEQ ID NO: 326582 - protein, 49 aa, Zea mays
  Clone ID: MRT4577_60912C.1.pep
QCKAPLPCIVCIEPRRCSGLTRKAIVRLVCDLMGAAFSLFGRFMATIAG

SEQ ID NO: 326583 - protein, 104 aa, Zea mays
  unsure (1)..(104): unsure at all Xaa locations
  Clone ID: MRT4577_60913C.1.pep
CSCLLQGCSXPFRACRSSMLPLPRPLTSGVSVVKPNSSTLRINRQXSWHLPYHPVLNNISLYNSTLVHYAXTYGXNYTTGSXLLLLSTEFFITTXHDLSIDTHS

SEQ ID NO: 326584 - protein, 142 aa, Zea mays
  Clone ID: MRT4577_60914C.1.pep
EEEWSLVRTASGKARAEGQRSLVRTASGKAGAEGRRSLVRTDSGREAGVEGRRSLVRTASGMEAGEGRRGGETRHAQCLGEVRAGRRGGETRDARCVGEARGGGAEADMRVGQAGGDVDAAAGDGVWPRRRRDGGRWLGHSR

SEQ ID NO: 326585 - protein, 47 aa, Zea mays
  Clone ID: MRT4577_60915C.1.pep
TFIRPADRNLQIAMKHFNRKRRQRDRGGICKRSLPWMHDQRVRAGSW

SEQ ID NO: 326586 - protein, 96 aa, Zea mays
  unsure (1)..(96): unsure at all Xaa locations
  Clone ID: MRT4577_60916C.1.pep
IASGAPESPALAGPAPPGSSSSPAGGRSSSRAVTGYAAALADACVRAGTLRRAARHARALXHLXLRLERPLEEGAVAVEAGMTGADQHLDSPIGSH

SEQ ID NO: 326587 - protein, 57 aa, Zea mays
  Clone ID: MRT4577_60918C.1.pep
KSWRGTHYMMDKLPKFQSLIPIHLGGGRFERPLQHKLFLLHLPTRAHVPPGLDSIFF

SEQ ID NO: 326588 - protein, 102 aa, Zea mays
  unsure (1)..(102): unsure at all Xaa locations
  Clone ID: MRT4577_60919C.1.pep
RPDPLSFLQITPLPPPPANPFLDSSCCCERARVGAQVSRVLPPRSWCPSPWTXGCRFRAGLELRGPWGAAAAGAGVAGDRVAAPARGPCXLVGWGGWGGDAL

SEQ ID NO: 326589 - protein, 50 aa, Zea mays
  Clone ID: MRT4577_6091C.1.pep
NSELKAFSHIPAHGSFAPQTNLKSSNNLLVNHWFPQALVYFSTVVGHSVK

SEQ ID NO: 326590 - protein, 116 aa, Zea mays
  Clone ID: MRT4577_60920C.1.pep
MSLDTKLILDAIGKLFDDFDARWERRLPKLLTAQEASPVISVLTPTVAVGATIIADNWGGGFNGGEYSIEQYCTSPSIVADNWGGFFGGEDVAANAEFAIDPPDDPERFVLPTPPP

SEQ ID NO: 326591 - protein, 139 aa, Zea mays
  Clone ID: MRT4577_60921C.1.pep
PRLWLLGPQSSPTTGVGASTEASTHPSSTARRHPSSPTIGADSSVTRTRLPTPSSPSIRQTTPRDLSSPTPPPTSLASTPRWSAPTLERRTTPSMRSSPPPTPTRCSTPSPRTSLRPSLAPRKAALPSSRTRSRASFPR

SEQ ID NO: 326592 - protein, 94 aa, Zea mays
  unsure (1)..(94): unsure at all Xaa locations
  Clone ID: MRT4577_60922C.1.pep
LKRPPPFFFFFPPLFFFFFFFFFFFPPPPPIRWNTKIVTAQNFGTFLXVLHAEILPYWKVPSVKSQXPVLTPDDYSYASPARPARHAWADAWSE

SEQ ID NO: 326593 - protein, 40 aa, Zea mays
  Clone ID: MRT4577_60923C.1.pep
ELAVCPSPTQAFAILGFWARICLRGGSSLTPEYCNVWPTV

SEQ ID NO: 326594 - protein, 228 aa, Zea mays
  Clone ID: MRT4577_60924C.1.pep
RDIPSFIIASSLRSFRWGRPDATKFLLFPLLSAHPSLARVTPLCRLPKAEQPRQEEGGGRGKAIWLLFQFRIHRKSGCIGNLRKSQSLPDSKPKRSLRKKSLDSSTGNRRRWQSSLEAMEKNVSISVSLEGNISSIPNSIVNDSKTLMENGVDTSFINHAAKEWTEMRRQWVGHQAEVPRKAPQEPVISWSATYDDLLSTSERFPQRIPLSEMVDFLVDIWHEEGLYG

SEQ ID NO: 326595 - protein, 39 aa, Zea mays
  Clone ID: MRT4577_60925C.1.pep
SIKCGYGSLHRMLNTLPWRAVSMIKCHVYTVDSSPDLAH

SEQ ID NO: 326596 - protein, 159 aa, Zea mays
  Clone ID: MRT4577_60926C.1.pep
ADIYGSSGCIGNLRKSQSLPDSKPKRSLRKKSLDSSTGNRRRWQSSLEAMEKNVSISVSLEGNISSIPNSIVNDSKTLMENGVDTSFINHAAKEWTEMRRQWVGHQAEVPRKAPQEPVISWSATYDDLLSTSERFPQRIPLSEMVDFLVDIWHEEGLYG

SEQ ID NO: 326597 - protein, 89 aa, Zea mays
  Clone ID: MRT4577_60927C.1.pep
IVSKELLLSQGDRECMFFCTDVKGSKNMQDMILGFDTYSTHPVLSLAVDGMLGGGTGVEKFMPCAANATLPASKPVSFLVCFPSLYFWR

SEQ ID NO: 326598 - protein, 85 aa, Zea mays
  unsure (1)..(85): unsure at all Xaa locations
  Clone ID: MRT4577_60928C.1.pep
MMGCVSSLARRSRCAHPWHDLDIGPDAPAGFCVGDDITXGIEGNYERDKTTGLTKGDRVLWSXMXYPHICAFAPTTLXCEHYDPI

SEQ ID NO: 326599 - protein, 99 aa, Zea mays
  Clone ID: MRT4577_60929C.1.pep
MSLSRTASSTIPSSDIAISPVAAWPAGPAPAIPSPASTAAFHWFEQVPSPRTPPSSVHHRGGHNLELQLMPPSCSGAGGDAPPRTPAGPSQSHAGAMGM

SEQ ID NO: 326600 - protein, 173 aa, Zea mays
  Clone ID: MRT4577_6092C.1.pep
MYDGHSNPEQFLMSYEQPYHHMVATLSSWQSPLSWQSGVWPKRGPTTQYFSRKPPQTLEKLLQKMDEYIRANNDFWQRKEEAYRYAEMTRGFRGRLHPRHVRMIHNPSPIEDRGSHTQGHQHNSQSSGTQQSSFMPPAPRGRGGRSFGGRFSSQPRRMFFLLSGEDKGHTTRT

SEQ ID NO: 326601 - protein, 44 aa, Zea mays
  Clone ID: MRT4577_60930C.1.pep
SVIILPALYDHSKRLCLIQGMLCHNRTCGSAPRTFWFQIRFAPV

SEQ ID NO: 326602 - protein, 101 aa, Zea mays
  Clone ID: MRT4577_60931C.1.pep
RNKKPTWQVRGRAKQNSRLKLADGQTKESATKTPFQRGGKSNNPPLKGGPPLHPNGGGTPLSKLSQQAISKKLRKLARPKTYLRTSNKTGLKKGNLETKTP

SEQ ID NO: 326603 - protein, 83 aa, Zea mays
  Clone ID: MRT4577_60932C.1.pep
PTRSAGYARSNALSELDHASQAMGRLGARASAMIPTSRSYRRSPPPVPIIINNDVDVGMYTRAQAMPTAPTTPETPIIVVCSK

SEQ ID NO: 326604 - protein, 117 aa, Zea mays
  Clone ID: MRT4577_60933C.1.pep
SNLLSQKGWRHWDQKLFNGGSTDNTVRNFSSNSPAFSRASPGAMLRRGSLRPTSTSMLQTWRGGTIRTLALSPSPSARSRALPRRGLPYRRPCLAYPSYRKAGVMFLGAPWGGGVRP

SEQ ID NO: 326605 - protein, 186 aa, Zea mays
  Clone ID: MRT4577_60934C.1.pep
MGISARWLKSLVGLRKVGRQQQQRRKDDADVGRMKTDVADQFHFQIQHSQDDNSIAAQEIPEVSYGNDPPEDDSNVPSCFEPARSSAHMPFCQTEEAQKEIWAATIIQTAFRAFLARRARRALKGLVRLQALVRGHIVRKRAATTLRCMQALVRVQARVRARRVRMALETRLIGKILHQSTRSSTC

SEQ ID NO: 326606 - protein, 65 aa, Zea mays
  unsure (1)..(65): unsure at all Xaa locations
  Clone ID: MRT4577_60935C.1.pep
GGGCFLKIFTNKGRVIFKMCHLHVIQTNKQQSQTAHQHMLFSKXLIMILWYSICSQXPALGTGGA

SEQ ID NO: 326607 - protein, 131 aa, Zea mays
  Clone ID: MRT4577_60936C.1.pep
CARRGAQRRHCCGSNGRLVPIPPRRALALHRGHLFLVPSNTPTPASGSGTTSAPCSRNLCQRRRYCPARRPRLSAGVDLFCAGANGNRKVCVFMLLWLRRAEWRRDGHLGEVAQVVSWVEEGGAAAAAAAA

SEQ ID NO: 326608 - protein, 73 aa, Zea mays
  unsure (1)..(73): unsure at all Xaa locations
  Clone ID: MRT4577_60937C.1.pep
VFPPFKSLEPRVDPICIASYEXDIRLLNMINSITRSKVLVYHLQKQINPYIKSMLPLLVIYNPNFFGVYQISH

SEQ ID NO: 326609 - protein, 85 aa, Zea mays
  Clone ID: MRT4577_60938C.1.pep
VSKNLLTIKIKMSSMICSSVVCCNVVTVPLQIIYKSFFSNLLSVTRERKIPNLHESSAYSFVLHLILQLARFLMPTALNKARVNV

SEQ ID NO: 326610 - protein, 79 aa, Zea mays
  Clone ID: MRT4577_60939C.1.pep
MEHKDAGSQARTGPMLCMNNCRCFNRSATMNMSSKCHKEMITNQDHAKLAASSIDSLVNGIDSVMEPVVAGSNTVVTVA

SEQ ID NO: 326611 - protein, 136 aa, Zea mays
  unsure (1)..(136): unsure at all Xaa locations
  Clone ID: MRT4577_6093C.1.pep
TRTRILDSCVLAWTSHTFRSIALADHLIEEHIGTFNEAFCLLDKDGYCCITTKELEPVMRSLDHNPTEAQLQNMISDVXASDSSTIDXLEFLVLLERKMMXTRSXEELREAFRVFYWDQNGVIYKGDLRLLMTNLR

SEQ ID NO: 326612 - protein, 73 aa, Zea mays
  unsure (1)..(73): unsure at all Xaa locations
  Clone ID: MRT4577_60940C.1.pep
MRERVSIHIGQAGIPVCNASWELYCLEHGVEGVRRLPGDKAIGRGAEAVYIFXLRTGALAHVXSAVFXDLAPT

SEQ ID NO: 326613 - protein, 120 aa, Zea mays
  Clone ID: MRT4577_60941C.1.pep
GHYLGVDGKCHEKDVQYAFSLSGFVNVTQYNVDDLKLALFENGPVTVAINAAVRTFSFYSNGVYYDSDCHGGEDDLDHQVLLVGYGTLNNDSYWLIKNSWSTHWGNDGYILISQRDNMCG

SEQ ID NO: 326614 - protein, 303 aa, Zea mays
  Clone ID: MRT4577_60942C.1.pep
MASRDFLGGFGRDGGQAPVGGAGAAPGPGGESDEIELSLGLSLGGCFGAEPSQEGRSADPRLQRSSSVASICSLPAATTGTSCGAQDAGPAAAPPPDLLRTSSLPAEYMEDRLRRRAMQSQRRLEAKRKRLERRNSMSSGRPVPAAGGRDDGLEHTVPSGFQLRRSVALTTAGSPTPSRPQQGPADRRAAEATGPDGAACHDEPLPLRLRTLRSLTMRTASTGDLRSAMAEDMPMVSYKAEGPGGRKTDGFLYKYRKGEEVRIVCVCHGSFLTPAEFVEHAGGGEVPNPLRHIVVNPQQSVFL

SEQ ID NO: 326615 - protein, 97 aa, Zea mays
  Clone ID: MRT4577_60943C.1.pep
PLESPPFFFFFFFYFFFFFFFFFFFLEGNMSDVQGKSTCLPYRANNLIFGMPAQHGIHLRGGDPPYHLYKINTSIDEQLLQGFVTITIYNLGNKLGG

SEQ ID NO: 326616 - protein, 157 aa, Zea mays
  Clone ID: MRT4577_60945C.1.pep
PTSLSVATIEAFMARVACPSQPPSTPPLPAITHPLLPPPATAAPTLPPPASSPRPIGASAPTQTGLSIHLISMQPSPSPIRLMSSHQQQRRNSRWQCLQRRPRPLSPTTPRYSTEERTVPCSWALRSATPRATHHALWRCTTRHPHRAHPGPASCRI

SEQ ID NO: 326617 - protein, 84 aa, Zea mays
  Clone ID: MRT4577_60946C.1.pep
PPIAKRPSPGGGPFIKETGTTGFPPGKRAVRAPQINLGSLLLRAPRLYPLYLRVVFFVGFETDNHFPQGKRIALFTPKGQFPPP

SEQ ID NO: 326618 - protein, 89 aa, Zea mays
  Clone ID: MRT4577_60947C.1.pep
MPSLQKALPPELADNVLRLYRECLRRAKYIGHQKHNTELLVAMVRQQFKKNMHETDPEKIQKMKDDAARGLINHILYESEKITGRKFSG

SEQ ID NO: 326619 - protein, 203 aa, Zea mays
  unsure (1)..(203): unsure at all Xaa locations
  Clone ID: MRT4577_60948C.1.pep
TTWDFPPGLVRFHFGTERPAPKGEGLEQNDQPTPPRQPPGPKHKAHPAARPFLGPVGRAFLLANSPRSPVSPAYYAWDFPPGRLRLACWPGEPAARTRPSQLEQPGGFRLASALSWDGRQRGHRLFLTQLGTAPFPGPHCRFPLAQVTLLKTRVXADSLLLTNLGDIHGTPPLLSLGVFXALEEKKKPPTLWVRVNQKKDYRV

SEQ ID NO: 326620 - protein, 89 aa, Zea mays; identical to SEQ ID NO: 326618
  Clone ID: MRT4577_60949C.1.pep

SEQ ID NO: 326621 - protein, 49 aa, Zea mays
  Clone ID: MRT4577_6094C.1.pep
MLHPLSPFPPFTTQHQLDSIGFFHYCSIFTPWSFDSKKYEIHRFGAPPK

SEQ ID NO: 326622 - protein, 89 aa, Zea mays; identical to SEQ ID NO: 326618
  Clone ID: MRT4577_60950C.1.pep

SEQ ID NO: 326623 - protein, 225 aa, Zea mays
  Clone ID: MRT4577_60951C.1.pep
MSVFGGDSWARDAQQRKRRLDELLLPITAPSSPSTPDSFKKLPNGKLACLVCPHRPVLDTPLMLSMHNKGARHIAAESRLREKELSKKHEINKRLALSSDASHSNSGDPRTSVCPTNIKEKPLIEETRRAILEAQSSRFNDFKGKKELSTGNTGSREWSCKGQSFAGNQTQDKLFSDRQTEVRKRQEQELWFTASGWKRDGHGRWYRDENVEFDSDEDDPNICLS

SEQ ID NO: 326624 - protein, 253 aa, Zea mays
  Clone ID: MRT4577_60952C.1.pep
MSVFGGDSWARDAQQRKRRLDELLLPITAPSSPSTPDSFKKLHNGKLACLICPHRPVLDTPLMLSMHNKGARHIAAESRLREKELSKKHEISKRLALSSDVSHSNSGNPRTSVWPTNIKEKPLIEETRRAILEAQSSRFNDFQGKKVSCDSEWMTITSSFDSNVASSDVPKELSTGNTGSREWSCKGQSFAGNQTQDKLFSDRQTEVRKRQEQELWFTASGWKRDGHGRWYRDENVSYKNLLSTLFMRCAFLC

SEQ ID NO: 326625 - protein, 74 aa, Zea mays
  Clone ID: MRT4577_60953C.1.pep
TLVRDLMHASHVPRINKHGSLYWCSRPLISSMVNVAQAATCSTPVGLPESMITPTGLLATRPQRVYDKARADFL

SEQ ID NO: 326626 - protein, 275 aa, Zea mays
  unsure (1)..(275): unsure at all Xaa locations
  Clone ID: MRT4577_60954C.1.pep
MMDLSTTSVLAAKAYKYKAESLVKEYLLADSYVSYTAVLGGILMCKMAYDITSIISSLYYKGYGSLTKTQKLEWNNRGMSTIHAIFITVVSVYLVFFSNLFSDELDGLVTYRSSNLSNFTLXVSVGYFITDLAMILWAYPSLGGMEYVLHHMLSLISIVYAMYSGEGQLYTYMVLISETTTPGINLRWFLDTAGLKKSKAYLVNGVTMFIAWLVARIILFVYLFYHIYFHYDQVKQMHTFSCILIFAVPTILLVMNTMWFAKILRGLKKTLAKRQ

SEQ ID NO: 326627 - protein, 142 aa, Zea mays
  unsure (1)..(142): unsure at all Xaa locations
  Clone ID: MRT4577_60955C.1.pep
GASRIRTTQPYSRARNHSRRSEARTKHTARKSTGGKAPRKQLGTKAARKSPPATGGAKKPQRFRPATVALREIRKYQKSTELIIPKLPFQRLARQIAQDFKTDPSLQSSADAAQEEAAQAYHGGAXEDTNLCAIHAKRVTIR

SEQ ID NO: 326628 - protein, 110 aa, Zea mays
  Clone ID: MRT4577_60956C.1.pep
QRRQTKQREHPKQNTQKDHGPGQRGAPPHNPGRQAGHTTPPRPQRTKTQATGKERHGKAPRRRTRKQAQESTERKQTQHAPAGHRRRDSRHGQTSQQPKRTRETDAGRPG

SEQ ID NO: 326629 - protein, 93 aa, Zea mays
  Clone ID: MRT4577_60957C.1.pep
NSPNSVAGARSTCLSRLFSPFALVYGRSLRQERPARCRRRRRQRRRQVVGDAVPNVWWSGSTGVISPRQPEGANQDSDGGVYVRGASLGQGAA

SEQ ID NO: 326630 - protein, 136 aa, Zea mays
  Clone ID: MRT4577_60958C.1.pep
GPPKSPLGGWALWPGSWRPGHPPPAIFWLPGKEVFKGFWPEEPPWVSGFKKFWAPRKVIPSPPGGAPFFSLAWVFKKILGFLSPVSWVLVWPKNHVFLPPFFLGGQFFPFIGTLFFFFLGGPPAPPQKGGWALLVP

SEQ ID NO: 326631 - protein, 95 aa, Zea mays
  unsure (1)..(95): unsure at all Xaa locations
  Clone ID: MRT4577_60959C.1.pep
AGPAIQLECSHIFHLQXCLRVLXNRXLGSRITFGVISCPICRSTIDHIVLRELLDPITGLYEDVRREALMRLGYEGLHKSEAITTPGVRSYNDPA

SEQ ID NO: 326632 - protein, 124 aa, Zea mays
  unsure (1)..(124): unsure at all Xaa locations
  Clone ID: MRT4577_6095C.1.pep
PHRFHPPPTTKILPPPTAACEIEARIPPPPRKPPCVRRKAKERGRLKGPAEVAHFLSPMVLTYLYASTAGSYDRLALPARPRLPGTLVPCASSDLLSCNCPCQLVFFFFFFFFXXXXXXPAGLE

SEQ ID NO: 326633 - protein, 63 aa, Zea mays
  Clone ID: MRT4577_60960C.1.pep
RWCCKKKKKKKKKKKKKKKKKKKKKKKKKKKKKKKKKKKKKKGRPPIINFLNPKINFEPVPEG

SEQ ID NO: 326634 - protein, 105 aa, Zea mays
  Clone ID: MRT4577_60961C.1.pep
PPIHLLLALQSCRSTFSAAFGTSNDTDLQVTPAAADPISFFAHDLATQHLSNCTCRISTDFGHSIQFLIFFLRKVSFTSASDGLILGLLHPIHFFIGKIVARVIV

SEQ ID NO: 326635 - protein, 53 aa, Zea mays
  Clone ID: MRT4577_60962C.1.pep
IPALDFRSNRGDCIPVQGYPVLIWGAHVRSGGSDRVIPFRSGNLLKSPWVLQK

SEQ ID NO: 326636 - protein, 100 aa, Zea mays
  unsure (1)..(100): unsure at all Xaa locations
  Clone ID: MRT4577_60963C.1.pep
MASTKVQRIMTQPIXWRILGGRARRQNLIFRFLQSKARIQIWLFEQKDLRIEGRIIGFDEYMNLVLEDAEEINVKKNTRKTLGRILLKGDNITLMMNSGK

SEQ ID NO: 326637 - protein, 88 aa, Zea mays
  Clone ID: MRT4577_60964C.1.pep
MASTKVQRIMTQPINLIFRFLQSKARIQIWLFEQKDLRIEGRIIGFDEYMNLVLEDAEEINVKKNTRKSLGRILLKGDNITLMMNSGK

SEQ ID NO: 326638 - protein, 93 aa, Zea mays
  unsure (1)..(93): unsure at all Xaa locations
  Clone ID: MRT4577_60965C.1.pep
MASTKVQRIMTQPINLIFRFLQSKARIQIWLFEQKDLRIEGRIIXLHLQGFDEYMNLVLEDAEEINVKKNTRKTLGRILLKGDNITLMMNSGK

SEQ ID NO: 326639 - protein, 71 aa, Zea mays
  unsure (1)..(71): unsure at all Xaa locations
  Clone ID: MRT4577_60966C.1.pep
MMDPNPIVQVKHPSALAMFDQLVAASKGKQIVVFLDYDGTLSPIVDDPDAAYMSDTMRRAVRNVXQHFPTA

SEQ ID NO: 326640 - protein, 79 aa, Zea mays
  Clone ID: MRT4577_60967C.1.pep
SNSTLSLHLAARTATDRRVDWIQTLVCHSMRSCLMNRERSISWRTLLQLPARRSGRIEVHACAGLPIPLQACDKNLGWI

SEQ ID NO: 326641 - protein, 50 aa, Zea mays
  unsure (1)..(50): unsure at all Xaa locations
  Clone ID: MRT4577_60968C.1.pep
FFDSPXSSSKFTSTXXHFXMVTGHFPNSQSQQDAVLTKNFRVACTYLKDV

SEQ ID NO: 326642 - protein, 134 aa, Zea mays
  unsure (1)..(134): unsure at all Xaa locations
  Clone ID: MRT4577_60969C.1.pep
MASTKVQRIMTQPINLIFRFLQSKXARIQIWLFEQKDLRIEGRIIVYSSGGSSWVLDSGCINHMTGEEDMFHSLQLTXKHKKLCLEIVTKGFDEYMNLVLEDAEEINVKKNTRKSLGRILLKGDNITLMMNSGK

SEQ ID NO: 326643 - protein, 325 aa, Zea mays
  unsure (1)..(325): unsure at all Xaa locations
  Clone ID: MRT4577_6096C.1.pep
FLQHEFVNISKPHAERLIGEMGPDFSQKMAVKSLTSQQLVRIHQLCRQAKFDDPSGNCLSPAGEYNLRLGIIKELHPDMVATHASSPQVFEGHPFIVEAGISIGGKDVKQGLNIFRFANRIPLLFEQGADVITRTAAKRISWSSYKINQQQDKIGVFVSIVSTKIPFKGTGKEYIGDDITEISSAVKSALKQCCLQLKSKIVKKLQARERQDRKRNLNRYIPDVARAVMETLVEIADQSPPKRPRYDKEDEELLEKVNSQEVTEMTFRDCLTQHVEQVDYEMALDYVMQSGVSEEPREAIYLNSLEGSYKFXDLQSPVFVFRFVH

SEQ ID NO: 326644 - protein, 53 aa, Zea mays
  Clone ID: MRT4577_60970C.1.pep
RSSLAPLAGGYASGPKGFWVVTRSSHQRRLLYTKKQIPIVVHHRLALASSQLG

SEQ ID NO: 326645 - protein, 88 aa, Zea mays; identical to SEQ ID NO: 326637
  Clone ID: MRT4577_60971C.1.pep

SEQ ID NO: 326646 - protein, 88 aa, Zea mays
  Clone ID: MRT4577_60972C.1.pep
MASTKVQRIMTQPINLIFRFLQSKARIQIWLFEQKDLRIEGRIIGFDEYMNLVLEDAEEINVKKNTRKTLGRILLKGDNITLMMNSGK

SEQ ID NO: 326647 - protein, 138 aa, Zea mays
  Clone ID: MRT4577_60973C.1.pep
MADFSWLTVLGFLFLTFNSGMAIYRSNGDAGSVAFVVVSYLDLVALFACLRYYEQLDQQHSQKRARVKAGVWSLTTLLTIMFSYKVAEIMPLPVKLVVWSMAAATTCGGFYAFFVHSEKPVMPAAAPRPAAAKDAASN

SEQ ID NO: 326648 - protein, 65 aa, Zea mays
  Clone ID: MRT4577_60974C.1.pep
RGYSSTVHVGGGCGLRLWRRWRKRSPDMLEPTCLWIWLRRRQGPTARRRSRARYGARFCLTRAVR

SEQ ID NO: 326649 - protein, 138 aa, Zea mays
  Clone ID: MRT4577_60975C.1.pep
MADFSWLTVLGFLFLTFNSGMAIYRSNGDAGSVAFVVVSYLDLVALFACLRYYEQLDQQHSQKRARVKAGVWSLTTLLTIMFSYKVAEIMPLPVKLVVWSMAAATTCGGFYAFFVHSEKPVMPAVAPRPAAAKDAASN

SEQ ID NO: 326650 - protein, 53 aa, Zea mays
  Clone ID: MRT4577_60976C.1.pep
THFFDLHLKPQNASGTNINWSLFSSTKQAKARCPNLDPPSSQTKDRPICSTYV

SEQ ID NO: 326651 - protein, 166 aa, Zea mays
  unsure (1)..(166): unsure at all Xaa locations
  Clone ID: MRT4577_60977C.1.pep
LQPTNALCNASAAISPRGELALPLIASSRRYVRLLGLASSVFRCXHRGMAIYRSNGDAGSVAFVVVSYLDLVALFACLRYYEQLDQQHSQKRARVKAGVWSLTTLLTIMFSYKVAEIMPLPVKLVVWSMAAATTCGGFYAFFVHSEKPVMPAVAPRPAAAKDAASN

SEQ ID NO: 326652 - protein, 153 aa, Zea mays
  unsure (1)..(153): unsure at all Xaa locations
  Clone ID: MRT4577_60978C.1.pep
MSVVGFDLGNESCIVGVARQRGIDVVLNEESKRETPAIVCFGDKQRFIGTAGAANSTMNPKNSISQIKRLLGRKFADPELQNDIKAFPFGVSEGPDGFPLVHVRYLXEERSFTPTQLLAMVLSILKAIAEGYLNSAVIDCLIGIPXYFTDLPR

SEQ ID NO: 326653 - protein, 138 aa, Zea mays
  unsure (1)..(138): unsure at all Xaa locations
  Clone ID: MRT4577_60979C.1.pep
MADFSWLTVLGFLFLTFNSGMAIYRSNGDAGSVAFVVVSYLDLVALFACLRYYEQLDQQHSQKRARVKAGVWSLTTLLTIMXSYKGAXIMPLPDKLVVWSMAAATTCGGFYAVFEHSEKPEMPAVAPRPAAAKDAASN

SEQ ID NO: 326654 - protein, 63 aa, Zea mays
  Clone ID: MRT4577_6097C.1.pep
VNHGASPGRVVGPVMPSASARVNDPQLVASLARPPAGPVPSVVLSVYLLLLKLGSFYRQEHRL

SEQ ID NO: 326655 - protein, 79 aa, Zea mays
  Clone ID: MRT4577_60980C.1.pep
IHIGAFLGSSAQKLLGSNGFNPTEVPIVGSHSTPQLQGPTGKESVHSLSRLKFSLKPNVSKFLSFFCRSFWNLAFIFLV

SEQ ID NO: 326656 - protein, 135 aa, Zea mays
  Clone ID: MRT4577_60981C.1.pep
IVCEPTSWRGVIGTPLNSSPEYPTLLPRAGGCGQPTWTPIWLMSRLLRIQGFSRWRLLSRSSLKVAHFCPVAPGATCSHITCGCLQKNAASARPSTSARLLGSWNARDQDRERLVPSHRYGIGRMTPSHAPQCNR

SEQ ID NO: 326657 - protein, 195 aa, Zea mays
  Clone ID: MRT4577_60982C.1.pep
MAPVKVYGLPMNGSVARVLVCLEEVGAEYEVVAVDLHTGEHKRLPHLARNPFGQVPAFQDGDLILFESRAISKYILRKESSDLLRENNLSESAMVDVWLDVESQKFDSVMLPIIFQGLVIPVYMGGTSDLKVLEENLEKLKEIMEVYEERLSKSKYLAGDFISLADISHFPMVHLLHETPYASVLDAYPHVKAWI

SEQ ID NO: 326658 - protein, 91 aa, Zea mays
  unsure (1)..(91): unsure at all Xaa locations
  Clone ID: MRT4577_60983C.1.pep
KPVCELGIPPENITANQLLFGTLGEYAGFDPTEPTXRNGGKAIAVQLIKXDHGFQTIVTIGDGATDLEAWHPVGSHCVPSELVVGGGSFCS

SEQ ID NO: 326659 - protein, 48 aa, Zea mays
  Clone ID: MRT4577_60984C.1.pep
FELHVDSYTGSGCISTTRKVSLQLTVSAHVTSADAQASTSSLSSLLSS

SEQ ID NO: 326660 - protein, 68 aa, Zea mays
  Clone ID: MRT4577_60985C.1.pep
KFKEVGEAFTILSDPKKKTRYDSGQDLDEEGMNMGDFDANNIFKAFFGGPGGFSFEASGPGNFYFQFG

SEQ ID NO: 326661 - protein, 127 aa, Zea mays
  Clone ID: MRT4577_60986C.1.pep
WSLVMFFFMRPPPVNVHEITACLWRRFSDGSLSHAHHAPAPTQLPLPTPAIIQHSSCTRIEKHPLAVSLHTHFIVLEKVGLAQEPPYSLLLKRHRQLLHKSREERCCPGAYGRWCHYMDENEALFPG

SEQ ID NO: 326662 - protein, 83 aa, Zea mays
  unsure (1)..(83): unsure at all Xaa locations
  Clone ID: MRT4577_60987C.1.pep
ALETTWTKTGADTGHDNNEKTQYTYYPIQTKGGAEGVPSFXKXXXPPQNRGRGDQKPPGNKXXNKPRPTRNTXRGEETRPPQG

SEQ ID NO: 326663 - protein, 54 aa, Zea mays
  Clone ID: MRT4577_60988C.1.pep
MVFFWDPKKLWEGVCFFPKKKKKKKKKKKKKKKKKKKKKKKKKKKKKKNSREGR

SEQ ID NO: 326664 - protein, 200 aa, Zea mays
  Clone ID: MRT4577_60989C.1.pep
MAMVLGMVLGKIPVETPKHEVLHTGAGYEIRKYPPSIAAELTYDPKEMRGDPDGGFTVLANYIGVLGKPQNTKPEKIAMTAPVITTEPIAMTAPVITDDQQAPGKVTMQFLLPSKYTRVEEAPRPTDERVVIREVPERKFGVARFSGVATDRTVREKAKGLKAALEKDGYTIKVPFVLARYNPSFTLPPLRTNEVMFPVE

SEQ ID NO: 326665 - protein, 165 aa, Zea mays
  unsure (1)..(165): unsure at all Xaa locations
  Clone ID: MRT4577_6098C.1.pep
WVPRGRPGIFFPQNEIAFSPIFAFYFSPLSYRCLLRYTFRTTRSRECLRKPCDPYKHRPSKGRKSSLWTSNCXCPXWNNDSGLXTIDREDEXLLDDHHXTESLINSTHRXICEPGTHGHRCSDDCYLEATHDAXQLTCGECLRAPEVQTRAIDHCSYRWVRYGKI

SEQ ID NO: 326666 - protein, 78 aa, Zea mays
  Clone ID: MRT4577_60990C.1.pep
SRGRTAWRYCGGPSAAVEAKLAAAGLELERYGPVRGERHTGGKLRPDLELGDRRVSSLSQQRHLHQPVRSHNCACWSC

SEQ ID NO: 326667 - protein, 125 aa, Zea mays
  Clone ID: MRT4577_60991C.1.pep
VDCIANSDDAAYWLLKEFSANSLQEKFQKLMLNDMKELSRIQAKVGLQMPLMSPLDSDEEKYSVASDSVSSADHEKVQHGGNSSDSENIDCDHTTEDFESSDTLSTNSSSLPPQPQPPVPPHMVS

SEQ ID NO: 326668 - protein, 245 aa, Zea mays
  Clone ID: MRT4577_60992C.1.pep
MAMVLGMVLGKIPVETPKHEVLHTGAGYEIRKYPPSIAAELTYDPKEMKGDPDGGFTVLANYIGVLGKPQNTKPEKIAMTAPVITTGSGSGGDGEKIAMTAPVITTGSGSGGDGEKIAMTAPVITTGGGEPEPVAMTAPVITDDQQAPGKVTMQFLLPSKYTRVEEAPRPTDERVVIREVPERKFGVARFSGVATDRTVREKAKGLKAALEKDGYTIKGPFVLARYNPPFTLPPLRTNEVMFPVE

SEQ ID NO: 326669 - protein, 225 aa, Zea mays
  Clone ID: MRT4577_60993C.1.pep
MAMVLRMVLGKIPVETPKHEVLHTGAGYEIRKYPPSIAAELTYDPKEMRGDPDGGFTVLANYIGVLGKPQNTKPEKIAMTAPVITTGSGSGGDGEKIAMTAPVITTGGGEPEPIAMTAPVITDDQQAPGKVTMQFLLPSKYTRVEEAPRPTDERVVIREVPERKFGVARFSGVATDRTVREKAKGLKAALEKDGYTIKGPFVLARYNPSFTLPPLRTNEVMFPVE

SEQ ID NO: 326670 - protein, 196 aa, Zea mays
  Clone ID: MRT4577_60994C.1.pep
PAGLLPFAPRGGRPPCPFFPAAATGQCARLRCICISKHLSGRTDNEIKNYWNTRFKRRQRAGLPPYPPDVERQIKLLRAQNVNPFADADADAAPLRRRKPVRVALQHTVTVADGLALALATDQPELPASEPDAGVPPPRRQSAAVVPHASRTAARRLSATSSPLACRHCQPPERRRSYIRTNSTPPAAAGCWISRC

SEQ ID NO: 326671 - protein, 541 aa, Zea mays
  unsure (1)..(541): unsure at all Xaa locations
  Clone ID: MRT4577_60995C.1.pep
MASGDLLLRAHAGAPVLARAFSCRLLVPARRRSGLISPLAASKVGIADVVGRVRSGGADQKRRRRDAKEGFGFSGVATRRXYRRREGGAGRGXEALKLGVEKNGGETGGVDGSYLSETRFDQCAISPLSMKAVKDAGYERMTEVQEATLPIILQGKDVLAKAKTGTGKTVAFLLPAIEVLSTLPHQRGQLRPPINLLVMCPTRELANQVAVEARKLLRYHRTLGVQVVIGGTRLTQEQRSMQANPCQILVATPGRLKDHLENTPGFSTRLKGVKVLVLDEADRLLDMGFRRDIEKIIASIPRERQTLLFSATVPEEVRQISHVAMKKDYRFINTVKEGDEETHAQVSQMYMVAPLDLHFSILYDVLKKHVAEDADYKVIIFCTTAMVTKLVAEVLSQLKLNIREIHSRKSQSARTKVSDEFRKSKGLILVSSDVSARGVDYPDVTLVIQVGVPADREQYIHRLGRTGRKGKEGQGLLLLAPWEKYFLGAVKDLSIAESAVXQLIQVLRQKNAVRKVEMKSKECAYQAWLGYYNSNKTIGRD

SEQ ID NO: 326672 - protein, 402 aa, Zea mays
  Clone ID: MRT4577_60996C.1.pep
MARSGGGMEGSGGLKKGPWTQAEDKLLRDHVRRHGEGNWNAVRRETRLQRCGKSCRLRWANHLRPNLRKCPFSPEEERQILLLHGLIGNKWARISKHLSGRTDNEIKNYWNTRFKRRQRAGLPPYPPDVERQIKLLRAQNVNPFADADADAAHANASAGLPAPPLLYDVGNPFALLSSIPSLSQTASHSHSPLINQNYPLLNQMQVFHHLGGSQQPSFHQDGSAAAFGDIVSSRLPPLPTARTQAELHSNQFDTSISGGLVDQSMLIGDEHLLRPNPSMVKVSSMPALSYREPDGSRMLPAHGAGSDGDVSSLGQCPPGQDLHRGATWDFTFAAVKPAKRRTASEVGFSDMFAVAPPGDWFGGGSTAPSPGPSSAVTDEEFNLEMQQFMSMLPLSDEHGWNA

SEQ ID NO: 326673 - protein, 63 aa, Zea mays
  Clone ID: MRT4577_60997C.1.pep
SVSLALVAGHQLLGVAELLRADRHTESGRQADTGVARVRLACQGFRGDERPPGGCHVGSGCFW

SEQ ID NO: 326674 - protein, 294 aa, Zea mays
  unsure (1)..(294): unsure at all Xaa locations
  Clone ID: MRT4577_60998C.1.pep
AATRPCGKSCRLRWANHLRPNLRKXAFSPEEERQILLLHGLIGNKWARISKHLSGRTDNEIKNYWNTRFKRRQRAGLPPYPPDVERQIKLLRAQNVNPFADADADAAHANANANANASAGLPAPPLLYDVGNPFALLSSIPSLSQTASHSHSPLINQNYPLLNQMQVFHHLGGSQQPSFHQDGSAAAFGDIVSSRLPPLPTARTQAELHSNQFDTSSSGGLLDQSMLIGDEHLLRPNPSMVKVSSMPALSYREPDGSRMLPAHGAGSDGDVSSLGHCPPGQDLHRGATWDFTFE

SEQ ID NO: 326675 - protein, 39 aa, Zea mays
  Clone ID: MRT4577_60999C.1.pep
DDDLDRARLLALEGLRAGRLERMCDEALALAVQHDDAQA

SEQ ID NO: 326676 - protein, 223 aa, Zea mays
  Clone ID: MRT4577_6099C.1.pep
TKPSLTDDEVSNLCSEFLTAGTDTTSTALQWIMAELVKNPDAQEKLYSEIRATCGDDQAEVGEEDTHRMPYLKAVVLEGLRRHPPAHFVLSHKAAEDTEVGGYLIPKGATVNFTVAEMGWDEREWDRPMEFVPERFLSGGDGEGVDVTGSREIKMMPFGAGRRICAGLGIAMLHLEYFVANLVREFEWKEVAGDEVDLSETREFTTVMKKPLRAQMVRRTTCV

SEQ ID NO: 326677 - protein, 59 aa, Zea mays
  Clone ID: MRT4577_609C.1.pep
AQAGDRIVCRHGLRRRGSTSPQGHDHAREPAEDLSESDTSITAGARIMVHSRDGTPVVT

SEQ ID NO: 326678 - protein, 50 aa, Zea mays
  Clone ID: MRT4577_60C.1.pep
CKFALMNSVLYPFFSLLLSVSSNILGNAYYCCIIKKVHCFTFFANLIDGF

SEQ ID NO: 326679 - protein, 213 aa, Zea mays
  unsure (1)..(213): unsure at all Xaa locations
  Clone ID: MRT4577_61000C.1.pep
MGARCSKLSVCWWPPHFKSPMLENGAAGDDGSGVPVFAEYSFDDLRVATDGFAPDRIVSEHGEKAPNVVYRGTLFSSGRTVAIKRFGRSAWPDSRQFLEEARAVGQLRSGRLANLIGCCCESGERLLVAEFMPHETLAKHLFHWETNPLSWAMRMRAALYVAQALDYCSSKGRALYHDLHAYRVVFDVDGXPQISCFGLMKNSRDGKSYSTNL

SEQ ID NO: 326680 - protein, 493 aa, Zea mays
  unsure (1)..(493): unsure at all Xaa locations
  Clone ID: MRT4577_61001C.1.pep
MGARCSKLSVCWWPPRFKSPMLENGAAEDDGSGVPVFAEYSLAELRVATDGFATDRIVSEHGEKAPNVVYRGTLFSSGRTVAIKRFGRSAWPDSRQFLEEARAVGQLRSRRLANLIGCCYESGERLLVAEFMPHETLAKHLFHWETNPLSWAMRTRAAFYVAQALEYCSSKGRALYHDLHAYRVVFDAEGNPRLSCFGLMKNSRDGKSYSTNLAFTPPEYLKTGRVSPXESVVYSFGTVLLDLLSXGKHIPPSHALDLIRGKNFLVLMDSCLEGHVSSSDGTDLMRLASRCLQYEARDRPNLKTVVSGLECLQKDVSTPSHTLLGIQHDNKNSDRISLSAIGKAFARADLNEVHEILLHDGYDEDDTANAELSLQSWNDDVSESFVVKRHAGNAFRSKDYSTAIECYSRFIDSGAGVAPTMLGRRCFAYVVAGNPQEGLEDAKRAEVIASDWPMGHYLQALALHNLGREAESQEALKNGTALEAAMNSRARTV

SEQ ID NO: 326681 - protein, 276 aa, Zea mays
  Clone ID: MRT4577_61002C.1.pep
TPPEYLKTGRVSPESVVYSFGTVLLDLLSGKHIPPSHALDLIRGKNFLVLMDSCLEGHVSNSDGTDLMRLASRCLQYEARDRPNLKTVVSGLTSLQKDAYTPSHTLLGIQHDKNNSGQVSLSAIGKAFARADLNEVHEILLHDGYNEDDEANAELSLQSWNGDISESFVVKRRADNAFRSKEYTTAIECYSRFLDSGAVVAPTMLGRRCFAHVVAGNPQEGLEDAKRAEIIASDWPMGHYLQALALHKLGREAESQEALKNGTALEAARNSRARTV

SEQ ID NO: 326682 - protein, 491 aa, Zea mays
  Clone ID: MRT4577_61003C.1.pep
MGARCSKLSVCWWPPRFKSPMLENGAAEDDGSGVPVFAEYSLAELRVATDGFATDRIVSEHGEKAPNVVYRGTLFSSGRTVAIKRFGRSAWPDSRQFLEEARAVGQLRSGRLANLIGCCCESGERLLVAEFMPHETLAKHLFHWETNPLSWAMRMRAALYVAQALDYCSSKGRALYHDLHAYRVVFDADGNPRLSCFGLMKNSRDGKSYSTNLAFTPPEYLKTGRVSPESVVYSFGTVLLDLLSGKHIPPSHALDLIRGKNFLVLMDSCLEGHVSSSDGTDLMRLASRCLQYEARDRPNLKTVVSGLECLQKDVSTPSHTLLGIQHDNKNSGRISLSAIGKAFARADLNEVHEILLHDGYDEDDTANAELSLQSWNDDVSESFVVKRHADNAFRSKDYSTAIECYSRFIDSGAGVAPTMLGRRCFAYVVAGNPQEGLEDAKRAEVIASDWPMGHYLQALALHNLGREAESQEALKNGTALEAAMNSRARTV

SEQ ID NO: 326683 - protein, 730 aa, Zea mays
  unsure (1)..(730): unsure at all Xaa locations
  Clone ID: MRT4577_61004C.1.pep
PSVRPYENXFVWNTFLTEPVRSRCHNTLWTVALVHGHFKQVKLSIFGREINVVLSSRRSRHFAGTRYLKRGVNDXGKVANDVETEQIVFEEEAGSWKGRMSAVVQMRGSIPLFWSQEASRLSPKPDIFVQRYDPTYEATKLHFDDLARRYGHPIIILNLIKTVEKRPREMMLRREYCRAVEYLNQNVPEEKKLRFIHWDFHKFAKSKSANVLGVLGKVAGEALDLTGFYYSGKPKVQKKRLIQLSRTSTARDGSLDIRASSGDLSRLRDGSLDIRASSGDLSRLSSNAEALSSTGFQDMRNQXTNKSXGDTPCYQTGVLRTNCIDCLDRTNVAQYAYGLAALGRQLHAMGLTDVLKIHPDSSIASALMEMYQSMGDALAHQYGGSAAHNTVFPERQGKWKATTQSREFLKSIKRYYSNAYTDGEKQDAINLFLGYFQPQEGKPALWELDTDYYLHVTTAGDDLMSDSYHLSSAPGNNVFVGSGAALNPGTILSPVPACKEDFSRKKLTSFDKLIERTCSARGNVRLHCDADLKPSGGVGTSGMAPDAAEIQLKSPNWLFGQRKHTETISTARVAPVENVNEGNRDESNVSLCGELIWLSSSVESCEEDIFRRYLAFTTADVENGWYGGTLLYDRDENSGAYRHYSELCQGAVMDPFEHDPEKERHYAEALSVDLGDARVEAEMQAALDDYQVIGSDLSIIPSCGALAEDPSQLTRWIIGDERLLVGAAAQ

SEQ ID NO: 326684 - protein, 913 aa, Zea mays
  unsure (1)..(913): unsure at all Xaa locations
  Clone ID: MRT4577_61005C.1.pep
MAAEAEDPSLAATLEKFRLYETRARFYVIGSSREKRWFRVLKIDRSEPSELNVSEDPVWYSLQEVKSLLQRIDEGNRSTGGLAFVTKAYGIAGCIKFLESYYLILVTKRRQIGCICGHAIYCIDESQMITIPHSSVQTDVATSKNELRYKKLLASXVDLTKDFFYSYTYPIMQSLQQSVTSAGMKEMPYENLFVWNTFLTEPVRSRCHNTLWTVALVHGHFKQVKLSISGREISVVLSSRRSRHFAGTRYLKRGVNDHGKVANDVETEQIVFEEEAGSWKGRMSAVVQMRGSIPLFWSQEASRLSPKPDIFVQRYDPTYEATKLRFENXAGLTGTILSSARELSWIPMSMTLRXRHYAEALSVDLGDARVEAEMQAALDDWDFHKFAKSKSANVLGVLGKVAGEALDLTGFYYSGKPKVQKKRLIQLSRTSTARDGSLDIRASSGDLSRLRDGSLDIRASSGDLSRLSSNAEALSSTGFQDMRNQXTNKSXGDTPCYQTGVLRTNCIDCLDRTNVAQYAYGLAALGRQLHAMGLTDVLKIHPDSSIASALMEMYQSMGDALAHQYGGSAAHNTVFPERQGKWKATTQSREFLKSIKRYYSNAYTDGEKQDAINLFLGYFQPQEGKPALWELDTDYYLHVTTAGDDLMSDSYHLSSAPGNNVFVGSGAALNPGTILSPVPACKEDFSRKKLTSFDKLIERTCSSIRNVRLHCDADLKPSGGVGTSGMAPDAAEIQLKSPNWLFGQRKHTETISTARVAPVENVNEGNRDESNVSLCGELIWLSSSVESCEEDIFRRYLAFTTADVENGWYGGTLLYDRDENSGAYRHYSELCQGAVMDPFEHDPEKERHYAEALSVDLGDARVEAEMQAALDDYQVIGSDLSIIPSCGALAEDPSQLTRWIIGDERLLVGAAAQ

SEQ ID NO: 326685 - protein, 66 aa, Zea mays
  Clone ID: MRT4577_61006C.1.pep
GSRCNWRWVVVRPWSYSIGSTPASRRRESILATPHSASQATHQLSLGNMETTGEFLLQCWIYYTQM

SEQ ID NO: 326686 - protein, 101 aa, Zea mays
  Clone ID: MRT4577_61007C.1.pep
ILFCTGPATYHLSLIRRLRLSSSGEAPACTPTKENFSRIRSRQCGGEHLPRPTMAPSSNNDFIVIEKRAWEVEETTTTNNDRRERPGRQYLGQTTYDMPKS

SEQ ID NO: 326687 - protein, 84 aa, Zea mays
  Clone ID: MRT4577_61008C.1.pep
YNQGGKPPATSLVGKRRATIRDPAHLEPSRHVDLLKPPQKALALAPLHVLARSHQQGGGLPEFPVVRASPVLLYGERGPQRTPG

SEQ ID NO: 326688 - protein, 169 aa, Zea mays
  unsure (1)..(169): unsure at all Xaa locations
  Clone ID: MRT4577_6100C.1.pep
ISNRTTASCLPLNCGLGLDKALWLCKPLLILAVQAWIPSLELESSLQLQLFLPLRPSPPVRRGTSAAKGLCVERWRERERFASAKIHIQASTRNPHRKTKGHETVPYQNSTPTTRGSDLSHTTQPXSTHEFASGWLAGLLNSLTRNRRNSPPPEHSCTGGRLHGFHGLS

SEQ ID NO: 326689 - protein, 88 aa, Zea mays
  Clone ID: MRT4577_61010C.1.pep
HKLQRPGLFPAKKSRGDGRIYQSPKFYNTKTVRAPQNWPGAYKKKGSPGLKSYRFITKPHFLAFLGAHKAGAGDETGGGISGGPGANL

SEQ ID NO: 326690 - protein, 10 aa, Zea mays
  Clone ID: MRT4577_61011C.1.pep
MLFFLFPGYM

SEQ ID NO: 326691 - protein, 65 aa, Zea mays
  Clone ID: MRT4577_61012C.1.pep
PALAQLGPPLGALGAPRSGFERPPGGGISGESPHKGGPGRIKHFILSDLMFGHLFFNANVNFCLF

SEQ ID NO: 326692 - protein, 184 aa, Zea mays
  Clone ID: MRT4577_61013C.1.pep
PAGKSCKKSHFFISISLPTKIFTRYKHSSKMVTTRASSRGASVGPEFAPEFHTELPTIPSTPSTRKRSAKAASSSSTTTASAKKRRLSVQEPKKWHHAPSTATVLWLAISLPLVAWDSGYVLGRPHTMPGGAYQWPLYMPYALYGQVDHVYGLKAWESKNGFTGAQTALNIVEILMYLVYLGTI

SEQ ID NO: 326693 - protein, 83 aa, Zea mays
  Clone ID: MRT4577_61014C.1.pep
EMQNPDNHQREASPLGFKNPRKRHHQLDLPATLLTLRPNGKKLLQRSNDDKLDETETKFQFFLGGTNLKPFFTCICEDTNIPA

SEQ ID NO: 326694 - protein, 83 aa, Zea mays
  Clone ID: MRT4577_61015C.1.pep
IAARGSRGRLVSGIVHNLKASYALVSLPTERPSLSKPDLTTKGGAQDSRAHRTPSTNGGVHDNRCSSMVQENLSLPRTQDARA

SEQ ID NO: 326695 - protein, 90 aa, Zea mays
  unsure (1)..(90): unsure at all Xaa locations
  Clone ID: MRT4577_61016C.1.pep
APHPRAIFFFSKFLFFFSPSRLFPPPNSSPSLQLLSFFPQPTFXSIFSIPRFNYPFKIISHPSNLRPRFPFPPSQGFFIPLKIFFDFPSS

SEQ ID NO: 326696 - protein, 67 aa, Zea mays
  unsure (1)..(67): unsure at all Xaa locations
  Clone ID: MRT4577_61017C.1.pep
GDEMLXASFTYNELENSGVWEADXEWCTRRPGDADLGGKPSAEDGDDESVDDTGEKVSDTACTVRRQ

SEQ ID NO: 326697 - protein, 80 aa, Zea mays
  Clone ID: MRT4577_61018C.1.pep
NGGVTYTFKQKYRWRKPLPSFLIITQFETTYRSLNQYQNQPFYRPSQEQPCPSLAARHWLAPGNQWTGSHNHHTAMSIPA

SEQ ID NO: 326698 - protein, 143 aa, Zea mays
  unsure (1)..(143): unsure at all Xaa locations
  Clone ID: MRT4577_61019C.1.pep
PTSCYCRVVSDSKMTIYHPGMHIKQVDELPYRVLLDSWNNNNXVHSEALDDARIXCNKYITXSAVNDAFHLRXIRLHXPFHELRINXMLSRARTDTLQTGMMGDFGIPHLIXDNQQIAQDLVSDRCKDNHDAHAPDALRHANI

SEQ ID NO: 326699 - protein, 81 aa, Zea mays
  unsure (1)..(81): unsure at all Xaa locations
  Clone ID: MRT4577_6101C.1.pep
HFLAAVIKARKLELAGLGKCDAPAHDYLLCKFMRKGYYSDEQLQHVSLKLILVGRDTYSEELYXLFWLVSTHTDMDHQIVL

SEQ ID NO: 326700 - protein, 164 aa, Zea mays
  unsure (1)..(164): unsure at all Xaa locations
  Clone ID: MRT4577_61020C.1.pep
CARPLTHSPRRSPPPTTASCPSPPPPPPPVPRRGGTCASEPREIRQKRGEKKXRKQYENKKXNDEDKVWXGXNFXKRKVEMXETRLLTLEIWDTAXQERFKSLGVAFYRXADCCXLVXDVXSMKGXDKLNKWLEEFLIQASPSEPDNFPFGFIXGNKVEWKKEG

SEQ ID NO: 326701 - protein, 33 aa, Zea mays
  Clone ID: MRT4577_61021C.1.pep
LLLSKDRYGCYEVMPTRLIMSDNIIPDSKGGGG

SEQ ID NO: 326702 - protein, 108 aa, Zea mays
  Clone ID: MRT4577_61022C.1.pep
MSGVWVFKNGVVRLVENGAAVGGEAAVRRRKALVHTPSGQVVRSYAELEAELRALGWERYYEDPALYQFHKRGSLDLISLPADFARFSSVHMYDIVIKNRDSFRVVDV

SEQ ID NO: 326703 - protein, 80 aa, Zea mays
  Clone ID: MRT4577_61023C.1.pep
ICWGPPGGCILMGGGFFGGWLSGHRFLVSSCVGHYSAHFLCLLYIGEGGCSLCSGALFLWEPVGVKGCWGKKFVGGWYKV

SEQ ID NO: 326704 - protein, 85 aa, Zea mays
  Clone ID: MRT4577_61024C.1.pep
KPLLEPPRACSHSLRDALALSVRPLLPQLVVLQLHGCTRPRSQRLVVFTLRGLSRVVVCLVVSALFLPTLRCGPLVFCSLPALVH

SEQ ID NO: 326705 - protein, 86 aa, Zea mays
  Clone ID: MRT4577_61025C.1.pep
SWFPLLRALGTGVSPPPLGGGVANALNDPFKWKGLFFGEKGCLELFKKKKKKKKKKKKKKKKKPKKKKKKKKKKKKKKLDLPGRPL

SEQ ID NO: 326706 - protein, 109 aa, Zea mays
  Clone ID: MRT4577_61026C.1.pep
CMWPTRNKKLHFQRLKKKVFGKKKKKDSRSKKNTTKKARACRSIGPTLASASFHRLTFVLQPPNCNTPAYPTSIVMAQPRLPQLTSLDHTPTCRPSQQSDRPYRISLTP

SEQ ID NO: 326707 - protein, 96 aa, Zea mays
  Clone ID: MRT4577_61027C.1.pep
LLAQTTSSTKYFSPKHVGYARIETQPKRQSKFQAHVYLFYMHSYSKLNLWIHSILSSLLLNIPMSTSAFTSLFSLLSCQDIQINITSKPIISSGNI

SEQ ID NO: 326708 - protein, 285 aa, Zea mays
  unsure (1)..(285): unsure at all Xaa locations
  Clone ID: MRT4577_61028C.1.pep
FFTTKPYACDPSNLPKYPPSKEYDAKLRDEEARRQRAAAKGQEAEAGRRKQLPAPDGNSGLQHRRVQVNSKNSTYKFTPKEDVSGFPIDPSARAADNGYPQRVPLMQAGRSSSTLGRSSGMDPKAQRFHTSQIVTITTEMSNQSTASGQRGNAPKMSNLGESARRXFERAPVQFKIQSAXAADPSDRPEWNHQFQERPSSSHRKDDAAVNKETTVVNGTKKNRIHYSGPLMPHGANMDEILREHERQIQQAVRRARLDKGKGKHNGERDQSEALLYTTGNVRADR

SEQ ID NO: 326709 - protein, 79 aa, Zea mays
  unsure (1)..(79): unsure at all Xaa locations
  Clone ID: MRT4577_61029C.1.pep
RTGSWKKKKRRAWPXRRSAGRRAEGPRGRACAASREGRFRATKPDGSSGREGMSRSKGAGEVGGAPVNGMSRTQQQXXR

SEQ ID NO: 326710 - protein, 90 aa, Zea mays
  Clone ID: MRT4577_6102C.1.pep
ASNQRKTPSRHRAGRYDLYILCGASQVVGYVGHGWTLSIVFTCWDSAVNGGVRKKKDVNNETKLDMVYKKDDNFGEWNSEVARTGTTVYE

SEQ ID NO: 326711 - protein, 153 aa, Zea mays
  unsure (1)..(153): unsure at all Xaa locations
  Clone ID: MRT4577_61030C.1.pep
PPEAPNPGEAKAGPXPPQKRKPPPPAPAAKEGPKDGSPKVGGKEGAKKGGAEAPAKGAKQPDXPKNPRQGPPGGGKRPAPRPGGPGKGVFKKTNPRPLPARRGRGVLFQKIPSPVFPARKKIWERGPAPGGLNTKAQNIQGGTPPAVVCPPPP

SEQ ID NO: 326712 - protein, 150 aa, Zea mays
  unsure (1)..(150): unsure at all Xaa locations
  Clone ID: MRT4577_61031C.1.pep
EAQLQGQAQIPRLRAPRRYDLRLRTRLITYTFXGTDVGTTSVSVPTRLLVLNSDDLSINSACIRYQHLAPKEVVYFEDDEILVLRYSKDQVLGEGVLNMKFNGTLNDQMRGSYHSKYQDKGKMKNMALTHFESVDAXRCFSMXDEPAFKV

SEQ ID NO: 326713 - protein, 79 aa, Zea mays
  Clone ID: MRT4577_61032C.1.pep
NKQKSGKNLKKISADLIRSLSVGILQPPLYSLDFSALSVFLCRTSAIVLLPPARRRYPLRRFGLQKSWLPVFISSRRRL

SEQ ID NO: 326714 - protein, 105 aa, Zea mays
  Clone ID: MRT4577_61033C.1.pep
MDREAKKEAFRKYLESSGVLDTLTKVTSSSSHAALVALYEENDKPSSAVEFVQQKLGGPSISDYEKLKAEKLDLQLKYDKLLETHKETCRQLEELKNMKYGAPWN

SEQ ID NO: 326715 - protein, 112 aa, Zea mays
  Clone ID: MRT4577_61034C.1.pep
FKDISTDSPQISVYKVLLLFPAYNRSTKPFRGRPARSEVAVMCRLPWCISVGVNSDRSALWIPFASYPSLATRAHDPLILIVSSRTDGVICLYRAPQTPACHICHDRRAQGW

SEQ ID NO: 326716 - protein, 38 aa, Zea mays
  Clone ID: MRT4577_61035C.1.pep
MSSRRSRASTVSEEEINELISRLQTLLPSARRRGGSQV

SEQ ID NO: 326717 - protein, 87 aa, Zea mays
  Clone ID: MRT4577_61036C.1.pep
MSSRRSRASTVSEEEINELISRLQTLLPSARRRGGSQASTTKLLKETCSYIKSLHREVDDLSDRLSDLMASMDHNSPGAEIIRSLLR

SEQ ID NO: 326718 - protein, 52 aa, Zea mays
  Clone ID: MRT4577_61037C.1.pep
MQASTTKLLKETCSYIKSLHREVDDLSDRLSDLMASMDHNSPGAEIIRSLLR

SEQ ID NO: 326719 - protein, 71 aa, Zea mays
  Clone ID: MRT4577_61038C.1.pep
VDKVQETGWSRWMFISRLRSVRQNRLPSALKSRVTFSLLSSINSGYIVWLEWSASPHGMSKTGLRNIYIYI

SEQ ID NO: 326720 - protein, 75 aa, Zea mays
  Clone ID: MRT4577_61039C.1.pep
THDTAAPRNLIVGYCRSGDCLCMPSSTRRVQSKNSRVQRDSVRLGALYQGLAIISTCSTLTRFRRRYCSPSSGPN

SEQ ID NO: 326721 - protein, 46 aa, Zea mays
  Clone ID: MRT4577_6103C.1.pep
PFNGVYCPLRKNYFFSRPPAIATLRMKRRLFSNVNKESDNEKGRAF

SEQ ID NO: 326722 - protein, 50 aa, Zea mays
  Clone ID: MRT4577_61040C.1.pep
RFGDLHFIYLSWFFFQKKPLPITSNQDAVQLKLCLPALYLHFCEIVVHCI

SEQ ID NO: 326723 - protein, 176 aa, Zea mays
  Clone ID: MRT4577_61041C.1.pep
MPSDSSSWARALVQISPYTFSAIGIAVSIGVSVLGAAWGIFITGSSLIGAAIKAPRITSKNLISVIFCEAVAIYGVIVAIILQTKLESVPTSQMYDPESLRAGYAIFASGLIVGFANLVCGVCVGIIGSSCALSDAQNSSLFVKILVIEIFGSALGLFGVIVGIIMSSQATWPAKA

SEQ ID NO: 326724 - protein, 169 aa, Zea mays
  unsure (1)..(169): unsure at all Xaa locations
  Clone ID: MRT4577_61042C.1.pep
MSSDSSSWARALVQISPYTFSAIGIAVSIGVSVLGAAWGIFITGSSLIGAAIKAPRITSKNLISVIFCEAVAIXLQTKLESVPTSQMYDPESLRAGYAIFASGLIVGFANLVCGVCVGIIGSSCALSDAQNSSLFVKILVIEIFGSALGLFGVIVGIIMSSQATWPAKA

SEQ ID NO: 326725 - protein, 176 aa, Zea mays
  Clone ID: MRT4577_61043C.1.pep
MSSDSSSWARALVQISPYTFSAIGIAVSIGVSVLGAAWGIFITGSSLIGAAIKAPRITSKNLISVIFCEAVAIYGVIVAIILQTKLESVPTSQMYDPESLRAGYAIFASGLIVGFANLVCGVCVGIIGSSCALSDAQNSSLFVKILVIEIFGSALGLFGVIVGIIMSSQATWPAKA

SEQ ID NO: 326726 - protein, 205 aa, Zea mays
  unsure (1)..(205): unsure at all Xaa locations
  Clone ID: MRT4577_61044C.1.pep
CPFSWCSLARRSACSSICLSPTTPPIPTSDFWFALHWPVSSSLCFFLCAFLASPLSQMYRTVKSTDKPAASSGANDGGSGDEDFAGGGQAGSGGENMCARPFGEHRSTSEGAASSVGGGGGGGSDMDQSSAGNGSTRWSNSSRDPWLSSNSCNMDAHRLAALSSPIENGEPXAGRAARRCRTRSXSSPSLEFTLGRPDWQGTDHD

SEQ ID NO: 326727 - protein, 102 aa, Zea mays
  unsure (1)..(102): unsure at all Xaa locations
  Clone ID: MRT4577_61045C.1.pep
XFNFFFFFGKGKVSLIPKLICFLTPGNTCGPPGFIYITNWVFGVETVCPEIKICPPTVFGQVKKGRVPLKTRGAMGFPFGRGSWKKRAFPPVGGPFFDPTGG

SEQ ID NO: 326728 - protein, 260 aa, Zea mays
  Clone ID: MRT4577_61046C.1.pep
MDKIKQVFSHDSTKKEEHHHNAAAGTTTAPPTRSSAGDREQVVAPTESRAATAETTAPVSNTAPTSDTGLTGARRDETASGVSGLKTHEHEHGAHGAHLKEVAKPPAHQHQHPREDGILDVEQAKNAKHDHQHLAPVTHERHHVHEVEEVERQREVDRNIHHVQHHVQPVLDEQHGAETVQQKVVPQTEVRENHVATDEDKAQFASLATARDEFAEGPREKTIIDKGEKVVEHDHHHVHHVVQPVIERDVHEHNRIKTTI

SEQ ID NO: 326729 - protein, 123 aa, Zea mays
  unsure (1)..(123): unsure at all Xaa locations
  Clone ID: MRT4577_61047C.1.pep
QXTSILIYLLAGTATSWFPTFKGQYSTTFELNNFLCNLTCSGVLFFKKGQVMRCSPPIWVTNVTSLLLKIMSVHAVSTSKVSPYICIAGLICIVMAVLAVTNFTSSEAHDLPHARSTNLATRV

SEQ ID NO: 326730 - protein, 110 aa, Zea mays
  Clone ID: MRT4577_61048C.1.pep
EFLLILIGKHYRQKKSDAWSPQSVIFKGISLVFVMKMSLVRLELLKPTRCSGSICVKTPMTSWKGRCWILDYFHLSVKSKLYHEVTINRFEICFGRCSLILTHLLCLPRC

SEQ ID NO: 326731 - protein, 76 aa, Zea mays
  Clone ID: MRT4577_61049C.1.pep
AALEAKWRCCMNHTSPARSRHDLVVVPCVVKKFQASGEDEASRVVFTKCTTKSSNILRDSSSIRQNYLVEEKIFIN

SEQ ID NO: 326732 - protein, 156 aa, Zea mays
  unsure (1)..(156): unsure at all Xaa locations
  Clone ID: MRT4577_6104C.1.pep
LSTSYRSLLELAQQRDILVYDFVSNGTLSAAVPLLPRRTHLAMVAQIAXALEXLHFGMNPPXVHRDITSSNIFVEADIRACLGDFGLSLLLAPSDMCATEGTRDLVCCTSPGWGPWTLARSGGTWRWRSGWRPRSRSVSTGWSSTHRCCPRSSVVV

SEQ ID NO: 326733 - protein, 72 aa, Zea mays
  unsure (1)..(72): unsure at all Xaa locations
  Clone ID: MRT4577_61050C.1.pep
FGGKFQAEGLAGAASKESNHYTYGWDFALSSSMAPRQTTDRDKRCGVSYLYRLDSSQXFTRSRLPDKVFQAS

SEQ ID NO: 326734 - protein, 63 aa, Zea mays
  Clone ID: MRT4577_61051C.1.pep
LPSRRRGRKRLPCLPPSPSPLPLSYRLCSRTSVMSNGDAGMCRKISSRLCVNPIALWSLYAVA

SEQ ID NO: 326735 - protein, 85 aa, Zea mays
  unsure (1)..(85): unsure at all Xaa locations
  Clone ID: MRT4577_61052C.1.pep
RVLXXLXLXPFXPWCPGXXCLXXPVAGFXWPRFPPRXLXXXXXXLSAXLSXXCSCXXLVAFPFSGFLFVFFFFXXXXXXXXXXXP

SEQ ID NO: 326736 - protein, 95 aa, Zea mays
  Clone ID: MRT4577_61053C.1.pep
TPSPPSTLPTLHILSHKLGHHLSQLFCMLKTILSQLMKHKHIKTTVANPTKVPRYSNQTVQLKPEATQHPPRLPAPFLRHDDLVHKLFTVLSFRY

SEQ ID NO: 326737 - protein, 63 aa, Zea mays
  Clone ID: MRT4577_61054C.1.pep
SLPLVASKQESSGSRCHPQGFYGWRLGSTEEIVVTLNGCPGGEVLGSGGTAERHVRRIAGGGA

SEQ ID NO: 326738 - protein, 102 aa, Zea mays
  Clone ID: MRT4577_61055C.1.pep
SHGVIKISPEPVIHHTLEGPLKRQRAILVLSHRRWKALLEPGPLQDWFCRLGGLLKGSQNNVWQFRSSRALGVEVSVLSKTSPLFVVVVRHRVSIQGMNCEI

SEQ ID NO: 326739 - protein, 78 aa, Zea mays
  Clone ID: MRT4577_61056C.1.pep
TLLLIDSSFIFYDLSQMAAVSSATSSIHPQVVPFYQYAVPNVSTLITTATFAAHSTYLFCHTQHGSTNNPSLEVPSLQ

SEQ ID NO: 326740 - protein, 129 aa, Zea mays
  Clone ID: MRT4577_61057C.1.pep
HLSLVPAKLAQLSRCASTYPHEQDPFFSLDSFSFSFALQNSQDLVRFSSSLGFTLLIRSSAKDPTWSLRDCCSQERTMLPTQPPTAHTLFPPLVLPFPPGMLILVMSSLSLVLPQQRMNGSGIDFCPLM

SEQ ID NO: 326741 - protein, 81 aa, Zea mays
  Clone ID: MRT4577_61058C.1.pep
LFACPATRLAGTCEQPYPTPKGHFTYSQGSKHLDTVTELGNKGEQEAHPRAGVSRRSSTQLEEAIHKKKTVAQRLISGTRT

SEQ ID NO: 326742 - protein, 45 aa, Zea mays
  Clone ID: MRT4577_61059C.1.pep
YYINPTANIKVGINVFGGDLRHVLNEDLHCDYLLLDFVNDYFICF

SEQ ID NO: 326743 - protein, 237 aa, Zea mays
  unsure (1)..(237): unsure at all Xaa locations
  Clone ID: MRT4577_6105C.1.pep
SKSPEPKPAAGTPTTEEVAAPAAAETTTEPAAVPEPTAEPTETAEEPAVAAADATGPAEEPVVSETPASPTDKAKKSVXVSSTNSSRQSPTXAADTTATSTEPAAETAAETAAAPETTEETPAVAETTAAAEPEPVAAEESAAVETTEEKKTPSRPSSPLGRSLTKXTEESAPSSPREXETKETVAKEETAPAATEETTGXVEPTPATEEAAAPTTTEEETPAAAPVESAPVVTASA

SEQ ID NO: 326744 - protein, 93 aa, Zea mays
  unsure (1)..(93): unsure at all Xaa locations
  Clone ID: MRT4577_61060C.1.pep
PXXACIRPPALPGAAHRTHWXXXSPSSRGPPPASSPAMAAAGDPPPPIYAEGAARTRGEISPHFQTYARDDDAKLETTRARLSNILKRHEDLK

SEQ ID NO: 326745 - protein, 75 aa, Zea mays
  Clone ID: MRT4577_61061C.1.pep
GLGREKKKKKKKKKKKKKKKKKKKKKKKKKKKKKKKNRFGPFFLEPVKDPIIWSRPGAGFKKTVFFGPRFFPPGP

SEQ ID NO: 326746 - protein, 42 aa, Zea mays
  Clone ID: MRT4577_61062C.1.pep
PTAQLPPQPLWGFRCPSALLLIYDIWGISSIPPPLFIYVIKP

SEQ ID NO: 326747 - protein, 38 aa, Zea mays
  Clone ID: MRT4577_61063C.1.pep
QVLIGLIIGKVGRLEGTGRNLIPGWTPSLVGGGSGSRT

SEQ ID NO: 326748 - protein, 88 aa, Zea mays
  Clone ID: MRT4577_61064C.1.pep
EGNSIGIHCHLPIRHHLPGDTPSDGGERLIEILLTREKEREVGADDHATREGGRGIHEGLQHRLDASEAALVTEWLLKIEPDIRVCIY

SEQ ID NO: 326749 - protein, 59 aa, Zea mays
  Clone ID: MRT4577_61065C.1.pep
QMLGQYTGPRIEHAQFQMPGSQIIAYRSRRRLSASPSISSNTIRLGSKKISINYHTKGK

SEQ ID NO: 326750 - protein, 60 aa, Zea mays
  Clone ID: MRT4577_61066C.1.pep
SCLRFSLRLSARQVIQQSSYVPCSTSFSMATFKDSLDNFRLTFMMTSFIELFTDVLYIVG

SEQ ID NO: 326751 - protein, 104 aa, Zea mays
  Clone ID: MRT4577_61067C.1.pep
FTPHTKHHPLQSHKHSKPFLGLLYHSIFPPFIRFAAKSKSHENGPQALKNSLLLFDMPSPICPAPPKWGSSSYLWQPPKTGPKTLTGFSFQNLYYKTTHTFASI

SEQ ID NO: 326752 - protein, 78 aa, Zea mays
  Clone ID: MRT4577_61068C.1.pep
MAEDGGKAAAASAAAAEAGGGGAKEGGEERTVKLFVGQVPKHMAEADLLALFREVAAVDEVTVIKDKATKVSRGCCFV

SEQ ID NO: 326753 - protein, 77 aa, Zea mays
  unsure (1)..(77): unsure at all Xaa locations
  Clone ID: MRT4577_61069C.1.pep
SKIIISAGGAEAEELELLGAVGEGLHLVVAIHEEGRIQADEVVVLFLLPLPHAAGVRHLSAPPRRRRLQQQGEMFEX

SEQ ID NO: 326754 - protein, 64 aa, Zea mays
  Clone ID: MRT4577_6106C.1.pep
SVTLTSQLCSMPSLRPHVGNSGAAAGPKDYVNVCIQHSNEHNILTTVTGQNKENRFFFFPPPPP

SEQ ID NO: 326755 - protein, 166 aa, Zea mays
  Clone ID: MRT4577_61070C.1.pep
GICEAVEGDFLDAHSLQLLNPYMPNLSASWLFQRAMSVRPHVNVSPTFINELLFANFQSMQKLGDSVLRPFLQDVIQFGPLVKTLGLVMITRPQILPSIFKQVGLGVILEWSGHFMMLGYYTFLSTYIDPILRSWVESLPPRDKYQWKRYLEAWRYGAGLDYRQGE

SEQ ID NO: 326756 - protein, 129 aa, Zea mays
  unsure (1)..(129): unsure at all Xaa locations
  Clone ID: MRT4577_61071C.1.pep
DNSYQCTRPALLQYHFIDDEFWIALHVLVSYHLISHTSFFYFGVKVYVKQLKVISWMLIVCSCSTLTWLVYAIAISIQFEVEAYSVLVLQPNLSASWVFQRAMSVRPHVNVSPTCINELLFANFXQCRN

SEQ ID NO: 326757 - protein, 78 aa, Zea mays
  unsure (1)..(78): unsure at all Xaa locations
  Clone ID: MRT4577_61072C.1.pep
CRHDKLYMQHTIHQPHHSQRLCDIAYRSLLESRVIRVASHARARGXRVAGSIRASLRSVGRVATEPDRGDRNRTYSGS

SEQ ID NO: 326758 - protein, 136 aa, Zea mays
  Clone ID: MRT4577_61073C.1.pep
FFFFFFFFFFGFIKIIGLKKPSPGPGKATDYARLLPPPPASDTRHLPFAARHLLLSNLNSMGNISTSNPRDRHGQQQQQLVDLLSLEELRSHGRDFPAATLQLGRVHPLLFVLFAGCLWIGQNKTFHRHLRRDREK

SEQ ID NO: 326759 - protein, 80 aa, Zea mays
  Clone ID: MRT4577_61074C.1.pep
KKNDIDHGSGGDLDDTTGSDFLENLVGGKTSLGKNGGPVVFPGLPALGVNHNGHVHKKVGLEHDRPHLRAQDFLKDDHLP

SEQ ID NO: 326760 - protein, 152 aa, Zea mays [sequence omitted]

SEQ ID NO: 326761 - protein, 100 aa, Zea mays
  unsure (1)..(100): unsure at all Xaa locations
  Clone ID: MRT4577_61076C.1.pep
FVPRALLMDSXPVTMDGVRTGPYGQIFLPDNFVLGQGXGALNNLAKGHYTEGAELIDCVLDGWRNEAYNCDCLQGCQXVGHSLGGGTXGSGMGTLLISKI

SEQ ID NO: 326762 - protein, 584 aa, Zea mays
  Clone ID: MRT4577_61077C.1.pep
MSAAVACAERATNDMLIGPDWAVNIELCDIINMDPGQAKDTLKLLKKRLASKNSKVQILTLYVLETLSKNCGDIVHQQIVERDILSEMVKIVKKKPDLSVREKILSLIDTWQVAFGGPSGKYRQYHAAYQELRAAGVDFPPREENSVPLFTPPQTQPLRHPHLYTPPGQSYEDAAIQASLQSAPPAPALSLSEIQSARGIVDVLDEMLNALDHRHPEGVREEVIVDLVGQCRSYQSRVMDLVNSTGDESLLFQALGLNDELQRVVQRHDDIAKGIPPGTGAPLPASGNVNQGTAPPRPTAVSFSPLLNVHEDDEPEDEFSVLSRRSARDGAVAQNNVPSAPRNERPYPSPLLPPPPASKRPVYTEASSVDYLSGDSYKSEKVSDDFINPTAPANISTSSHSKAEAHPPPSYGGRPDRVSDDFINPTAPSFSAPSRPTNEEPARPSVKRQESLPDDDFINPTALPGFSSSSATKESGEDLPKAPWEAQAAAGSLPPPPARYGQRQQYFEQNVYSGGSNEGGYNGLTTQTEGLSLNPRSSENERSAARPAASRPAKPEDSLFKDLVDFAKTKPSSPSKPANSRRTR

SEQ ID NO: 326763 - protein, 225 aa, Zea mays
  Clone ID: MRT4577_61078C.1.pep
MAVALRFLGVARESLSGRARRRLQAREGAAPGTREHEPGATMLEAEEGPGGSLPDGVHRSALPQDGGGPRSCGGGKECPSGVHLHHEVRRLVAHAGEKAVSCGGGGASEIPELTVIRELHLRGSIGGVVATLSRKRSVDVRRINPKVPKEEVVTISGRLVQILSDHGPLTIGNTWNNTKVPNQPVRQSGKSRGAMQASEKQQRRRCQVPTMLQHVQFACGIGIPS

SEQ ID NO: 326764 - protein, 127 aa, Zea mays
  unsure (1)..(127): unsure at all Xaa locations
  Clone ID: MRT4577_61079C.1.pep
NGRPFFFFFKDRTQRAPNLGLRLANYTRKAQRATIWLHLNYSNPTWAKPQAALNQRPPLIPRPGLDQPPSTWSSPVGFQLFLIRLLLALFFFALLTRPGKMNPTCGNRPGTDLLLTTCLIINNXIMT

SEQ ID NO: 326765 - protein, 55 aa, Zea mays
  Clone ID: MRT4577_6107C.1.pep
EIGHCKQHLREEEQYSLVSVNGLWLSSSVSALMTSNFCDLLVFQHLWLYCGHWRD

SEQ ID NO: 326766 - protein, 80 aa, Zea mays
  Clone ID: MRT4577_61080C.1.pep
VHSSSYAPIPYCKTYAISLPGGSLQSPTLQQITHDHPRLLNCLLLSRVQYNAHWLHCMLLTLTLLLITLSTHKPLQAFMH

SEQ ID NO: 326767 - protein, 54 aa, Zea mays
  Clone ID: MRT4577_61081C.1.pep
VSTDEIRTISEPIGQSSSRSWMRILFPVLLLLVARIFSLSTELLITDPFCVWAP

SEQ ID NO: 326768 - protein, 138 aa, Zea mays
  Clone ID: MRT4577_61082C.1.pep
PEPPPKPELKPDPNPKPKPELKPDPNPEPKLGLKPDPSPDPDPKPEPYLDPNPNPDPEPHPKPELKLVPNPEPKPDPNPGPPPNPDLKPDPNPQPDLKPGPKPKLDPPPFPPAVFNWGSGFYQFLWCFNKIPCSSVLL

SEQ ID NO: 326769 - protein, 86 aa, Zea mays
  unsure (1)..(86): unsure at all Xaa locations
  Clone ID: MRT4577_61083C.1.pep
RRFSSPLPLDYWSTRRPEAASSSATDRRRSSRRLPLVPVPQPRRSASVRYATRHCAVGRQLGLLAPXRLLRARRPFXGVIKDGATS

SEQ ID NO: 326770 - protein, 117 aa, Zea mays
  Clone ID: MRT4577_61084C.1.pep
LLQDHNGPARRRRQNAHFQKFIFCKKSVSVGVPKNKNNFLHQDKMIDEAIVKVARSLYDSVRVHKQLNSCFCTKNVLATCVSCFRLAHKKKVDLAKNSDHSVYFPSVQKPRRFRVPY

SEQ ID NO: 326771 - protein, 132 aa, Zea mays
  Clone ID: MRT4577_61085C.1.pep
MDMPNDTCPSPKLHTRLRLWEFADCYVFEPVGLNDLLLSVNRINGSMNLVEELPQHGPSINPKVQIVFGVIGVLKLAVGTYILVITDRDCAGSYLGHAVFKVRGLRALPCNNSLSASAEQKKVGIEFSELLD

SEQ ID NO: 326772 - protein, 51 aa, Zea mays
  Clone ID: MRT4577_61086C.1.pep
IPAATHSSESRSLAHTVYYSILHTLTCDNLTITYLQLNSTNSPSTLHNLYS

SEQ ID NO: 326773 - protein, 102 aa, Zea mays
  Clone ID: MRT4577_61087C.1.pep
PDLRPRLLVNSSATLGAVGWATHAGGVDKCRKLGQYYSQRLWMLRTMVSQLLMHVRIEITSAKVKDVRLKADHMVQVGMEDTHHATRQAVPFDRWDDDLHKL

SEQ ID NO: 326774 - protein, 58 aa, Zea mays
  Clone ID: MRT4577_61088C.1.pep
KLQGSEHLSNFSQIKDLGHHREMELGGGTIVKPRFEVLKEMQTFKKRSFLTGVGLEAL

SEQ ID NO: 326775 - protein, 123 aa, Zea mays
  unsure (1)..(123): unsure at all Xaa locations
  Clone ID: MRT4577_61089C.1.pep
PSTLTHPKLXFLISHTRPXXXLPPPFPPKSILFXFPTPIVPPLIPAPRKKFFFXHPSPPQSPTASSPPPKKPPCTRPKIFQFAKAPKILSIGPLSTKAPSAPPPPLFNLFGLNLVWFLSSMFS

SEQ ID NO: 326776 - protein, 43 aa, Zea mays
  Clone ID: MRT4577_6108C.1.pep
SPKLSGLRGGRSSASRVNIIGYTLAVRGVEGGGLDSSLRPGRA

SEQ ID NO: 326777 - protein, 42 aa, Zea mays
  Clone ID: MRT4577_61090C.1.pep
KKKKKKRKNDKKKKQKKRKKKKKKKKKKKKGKKKKKKRGAGF

SEQ ID NO: 326778 - protein, 70 aa, Zea mays
  Clone ID: MRT4577_61091C.1.pep
HEHDRTSLGGTKSWLCPGNKKIASGTLMLNSTTHTYFFVNSRGRTFGGSFKKGCIALSNIFKQWMVQVLV

SEQ ID NO: 326779 - protein, 58 aa, Zea mays
  Clone ID: MRT4577_61092C.1.pep
EARILNIGRRQISLFQQKYLPKPLKQGPTDKPGAAESPIPHGIQRTGPHRDQHHPIEA

SEQ ID NO: 326780 - protein, 124 aa, Zea mays
  unsure (1)..(124): unsure at all Xaa locations
  Clone ID: MRT4577_61093C.1.pep
AIYLQAXQLLPFNQLGGSPYAFLLQQQHLPFHLQAVANIAAFLRQQHXLLPFLPXQVVGNINAFSCNSEHLQPXYPQNVANIXVAFLQQLQIVPFIQHAFTNSTTLFEPSTIGGVNIYNYLWMY

SEQ ID NO: 326781 - protein, 105 aa, Zea mays
  Clone ID: MRT4577_61094C.1.pep
WQPIGKGGRGNPKNQRWLKNHGTGLNKALTRKIPRQHKNEGRGASKPIGREPQKRIPRGTQQNPGNLGGAHARGDSHHPGGRHKGTRAGHKPGRTRGQSRSRRKM

SEQ ID NO: 326782 - protein, 57 aa, Zea mays
  Clone ID: MRT4577_61095C.1.pep
STYTLVDTADSTGDNHESENNPLDDLLPRSFNDSLISSSDVQCNSVGHTKRGSFVYV

SEQ ID NO: 326783 - protein, 49 aa, Zea mays
  Clone ID: MRT4577_61096C.1.pep
WPFLNSVVGYEAQRRTRWLRVVFFNYFSMFYYLLYEFLIFCVLLDWICS

SEQ ID NO: 326784 - protein, 108 aa, Zea mays
  Clone ID: MRT4577_61097C.1.pep
TISDLKVEFRGLNKTRAGPPAGSSKQEACYGWGERYRGAGRHQAQSSKTQAGVKNRGFSSPPLKRARGETPETFTTLKRTPEKRPTGGPLRPNPAIGTPPELCVETTA

SEQ ID NO: 326785 - protein, 72 aa, Zea mays
  Clone ID: MRT4577_61098C.1.pep
NHYRGTRRNSTLTPNSTIKAPLATTSNSTLSEPTPRPTGNNIKHHQPSPPPQPQESSNAAPQDNDTNKHKPY

SEQ ID NO: 326786 - protein, 62 aa, Zea mays
  Clone ID: MRT4577_61099C.1.pep
VLVYGASFTMTARSIICSKHFRRSMIYVLSHVHALELACLIHHRCYICFFRQFRLFVQIWFA

SEQ ID NO: 326787 - protein, 162 aa, Zea mays
  Clone ID: MRT4577_6109C.1.pep
MSNVYFDVTKNGAPLGRIVFKLYDDVVPKTARNFRELCTGQNGFGYAGSGFHRVIPEFMLQGGDFTKHNGTGGKSIYGEKFADENFKLKHTKPGLLSMANAGPNTNGSQFFITTIVTSWLDGKHVVFGEVVEGLDIVKKIEGEGSQTGRTRSKIEIAASGTV

SEQ ID NO: 326788 - protein, 213 aa, Zea mays
  Clone ID: MRT4577_610C.1.pep
FQVSIHANLFVSILLWRFDDTLLVDGSVAVAEMEEDDQVFDLALEARLHAAETIKQSRQELIVVASLVERIPNLAGLTRTCEVFRAAGLVVADKSVLQDKQFRLISVTAEKWLPVTEVPVDSVKAYLERKRGDGYSVIGLEQTANSMPLDRFGFPDRTVLVLGREKEGIPVDIIHILDACVEIPQLGVVRSLNVHVSGAIAVWEYTRQQRNQR

SEQ ID NO: 326789 - protein, 121 aa, Zea mays
  unsure (1)..(121): unsure at all Xaa locations
  Clone ID: MRT4577_61100C.1.pep
KGIKESPRSETRRLAHPGFRIIPGTAYSLYGIFRYSGLKFYFYEKMKSHVPEEHRKGMIAKLGCQSVIXSLGHTITYPLDLVRRQMQVQALXSXIQTSXDRGTLRXLVMIPKHQGWRQLFS

SEQ ID NO: 326790 - protein, 193 aa, Zea mays
  unsure (1)..(193): unsure at all Xaa locations
  Clone ID: MRT4577_61101C.1.pep
METYTTDDALTTMGFGKLQGLVLVYAGMGWVAEAMEVMLLSFVGPLIREEWKISAQDESLLSSVVFLGMLIGACGWGYVSDKYGRRTGLLFSTLFTTGMGFLSALSPNYLCLMALRFLVGVGLGGSHVYSSWFLEFVPAQNRGFWMIIFSFFWTIGTVLEAXLAWIVVSHLTWRWVLALTAIPCFLLLPFFGS

SEQ ID NO: 326791 - protein, 68 aa, Zea mays
  Clone ID: MRT4577_61102C.1.pep
GITLVDPPTPCGRLDLQPLPSLLRSDREERERGRRRRAKAKPESPHHDARATQVASTGWRCLVGPTFV

SEQ ID NO: 326792 - protein, 86 aa, Zea mays
  Clone ID: MRT4577_61103C.1.pep
RGVFQILVSKIFDLLSICKTPLEPKREFCLVKGKAFETGGIFFSNLENASRNLIHIPLTICKKTLKKNFQKHLQKQNKWCKRGPKF

SEQ ID NO: 326793 - protein, 82 aa, Zea mays
  Clone ID: MRT4577_61104C.1.pep
SNGFLSVFSCKQSACEHLNWHGALTISSSALPSNAGITNWSLRGYTIPHEHSTSMGVCTKRERIKPITQVVYAYRLSLIPLA

SEQ ID NO: 326794 - protein, 85 aa, Zea mays
  Clone ID: MRT4577_61105C.1.pep
IRNEPARPNGPDLSALVRSDASSACLSHRRREELRPSAVIRQIRELHSDGSEQKWEMAEKTRQLGIVHVIVSVRRRIWSHWRRSV

SEQ ID NO: 326795 - protein, 64 aa, Zea mays
  Clone ID: MRT4577_61106C.1.pep
AFFPKGSPIPKLVPRASQTIPQKSASNKKKGLNTAKTPPTVLYFIKFCQKVRGPPPRCPDNNPP

SEQ ID NO: 326796 - protein, 156 aa, Zea mays
  Clone ID: MRT4577_61107C.1.pep
QSLGWYQARPGQRPSKGKPNQDPDGWADPGERDRHPEADQHPPEGDPKEQGVTKEKGGPRGKAGSGQNATQNTQPKPKKEKAGKQKEGAKAKEGGSKQKPNSKQKTGRTRGIKETDNAQEKAIKEWDTRGGQAPTKGTPNTGEALTSGTGNSCRER

SEQ ID NO: 326797 - protein, 107 aa, Zea mays
  Clone ID: MRT4577_61108C.1.pep
MFCLADMQQETGNCATFHNNGSEHPSDFVNYFTCMAIWYRRRTPRRMTGGKRFGGGRVPTGTPSLAWSSVVIVASLLAGASIVHNIYKPDMTIPPVEGAAGGGGQES

SEQ ID NO: 326798 - protein, 68 aa, Zea mays
  unsure (1)..(68): unsure at all Xaa locations
  Clone ID: MRT4577_61109C.1.pep
LLSPRPSRSLIAYACRLXLXPCLIWCHFSLASXLXVFPVSSTSSVVNHKAXTCLIXKTLDSFFYXMNG

SEQ ID NO: 326799 - protein, 77 aa, Zea mays
  Clone ID: MRT4577_6110C.1.pep
KTFSPPSPAILSFADNGFLRYPGCPLRQVLLHPRLPLRRTFSSRPEFQGLHQPTTCALLLSTPAGPTSTWNRPGTAA

SEQ ID NO: 326800 - protein, 97 aa, Zea mays
  Clone ID: MRT4577_61110C.1.pep
MAPAATGGKKQKKKWSKGKVKDKAQHAVVLDKTTNDKLQKDVQSYRLITVATLVDRLKINGSLARKALADLEANGQIKKVVGHSKLSIYTRAIGDAE

SEQ ID NO: 326801 - protein, 46 aa, Zea mays
  Clone ID: MRT4577_61111C.1.pep
RMIVHSDGNHRYRGLFVTNQLASATLCRLKAGNRKVCGRTPGASLE

SEQ ID NO: 326802 - protein, 247 aa, Zea mays
  Clone ID: MRT4577_61112C.1.pep
PTRPITRPEDYPYREADGTCNKNKLKKRVVTIDGYTDVPSNKEDLLLQAVAQQPVSVGICGSARAFQLYYQGIFDGPCPTSLDHAVLIVGYGSEGGKDYWIVKNSWGESWGMKGYMHMHRNTGDSKGVCGINMMASFPTKTSPNPPPSPGPGPTKCSLLTYCPEGSTCCCSWRVLGFCLSWSCCELDNAVCCKDNRYCCPHDYPVCDTGRGQCLKASGNLSSIEGIRRKQSFSKAPSWTGWLELMDL

SEQ ID NO: 326803 - protein, 469 aa, Zea mays
  Clone ID: MRT4577_61113C.1.pep
MPSVHHHLLLLTLAALAVAAATASAGGDPPAIEAQFDAWCAEHGKAYATPEERAARLAVFADNAAFVAAHNARAGANAAGGGGGGAAPPSYTLALNAFADLTHEEFRAARLGRIAPGAALRSRAAPVYWGLGGGAAVPDALDWRKSGAVTKVKDQGSCGACWSFSATGAMEGINKIKTGSLVSLSEQELIDCDRSYNSGCGGGLMDYAYKFVIKNGGFDTEEDYPYRAADGTCNKNKLKKRVVTIDGYTDVPSNKEDLLLQAVAQQPVSVGICGRARAFQLYYQGIFDGPCPTSLDQAVVTTQSTRAVLIVGYGSEGGKDYWIVKNSWGESWGMKGYMHMHRNTGDSKGVCGINMMASFPTKTSPNPPPSPGPGPTKCSLLTYCPEGSTCCCSWRVLGFCLSWSCCELDNAVCCKDNRYCCPHDYPVCDTGRGQCLKASGNFSAIEGIRRKQSFSKAPSWTGWLELMDQ

SEQ ID NO: 326804 - protein, 51 aa, Zea mays
  Clone ID: MRT4577_61114C.1.pep
LHVPSVFPCRRPFFFFFLFFLEHVFSKYYKAKTTQDILFSLRVTYPQVYKQ

SEQ ID NO: 326805 - protein, 55 aa, Zea mays
  Clone ID: MRT4577_61115C.1.pep
YYYSDIQMGWVHITRGGAHTLNLFPLYEFYTHITSTSHYTISSDTYYHIINYSHP

SEQ ID NO: 326806 - protein, 95 aa, Zea mays
  unsure (1)..(95): unsure at all Xaa locations
  Clone ID: MRT4577_61116C.1.pep
VCGFLIFFFFFFFFFFFFFFQKKYNFYKINTIQYSLPQHKNLIFEIFHPFCCWPNNFLTXFKSIIIKLXLXXFXKINTSPXSFLISXNIFHXXKP

SEQ ID NO: 326807 - protein, 88 aa, Zea mays
  Clone ID: MRT4577_61117C.1.pep
QLSEQQSAHHFEHNFYHNHFQIHYEYRQDISTLISEVTSPATRPTGIHHGINQTSTANSLARLLAMLRNVLEYPPKYQLRIQVWIIRA

SEQ ID NO: 326808 - protein, 88 aa, Zea mays
  Clone ID: MRT4577_61118C.1.pep
WTAEGTNMSRSTGNIKRTPMTDQGISSSSDGTSSARCNRFVTLFHISSHKAITQHKHVVSTRLTVQRRCFNPPSAHWPSSVQAGSEIK

SEQ ID NO: 326809 - protein, 54 aa, Zea mays
  Clone ID: MRT4577_61119C.1.pep
RARTTPKPNGRRNNILARMLQIKARRYIARDVQKLANRHGFQKLVLLYSGRAGR

SEQ ID NO: 326810 - protein, 71 aa, Zea mays
  unsure (1)..(71): unsure at all Xaa locations
  Clone ID: MRT4577_6111C.1.pep
CTKERPDILMPRPGGIRCDVYPPIXRKKAFXDLYPLEGGVSTYPKVEGPPGWVGNLFVFDGRALVAPTAIQ

SEQ ID NO: 326811 - protein, 193 aa, Zea mays
  Clone ID: MRT4577_61120C.1.pep
QSAVACCTDQRRFPALARQACPAAVLCSCLPRELLSLIYPSPLGAEMSDSNDFVELLWENGQAVVHGRRKQHPQAAFPPFTCGAASSSRAQENQPGTTDPVSLFKTGGLFADFSSGLDAARGNGDLDDTVPWIHCPIVEEDSAVPAPALAEGYSPDFFSELHAAALAVAAAETNLSPLPPPVQHNRNTPVAHH

SEQ ID NO: 326812 - protein, 56 aa, Zea mays
  unsure (1)..(56): unsure at all Xaa locations
  Clone ID: MRT4577_61121C.1.pep
NLCAPIHELLPPWVVITVXVVFTASKPWSKSGTESWEHDSLQPYTFKKDALWLXAR

SEQ ID NO: 326813 - protein, 91 aa, Zea mays
  Clone ID: MRT4577_61122C.1.pep
RRAIFVRTRRNFRASCRYATRRPTVALHHKMHSLCGGKDDEKPLASEVPASSPHGRHELGWRHRPVRRHHLPEAIVNGSSEAHYFNRDLTD

SEQ ID NO: 326814 - protein, 65 aa, Zea mays
  unsure (1)..(65): unsure at all Xaa locations
  Clone ID: MRT4577_61123C.1.pep
HTXSYSSPDFVSYAYILIHAPFHSLTQTHHPYKYTLLFPTNLLFLPPPMHTSSLPTHLLRRTHPL

SEQ ID NO: 326815 - protein, 55 aa, Zea mays
  Clone ID: MRT4577_61124C.1.pep
MNAPPPQGRAAEANLGPTKKKKEKSSKNQKKKQPKKKKKKKKKKKKKKKKKKKKK

SEQ ID NO: 326816 - protein, 124 aa, Zea mays
  unsure (1)..(124): unsure at all Xaa locations
  Clone ID: MRT4577_61125C.1.pep
RARTALIRQSRXPFFFFLTLFFFEDDGASPNQGGRPNRPTRGQALLKAQAKPNTKTHTKHTALPRHKSAHTHTQGPKHNPPRKGGKQTRDDKRMTPHSETPENSPPNWENTLQGGQDTQGPKRN

SEQ ID NO: 326817 - protein, 592 aa, Zea mays
  unsure (1)..(592): unsure at all Xaa locations
  Clone ID: MRT4577_61126C.1.pep
MAAATAVWNRKWVNLDLLNSAYILLLPKKDDACQVKDFRPISLVHSFAKLITKLLANRLASHLDNMTAIMLHQKNCARILLKLDITKAFDSVSWSFLLEVMKHLGFGQIWCDIISTLLASASSQVLLNGAPGQKILHRRGLRQGDPLSPMLFILVMDVLCYLTKKAAAVGLLEPLSGNSYHSRISLYADDVVIFLHPVTSDVVTTMDILRIFGEASGLKTNMAKSSVFPIRRSFLWRGRKNALGGHCMVAWSKVTRPKKLGGLGISDLQKMNWALRLRWLWLQKTDPDRPWASFNIKAHPSVKAFFSAAVSSVVGNGKNTLFWTDKWIDGQSLCQLAPHLVKTVSSRAKKRSVHNALTTRGWVQDIRGAITLNVLADFFKVWDLTAHWELQQDHEDKHIWLLSSSGLYSTKSAYTGFFFGSTTFNPWERIWKAWAPGKCKFFMWLVAHGRCWTADRLARKGLPHPHLCPLCDQEETLNHLLVSCVFSRDVWFQILKFVRLQHLAPNLATSSFEVWWXELSRSQVIQRLGGCXGLNSLIILGAWAIWNHRNRCVFNGEQPCSTMVIKWVREESHNWCRAGANGLDSILSAPAH

SEQ ID NO: 326818 - protein, 112 aa, Zea mays
  Clone ID: MRT4577_61127C.1.pep
QQPVTSYHIHTLKSIAGEELNTSSTRLSHPDISRDSRWGKSNWLAHSSCCLLRTILNPREYCMSFFSLKGSSLPSLKATQTLQYENIQFWKCRARHCMISTTICFSQHRCFW

SEQ ID NO: 326819 - protein, 119 aa, Zea mays
  Clone ID: MRT4577_61128C.1.pep
KRGPPIVAPPPPIFFGAPPGGFFPAFFFSVKGGRAPGGFKPGKEGVGLQPLGGLVPIGSGGGGPPPPKRKRTPERCFWASPTFFLRVQKGWGFFPLWFFGMGTLFHFLRREGKSNRKLF

SEQ ID NO: 326820 - protein, 84 aa, Zea mays
  Clone ID: MRT4577_61129C.1.pep
LFPHPGRVSPTIPLRQLAIRPLRPPLPISDVPHAQTGAIWCCRLPPWRWRHHRHLTRCPKTNSSSSLATLSSPPGTTQAHTLIE

SEQ ID NO: 326821 - protein, 68 aa, Zea mays
  Clone ID: MRT4577_6112C.1.pep
HPSHSSPSHLSRSILGPGVTPPPQGTATPSLPLPLQPARLPRKWTPHAPPGSSSLLPLPLYCVESLLH

SEQ ID NO: 326822 - protein, 122 aa, Zea mays
  unsure (1)..(122): unsure at all Xaa locations
  Clone ID: MRT4577_61130C.1.pep
MASGELPRXEEYVYMDNLGEQAERHEEMVLLMDKVATTVDSEELTEEERNLLSGAYRNVIGASRASWPIISFIEQKEEGRCNEDRVTLFEDVRGKIESXLTQICDGILKLLETHLEPSSTAP

SEQ ID NO: 326823 - protein, 61 aa, Zea mays
  Clone ID: MRT4577_61131C.1.pep
DKPTSKTPATVPEHGTNGINQTAYDAKGFVRSRVLCSWPKKKKRKKTGLYCIGRVSALFPA

SEQ ID NO: 326824 - protein, 149 aa, Zea mays
  Clone ID: MRT4577_61132C.1.pep
PESRGGPTRPLETNETRLVTISRATKEIRLDQGLKMLRILRDHVSRTSILDNLAFYKGRQKWMQDRRSNQHQFQRQVWATRTPVFVTGGRPKDPVKGKPNPPEPEGVTAKVKAVKVPAKNGLTAPVVSNAEKGAQPEPEKPVFSNGVAR

SEQ ID NO: 326825 - protein, 73 aa, Zea mays
  unsure (1)..(73): unsure at all Xaa locations
  Clone ID: MRT4577_61133C.1.pep
PWTSTTGATEWALRGANXXRGHEGLAXRDSSPRTXPAPSISKLTCPLARVLSYAPSLYVLXTVGAERSGCAET

SEQ ID NO: 326826 - protein, 50 aa, Zea mays
  Clone ID: MRT4577_61134C.1.pep
TAKQKGEGIPRDPPGVQPCEASVLPKHGVCTLLSAKIIGGGCHKSLAHES

SEQ ID NO: 326827 - protein, 246 aa, Zea mays
  unsure (1)..(246): unsure at all Xaa locations
  Clone ID: MRT4577_61135C.1.pep
LGTSRPAGYVVILTIIPRXLIQPAESVALFLLSHALVYVLPAEVDSHISLLPSHSKXHDPYPDVAGCNIHXDISPQARELPLTHHELYDXIDVDPPRRLLLHGPPGTAXIMLAKAXTXHTTVAFIRVCESELVQIHXIRNVHRYVVMCNPLPKENAXPAIIFIEDXDAIDTARFDAQTDAXRKDLPVLMDLLLHMHVVDLTXDXKGIMLTNPPDTLDPGLLRTGXMHSXMEFALTYRRXSRLVFQV

SEQ ID NO: 326828 - protein, 148 aa, Zea mays
  Clone ID: MRT4577_61136C.1.pep
FYFFFFFFFFGCFFFFFFFFFFFCFSLQNGKRFFPGTNSGEGRALKRDKTFLAPPPGFPSRVGPKTILFPPELACPALHCTRNCLGAFNWAPCFSPQRKPPQEPGFPPKAQPLYVPATEGFPGVPSRPGGLVPQGGGGLVPQQPGGLG

SEQ ID NO: 326829 - protein, 174 aa, Zea mays
  Clone ID: MRT4577_61137C.1.pep
MSRDPLVVGHVVGDILDPFIKTASLKVLYNNKELTNGSDLKPSQVASEPRVEIGGRDMRNLYTLVMVDPDSPSPSNPTNREYLRWLVTDIPESANASYRNEIVSYENPKPSAGIHRFVFVLFRQSVQQTVYAPGWRQNFNTRDFSALYNLGPPVAAVFFNCQRENGCGGRRYIR

SEQ ID NO: 326830 - protein, 94 aa, Zea mays
  Clone ID: MRT4577_61138C.1.pep
ETPARHIKPFLSIPFRFPGKKKEGGGLNGKKWLRAPEGAQTRRLQTIPGGPHHGAPAKNLLKTVTQKEPGSMGHFRARREHPAKLNKKLGMGRP

SEQ ID NO: 326831 - protein, 167 aa, Zea mays
  unsure (1)..(167): unsure at all Xaa locations
  Clone ID: MRT4577_61139C.1.pep
MAATEGVLLGMGNPLLDISGVVDDALLTKYDIQLNNGILVEELRRNIDPTMXRKINAWILAGGATQKCIRVAQWMLXTSGATSYIGCIGKDKVGDRMXKKNPQGVRYXMCSYEDKNLCTXGTCTICLVGGERKXIVNNTPGNCYKFDHLKRPNIWALVEKAKIIYIG

SEQ ID NO: 326832 - protein, 151 aa, Zea mays
  Clone ID: MRT4577_6113C.1.pep
MSRPVGIGGSSQPPAQSSFPPPPCSPGAPHLVASAAALLSEATAMPVESAAPAPPPTDDDNVDVELLGLRLRVQSSTDLGSNSTFAFPSGQNSVFPSPTRSAAPFRSAPNSAALIYLIPHNLSGETGMEWRISCRGASEGGGGAWPGPARV

SEQ ID NO: 326833 - protein, 57 aa, Zea mays
  Clone ID: MRT4577_61140C.1.pep
LGVDSEAWGGIKIHGVVRQSRRAPDVSGRRADRHVGRPDHRRTLLRSFLGVPTTVEV

SEQ ID NO: 326834 - protein, 91 aa, Zea mays
  Clone ID: MRT4577_61141C.1.pep
SLPAVPHHSVSAEDGTAAQSDDDDTGATLASQLSAAVPRFHGLRGYAAPRSAVAALPSVRVGRKRSLSQGIFCYYIVSEHKLIMMTTTTLM

SEQ ID NO: 326835 - protein, 98 aa, Zea mays
  Clone ID: MRT4577_61142C.1.pep
SSVLARNRLEKVPVEGSTVGLSSTPIHGGATFVCNCFECLGHDEVNIGGCGHHWHRNTTSKLWDSALRVGKGVILGLSTETICSHEEHRLELVGRKKT

SEQ ID NO: 326836 - protein, 121 aa, Zea mays
  Clone ID: MRT4577_61143C.1.pep
AEGRSAGYRGPRRGVQGGLSRAFGDGSGSGRQVAASAPVEVAAWPARFSVPDAEPTLLFEMEMGDDDDDKGEGDAGWVPPHVYLARRQARASVVEGAGRTLKGRDMSRVRDAVWSRTGFDG

SEQ ID NO: 326837 - protein, 264 aa, Zea mays
  Clone ID: MRT4577_61144C.1.pep
MVKLATAREARLYGPALAARRWEYINAGTYVFAALLLVLAAALSMSVSAARPGLAVGAVALAAVAAVNAHDLAAHLAGVDCRVGLARYDAQLGLVEFLVPAVHAAGCALAAAGLALLASPHSHSQSQQRHAATMLLVAALLWVLGSVLNSCQVYERADGRAQLLQSGVQVPQLLGSLLFLVAAALNRPRSGGEPAWLCLVGSVLWLAAALLNVLKVFAMHQSDALRLEKLRGGAQEWLSRDREGRVPLNWEEAARRRALPTELR

SEQ ID NO: 326838 - protein, 56 aa, Zea mays
  unsure (1)..(56): unsure at all Xaa locations
  Clone ID: MRT4577_61145C.1.pep
LVFSGAXFVVFGCALCWGFSLVLPGLWVVASGRXWVCGLXGVGXGXVRARLLSGLG

SEQ ID NO: 326839 - protein, 42 aa, Zea mays
  Clone ID: MRT4577_61146C.1.pep
PTRPLMKRMVLLNLSTNSVLVPGNGCWINVGLIQLIFNNSQC

SEQ ID NO: 326840 - protein, 75 aa, Zea mays
  Clone ID: MRT4577_61147C.1.pep
ALQGGINTKIYPVGLTLLLFGMNHKARKGSYGHKKKKIALAHLQVSSAKDYLKIPAPTVLDSPLITLLKTETECG

SEQ ID NO: 326841 - protein, 119 aa, Zea mays
  unsure (1)..(119): unsure at all Xaa locations
  Clone ID: MRT4577_61148C.1.pep
VGPMEFLYDQAPESMRSTPAALFWLASSIGHYLGTVLVTVVRATPXPRGDWLQDNINRGRIDNYYWLVTCLMVLDLGYYIVCFHFYPMKPLEMADEQDDHDEECELSPVPRNGIGAGVV

SEQ ID NO: 326842 - protein, 130 aa, Zea mays
  Clone ID: MRT4577_61149C.1.pep
VRFPAWGRCPWGFGAVGYPLYKVGIGSRAFNVSNGEPFGCPVGAGYNFGGCLLCTLLSLMILFRDSWSGMCFHVLWALILRSVGGLWGLAGWFPGVFRGVFSLFWLVLGRCGHTWLYVVPVRWVSTSAFL

SEQ ID NO: 326843 - protein, 460 aa, Zea mays
  Clone ID: MRT4577_6114C.1.pep
MGYGMSRLEDEYYEAEGQNTGGSGSVQVNDEFATLHNDIFHMTRMRSGLTESYKSMGTNRGIISTAKLLSRREIDCSGKGMFSSGDRAFVLGRHVPMNNPELLDRMDSRAYVSQFSADGTLFVAGFQGSHIRIYDVDRGWSIHKDIHARCLRWTISDVSLSPDQRYLAYSSLAPIIHIVNVGNAARESYANVTDIHDGLDFSQHEDVQYSFGIFSVKFSSDGRELVAGSNDDSIYVYDLHANKLTLRLSAHTSDVNTVAFADETGHLIYSGSDDTLCKVWDRRCLSAGQAAGVLTGHLHGITHIDSRGDGRSFISNGKDQAIKLWDIRKMMSNADSCADGAPAWDYRYSRYPHQHKQLKHPHDQSIATYRGHTVLRTLIRCYFSPSYSTGQKYIYTGSYDSNVCIYDVVSGSQVAKLKWHQMAIRDCSWHPFEPTLVSSSWDGRVVKWTSARDEGASDVD

SEQ ID NO: 326844 - protein, 123 aa, Zea mays
  Clone ID: MRT4577_61150C.1.pep
MRTAKTKMLPRAAADEETREGEMGPDLLGLGLLPPPMAGGGHGGGSAAHQKTGFDEPLRFAADAPLPVRACVRPRPRPVDVDDGVVPAAPPASMPKPPRRRRHGGRQLSWRRPRRSSVLSGRS

SEQ ID NO: 326845 - protein, 195 aa, Zea mays
  Clone ID: MRT4577_61151C.1.pep
MSKKKAVTTMTLEDFHGGSIPSELPLPSAPGVSARPPDRPTAAPSASSTASARPRTPAASSAAAAAAAVPSFLTNPSRIGRHFDEDERTPFELAAPRRPAPSPPSFPSVPAVAPARSGPGNAWGAKREVAPAAPPVVPAASSGQIWSATRIAQASAVEKVISGRWHLSKPSSPPASVSAPVLETQVVPPEMERSG

SEQ ID NO: 326846 - protein, 152 aa, Zea mays
  unsure (1)..(152): unsure at all Xaa locations
  Clone ID: MRT4577_61152C.1.pep
PQKEPPKXKPXGKPANGGKKEGKKTKRGGPKGPAKERGPLGGTPTPPALKGPQKRGANPQSGWENVGKKKRGGPKRIKSQPAKRGKAPKRKNWGNPRVFPSPDEGKNRGPMKMENNPPKGEXPPKKKPKRPPXEGKTQKSPXKGPPGKNKPI

SEQ ID NO: 326847 - protein, 46 aa, Zea mays
  Clone ID: MRT4577_61153C.1.pep
FLHISFIARLMMLQLRTGPVLSRSEGSQLSEFDQDVIARSDIITSL

SEQ ID NO: 326848 - protein, 57 aa, Zea mays
  Clone ID: MRT4577_61154C.1.pep
HRNYNHSRQKMNQLRYSNKGSHIMLIQIKRDTLQNYFTKVPEDMHTSGPKLCKSTTH

SEQ ID NO: 326849 - protein, 89 aa, Zea mays
  Clone ID: MRT4577_61155C.1.pep
GGKPPCPNFWFVSSGGWGVKFGFTPPVSLYFGIRFMYGVTFAWPFFFFWSRIVLVCPTPADPLCSCSGSSAPKKSFKSLGNHPQKKRTL

SEQ ID NO: 326850 - protein, 80 aa, Zea mays
  Clone ID: MRT4577_61156C.1.pep
IGYLEAGRENLLFSHVEICAIAPLSLLLSLALAPLLSINKTHRLSDTDQIIHVLASLQNACCIPILAQHSHTPARLHRSQ

SEQ ID NO: 326851 - protein, 90 aa, Zea mays
  unsure (1)..(90): unsure at all Xaa locations
  Clone ID: MRT4577_61157C.1.pep
VVDQSSEGGFLVRGDGFGRSLRGGSVLVVIGVVVVVELGFEEAFDVFVGVFASALFVLLCGWGCFGVVGLGCVVLLLCAVPGAXLVGFVF

SEQ ID NO: 326852 - protein, 95 aa, Zea mays
  Clone ID: MRT4577_61158C.1.pep
NAPWTPENRSKLSSPGLDGSTILLTVPNKGGPFYRLLQCKTPHPTWRRSWIGHPDHQKVSGTSLPCKNPLKRTSDPPGFEKGALREAPLMVGKDS

SEQ ID NO: 326853 - protein, 79 aa, Zea mays
  Clone ID: MRT4577_61159C.1.pep
MPCALALPCLPSSARTTSLLAFPACEGSPNTVLFSRLTPLGAFPVSILTSSLYNALCYKLFTCCYVFTFLRLLYNCYCC

SEQ ID NO: 326854 - protein, 154 aa, Zea mays
  Clone ID: MRT4577_6115C.1.pep
MQIFVKTLTGKTITLEVESSDTIDNVKAKIQDKEGIPPDQQRLIFAGKQLEDGRTLADYNIQKESTLHLVLRLRGGGKKRKKKVYTTPKKIKHKRKKTKLAVLKYYKVDGDGKIERLRRECPQPECGAGVFMAAMHNRQYCGKWHLTYVFHEAK

SEQ ID NO: 326855 - protein, 97 aa, Zea mays
  Clone ID: MRT4577_61160C.1.pep
QGSTLSSSRSGHAPARGSHTNVEPKVCVLEIVSSCVGNTCPCHQPNSVDGPPYTMVGPATIFSHWLDVAVFVRFGLHVALHLLPGIAGHWVTNWELW

SEQ ID NO: 326856 - protein, 64 aa, Zea mays
  Clone ID: MRT4577_61161C.1.pep
IEMPGGCPKTPLTNRSQVSDVSLSDQNKSRALGQRSFISSALGWCEISDLWSSILPRPGQNGWR

SEQ ID NO: 326857 - protein, 49 aa, Zea mays
  Clone ID: MRT4577_61162C.1.pep
TYMIKSDTERGLFMDNDDMAYDFKNLLFDEKEVAMFVFYNIEIHPMKGS

SEQ ID NO: 326858 - protein, 58 aa, Zea mays
  Clone ID: MRT4577_61163C.1.pep
MAPTVMMASSATAVVPFQGLKSTRSLPVAGRSSRSLGNVSNGGRIRRMQVWPAYGNKK

SEQ ID NO: 326859 - protein, 67 aa, Zea mays
  Clone ID: MRT4577_61164C.1.pep
SCPQRAPRPPMPRTQCSPSLHSIPPLPVPLRRSSSRARLDSSGSTSSAMFAAAGGREHWAAAVCIPG

SEQ ID NO: 326860 - protein, 176 aa, Zea mays
  unsure (1)..(176): unsure at all Xaa locations
  Clone ID: MRT4577_61165C.1.pep
HTSVHTYCETYLMNHYVNATISTHYMATIGPDLLTHDALLVDRIFTLQMWDTVGHEWYQSLDGAFYRCADCCVLFYDVHAMXSYDDLNNCREXYLVHASXPSYPDNIPDVQVGNKADVYGDNSXALSANKANAWCAYTGNIDCSDTSDTDRTIVEDALQSVPKNALNNDHAEELYV

SEQ ID NO: 326861 - protein, 151 aa, Zea mays
  Clone ID: MRT4577_61166C.1.pep
MDAQHLPPAAPSPFPHAQYVLDVMLSRLIVSMVEIGLDYELCEECRDKPVCDEWFSAGFPSIQQILHATNGRNPMMHVSTSYDATNDRIRSRRHDGNAAQSENKKQFELDLDRIAKGEDSRTTLMIKNIPNKYTSKLLLAVIDENHRGTYD

SEQ ID NO: 326862 - protein, 141 aa, Zea mays
  Clone ID: MRT4577_61167C.1.pep
STQDRRPHPSPPSSSPSSTSRSSEKTAQVSHLPRSHPSRVFLTLFLCSSRRSGGRDLEVCLSRGFPGSRRICSSGARGRRGSSGRICSRTGRGLKVQRRSGPRVGEVRSTVASPWFHSPPRRCPIWRQQCPRSERCYQERP

SEQ ID NO: 326863 - protein, 527 aa, Zea mays
  Clone ID: MRT4577_61168C.1.pep
MSKTESRKLSDDYEVAEVLGRGGFSIVRRGVSKSEGKAAQQVAIKTLRRLGPATTTGGSTPPQQGSNKGGGLVPTWKQVSSISDALLTNEILVMRRIVEAVAPHPNVIALHDVYEDARGVHLVLELCSGGELFDRIVGRDRHYSEFDAAGVVRQIARGLQALHGAGVVHRDLKPENCLFADRGEASTLKVMDFGLSSVEDFSDPVVTLFGSIDYVSPEALSRQDVSAASDMWSVGVILYILLSGCPPFHAPTNREKQQRILQGEFSFQDHTWKTISSSAKELISSLLSVEPYKRPTASDLLGHPWVIGDCAKQDLMDAEVVTKLQRFNARRKLRAAAIASVLSSKVALRTKRLRNLLGRHDLSSEELDNLRAHFARICADGENATLAEFEQVLRAMRLEALVPLAPRVFDLFDNNRDGTVDMREILCGLSSLRNSRGDDALRLCFQMYDADRSGCISKDELASMLRALPEECLPGDITEPGKLDEVFDEMDANGDGKVSFEEFKAAMQKDSALQDVVLSSLRPPPPP

SEQ ID NO: 326864 - protein, 58 aa, Zea mays
  unsure (1)..(58): unsure at all Xaa locations
  Clone ID: MRT4577_61169C.1.pep
VMFKXXRDWRRGXIDYYSSAVLYERCLYICNXXYIALKMAIHKLNPHPPSPSXLHKIN

SEQ ID NO: 326865 - protein, 102 aa, Zea mays
  Clone ID: MRT4577_6116C.1.pep
MAPEKKQSNPMREIKVQKLVLNISVGESGDRLTRAAKVLEQLSGQSPVFSKARYTVRSFGIRRNEKIACYVTVRGEKAMQLLESGLKVKEYELLRRNFSGSR

SEQ ID NO: 326866 - protein, 87 aa, Zea mays
  Clone ID: MRT4577_61170C.1.pep
KTKTKNSQTIITLNKTITPHSILLTSPPPFKISFSQSPPLWGTTFFIIPLKIPSLPPFYLQMFWYTLFLPTLNPFLTFLFFIYSSIC

SEQ ID NO: 326867 - protein, 57 aa, Zea mays
  Clone ID: MRT4577_61171C.1.pep
AFFIKWFAFKNLPTEKDGDWGRARRPNNCVREGPAFLLDFRAYWGPLAGGSRGWCSL

SEQ ID NO: 326868 - protein, 84 aa, Zea mays
  unsure (1)..(84): unsure at all Xaa locations
  Clone ID: MRT4577_61172C.1.pep
RNNDTEXXXKKXKMKKKKKKKKKKKKKKKKKKKKFTTTKKKKKKKKKKKKKKKKKKKKKKKKKKKKKKLNQKNKKKKKNTTNIS

SEQ ID NO: 326869 - protein, 82 aa, Zea mays
  Clone ID: MRT4577_61173C.1.pep
ICILLGDISFYMLMFPLFPIVFAHCAILIPCTKFFEAMISCRMQIVICSFPVFYLSFAARYKLIIFLMPLLLFHQMQLFMSA

SEQ ID NO: 326870 - protein, 81 aa, Zea mays
  Clone ID: MRT4577_61174C.1.pep
IKTCICNPSLRLPYKLEFTGELPIVCLNSYSKILVQIQWQVLSAFNPAIKPLGEIHFMGTWKIVAYKLIGGNTHHYTTTTP

SEQ ID NO: 326871 - protein, 137 aa, Zea mays
  Clone ID: MRT4577_61175C.1.pep
TSSRSAFRRLCQKDATYRLYSRRVNCINRKITKLQQTAARVGPRGLFAVKQKMEMYKREKAELYDVINKGMQENERGGNSGAGPSNRAAAGPSSHEAAASSPSNTAIPSDGADTSKDDDASPYSVPSSNCAGPSGSK

SEQ ID NO: 326872 - protein, 80 aa, Zea mays
  Clone ID: MRT4577_61176C.1.pep
LALKVLKEDKGDYCSEFFELAAEFFSSGNGEDGANLLLICKSLIMSVSSMLLADDLNKSQLSDSDLKRGIEMLRRAGKVK

SEQ ID NO: 326873 - protein, 34 aa, Zea mays
  Clone ID: MRT4577_61177C.1.pep
WVVFIYQVLLFLYNGICILCPTHTIKCFFHAQII

SEQ ID NO: 326874 - protein, 73 aa, Zea mays
  Clone ID: MRT4577_61178C.1.pep
KRMCSSRFQVPNVPQSDVIVCKNSLTVRRVLFLWVTLYYCTKVCKTFVFRPRPLKMCISWGNCVIPFLKFAIM

SEQ ID NO: 326875 - protein, 38 aa, Zea mays
  Clone ID: MRT4577_61179C.1.pep
VFPACFCLTGNRSSFFRCIFFLLLMYICIFCFYETRST

SEQ ID NO: 326876 - protein, 181 aa, Zea mays
  Clone ID: MRT4577_6117C.1.pep
MASEKKQSNPMREIKVQKLVLNISVGESGDRLTRAAKVLEQLSGQSPVFSKARYTVRSFGIRRNEKIACYVTVRGEKAMQLLESGLKVKEYELLRRNFSDTGCFGFGIQEHIDLGIKYDPSTGIYGMDFYVVLERAGYRVARRRRCKSRVGIQHRVTKEDAMKWFQVKYEGVILNKAQNTS

SEQ ID NO: 326877 - protein, 98 aa, Zea mays
  unsure (1)..(98): unsure at all Xaa locations
  Clone ID: MRT4577_61180C.1.pep
GGGEYPGVTXGVDFXKKLHPGGGFGPPGXGRDPERGAFFRGRXIKKGGGAMFSMLAFFIRGXVTGEGPVENFAKDLRDPLGKKLFPVILGAAEGRLSL

SEQ ID NO: 326878 - protein, 121 aa, Zea mays
  unsure (1)..(121): unsure at all Xaa locations
  Clone ID: MRT4577_61181C.1.pep
TTNYQHIKNITVPTTATKRWALLILILLTARHTTTSIHPQCSQSPIPTPFYQYHTPTLSTKWXNQIEQPYNNKQSMVTPILPLLPWYIQQPKDLXNKXPLSNILTNNIMDQQLQQLVLTKL

SEQ ID NO: 326879 - protein, 89 aa, Zea mays
  unsure (1)..(89): unsure at all Xaa locations
  Clone ID: MRT4577_61182C.1.pep
GSRSPSPPRTPSWTHVDDVKPRVPSSRKPNPTKLRSSITPGTVLIXLSGRFMGKRVVFLKQLNSXASFVSGSFKINVGPDLFVSTKNLC

SEQ ID NO: 326880 - protein, 130 aa, Zea mays
  Clone ID: MRT4577_61183C.1.pep
CPRSGGSRPCIDPLPIRFTEITAWPGHLCAWYTATGTSKYHYQNLSQFRIFVRTQPEGLHGAWPLVSIAATTRWDKFSSVNFYDPHLGLGVAVAAVTNYICNWHATNDLIIPFRSFRRCNYNQISFFLSF

SEQ ID NO: 326881 - protein, 36 aa, Zea mays
  Clone ID: MRT4577_61184C.1.pep
STLPLFICNINYHFTQLAAVYPQYFLPLQTIVCISL

SEQ ID NO: 326882 - protein, 36 aa, Zea mays
  Clone ID: MRT4577_61185C.1.pep
VGASIHYTSRGNVLGAHLCQLIQIVNIIQSGAAIRH

SEQ ID NO: 326883 - protein, 60 aa, Zea mays
  Clone ID: MRT4577_61186C.1.pep
ASTHDVVLTRPKKKKKKKKKKKKKKKKKKKKIRKDKGGGPGGLLACMPVHGMSNHFHGVT

SEQ ID NO: 326884 - protein, 61 aa, Zea mays
  Clone ID: MRT4577_61187C.1.pep
SIRGYKRHFIHTLGGQNMCYFFTLSKNIPQPLKRGNITNKPSFFPGPGENPLIAKNPEKLV

SEQ ID NO: 326885 - protein, 79 aa, Zea mays
  Clone ID: MRT4577_61188C.1.pep
SYDVACSRPSAANSARGGVGSFFLKWALPSAGERMRPCQFLMRPGHDVRLTSCSQMPGHTNRSWSAEHSVKRSRYTSNV

SEQ ID NO: 326886 - protein, 57 aa, Zea mays
  Clone ID: MRT4577_61189C.1.pep
CLRVSYKATRSHPPSHQREGYWSPSPSLNGASNCPMQGVVRAPRPQGKIIAPRWRGC

SEQ ID NO: 326887 - protein, 100 aa, Zea mays
  unsure (1)..(100): unsure at all Xaa locations
  Clone ID: MRT4577_6118C.1.pep
PLVHPLFHXFVKYLLIVRFRKFINIIIPIPYQTYSLLSTLITNITKFSFYLSKTLYILKHNHIFFIFTPHFHIYIVTIKHSNNKTQLYLFIYPLLKKFSY

SEQ ID NO: 326888 - protein, 135 aa, Zea mays
  Clone ID: MRT4577_61190C.1.pep
DTPLCTARNILGPLPGYGEVPYISMGKIAPSSSHSYSPSLYIPFPFPIIGTRQAQVGACCQQATASMKAEKAAVVTTSVNRDKVMTNEDPLSTVHEIQFFPSCAHMQHCACITSCVSLSSSASSNAISHTHSLIK

SEQ ID NO: 326889 - protein, 112 aa, Zea mays
  Clone ID: MRT4577_61191C.1.pep
HYYGKLDPWRTAPQFPGDHTSGPFGGDLAELKNQGTVPKSIVHATALACGARAVPLEDAASLISAIESKIRSGGAIIAKLPSNNLAPLVPPAIAMSSSSEDDEEHDHSEPSQ

SEQ ID NO: 326890 - protein, 81 aa, Zea mays
  unsure (1)..(81): unsure at all Xaa locations
  Clone ID: MRT4577_61192C.1.pep
PKQTKPATAPRGATGPGPDGAHTRPGDPYHRTGARPDAEAASPDPTSGGEPAQFPSWAXPGTLAVTRGILVRFFSSADGEA

SEQ ID NO: 326891 - protein, 48 aa, Zea mays
  Clone ID: MRT4577_61193C.1.pep
TPARASKWKGFSPQIEPQTIGLDLDEVNFVDKVFFKHGLMIHTRTYFH

SEQ ID NO: 326892 - protein, 28 aa, Zea mays
  Clone ID: MRT4577_61194C.1.pep
FIDRRGFKKLSCNAPVIKCASSLATRVI

SEQ ID NO: 326893 - protein, 189 aa, Zea mays
  Clone ID: MRT4577_61195C.1.pep
KCLRLVLCLGMRATCTSHAALAPSELTHAVPLTSLVTAPTLLFSHHRAGCSEVALLSSSLVDLSGVFVVVPTSLSFPPQSLSWSAHVSCGVFPLSGDHAADSPTSPWPEISRESHARVILVPRSPKVSEAYRVACSSSTIVCCLEQCSDAVNWRCGPPLRRPVHPCRPRSVSRAHRSLVRSLKLSTPLV

SEQ ID NO: 326894 - protein, 94 aa, Zea mays
  unsure (1)..(94): unsure at all Xaa locations
  Clone ID: MRT4577_61196C.1.pep
SQRVESMEALPILSRNPSRSTDRDWETASAASSLASVAEYTGPKLFKEPSSKSHKPIIHNAISHCCLAGKVNEPHKNSILEEREKCDXNHYIIL

SEQ ID NO: 326895 - protein, 48 aa, Zea mays
  Clone ID: MRT4577_61197C.1.pep
RFLSPLAVASPLVAPFLQQHQLLPYPRFSLMTPVLLRPPPPPSGGAFF

SEQ ID NO: 326896 - protein, 86 aa, Zea mays
  Clone ID: MRT4577_61198C.1.pep
ERGQWLHGHTDGATQRRPRRLRRVRPRVHGGVDGGHTCTADDDYLEAASIMLDTASVVVPSAAARFDGATADEGRRRLKMIMTVLQ

SEQ ID NO: 326897 - protein, 76 aa, Zea mays
  Clone ID: MRT4577_61199C.1.pep
IFVRPSIPQGVFLFLKGTHMLKRIIDSLNAHTHEMMIYTRCSGARIPKLDGKMAIALKDQQHSFRQCIQDPCKSKH

SEQ ID NO: 326898 - protein, 252 aa, Zea mays
  unsure (1)..(252): unsure at all Xaa locations
  Clone ID: MRT4577_6119C.1.pep
MAGWYEEAAGLLLRRSALAEMAVDVLLCAVPIWAAVMIGLFIGWAWRPRWTGLIFLGFRSRLRLLYVPPGLGARRLWLACTALSAFSVXRRSCSPPPSAAMGSTSARIPXDDTDACGDSGACANGRSIFEVKHGIVTEKDLDHLVQLLDNKESGHTTWQHLMERTTSNMTYKAWRXHEPEVGPIMHCSQTIFEDATPELVRDFFWDDDFRLKWDPMLVCFKXLDEFPLNGTTIIXWIKKFPFXFCSDREIHF

SEQ ID NO: 326899 - protein, 160 aa, Zea mays
  Clone ID: MRT4577_611C.1.pep
EFASLDLGLLSAGVVVAVECVLEVAFPAFPPPHASAPWKENGACPFPFPSTFTTTSRRSGSIGCSSGDPSVPDPGREEALPDPCDSRPLLLRAWSMASPPAIPDTPRRSMGTAATPLLVYSPSRLLVYLVAVMTWLWAGLIARRRFTLAVLLAGRRGGKF

SEQ ID NO: 326900 - protein, 37 aa, Zea mays
  Clone ID: MRT4577_61200C.1.pep
PQTGGAFQRKFQPLAHFHVLDSTSKCQGNLNLHTNHI

SEQ ID NO: 326901 - protein, 127 aa, Zea mays
  unsure (1)..(127): unsure at all Xaa locations
  Clone ID: MRT4577_61201C.1.pep
EDDARQAQRYIRRRDEGELPSSSSPSGSGFGSGEGDEWEVRPGGMLVQKRSPDADAPAGAPXPTIRXKXKXNGGDHEIYINSQASFGELKKMLAGRTGLHPQDQKLVYQDLERDSKPLLYMAGAKDR

SEQ ID NO: 326902 - protein, 205 aa, Zea mays
  unsure (1)..(205): unsure at all Xaa locations
  Clone ID: MRT4577_61202C.1.pep
ARWGDRSIGRRSRHVRTYVPDRGSLQDDDEREPEAEGGIVAGEGGRXVPKEEVWEVRPGGMLVQKRSPDADPPPVPTIRVKVKFNGVYHEIYINSQASFGELKKLVSEKTGLHPDDQKVVYKDKERDSKAFLDMAGVKDRSKMVMLEDPAAKAKRLLEERRTSKAERAAKAIARVALDVDSSPPRVRACGAFMCYSSSSCVVASR

SEQ ID NO: 326903 - protein, 323 aa, Zea mays
  unsure (1)..(323): unsure at all Xaa locations
  Clone ID: MRT4577_61203C.1.pep
MMRGNREQRVAFSSTKEAAAVPKEEVWEVRPGGMLVQKRSPDADPPPGGAPVPTIRVKVKFNGVYHEIYINSQASFGXLKKLLSEKTGLHPDDQKVVYKDKERDSKAFLDMAGVKDRSKMVMLEDPAAKAKRLLEERRTGKAERAAKAIARAALDVDKLATKVSALETIVSKGGKVVDADVVTLTEALMNELVKLDSVAAEGEVKAARRAQEKRVQKYVETLDAIRAKNKAAAAAAPAKARSGSNKARAPQLPPRPPPVSQRRNFQQPSPAPAPPTQGWESFDLLSSVPSTSSATVTTTMAAATTTTSPAGVSPIPRFDWELF

SEQ ID NO: 326904 - protein, 37 aa, Zea mays
  unsure (1)..(37): unsure at all Xaa locations
  Clone ID: MRT4577_61204C.1.pep
HYGELAPEXVXSYFKYGCTLLYKTHEESDVLRNVPNS

SEQ ID NO: 326905 - protein, 315 aa, Zea mays
  Clone ID: MRT4577_61205C.1.pep
MMRARPKGTFADAMRESSPPPPPPPAPASAAVKEDEWEVRPGGMLVQKRSPDADAPAGAPVPTIRVKVKFNGVYHEIYINSQASFGELKKMLSARTGLHPEDQKLVYKDKERDSKAFLDMAGVKDRSKMVLLEDPAAQAKRLLEQRRTDKAERAAKSISRIGLDVDKLATKVSALEAIVSKGGKVVDADVVALTEALMNELVKLDSIAADGEVKVQRRMQEKRVQKYVETLDAIRAKNAAAPKAKAKANGDMNGHAKARAPQLPPRPPPVSQRRNFQQPSPAPAPPTQGWESFDLLSSVPSTSSATVTTTMAAAN

SEQ ID NO: 326906 - protein, 263 aa, Zea mays
  unsure (1)..(263): unsure at all Xaa locations
  Clone ID: MRT4577_61206C.1.pep
MAGAQESLVYAGVMRGHNDVVTAIATPIDNSPFIVSSSRDKSLLVWDLTNPIQATQDSSSEYGVPFRRLTGHGHFVQDVVLSSDGQFALSGSWDGELRLWDLSTGVTTRRFVGHEKDVLSVAFSIDNRQIVSASRDRTIKLWNTLGECKYTIGGDLGGGEGHTGWVSCVRFSPNNFAPTIVSGSWDRSVKVWNLTNCKLRCTLDGHGGYVSAVAVSPDGSLCASGGKDGVTLLWDLTEGKRLYSLDAGIIINSLCFSPNXYWL

SEQ ID NO: 326907 - protein, 82 aa, Zea mays
  Clone ID: MRT4577_61207C.1.pep
TWHMCLSEMGGRTWECSRVFTANGPNAALLGRDIFHQMRPCDCQAKLVRHLQAVSTSAGHGRLDKPRRCIQFVVLYDHGRAG

SEQ ID NO: 326908 - protein, 78 aa, Zea mays
  Clone ID: MRT4577_61208C.1.pep
LHKKEPLFSQVPPVSSRQRGEQGVNIEGRETHCPAFLSMQSCVESVGKCVEGQYHLVLESVSLLSPAGGPLTLRKLLL

SEQ ID NO: 326909 - protein, 115 aa, Zea mays
  Clone ID: MRT4577_61209C.1.pep
HASGQILVHRFSYPTVDSVVEYLAEEYALDHTNGTWLYPHSAEHFCERLYESELLMRQAVNELGGLVILENIHRVSSHACYMTGVDNIKPPPADTAVYTHTTTVALSHYDHTLWR

SEQ ID NO: 326910 - protein, 108 aa, Zea mays
  Clone ID: MRT4577_6120C.1.pep
DPANKNDGAYPPTDPDMKKANKARGARKFSEQPRPGNLTQVDLARPSHFDEASSHVPELKKSRSSKLTSQKDLVAERKRQREDIDTLLSSSLISSTKPSSSRNTKKQK

SEQ ID NO: 326911 - protein, 50 aa, Zea mays
  Clone ID: MRT4577_61210C.1.pep
MGKIKIGINGFGRIGRLVARVGLQSEDVKLVDENNPWEGGGDYNDHTCNK

SEQ ID NO: 326912 - protein, 48 aa, Zea mays
  Clone ID: MRT4577_61211C.1.pep
SAPFQLEAGEMYPLVRPWSRAKAIRSCMPRAQRVSPLACRLTRGRTRG

SEQ ID NO: 326913 - protein, 97 aa, Zea mays
  Clone ID: MRT4577_61212C.1.pep
STCRVRIYTIIMCYLKYEDAHSVGTLTLCACTTIATLTMELNTTTRDVMDEVVVQAHDDYSFLAHRSIFVYCVFLGGSLIAWKIKKQLAVSLFEYRG

SEQ ID NO: 326914 - protein, 48 aa, Zea mays
  Clone ID: MRT4577_61213C.1.pep
AAMHYGVTMIGDWAEVICVKKEATQLLTKYANNNEYSELFKCQPRRQE

SEQ ID NO: 326915 - protein, 72 aa, Zea mays
  Clone ID: MRT4577_61214C.1.pep
GRLRSLLFKNQESLLALCRRGRHPKQSPQGGAASVHGLQNPFQGLVRVRAPPQNATNPKATYPVQVVNKPIF

SEQ ID NO: 326916 - protein, 65 aa, Zea mays
  unsure (1)..(65): unsure at all Xaa locations
  Clone ID: MRT4577_61215C.1.pep
PSSALRLLSAPAPSDLLLPPPPLVHASAXSXXAALARPFYPFAPWEXLLPARPXXRNGPRPSPAQ

SEQ ID NO: 326917 - protein, 56 aa, Zea mays
  Clone ID: MRT4577_61216C.1.pep
LQPTPILSRKPNNYMHHRPISLNLLSNIKYPLLRHLLPLAIPPNLYLQIPHFSNQN

SEQ ID NO: 326918 - protein, 33 aa, Zea mays
  Clone ID: MRT4577_61217C.1.pep
AGGGSAPAAEAKKEEKVEEKEESDDDTGFSLFD

SEQ ID NO: 326919 - protein, 338 aa, Zea mays
  unsure (1)..(338): unsure at all Xaa locations
  Clone ID: MRT4577_61218C.1.pep
IVQTPLTATSRRIHGRQRRLRPFPASSPGLNFTAAPTENPHFLFSKPHSPQRAAGSMAGKDGSPPPPPLPSYPEMIVEAIRALGLENGCNKTAISDYIKGSYGSNLPAQHNAVLTGHLARMKATGELAFLRNNYLLPNEXSLPAEHXGTRAPPPPRXSTGVLDVGDDVLLASPLVIDADAVDIDVPAPAPVVTADVDDIDVPAPAPVVTADVNPVHTKRGRGRPPKPKDPVAEGYGGKPATAPVAAAAVPVKRGRGRPPKPKNPVAEDSAPTAASVVTTDGNAVPXVKRGRGRPPKLKDPINVATDQATSGMLSPTWPWAPAQAAQVLVEDPRGDLLN

SEQ ID NO: 326920 - protein, 199 aa, Zea mays
  Clone ID: MRT4577_61219C.1.pep
MTSAWLVRAYVPMLLRSRISSASMEKTRRHRVLAVLLLLVVVLVSALPDLGSCHKDDAGQGGTTNPEEDMVSVSEASRTTHHGDRTRKFLHEQQQQNRYWSGDFGDKVSSLPDSTEYPPAGGGSSSQSPASTFKPDQWQPWLPWAPKATPQMSVPPAQAPAPSPAGVVSNPGHSIALPPQPAVPVPADAGSRPAVGAGV

SEQ ID NO: 326921 - protein, 59 aa, Zea mays
  Clone ID: MRT4577_6121C.1.pep
ANVAKNSCLTILSEWGPNPSNKIIFFHAVILDIASSSIVSPNIVSQCRCCYEMPCMGHH

SEQ ID NO: 326922 - protein, 42 aa, Zea mays
  Clone ID: MRT4577_61220C.1.pep
IIKKKKTTTGSGRLCISPGPCEVITIQSNHLNPTHCPSFYNT

SEQ ID NO: 326923 - protein, 203 aa, Zea mays
  Clone ID: MRT4577_61221C.1.pep
MLLRSRISSASASMETTRRHRVLAVLLLVVVVVVSALPDLGSCHKDDAGQEEDMGSASEASRTTHHGDRTRKFLHEQQQQQNRYWSEDFGDKVSSLPDSSQYPPAGGGSSSQSPASTLKPDQWQPWLPWAPKATPQMSVPPAQAPAPSPAGVVSNSAHSIALPPQPAVAVGAGVPAGGAGARPRSGGVGRPVYAIAAAGASLA

SEQ ID NO: 326924 - protein, 58 aa, Zea mays
  Clone ID: MRT4577_61222C.1.pep
NFSQNSLSKFLYEPRRNCLIQLESRHKLGIRAVLQRLFRSRAQPFIRRQLLVGTHLAP

SEQ ID NO: 326925 - protein, 108 aa, Zea mays
  Clone ID: MRT4577_61223C.1.pep
RPAPGDDYARSLVDYLEGVDAMNLPRSGISRAHLRAISWMGMSLHDSDFGWGAPVFMGPALMYYSGFVYVMQAPGKEGAVALALSLEPESMPEFRKVFAQELARLQAI

SEQ ID NO: 326926 - protein, 69 aa, Zea mays
  Clone ID: MRT4577_61224C.1.pep
PAAIILISPPPSLMLHEGSTSMGFRVAMGSTPSLANHVGRPIGDRVLSHRQRRRAPILTPPPQSVSLVS

SEQ ID NO: 326927 - protein, 85 aa, Zea mays
  Clone ID: MRT4577_61225C.1.pep
WRPLSALMFMYSSAVLLSSSALGFRIRSEMGLAFACRFYRQILKAPWGSPFRASIPSWGAVGLLKERTRGSVYEMDAAVRTRASS

SEQ ID NO: 326928 - protein, 1487 aa, Zea mays
  unsure (1)..(1487): unsure at all Xaa locations
  Clone ID: MRT4577_61226C.1.pep
MDSDKHIANTKKRKVSSSVLYSPPITNATEARQNRRRLLDQQRIAKRGLPCQTTENSQCGHFTKEYIQALKASYPNRSYYGTPDYECRHCKAIFWYGERVRAKQRDGTIVYNNCCKGGKIDIPPYKPRPEPLSTLARFDGDHTSKKFIKNIRQYNCLFAFTSMGAQIDKSVNDGRGPPLFKICGQVYHRVGSLLPPDGSPPKFIQLYIYDTANEVQNRIECIKDNEGPHQDLDPAIVKDLIKMLDLHNPLAKKFRMARERLANNKNEEFIIRLIGAREGDSVQYNLPSVEELAMLVVGDFSLDTFKRDIIIEMRSKELKRISALHPAFMALQYPLLFPFGERGFQIGIIYNGVNPSDKGKRTHMTMQEYYCHQFHYRKNQPNPYLCYGLLSSQAKVDARACIDESRLEYILQNQKNLRMETIQGITDAISHGYTSGNEMGKTIILPASHIGGRRYMIQNYHDSIAICRIHGPPDFFITFTCNANWPEIQKSFFEPGQNPPDRSDVVVRVFHMKLQDMLHDIKSRSFFGPCNAVLYTTEFQKRGLPHSHIIFWVSTDTTHPTSELIDSFICAEIPDPNTDPLAYCLVAEHMMHGPCGTLNPNCPCMKNGRCSKNYPKEFHETTSFDSQGFVIYRRRNSNRYVIKSGNKLDNRWVVPYNPTLLKIYQAHINIEWCNKTIFVKYLFKYVTKGPDCSKAYLQKIRNGEEAPYDKDAEARNEVKEYLDSRYLCDKDSCWRVLGYEIHRHYPSVERMPVHLPNENSITYNATSNMSQILSEPFLRKTMLTEWFTTNKEREEARELTYIEFPSKWRWEEQTRSWXERNKGXKIGRIYYVHPSTGERYYLRMLLLTVKGAQSYEDLRKYNGVLYRTFKEACKARGLLNDDQEWYNAFDEAARWATSNQLRQLFVTMLLFCEVGDEHSFFEKVWKLLADDIQYNMRKTLNHPAYQMEEHQIKDHLIDQLTVLFNKCGGNIKNHDLPSKSVSSETLHGNRFIEEELFYNINDMLTQSHELQCKLNTQQMNAFHSIVQTVLSDMPGFFFVSGYGGTGKTFLWKAIITYLRAQKKIVLAVASSGVASLLLPGGRTAHSRFKIPCDLDETTTCDIKRAFMTHRAAFEALDRTLRDLMSTNHQQAMTIPFGGKVVVLGGDPRQILPVIEGGSRTQIINAAITNSPLWHSVTILQLTENMRLSSLHLPNQAKNEIDLFSRWTLDIGEGKIEASTKNGELEPSWIIIPSDFLLMPQGNNLSMLIESTYPNISEHYDDPDYLKARAILTPTNDMVDLVNDYIVSMIAGDTKEYRSCDTIIKGPNTNDDYDLLYPVEFLNSLQGNNFPQHLLVLKKGVPIMLLRNLNQSEGLCNGTRLIITSLGDLVLEAKIITGIQTGKTVLIPRICLSLKNYKLPFVLERRQFPIKVCYAMTINKSQGQTLSDVGIYLKRPVFTHGQLYVAISRVTSKKGLKILIEDDNGKSNNETKNIVYKEIFSRFSSINM

SEQ ID NO: 326929 - protein, 97 aa, Zea mays
  unsure (1)..(97): unsure at all Xaa locations
  Clone ID: MRT4577_61227C.1.pep
MTAPVDKGKNAKTYAYGGEENELIDGALVFSIXKLQXIHDELEKVYVEASDMVIEVEQIYIEIRRPCYLTRGDIFKTILDFLLTAFLSHPLLNELFT

SEQ ID NO: 326930 - protein, 167 aa, Zea mays
  unsure (1)..(167): unsure at all Xaa locations
  Clone ID: MRT4577_61228C.1.pep
MGEVAMELYTQDDTIDIKGNPGLKKXDTGKWRACPYILWNESCXGCTSYGMSTNLANFMKDXRMGMDNAAAVNNXTNWGGTCYITPLIGAFLADTYLGRFWTIASVMIIYIFGLGLLTMATSVHGLMPACASKGVCDPTPGQSAAVFIALYLIALGTGGIKPCVSSF

SEQ ID NO: 326931 - protein, 84 aa, Zea mays
  Clone ID: MRT4577_61229C.1.pep
ASPSPDPVSKSDPYMRYKSYEILDVQQCPSNDNDLPLVVGLHTESGSSVAGRQMLQCKQSGYCEYCPDSVVASRFHPSRRRALV

SEQ ID NO: 326932 - protein, 104 aa, Zea mays
  Clone ID: MRT4577_6122C.1.pep
SFIFYTKALDKKIHSRFYFGNGKFNSLFFKRTKPAPGFKRGGGKDPEGHNRFTPSTKYITTHNNYGFLANHTKPGPPFKAPAGSFHFFIFGRRNTNPGRLGQGF

SEQ ID NO: 326933 - protein, 61 aa, Zea mays
  Clone ID: MRT4577_61230C.1.pep
GRWWNIKLRLYLSSAKFHRFLNAFAFNGWAEQTLFISGRWAFFSCMVKFVLNSVTGMVAYH

SEQ ID NO: 326934 - protein, 62 aa, Zea mays
  Clone ID: MRT4577_61231C.1.pep
LPGFSRHLSSWSWVRSSERTVLTPSTKGWYYRLLLSAADVPEISFLSGRDSSLRGVQKTCRP

SEQ ID NO: 326935 - protein, 77 aa, Zea mays
  Clone ID: MRT4577_61232C.1.pep
SKLCTQRWLGKHGRVCGSAWALNHSECLGLQEVNVTLHLQTHVVQNHIFGACLRISHRLANTACRFDITDGMTIEGY

SEQ ID NO: 326936 - protein, 73 aa, Zea mays
  Clone ID: MRT4577_61233C.1.pep
PEVWTRGEKELGVWRVNIRIHRLEGTQVTGKSSPVVHTAAEMLRSVVCPVINLITSEEQVVEEEPHNEEFDLI

SEQ ID NO: 326937 - protein, 55 aa, Zea mays
  Clone ID: MRT4577_61234C.1.pep
RPPTTHLLCGPPPMIEGYPRLSVRRFAFQGYPRVFYFPLNIAFWHYHYLFVGAKV

SEQ ID NO: 326938 - protein, 190 aa, Zea mays
  unsure (1)..(190): unsure at all Xaa locations
  Clone ID: MRT4577_61235C.1.pep
TLEGPAGKNYQKKKKKKKKKKKKKKKKKKKKKKKTHGGSFPIPKQSGIPKWEQGTHSVQSFRSPPSIQPARGGKDWGNHGEDNLGGSGRRLLGILQARALIGGGIALIIYRGARPRNRGFYLQDGSLQKLNFSXPQPGLLPSXKRLKGTLASRNPNEGGGGNYNRLDGNASNKNQQGTGAAALPAVNQGH

SEQ ID NO: 326939 - protein, 50 aa, Zea mays
  Clone ID: MRT4577_61236C.1.pep
YAAACSTRSTEGCMLQRIKIAAGAIEATDSIDAMVHTPYVQLDFSISQTL

SEQ ID NO: 326940 - protein, 119 aa, Zea mays
  Clone ID: MRT4577_61237C.1.pep
RDATEISVLSFWKAQEQSADKESELSAVNRLKPKCSAQDLSISDWLARERIRSSASDLSRSEGCEPQAESPSVLGTPTSTHTPASSQQPEARAAASTSASTSQPPLSTPPQSPDQINGD

SEQ ID NO: 326941 - protein, 98 aa, Zea mays
  unsure (1)..(98): unsure at all Xaa locations
  Clone ID: MRT4577_61238C.1.pep
MAVNKVNLFGPXVKSXDFFSPKKAYILFPTKTPGVELPNSSRVGAFPPWAGKKKFGLVSQSDGSFLYSGHQEKGFFFTWVSPPKSGWVFPPPKEGPLS

SEQ ID NO: 326942 - protein, 84 aa, Zea mays
  unsure (1)..(84): unsure at all Xaa locations
  Clone ID: MRT4577_61239C.1.pep
WPCHAPAAVHVPQAGHVAPPVQLELPVDLPPHAELAAAEQLAPAVHVPAXSDITDGDAPTVLNHSMLILYCRQSHALEKICIEA

SEQ ID NO: 326943 - protein, 153 aa, Zea mays
  unsure (1)..(153): unsure at all Xaa locations
  Clone ID: MRT4577_6123C.1.pep
MATKILALLALLALLVSATNAFIIPQCSLAPSAIIPQFLPPVTSMGFEHPGVQAYRLQLVLAGSALQQPIAQLQQQFLAHLTLPTIGTQQPPHFFALIGPLAGGDPCALFXQKLLASTPFVLATVLPSQHQQQLNQFMPPLSQLALGTPCRLP

SEQ ID NO: 326944 - protein, 63 aa, Zea mays
  Clone ID: MRT4577_61240C.1.pep
EETSNEIQGRYFGNYGIIRDIVHSHILQTIALFAMEPPVSLDGEDIRDEKVKVLRSIRKVNLD

SEQ ID NO: 326945 - protein, 96 aa, Zea mays
  unsure (1)..(96): unsure at all Xaa locations
  Clone ID: MRT4577_61241C.1.pep
CSLMSLFMHRFNFDGTQYVTLVCLSILPCLPLNHLSSFAITLYCFGLIFHYIHVPIMLXFYLLFMSRSLLLMRTWSDHLRNKCHHKGIMGRPWLIN

SEQ ID NO: 326946 - protein, 103 aa, Zea mays
  Clone ID: MRT4577_61242C.1.pep
VSGLLMTVSTSDIPVLQSAEVAHLYLQVMLPIFQGIATSHTPLPRRRGRVTLRGLYKVPLASENPLQFIGSSNAGFLADRHRSKINQGPPYTDHSPTALAPFG

SEQ ID NO: 326947 - protein, 102 aa, Zea mays
  Clone ID: MRT4577_61243C.1.pep
TYALNNDNKEYYWVTKVDQGRNLPLMSSCSATSICWSPGSSVTGPSEKGATIISAHGDRRIPGGLVLRRGINSPPPVHPIQLIRSVNHRTQSKLQTSRRTSV

SEQ ID NO: 326948 - protein, 185 aa, Zea mays
  Clone ID: MRT4577_61244C.1.pep
MASTCRPVLLSLLFLLVLLTAPAFGSTLLPAAAGGPGPAGTSVPVPVPVPAQPSAYEMLEGFGFPRGILPEGVTGYTYRASDGAFEVFMDDGDCEFEVDGGYRLTYRRRVHGNVAGGSIRNLGGVSVRMFLFDWSIDRVAVEDAARLVFYVGPLSQEFPADNFGQSPRCRRRRRGSGNGVGVAAV

SEQ ID NO: 326949 - protein, 15 aa, Zea mays
  Clone ID: MRT4577_61245C.1.pep
MAVSQEPCIGASYRL

SEQ ID NO: 326950 - protein, 138 aa, Zea mays
  Clone ID: MRT4577_61246C.1.pep
GVSRRAPPRGWGVPSGPFRGARGPPRGLSPPPPEGTEGFPCPPCPVVPGPPWILSAGSPFSRVFLEGKPCPPRLLKCPLFFIIELANGLFVFFVWLSWPSLLLWAGFFFSILPGFPFFFFCSFSLPLPTLKESPLPPT

SEQ ID NO: 326951 - protein, 189 aa, Zea mays
  Clone ID: MRT4577_61247C.1.pep
HAHGSSEFGSSDSAIFDLGVPILGICYGWQELAWQINSANVARGEAREYGHADVIIHKVDNHVDRLFAGLGETMHAYMSHFDKLVSLPEGFVVVASTSNSEFAGIANKTKPIFGVQFHPELEHTPRGSELLRNFSVDICGANPSWVMGDFVQQEISRIPHLVGDRAQVNGAVSGGVHSTVAAKLMKEAI

SEQ ID NO: 326952 - protein, 128 aa, Zea mays
  Clone ID: MRT4577_61248C.1.pep
MLEGFGFPRGILPEGVTGYTYRASDGAFEVFMDGGDCEFEVDGGYRLTYRRRVHGNVAGGSIRNLGGVSVRMFLFDWSIDRVAVEDAARLVFYVGPLSQEFPADNFGQSPRCRRRRRGSGNGGGVAPM

SEQ ID NO: 326953 - protein, 93 aa, Zea mays
  Clone ID: MRT4577_61249C.1.pep
IIPAHLGATHRVPKYGGSTNRPWRMFGLLRFLSPMLCSEDGECRFVQAGTYLIGPRSARPDRDSAVPGVVVHNNSTILQLRNNPAPGRPRGTQ

SEQ ID NO: 326954 - protein, 99 aa, Zea mays
  unsure (1)..(99): unsure at all Xaa locations
  Clone ID: MRT4577_6124C.1.pep
LGSGLAXRFCGPVPFPRGASGRAASCSXAXCCSVSCGSLGGPPPRRSGGLLLSSGPGAALRAALVARCFLGRLPSRGPAGGLLAPGLLSRFLGLPPRWG

SEQ ID NO: 326955 - protein, 94 aa, Zea mays
  Clone ID: MRT4577_61250C.1.pep
IALFTLQSRPLRADSRYSAGTPDSPVRHRTLSGATPDSPVNYSGGAPKKPEGEEFELVHPGAPDTVRCARPRHTSVSFLLLTFEPQLVLLIGLC

SEQ ID NO: 326956 - protein, 187 aa, Zea mays
  Clone ID: MRT4577_61251C.1.pep
GTLGFGRDDPGGVVRIRLSFLDSGSTLEYLYEAHTLLLSHQNKDDQQVRAPLLPTRERATIPQNHQRRRFAAESSGRWSNGSPLCPPLRAPSLTSAISPNAGTTPESLRRVYGEPSATFSGEKKALVAGDCSPESRIYGEAAGVVGSNTYTTIREDTCHLKSKLVPGISSPRQVVPLITSFTHSCSN

SEQ ID NO: 326957 - protein, 49 aa, Zea mays
  Clone ID: MRT4577_61252C.1.pep
CNYLFWDRTPVKKKKKKKKKKNKKKKKKKKKKKKKKKKKKKNSRGGAVY

SEQ ID NO: 326958 - protein, 96 aa, Zea mays
  Clone ID: MRT4577_61253C.1.pep
ARLVYQFYTLQRLYPLPTSHVTHLPRGNDSHTPLPRKRGRATLRGLYKVPLASENPLQFMGRALARIPRLTAIAAKSTREPPCMQLPYCPCPFRVR

SEQ ID NO: 326959 - protein, 60 aa, Zea mays
  Clone ID: MRT4577_61254C.1.pep
QRLLRAPASCAGRLCSSSSVCSYYRHVCSRLVGRSSRRCYDAPAEGAGAKVRERSGGGRA

SEQ ID NO: 326960 - protein, 98 aa, Zea mays
  Clone ID: MRT4577_61255C.1.pep
YTSFTLCRGCASLPTSHVTHLPRDRDFPYTSTEEARQGNTTRPLQSSTSFRKPATVYRKLQCRNPSHDRHRSKIIPKGLPTLTTPLLPLPLSGKVVIH

SEQ ID NO: 326961 - protein, 334 aa, Zea mays
  Clone ID: MRT4577_61256C.1.pep
MPADGEALAPAVHFWGEHPATEAEFYSAHGTEGEPSYFTTPDAGARRLFTRAWRPRAPERPRALVFMVHGYGNDISWTFQSTAVFLARSGFACFAADLPGHGRSHGLRAFVPDLDAAVADLLAFFRAVRAREEHAGLPCFLFGESMGGAICLLIHLRTRPEEWAGAVLVAPMCRISDRIRPPWPLPEILTFVARFAPTAAIVPTADLIEKSVKVPAKRIVAARNPVRYNGRPRLGTVVELLRATDELAKRLGEVSIPFLVVHGSTDEVTDPEVSRALYAAAASKDKTIKIYDGMLHSLLFGEPDENIERVRGDILAWLNERCTAQATHRNIPVE

SEQ ID NO: 326962 - protein, 120 aa, Zea mays
  Clone ID: MRT4577_61257C.1.pep
PGWYEHVGRTVCFLVCKNHLLWEWLFSLLNLNRGARQAPCHGQARPLYGGSRQGERLRRGAQGVLVRFKVPGSRCSSRTLGPSECVHGPSPQRLSYRKKRLDEWAIDKFLNAFFHVKQFE

SEQ ID NO: 326963 - protein, 71 aa, Zea mays
  Clone ID: MRT4577_61258C.1.pep
RSPTTHIMIPGSNIRSLPDLYYQVCHLATSSPRNLVLSSPKHMVREVLDVISKRIWRTDINDATAFYISID

SEQ ID NO: 326964 - protein, 75 aa, Zea mays
  unsure (1)..(75): unsure at all Xaa locations
  Clone ID: MRT4577_61259C.1.pep
TPKNPPVKISPMVPPNKGFFSAPRFLKMFGPFLNDLQKAPIPSSRGGERDPVPFQGEKNQLFLVGGKPGXEKRRK

SEQ ID NO: 326965 - protein, 119 aa, Zea mays
  Clone ID: MRT4577_6125C.1.pep
MATRILALLALLALLVSATNAFIIPQCSLAPSAIIPQFLPPVTSMGFKHSAVQAYKLQLTLAASVLQQPIAQLQQQFLAHLNLQTIVTQQQQQFLTSLNHLAVANPCLLIQQNLLASKP

SEQ ID NO: 326966 - protein, 113 aa, Zea mays
  unsure (1)..(113): unsure at all Xaa locations
  Clone ID: MRT4577_61260C.1.pep
PPVRHLFFFNQHTLATSQGEVELCSKVEAFTYQQPRLVXMLIGFRVADRGRLSRNEAIXLSSLDPHEYEANXETLRRLQTNHAVLANRRAPYLHQECTRGCLRPRHKRPKNIL

SEQ ID NO: 326967 - protein, 84 aa, Zea mays
  Clone ID: MRT4577_61261C.1.pep
VTEEFDRSETWKGESSHVPALCVFSLRESSFLSCLVTTSWVMSYDDHDAGRASEHLWFVHRRPAFFSFSGHRRVRSIKNLEREE

SEQ ID NO: 326968 - protein, 363 aa, Zea mays
  Clone ID: MRT4577_61262C.1.pep
MPYPETTDAFAVTDIKNWSNFTRKELPLKKFEEHDVDIAIDACGVCASDVHTISGGWGESIPLPLCVGHEVIGKVIKVGSKVTKVKVGDRAGIGAQIGADLTCDQCKNDQENYCPNSVDTYGAKHTDGTVAQGGYASHIRGHEYFVFKIPDNIETSLAAPMLCAGLTTYSPLKRLGAGPGKKVGIIGLGGLGHFGVLWSVAMGADTYVISHTPNKKDDALKMGAKDFIVTKEKGWSEPWKFHFDFVINTADATDKFDLAEYFSILKVNGTFHMVGFPDNPLPPIPAQIFAPNGCYMGASHIGNRPEMEEMFELASKQNIKSWVQEIQISEEGCKEAVERVYKNDNVRYRITLTGFDKVFGKRA

SEQ ID NO: 326969 - protein, 162 aa, Zea mays
  unsure (1)..(162): unsure at all Xaa locations
  Clone ID: MRT4577_61263C.1.pep
RPGFPPDXGGAAKPRRTTQWALRVWYHAPGILHWWMEQSWLPTCTEVDGTTPMPNERVAVIRFKMNECGTLQHKRXQATQQEIHESYYRDMIRDVLLWEFDHMELSEPSSTVHLWQGDEDGLFPVVLQRCLAXMIGWXNYHXLPGTGHYTVVMRLDVGDNCT

SEQ ID NO: 326970 - protein, 169 aa, Zea mays
  Clone ID: MRT4577_61264C.1.pep
MASSASQASLLLQKQLKDLAKNPVDGFSAGLVDDSNIFEWQVTIIGPPDTLYDGGYFNAIMTFPQNYPNSPPSVRFTSEMWHPNVYPDGRVCISILHPPGEDPNGYELASERWTPVHTVESIVLSIISMLSSPNDESPANIEAAKDWREKRDEFKKKVRQCVRKSQEML

SEQ ID NO: 326971 - protein, 87 aa, Zea mays
  Clone ID: MRT4577_61265C.1.pep
AHRSSSLFYAHPHKQSSHRHHHHREAAASRPRSRRQGSHALACASKYMRAAPFSADGKGAGTIEALLWPNGEGGGGGDLLLEPTSVL

SEQ ID NO: 326972 - protein, 83 aa, Zea mays
  Clone ID: MRT4577_61266C.1.pep
MRNRARLKLLTVIGERTLRRREAGPETHSSAGDIRSRRTLRADTVVYGLPSTIGTRIGGLLTGNMIAADRIINYVLQAHKAAQ

SEQ ID NO: 326973 - protein, 95 aa, Zea mays
  Clone ID: MRT4577_61267C.1.pep
PAKIKFIFANFKNYHPVPPFSVPLPPPFFSTKSYPAPLPKYTSSELTYFQNHRIFHYVILNMLELTTYFPFPNIITYSLVNFLFSQIVYIFFFCL

SEQ ID NO: 326974 - protein, 132 aa, Zea mays
  Clone ID: MRT4577_61268C.1.pep
ITHTGCILTFLPLMSSYTQAICIEAGFVAHRRHSDASKRRPLNYVQPLRCPSLRALQRAPVSSPVPTARSPVVGAKQDTKVLLPLHVCQMNLLVAPVYSGPSILAFEYIFSVLGCIRKTALATAAPAYAHVS

SEQ ID NO: 326975 - protein, 142 aa, Zea mays
  unsure (1)..(142): unsure at all Xaa locations
  Clone ID: MRT4577_61269C.1.pep
NNSPELVYQFQVKIKIPPKGDSFFPEQKFATFFPFFLPSGGGGPPHMARGKKAKKPPLFFPLTTLKKQNTQPYHKKAIPCPHNAFGHIFLPGSPSHKKSPSFFLTRLLGKSKQMTTKPRPTVPPRQGLQSLLFAALRXRRRG

SEQ ID NO: 326976 - protein, 104 aa, Zea mays
  Clone ID: MRT4577_6126C.1.pep
GHQLAHICHQCEHPQDARGDLGRSLPVGSACGVVQSWLPGGCRRLSLRARCLPSPYLSPSQIISLLHPRWVGDFEILASAILDCLLFIHLKIAMIIGCMPIQVV

SEQ ID NO: 326977 - protein, 81 aa, Zea mays
  Clone ID: MRT4577_61270C.1.pep
YKLASRPRAWPCCPSASVRTTDYTLIRVLLFLALTGQTPHMGSLLIRYPISHYSLHPLSGTLIFVQHNNIPMLYNGSVKSD

SEQ ID NO: 326978 - protein, 82 aa, Zea mays
  Clone ID: MRT4577_61271C.1.pep
NIILLNILLFLRPGLLGSQIDKGPLLMGPVCSLLGCCQSVIALPQLTNNTLQHHNSFPPTLSTSNYGQSKACFNETPATLTP

SEQ ID NO: 326979 - protein, 39 aa, Zea mays
  Clone ID: MRT4577_61272C.1.pep
HRSFAMEASAPCAREERLELADGALSVPLDLNPYSRTLH

SEQ ID NO: 326980 - protein, 85 aa, Zea mays
  unsure (1)..(85): unsure at all Xaa locations
  Clone ID: MRT4577_61273C.1.pep
SPSWCSTAVLFSSGWSRWLSLARRWITACSGVYGGVARSCGASPLRVRFTPYPWSGSSLVSRAQLARSLLPASQKLWFALSARXV

SEQ ID NO: 326981 - protein, 65 aa, Zea mays
  unsure (1)..(65): unsure at all Xaa locations
  Clone ID: MRT4577_61274C.1.pep
GMRRMALNAARPMGHIDESVTGSFLGWQRADRCTNVLRPFSRTEGYVTFIXSSSLAGHRMPMPPS

SEQ ID NO: 326982 - protein, 61 aa, Zea mays
  unsure (1)..(61): unsure at all Xaa locations
  Clone ID: MRT4577_61275C.1.pep
LAGVCPRXLGGDLRSGFPEAGVYPLRPPRETVPEKDFFDSVNKVIRGFPKFRATPKYMGFN

SEQ ID NO: 326983 - protein, 67 aa, Zea mays
  Clone ID: MRT4577_61276C.1.pep
GHLGRRERKGGLPTRMPGGLRSFPPAVGVGALKKQTPSSFLSQPAITCTRKRAENWTSTRTTLGPRS

SEQ ID NO: 326984 - protein, 84 aa, Zea mays
  Clone ID: MRT4577_61278C.1.pep
KNVRNNSLVLPDLYMGEYILFSTCHIVIHISSLPPKLIFSLLAYQTSQYNKFVPLNPGYLAAKEWVVPWTSTMCYLYSNQGQPL

SEQ ID NO: 326985 - protein, 87 aa, Zea mays
  Clone ID: MRT4577_61279C.1.pep
SVKWFHSSSSSDLCVIHSSDGPHKSYVVRHQVTACNIIAGPCNTFSRDGAPVRVIRRELLEPFSIHNVQPTQYSSLEVKRINLVVIV

SEQ ID NO: 326986 - protein, 111 aa, Zea mays
  unsure (1)..(111): unsure at all Xaa locations
  Clone ID: MRT4577_6127C.1.pep
RNHTAFHAYRXXMTLAESALQQPIAQLQQQSLAHLTQQTIATQQHHQQFLSLLNHLAVVNPVTYSQQXLFAYNPLVLAYVSXYQQQQQLXSFMPMLNQLAMVNPAVYLTTT

SEQ ID NO: 326987 - protein, 75 aa, Zea mays
  unsure (1)..(75): unsure at all Xaa locations
  Clone ID: MRT4577_61280C.1.pep
FVKSLTGKTITLKVXNRKPFSNVKGKSQDNEGFPPXDQQRLIFAGKQLENARSLADYNIQKESPLHLVLRLRGGQ

SEQ ID NO: 326988 - protein, 57 aa, Zea mays
  Clone ID: MRT4577_61281C.1.pep
PDWGAGGWMTQPHLRAFYQHAMPNADTLVQLQQQVSFNQPALTNPAASYQQPITGGA

SEQ ID NO: 326989 - protein, 120 aa, Zea mays
  unsure (1)..(120): unsure at all Xaa locations
  Clone ID: MRT4577_61282C.1.pep
RILVAGSRANILGFQSGVCTIECQANTGRTTVGTTVLETVNAXVVPSTKVVFTESPAAEFVRKVGFSFPFVTVGEXSYTRFLGXDSMCLTIPVPGPSSVQPVXTTVKCPTVLKGGRRLIA

SEQ ID NO: 326990 - protein, 56 aa, Zea mays
  Clone ID: MRT4577_61283C.1.pep
NPSSIDNRFLLPVTTFWFSYNDYSMTLRHSLKHPVFLPYGYVWIQYITISFIVYPN

SEQ ID NO: 326991 - protein, 202 aa, Zea mays
  unsure (1)..(202): unsure at all Xaa locations
  Clone ID: MRT4577_61284C.1.pep
EPKIKNKDLRFGRRSPVVDSVSVRCCFVQSVRPTPLFGFLSQGWIEGIRQEMDVEGKMNLEIGSKDMEVESKNLKLEDPLPSSAMDMDEPAVAESGEVDGSNGSSKECPLTPRDSMTSNVPVAKEPRSVSTDFGDELDLELGSGEPEPGRQQERKLSRQDRLELSRLFQHAVSAHDXECADGLLATADAQGLNDXALRGGRC

SEQ ID NO: 326992 - protein, 77 aa, Zea mays
  Clone ID: MRT4577_61286C.1.pep
ILVSIRWDVSFTSVYCSRPCLQILVTSVYFTVVVCALLVILKENAGSLAGSGYKPLPVVKTTLRPKYIVLDNPPRAE

SEQ ID NO: 326993 - protein, 102 aa, Zea mays
  unsure (1)..(102): unsure at all Xaa locations
  Clone ID: MRT4577_61288C.1.pep
TGARPTRTDESYLSDDVFFLFYNAMIGLCVITLITSLLSKFVVSTIEATLKSWXISXKTISAIXTPIIRYAAEHTRATLFAFKNNINITLGVSLVSATQNFM

SEQ ID NO: 326994 - protein, 158 aa, Zea mays
  Clone ID: MRT4577_61289C.1.pep
PEADGGAIARQDRQPHLCARPRRVRRDAKPKILGLDICADTIVGDQMQRGISGGQKKRVTTGEMIVGPTKVLFMDEISTGLDSSTTFQIVKCLQQIVHLGEATILMSLLQPAPETFDLFDDIILLSEGQIVYQGPREYVLEFFESCGFCCPGRMGTAD

SEQ ID NO: 326995 - protein, 125 aa, Zea mays
  unsure (1)..(125): unsure at all Xaa locations
  Clone ID: MRT4577_6128C.1.pep
PRXPKKKKKKKKKKKKKKKKKKKKNEKKKTKHKNTQSNAKRGALLWWTPTFNPVARRLTSLFSGQPHAVYPAQLFRNCIPCLTPWGARIRGPDRTVLLSEVAPDWKGGRALPFPLFARGVGVGHT

SEQ ID NO: 326996 - protein, 60 aa, Zea mays
  Clone ID: MRT4577_61290C.1.pep
LTEREELASLCEDNQMLQIILVKNLICCFDSVKKYFLFFICLHQKNKNFKNKKIFKIRYY

SEQ ID NO: 326997 - protein, 75 aa, Zea mays
  Clone ID: MRT4577_61291C.1.pep
MSLAGTRKMSFFAFHLLLHPGGLFVLNQHHLILLSKIHILCCLSLIFLNFMSYYSFTTSPYKLDSIEPYIINITV

SEQ ID NO: 326998 - protein, 136 aa, Zea mays
  Clone ID: MRT4577_61292C.1.pep
AAGFFFFFFFQGRELFFFFFFFFFFFFFFFFFFFQCMQAPIWYLPCATIEKWPSQLFIRMLYHFFHYVHSHVCLTCLMRDRSRDVLIMYSDETLSRNRDVSQVLSGLDNNGFSACSKSSRWCKKRRRGYSKSRETC

SEQ ID NO: 326999 - protein, 55 aa, Zea mays
  Clone ID: MRT4577_61293C.1.pep
CLPLLSQYGVGPNTSHDLVRSKRWCENLAFQRLPPWRPITNSTNLFYLQTKKSPL

SEQ ID NO: 327000 - protein, 117 aa, Zea mays
  Clone ID: MRT4577_61294C.1.pep
GTLEAGRERCSSTAARCGSSAAIAHAGQPHRFVPAFMARIQCSCALPHAMPGSVASSMAPGDARLKSLACSISGIPDCSQAIYLVPHAYTTLLLNPKAVSVTSATSCGSRTWSNAAP

SEQ ID NO: 327001 - protein, 68 aa, Zea mays
  Clone ID: MRT4577_61295C.1.pep
VFGQAVCRCGVLVAVLFVHPCLRFGARSHPSLPHRCRLPSRARLACWPPRGLAHARVATGRPSWTVTD

SEQ ID NO: 327002 - protein, 93 aa, Zea mays
  Clone ID: MRT4577_61296C.1.pep
PTIILYVPKRFSREFETEGSKMSTSVVFTIGGQWGILPKKICCKLRNWGVGTNSGSLSGLDFGKIIYWLHFFVLRGGVVHDVPQETCEILFWA

SEQ ID NO: 327003 - protein, 186 aa, Zea mays
  unsure (1)..(186): unsure at all Xaa locations
  Clone ID: MRT4577_61297C.1.pep
MPPPSTAAAVSSIIRPTPPPAVSFHPXTPPADQAALISWRRSXASRLAVARAAASGARGGGDAETVFFDGGAHYGDLAANLLLGLTLLWLPLTLAAVSRAFILRYRFTSRRVTVVSGLSGADRTDFPYSSVTSVVVVPRFVGEWGDIVITLRDGTKVDLRSVPRFREVADYCRSMAXAAEGSLVVS

SEQ ID NO: 327004 - protein, 119 aa, Zea mays
  unsure (1)..(119): unsure at all Xaa locations
  Clone ID: MRT4577_61298C.1.pep
THQAKRTSNYLSPTATKIWAGLALMGLXLSATNASIITQCSIDTSANIPQLLRSVTSMGLQHSAVQAYRLQLALAVSCLQQPIAQTQHQCLAHLNLLTIATQQPHQQYLPXLIHLAVVN

SEQ ID NO: 327005 - protein, 138 aa, Zea mays
  unsure (1)..(138): unsure at all Xaa locations
  Clone ID: MRT4577_61299C.1.pep
LHLTRXQVHNQQDEAVMSSADSNSIGLAGPGVPRLNSSVRRSLSVATSMHLHNDVEDLKMLLEAYFMHLDGIRNRILSVRQYIDDTEDYFNIQLDNQRNELIQLQLTLTIAYSGIAANTFIVGALAMNMPSSLYNTDN

SEQ ID NO: 327006 - protein, 62 aa, Zea mays
  Clone ID: MRT4577_6129C.1.pep
LLVAVRLHTLLSCPLEQPAGTEWILEEGVTTGPPRKPRADIYNLRSPDEFIVGQNQALIEPG

SEQ ID NO: 327007 - protein, 111 aa, Zea mays
  Clone ID: MRT4577_612C.1.pep
PRVKKKKKKKKKKKKKKKKKKKKKKKKKKKKKKKKKKKKKKTKKKKNWGAPFFRVPNFTSPWFGKVLLFFFGALKINFTGPVLKRWEWEKPWVSQLFWFWGNSLFSQLGLY

SEQ ID NO: 327008 - protein, 64 aa, Zea mays
  Clone ID: MRT4577_61300C.1.pep
MRSKKKKKKKKKKKKKKKKKKKKKKKKKKKKKKKKRKKKKKEKKKKKKKKKKKKKKKKEGGGFF

SEQ ID NO: 327009 - protein, 91 aa, Zea mays
  unsure (1)..(91): unsure at all Xaa locations
  Clone ID: MRT4577_61301C.1.pep
MAQAPATRGGHSTFWRPQMTXVVRLLDSLAEVDLTNGVQPRKIEMFNVANTPDITIFQRMACGSHDYKTDDNHSIWSRHSKGLDAYRSRPL

SEQ ID NO: 327010 - protein, 104 aa, Zea mays
  Clone ID: MRT4577_61302C.1.pep
MAEETTLLANSYGRNEGTKGIHHGRKLMDNSIGSNQLFLTEIRLLDKKTRPGGNYTPPPVIPAPGGAYAGEGATTRENPNPLHDFVNEFFASGGSGHNSNDPDM

SEQ ID NO: 327011 - protein, 79 aa, Zea mays
  Clone ID: MRT4577_61303C.1.pep
VVKSSKVSFCIFKKTTASKLLQHKIKVQPWATNAHITYTNFGMLLCSPYEKISIFNHQTQTPQTYPFAYFTQRMISNCI

SEQ ID NO: 327012 - protein, 88 aa, Zea mays
  Clone ID: MRT4577_61304C.1.pep
LGDCLVKIYKSDGIKGLYIGFNVSVQGIIIYRAAYFGIYDTAKGMLPDPKNTHIVISWMIAQTVTAVAGLTSYPFDTVRRRMMMQSGA

SEQ ID NO: 327013 - protein, 88 aa, Zea mays
  Clone ID: MRT4577_61305C.1.pep
ETFVSVDSLIELMATQTTLTVTKICELHFGLWPRAADLKVNPSYTPLGVQLPPLLILDVQFQEDPGKLVLSSPFSCAGNVFLSSYMAS

SEQ ID NO: 327014 - protein, 182 aa, Zea mays
  unsure (1)..(182): unsure at all Xaa locations
  Clone ID: MRT4577_61306C.1.pep
HIKIGKGNFLFRGGPIHHPKNYILEQQLTGGREEGPTNEAQQLRRRGPAPLPPYGQLQQPRPSPQLGSLSSASSLPPPXLPXXXAPAAYPQXFLPFNPXAXLXSPAXLPPPPLLXFXPXAGXXPASLLAHPXXXPFLPRXAPXAGPLFPCXXXLPFHQLALAPPPRFLPPPXLGGAHEKKNK

SEQ ID NO: 327015 - protein, 36 aa, Zea mays
  Clone ID: MRT4577_61307C.1.pep
TIKQRTEFSQRMESFLKLSYSSHKLIHRPISVLSHH

SEQ ID NO: 327016 - protein, 70 aa, Zea mays
  unsure (1)..(70): unsure at all Xaa locations
  Clone ID: MRT4577_61308C.1.pep
INXSXKSXRKHSNSDTWIVXXQSNXQRLSPXXDPXELXXNVAXXEEXYXRVAXAVEXVXDVLEXXXRTLX

SEQ ID NO: 327017 - protein, 93 aa, Zea mays
  Clone ID: MRT4577_61309C.1.pep
DSQDTAPTLADMFETAAAGMPAAAIAALPVTAVTESTVTDASGEPIGCPICLQDFEAGETARRLPECGHTFHLPCIDVWLLRHASCPLCRRAV

SEQ ID NO: 327018 - protein, 93 aa, Zea mays
  Clone ID: MRT4577_6130C.1.pep
GGWSFHLFLFFENKATAESVLTQKEMAPFLHMGHGLALKSTISRLKPLKSLPGDGRWIKNTEPGLETPFLMTGTHPGKLNPTTAVWCLFSPPP

SEQ ID NO: 327019 - protein, 97 aa, Zea mays
  unsure (1)..(97): unsure at all Xaa locations
  Clone ID: MRT4577_61310C.1.pep
MCDFTEDQTAEFKEAFQLFDRTGDGKILYSQCGDVMRALGQNPTNAEVLKVLGNPKSDEMNVKVLDFEHFLPMLQTVAMNKDQGXYEDYVEGLRVFD

SEQ ID NO: 327020 - protein, 57 aa, Zea mays
  Clone ID: MRT4577_61311C.1.pep
FKFGNDLIEKMVEEYICVVNYYIGEKRCVNVEEIKFEESLRYDISDIGKKESCIRVN

SEQ ID NO: 327021 - protein, 395 aa, Zea mays
  Clone ID: MRT4577_61312C.1.pep
MAVKSRAEGALTIAAHRFATIDKGHKKSRTQQGLMNNVGLVAFLVMLLSFVDWCSWKIVRLPLDSFYLTRPFLTSAVLSALAGFLFAPIADSLKIHHFRRRGKSVSPSSRKPTPGMGGLFFVPVGIFVAKREVGSNSNGVNGAAMITLIFAMVGLLDDISSLAADHNYKIPQWIRFLVQIVAGIYFSIWLGSTDISTPYSMKYLVPLPPPFGLALIGKVYMGLAAACSLSMGPAVTLVDGLDGLAGGIAALALIALSVAALPICSEFSVFGASMSGACIGFLFHNRYRASVVMGRVGSFALGGAVATIASCSGMFLPMLIACSLFFVELLFAILQVPFHMAKNSFRGTSRHPLKIRPSHYYLRLLGIKEPYIVAGAYMVSCFLTLLAGYLGLVSA

SEQ ID NO: 327022 - protein, 208 aa, Zea mays
  unsure (1)..(208): unsure at all Xaa locations
  Clone ID: MRT4577_61313C.1.pep
MRQHHVGLPGGVGSPDGALGGPPRRGRREPAASAPDAGHHRGLLPPWPRRRRQVFAAAIPPLRRRGRRRPRPPVACSLLGPPLLRRPPPXSPSPSRQSPSSPPPAHPHPLPSPWPSPPWPTPPTRSPKLPPPPPPSASPPPSPAPAAAWAATRARPSRTAPLSPPPPPPPRAAAERRPPSQAGAAPPPPYRPRRRRVRRRPSCSRSSP

SEQ ID NO: 327023 - protein, 62 aa, Zea mays
  Clone ID: MRT4577_61314C.1.pep
RLGGVCTERKPRRCRPAGPSLLLIPQVFIYVLVFFRPSPFFSLGAAFRETNSGPLAPKARII

SEQ ID NO: 327024 - protein, 93 aa, Zea mays
  Clone ID: MRT4577_61315C.1.pep
GPPNNQRGGETFYQAGSPLINKTTTWAPPFCQKKGTPPFACPPLFLTGGPPPTKISQPFYPPQVSIFYKKTQKKANPLTPQGFSPLMPRPKTP

SEQ ID NO: 327025 - protein, 64 aa, Zea mays
  Clone ID: MRT4577_61316C.1.pep
KFKIGGIHPGSGGGGGPCQSKSGLCCSHSKKGGPTKNRANREFSPHTKLMRPENRVFYKRETKS

SEQ ID NO: 327026 - protein, 57 aa, Zea mays
  Clone ID: MRT4577_61317C.1.pep
PSFRLPQSHRGPHSKGPFPEKHAFLLKVRQHYQDPNPELFNHQVLPPLNHKPNIQNL

SEQ ID NO: 327027 - protein, 90 aa, Zea mays
  unsure (1)..(90): unsure at all Xaa locations
  Clone ID: MRT4577_61318C.1.pep
GIPVWWGGDYWANRVWWTLXGVLTFQLGDLGQPLFMGGGVPSPPGVVFLGGHLGFCHDFLGAVWAMGGGFWVLFAVVFALAIKDLNFHGG

SEQ ID NO: 327028 - protein, 405 aa, Zea mays
  Clone ID: MRT4577_61319C.1.pep
MIVPSALCHEPPGTPAGAAEAIGGGGDPEAAARRRWDLPGKVAGNIAMGKIDMSTDEESDCVAICPPNRNAGHEEVVSGSHDEDSSGKQENPYAVNSHMDSNGQEDVSVNLDLLKLIHQQESSVSNSPTKPAVARQQGSGHTVLEPCAVAPERRSSGAGNIARIPHPTSSGEKLSDKSSSSPRSMAKKSPSFTPRKPLQSDNTSHSQDDDSYSVTSSTVTSARAGKTKKTTVAVAPTFVCANRAEKRGEFYTKLEEKRKALEEEKLQAEARKREEEEEALRQLRKNLVVRAKPMPSFYQEGPPPKVELKKVPPTRAKSPKLTRRKSCSETPHTPEGGNGSAVCCRLHRHSIGNARDVSSKAQCSPKSASKAGSATRSRVTKSREDLKASVKKVGLPSAANFAVQT

SEQ ID NO: 327029 - protein, 73 aa, Zea mays
  Clone ID: MRT4577_6131C.1.pep
PLMGFSHPSRGPLLARSPKYFRLFWRSPCFFFPLPPPLLSDGFSRLPMLCLLHILLVPGLPRLLVPIPVLKLF

SEQ ID NO: 327030 - protein, 143 aa, Zea mays
  unsure (1)..(143): unsure at all Xaa locations
  Clone ID: MRT4577_61320C.1.pep
QEQEAWIATGCDVDARRAEVEETREQAAPAPVEPCLSSFVDMSEIFPASVTLSSGGDVDNSXQARRGNGXPRPQLLATTALVPVTEKKGGYDVAHPDRGTVISRYKEKRKNRRFGKQIRYESRKARADGRMRIKGRFAKSGEV

SEQ ID NO: 327031 - protein, 110 aa, Zea mays
  unsure (1)..(110): unsure at all Xaa locations
  Clone ID: MRT4577_61321C.1.pep
MKPTRHHLLLALGFSLLAITLSILYSLRQSALDNLLSNHVSASPKPSRPVALARPPAPKSRWDPAQKYLVYLPFEGISNQFYSFQNAATMAKRLNRTLVVXPSPXTAMTV

SEQ ID NO: 327032 - protein, 39 aa, Zea mays
  Clone ID: MRT4577_61322C.1.pep
LSLLLLAHRFGKQIRYESRKARADGRMRIKGRFAKSGEV

SEQ ID NO: 327033 - protein, 698 aa, Zea mays
  unsure (1)..(698): unsure at all Xaa locations
  Clone ID: MRT4577_61323C.1.pep
MECETGLVDRPLNSSAPRTGDPLKWGKAAEGLTGSHLDEVKRMVEEYRVPLVKIDGAVLSVAKVAAVAGRVQVALDESARPRLEASREWVFESTMNGTDTYGVTTGFGGACHRRTKEFAALQKELIRYLNAGVFGASSSDGYTLPPEVTRAAMLVRINTLTQGYSGIRFEILEAIAKLLNANVTPCLPLRGSITASGDXVPLSYIAGLITGRKNSXAVAPDGTKVDAVEAFRIAGIEHGFFALQPKEGLAIVNGTAVGSGLAAIVLFEANILAVLVEVLSALYCEVMAGNPEYTDHLIHALKHHPGQIEAAAIMEHILEGSSYMKLAKEQGELDPLTKMKQDRYAIRTTPQWLGPQVEVIRFATKSIEREINSVNDNPIIDVARRKALHGGNFQGTPVGVSMDNTRLAVAAIGKLMFAQFSELVSSFYSNGLPSNLSGGRNPSLDYGFNGAEVAMASYCSELQFLANPVTNHVQTAEQHNQSVNSLGLISSRMTAEAVTILKLMSSTFLIALCQAVDLRQLEESIKAAVKKCVSHVAKKSLAIDDHDLLVAIDRVAVFTYAEDPCRPSYPLMQKLRAVLMEHALINGDSNTERPMETSILAKVAEFEKQLSAVLPDEVEAARAAVESGTTPNRITECRSYPLYRFVREELGAEYLTGEKTRSPGEEVDKVVIAMNQRKHIDPLLQCLSEWKGAPLPII

SEQ ID NO: 327034 - protein, 45 aa, Zea mays
  Clone ID: MRT4577_61324C.1.pep
YDLICYLSLIWSVRYLSFFFPPFRLCSEIVERSPELFPRLSYAAV

SEQ ID NO: 327035 - protein, 76 aa, Zea mays
  unsure (1)..(76): unsure at all Xaa locations
  Clone ID: MRT4577_61325C.1.pep
MATTVASSLLKSSFAGSRLPLATRTTTPLFVVVAXTPRAGGGPIRPSICYFPTPPYDLTVFRVSPIKEPIVAPERT

SEQ ID NO: 327036 - protein, 26 aa, Zea mays
  Clone ID: MRT4577_61326C.1.pep
GVFFLTKTTIFLALSNYNFREIFAAK

SEQ ID NO: 327037 - protein, 112 aa, Zea mays
  Clone ID: MRT4577_61327C.1.pep
MAAVETVVLKVAMSCEGCAGAVRRVLSKMEGVETFDIDLKEQKVTVKGNVKPEDVFQTVSKSGKRTSYWEGEATAPDAAAASGAEAAPGTAAEAPPAAAPAAPEITPAKADA

SEQ ID NO: 327038 - protein, 145 aa, Zea mays
  unsure (1)..(145): unsure at all Xaa locations
  Clone ID: MRT4577_61328C.1.pep
MAAEELLRKLRELEEGQAELKREISKLVPEQQQQHHHHXTTTPRAARRSLRRRAAPSPRXSLPSRLQRVGRVGLTDRQHIRALHALGQAVHIIASGGKLIYWNRYAEQMYGYSTSEAVGHDAVELLVHPDDAEAANNIIGNIFMK

SEQ ID NO: 327039 - protein, 111 aa, Zea mays
  unsure (1)..(111): unsure at all Xaa locations
  Clone ID: MRT4577_61329C.1.pep
LIIDHQNVNPKLKAHALQALPLTPVLLEPXVETFDIDLKEQKVTVKGNVKPEDVFQTVSKSGKRTSYWEGEATAPDAAAAPEAEAAPSTAAEAPPAAAPAAPEITPAKADA

SEQ ID NO: 327040 - protein, 73 aa, Zea mays
  Clone ID: MRT4577_6132C.1.pep
PELSRHSSPLLFRNHHSSKSHKQKLKGPQLCLVSFFYVASNKVTFPVCEDDSVSYFLVWLQKIQISLPCFKGT

SEQ ID NO: 327041 - protein, 78 aa, Zea mays
  Clone ID: MRT4577_61330C.1.pep
LLLAPATAMWSWSSMAFGSLLLLFLLATRAYGLGRQDMQLHTAHLPMNTKVNSQKEIPADFKWQLRPPAGTLDSRRNA

SEQ ID NO: 327042 - protein, 78 aa, Zea mays
  Clone ID: MRT4577_61331C.1.pep
ALGLTIYTLTFIILLQRNLYKLSLKLNLIADLIQLLELKNHNITHLNQLSANGHESRFPTLLDAQSQYLFQKILIQTC

SEQ ID NO: 327043 - protein, 109 aa, Zea mays
  Clone ID: MRT4577_61332C.1.pep
MPGAPCNVEPTGRRLRWSGLGRRRRRRLPVARLGGERAGRGRGVLRRLRLRWLTARWLRRAARRLAAIYMAALAGPPAPTGASSSTCPPWIGLEPCFATPFVSCTRPCW

SEQ ID NO: 327044 - protein, 356 aa, Zea mays
  Clone ID: MRT4577_61333C.1.pep
HTRPPTRPPTRPRTRGFFPWNYDWHRDQPHVDESVIKSSEVTRRCKSGPVEHDAVLRAMSRALETTEEAYMDIVENELDRHPELALMGSCVLVMLMKDQDVYVMNLGDSRAILAQDNDQYNSSSFSKGDLRHRNRSRESLVRVELDRISEESPMHNPNSHLNSNTKAKELSICRLRMRAVQLSTDHSTSIEEEVLRIKVEHPDDPQAVFNGRVKGQLKVTRAFGAGFLKKPKFNEALLEMFRIDYVGTSPYISCNPAVLHHRLCANDRFLVLSSDGLYQYFSNDEVVSHVLWFMENVPEGDPAQYLVAELLCRAAKKNGMNFHELLDIPQGDRRKYHDDVSVMVVSLEGRIWRSSG

SEQ ID NO: 327045 - protein, 95 aa, Zea mays
  Clone ID: MRT4577_61334C.1.pep
FRVFPSRRGAIGDDWPRPGPTGVKKARKPNLGLREKKIGVLSKVGRGLPPQNFKAQPKGPGLSGPGFLFAAKAKPQKDPPKRNPIGMGLSFVVSS

SEQ ID NO: 327046 - protein, 60 aa, Zea mays
  Clone ID: MRT4577_61335C.1.pep
MSGGSIFPCSIMSMHWTELILYVTTVIFCLSVSYNSSSKIRFAQVTAVCVFRNGFSQCPI

SEQ ID NO: 327047 - protein, 51 aa, Zea mays
  Clone ID: MRT4577_61336C.1.pep
VRAWWWCFFFFLLRKREWRAWGSIRYPPISTNPCIHTPIHTIDNLPTFILS

SEQ ID NO: 327048 - protein, 123 aa, Zea mays
  Clone ID: MRT4577_61337C.1.pep
IDRTRRQNEGWAKARAGNLTSCRCARPCHSGRRGGRAPSGGYHSLGSPRKPASSWSPASQRQTNPPQKPSVVVSSPGRVETGQGDRRLGFQTQRCDASLPSCSSATRPVGSVALPLRVAARPA

SEQ ID NO: 327049 - protein, 282 aa, Zea mays
  unsure (1)..(282): unsure at all Xaa locations
  Clone ID: MRT4577_61338C.1.pep
HWVPRGRPGPTIPETPFSPSTQSHSPRAESSSSSGMAGFKVTRISEGPVKPASATPEETLPLAWVDRYPTHRGLVESMHIFRSGAGEAPAVIRAALAKALAFFYPXIRCTADGVYFAEAEADCSLEDVRFLERPLLLPKEDLVPYPGDDRWPVEPHNTIMMMQITKFTCGGFVMGLRFNHASADGMGAAQFINAVGDMARGLAEPRVLPVWHREKFPDPSIKPGPLPELPVLALDYVVLDFPTAYIDGLKREYKAHSGRFCSGFDVLTAKLWQCRTRALALD

SEQ ID NO: 327050 - protein, 259 aa, Zea mays
  unsure (1)..(259): unsure at all Xaa locations
  Clone ID: MRT4577_61339C.1.pep
GRDPQIPETPFSPSTQSHSPRAESSSSSGMAGFKVTRISEGPVKPASATPEETLPLAWVDRYPTHRGLVESMHIFRSGAGEAPAVIRAALAKALAFFYPLAGRIVEGEQPGRPAIRCTADGVYFAEAEADCSLEDVRFLERPLLXLVEVIDIIRETKDRMAVEFSRFAGEETDQDPFQMTFNYESIYVSDWSKLXXFSEVDYGFGPPIFAGPLVNNDFIASVVILKAPLPLDGTRMLASCVTKEHSEEFARXXMKEDLP

SEQ ID NO: 327051 - protein, 46 aa, Zea mays
  Clone ID: MRT4577_6133C.1.pep
PVEKNAAPFIQESKPQKPVVAFIVWPSGTPGPWHGSGVKLSARRKG

SEQ ID NO: 327052 - protein, 451 aa, Zea mays
  Clone ID: MRT4577_61340C.1.pep
IGTLEAGREQIPETPFSPSTQSHSPRAESSSSSGMAGFKVTRISEGPVKPASATPEETLPLAWVDRYPTHRGLVESMHIFRSGAGEAPAVIRAALAKALAFFYPLAGRIVEGEQPGRPAIRCTADGVYFAEAEADCSLEDVRFLERPLLLPKEDLVPYPGDDRWPVEPHNTIMMMQITKFTCGGFVMGLRFNHASADGMGAAQFINAVGDMARGLAEPRVLPVWHREKFPDPSIKPGPLPELPVLALDYVVLDFPTAYIDGLKREYKAHSGRFCSGFDVLTAKLWQCRTRALALDPAAEVKLCFFASVRHLLKLDRGYYGNSIFPVKMSAPADKVLASSLVEVVDIIREAKDRMAVEFSRFAGEETDQDPFQMTFNYESIYVSDWSKLGFSEVDYGFGPPIFAGPLVNNDFIASVVFLKAPLPLDGTRMLASCVTKEHSEEFARGMKEDLP

SEQ ID NO: 327053 - protein, 70 aa, Zea mays
  Clone ID: MRT4577_61341C.1.pep
HHYDSVRILVRDARLVYRWGEFASDKMTNLILSTLGLVGVVVNCVTLCLWIVRLIAELLVTVKVWQGVTS

SEQ ID NO: 327054 - protein, 63 aa, Zea mays
  Clone ID: MRT4577_61342C.1.pep
EAGLTDVLYQVSRLAIVGKGRLAPPVSPLPAKTCTGCRYEFDIIEPSRPWTQTGCSQKVEVPT

SEQ ID NO: 327055 - protein, 51 aa, Zea mays
  Clone ID: MRT4577_61343C.1.pep
SKHQFWFTVCATKTNNLEKKADDALARLLRSEKCRYKNWKCLALDERLAQN

SEQ ID NO: 327056 - protein, 62 aa, Zea mays
  Clone ID: MRT4577_61344C.1.pep
SSGNNAEYFFFFFFFFFFSFFFFFFGKGGSTFYRRATCKHQAQLMFQQDSPASGSTRNTLLV

SEQ ID NO: 327057 - protein, 55 aa, Zea mays
  Clone ID: MRT4577_61345C.1.pep
AASRGDLTLQHQVPRHTLEPVARQEGEAQVVVVLAGARVREHHGSVRICVSRPAS

SEQ ID NO: 327058 - protein, 61 aa, Zea mays
  Clone ID: MRT4577_61346C.1.pep
CLYGAIAQEAGPNIHPHQKPMKTNPKRAKGPKPAIHLNTGKYQRRSWATGLGTPHFGWPGF

SEQ ID NO: 327059 - protein, 99 aa, Zea mays
  Clone ID: MRT4577_61347C.1.pep
LGCFFLAKSKSFQRFKGFFSLCFQAAPGFNPPFPINQKKPFLLGKKILSKPGDFWVGPSPYPKQKAFNPFPLGDPPQKEHLGLPKRGLKEKKPKGFPRS

SEQ ID NO: 327060 - protein, 143 aa, Zea mays
  Clone ID: MRT4577_61349C.1.pep
PIWKQEDERRPLFGKKRGSDNVQGAGHRQLQARCHGGSFSAPREEQGAPWSRGKMERAPACCSPWRGARLPAAAGIPGRRGQGAGRPGRRTRARRGLAAMAGRKLLRAAVRKTGTGSSQGGAATGRGARLRDFSGCHGSWSCC

SEQ ID NO: 327061 - protein, 70 aa, Zea mays
  Clone ID: MRT4577_6134C.1.pep
ILKWNRGAEVIQTSAALHNVLSASVQPVLIQQYMSVGGETSCSRITSHIYAERSCSRRAFWRPAGLEVPN

SEQ ID NO: 327062 - protein, 52 aa, Zea mays
  unsure (1)..(52): unsure at all Xaa locations
  Clone ID: MRT4577_61350C.1.pep
MWXEAVRRRLVATARPAFLRAAGAEKNFRAVVVPRFGGPEVLEVXQGMPVPH

SEQ ID NO: 327063 - protein, 85 aa, Zea mays
  Clone ID: MRT4577_61351C.1.pep
TRESSHSPCQDLLQGNLTGIMCRYRGSLPLVAGGPVLNIHHLLKHLSSDHSLKAHGRECDIPNQGWVISTHHVGGIRICFIVHPQ

SEQ ID NO: 327064 - protein, 82 aa, Zea mays
  Clone ID: MRT4577_61352C.1.pep
GVRFRCQAQDHHRQAGVSCVGIPGRSGIDAVVIVLQPRIWYSFICSSGKSESYCSRACVKSGGMVLTCCYVRRCGVFLHIRF

SEQ ID NO: 327065 - protein, 40 aa, Zea mays
  Clone ID: MRT4577_61353C.1.pep
SMPLSSLFLPWETLKRLIIFDFNRTGQLYRIRYRLGTRRN

SEQ ID NO: 327066 - protein, 58 aa, Zea mays
  Clone ID: MRT4577_61354C.1.pep
METKNDLSADSGMTMETTNRGAQKRHWGHYADESLHTRMKAHAQLDYIYTDDAGERGY

SEQ ID NO: 327067 - protein, 116 aa, Zea mays
  Clone ID: MRT4577_61355C.1.pep
GEKNTSYISYINKPYANEPGKQRAKKTADKIRKTHYVTPRKMGTPNIKQTSSTAPPKISYTQEKPFFYRATLILTPLAKKFYELCGTNWGHRGTATPLKKKGYLPLKKYYTHGPGP

SEQ ID NO: 327068 - protein, 79 aa, Zea mays
  Clone ID: MRT4577_61356C.1.pep
CEAEAFDEILSDRGDFCACIDARGAISLLEKAGYEHVKAVIQPEFSVSASDVKDPSAEAIAFSGKFYSEVCVNGGRKMA

SEQ ID NO: 327069 - protein, 62 aa, Zea mays
  Clone ID: MRT4577_61357C.1.pep
AATQSSVATRRRDILETPTKIRFFVYRKRGDTSSEGRRLSQRRGVRKTMPSRENKLDVDTSS

SEQ ID NO: 327070 - protein, 87 aa, Zea mays
  Clone ID: MRT4577_61358C.1.pep
IASGCSRSRTSVLHGELPSREERHAAYHRGTGTVTPMKPQQHAPSCSSSDPDRASDVFLEASPRHNSPVPIPTAHRQQQQPHPYFKV

SEQ ID NO: 327071 - protein, 206 aa, Zea mays
  unsure (1)..(206): unsure at all Xaa locations
  Clone ID: MRT4577_61359C.1.pep
MPSYTSVHLAERPTDGIVAGKTFTPKSHPVPSASSLKDGEVLFQTLYLSIDPAMRGWLNPTRSYIPPVQIDAVMRGQGIGLIVASKNPKFPVGTYAKAMCGWAEYAIIPGKDVESLDLPEGAVPTDALGVLGMTGLTAYFGLLDVGQVKPGDFVVVSGAAGXTGSVVXSIAKLRGXKVLGLAGXDSKLXWLKDXLXFDEALNYKDP

SEQ ID NO: 327072 - protein, 97 aa, Zea mays
  Clone ID: MRT4577_6135C.1.pep
RTVGLRATLICWASANPTWVGCITLRATAPASSLSVRQLLVPALLCSLLQRALPAPSSRRGARRTPVFRCSLLSKSRGPSVSHLTCYLVMYPLSQNK

SEQ ID NO: 327073 - protein, 54 aa, Zea mays
  Clone ID: MRT4577_61360C.1.pep
HITYAVKIRTVHIQADGATAHTRDHDASCCSTHTVYMMPSPVRGTHMQGEQSTY

SEQ ID NO: 327074 - protein, 44 aa, Zea mays
  Clone ID: MRT4577_61361C.1.pep
RIRCRSGTCSSFWRLPHLDLLPGANGKSSGDSVHYGAPGAEGGP

SEQ ID NO: 327075 - protein, 177 aa, Zea mays
  Clone ID: MRT4577_61362C.1.pep
PLLVSFHPSPPPTPQAPPFILQERVKAPQIPNPFFSGLGEFLKEVGPKVFFFGKGALGEPQLIWVCPLFGPPRVYHFCFRFFFFGEFLGDTIFSQEAFFSFVIPSWGRIRVPLVTAPGFVEFPLGGGPPRVFFLKKKKKKKKKKKKKKKKKKNNKKKKEKKKKKKTKNKKNKNKKSL

SEQ ID NO: 327076 - protein, 108 aa, Zea mays
  Clone ID: MRT4577_61363C.1.pep
TCSLFSFPRASRVVCVLSCVSPRVVAHRSRAIARCSHVVARIILRVNRAMFARRHHSFARSCRASGSRVAHIPRVDHVCRTTCVRNNKLFSLITHMLITLIRHVTYFR

SEQ ID NO: 327077 - protein, 371 aa, Zea mays
  Clone ID: MRT4577_61364C.1.pep
MARAAASVAAALLVVLGVAASVATAQMETCSGDLPPVLAANYSGLACQPVWNNFVLRYHQDKDNVLRVVLSTMYSTGWVGMGFSRDGLMVGSSAMVGWIGKKGLPHVRQFALRGKSSSKVVVDRGFLVSNDHDHTVVVQQAKIYLAFQLRFSYRLTHQHIVMAFGNSIPVKNRLTRHQDKTSFTFDFTTGRASVDGSFPYGLRRAHGALNVFAWGVLLPIGAILARYFRRMDPLWFYLHVGVQLAGFIIGLAGVVAGVALYNKIQADIPAHRGLGVFVLFLGILQVLAFFLRPSADSKYRKYWNWYHHWAGRLALFFAAVNIVLGIHVGGADSSWKIGYGFSLAVLLVAVAALEFMLWTRWSKNSTATPTY

SEQ ID NO: 327078 - protein, 86 aa, Zea mays
  Clone ID: MRT4577_61365C.1.pep
PTPSPHSLFYLFPSHAQRACLLCSGRTLFQALILSSSSNCGPTPFLLHVRIYLFFLFMAPHSLLFTFTYCPSSSLLSFHTILYSYL

SEQ ID NO: 327079 - protein, 81 aa, Zea mays
  unsure (1)..(81): unsure at all Xaa locations
  Clone ID: MRT4577_61366C.1.pep
PQGPLPPAPPGVRGGXPGPANXGPKTPATGPXRPGPAWAGPPQGRTHPPRGRPGAAKRGLPGDNQXGPLGPPGAQGAPSDY

SEQ ID NO: 327080 - protein, 80 aa, Zea mays
  Clone ID: MRT4577_61367C.1.pep
VRVSLHPAFFLHNNTTRLENQHLLLNRCVDMASNSQKAHSGGQPCQHLCNGLGKGNQGPLNYLLLCHRSGRFTKTPCFLL

SEQ ID NO: 327081 - protein, 163 aa, Zea mays
  Clone ID: MRT4577_61368C.1.pep
AHRTVRCTTGQCLVHQGESAQTLQLRVSQAQLRYNSPDCPVCHRTVRCTSGATAICAQWSTLQSEQYNSDVRADGQRSTELFGVTPDCPVPHEDKASNGRPAPGPNDKMTWRRTGHCPVAHRTVQCAHRQQPSPTATIWLVAINTTPTGHFKVWEPKQTFQVI

SEQ ID NO: 327082 - protein, 93 aa, Zea mays
  Clone ID: MRT4577_61369C.1.pep
KNHCWCSTPGRPRNCRSSHSPVAMKSKQAIPLPSVHHQSPRKPTFNADCEAVDTNYTATDLLVWEYIGASVSKVLMNANSMSHLRSTEAGIHA

SEQ ID NO: 327083 - protein, 183 aa, Zea mays
  Clone ID: MRT4577_6136C.1.pep
MSNPSFDHSYELPLRRNLLLLRDLLDLLRFIAGVILDRLGVAPCQGEVRLPGQALGGVGEHANDVDLERLLEARLWETVTRSLTAPRYRRRRVAPAQPADVQLDAEGDAEGAAVCAICLAGLEQGDFQTVVELCGCSHVLHAACIDAWVRSGDDAATCPLCRAPMLPTAWDDEQSSFGARRGD

SEQ ID NO: 327084 - protein, 65 aa, Zea mays
  Clone ID: MRT4577_61370C.1.pep
VGGAPKKSFIDLCQGSMDLITLDIFQSFKDPPAHFHTTFSPETCFPPFKLHNSSREHPFCNLTTG

SEQ ID NO: 327085 - protein, 55 aa, Zea mays
  Clone ID: MRT4577_61371C.1.pep
EFFFRGKTFIFIYKKLHFFYLLAHPFSHYFNQSSFYTFIYPPISHLYLLTYHIFL

SEQ ID NO: 327086 - protein, 157 aa, Zea mays
  Clone ID: MRT4577_61372C.1.pep
RAGEFQEPWDAGAAAVPLPRQTRAFKSEAIGVMDAAGIGASSSLDGAVIGPYATSLNLGGGGGILQEALAHHHHHHHGGADARFVQAYGDMAGFGGYDGGSVSLTLGLQHCNEAGAGAGPAEPQALLYGSAGDFDFISGSEDRQRFGSSQLLHDFVA

SEQ ID NO: 327087 - protein, 138 aa, Zea mays
  unsure (1)..(138): unsure at all Xaa locations
  Clone ID: MRT4577_61373C.1.pep
DPARPPARDRRRRPSRXSXXXRXRXRDPTRRARRPCCPSRRRSRGAPSGRRGGTPGTPGTRRRAAARRRAGSGAASGSLPSPXRRRDPGRRRXFPAGHERPRAPPREGSRQFFSPPVATLRASTEHQEQERRLRYDES

SEQ ID NO: 327088 - protein, 122 aa, Zea mays
  Clone ID: MRT4577_61374C.1.pep
LALAIEAGKISPRDDFKARARVLADDFGWDVTDARKIWTFGPDGTGANLLVDQTKAVQYLNEIKDSVVSGFQWASREGPIAEEPMRSIRFNVLDVTLHADAIHRGGGQIIPTARRVLYASAL

SEQ ID NO: 327089 - protein, 77 aa, Zea mays
  Clone ID: MRT4577_61375C.1.pep
IVGNKHVCYCSARQCPVEWSEKLFMDPLQLDRQTYANTITRSPHVLYWAEALSFYMLLSLCGTILGSSWGTRCSSEN

SEQ ID NO: 327090 - protein, 107 aa, Zea mays
  Clone ID: MRT4577_61376C.1.pep
LLSTDWPLTIFEFPNSQPWYPRGLALTALHHTYLEKACTGSTAVLGTEAYGLVYTGPIHNELPSYIVVDNIFLLNRSPQNYSYVRETTVDLHFYKYLTRLLGLCKQG

SEQ ID NO: 327091 - protein, 46 aa, Zea mays
  unsure (1)..(46): unsure at all Xaa locations
  Clone ID: MRT4577_61377C.1.pep
GPLFGGAAYGGGGAYGAAGXYGGGGAGXGGGTRGGGYGTSPGNWRN

SEQ ID NO: 327092 - protein, 71 aa, Zea mays
  Clone ID: MRT4577_61378C.1.pep
PAGSGTSPRSRSFPQIQIAGVKGNCYQIAIYSRASRNRRSRFGEPPVLRSSSSSPTRSKTLSICLVKASVL

SEQ ID NO: 327093 - protein, 58 aa, Zea mays
  Clone ID: MRT4577_61379C.1.pep
KFAHSTKNPLIQLTQYYQLNSKILFKAQTSPFIHTFTLYTIFISYTYSTFFNHSKLHP

SEQ ID NO: 327094 - protein, 104 aa, Zea mays
  Clone ID: MRT4577_6137C.1.pep
RGKRTTSTTKGGKHWGKSPPPLPQRGGPQTEAPTWGQAHDPGAGEQASTKHRYKRGKPRFPNPKIKGWGQAPPDLAKKTRSIILLLSARAKQAFLARDPHRTPH

SEQ ID NO: 327095 - protein, 181 aa, Zea mays
  Clone ID: MRT4577_61380C.1.pep
MEMIDAELRLGPPGSSNRDVINVVQPSLAAAKRPSSSVVESEASGTDDHDHDDAAPTSKVQVVGWPPVRVYRKNAFHAAAEARRTRRGEQQGGGGLYVKVSMDGAPYLRKVDLRTYAAATGMRDALDALFGCFSSSADGGCQFAVAYEDKDGDLMLAGDVPWEMFICSCKKLRIMRGSEAR

SEQ ID NO: 327096 - protein, 101 aa, Zea mays
  Clone ID: MRT4577_61381C.1.pep
QDGVTDDAYAAVILEPSPPSPWCAYGPAAGLVARTRRRARACVGSLPMHAGIPNRLQFQQVVVFFFSLVHDSMSPAGLSMHMQPTGFLHPRCLGILLRTPS

SEQ ID NO: 327097 - protein, 169 aa, Zea mays
  unsure (1)..(169): unsure at all Xaa locations
  Clone ID: MRT4577_61383C.1.pep
MEMIDAELRLGPPGSNNRDVINVVQPALAAAKRPSSSVLESEASGTDDHDHDDAAPTSKVQVVGWPPVRVYXPVRVYRKNAFHAAAEARRTRRGEQQGGGGLYVKVSMDGAPYLRKVDLRTYGGYRELRDALDALFGCFSSSADGGCQFAVAYEDKDGDLMLAGDVPWE

SEQ ID NO: 327098 - protein, 158 aa, Zea mays
  unsure (1)..(158): unsure at all Xaa locations
  Clone ID: MRT4577_61384C.1.pep
KCSNFFFLFHLFPPPPPPDPDRNQPPRKKKKPGERKKNPFLQKNTTPHPPPTPPTPPPPPPTPPPPPPGXAGTPLGGWGKPPXPAEASPAPPPLGGLAPPPPSKACSSFGKTAXSPLPSGAPLGPPKLQGRGGHWGPLGPTQKPQNPPRPKKSPRPPL

SEQ ID NO: 327099 - protein, 91 aa, Zea mays
  unsure (1)..(91): unsure at all Xaa locations
  Clone ID: MRT4577_61385C.1.pep
XWFFFKGGGGRTKRNIYCESRSTHRAYPITLAGRKEPSIAYTRAYRIVPHNWEPPPATGGGRELFFFYYNMGSKTLETGGCFASLPRLREN

SEQ ID NO: 327100 - protein, 70 aa, Zea mays
  Clone ID: MRT4577_61386C.1.pep
LHRRLFLPPLLGLFSCAAALLFLPLPGLSSCAPAPLFLPLMGLPSCAPAPLFLPFMGLSSCAPAILCPLF

SEQ ID NO: 327101 - protein, 68 aa, Zea mays
  Clone ID: MRT4577_61387C.1.pep
RAELWPCISQALPPASVSMSAHLPHIFLRSIKYKVFFSCKFQFSIRSISMFASIPRVYDRMAALFALE

SEQ ID NO: 327102 - protein, 106 aa, Zea mays
  unsure (1)..(106): unsure at all Xaa locations
  Clone ID: MRT4577_61388C.1.pep
MGDQLTNKKIGELKEALTLFKKEGNGXIITKELETGMPSFGQNPTEAKLQDMTNEVNADGNGTIDFPEFLNLMARKIKDTASKEELKEAFRVFNKDQNGLIWVAKL

SEQ ID NO: 327103 - protein, 41 aa, Zea mays
  Clone ID: MRT4577_61389C.1.pep
KSSTKGGPSGAFLIVIYIQHRSIANLILIYFHHECVTRAVL

SEQ ID NO: 327104 - protein, 59 aa, Zea mays
  Clone ID: MRT4577_6138C.1.pep
APYIKQKSRGNYAAFRVWSPYWSYCCYGPCDSETRTNFCMLIFCAYKMNELNIQNMKAK

SEQ ID NO: 327105 - protein, 79 aa, Zea mays
  Clone ID: MRT4577_61390C.1.pep
GLMKLIACNAVIGAQFMEAGCIGQARIWKLLGVLNLLGDRKLSHVQNVYTAQLLPIADLCTSWALPLARLRNLHYVRGC

SEQ ID NO: 327106 - protein, 127 aa, Zea mays
  Clone ID: MRT4577_61391C.1.pep
EKLCPLSGTGPKFPVPPPLPFKPFSGFFFEEPPGFLKFFLKNFILNPFPYTEHAPPKTFPPMVVFSPSSPRAAPSSASAVRLARSPLFFVPPVLLFFPFPSFGWVAKILVSFPLDQPFFACFKKSPF

SEQ ID NO: 327107 - protein, 232 aa, Zea mays
  unsure (1)..(232): unsure at all Xaa locations
  Clone ID: MRT4577_61392C.1.pep
MAEATAYEEQRRRQVEANKRKLEELQLHYLSAAVREAAAAAKPSPVKKRKARVPLDAADSVMEPLRRSGRLANLPDKSVHREEVPTFWRKIRRTYGSVRKDLENRVYATDEARSYAICKAEEVEQELDSSFPVFIKPMTQSHVTGGFWLGLPNHFCRKYLPKRDETITLLDEDDNESYTLYLALKRGLSAGWRGFAIQHKLVDGDCLVFQLTERTKSRVXIIRASSYYESED

SEQ ID NO: 327108 - protein, 94 aa, Zea mays
  unsure (1)..(94): unsure at all Xaa locations
  Clone ID: MRT4577_61393C.1.pep
LAGAQCREXQFDAADAGAENFNTSXAAVYWGPWQNARATLYGQPNGAGPDDNCGACGFQAHNQYPSCTXGSCGNSHVQDARDRLCSRLVQEDRL

SEQ ID NO: 327109 - protein, 41 aa, Zea mays
  Clone ID: MRT4577_61394C.1.pep
LWGSVLKYWVVFHPRCCKRCLFPRLATGVFRKIMAVFVGAS

SEQ ID NO: 327110 - protein, 102 aa, Zea mays
  Clone ID: MRT4577_61395C.1.pep
RGRMRSFRESVTLLEVGLFRTLMPSVVGCFCLPSSSELRRMFSRADGAKKTAEEVKAAVEARVRQLSLARDGAIATSTEAAIVLSERSAELQELCLFVGKVC

SEQ ID NO: 327111 - protein, 60 aa, Zea mays
  Clone ID: MRT4577_61396C.1.pep
ARASSRSRASALLLRLGVNKFNIHGNLKNERAGPKLVHVANNPLDGKDPRITNPGPLANG

SEQ ID NO: 327112 - protein, 58 aa, Zea mays
  Clone ID: MRT4577_61397C.1.pep
RVETGRRFRDMFSTMRRMDFHGGRHQEAGHNQERGHRKLSELVSTERHANGLFVRRDA

SEQ ID NO: 327113 - protein, 41 aa, Zea mays
  unsure (1)..(41): unsure at all Xaa locations
  Clone ID: MRT4577_61398C.1.pep
CASTPLSAHMSRGRIRLLERLNPHNLDTWVSSDHXAIPEMV

SEQ ID NO: 327114 - protein, 117 aa, Zea mays
  unsure (1)..(117): unsure at all Xaa locations
  Clone ID: MRT4577_61399C.1.pep
LERRQRLHLDLLPLSIFKLLDVXQAEYXXHLSSRGHVPERFIHRLTXFVPLRREHDHHQVIMSVQSFXQFISVDXDVIDPVTSCXRDAQTLGWLMACSKFLYXVSALLLLGRVLYLS

SEQ ID NO: 327115 - protein, 61 aa, Zea mays
  Clone ID: MRT4577_6139C.1.pep
SSLSDHSAKEIVFQAAIISFTLLDTFWPFGSWCSHFKALQNRPFTPNVAVQVPSLLLITFQ

SEQ ID NO: 327116 - protein, 85 aa, Zea mays
  Clone ID: MRT4577_613C.1.pep
SGLTPGAKPPTKGGLQRLFSPPLIWPHWKGQRALFFLKKVISQRRLPLGLVPRPCWGLSPRGGLGGAPQQLQKGGTLGPRGRVWC

SEQ ID NO: 327117 - protein, 121 aa, Zea mays
  Clone ID: MRT4577_61400C.1.pep
MASTGRSMLLSLLLFAVTLSLLEMYRAKFASSELMTIAGGFVCSLLFLLLLTFIGNYQEASGDRTGWGAVVVAQLVALIVAGTVHRVCITTCFLFSAGLLYEVDKLSGMILARSESKVRRH

SEQ ID NO: 327118 - protein, 64 aa, Zea mays
  Clone ID: MRT4577_61401C.1.pep
VPLLVWGAHRSQRGNLESLSRPPRSPRGSCRLLDKKTKTVTRKYEAHRRWDRRGCACSGPLVSA

SEQ ID NO: 327119 - protein, 75 aa, Zea mays
  Clone ID: MRT4577_61402C.1.pep
GRPSPYHSHHAPTRRRRGPSCFFWQGSLAGHVVFFDASWLPGCGRWRQRTRPLRCGLRDQIRRLGYSRTIFTVRS

SEQ ID NO: 327120 - protein, 121 aa, Zea mays; identical to SEQ ID NO: 327117
  Clone ID: MRT4577_61403C.1.pep

SEQ ID NO: 327121 - protein, 864 aa, Zea mays
  unsure (1)..(864): unsure at all Xaa locations
  Clone ID: MRT4577_61404C.1.pep
MAIVRSTARITRDGEEAEAAETAPISEVMRQSGLVVTEDASEEGAPAAEAEQADIEEGNVDEEEIDYNTVMPSKPSHLDFGKSTVTEADMPMMLKAXYFGEAEKKLIRFGGGETTPKPENDEVVVFRSFFKAGLRFPLHGMIADVLEDFEIYLHQLTPNAIVRLIVFIWALRSQGVDPLAEAFCRVHGLHYQAKAREDGLHENFGCYNFAYRKDMKTPVVSYRTKWPSGWKTEWFYVKVDEKKEKLVRSPLDLTFGLTRPLCDMLQGSPCREVVGEFRVVSEHIGTRDLVQEYLANRVFPTLKEWNMPNLKGEKKTNELVRLPYHFKFKKHFKEPCQEWLNRVMDALKFEYPDYERLNKGAEGPKRKRVVSVMKRQAAKMIEEDEKALKKKKSSPKPKVVVPKKRKAAAAKQKIADIEEETPSMPPAADVEEILKVMTESLPLKLSPLGPQLMKLLQKEEPATIKKLAEKRRRIITVIDAIEETPPSVSASKRPTAEATTAEAAAAEATNLEGVFSDIDKMILDMAMEETATATEETLAPVPEKEKEIAEDTLEEKDFNFENILGQKLSKAEKEELRDYTISCGYQPGALLFGGVDEESLGCLRDQTGAKVVSTLAKSVGFPKLEVDLTRYRRQHITGSLFHSNFKSLLLSKTLRMQQDLKDKKNEIIIEGLEGKIKEHEAALEKKDFVIQTMEEKKDFDAKLEAEVAKSSNLQKSLKELQDKCLNFGNRCMQRLKQVFNSVGASSEKFKPSAEDLPGIFDHIEGEVDALDEVIAGHGDFYALLASRGTAVAFMKAGCMHGKIVNRPNFNLSPADLIYIPSLARSIGNRFIKQIWAKGGRSLAGDEARSHLKPDDEAEEQRVEA

SEQ ID NO: 327122 - protein, 44 aa, Zea mays
  unsure (1)..(44): unsure at all Xaa locations
  Clone ID: MRT4577_61405C.1.pep
LGTSRPAGMSLRHPCIXASRITADGGCVRRNGRVNPPHRFSGDL

SEQ ID NO: 327123 - protein, 83 aa, Zea mays
  Clone ID: MRT4577_61406C.1.pep
GGVCYYDAPRNLFQGGVCWVCDPNFKKGGQVGEKNGGPFPGGLGRSAPVRIVLGFPLYKNFCNPQEKAVSIVNFLRFVPPPKK

SEQ ID NO: 327124 - protein, 93 aa, Zea mays
  Clone ID: MRT4577_61407C.1.pep
HLPPYPPIPSISHSFTKSQPHYFIYFSSIFFNKISQTLYQIINLPTSHHHLKTIHLITTSPIQTTLSISQTHSQLLHKNPLFQTYTILHSSLP

SEQ ID NO: 327125 - protein, 136 aa, Zea mays
  Clone ID: MRT4577_61408C.1.pep
NGSTLETPLPLGHDSWHFRNTGNKDIESSLEATFSTQGKLSMFRYIAFTRSETDSNVAPSPARCQAPRAPPRCRRDLTRRPTWQRPPHQTRRRHRPITVRRARTTGLVHQALPSRTGGGGALQWGLARLHGSGSRP

SEQ ID NO: 327126 - protein, 64 aa, Zea mays
  Clone ID: MRT4577_61409C.1.pep
VQFHFALSPTNYVAGHTHTCTHTTYPHVYMHIVCTYVYTLNIFNISVKYACELYVCIYVKHVRI

SEQ ID NO: 327127 - protein, 93 aa, Zea mays
  unsure (1)..(93): unsure at all Xaa locations
  Clone ID: MRT4577_6140C.1.pep
CQGLSSLLYKSFSHKTFFFQEVLXMVVDQVQILDRHHLFGKFASVDGGVSTRTDQNLAFFGGYNMVTTHIVLLHKNPSEDIHALVEQYYDHFH

SEQ ID NO: 327128 - protein, 68 aa, Zea mays
  Clone ID: MRT4577_61410C.1.pep
ARVKVLGRSIPWLKFCFFGQRGFSSGRLKVGFPARCRGNTKMGFFNKMALASFANHDSPGAEPAIWGY

SEQ ID NO: 327129 - protein, 122 aa, Zea mays
  Clone ID: MRT4577_61411C.1.pep
APEHPISPERFSSLTQGKLSMFRYIAFTRSETDSNVAPSPARCQAPRAPPRCRRDLTRRPTWQRPPHQTRRRHRPITVRRARTTGLVHQALPSRTGGGGALQWGLARLHGSGWVGQLADQGR

SEQ ID NO: 327130 - protein, 73 aa, Zea mays
  Clone ID: MRT4577_61412C.1.pep
ASNPAGGPHHATPTHRAGEIMHRAGGNHPYINARNISPAMCFSYGDTRHIKVLCNQEHSFTSNATFKIRPDSS

SEQ ID NO: 327131 - protein, 192 aa, Zea mays
  Clone ID: MRT4577_61413C.1.pep
NLSDLRVALPTLTRAGERAPIEVCRIPRVRRQGLVNEASDPRAPGRDGAVPAPGLMRRPLPCQTSRRISAASGRGPWNLTSSRSISLPTSGLKDHHLSPTCSPPAELQESSCSLCADMKWCLITVEFMGIVLFFFVCATMELSLDIPGDGATLESVLNLVKAMYLNIESFPCVRLLNLSGEIGWSGAYLVLT

SEQ ID NO: 327132 - protein, 81 aa, Zea mays
  Clone ID: MRT4577_61414C.1.pep
GAYWHINQPLLFSKPWVTLGYGIREYPPISLRLGGTVSSDGASLPIIGAFNRGGPLTLINPFTFFINRLRGGINSWAEVFL

SEQ ID NO: 327133 - protein, 153 aa, Zea mays
  Clone ID: MRT4577_61415C.1.pep
KHILARQTGLSRSQVSNWFINARVRLWKPMIEEMYTEEVNPKPADDTSQNPSAGGGVGVGVAIKPEQQVSTAAAGATIGGGGGGDHLFGPSYPSMYGSHGGAVSLTLGLQQQPFASTMMHQRRPLMTFQGDEQEPALPYRDLMGSQLLHHFAG

SEQ ID NO: 327134 - protein, 166 aa, Zea mays
  unsure (1)..(166): unsure at all Xaa locations
  Clone ID: MRT4577_61416C.1.pep
MPTECCQNENGCTSGKNAFTKSNGCGDSETCAEGHVGDAPAMESRSQSRKQASDLEQETCLDDSNLVARAARLFAPRLGQLDDNYEYCVKIIRWLECSGLIEKDFRMKFLTWFSLRSTEQERRVVITFIRTLIDEPSSLAAQLLDSFEEIVTSKRPRTGXCXKLWH

SEQ ID NO: 327135 - protein, 100 aa, Zea mays
  Clone ID: MRT4577_61417C.1.pep
INTGGCYLLHTQILQKQHPWGEQLGPSNPRGKSQPAKPWVLQPGKLIHVLQAGGPVLGAHRKEKEAKFVPSWLQIKRGKHGRHQVNHGPREVGVLNKPDA

SEQ ID NO: 327136 - protein, 173 aa, Zea mays
  unsure (1)..(173): unsure at all Xaa locations
  Clone ID: MRT4577_61418C.1.pep
MAATTIDWHARNNAALPAAMYGVAVPDSKELVRALIAPPMQQAPTISFAYPCSGVEQQSAAGSFLGAGGGGLTPAQILQVQSRLQFLRRPAXGPRSXQPMKRQGVPLPQAPAVSKLYRGVRQRHWGKWXVAXIRLPRNRTRLWLGTFDTAEEAALAYDSAAFRLRGGLARLNF

SEQ ID NO: 327137 - protein, 75 aa, Zea mays
  unsure (1)..(75): unsure at all Xaa locations
  Clone ID: MRT4577_61419C.1.pep
HSGLLFHSFSFVXHLLYPFNVWLTLVXXXXFFYHPKKXXXHIFPPXKKKSAVIGSVFLVXSVSGLFKHLRIXFFF

SEQ ID NO: 327138 - protein, 84 aa, Zea mays
  unsure (1)..(84): unsure at all Xaa locations
  Clone ID: MRT4577_6141C.1.pep
YSFHFYVYIQINLDTYTKTHTLIICLVYLSSNSFNNLNDSKGGGXKYLSSSNNTXXQNPPSLNINNXKIFPTLXXNNNQXYFSN

SEQ ID NO: 327139 - protein, 80 aa, Zea mays
  Clone ID: MRT4577_61420C.1.pep
LAVAPVTAMVPSDGCHMAKSGADGRNACGPQNKSLTRPSGRAALHGPAVFISSHKRPILTAPVDWLTRLPLTPAGVVRHL

SEQ ID NO: 327140 - protein, 209 aa, Zea mays
  Clone ID: MRT4577_61421C.1.pep
MAARCSTAASVVRTGSRDLSPSFSFTAAALPSARLRPVGAWVRGGGYTCRLRAVRAMGSAPSSSQSPSPHTPSGQTQGKADYKSLSEEEWKKRLTEEQYYVTRQKGTERAFTGEYWNTKTPGIYQCVCCDTPLFQSSTKFDSGTGWPSYYKPIGENVKSKLDMSIIFMPRTEVLCATCDAHLGHVFDDGPPPTGKRYCINSASLKLKPQ

SEQ ID NO: 327141 - protein, 450 aa, Zea mays
  Clone ID: MRT4577_61422C.1.pep
HASAHASAIYLALLFTPSILMAPFAETLGSKYRKTWLRLVHRTLELAGPAFIKWGQWAATRPDLFPSDLCTELSKLHTKAPAHSFTYTKKTVEKAFGRKLSDIFENFEEDPVASGSVAQVHRAVLRFRYPNRQTKRVTVAVKVRHPGVGDSIRRDFNIINAVAKISRYIPTLNWLRLDESVQQFAVFMMSQVDLAREAAHLSRFIYNFRRWKDVSFPRPLYPLVHPAVLVETYEHGESVSHYVDDLEGHDRIKSALAHIGTHALLKMLLVDNFVHADMHPGNILVRVAQPKNSNNTLKKSRPHVVFLDVGMTAELSSNDRVNLLEFFKAVARRDGRTAAESTLKLSKQQNCPNPKAFIEEVERSFSFWGTAEGDAIHPAECMHQLLEQVRCHKVNIDGNVCTVMVTTLVLEGWQRKLDPDYNVMKTLQTLLFKEDWAKSLQYTIQGLMAP

SEQ ID NO: 327142 - protein, 209 aa, Zea mays
  Clone ID: MRT4577_61423C.1.pep
MAARCSTAASVVRTGSRDLSPSFSFTAAALPSARLRPVGAWVRGGGYTCRLRAVRAMGSAPSSSQSPSLHTPSGQTQGKADYKSLSEEEWKKRLTEEQYYVTRQKGTERAFTGEYWNTKTPGIYQCVCCDTPLFQSSTKFDSGTGWPSYYKPIGENVKSKLDMSIIFMPRTEVLCATCDAHLGHVFDDGPPPTGKRYCINSASLKLKPQ

SEQ ID NO: 327143 - protein, 112 aa, Zea mays
  unsure (1)..(112): unsure at all Xaa locations
  Clone ID: MRT4577_61424C.1.pep
TERVAGRPPPRATDERSSRWPPDPGFSSTPAVXLQLSLPRPRSMLNSRAEPLARLPPHHRAASRGPPSFSPDSLASEDVERGEGSRRRPAPGARATGFKGFRWIWTPEWTEC

SEQ ID NO: 327144 - protein, 78 aa, Zea mays
  unsure (1)..(78): unsure at all Xaa locations
  Clone ID: MRT4577_61425C.1.pep
VLSSMARNMLFQTQXSCTCTPTMSPIPLLLPCALHILEQRYQFPLANPLHVLHLLPRLLQVIVHVDDFTRDIYPFSYS

SEQ ID NO: 327145 - protein, 50 aa, Zea mays
  unsure (1)..(50): unsure at all Xaa locations
  Clone ID: MRT4577_61426C.1.pep
GYTLRDDRGSAAVRAHYYGDDWVLQRGSVRSSAPCLKPPRLVXWRRGGGG

SEQ ID NO: 327146 - protein, 51 aa, Zea mays
  Clone ID: MRT4577_61427C.1.pep
RMRRPTLRSKGRGCIRRRICASLTEHCTLTANGNRKGPMWKCYQQGLRMNN

SEQ ID NO: 327147 - protein, 126 aa, Zea mays
  Clone ID: MRT4577_61428C.1.pep
PFFAVFCVVFFLWVQFFGVGALAFVSAALVFLWVRFVGIFGLCFGVVYLPLCGLLGCCPWGFSFGVGSLAGVSVVCRWVFSSFFRPVSWWVLSVSPFAAFAFRVMCWLAVWFCCFGCFSAALNFAV

SEQ ID NO: 327148 - protein, 41 aa, Zea mays
  Clone ID: MRT4577_61429C.1.pep
GAPARFVPQGITFLPVPQMCHSPCNRQPPAVHVRSVTGYTQ

SEQ ID NO: 327149 - protein, 50 aa, Zea mays
  Clone ID: MRT4577_6142C.1.pep
VILFLVFATSHLLCSIWRECLTCCSNNHFGCVSPFLVCKEPAKCGQNYPS

SEQ ID NO: 327150 - protein, 93 aa, Zea mays
  Clone ID: MRT4577_61430C.1.pep
LVSALEPSHEPVHILLCSPRRDELDYVRSCITCMLCVSLYERGCTAWVPLTTDLTSSRSRRCGRRIGAAPTRRLAKVTYAGHRSYPRKRGRTF

SEQ ID NO: 327151 - protein, 184 aa, Zea mays
  unsure (1)..(184): unsure at all Xaa locations
  Clone ID: MRT4577_61431C.1.pep
EVINSIDKIRRGFIWRGRKEVNGGSCLVSWDIVTRPLYLGGLGISNLLYQSWALQAKWLWLQKTDPNKPWSGLEFPIQXHVKSFFSASIVTMVGNGCNTLFWTDRWVDGSRIQDFAPAVVANVGKRALSSRTVAHALENWQWVSDIVTPLNLSGLQQYLNLWDTLRGVVLTQEADRHVWIHSSS

SEQ ID NO: 327152 - protein, 80 aa, Zea mays
  unsure (1)..(80): unsure at all Xaa locations
  Clone ID: MRT4577_61432C.1.pep
MAAKLTHLHSLRERLGATFSSHPNELTTLFSTNAHQGKGMLQRHHLLAEFDALTDKDKEKNVPLDDIPPAAXQEEIVHPP

SEQ ID NO: 327153 - protein, 122 aa, Zea mays
  unsure (1)..(122): unsure at all Xaa locations
  Clone ID: MRT4577_61433C.1.pep
FGSRPKIWTXYWPGWFQTFGESNPHRPPEDVAFAVARLSEKGGSVQKYYTYHGGPHPGRTTGGPFISTSSYSYXPPSDEYGPLRFPKWAHPMELPKLIRLCEHTLSYGNTTIXLFLGPKQDS

SEQ ID NO: 327154 - protein, 416 aa, Zea mays
  Clone ID: MRT4577_61434C.1.pep
VDSDVLRCQSALSYRGVCSSRILPSEDDSLARALRSCHSQPFSFVEEGDTGASGMISLAEYLGTNVADHIPETPNNLSEEMVRCMAGIYCRLADPPLVHHGSSSSPSSSFSSTSAISPQYVGDMWSPKYRREATLDSRLINPFHVDGLKEFSGPYNTMVEVPMISRDSRRLKEAEDLLQTYKLILYRLEAVDLRRMTDEEKIAFWVNIHNALLMHAYLKNGVPQNNLKKTSLLVKAACKIAGRNINAAVIQSIVLGCNTHCPGQWLRTLLYPRIKSKVSKAGHEWRAFAVAQPEPLLRFALCSGSHSDPAVRVYTPKRLFHQLESAKEEFIRATAGVWKEQKLLLPKLVEAYAKDVKLSPQGLVDMVQRYLPESMRMAVQRCQHGGRSSGKVVEWVSYNPAFRYLLARDLAFPHLS

SEQ ID NO: 327155 - protein, 67 aa, Zea mays
  Clone ID: MRT4577_61435C.1.pep
KLGRPLFIFLVFSPPPNLSRSFYWFWDFSGKLLFGGVSCVLVPKIAWKFKNFANWFLSFVKIKVEGC

SEQ ID NO: 327156 - protein, 135 aa, Zea mays
  unsure (1)..(135): unsure at all Xaa locations
  Clone ID: MRT4577_61436C.1.pep
SSHETLRLXPPATLLPRMVFEDIPXTGGLHLPRGLSVWIPVLXIHHDXSIWGPDAHEFKPERFAAGRRPAFLPFAAGPXXCVGQAYALVEAKVVLAMLLSHFRIXISDDYRHAPVNVLTLRPKHGVPVHLRPLRP

SEQ ID NO: 327157 - protein, 74 aa, Zea mays
  Clone ID: MRT4577_61437C.1.pep
FSSNDLSFKDPFCQIISEQGGSLSPVVLRTIASVAKEYASLNRFEGLGILISIHGLSRICNPRTLRCYTVPRTS

SEQ ID NO: 327158 - protein, 114 aa, Zea mays
  Clone ID: MRT4577_61438C.1.pep
KIFGKKKKPFLFTLFFFKKKNFFPPNFQGLQKNCWAGKGFLNPKKKTFVIKNFGPPNFFGGKNPFFLNKKIFLGLPKKTPRGLLKCLGTPPFFFGREKGKHQRGGCFFKTPSRG

SEQ ID NO: 327159 - protein, 586 aa, Zea mays
  Clone ID: MRT4577_61439C.1.pep
MADDHYSSKRKYDDSPPPRRTGFSSGPPPASPPVAGAPVPSSYNTVPPPPDEIQLAKQRAQEIAARLFSAAEAKRPRVDNGDDDVGTAGGGGSLGGGGRIGGGGLGFSSSAGGGHGSSIPPLSSQGNSHQYSSYGGGYQSGSTTKKIDIPNGRVGVIIGKAGETIKHLQAQSGAKIQVTRDMDVQPGSQTRSVDLSGTPDQINRAEQLIIDVLAEADAGSSGTISNRKYNAPQPGAEQFQMQIANNKVGLVIGKGGETIKSMQAKSQARIQVIPLHLPPGDTSTERTLYIDGTAEQIEIAKQLVSEVTSENRARNPMSGGYSQQGYRPPRPQANWGAPGAPTTQQPGYGYMQPGAYPGAPPQYGQQPYGSYPPASGGYQTGWDQSSNQQSQQAPSAAGYDYYNQQQQPQQQQSATGTAAPADASNYNYSQPPASYASQGYGDSTYSQQSGGQQAYDYSGYQTQGQQQSYSEQPGYDQQSYGSAANSTQDGTAPSYGGPGGAGQASPGQQASTPSSGGQPGYPSQPPTSAAASSYPVQGSAPPSGYVAPHTQPGYGTQPPPQGAYGQGAYGQPPQAQKPPSSAPTYG

SEQ ID NO: 327160 - protein, 144 aa, Zea mays
  unsure (1)..(144): unsure at all Xaa locations
  Clone ID: MRT4577_6143C.1.pep
FGSRQIFTPYFAAWRDLAEXHVVXLQGSRQAAFGKAELISGQQTNPLYNIIYAEAPLTIGGLENIQTADTYFAXSMXLTGGPNTXALFVLRKCTSAIYHLTKGRNKYEDGSELHTLTAKVSRNNFLKKAXTNAPLMSTSLKNMK

SEQ ID NO: 327161 - protein, 122 aa, Zea mays
  unsure (1)..(122): unsure at all Xaa locations
  Clone ID: MRT4577_61440C.1.pep
MEKNRITGHGIRATLPKGNPNGKPNXKTKLPPAQRGGKTLALGGAPAPPRGGGGGPSPQGIKGGTPLSPNRGATPHGGPGAPQXGACPPRRRPGTPGPCPPGPPAGWRTTAPPRCRGGTRGG

SEQ ID NO: 327162 - protein, 100 aa, Zea mays
  unsure (1)..(100): unsure at all Xaa locations
  Clone ID: MRT4577_61441C.1.pep
SVGCLVXSXXCWFVFXXSAWFXWXLXXXFLXXVPGXCSPPPSLXXPCXAFXFXLCAALLXVXXXXXSXFXXSFXXXXRLXVCXCXGGXLFHVLFFVXRPX

SEQ ID NO: 327163 - protein, 49 aa, Zea mays
  Clone ID: MRT4577_61442C.1.pep
PRLSPWPLVVVRFPFKWLGCPFVLRLVILCVFLLLGVSVFTLGCFFHNI

SEQ ID NO: 327164 - protein, 82 aa, Zea mays
  Clone ID: MRT4577_61443C.1.pep
RPVTQYSLSQRLSLRRHRQTELYLDVLRSRRHLRRPPIAMPFLPYSPGTEACSNEPMHLCGAIVLLLSISRYCVHNFAHFRA

SEQ ID NO: 327165 - protein, 134 aa, Zea mays
  Clone ID: MRT4577_61444C.1.pep
FRKRSNRANGGDDPKREKKMVMPTDPMLWHKVAAVSGVAALGLGTYGAHMFRPQNPRYKEIWQTASLYHLVHTAALLGAPMTKRPNIFGGLLTTGIVLFSGTCYTVAYLEDRKFSSPAPIGGFAFIAAWASLLF

SEQ ID NO: 327166 - protein, 136 aa, Zea mays
  Clone ID: MRT4577_61445C.1.pep
MQASRARLFKEYKEVQREKSADPDIQLICDDSNIFKWTALIKYPLLPPQVRFLTKIFHPNVHFKTGEICLDILKNAWSPAWTLQSVCRAIIALMAHPEPDSPLNCDSGNLLRSGDIRGYQSMARMYTRLAAMPKKG

SEQ ID NO: 327167 - protein, 157 aa, Zea mays
  Clone ID: MRT4577_61446C.1.pep
MQASRARLFKEYKEVQREKSADPDIQLICDDSNIFKWTALIKGPSETPYEGGVFQLAFAIPEQYPLLPPQVRFLTKIFHPNVHFKTGEICLDILKNAWSPAWTLQSVCRAIIALMAHPEPDSPLNCDSGNLLRSGDIRGYQSMARMYTRLAAMPKKG

SEQ ID NO: 327168 - protein, 67 aa, Zea mays
  unsure (1)..(67): unsure at all Xaa locations
  Clone ID: MRT4577_61447C.1.pep
MFSRNQPPPSTRITCHPPPRALPLSCPLRPAXPPSAPPPPRPXPPPPRPPPPPSSPPPPPPPPLPPP

SEQ ID NO: 327169 - protein, 490 aa, Zea mays
  unsure (1)..(490): unsure at all Xaa locations
  Clone ID: MRT4577_61448C.1.pep
LPKLVKTGALCCVAARPHGTKSDPASRDRSMDPTEPRWRINSSFSPPTSRRWDCRYSSDGLPHRVHDAPHDHPPYVSSLSSHSKGSRSAFGSDQYLNHHHSASDGALSYFGSPADSLQAXHAGHPLFKDLISVNSLPLQEDQDQKLLIILSQVRGHXTATSSFSSASPFSESSQLASSSKQAAPYLPRNHMGRRSFMSKPVYPLVFRNPVSESEACRMLEVSNAGRATPSDDSQASPLWRRSLASPELKFHNALNELGKMEVSPERNTSSRREGFRWSNASSYDFGYDGDAIDISDHISIESQRSPTSSARFLKCGLCERFLHQKSPWTSNRIVRNADMPVAAVLPCRHVFHADCLEESTAKTEVHEPPCPLCARATDDEGHVSFSEPLHVALRSARRNLLLGTGAGGNSGISDPPRTDRGLKRNNSAVMPRRSGGALFRNRFKKQFPFKARIGKELFGGRVLNKVGLSLSSGQHDDHRQQAPKHDRPMK

SEQ ID NO: 327170 - protein, 157 aa, Zea mays; identical to SEQ ID NO: 327167
  Clone ID: MRT4577_61449C.1.pep

SEQ ID NO: 327171 - protein, 72 aa, Zea mays
  unsure (1)..(72): unsure at all Xaa locations
  Clone ID: MRT4577_6144C.1.pep
SYVHLLQIHRGCKLYLQGGPYQXPPILLQSPLLKNLCNSSPLPIWLRPGKKPNCKILFYXSFSLLRSFICEI

SEQ ID NO: 327172 - protein, 67 aa, Zea mays
  Clone ID: MRT4577_61450C.1.pep
VNSTTSIYSRGQNNRNEIMRAGRGPIGLRRLAQTPMQSHIRQPLVAAPTGDGSSTGAGASATSGLPG

SEQ ID NO: 327173 - protein, 151 aa, Zea mays
  Clone ID: MRT4577_61451C.1.pep
LPKLVKTGALCCVAARPHGTKSDPASRDRSMDPTEPRWRINSSFSPPTSRRWDCRYSSDGLPHRVHDAPHDHPPYVSSLSSHSKGSRSAFGSDQYLNHHHSASDGALSYFGSPADSLQAPRWTPSLQRFDLGEFSTPAGDMPSHCIISGGL

SEQ ID NO: 327174 - protein, 139 aa, Zea mays
  Clone ID: MRT4577_61452C.1.pep
ARHTTCEQCVCLTRAGSRICMIYHTLLVFVKRQLSLLPSFSLVFRDRAECKNTHFCLCLSACPTCAVTASVSSTLLVCRCSLDHRHTLAVGSEHASLRSRRRRLRGLSLAIGRRDHAGACGSRRSRQAYEAATRSGSVP

SEQ ID NO: 327175 - protein, 65 aa, Zea mays
  Clone ID: MRT4577_61453C.1.pep
YHLTNTTLIQTFEKMVSVIYLVEITKIVLHFMAIKSDFPGDPGYNLYTPFTFSTPLFTAIRKDDS

SEQ ID NO: 327176 - protein, 114 aa, Zea mays
  Clone ID: MRT4577_61454C.1.pep
MAADALSIIPGAVLRNLSDKLYEKRKNAALEIEGIVKQLAMAGEHERISAVISLLTNDFTYSPQTNHRKGGLIGLAAVTVGLTSEAAQHLEQIVPPVLNSFLDQDSRVRYYACE

SEQ ID NO: 327177 - protein, 229 aa, Zea mays
  unsure (1)..(229): unsure at all Xaa locations
  Clone ID: MRT4577_61455C.1.pep
MTAKVHPNVAVPSVGLGLGQPAAVAVSPPADEEPVTLTVWRKSLLFNCRGFTVFDAHGDLVYRVDTYASDSRAEVVLMDAAGRPVLTVRRRQRPIGLGLGADQWLVYPGEEARRLPPLYAVKRPAAQYMRGGGGGGAKSMAHVAACSGGGVSGAAAGYEVEGSYLRRRCTVYDXRRRAVAEVRPKEAVGSDVFRLVVQXPGMEVSLAMAVVLALDQMFGKPSLLRSWSS

SEQ ID NO: 327178 - protein, 95 aa, Zea mays
  Clone ID: MRT4577_61456C.1.pep
HPMTPTFDHNIFLPYTHTGSMKLISNFASFHLEHLYHVSLSSLNHHSVSTTHDYIPSQSISLKNHLTMIYPQYQIYSKVHFYDYIYSLLNSFYTS

SEQ ID NO: 327179 - protein, 101 aa, Zea mays
  Clone ID: MRT4577_61457C.1.pep
RQQMLLPFSELVATSGASFLPQQQVFLWQTRFGLTPRPFWFVPQFAPLDRPGFCYPTAPYQGMLHGGGPFLSVYGCGARFSRFLSYRLMPGRDKKVRSRSL

SEQ ID NO: 327180 - protein, 88 aa, Zea mays
  unsure (1)..(88): unsure at all Xaa locations
  Clone ID: MRT4577_61458C.1.pep
XFXXXDKKTPGALFGRXTHTEKKRAPLNXKXRPRXXXXTQXRTTXXEXXRRDKPAXQHKXDEQSRSRSPNPETEPXXXXKATKXQPXT

SEQ ID NO: 327181 - protein, 92 aa, Zea mays
  Clone ID: MRT4577_61459C.1.pep
RPKCPLKKVLILMGNWIRLVHSQASLGNPPIGWKNTPRLFLPVFSLQKTQGLRANKEIGTRFRCQKVLDRQETRSDQPEDPPDFRRAKPGQT

SEQ ID NO: 327182 - protein, 68 aa, Zea mays
  unsure (1)..(68): unsure at all Xaa locations
  Clone ID: MRT4577_6145C.1.pep
LWDTIAGGDSEDDQEGVXDDNFIDDTGVDPADRYGSDNERHSPGHYAQAEEGEEDDEIERLFRGGKRK

SEQ ID NO: 327183 - protein, 121 aa, Zea mays
  Clone ID: MRT4577_61460C.1.pep
FLSHIPPIDACGRPLQDFAVGMSIYEASTAGPPFSFPALATPSPFRQTHLLRLHFAYVGITLPLTIWPVPQVGHQMLRTCHIMLGYGGNETIAWATSHGPRQLKIRGEKSCTPACVRYCAQ

SEQ ID NO: 327184 - protein, 150 aa, Zea mays
  Clone ID: MRT4577_61461C.1.pep
PHINGWMAKGLSSSHGGGERQRAPNDYEAVAGARRVSAPVHPAPIQTAIRNREGNSSVAEILIDDRELRSDLAMGIHGFGREANFRREIAAPPITNVQLAGLFRCGAHPRQPRARNRCLAMAYEHAHGGGRISHDDEQVLDAPNRAGPGR

SEQ ID NO: 327185 - protein, 91 aa, Zea mays
  Clone ID: MRT4577_61463C.1.pep
RFRNPGRPWTTDAPLPDGPEEAQKAAAPNPPPGSPGRNNPDPPGAALTAGGPGQPPNNNRAIGWLFCAFRPKKAWRLPPTTAFRFHASGRA

SEQ ID NO: 327186 - protein, 77 aa, Zea mays
  Clone ID: MRT4577_61464C.1.pep
RANSSNFCNQRDLMEQDVKILDLDESIARMKVIYCSWTNGKVSTCSFTELILQSVGFHTGLFTLPHLIVVRELFHLI

SEQ ID NO: 327187 - protein, 65 aa, Zea mays
  Clone ID: MRT4577_61465C.1.pep
KDSTKQLRRQQDSRRLRPRHDTTQAGGGYYVNQRRPVTDNLLSTDSPCFSRVGRAGTSSDGESRA

SEQ ID NO: 327188 - protein, 99 aa, Zea mays
  unsure (1)..(99): unsure at all Xaa locations
  Clone ID: MRT4577_61466C.1.pep
SPFNQLSPLXPLSYFPHQKLIPFGHLTTPNPPPFFSHHQVLPFTHQFLANPATLFQLQQMMPFSTPALSNPPAFFQQHIIGGAPFKLLISCNPKMNFLA

SEQ ID NO: 327189 - protein, 55 aa, Zea mays
  Clone ID: MRT4577_61467C.1.pep
VAITVHKTDGRADGRADSRESTGDPADTTDDATGAAYGETYGVQEKAPGKSAGKA

SEQ ID NO: 327190 - protein, 84 aa, Zea mays
  Clone ID: MRT4577_61468C.1.pep
REALKEAREKTRSRLRPRCYNALHPIRVAITRVNAGSGRSRKSTGLLICRYEVYGVKIARVIKLKRRSTTRGDGGEGGNAWRAW

SEQ ID NO: 327191 - protein, 107 aa, Zea mays
  unsure (1)..(107): unsure at all Xaa locations
  Clone ID: MRT4577_61469C.1.pep
GSPGFGFAGEGIDMAPQHDEERCYADGLGWDTDDHXSLHDSCSTYGEVFELKIIRDRKTQRSRGFGFVTFSTEEAMRNAIEGMNGKELDGRNITVNEVQSRGGRGGV

SEQ ID NO: 327192 - protein, 47 aa, Zea mays
  Clone ID: MRT4577_6146C.1.pep
YNATIMVREYTNFYIEDLSIPLLMCRACNYVNCVFWICQINLKESRS

SEQ ID NO: 327193 - protein, 76 aa, Zea mays
  Clone ID: MRT4577_61470C.1.pep
WLVCVMVSLHRMIPCSWSPTLSFPRSIQVCVIWLPLIPSPLLVFKKKNFASFYGLISCHIFCKVLRKHKYHSYVFC

SEQ ID NO: 327194 - protein, 60 aa, Zea mays
  Clone ID: MRT4577_61471C.1.pep
YLFDAKALYIATSKPPRGENKIESPGRSFACLLTAQVSSEVARVFLATSNLLWSSFGTLI

SEQ ID NO: 327195 - protein, 39 aa, Zea mays
  unsure (1)..(39): unsure at all Xaa locations
  Clone ID: MRT4577_61472C.1.pep
WLLICHGERCLVRRICTNITYKSLRFVVCHVASDXVHVL

SEQ ID NO: 327196 - protein, 94 aa, Zea mays
  Clone ID: MRT4577_61473C.1.pep
MPIIQMNKKKRKESKSRVTHPRPRSIHFQRSNSYQLASGRTELGTASQAGGVHGRAADVGAGEERAAGAGPGHALLGLPRAVIEVARVAGGIVP

SEQ ID NO: 327197 - protein, 85 aa, Zea mays
  unsure (1)..(85): unsure at all Xaa locations
  Clone ID: MRT4577_61474C.1.pep
IPFGRRVLFPLYPTHSNILLISPAPPXLGAAYPGDGKLHSISPYHLKLIALQKPLFXDDVTFNTFKSYHISLNHVSNICNALTLD

SEQ ID NO: 327198 - protein, 81 aa, Zea mays
  Clone ID: MRT4577_61475C.1.pep
RNPKGITDATRGAASLQAAASLMQPAKIGGRAPFACVPSRPSSELACRDFCVGAGAARITCSLQDVASRCVDTANSAGFAL

SEQ ID NO: 327199 - protein, 80 aa, Zea mays
  Clone ID: MRT4577_61476C.1.pep
FPCKSSRIQISLQLAAAPVITPRLCTTHYRDLWAPPAFRAGCPAPTLGDPTGLAPTALGKPCTTLFVGKFRWWYAVFSSG

SEQ ID NO: 327200 - protein, 92 aa, Zea mays
  Clone ID: MRT4577_61477C.1.pep
KSWPVWQALETGIFLFFPERFRGRVCLALQNLPLGGLFWLKTFGHAPQGGIITVVSNSERTLNQENFKCPFFKGGGSSIKGFSQKFGRGSLF

SEQ ID NO: 327201 - protein, 44 aa, Zea mays
  Clone ID: MRT4577_61478C.1.pep
MGNIFVKKPKITEVDRAILTLKTQRRKLAQFQQQVRLPFRGTLS

SEQ ID NO: 327202 - protein, 85 aa, Zea mays
  Clone ID: MRT4577_61479C.1.pep
KKPRRGGGNFGNTLPQSPLKRGGGLKTRGEPNPGAPHQITPPRLGPWGVPGPKGQTRGPQTGALFFQEAPQWSSPFGGKGKKTPF

SEQ ID NO: 327203 - protein, 186 aa, Zea mays
  unsure (1)..(186): unsure at all Xaa locations
  Clone ID: MRT4577_6147C.1.pep
RSAGGPSTSAAPPPQQTWRWPLASTTRSRQRDWVQATSGNGGVTQARSFAKDAAPADRPPGGGDDLLKGIFFXAKTKCETALGVLKKEKITIDPDDFAAAPRYAQVMNTVREQADLLSDAQRIKYTIETVTKGIPDARTYLNTLPQLRIKRGLIHHLGIDPLMMEAPEKTATDINKPLLRSDNKNM

SEQ ID NO: 327204 - protein, 45 aa, Zea mays
  Clone ID: MRT4577_61480C.1.pep
YVKGSSSAGIFAAGFFSPWVPFVRRLREVGTREDKRLRRIARTRG

SEQ ID NO: 327205 - protein, 160 aa, Zea mays
  unsure (1)..(160): unsure at all Xaa locations
  Clone ID: MRT4577_61481C.1.pep
MITFTYIMGDADVKPEAAAGGPENRTFPKYRYRGVDLDALLHMCTDDLVQLFPASASRRILRGLNRNSMALIKKMGEAKXDAPAGDKSQPVKRHLRSMICVPETTVTIGAAYNGKTFNQAEIXPEMIRHYLAECSLSYXPHKHAXPGMGGTHSSRRIPLK

SEQ ID NO: 327206 - protein, 182 aa, Zea mays
  Clone ID: MRT4577_61482C.1.pep
MATEQAAENYTVEDLVALNPYNPDILNDLEKFVNEQVSSQTYNLDANLSLLRLYQFEPERMSIQIVAHILIKALMAMPAPDFSLCLFLIPEHVQMEEQFKTARFSQFWDEAAKNRHISEAVPGFEQAIQSYAIHVLSLTYQKVPRPILVEAINIEGLALDKFLEYHAANSGWVIEKGGQSQV

SEQ ID NO: 327207 - protein, 52 aa, Zea mays
  Clone ID: MRT4577_61483C.1.pep
SKAAEIQSMKVLSYLERREGFFMHREVSLGFAVEIFIMHPILYIRLLYDQGK

SEQ ID NO: 327208 - protein, 226 aa, Zea mays
  Clone ID: MRT4577_61484C.1.pep
MATEQAAENYTVEDLVALNPYNPDILNDLEKFVNEQVSSQTYNLDANLSLLRLYQFEPERMSIQIVAHILIKALMAMPAPDFSLCLFLIPEHVQMEEQFKVLIVLSHYLETARFSQFWDEAAKNRHISEAVPGFEQAIQSYAIHVLSLTYQKVPRPILVEAINIEGLALDKFLEYHAANSGWVIEKGGQSQVIVLPRNEFNHPELKKNTADILPFEHVTRIFPVLG

SEQ ID NO: 327209 - protein, 207 aa, Zea mays
  Clone ID: MRT4577_61485C.1.pep
MATEQAAENYTVEDLVALNPYNPDILNDLEKFVNERFEPERMSIQIVAHILIKALMAMPAPDFSLCLFLIPEHVQMEEQFKVLIVLSHYLETARFSQFWDEAAKNRHISEAVPGFEQAIQSYAIHVLSLTYQKVPRPILVEAINIEGLALDKFLEYHAANSGWVIEKGGQSQVIVLPRNEFNHPELKKNTADILPFEHVTRIFPVLG

SEQ ID NO: 327210 - protein, 43 aa, Zea mays
  Clone ID: MRT4577_61486C.1.pep
KVGGVSCLMSPYRLNNYVCETNTDILQHFDLFSGMICIITCCL

SEQ ID NO: 327211 - protein, 331 aa, Zea mays
  unsure (1)..(331): unsure at all Xaa locations
  Clone ID: MRT4577_61487C.1.pep
MATEQEAENYTVEDLVALNPYNPDILNDLEKFVNEQVASQTYNLDANLSLLRLYQFEPGRMSIHIVAHILIKALMAMPAPDFSLCLFLIPEHVXEKLHPALLVQXSEVLCRPAIQCVXEACVXNVHNIQYLXYLVKKPPHPCLNIYCALRVXICRKQTSLANVTDAEIPYRPTRPAFTFFGCIILSACLVYLSVSLFQQMEEQFKALIVLSHYLETARFRQFWDDAANNRHILEAVPGFEQAIQSYAIHVLSLTYQKVPRHILAEAINIEGLALDKFLEYHAANSGWVIEKGGQSQVIVLPRNEFNHPQLKKNTADTVPFEHLTRIFPVLS

SEQ ID NO: 327212 - protein, 101 aa, Zea mays
  Clone ID: MRT4577_61488C.1.pep
MVVVRPSPGSFGPELRGGALCLRGCAAATPLCGCAAATPLCACVLVPWLVHTLQLSTAQSFNFDTCRATASGRAPAHGGGVHHRQGPHPCVRMLWRGGYGS

SEQ ID NO: 327213 - protein, 64 aa, Zea mays
  unsure (1)..(64): unsure at all Xaa locations
  Clone ID: MRT4577_61489C.1.pep
SAVLIYLQAGQIYMGECTIPYASLDFYNYLCLPTHPYPIHDEDPLDLXLLAYQNYNGELYFLLY

SEQ ID NO: 327214 - protein, 104 aa, Zea mays
  Clone ID: MRT4577_6148C.1.pep
KKKKQEPQASKQEAREPTKTNHGHGTEGKPEPPERGHAGGGTTLTSRTRSRSKRCKGHETIQVKGNPLATTDLNQNKEQGKGRGKPRQDNPVNTGKGKPDGQGP

SEQ ID NO: 327215 - protein, 40 aa, Zea mays
  unsure (1)..(40): unsure at all Xaa locations
  Clone ID: MRT4577_61490C.1.pep
VFXVHRGRAXAEXGRQXHAXEHXXEEVHXAETHCXXDLXT

SEQ ID NO: 327216 - protein, 92 aa, Zea mays
  Clone ID: MRT4577_61491C.1.pep
GGKAPRPGGGPFLGPTPSFGRAVFPWWALWGWPLLGTSRGARFLRGKWVVYFGTGFVSKQRAPWGWWGPSSSWGGHFFLGFTSLGAFTFFFF

SEQ ID NO: 327217 - protein, 59 aa, Zea mays
  Clone ID: MRT4577_61492C.1.pep
DEHHICFFFEPQRAALYSGGLSSGERTTTPICFSSSTPPPFLLTSFSSAPAPQGLLLIL

SEQ ID NO: 327218 - protein, 88 aa, Zea mays
  Clone ID: MRT4577_61493C.1.pep
VGARIFFADLARWPWHITRTRNIVILLEHFVPSEVESLPCMNTYDQLAVHQSPLNYVSTLGHPKDKIHKKSWCRTEAQKETENSRCSK

SEQ ID NO: 327219 - protein, 55 aa, Zea mays
  Clone ID: MRT4577_61494C.1.pep
PHEPCLHQVLQELAPNVIRAHIALECTHCIINCSYQQTVSSSFRSLHRHCITVPR

SEQ ID NO: 327220 - protein, 68 aa, Zea mays
  Clone ID: MRT4577_61495C.1.pep
MAKAGAELGSSDGVKGTILSTQEGKGPTTGTGSVPGHKPGLHGAHGHAPGDTTNGRKSTGPHHKPASK

SEQ ID NO: 327221 - protein, 140 aa, Zea mays
  Clone ID: MRT4577_61496C.1.pep
VVAWACRRGGGGEGAGTRRWRLVERGSDRLAFINSQTRSLSCDPIPDSPRRPEFEGSAENEFIERNQLQKSEPNNDLVPGFQHPNTRQGVKARTLSYDDLVPGIQRADGRQEMKASTLSYEDELFRKFRACLAWLCSTPE

SEQ ID NO: 327222 - protein, 179 aa, Zea mays
  Clone ID: MRT4577_61497C.1.pep
MGLVVSATASCSDIFGRRRSSTLPPATATPTSSTPQLPDTTPEPELVRVFRHFDADGDGRISVAEMRESCGCTAAEAEEMVAAADRDGDGFISLEELGALFEDEDQSDTLRAAFAEYDENGDGVITAEELLRALRRLGIVGEEMTAERCAEIIAAVDRDGDGVISFDEFKAMMATEPAA

SEQ ID NO: 327223 - protein, 61 aa, Zea mays
  Clone ID: MRT4577_61498C.1.pep
IASSYRIRQAINQIEINKNRGGAERREERRGEKHLRNEYDMDLHSSQGGKTPTAQPDRKRV

SEQ ID NO: 327224 - protein, 95 aa, Zea mays
  Clone ID: MRT4577_61499C.1.pep
KKERGKSPGLRDVKPWADETDMKKLGGAVPRGQMEGLTWGASKLGPVGYGLKKMAFMLPIGGDFGSIAPLIGGPLTQEPLNGYVQSWDIVAFNKI

SEQ ID NO: 327225 - protein, 42 aa, Zea mays
  Clone ID: MRT4577_6149C.1.pep
SSLALQKKHPMPLFTEGFTHPLTQRTVRLYETFSTSTGPRPS

SEQ ID NO: 327226 - protein, 148 aa, Zea mays
  unsure (1)..(148): unsure at all Xaa locations
  Clone ID: MRT4577_614C.1.pep
MGPKVLFSTFNGTNKIRAYAPCAKRSGRVXLLLINLVGNSTNRIPVPSQGAQAQSARREKTXTPGRFPFPALGGAAELLAPKEEYPLAPKDGDLQSQQVLLNGHVLATDADGGIPELEPVRVDGTQPVTVVRINPGERRSLFACPCVK

SEQ ID NO: 327227 - protein, 263 aa, Zea mays
  unsure (1)..(263): unsure at all Xaa locations
  Clone ID: MRT4577_61500C.1.pep
MCSLLISAELVSGNTGGDDMAVLIQLKAFLRAHNQINRGAYDGWPEASPSPSPCGSWRGVGCDADGRVSSLDLSRSSISGPLFGNFSGLSGLVRLDLSDNSIAGELPADLDRCVGLQHLNLSYNLISGALGVPSLTKLRTLDVSRNRLEGEVVVVSGNFNFLGACDDLVVLNVSGNSLGGDIAGLLGNCPRLRYVDLSMNGFTGRVTQSLGIASLAQFSAAENXWXGSVPPGVXPXGWXLQSLDLSGNPLSGSFPDSVSNCPG

SEQ ID NO: 327228 - protein, 92 aa, Zea mays
  Clone ID: MRT4577_61501C.1.pep
SNSSTDGSRGHHVWEGPLPGSRRPTRVFPGEDDIEMKSTLYLAPNESNGFGFRTSLDAALSPQFFDRTGQISMPVPIEKVDSELDGITLKST

SEQ ID NO: 327229 - protein, 368 aa, Zea mays
  Clone ID: MRT4577_61502C.1.pep
MAPAKAQHTSTNQQTLLDAQLQLWHHAFGYVKSMALKAALDLGIPDAIHQHGGSATLPQIVTELATLHPSKTPCLRRLMRVLTLTGVFGVVVQHSTTDGGSDLVYELTPASRLLVGSAPSNGPNVSPFLNMILGTAFVSSFLDLGEWFQHELPDPSPFKLAHGRHVWDMARHDASFAKLCDSGMVADSRFIMDVMVEECADDVFRGISSLVDVAGGLGGAAQAIAKAFPHIDCSVLDLPNVVAAAPTSTDVKYIAGDMFQSIPAADVVFLKWVLHDWGDAECVKILQNCKKAIPSEGGKVIIMDIVVGAGSSDRKHVETQVLFDLFIMAINGAEREEEEWKKIIFEAGFSSYNIIPVLGVRSIIEVYP

SEQ ID NO: 327230 - protein, 123 aa, Zea mays
  unsure (1)..(123): unsure at all Xaa locations
  Clone ID: MRT4577_61503C.1.pep
RRTPRDPQPPPTGREAXEGRSAPRDTKDGDRRAXXRPTPGATGKNGNKXXXPKPXXGRPXGXRGRRGAGGPXPGAATDATAREXNTPXXANGQTQXETKDNRXRXXXNTAQKAASADTEAPKR

SEQ ID NO: 327231 - protein, 195 aa, Zea mays
  Clone ID: MRT4577_61504C.1.pep
PQGANVVVNVWGVGRAPQVWAPPLQFRPERFLRGNIDIKGAHFRVFPFGPGPRVCPGAPLGVTLVGSLMGPLLPPFSWALPSGAFSQDVGLMGSPGVVPFLAPPLQAVPPPRLGKEELSRGVPLDVLTLGVLAFFGFPFFKPPAAVGNFGPLNFSLVMCGSYLGAGLFFSPKLFPWASPFAPGVFFHFPPCPFFF

SEQ ID NO: 327232 - protein, 115 aa, Zea mays
  unsure (1)..(115): unsure at all Xaa locations
  Clone ID: MRT4577_61505C.1.pep
GPSCSSILLCSHPAPSALPHTHLLAFRTRVYHISLQISWLFWMVGXPPPPLLVLLPQLLVVAPPILLAGLLRLGRLNGSSHRSPRRRDTNPPSSRGGREGAGGGAGALPADVVVD

SEQ ID NO: 327233 - protein, 104 aa, Zea mays
  Clone ID: MRT4577_61506C.1.pep
ARMLHPTAVVWKAMQLAGVGSERRLREAIRIVDEHVAAIMESEERSRGVGDGGGCDEQHLLSRFAAAMEEEEGSELGAMFRSPEAKRRFLRDIVVSSWLAGKDS

SEQ ID NO: 327234 - protein, 192 aa, Zea mays
  unsure (1)..(192): unsure at all Xaa locations
  Clone ID: MRT4577_61507C.1.pep
CLDSTVDIYWPNRRPATVSVSRKPSSNVQSSTQQRNTALSDRTRTDRDSCTWMHGPVAVGTEVNYGGHDERCSFIQAFQRAATRQRLFMWVLVLASRSGRCRLAAAETNVRRSNGFAQGALPAATTDRWRGRKGNQSTGGGFNILYSGWQTPINKQLKDXCFFAFRSVSSLGKHRIESSPSNRATRSXHXAQ

SEQ ID NO: 327235 - protein, 71 aa, Zea mays
  Clone ID: MRT4577_61508C.1.pep
CVVPRSLSWCVLHRHGNVRVFPIMAVHLYFSLVWNDHFPRLVFVYNVVPVVCSYYTHSCSFIRINSLANWI

SEQ ID NO: 327236 - protein, 78 aa, Zea mays
  unsure (1)..(78): unsure at all Xaa locations
  Clone ID: MRT4577_61509C.1.pep
MRSGFAGLGLAGKSYRDMLMTWACRLRRLRGTNFLLCALDHETYEFXSILQGDPSFXDPLSPXRLSFANCHFGTNCFQ

SEQ ID NO: 327237 - protein, 402 aa, Zea mays
  Clone ID: MRT4577_6150C.1.pep
MRKVPDCTDSALESSTEVNSQKEALEAVLFERKNEIEILKGGMASAAKQFEVELAHRDLEIGKCKHELGVLSEKYLHDKSTLEDELRKLHGIIKNMEGDLEKNSQEKMQLKSRIKELEQAAHSLDYSASEIVELQEVIRNTQAELEKVTEDKIVLKERANEFEQLLRALKVSGTEVAKLPETIKNLEAQLERALEEKSILQDQIKQVEQVMSESLEKHSHEQSSLAADLLKLSEANTSLGGKLSSVAAELVQVYADKEEESLDNEKQISVLNQDIADLRRKLELLSSEKTAVDDELAKLLADIMIRDEKMKRMDDHLNQLQFEHAKLMAEFDTAHRSLSELCAQVSELEDEVQKQKLVISETAEGKREAIRQLCFSIEHYRSGYQQLRQLLQGHRRPLVMAT

SEQ ID NO: 327238 - protein, 145 aa, Zea mays
  Clone ID: MRT4577_61510C.1.pep
TRVCSGLGFALGLRCVLFWAFTVRAEISAPRPWANLPALSLSMRALSLSMRALAAAALGARQISLRSLSPCARFPSPCARATAAGRALSLRAAPCVRAAAAGRAISLRAAPCVRLLLGAAAAPWPHTLAACCASCATGDRESSYC

SEQ ID NO: 327239 - protein, 203 aa, Zea mays
  Clone ID: MRT4577_61511C.1.pep
MERVRVQKNIEELQDSKEKCYEVSMEWANKLKDSFGKVGAYSSEQKFIRGDPEGVIQWIGEEAETFDEILSDREDFCAFAGARGAAAILEKAGCEHVKAVAQAESILLVDDTRDLSVEASTLCSKFYSDVWMKGGREMADEAIKNNEKESHDAREEAKRAEEAVERAIIICIFGPELKPQREEAQKVYGGWRGAEAVCRRASA

SEQ ID NO: 327240 - protein, 100 aa, Zea mays
  Clone ID: MRT4577_61512C.1.pep
MKTRTAILPTVLSVTDDKVCVLNYSRADDGDMDFSAPGVPCVAKLEKVVAARSYSAAIMNINEPILPAALPSPDAGARTPTTMLVSARSIHHREPMRIPT

SEQ ID NO: 327241 - protein, 115 aa, Zea mays
  Clone ID: MRT4577_61513C.1.pep
GGLGNGERDQDTPHGKHRVPGRGRKALQQVMGAGGPNPDLFFNQRGPSESGVFFPSRVILFFFSLPEGKKKKFVFFSWGGFCSTLSLQKFFFPPSGRSWSILEPGGAFKIMKGRL

SEQ ID NO: 327242 - protein, 53 aa, Zea mays
  Clone ID: MRT4577_61514C.1.pep
LRCLSLLGFGSFGLLLLACEVDLRAHKSMAACAKIGPSEDCVFGAASCAKKNA

SEQ ID NO: 327243 - protein, 92 aa, Zea mays
  Clone ID: MRT4577_61515C.1.pep
DTLGHGTHVAGTIAGSTYGVAKKANIVSVKVFQGAEGTDSGVLAGFNWAVNDITSKGRAGKAVINLSLGGDASQAWVTAIDAAYNSGVLSVV

SEQ ID NO: 327244 - protein, 149 aa, Zea mays
  unsure (1)..(149): unsure at all Xaa locations
  Clone ID: MRT4577_61516C.1.pep
THPAKXXAAAPXGKXAQPAATTKGRTKPAPAAQTGRDARGGGXTARGGXGRGERGRGRGGRGXGQNRGYKGDNGNEGQGGXGGGRXGDGARTGGXEGERERDTRPPTRGGGRRRGNRKGDAADDXERPPRRNXERHSGTGHGYETKADG

SEQ ID NO: 327245 - protein, 56 aa, Zea mays
  unsure (1)..(56): unsure at all Xaa locations
  Clone ID: MRT4577_61517C.1.pep
FXXFLLXFXXFLXPFXLLGXLGXXXXFLSCXPXXXXFSCPXXXPXPQXXXGAFFFV

SEQ ID NO: 327246 - protein, 50 aa, Zea mays
  Clone ID: MRT4577_61518C.1.pep
FCMIVFSRIVLYFRVRRFFYFLCGKKRIILLALSYETILKLEMNIFMAIT

SEQ ID NO: 327247 - protein, 319 aa, Zea mays
  Clone ID: MRT4577_61519C.1.pep
MTEAAVITRYWCHGCEKVIEEAMGEEIKCPFCGGGFIEEMAGEDSEGLQLEREWGTPPGDSEDDDDDDIAHEFEGFIRRHGRASALRRVLDSIQDDLRADRERDNSVLINAFNQALASQGSALLDADEARDGRGGSSNSNDDGLLEEYDVLGAGLSLLLQHLAENDPNRYGTPPAKREAVEALPTVQIAEAVSCSVCLDDLELGSPAKQMPCGHRFHSSCILPWLELHSSCPVCRFELPSEETKDLNEPSDVHRRTESTREEVRADDPENDSESGNSAWPLVPWFFSGLFSVPEPSHTDRGTLTTDQQSPSTNPNAGGN

SEQ ID NO: 327248 - protein, 229 aa, Zea mays
  unsure (1)..(229): unsure at all Xaa locations
  Clone ID: MRT4577_6151C.1.pep
GRDGPDFLDISAGSGVGCDVSKKGSERSSSFSVSDSELDEAKEENGSIFYALSQKIVELEDALQEARKELDALEEKHAHCQNDLSTNSKVAEHEEKLHTSDVESDNLKKDPEETDSALESSTEVNSQKEALEAVLFERKNEIEILKGAMASAAKQFDVELEHRDLEIDKCKHELGVLSEKYLHDKSTLEDELKKLHGVIKNMEGDLEKXSQEKMQLKSRIKELEQAAHS

SEQ ID NO: 327249 - protein, 239 aa, Zea mays
  Clone ID: MRT4577_61520C.1.pep
MGIRRARRFLFLAAAVLLLHAPPPATSADLYALIYKGCANQSFPGGVAPPSVAALSTTLSAQSASAKFYKTSSSSSAASSSTSVFGLFQCRGDLSASDCAACVSRAMSSWPGVCGASVAARVQLAGCLALYEVSGFPQVSGVQMLFKTCGTGSGGGGGDFQMRRDTAFSALEGGVATSSGGFVATSYQAVYAMAQREGDLSTGDRSQCVTQAVQHVEAECGGAPYGPVYLSMCYMSYSY

SEQ ID NO: 327250 - protein, 270 aa, Zea mays
  unsure (1)..(270): unsure at all Xaa locations
  Clone ID: MRT4577_61521C.1.pep
MSSIPQEQWAQVIEKTGGPVEYKKIPVQKPGPDEVLVNIKYSGVCHTDLHAVNGDWPLPTKLPLVGGHEGAGVVVARGELVKDVELGDHVGVKWLNGSCLSCDFCQQADEPLCPKPLLSGYTVDGTFQQYCIAKAAHVARIPKECDLAAIAPVLCAGITVYKGLKESGVKPGQFAAIVGAGGGLGSLACQYAKAMGVRTIAIDSGEEKKKMCTGELGAEAFVDFATSKNLVXDVQKATPDGLGPHXVILGAVNEKPFPQAAEYVRXRGTV

SEQ ID NO: 327251 - protein, 80 aa, Zea mays
  Clone ID: MRT4577_61522C.1.pep
GKTALAYTPFIAPAFKSLLHAVQSSRTSDVQASHVGVKQHAYHTAASLFRSNKQAHLAPGLPWHYCSLSRATGCDADHKV

SEQ ID NO: 327252 - protein, 92 aa, Zea mays
  Clone ID: MRT4577_61523C.1.pep
PHHLSLRRARSGTALESLTTMQAAAAANGAGYFHKPQQQPLVAGAPPSPSAAAVVSPHWVGMPFAPPPGATDMVMQPHTYGAFADIIRADSL

SEQ ID NO: 327253 - protein, 155 aa, Zea mays
  Clone ID: MRT4577_61524C.1.pep
NFFKACPPIPRVAMPIFVHYSGAIVRCWCLLPCSLQQLTGFFLGFKPLPFAPILLIFSIPSAWVVQTKAPYKFCCRALSGEFVPWVNSPPCWWVPLGGQPPLLACSAVFLYLVVLRCSPPPRFCVSPPPFSLHVFVASLNLCAWEWFLCEAIPCF

SEQ ID NO: 327254 - protein, 115 aa, Zea mays
  Clone ID: MRT4577_61525C.1.pep
NGRQGLFFCKKNISIGGELWLFLEPNLENQPALGGPGDNRTRVFSQAEHKRPGVFLHLQTSSNLKTPNMEYLQGRPTFKNPAKKQTVMKNGQPGPFFPSPGPIQWSPSGELSDRG

SEQ ID NO: 327255 - protein, 74 aa, Zea mays
  Clone ID: MRT4577_61526C.1.pep
VKIEGSKCPCFTESGDMDDGISWKSSCRENSCDNYIYCPTATNVQNGSLDHFQEHWLKGEHVHIGREIGNGIRL

SEQ ID NO: 327256 - protein, 139 aa, Zea mays
  Clone ID: MRT4577_61527C.1.pep
LLGLVGSLPLCSLWRRSGSFRLCCRRSGLWFCFPLLWLGRVLPPVRLRPVAPAPSGLSRRRPALAPLCGCFGPACPLPGLFVRGRAAAGAWPPLPPPPPRRSSVRVRLSALVPRRLFLALFACACVCLRRLWRSLLRVG

SEQ ID NO: 327257 - protein, 378 aa, Zea mays
  Clone ID: MRT4577_61528C.1.pep
GKAKRRESSSPARTPPDGWVLPPGTGTLPTPTAAVKSASADCCYCTGIVIGYLEAGQAGFFTRLGRLIKEKAKSDVEKLFSGFSKTRENLSVVDELLTYWNLADTDRVLDDLEEALLVSDFGPKISFRIVDTLREEIRDGKLKSGAEIKAALKRCILELLTSKGGNSELNLGFRKPAVIMIVGVNGGGKTTSLGKLAYRFKNEGVKVLMAAGDTFRAAARDQLEVWAERTGSEIVIDNDKKAQPPAVLSQAVKRGKREGFDVVLCDTSGRLHTNYGLMEELVSCKKVLAKALPGAPNEILLVLDGTTGLNMLQQAREFNDVVGVTGFILTKLDGTARGGCVVSVVDELGIPVKFIGVGEGMEDLQPFDAEAFVEAIFP

SEQ ID NO: 327258 - protein, 84 aa, Zea mays
  Clone ID: MRT4577_61529C.1.pep
GTRASLSYSSFHHAWTPWRAAGACLVHVKFVCTEAHNCILDKWLIACRLAVKGLLQNSQPDTKRTEVFLLWWHFRNTSFGHTTS

SEQ ID NO: 327259 - protein, 70 aa, Zea mays
  unsure (1)..(70): unsure at all Xaa locations
  Clone ID: MRT4577_6152C.1.pep
RGEAGTTAPRGHSTREVTVRSESASLPTKRALNASSVKXVVKVTITLNKDTQQAPVVIGWPKRRRKRGRS

SEQ ID NO: 327260 - protein, 247 aa, Zea mays
  unsure (1)..(247): unsure at all Xaa locations
  Clone ID: MRT4577_61530C.1.pep
SSKRRCTGTIVGISDYEPMRWPNSKXRNLQVEWDEHGYGERPERVSLWDIETPENMVFSSPLNSKRQCLPSYGVSGLHVSSISKPQGSPFGNLQHMPGISSDIALLLLNQSAQNLGSSIACQQSSFSSIIQNAKQSYFPPTTLGASTGWNESQQQLNALGIQKGDQVSCDVQPGIDSITAPEMNVKPRVPRSTDSYSSQSISDPNSKSDPKTKTRRSKKSSSHKTISDRSEXSSVPSQICDKAEHGS

SEQ ID NO: 327261 - protein, 305 aa, Zea mays
  unsure (1)..(305): unsure at all Xaa locations
  Clone ID: MRT4577_61531C.1.pep
MAAIRHEVPFLSPAGGCAASSARAHSGYRAGLLRCSAAAGQAGFFTRLGRLIKEKAKSDVEKLFSGFSKTRENLSVVDELLTYWNLADTDRVLDDLEEALLVSDFGPKISFRIVDTLREEIRDGKLKSGAEIKPXRLTFYSVDGRLQAALKRCILELLTSKGGNSELNLGFRKPAVIMIVGVNGGGKTTSLGKLAYRFKNEGVKVLMAAGDTFRAAARDQLEVWAERTGSEIVIDNDKKAQXLQQAVKRGKREGFDVVLCDTSGRLHTNYGLMEELVSCKKXLAKALPGAXNEILLVLDGTTGLN

SEQ ID NO: 327262 - protein, 106 aa, Zea mays
  Clone ID: MRT4577_61532C.1.pep
KKRSNSNRRVVILLLQSWKKTRVSQGEYTTCSLISFIYMYRSSFRWCHFSTIWFNNTQGNRVVDRVDQISCIDLRLRGGRMKGYINKLVYVSVPVKSTQGCLPASA

SEQ ID NO: 327263 - protein, 86 aa, Zea mays
  unsure (1)..(86): unsure at all Xaa locations
  Clone ID: MRT4577_61533C.1.pep
CVGVTGFILTKLDGTARGGCVVGSLLLRKQTXQWQSLLSDLIFVAWPVAXSVVDELGIPVKFIGVGEGMEDLQPFDAEAFVEAIFP

SEQ ID NO: 327264 - protein, 94 aa, Zea mays
  Clone ID: MRT4577_61534C.1.pep
HNFYPITRYFIHYTTIFINPSWPISPAKIHKFSLIPISTFCFFPVLVTTPFVFPRSQSWDLTYLPLLKTPTCTSNIFRPLLTFFSFNNRTILRG

SEQ ID NO: 327265 - protein, 96 aa, Zea mays
  Clone ID: MRT4577_61535C.1.pep
MQFAKIASVLAMAAAAVGAPAPGNYEVEPRTGGSNNGNNQPACSAQSSNVCCNGLGCLVQILGAGCSTKSYCCQSDAPLAVGALVNVNALNCVQVL

SEQ ID NO: 327266 - protein, 75 aa, Zea mays
  unsure (1)..(75): unsure at all Xaa locations
  Clone ID: MRT4577_61536C.1.pep
GPKKSPAQPPRNRSGQLKFNLLGTSATAPFIWALLIWFRPRGQPPPTEXGAGGIKKKKCLSQPAVQKLQLSWTVT

SEQ ID NO: 327267 - protein, 122 aa, Zea mays
  unsure (1)..(122): unsure at all Xaa locations
  Clone ID: MRT4577_61537C.1.pep
RVRFFVRRVGPGLFAAAPPRGGGRGGLGAPLSSGAAARXFSFLVVVVGGSGSGLXCWPFSVGEPFASAWGSWVLLRGSFPAAGSPVSVFSLSWRPPFXRPFGVGRFGACSLRSVGSPLLFSF

SEQ ID NO: 327268 - protein, 82 aa, Zea mays
  Clone ID: MRT4577_61538C.1.pep
ARTSPLFNFKNGQSQSFALKPKHLEHFSSRFTKPRNESPLFLFVTLQPRGARRGLKPFCPFFPPRAVFPWAFLRPPWRVWPK

SEQ ID NO: 327269 - protein, 230 aa, Zea mays
  unsure (1)..(230): unsure at all Xaa locations
  Clone ID: MRT4577_61539C.1.pep
MQRQEESGEDIVIVGAGLAGLAAALGLHRKGVRSLVLESSPALRASGFAFATWPNAFRALDALGVGDEIRKLHLHIEGLRVMSASTGEIAKKVDFRDEFRCVRRDVLLQVLAAELPTGTIRYSSRIVSIDDGDDDGAKILHLADGSTLRARVLVGCDGINSVVARWLGLAKPSHSGRSATRGLARYPDGHGFPPKFLQLFGNGFRFGFXPCNDTXVYWFYTGLLPTGWCR

SEQ ID NO: 327270 - protein, 95 aa, Zea mays
  Clone ID: MRT4577_6153C.1.pep
MATNPGLFTEWPWKKLGNFKVAPGTGPVSVPCVRTSMAQSGGEGEGKLATRLLLTGGVPCHGNLGRMVYGHVRHAVSEHACTHGLAIHTCMHRQP

SEQ ID NO: 327271 - protein, 268 aa, Zea mays
  unsure (1)..(268): unsure at all Xaa locations
  Clone ID: MRT4577_61540C.1.pep
GFSTHFGTYEAARWYLRHELXXIRKCLXKTQGXYELRLVGHSLGGASAALLAIMLRKKSKEELGFSPDIISAVGFGTPPCISKEAAESCASYVSTVVLQDDIIPRLSAASLARLRNEILKTDWXSVLEKEDLKHIVDIVTNAKLVVSSIQDVARKLGDYAKIVSPSTNSGVTKDPTNSTEMATSISRNDVFVPEDLFLPGTLYYLQRDIEDINDVEEESYTLWKGDPGENFQRILLSGNLISDHRCESIYYALREVLKTLPPPRTLDE

SEQ ID NO: 327272 - protein, 64 aa, Zea mays
  Clone ID: MRT4577_61541C.1.pep
RLESPVAQDLQFFVGESMKDDASVVFAYYKDGATNPTFLYFSQTNPFEFNSTRTTIVVGYNRCT

SEQ ID NO: 327273 - protein, 74 aa, Zea mays
  Clone ID: MRT4577_61542C.1.pep
QHIRILVHSSRIVFHLYPVLRSTTSLSSILGQTYHFRRLTLNRLILAYSIASHLFLSGIHKTFHPVSFFGYRLY

SEQ ID NO: 327274 - protein, 97 aa, Zea mays
  Clone ID: MRT4577_61543C.1.pep
HQVACRAVSPEIMGAGCCSQQIGAIGRPVIAALAVGVLGRDRIAVIELGPDDLICRTMATIRIRECSITIREVLHLSALTHQPHVIISVSAGNLHLY

SEQ ID NO: 327275 - protein, 113 aa, Zea mays
  Clone ID: MRT4577_61544C.1.pep
PVLGSWRRQNHQVLYHASLVLIFQVAIHWSPFRLRAVSTAAMSSKSTLSQASAMATSPTGSSSHMAMDAAAEAGSTRCYIDLLYTTSVRLWRLAWESRSTSGGVGFGGGLRLG

SEQ ID NO: 327276 - protein, 61 aa, Zea mays
  Clone ID: MRT4577_61545C.1.pep
GAGAGPKSPIKARFLCDLGTQHRGTFVRTLSYLFLEEITCDHRNMIKDHMLIIMLLLLYII

SEQ ID NO: 327277 - protein, 54 aa, Zea mays
  Clone ID: MRT4577_61546C.1.pep
ILSTRVGSILTFIKIIHRIHVVIRLQILATFGQPVCVPAPVSSVSTFTVLSKAR

SEQ ID NO: 327278 - protein, 38 aa, Zea mays
  Clone ID: MRT4577_61547C.1.pep
MAAVMALTVLRSRITRWPQWACEGPAPYCAVRRSVFGF

SEQ ID NO: 327279 - protein, 130 aa, Zea mays
  unsure (1)..(130): unsure at all Xaa locations
  Clone ID: MRT4577_61548C.1.pep
MSGDRLPTVERRRGIRRLLLHPRGEASSSSPPPPAPAPEEGRRKGFATAALRGLGCTSASASQAYAPGEAAAAAAVRSSADWQGRRRRRGRDRRKERGGGGGGGVGFVTGGIGAEVWXHPGIPSRSKRQF

SEQ ID NO: 327280 - protein, 522 aa, Zea mays
  Clone ID: MRT4577_61549C.1.pep
MARGDGGQLELSAGVRGTGGAAAAAAADHVAPISLGRLILAGMVAGGVQYGWALQLSLLTPYVQTLGLSHALTSFMWLCGPIAGLVVQPLVGLYSDRCTARWGRRRPFILIGCMLICLAVIVVGFSSDIGAALGDTKEHCSLYHGPRWHAAIVYVLGFWLLDFSNNTVQGPARAMMADLCGHHGPSAANSIFCSWMALGNILGYSSGSTNNWHKWFPFLLTNACCEACANLKGAFLVAVVFLVMCLTITLFFAKEVPYRGNQNLPTKANGEVETEPSGPLAVLKGFKNLPTGMPSVLLVTGLTWLSWFPFILYDTDWMGREIYHGDPKGSNAQISAFDEGVRVGSFGLLLNSIVLGFSSFLIEPMCRKVGPRVVWVTSNFMVCVAMAATALISFWSLKDYHGYVQDAITASTSIKAVCLVLFAFLGVPLAILYSVPFAVTAQLAATKGGGQGLCTGVLNISIVIPQVIIALGAGPWDALFGKGNIPAFGVASGFALIGGVVGVFLLPKISKRQFRAVSAGGH

SEQ ID NO: 327281 - protein, 431 aa, Zea mays
  unsure (1)..(431): unsure at all Xaa locations
  Clone ID: MRT4577_6154C.1.pep
MARLADLQKKIDEAAEEVRHLTQDDHDRRPQHRELRQEGSFNEDEWYDDFNHGSFTFDDASPLAAELQAIPWPQSYKPPQLPMYDGHSDPKQFLMSYEATISSYGGNAAVMAKSFVMAVRNVAQTWYSSLRPGTITSWQKLKDMLVTSFQGFQTKPVTTQALFQCTQDHEEYLQAYVRRFLRLRAQAPTVPNEIVIEAMIKGLRPGPTAQYFARKPPHSREALLQKMDEYIRADNDFRQRREVAYKFSEMTRGFRERLHPRHVRSIHNSNTSDDRASNAQHNHHSSQTSSMQXIWPLAPKGRGAMNFGERFGNHPRKIYCLFCGEDKGHTTRMCHVTIQKQKEIAEAAAQQSQPKQVMHTASYHSPYIPEYVGNHPAASIASASQSQASWQQPPPPPPIQRGQQPEGSQHTNLQWDFREESEARTVNSTVP

SEQ ID NO: 327282 - protein, 313 aa, Zea mays
  Clone ID: MRT4577_61550C.1.pep
MLLHHRLLPRLLLVPSTHTSTLLCPSRLPRRLSLSPRFYALPHLAAPQTVDHSDDEGAPQGEGQIKLPLDHLFVPPGATMDAGDQEAVSARVLKGSNIVLGPYARGDAQVVNADFVKSSVRPDDCPRDGLPEFALVGRSNVGKSSLLNSLVRRKRLALTSKKPGKTQCINHFKVNDSWYLVDLPGYGYASAPQEARTNWDEFTRNYFLSRENLVSVFLLIDASIPAKKIDLDYASWLGQNKVPMTLVFTKCDKRKKKKNGGRKPEENVETFQGLIREYFEAAPPWIMTSSVTNQGRDEILLHMSQLRNYWLKH

SEQ ID NO: 327283 - protein, 134 aa, Zea mays
  Clone ID: MRT4577_61551C.1.pep
NGIVHRCHVLKPKISNFSFSSKGPTKFIFFFRSPVVELKRQICSCCPLYVKNCSYPCNVRVCFCFGALYLRFVGLNVCGPQQPPFGFRNVTKCNVNGYGTDSPPEKKKKKKKKKKKKKKKKKKKKKKKKKKPPP

SEQ ID NO: 327284 - protein, 86 aa, Zea mays
  unsure (1)..(86): unsure at all Xaa locations
  Clone ID: MRT4577_61552C.1.pep
FPGGPPAQQWTAGSGVPFLAHPSRCDRASWAGGPSTFFCWGFSLHEWHLCPLFDYGSLPCACACPSSRFNKNGPGLRFVXGEXIGG

SEQ ID NO: 327285 - protein, 75 aa, Zea mays
  unsure (1)..(75): unsure at all Xaa locations
  Clone ID: MRT4577_61553C.1.pep
WSPVFLKFLQKRGYSPWFFKWGPLKFFRGFFVKKILNPPPRKKTPLPRKPIKNKGFLSPCEKKKKKKIPKKENPX

SEQ ID NO: 327286 - protein, 81 aa, Zea mays
  unsure (1)..(81): unsure at all Xaa locations
  Clone ID: MRT4577_61554C.1.pep
GEAKRGGPGRIWQKQRRGGSWPPSPGGGSGPKKGSPPPFGKRGGGPPCKGRKPRGGPGPKXLGDRGKPKLPGGKKMSKRKP

SEQ ID NO: 327287 - protein, 79 aa, Zea mays
  Clone ID: MRT4577_61555C.1.pep
MEADSGKLFVGGISWETDEDRLREYFGRFGEVTEAVIMRDRSTGRARGFGFVVFADATVAERVTIEKHMIDGRMAMHMK

SEQ ID NO: 327288 - protein, 470 aa, Zea mays
  Clone ID: MRT4577_61556C.1.pep
MEADSGKLFVGGISWETDEDRLREYFGRFGDVTEAVIMRDRNTGRARGFGFVVFADSGIAERVTMEKHMIDGRMVEAKKAVPRDDQSIASKNNSSIGSPGPGRTRKIFVGGLASNVTEVEFRRYFEQFGVITDVVVMYDHNTQRPRGFGFITYDSEDAVDKALHKNFHELNGKMVEVKRAVPKEQSPGPIARSPAGGQNYAMSRVHNFLNGFNQGYNPNPLGGYGMRVDARYGLLAGARNGFSSFGPGYGMGMSVEGGMRGYFGASSGFVNSSNGRQIGSYFNGSSNRLGSPIGYVGLNDDSGSILSSMSRNVWGNGNLNYIGNHTNMNSFPQPGSGGGISGDEISWGSLTSAHGMSNISSLGSGNLGRGTGDNNFGLPSGNYVRSNSTGTIGEPFSASANAYESNNPGAYGSSSIYGDSTWRFNSSEVDMPPFGHDLGNDDPDIKSEISASYMGNYTVNNNQTSRGITS

SEQ ID NO: 327289 - protein, 91 aa, Zea mays
  Clone ID: MRT4577_61557C.1.pep
LVSHFLHQPMHMNRTIQVHMAAALFMVTQPGGSTHLRLICLLLVMILEMMIQISNQKYQQAIWATILLITIRQAEVSLPRESTIIFIYDLG

SEQ ID NO: 327290 - protein, 165 aa, Zea mays
  unsure (1)..(165): unsure at all Xaa locations
  Clone ID: MRT4577_61558C.1.pep
PPPGSPSXPRGDPPGGQPLLDKEVQEKPAPPANWKKRMAKKPVPPAAPXPPPTQXKPGFTPPPTGXKKPPGXIPSPRGPPPPDPQESPPGTPPSPPHPPPGSPTCPHXVKTKGGPPQFQKPPXYLPGKKPRWSSSKHGPQCVGLQPPPPPPGIKTENKKKNKSPQ

SEQ ID NO: 327291 - protein, 470 aa, Zea mays
  Clone ID: MRT4577_61559C.1.pep
MEADSGKLFVGGISWETDEDRLRAYFGRFGEVTEAVIMRDRNTGRARGFGFVVFADSGIAERVTLDKHMIDGRMVEAKKAVPRDDQSIASKNNSSIGSPGPGRTRKIFVGGLASNVTEVDFRRYFEQFGVITDVVVMYDHNTQRPRGFGFITYDSEDAVDKALHKSFHELNGKMVEVKRAVPKEQSPGPIARSPAGGQNYAMSRVHNFLNGFNQGYNPNPLGGYGMRVDGRYGLLSGARNGFSSFGPGYGMGMNVEGGMSGYFGASSGFVNSSNGRQIGSYFNGSSNRLGSPIGYVGLNDDSGSILSSMSRNVWGNGNLNYIGNHTNMNSFPPPGSGGGISGDEISWGSLTSAHGMGNISSLGSGNLGRGTGDNNFGLPSGNYVRSNSTGTIGEPFSASANAYESNNPGAYGSSSIYGDSTWRFNSSEVDMPPFGHDLGNVDPDIKSEISASYMGNYTVNNNQTSRGITS

SEQ ID NO: 327292 - protein, 48 aa, Zea mays
  Clone ID: MRT4577_6155C.1.pep
PSHSGSWETNPQDSIVWFTWKSMPRYHRYGLRCQNIGVERLGLRCTFR

SEQ ID NO: 327293 - protein, 916 aa, Zea mays
  unsure (1)..(916): unsure at all Xaa locations
  Clone ID: MRT4577_61560C.1.pep
MTEKVKLTEETKLFEEKKVADPYIARFIESMAKTNTEKITKEILEGLSEDTGDSDNYDVESGDEDSEDRPWRPSHAVFGKSTIKQSHLENMRGRYFRDMSIVRAGGDKNIPAPEENEVVIYQSFFKAGLRFPLSKFVVEVLKIYQIFLHQITPEAIMRMGIFVWAIRSQGLEPSAKXFCSMHELLYETKATGKEQYHNNFGCYGFIACPNASHPVPTFRKRWPGAWMEEWFYVKNDLKAMEDIKEIIQRPIWSRFGLRRSKVEIDDAVEACQRAFNTVCSFIGTRDLIQEHIAFRVWPLVENWEIPKETTADSSEGGLIRLKYTFRFGEKFEEPNDDWLKCIEATSDELLGVYSKAEDNALSAAFGXRKKKRLNRVFDAIGFVYPDYGLPLRGQGKKRKVAASVIIAEPKGKKIKVLTHRSCYIEPTVIPEFGKGTSSAAEAKETVPIVQSTEEPTMVPMMPTVESAKAKDDKAEGPQIEEIMKISESLSPSIEAKLPKVQKASTVTXEEKDGEHARCCARXTKALSPAPKKKIAEAAKVQAEVETGQVEVEATKTRAEAEATKTQAEAEAGPSAPASAKPTTPKEEMTEQIAPKKIETSAPEALIEDIDYIIRHASGKKLSEEEILEARHYARKLKYPKGTLVFNGSNEDDFLCCLPDNKEISVCREIGRSMGFTKLEDGLSILSKDDLADSLAYNXKGIKVNFXLRMKYLFVILNSFLLLQGLILSNALRAXKNIEDEGYTMALNNLRSDVIELRNEGLEKDXLNFIGKQCEGXKLVSKLRPKPKRLKLKTFGNSWPKLRKTAHSRKLIKKLANIGKIIWRKMLKNFXSRERCFEKSLDCVKKIKGSFAKVGAYSAKXKTSYEATPKAXEWISGEAETFKEILSDRGDVCAFSGARGISAILEKAGCDHIKTLA

SEQ ID NO: 327294 - protein, 469 aa, Zea mays
  Clone ID: MRT4577_61561C.1.pep
METADYSGKLFVGGISWETDEDRLREYFGRFGEVTEAVIMRDRSTGRARGFGFVVFADATVAERVTIEKHMIDGRMVEAKKAVPRDDHSIVSKSNTSSIGSPGPGRTRKIFVGGLPSNVTEADFRGYFEQFGVITDVVVMYDHNTQRPRGFGFITYDSEDAVDKALHKSFHELNGKMVEVKKAVPKEQSPGPVARSPAGVGQNYAMNRVHSFLNDFNQGYNPNPIGGYGMRVDGRFGQLSGARNGLSSFGPGYGMGMNVEGGMSGTFGANSGFISNSNGRQMGSYFNGSSNRLSSSIGYLGYDSGSMLSSMSRNFNAGVNYPINPTNMSAFAALGNGGGVNYMGLPSIAPELAQLGNISSLGSGNFSRGAGVNNLSLPSGSYGRSNSTGTIGEPFSASGNAYEVNNPDTYGNSSIYGGTSWRFPSSEVDVPSFSHDLGNVDPNMKSDISANYMGNYSVSNNQPSRGITS

SEQ ID NO: 327295 - protein, 59 aa, Zea mays
  unsure (1)..(59): unsure at all Xaa locations
  Clone ID: MRT4577_61562C.1.pep
MMKWGAQHQXPADSYYDVPSYCTDGVPKSKFKIKAGKTLTARKWXAAFSRNGCLDIASV

SEQ ID NO: 327296 - protein, 63 aa, Zea mays
  Clone ID: MRT4577_61563C.1.pep
IYWTDELIFRRPASLLFFFLPQANSTFLTEKGNALTSSTTLTQEHHRPRRIPSTIYMQSQERI

SEQ ID NO: 327297 - protein, 108 aa, Zea mays
  unsure (1)..(108): unsure at all Xaa locations
  Clone ID: MRT4577_61564C.1.pep
GGAQRPSRPSSTTGYTFHRRKSPSHARRRSTLPGGPRAGEEHFYGAKVHPKTLSLKHTGPVELSMANAGPYTRAFDTFIXTGDTPLMDGLHEEFGLYAKGMAGNKVIE

SEQ ID NO: 327298 - protein, 94 aa, Zea mays
  Clone ID: MRT4577_61565C.1.pep
DARIRRQMGYPPASSFRRCCLLTLHSRLADAPAPMSCPLPPAPSHLSLASSLDTHISAIWDGLLPRSTILVAQHTTDDSTVYKLHPSGTNQPTF

SEQ ID NO: 327299 - protein, 39 aa, Zea mays
  Clone ID: MRT4577_61566C.1.pep
FSTDTLAEELLASEFTKLSYQLCIQKQLFIIVITHEYSM

SEQ ID NO: 327300 - protein, 128 aa, Zea mays
  Clone ID: MRT4577_61567C.1.pep
FSHRRYYGVQIRDHVRFIFVQRTKAVKPVVVHFHEKAGHVPEQASELHVQDVEARVETVRLTPSRMRRKSTMFATIVGIITLETGYCSPFRPRGVQPVEHRVDTPALGAEGLCRHPAGTLVVVGAGQP

SEQ ID NO: 327301 - protein, 67 aa, Zea mays
  Clone ID: MRT4577_61568C.1.pep
YATMNKHITDKLACIGLHRSLIICQHSTFFSSAGNRYHRPWRMIDTSSIGRSVVGAARASERPHQAP

SEQ ID NO: 327302 - protein, 76 aa, Zea mays
  Clone ID: MRT4577_61569C.1.pep
QWCINSVYTLGRSPAYHRRIWRSAVSARGVGSRTSAWTVLMSLDMMIHPVGRNSKGHVHRREESRSRYPVTIIVGS

SEQ ID NO: 327303 - protein, 84 aa, Zea mays
  Clone ID: MRT4577_6156C.1.pep
QVGFELPFDQSRHVIHVLSLIMPSNIGKKGSTSRSSKQQFDIQCFFVVQSYVYSDTSGPATCRWRLIRGQPFHHSYSYMSAHVS

SEQ ID NO: 327304 - protein, 179 aa, Zea mays
  unsure (1)..(179): unsure at all Xaa locations
  Clone ID: MRT4577_61570C.1.pep
VRPHVQTRRLRDTVDNFFPFATSQGQEGLEDIPRWDILWANRELTGVGAVPAGAGRGGRVSDKLLPTXATRPLAGPNLWTPDWGRNTRMVDARGGWSRLQXAGNRREQRLLNTRYYPTDAXRYNTEPQRCGXAMVGVRVXLSEHNKDTNAIFSLEMDEKDMNIITEVSKRGRXLIDIIG

SEQ ID NO: 327305 - protein, 214 aa, Zea mays
  Clone ID: MRT4577_61571C.1.pep
GYLEAGRERHRGDRDKGVNAVTNFDLRSFGTWLKPSAPPAAFNREALVAQAAPAEQLQLHHHPAETAQMLPRGNPFLLDHMSSSGGGGGQEASMSTVSPGGMRRRGSSTALSLLLKSSMFRQLVEKNSDAEEGAGDGEAAAAGGSGGHPGPGDAYEYHNFFQGEAPPDMCDLFSSGGGGGGHARVAGFHGDIAACYDGEGLDGWSGFGNMPSLQ

SEQ ID NO: 327306 - protein, 98 aa, Zea mays
  Clone ID: MRT4577_61572C.1.pep
THASSKAGSPARAPVDSPNARSPAAPAKALESAATRTAPANAPQAAFISAVAAAPSSSSSMKSGPPAAPISAASTPSSSIDEEFSPSPSASNRPSCLP

SEQ ID NO: 327307 - protein, 111 aa, Zea mays
  Clone ID: MRT4577_61573C.1.pep
FFSRGNNAEYAGFLVQLIIRFEKKKKKKKKKKKKKKKKKKKKKKKKKKKKKKKKKSSFALFPGFKGDFQHTGGRFWGIRAGSQAWGNHGHRCFLGEIVFRSHFHTKYEPGG

SEQ ID NO: 327308 - protein, 78 aa, Zea mays
  Clone ID: MRT4577_61574C.1.pep
GHFGEKMEKVVSGEKLESAQNSTKHTARKHKLKSLGCLGRGLIHINWVGLKAPFPVGKPVGPAALRNRPTRGKRGFAN

SEQ ID NO: 327309 - protein, 79 aa, Zea mays
  Clone ID: MRT4577_61575C.1.pep
CQTMHMHSMWHPACLGRWACQGRWSTASHSLCRSSGQRVQGRVVSRRVREATGESKKPKKVSYPGNHGCRFEVKERRLV

SEQ ID NO: 327310 - protein, 53 aa, Zea mays
  Clone ID: MRT4577_61576C.1.pep
NLTPPLTKPLLPYPILPFPPSLSIPKINYPILPFPKHTPHNYNTSSSPNHHNF

SEQ ID NO: 327311 - protein, 80 aa, Zea mays
  Clone ID: MRT4577_61577C.1.pep
GLFKVYFQKLSCPIPTNFGKTSTKELIVGNKPGLGGSPIHQIAKPPKENQERQPVPPFGRNWTVKRKCWFSGIMEGLGGF

SEQ ID NO: 327312 - protein, 66 aa, Zea mays
  Clone ID: MRT4577_61578C.1.pep
VPTQQAFRQHTRKAICHSVNYFVHSLLLSVSQSVPLTNMSFHDAKGVHCHLGTDRVSPCERMNEAS

SEQ ID NO: 327313 - protein, 145 aa, Zea mays
  unsure (1)..(145): unsure at all Xaa locations
  Clone ID: MRT4577_61579C.1.pep
SARALLESVVEAVNGCLVEAPNYGLRSPEKELRAHDVIQAIRKCSSTGGPKGRFWVLDPVDGTLGFVRGDQYAIALALIEDGEVILGVLGCPNYPMKKEWLNYHQKYYRLMSKAAPPPLGSWHXGCVMYAXEGCGQAWMXPLVHD

SEQ ID NO: 327314 - protein, 89 aa, Zea mays
  Clone ID: MRT4577_6157C.1.pep
VGKQPIDHSSERERRTGQRVLPSLRSEPRQNALVSPGAAHTGFNVGIHKSPLLSRTNVHGRGGNNQHALKFFVVSTGLEDMETRALVTT

SEQ ID NO: 327315 - protein, 59 aa, Zea mays
  Clone ID: MRT4577_61580C.1.pep
AKREAKFPEKGRSRVIRLQHRQDMRTHNCSSKMSIYASLYQANREAEFPESILQSRPAG

SEQ ID NO: 327316 - protein, 92 aa, Zea mays
  Clone ID: MRT4577_61581C.1.pep
VLLGFGDLFLVWSLPRNKFYFFGERKEYVFNKYFSNTHVVGPGSDTLTNHCALTTGSRHILTKKKRSGLEEDGPVVNIGLCPNNREVVLAPP

SEQ ID NO: 327317 - protein, 95 aa, Zea mays
  Clone ID: MRT4577_61582C.1.pep
RVLLVSHPIMEGHRLGVRRTGGEGERRLERSGRRPPLMPSLRASLLSAATARRHTACRARLQGGSGSMERRRYDRRCKMGDQDNGGGCAFAGAVK

SEQ ID NO: 327318 - protein, 50 aa, Zea mays
  Clone ID: MRT4577_61583C.1.pep
YSSPLYFGTSLACENQTSFLLGNSLPKAAVPRAIMSPRCGVHARPVPLKR

SEQ ID NO: 327319 - protein, 90 aa, Zea mays
  Clone ID: MRT4577_61584C.1.pep
MVIGLPTDVKHVAHIGWDGSTSTTSSLRAWNRAAPTPPASSSSSAPAAAAPKEQEQYPLPLPALSMQQFELAMAAQAGGGGGGAAHRRHS

SEQ ID NO: 327320 - protein, 72 aa, Zea mays
  Clone ID: MRT4577_61585C.1.pep
LLQGDLHHLWRDKILPVKQQNTKEVLLCCPVVLCYLGRGQQYPRSESSRTTRSHLLSGSANNITCSVLATNK

SEQ ID NO: 327321 - protein, 50 aa, Zea mays
  Clone ID: MRT4577_61586C.1.pep
LKILYIVCGHSHEGSGFTVDVTETRLSDIVTFGCHDAGLQFSPSTSLHYC

SEQ ID NO: 327322 - protein, 243 aa, Zea mays
  Clone ID: MRT4577_61587C.1.pep
MNELDLNTAALDPDHYATGLRVLLQKELRNSDVSQLGRIVLPKKEAESYLPILMAKDGKSLCMHDLLNSQLWTFKYRYWFNNKSRMYVLENTGDYVKAHDLQQGDFIVIYKDDENNRFVIGAKKAGDEQTATVPQVHEHMHISAALPAPQAFHDYAGPVAAEAGMLAIVPQGDEIFDGILNSLPEIPVANVRYSDFFDPFGDSMDMANPLSSSNNPSVNLATHFHDERIGSCSFPYPKSGPQM

SEQ ID NO: 327323 - protein, 102 aa, Zea mays
  Clone ID: MRT4577_61588C.1.pep
GDWLTLNYTTEYDRPAPRRALLFRPVSVGSDRNARTWYGFPSEASSFLYPSSGGLGRRLVGGCGMRGSARLQGRQGMDRDKDKEMHAGHRRLHGRRSVRPGR

SEQ ID NO: 327324 - protein, 65 aa, Zea mays
  Clone ID: MRT4577_61589C.1.pep
VPGSVGERVGEPVGEVFPTAHVLKLKIVAKKGWGGVPPTPGPPYWLFGPPIGKVTRVSPLGGHPK

SEQ ID NO: 327325 - protein, 70 aa, Zea mays
  unsure (1)..(70): unsure at all Xaa locations
  Clone ID: MRT4577_6158C.1.pep
FSLPXGVLFGVVXVFXXKXGWPGRSPLFGEGQSRAPLSGVPLFAISNGKNLKLLRILSLLGGVYPPKKKN

SEQ ID NO: 327326 - protein, 305 aa, Zea mays
  Clone ID: MRT4577_61590C.1.pep
MGIRSQAGVPLAGVGYAALADHLHAPSWSSKFRPHLPEKYDAAGGNTAVMATYFHVALSRPARTWLMNLAPGSIYSWEELYARFVANFASAYQQHGVEAHLHAVRQEPGETLPTFISRFTKGVRDEKMLEKLATHDVETVPTLFALADKCARVAEGRAWHSAPQTGAAQSGGSGAVPRDGRKKKKKDRDYQKSRSTTLVVAAATGGRGDRNKRPRLQRGNSGSCPVHPNGRNSAAECCDIIDLAKRVSERREQSSKDGSPPRRRSGKEKVDDGEVATAERDLGYESPEGDLKDVFAGDSHSGGDN

SEQ ID NO: 327327 - protein, 350 aa, Zea mays
  Clone ID: MRT4577_61591C.1.pep
MAHSTSTRSRSRSSRRQHEVSASVRSPLVRGAQTNDLRAELNRRRAGEDARISLERAHECRQNIEGRNLDQDFAVVAPQAPMGTRSQAGVPLADVGCATLVDHLRAASWPPKFRPHLPEKYDETSNPSEFLQVYVTAITAAGGNTAVMATYLHVALSGPARTWLMNLAPGSIYSWEELCAQFVVNFASAYQQHGVEAHLHAVRKEPRETLRTFISRFTKVRGTIPHISDASIITAFRQEVRDKKMLEKLATHDVETVPTLFALADKCARAAEGRAWHSAPQAGATQSGGSGAVPRDDGNPGSGPSPTASTKPRRALQLSLSWKGPFKVTGIRRPEGDYLAMTEGVPLPGH

SEQ ID NO: 327328 - protein, 78 aa, Zea mays
  Clone ID: MRT4577_61592C.1.pep
NSAERAAELLRITHLDLMSVSLVFFSVGGFFRLVGFRSPPPAGVGKMGCMVRVVGGKKIGFPWAHSAPRPSAHARWTS

SEQ ID NO: 327329 - protein, 53 aa, Zea mays
  Clone ID: MRT4577_61593C.1.pep
TTADVNDTQPCSMGLHISARGAHDVGGLRAGGLRTPTSPCDARSTTGHATAEQ

SEQ ID NO: 327330 - protein, 113 aa, Zea mays
  Clone ID: MRT4577_61594C.1.pep
QKTGPQSQTPEKKKILGGPGTTKAPKTTLRGGITQQTGGNPRPKIWEPDLFNSKILRGPQSQAYIAPKSPSLVPKLNFLAFLGPPKKGPGAATGPVGFLGPGANLSSLKEIFL

SEQ ID NO: 327331 - protein, 108 aa, Zea mays
  unsure (1)..(108): unsure at all Xaa locations
  Clone ID: MRT4577_61595C.1.pep
MAPANNKRIGNVKKGGTKKTVYPFYKKDWYDIKAPSVFSVRNIGKTLLYITQGTKIASDGLKHKIFEVCLACHYDDXDQAYTNNRLRDEYVHCMNVLTNFXWCMNFTT

SEQ ID NO: 327332 - protein, 167 aa, Zea mays
  Clone ID: MRT4577_61596C.1.pep
GIEGAIALGLGHGFVSSGLFICVGGVLYDRSHTRLITYYRGIAQIMPLFSVLFFILCLGNAGTPLTLNFIGEFMCLYGGFERMPILGALASSSIVFSAAYTMFMFNRIVFGGSLSKYFLNSISDVNKREFTILLTLVVFTVVLGIYPAPILDGLNYSVSTLIYAYNF

SEQ ID NO: 327333 - protein, 42 aa, Zea mays
  Clone ID: MRT4577_61597C.1.pep
AYEFNHQIEVQVAFRRIICAASLSVYRWVTSVRQRCKLHWLS

SEQ ID NO: 327334 - protein, 70 aa, Zea mays
  Clone ID: MRT4577_61598C.1.pep
HKAGSEIHRNEVLLDRNKDWNNIINTNHQGTQDILTVITINFVSYPHSWRENPFRAKALHYIIWHSSYSV

SEQ ID NO: 327335 - protein, 98 aa, Zea mays
  Clone ID: MRT4577_61599C.1.pep
KNNRTRALEAKNQRLALTLDQILCSWGNHALTNAMLQSYVIKSGLGVFLAKTNSSYGPCCALNRVETWLNYSGPRLVGRDFGRNFSCKMFSIKGCRWL

SEQ ID NO: 327336 - protein, 507 aa, Zea mays
  Clone ID: MRT4577_6159C.1.pep
MRPPEVAVAALLLVAAAAVAAAAAESATPLPAALRLQRAVPHQGVPLEELRRRDAARHRVSRRRLLGGVAGVVDFPVEGSANPYMVGLYFTRVKLGNPAKEFFVQIDTGSDILWVTCSPCTGCPTSSGLNIQLESFNPDSSSTASRITCSDDRCTAGFQTGEAICQTSNSQSSPCGYTFTYGDGSGTSGYYVSDTMFFETVMGNEQTANSSASIVFGCSNSQSGDLTKADRAVDGIFGFGQHQLSVISQLNSLGVSPKVFSHCLKGSDNGGGILVLGEIVEPGLVYTPLVPSQPHYNLNLESIAVNGQKLPIDSSLFTTSNTQGTIVDSGTTLAYLADGAYDPFVSAIAAAVSPSVRSLVSKGSQCFITSSSVDSSFPTVTLYFMGGVAMSVKPENYLLQQASVDNSVLWCIGWQRNQGQEITILGDLVLKDKIFVYDLANMRMGWADYDCSMSVNVTTSSGKNQYVNTGQFDVNGSARRASYKSLIPAGIVTMLVHMLIFGTGSRR

SEQ ID NO: 327337 - protein, 176 aa, Zea mays
  unsure (1)..(176): unsure at all Xaa locations
  Clone ID: MRT4577_615C.1.pep
TLVPRLKKPNMTLIFSVALYCGTAXMGTKVLSATFNGTNKIRAYAHCAKRSGRVXLLLINLDGNSTNRIHVTSQGAQAQSARRERAXTPGRFPFPALGGAAELLATREEYHLAPKDGDLQSQQVLLNGHVLATDADGDIPELEPVRVDGTQPVTVXVGPYSIVFAHIPGFYAPACS

SEQ ID NO: 327338 - protein, 144 aa, Zea mays
  unsure (1)..(144): unsure at all Xaa locations
  Clone ID: MRT4577_61600C.1.pep
QGAXEADEDQXXKSPXAEXSEAERDNEXXRXPXXXKXNPWXLXGXXXXXXPXEXKKQXRKXXXXXXPRKSKXPQAQEXXAAXAKAQQXXXXPQERGXXXDQXTXAKEEXRAKRKKEPKKDXAXKKKXXXGEXKXEEQXERGGQQ

SEQ ID NO: 327339 - protein, 623 aa, Zea mays
  Clone ID: MRT4577_61601C.1.pep
MGISSALPCSSLLMGGALLLASVVVQAQTHKKGGAVVIILTMGARRGLRRGQAAVAAVFSACPFLALAVLLALPELAAGDTHYYTFNVQMTNVTRLCVTKSIPTVNGEFPGPKLVVREGDRLVVKVHNHINYNVSFHWHGVRQLRNGWADGPSYITQCPIQGGQSYVYDFTVTGQRGTLWWHAHFSWLRVHLYGPLVILPKRGEGYPFPRPYKEVPVLFGEWFNADTEAVINQALQTGAGPNVSDAYTFNGLPGPTYNCSSKDTYKLRVKPGRTYMLRLINSALNDELFFGIANHTLTVVEADASYVKPFTVSTLVISPGQTMNVLLTTAPSPASPAYAMAIAPYTNTQGTFDNTTAAAVLEYAPTTTRNNTLPPLPALPLYNDTGAVSNFSRNFRSLNSARYPARVPVAVDRHLLFTVGLGTDPCPYTNQTCQGPNGTKFAASVNNNSFFRPRTALLEAHYRRRYAGVLLADFPTAPPHPFNYTGTPPNNTFVQHGTRVVPLRFNASVELVLQGTSIQGAESHPLHLHGYNFFVVGQGFGNFDPVNDPPGYNLADPVERNTISVPTAGWVAVRFLADNPGVWLMHCHFDVHLSWGLSMAWLVNDGPLPNEKMLPPPSDLPKC

SEQ ID NO: 327340 - protein, 108 aa, Zea mays
  Clone ID: MRT4577_61602C.1.pep
VKCAQRRVAAHYLVLQRDPHNHRFTHKVFDHWYIQDLDKAHGLRTCEGSNPYMFPINGVDRCLYPILMSHPAYIVLHSTYNQRLRPFSCSSVLFDYRRSTSYRIFITL

SEQ ID NO: 327341 - protein, 49 aa, Zea mays
  Clone ID: MRT4577_61603C.1.pep
LSVDYAVSASSERIRRVIVCRAGASSCLKEERPPIVGLDPNPDSAVLVR

SEQ ID NO: 327342 - protein, 84 aa, Zea mays
  unsure (1)..(84): unsure at all Xaa locations
  Clone ID: MRT4577_61604C.1.pep
RVCEYGFLSFYQVCFKVVRLIKDRVLEIPADTGSKCAACVGFGRYALYLLLDMVVCVVWLKKKKHVXXFXXGGNKRPKIIIKQP

SEQ ID NO: 327343 - protein, 120 aa, Zea mays
  unsure (1)..(120): unsure at all Xaa locations
  Clone ID: MRT4577_61605C.1.pep
DPRACRGPRAGSNPQLYQLPLCRATAEPTSRPPPPTPPPPLPRTRPXASGSTTTTEGDESVHSAGSPPSLPTFPQQQQQVTPPLPEMASLDFTEAPWDESASLHLNTYPSWDIDWDSILS

SEQ ID NO: 327344 - protein, 205 aa, Zea mays
  Clone ID: MRT4577_61606C.1.pep
MPKVLDHSYDGLHIRGAGSCPNQYIPYLQACLLYFAMFPRGNHVKRGSLIRRWQAEGLEFGGSNQAAENLKALVDRNFVWPLHASLNEHAKTFQPPGVVLNYISRRSQEEEFILRSCPSGELNPNYSRRLCLHPAEEEEGEPQPLVITNGSVPPRLRTLAVSWGQQQASRIAECEQLRVLDLASYNGLQPDQLEEICKKLKLLNI

SEQ ID NO: 327345 - protein, 84 aa, Zea mays
  Clone ID: MRT4577_61607C.1.pep
LEPSRLGGSHRIGACASRSTQRALALACLQSMSRSRWAAPASRGRSSSISIPLGFVRFGRAAWTADSSSSAAPSISSPAWPLAR

SEQ ID NO: 327346 - protein, 105 aa, Zea mays
  Clone ID: MRT4577_61608C.1.pep
GEDSTATVFPIYGQDGNEHQLWDPRLFTNAVHDLYRWKWEWLITSLFSVPALFWRAGWCGPEGIPVTTWNTFGPYFTGVPRRRGAALTLTCVHPPTQSCPDAPTQ

SEQ ID NO: 327347 - protein, 101 aa, Zea mays
  Clone ID: MRT4577_61609C.1.pep
RENGGCSTVSRTGRLGTSLCMRRGADWASSPGVEDCADAVVRLGRRPGRARSGVESLGPVPRCAPRSVVGRLRLQTVRPSSHREESTVDVAGRYRVRTKKQ

SEQ ID NO: 327348 - protein, 129 aa, Zea mays
  unsure (1)..(129): unsure at all Xaa locations
  Clone ID: MRT4577_6160C.1.pep
LCGPLVSDLXLKDKIFVYDLANMRMGWADYDCKPLILLKQSGCSLVLRYRHLSXXFPCHSIGPISXTXYLLAGSMSVNVTTSSGKNQYVNTGQFDVNGSARRASYKSLIPAGIVTMLVHMLIFGTGSRR

SEQ ID NO: 327349 - protein, 98 aa, Zea mays
  Clone ID: MRT4577_61610C.1.pep
NSASCRKWQRRRGNDRSNEDSWMYPRTSHGQQLGFSQNQFTDLLSLREGPGIMQEENGIRLYSGISHFKTLLVRWFHVYTQVLPTKKHQREQLRDIPA

SEQ ID NO: 327350 - protein, 55 aa, Zea mays
  Clone ID: MRT4577_61611C.1.pep
KATKSCTPRIGYLQGIQLDLVAHFSWNPGPCGLGSERCDIIIPGKSPSSSHCGCQ

SEQ ID NO: 327351 - protein, 152 aa, Zea mays
  unsure (1)..(152): unsure at all Xaa locations
  Clone ID: MRT4577_61612C.1.pep
XFFFFFFFFFFFFFFFFFFFFFFGPNPRSKKQQGGQQKREAENPPKKAPQPGHRPIDRAPDKGRTTQKASPTKKRNQAILPRKQPTKQHLPGRGWIRGGRGERNRGGRNSSSSSSNRSRGVQRTGQGIRTREGHNNTPENFLQQEGLDQVQG

SEQ ID NO: 327352 - protein, 117 aa, Zea mays
  Clone ID: MRT4577_61613C.1.pep
HFFFAPVHPSPRKSPSPLCGFELFFPPQKIFFPVTVLCLTKPPPLGPAPPPLLGGGGLLFSGPIFSPPPCPFLGYLPGGARPTPGFVSCLGGGGFFFFYRKGGGPPPYPVPLVCGIY

SEQ ID NO: 327353 - protein, 62 aa, Zea mays
  Clone ID: MRT4577_61614C.1.pep
MAIGGSDPAVRRLGLLLQRPVAVGGFGCVRVRRFRLRAGGAMMRGASPRVVGRLAVRLGRRA

SEQ ID NO: 327354 - protein, 87 aa, Zea mays
  unsure (1)..(87): unsure at all Xaa locations
  Clone ID: MRT4577_61615C.1.pep
EDVNYDIRVHMDEIYDEQVLDLLYEDRSSTKLDIRASMNNGLSNRPDAKICTVQSPADVINVMXIVNXHRASGTTAVCHRSSLSDCI

SEQ ID NO: 327355 - protein, 84 aa, Zea mays
  Clone ID: MRT4577_61616C.1.pep
RRDTHASVLSPRSVSPVQFPSLPAARFADQIPPFHGNHANPVSGCGDCRRAVQRGAPSSGGDGGYRGAAALQVGPAAEVRGLRP

SEQ ID NO: 327356 - protein, 426 aa, Zea mays
  Clone ID: MRT4577_61617C.1.pep
MLEVGQTMATISVWLRATIPNRNSFTAPQYKSCLAPPQPARTATGPSRRSPGNGSWAGAVMGAAGSRLEKALGEQFPEGERYFGLENFGNTCYCNSVLQALYFCVPFRDQLLEYYANNKNTGDVEENMLTCLADLFSQISSQKKKTGVIAPKRFIQRLKKQNEIFRSYMHQDAHEFLNFLLNELVDILEKEHNAARESLQNLSLQKNSNGPIDGQPNGSHKELAVTWVHKCFQGILTNETRCLRCETVTDRDETFFDLSLDIEQNSSLTSCLKNFSSTETLNAEDKFFCDKCCSLQEAQKRMKIKKPPNILVIHLKRFKYIEQLQRYKKLSYRVVFPLELKLLNTVDNSDLEYSLFAVVVHVGSGPNHGHYISLVKSHNHWLFFDDENVEMTDESMVQAFFGSPQEFSGNTDNGYILFYESLAERS

SEQ ID NO: 327357 - protein, 79 aa, Zea mays
  Clone ID: MRT4577_61618C.1.pep
TVGVTWHLEWRGKPFPFSRGCSFYRLLAGSESESEQQPLQIVYGRDCVEPAAKPGDLALVIIRGVTWILERFPSLASRF

SEQ ID NO: 327358 - protein, 66 aa, Zea mays
  unsure (1)..(66): unsure at all Xaa locations
  Clone ID: MRT4577_61619C.1.pep
NKNLGFPLLSSSWFFFFFAVHQPSLGLESIFLHGEVLLPASFPLSVSRESWALSDAAMARVFLGXA

SEQ ID NO: 327359 - protein, 118 aa, Zea mays
  Clone ID: MRT4577_6161C.1.pep
RESLVPQTKGQEDKGPGARAEASPHKPQTTSLPLRTARSCYYAVRSNTDKLARGNRDKMQQFMTITGAREKGALQPLKANDWHLQGALDLYYSAPQVTVGKTRHLEGTVTRCKEPDAL

SEQ ID NO: 327360 - protein, 81 aa, Zea mays
  unsure (1)..(81): unsure at all Xaa locations
  Clone ID: MRT4577_61620C.1.pep
TXEWSPPTKGKGNQTTLMVRLCLLQAIDHKFVYLTVEGVTNSVYMERGKSIRPERPMKSPSKLIPAPLLHQQTLQPRIRKI

SEQ ID NO: 327361 - protein, 60 aa, Zea mays
  Clone ID: MRT4577_61621C.1.pep
AASVSFLRPFWSSLACPLFGLLVRGWLPLSVCALGPLCLAFSSCGQITPPSARLASVKKR

SEQ ID NO: 327362 - protein, 50 aa, Zea mays
  Clone ID: MRT4577_61622C.1.pep
KKKKKKKKKKNKKKKKRGAARFGGPILSSPSLKGNIFFIGQPKLNQRAFF

SEQ ID NO: 327363 - protein, 57 aa, Zea mays
  Clone ID: MRT4577_61623C.1.pep
MYNAPPPRPQDMSYYEHCQKRHEEKGCLYACIFTALCCFCCYETCECCLDCLCCCCD

SEQ ID NO: 327364 - protein, 240 aa, Zea mays
  Clone ID: MRT4577_61624C.1.pep
LDALEPYMSKRTVELHWGKHHQDYVDDLNKQLATSPLYGYTLEDLIKEAYNNGNPLPEYNNAAQVWNNHFFWESMQLEGGGLPEGGVLQQIEKDFGSFTNFREEFIRSALQLLGSGWVWLVLKRNETKLSVVHTQNAIFPLAFGDIICLLVSFFPFMCFLQCLEYKLCNDIPYFLIAVNHQSRLMRACLLLRLQGILWIRRVKSCWRNQRHAYHSNAIHAKISCMLGFHHCPWILLQGNH

SEQ ID NO: 327365 - protein, 63 aa, Zea mays
  unsure (1)..(63): unsure at all Xaa locations
  Clone ID: MRT4577_61625C.1.pep
MAAKGLFFLMLLGLSARAAIRTIFPQCSQAPISXFLSSYLSTAGSSICGKPXILQPYRIQQVI

SEQ ID NO: 327366 - protein, 64 aa, Zea mays
  Clone ID: MRT4577_61626C.1.pep
LRLQHAVGAGTLACRCSGCADAAQGLDITERSASCPQHDLHYQLRPELMIPLAAWPDGLTVLHL

SEQ ID NO: 327367 - protein, 111 aa, Zea mays
  Clone ID: MRT4577_61627C.1.pep
KTVAASPRSICPVSLPPRSLRLVPLQITSSGSHPLLAPSASSLFKSTRSSRPRLRVSLLRISRSGPPAVARANAVAACPLLHQTPACNTLLESNKRWEREKKEDALGSPTP

SEQ ID NO: 327368 - protein, 163 aa, Zea mays
  unsure (1)..(163): unsure at all Xaa locations
  Clone ID: MRT4577_61628C.1.pep
ARKLSLTRXVFYIVMQCLGAICGAGVVKGFQPNPYQTLGGGANTVAHGYTKGSGLGAEIIGTFVLVYTVFSATDAKRSARDSHVPILAPLPIGFAVFLVHLATIPITGTGINPARSLGAAIIYNKDHAWDDPWIFWVGPFIGAALAALYHQLVIRAIPFKSRS

SEQ ID NO: 327369 - protein, 49 aa, Zea mays
  Clone ID: MRT4577_61629C.1.pep
NKNFYNHIPCPQFNHINRLGPKTLNGVFNFLGGGLTLRTKGGTLSHCLK

SEQ ID NO: 327370 - protein, 151 aa, Zea mays
  unsure (1)..(151): unsure at all Xaa locations
  Clone ID: MRT4577_6162C.1.pep
RPGHMQKRRKAXLIIKVAQRSRMGAAGRVHSSPHVILSPSLSHLTLSTPNSFANSGLEEALYTPCRRIIVSSEGLVARRSRKTLLRPHRAAEQPRHDALGPAPRVWCRGPPPSCPAPAAAGSPDEAAGGSGGGASSRGGCGRGRGRGGVGS

SEQ ID NO: 327371 - protein, 77 aa, Zea mays
  Clone ID: MRT4577_61630C.1.pep
GRFFFFFFARTQSLICHPCSFLSRTRRVAYHCINEREQNPTSSHFSRTKGLQLQLRFRKKIQSPVIKRTQPEKGYLN

SEQ ID NO: 327372 - protein, 71 aa, Zea mays
  Clone ID: MRT4577_61631C.1.pep
PTPRTRRNLGTPGSLLPRLHLLLRSGCNADNLRSRTTRPLGARRSDAVVARNCKAKRGRGDCKAWMSFFED

SEQ ID NO: 327373 - protein, 87 aa, Zea mays
  unsure (1)..(87): unsure at all Xaa locations
  Clone ID: MRT4577_61632C.1.pep
PRVRPRVRGGVGANDTKLFVHPSPPVKVGFAYMLDVATLGFNFKAGFYGSVFKFKIPFPSQGQDRKDVXPLIVEMLQAAKASFSDPE

SEQ ID NO: 327374 - protein, 96 aa, Zea mays
  Clone ID: MRT4577_61633C.1.pep
HVLPMSSAKVRLGWCGIMQDSRVGDSNDPTDPAGSLLMSLVMHTDDHGNTAEVVRELERDRAMRETIGIVMCSSKYTVICSQVSSLRGRIRSSQNW

SEQ ID NO: 327375 - protein, 42 aa, Zea mays
  Clone ID: MRT4577_61634C.1.pep
KAGDQKDEPLPFCFIGSHFSTLPENSISRMEDVSTYHGSPAS

SEQ ID NO: 327376 - protein, 238 aa, Zea mays
  unsure (1)..(238): unsure at all Xaa locations
  Clone ID: MRT4577_61635C.1.pep
MSTGAGAEPEMDDGYGFDTVFNVEAFSDRTLQVEVVGRDDHAPGSGRKRRREEDKEYDGEHIDSFCTVMSTPVLRVETIYVSSAILAAKSSFFRKLFSNGMKESGQREATVRLADSEEKAFMELLRFMYXGKLTPTTEPTHLVDILMAADKFEAISCMKLCVPAVLTEAVMKFLAERYKEFLSTESQDELMRIPXAXIEAILRRNSFGFASGVAVYDFVLRWTCYQCPNSEEIRKFSS

SEQ ID NO: 327377 - protein, 141 aa, Zea mays
  unsure (1)..(141): unsure at all Xaa locations
  Clone ID: MRT4577_61636C.1.pep
WLQAANRTRPQRPIAELPTKTIKRRNGRRNKHRRGHVKYIRWSNCPKSWPKDKAINRVLARNIVEQAAVKDVQEACVPDRISSAQIGDKTITVDKAXHAHLVISRSPWNMRNHEPTQGFRHRDEGPGPGKRLSRTQKPVSK

SEQ ID NO: 327378 - protein, 58 aa, Zea mays
  Clone ID: MRT4577_61637C.1.pep
IVMSIGHLFLTKLGTMLNQFYGWGGFCYLLGGQNPKRGPSRLCDGTKLFSKIVFFCPG

SEQ ID NO: 327379 - protein, 186 aa, Zea mays
  Clone ID: MRT4577_61638C.1.pep
MGKSPAKWIKSVLFGKRSSSRSGSTKAKDLSKGTTNKAAAAAAAAAGKEPAFSESSPVISEPVLVSAHNNETAREAAKGENSSVQEVPVTDVSQDLEKQGTVGSDTSNDAERLREEQAAVKAQAAFRGYLARRAFRALKGIIRLQALIRGHLVRRQAVSTLRATWLIVKFQALVRGRNVRLSNVFI

SEQ ID NO: 327380 - protein, 85 aa, Zea mays
  Clone ID: MRT4577_61639C.1.pep
MGSYKGSFFFFSNFKRGNAQSGLALFVKPLGPGFSDLRAQICFTDMTEACFGKIYFGLWPSKLNKQEGGVFSTPQVFFFSGSSIV

SEQ ID NO: 327381 - protein, 255 aa, Zea mays
  Clone ID: MRT4577_6163C.1.pep
MSHRKFEHPRHGSLGFLPRKRCSRHRGKVKSFPKDDQQKPCHLTAFLGYKAGMTHIVREVEKPGSKLHKKETCEAVTIIETPPLVIVGLVAYVKTPRGLRTLNSVWAQHLSEDVRRRFYKNWCKSKKKAFTKYALKYDSDAGKKEIQLQLEKMKKYATIVRVIAHTQIRKMKGLKQKKAHLMEIQINGGTIADKVDYGYKFFEKEVPVEAVFQKDEMVDIIGVTKGKGYEGVVTRWGVTRLPRKTPQGSPKVACI

SEQ ID NO: 327382 - protein, 235 aa, Zea mays
  Clone ID: MRT4577_61640C.1.pep
MAPPPTSPSFLRPPPLPHHPHPRLLLRPPSASFRVAEILGGRGLCNGEVGVRKELASGSTTSSPAPSPPPSTDSPPPAVDPDAFEKEMMGLTGGFPGGEVGLKDFVAKNPPPPKKSESQPQATLSAPPRPPELPLFLPGMVVLVKNPNNAYHMYCGIVQRVSDGKVAVLFEGGVWDRLITFNLDELEGREKGPPMANPKSVVLEDLVAELEDDDDDKEDEAAKKKEPEGAAAAAT

SEQ ID NO: 327383 - protein, 120 aa, Zea mays
  Clone ID: MRT4577_61641C.1.pep
KIGTLTGSRFEFRGGPPGWGNPLFLTPLSGKVVFGPGPFPISGVPPSVFWGPPGFGLTPCLVSRAFRSFFLNPPALGCSIGVRFLSFGPRIVGGGPLFFVPPPGGSRPAPPLHFKNCGEN

SEQ ID NO: 327384 - protein, 116 aa, Zea mays
  unsure (1)..(116): unsure at all Xaa locations
  Clone ID: MRT4577_61642C.1.pep
AVITVPAHSNVSLRRGAKDSGRIAGLEVLRMINEPSDAXLAYGFVKHNNESIVXFDLGGGTFDGSNLEVLDSVLEALSTSCDTQLGGYVFDQRMVDXLAGNLTNDEGLDFLKDKHA

SEQ ID NO: 327385 - protein, 89 aa, Zea mays
  Clone ID: MRT4577_61643C.1.pep
TPAASTCTYPVYYLISYGLSLCLAFYRICAQRWIISSLNYLLQSYIDYLLCISSTTTYLTFIEVYLLFFDLTYYTLTSLIVLFNYLYKI

SEQ ID NO: 327386 - protein, 80 aa, Zea mays
  Clone ID: MRT4577_61644C.1.pep
RTCADATVAQAASRMHQPSTCTAPCAKSVVARARDQDVQLPSATTGPSLSISRSVGMLVAAQMDQILSQRSREHYSQASL

SEQ ID NO: 327387 - protein, 155 aa, Zea mays
  Clone ID: MRT4577_61645C.1.pep
MAGTDSSVSSRQSSVNSLAKDLELPLEQGCLTIVVLGASGDLAKKKTFPALYHLFEQGFLQSGEVHIVGYARTNLSDDGLRGRIRAYLKGASEEHVSEFLQLIKYVSGSYDSGESFEKLNKEISDYEMSNNSGISRRLFYLALPPSVYPSLGKMI

SEQ ID NO: 327388 - protein, 108 aa, Zea mays
  unsure (1)..(108): unsure at all Xaa locations
  Clone ID: MRT4577_61646C.1.pep
SRAVVVALDPGTLNNVHTGPXEQILRLDIFVFGQSGAGNNCANLHYTERAELIDSVLYVARKEAENXEXLEGFQVRHSFGGRTGSGMSTLMISNIREXYPDQMMPTFS

SEQ ID NO: 327389 - protein, 254 aa, Zea mays
  Clone ID: MRT4577_61647C.1.pep
SAGVPLPSPTPASAGLSPPQHRADHASRRRRAPALTHCSRRRPLPSAVPLLLETVSVWTWRTGLGSPFAGHMVPSEPQTVVENNHSTSVGAEELVLTKDESTSTTTVVQGAGSLMSPKGVQEEASFMGKGKGGEQQLGYHPNVYASQPHTPFSGGYSNHLDQWEGYPYAVTYGAYSPLSAIGDRQTYFSLICPLSSPCYQPPASPNMTYSSPGTGISQFDPIHQYYSPDEVHYSVTPSFYQPFGSLNGGKNPFC

SEQ ID NO: 327390 - protein, 47 aa, Zea mays
  Clone ID: MRT4577_61648C.1.pep
SMRSKSKSLSFSACPNLNGNTERSQATTMSKLDKTFPLLILPVLPSL

SEQ ID NO: 327391 - protein, 92 aa, Zea mays
  Clone ID: MRT4577_61649C.1.pep
IPVNSKAEEICPDSLPSQTVVEKPSDPIDNDESKNQSADVSTSEDDSIREDIHETVCTIEPSLLNRKYIFMAFLVLLAAAVVFLLHEDGSPA

SEQ ID NO: 327392 - protein, 159 aa, Zea mays
  unsure (1)..(159): unsure at all Xaa locations
  Clone ID: MRT4577_6164C.1.pep
IPKDLNRSWXEDPISSGRYLMQELMGTGLSAQSVPEWKMTYGKAGTYGQKSRLSIQEQRQSLPIFRLKKELISAVNDNQVLVVIGETGSGKTTQVTQYLAEAGYTTRGKIACTQPRRVAAESIAKRVAEEVGCRVGEEVGYSIRFDDCTGPETVIKYMT

SEQ ID NO: 327393 - protein, 456 aa, Zea mays
  unsure (1)..(456): unsure at all Xaa locations
  Clone ID: MRT4577_61650C.1.pep
MMGCLFACFRASGGDGEVKGTGGQLAHPSQPPATTTTTSHQVQDGAGRRARPPSRNALSAVFQREDEGSRTAQVASSWADESGERKEMDQELVHQAIIQRSCGALLQTTNNIQGVLIKYADSVHQKETHSGCLPVMSDDLHFMEAPKVENCETPHXSHQSTVXITDATSSSKTNDELRTSATSLKNNVEESTNENDTEACVQGEEQQQALDLAEDFEECGVSKEDFFPPEKLEDPKCAKNDHVVSMEISISDECSLFQSSEGSVPSSYKIRESMNTTSVEKSPKTEATIHATRKKLPKSDNSELELPSLAQWLKPPNPKKAFRDEAMAGDRSHSGKSSDEDRPIIGMVAAHWKDKVPLPANFTSKLRDGNGIPNSTNKYKEDQKVSWHATPFEERLEKALSEEKLLSERSCSSGKTSQFLGVEGEESDMAESNRLYATAYACQFSSASHEPQKLSV

SEQ ID NO: 327394 - protein, 64 aa, Zea mays
  Clone ID: MRT4577_61651C.1.pep
PHRQLTHLGESRDYKENTARGLTCYTFYKGQRLLQSSPRLASTIRVLPGTVHRLRELSLETDSA

SEQ ID NO: 327395 - protein, 73 aa, Zea mays
  Clone ID: MRT4577_61652C.1.pep
SDFADAVYNSTLSPKHLGRLLPLLCLSVGEQFCVLYCRFVLVARAFNLDPPGFRDDVITVPFPLLLCGGNNVR

SEQ ID NO: 327396 - protein, 51 aa, Zea mays
  Clone ID: MRT4577_61653C.1.pep
ATRSNTRQAVCKRGHPLGTGEEGPILFCTLQPTRSWGFSPASSYERAEIFR

SEQ ID NO: 327397 - protein, 109 aa, Zea mays
  Clone ID: MRT4577_61654C.1.pep
SRFWPRGRLLLAVELRRRRKSRLNSPRPDLRTRTASNYANKYKEMDAPEVLEMQADSFKNRVERQLQCRLRGRPHRLVIQCVVDDEPLQDLLPGRRRQPSSSASATWVS

SEQ ID NO: 327398 - protein, 75 aa, Zea mays
  Clone ID: MRT4577_61655C.1.pep
RAPSCCTLLPTRAHSPPTLYYIPMLVSASPTIPKSHTWCWLYSWISARDGVPWLHCFEYNATVHMMKCVILWQYY

SEQ ID NO: 327399 - protein, 887 aa, Zea mays
  unsure (1)..(887): unsure at all Xaa locations
  Clone ID: MRT4577_61656C.1.pep
MDLAINPFSSGTRLRDMIRAIRACKTAAEERAVVRRECAAIRAAISEGDQDYRHRNMAKLMFIHMLVENLRRLQLMLLSQIXTTALTDFVFQAAVPKFIQLRLDPASSSTLPASGNVSVTQSLSVTNNQHGQKPLAMRIRMSYKVNGEDRLEQGQISNFPSXVVPPVSMGLGLLFQRATGKAFVFLFLNIFTSACLLMSCVHXSWFWSPILFLYIVYXMAAINDISYQNFQSXYLQQPPCSSXLISNSTLVNSXLHYSSYARAYDIGGITDPFLHIRVLKLMRILGQGDADCSEYINDILAQVSTKTESNKNAGNAILYECVETIMSIEATSGLRVLAINILGRFLSNRDNNIRYVALNMLMKAIAVDTQAVQRHRATILECVKDADVSIRKRALELVYLLVNDTNVKPLTKELVDYLEVSDQDFKEDLTAKICSIVEKFSLDRLWYLDQMFRVLSLAGNYVKDDVWHALIVLMSNASELQGYSIRSLYKALQASSEQESLVRVAVWCIGEYGEMLVXPITVTESDAVDAVXDXALQRYSADVTTRAMCLVSLLKLSSRFPPTSERIKEIVAQNKGNTVLELQQRSIEFSSIIQRHQSIKSSLLERMPALDEANYLVKRAASTQAAVSSVNSAPAVTSGGPLKLPNGVAKPPPAPLADLLDLGSDDAPVTTSAPTTSPNDFLQDLLGIGLTDSSPIGGAPSTSTDILMDLLSIGSSSVQNGXTNVKLSPTANFSLPGIETKSPPVTPQVVDLLDGLSSSTSLPDENAAYPTITAFQSATLRITFSFKKQPGKPQETTINASFTNLATTTFTDFVFQAXVPKFIQLRLDPASSSTLPASGNVSVTQSLSVTNNQHGQKPLAMRIRMSYKVNGEDRLEQGQISNFPSGL

SEQ ID NO: 327400 - protein, 262 aa, Zea mays
  unsure (1)..(262): unsure at all Xaa locations
  Clone ID: MRT4577_61657C.1.pep
GPLRKSHQHHRLRLRLPPRSARPAAAVFLVRLCGSEIPRRPALDSVERIVEDFAMDLAINPFSSGTRLRDMIRAIRACKTAAEERAVVRRECAAIRAAISEGDQDYRHRNMAKLMFIHMLGYPTHFGQMECLKLIAAAGFPEKRIGYLGLMLLLDERQEVLMLVTNSLKQDLNHSNQFIVGLALCALGNICSAEMARDLAPEVERLLQNRDPNTKKKAALCSIRIVRKFRLGRKFMSAAAALLKEXHHGGLISAVQLCMGLC

SEQ ID NO: 327401 - protein, 662 aa, Zea mays
  unsure (1)..(662): unsure at all Xaa locations
  Clone ID: MRT4577_61658C.1.pep
HWVPRGRPGQIPPPPSPPPRSAWPSSFSSATAAVIPRRPALDTVERIVEDLAMDLAINPFSSGTRLRDMIRAIRACKTAAEERAVVRRECAAIRAAISEGDQDYRHRNMAKLMFIHMLGYPTHFGQMECLKLIAAAGFPEKRIGYLGLMLLLDERQEVLMLVTNSLKQDLNHSNQFIVGLALCALGNICSAEMARDLAPEVERLLQNRDPNTKKKAALCSVRIVRKVPDLAEIFMSAATSLLKEKHHGVLISAVQLCMELCNASNEALEYLRXNCLEXLVGILXDVSNSSYAPEXVAQNKGNTVLELQQRSIEFSSIIQRHQSIKSSLLERMPALDEANYLVKRAASTQAAVSSVNSAPAVTSGGPLKLPNGVAKPPPAPLADLLDLGSDDAPVTTSAPTTSPNDFLQDLLGIGLTDSSPIGGAPSTSTDILMDLLSIGSSSVQNGPPTANFSLPGIETKSPPVTPQVVDLLDGLSSSTSLPGELLMXLSNIRKSCKYXKVTEFDFSSISNSRXSKGAFXSNLPIINEFTFTQFAXSPDENAAHPGITAFQSATLRITFSFKKQPGKPQETAISASFTNLATTTFTDFVFQAAVPKFIQLRLDPASSSTLPASGNGSVTQSLSVTNNQHGQKPLAMRIRMSYKVNGEDRLEQGQISNFPAGL

SEQ ID NO: 327402 - protein, 109 aa, Zea mays
  Clone ID: MRT4577_61659C.1.pep
ILGVCRRSSRRTLSSVTASSSSTGLVSPLCLGPNSMVSPCQQILAMVSSQRFKLRVWTLVQCGGVVVLSVSPLKWCVASVGLGASLVPAGPPHGPPAVIRASGSSLEPN

SEQ ID NO: 327403 - protein, 113 aa, Zea mays
  Clone ID: MRT4577_6165C.1.pep
MPNIFFFGPSVTFYEKSGIQFRSVIVGAQKILFRCSDHLSMERKEKFEIKRKNETLTDGVDGMVQYNGRLYVAPSSTLLQEIMVAVHEEGHECVQRTLHRLQRERELGLHLDS

SEQ ID NO: 327404 - protein, 122 aa, Zea mays
  Clone ID: MRT4577_61660C.1.pep
KQNRGLFFFLFFFFGSDIKKKTPGSQSYRHKSPEKKITDPFITAGPQSQSCPMHKPLGREKTTGPINPSGVVALNLKGHPGWGGATVSPPLPNWSNPLAPNTDGASLREEREQKVFSMPWGN

SEQ ID NO: 327405 - protein, 125 aa, Zea mays
  Clone ID: MRT4577_61661C.1.pep
HLIPVRLYTRSAGSRWHRSYALSVRIEPYPTDLELLVYVVVSAGVHCSAESMSIGTVVPACSFVASSARAGTVAAVIAVSTTAVLALAPSPLMACKSACMPMTQVRTSSSLPPAPSPRFLSGLPI

SEQ ID NO: 327406 - protein, 134 aa, Zea mays
  unsure (1)..(134): unsure at all Xaa locations
  Clone ID: MRT4577_61662C.1.pep
FIYNSNYELLIEXRSGTKLHCTRGCTNTCCTQPVXRESQLMQTNYHTAXNAAHNXLLDELPIHIXDVPIXDQLTPLSRMLYTSPSDGKWGEHEHHYLLFMVXDVNVHTDPYEVTDVTDMNRXELKELMPKANSH

SEQ ID NO: 327407 - protein, 270 aa, Zea mays
  Clone ID: MRT4577_61663C.1.pep
MKVEKQVKVEETGVDPKVLKSAFLKMVKLMNENEADKKNYWANGKLSQLKCPVCQRDSVDLHALLNHAYYAKNQEHRADHLGFHKALCVLMGWNYSVAPVHKTAYQALSTVDAEANQGDLILWPPTVIIENTYKSKNDGEKDVMSDKEVESKLREMGFAGVNVQPLPGKDGQRSVQAKFSASLDGLNNASRLAELFERQGHGRAAWARVRSAVPTGGGGDNNPMLVKVDGKGERTWVLYGYLATAWDLNVLDPESKQNATVKSRKELDLD

SEQ ID NO: 327408 - protein, 75 aa, Zea mays
  Clone ID: MRT4577_61664C.1.pep
MATTAASSLLKSTFTGSRLPSATRTTTPSNVAEATPRAGGGPIRTYISSYPTPTYDLTSFRINHIKETIPDPTDD

SEQ ID NO: 327409 - protein, 66 aa, Zea mays
  Clone ID: MRT4577_61665C.1.pep
VCESAISNGVPCGCMARSHTVQYCLYTFTGCSILFVGCATISHPVSGHTDTVRRFPWRISGEVRPL

SEQ ID NO: 327410 - protein, 85 aa, Zea mays
  Clone ID: MRT4577_61666C.1.pep
FLLLSLQRTINHIIPNTHNGPLLGFQRAGVNIINTPPNPLFLHKPVENLSPALYRPHRHRAAGTITVTAIPFPTAEAGLSEGSER

SEQ ID NO: 327411 - protein, 91 aa, Zea mays
  unsure (1)..(91): unsure at all Xaa locations
  Clone ID: MRT4577_61667C.1.pep
PGFVCLPPVAPMLXPFFGEVVGLLGPVSFWPLPVYFPIKMYFVQRPVPRWSPPWICPQMLSAGGPLVSVPPPGGSFAEVMGALKVYPPFTG

SEQ ID NO: 327412 - protein, 63 aa, Zea mays
  Clone ID: MRT4577_61668C.1.pep
YSISRVISSQRDLGDTAMSNPVIRDHAEASPTQPTLSSSTSFHATALTIIDRLQICGIVAHVS

SEQ ID NO: 327413 - protein, 65 aa, Zea mays
  Clone ID: MRT4577_61669C.1.pep
RARTKVSASPCCHGPRCSTILPLREPFSIHPIMRGAHGTAGRLLLAHQQVRMRPDLCCWNTDKTL

SEQ ID NO: 327414 - protein, 54 aa, Zea mays
  Clone ID: MRT4577_6166C.1.pep
DYYRTIGDHRCRPGAQIFLTLVRLCPFCLPSYEKTKNGPDLAYRIWCWNMIRKY

SEQ ID NO: 327415 - protein, 56 aa, Zea mays
  Clone ID: MRT4577_61670C.1.pep
TCILTSPYYCCPATLGSCSYYGVHVEGNAENPLFCLRQYPGPGAKVGSRSTKYMGH

SEQ ID NO: 327416 - protein, 99 aa, Zea mays
  Clone ID: MRT4577_61671C.1.pep
RRQRCPRCPPPGVWIHQPRPCPIIRSLLVPLGAPRERPSVSFSFSPLSFAVLSLLCAVLCCWLPGRFCFFCRVCPLASRFGFFVGPLPHSPRRYSRSCL

SEQ ID NO: 327417 - protein, 62 aa, Zea mays
  Clone ID: MRT4577_61672C.1.pep
AILTDIPWLDNLGRQTRSKADTPIENMIGHLSKLAIEHEHDRATGASRFVIGTRAPEEEDDE

SEQ ID NO: 327418 - protein, 158 aa, Zea mays
  Clone ID: MRT4577_61673C.1.pep
PPHPQPPQPAAALKPSPHGTAATRPSPPHPHPRRPHRAAPPRPPPALRALPRATAATPPSPPHPPPRGPPQHESTAAESSRETASATSGVGGAGRRRRRSRRGSSPWIRTLEMRAAGGGGGLISWNFKGMFWRRCLGLDSSGIYPLPWRWRPSQGAGM

SEQ ID NO: 327419 - protein, 38 aa, Zea mays
  Clone ID: MRT4577_61674C.1.pep
LITLVLLLTAGAGQTDGCAKILSNIKPIIIFHLFHRFF

SEQ ID NO: 327420 - protein, 500 aa, Zea mays
  Clone ID: MRT4577_61675C.1.pep
EDVFSGQAVGQSRVPLSTVHRRSDDRVEPPSRWLNLCGGEARPYAGRVHVRVCLEGGYHVLDEAANVASDVRAASKQLSKPPVGMLEVGVRGAANLVPMKIAKDGASGSTDAYVVLKYGPKWARTRTILDQFNPRWNEQYAWDVFDPCTVLTIAVFDNVRYKAAAADDPGKLPRDSRIGKLRIRLSTLDTNRVYANTFALTAVHPVGVRKMGELELAIRFTCPSWLTLMQAYGSPLLPRMHYVKPLGAAQQDVLRHTAMRTVSGRLARSEPPLGPEVVQYLLDTDTQSWSMRRSKANWFRVVGCLSHVATAVRWAHRVRTWAHPPTTVLVHLLLVAVVLCPEMILPTVCLYLFLVLLWRYRARARQPAGMDPRLSHVDSVSPDELDEEFDGLPSGRPADVVRMRYDRLRAVAARAQTLLGDVAAQGERVEALLSWRDPRATAVFAVVCLLAALVLYAVPFKVLLLGMGFYYLRHPRFRGDMPSAGFNFFRRLPSLSDRVF

SEQ ID NO: 327421 - protein, 70 aa, Zea mays
  Clone ID: MRT4577_61676C.1.pep
HAPSSSLKSLYHTHALSTLNTPTPHQVRDSYLDIADVCTQLLDFQDEKLFLINHEKMDAYNNLISLKHVP

SEQ ID NO: 327422 - protein, 112 aa, Zea mays
  unsure (1)..(112): unsure at all Xaa locations
  Clone ID: MRT4577_61677C.1.pep
LPNAKXDQPNGWLRDRKPACTNRDGEGLTEKTPAQEARRNGQHKDPPRPLLLPKPRDGTRINGNDRTTKAPAKVNGARRRQQEQSRPPREDRRHPRPTETQESKRAPPRPKE

SEQ ID NO: 327423 - protein, 91 aa, Zea mays
  unsure (1)..(91): unsure at all Xaa locations
  Clone ID: MRT4577_61678C.1.pep
MVLSLIDPFAEANAEESGVGLGTKDYVHMRIXERNDRKSLTTVQGLNKEFSYNKNLIDLKKEFCCNGTEVQDPELGLVIQLQSDQRKNGLL

SEQ ID NO: 327424 - protein, 218 aa, Zea mays
  unsure (1)..(218): unsure at all Xaa locations
  Clone ID: MRT4577_61679C.1.pep
MDTEYRALQQGSPSPWRTADGVSSWGPAQHQKRQRCQGSSSDQAGSSSSSSLQISEPEPQQNQEEDYYVEDDCDAYDEDDYDFDEAEFNLHLADKFDDLDLPPGVEANVPWLQKMPPKEVVKQPPISITADENANKYDKFKQFDTVQTFSDHHYAKNSHEEPTRAWSKRVQHDWKLLENDLPAYIYVRVAEDRMDLLXRAAIIGPKGTPYHDGLFFFD

SEQ ID NO: 327425 - protein, 91 aa, Zea mays
  unsure (1)..(91): unsure at all Xaa locations
  Clone ID: MRT4577_6167C.1.pep
MASIDSVLQGVSVSGKVDDIHRKILTPEALAFLALLHRSFNERRKNLLERRKARQAELDRGVLPDFLPETKHIRENPTWKGAXPAPGLVDR

SEQ ID NO: 327426 - protein, 59 aa, Zea mays
  Clone ID: MRT4577_61680C.1.pep
CDDMGICVCLCEKKELQVFRKKDSRAMHARCLMNEWLDVCVDNALVITKSGVNMLVKGG

SEQ ID NO: 327427 - protein, 190 aa, Zea mays
  Clone ID: MRT4577_61681C.1.pep
FEFELKTLEKINRKAIRNSLENRKANSAQVGPSGPAQRARAHVPSVPDRRVPPVSANSRALSLSLAALWGRPVGAVSFRTNTLSTSRTPPVSPLRFPNLSPTSPAVDTPTTARSLATFSRPCPFRSPHTACPLAPLICALNRALSPCARDQPSSTAAHQGPPPFHDHHCARVASVPSVSSAASPAARDAL

SEQ ID NO: 327428 - protein, 213 aa, Zea mays
  Clone ID: MRT4577_61682C.1.pep
GRPRVRDRPPRAPAPRTPSRSPAPRPSPTLAAPAMGCAASAANGAGPRRRGWARARMRRYSEASTSGLPPPPPPPQEAAESSSGGRRRGRKVAPEPKEPAEEGTAALPPMPGSPSFRYYCQKKTAAVDRIVADADAADADDSVRVRATARQLSNRCEITATKAHDSTEVAQPKEGTRWLRFSGLSLVATAWHNLISRQRSKHSPPPAAATSQP

SEQ ID NO: 327429 - protein, 64 aa, Zea mays
  unsure (1)..(64): unsure at all Xaa locations
  Clone ID: MRT4577_61683C.1.pep
NTVIDPAAIRGSVHAPATTTAGVMICLCVVPCCAAAXDPNLTDYIIQGRLYMHTCRAGFVTNIT

SEQ ID NO: 327430 - protein, 140 aa, Zea mays
  Clone ID: MRT4577_61684C.1.pep
MEAASNQEPGRCGGDDDEAKRREAELASSRLLDPGFKPSKLSQDRLDKFKELHKKRLQITEKPKYKRKPKGTTERSIKVTSNYKFTDKDASADSSPRDVHHMSSVTGIQGDPASGLSSRNKRKLHWGLDIKERWERKANM

SEQ ID NO: 327431 - protein, 442 aa, Zea mays
  unsure (1)..(442): unsure at all Xaa locations
  Clone ID: MRT4577_61685C.1.pep
ENVALVNGNRDSLPFDGMSDAEIERRMKEANAQAFHQTATNFVMPVAPAQNFVSSSVAPLAPPLSMMPPPFSQPVVQPGFSDPLQGSPAREEGEVPESELDPDTRRRLLILQHGQDTRDPTPPHPAIPPVQVPVPPVQPHGNWFPTEDGINPSNLSRGSAGFTVESDSMPYEKKQPPHPSFFHGGDSPMSSDRFGYQNQRFPSQLPHTEDHHMLQNHAPPKYRSFSGEELATRHVPSSQRNHIESGRHFSQYAGTSAGVLEGIAVKCGSKVEYRSTLCDTAELQFSIEVWIVGEKFGEGIGRTRREAQRQAAEMSLRNLANKYLSSDPNKLTDMXNKMLSVATETSLVTLEILXDDMLPLSSTSEESRFMXMEXNSRKTGDSVTALKXLCTVEGYNLVFQACPSPADGLVGKESYAQIQIGRQILGKGDAGSGIFAARGETE

SEQ ID NO: 327432 - protein, 65 aa, Zea mays
  Clone ID: MRT4577_61686C.1.pep
VVSASSGLGCVAPSSRGRFGVPGCAFVWVCCTIFLLWARSIGGGVPACSLNCPPRFAPRPSAHED

SEQ ID NO: 327433 - protein, 47 aa, Zea mays
  Clone ID: MRT4577_61687C.1.pep
LHKFCGESSFSTFTGIKLNLLRTLCNGHKKNSILVVLELRSILFFLY

SEQ ID NO: 327434 - protein, 43 aa, Zea mays
  Clone ID: MRT4577_61688C.1.pep
PYHSFLSRISSWLVTLHYCLRSPRPEFLECGVFLYCRAAPPGG

SEQ ID NO: 327435 - protein, 114 aa, Zea mays
  Clone ID: MRT4577_61689C.1.pep
WDPRGRPGTLPPRGTGRTLLASTSNFYRASLADLMSHSVRPSSASDKAGNKGNMFTLELPRARSPDVRKGPTDIQSKNRYHTTKMMYDDKDGDIALGRPDQARQAQLPDHDRRP

SEQ ID NO: 327436 - protein, 197 aa, Zea mays
  Clone ID: MRT4577_6168C.1.pep
RPGNSCSLPWWCPAPLFPLPPALGSRPCSPSQLVQRVVPRPRGAPSLVAVSEPDPKLLCVLLYPQFALPPCSRFFHGRRCPQPSPWWPTSPLPQPQLPLRPCCCKHSASPMAHGARPAPFCWWLSHLPGARRNDHEEFCVVCSPTCDTVDLRERRSPNTTLAKCSMICLSQESSSIWWFRVWFSYGTLVDHVMRKSS

SEQ ID NO: 327437 - protein, 128 aa, Zea mays
  Clone ID: MRT4577_61690C.1.pep
EDGRLGVAKTSNSTLGCSTLHLWIRDHERWEERRPIELRMLLPDDALRDPQFPPEFFPDKPWLAGFAGTGAGVIFFKTRLGYFAVDLNSGRSKNIGECLGWGCIIPYVSFCIPAPGAISTDEGPEAGL

SEQ ID NO: 327438 - protein, 150 aa, Zea mays
  Clone ID: MRT4577_61691C.1.pep
FSRPFWFFPPWPKGLQGRKNTFGGGGAPPGGGGGLSGPSSPSGPPPAKIGSPFPGARGPPSSNAGASSPKIGGSRSPSLFPRGPPQGSFPVFLSCPPFCGPPPPHKKDFVVGLPVCWGSLSPPKGKKSGGGAKKKKKKFSPKKKKKNCGG

SEQ ID NO: 327439 - protein, 119 aa, Zea mays
  unsure (1)..(119): unsure at all Xaa locations
  Clone ID: MRT4577_61692C.1.pep
VRFNCTDITATMTCRQVQGLLGGLRNLLFARLXKPRKNSLQYPSDDEDIEEKADKVIPDRVEQIELAKITLQPKGRGTKLLVDDIXRALTGNGDNGTDHCHSAKKGDCVWMIHNGKTLL

SEQ ID NO: 327440 - protein, 133 aa, Zea mays
  Clone ID: MRT4577_61693C.1.pep
MQTGALLLDGNTLNYFGNSIPINLVVAVIAEVILVGGAEYYRITNGLDLEDKLHPGGPFDPLGLASDPDQAAILKVKEIKNGRLAMFSMFAFFIQAYVTGEGPVENLAKHLSDPFGNNLLTVISGAAERTPSL

SEQ ID NO: 327441 - protein, 68 aa, Zea mays
  Clone ID: MRT4577_61694C.1.pep
QNAFFFGLLTCGGIHTLLITLPPVIAPGVYLFKVLGQGEEIAACFFIITRCGAYWLTGSKKRQPRWGT

SEQ ID NO: 327442 - protein, 141 aa, Zea mays
  unsure (1)..(141): unsure at all Xaa locations
  Clone ID: MRT4577_61695C.1.pep
TWPYSEAAGCVLHSTFINTVDLSDHIANKYCILLFYPLEFTSTSSSEITALXDRYNEFAKVNTEVLXIPLHQAVSHLAWGHTNRKSGGVGDPKYTLASDVSXSISKAFGALITDHGIALRGLFIIDKXGVLQHSTINNLAI

SEQ ID NO: 327443 - protein, 182 aa, Zea mays
  Clone ID: MRT4577_61696C.1.pep
PTRPPTRPRTRGVPLGLGTSASTRVSNELGAGQPEAARLAARVVVCMTLCGGVVLATIMILLRNIWGYAYSSEEDVVAYIARMLPILAVSFFVDGLNGLVIIGCGKQKIGARVNLGAFYMVGIPTGLLLAFVFNLNGMGLWLGIVCGSISKLALLLWIALRIDWESEAIKAKDRVLRSSGQT

SEQ ID NO: 327444 - protein, 64 aa, Zea mays
  Clone ID: MRT4577_61697C.1.pep
SRDDTLIVAHIALLICNYPIAGHPFSYGKAYAWLASICGLSRTSNHGICSGNVSYNPHIHRAKV

SEQ ID NO: 327445 - protein, 106 aa, Zea mays
  Clone ID: MRT4577_61698C.1.pep
GPGIKILYPISKYSTGFFTLYLNSLSTPTYYIIYFQLYSNHRGFFLGFPGGKGGPSKYRFRGPRGIFRNIYITSRGFWGKNESFQHLGSHGALGGLKDRWGGRAFG

SEQ ID NO: 327446 - protein, 87 aa, Zea mays
  Clone ID: MRT4577_61699C.1.pep
LMKDRTNTFSLPLSIGISIPLSVTGFFFFGRNKALYQSVNGFKNLSSSYRVGNTYYLLKDQIKSHTMPSLLSAFSNASDGSNNFGPK

SEQ ID NO: 327447 - protein, 124 aa, Zea mays
  Clone ID: MRT4577_6169C.1.pep
GPRHGLNYCRVHCSPRPGARRCFILGLLQSVIPPRPVARRLSKSCTSRNSSMALGIPLSGDAVHSALLMSSYCLFPLSPYVNALMCSAFVLPPKRGLSPCIIKSHLFDSLSLFDLKKKKRGRPL

SEQ ID NO: 327448 - protein, 58 aa, Zea mays
  Clone ID: MRT4577_616C.1.pep
IGKLANRNSLVFKIFPVWGRELPRVNLGTSSFLNHYFYRCVGGRHPVTRGNSNTCHEE

SEQ ID NO: 327449 - protein, 105 aa, Zea mays
  Clone ID: MRT4577_61700C.1.pep
SEFGSSAPPCSSLLFLAPPSEPGCFMPPRHRRTAMTLNVRSTQLDAIERMLYLNQRAVPNCWNEQREDHDHTILVIGSPLNLQTIACAKARQSAYPWWYPYPGQL

SEQ ID NO: 327450 - protein, 146 aa, Zea mays
  Clone ID: MRT4577_61701C.1.pep
VGWVFFFFFSFFFFFFFFFFFFFFFFGGPPFPVPLNHPFFNTPWGGDTKRRGGGLSKPPPARLFPWEPVKKGWPCTLPHSPCPIPSALAFCFWGSLGPSAPPHPPRGNWALPLGFRPPGHLRPPPTRWPPPRFFLPWGAPAGGLTP

SEQ ID NO: 327451 - protein, 127 aa, Zea mays
  Clone ID: MRT4577_61702C.1.pep
LPPVLPYAAAAARKKGLPEDCPICLDAFGEDDGVRVVPACGHLYHAPCIDRWLDVRNSCPVCRCAVASLYAADRDRGADALTAFDDDNDDQEAVLQRVVAMIEAIRDEQQREDAVARRAPAGGGGGS

SEQ ID NO: 327452 - protein, 168 aa, Zea mays
  Clone ID: MRT4577_61703C.1.pep
PPGVFAREKAPRGGRPIKRSCPNLSGGNKFPLRPRRSHWLNTAAEGPPLSNHGKKATGDPTRLGPTGGGSTTRATAAFFRPWCNFRFGQYITKYWGFGFFQQLLPGGIFPRGRPGLFPTGGGRALKAPPPWGPPHPKTNPQMLLFGSPPHWGVIPPVLCIQCFSRPRG

SEQ ID NO: 327453 - protein, 441 aa, Zea mays
  Clone ID: MRT4577_61704C.1.pep
MAAATAPPPAAVATTLSGLMRCQNIRSSRPRAFYARCASSNASAEAAESRKGGHGGTRLEEAVPVGEGRSRVDAWISARLGGGGVSRARVQASIRAGLVAVNGRPVSKVSHTVKGGDLVSCTVSELQPLRAEAEDIPLDIVYEDDHVLVVNKPAHMVVHPAPGNAKGTLVNAILHHCKISTFTCLARSSAGDECPDSTDEDTDVFHVDQFAAEDVSSEVRNALVRPGIVHRLDKGTSGLLVVAKDEHSHARLAEQFKLHTIRRVYISLTCGAPNPNSGRIEASIARDPNNRIRMTAIAGSGHRYARNAASRYKVREVFAGGGSALVEWRLETGRTHQIRAHAKYIGIPLLGDETYGGTQSMALSLLRPRSPSKYHSGLSNLLSKVDRPCLHAASLGFKHPRSGKVLEFSCPPPDDFLEVLGELRRVTSRSSDAPNGDGVFR

SEQ ID NO: 327454 - protein, 108 aa, Zea mays
  Clone ID: MRT4577_61705C.1.pep
MVGYGFLFERYPFFNTAREEGTDEGLRDDFGAWSRSGEAADTVCDTAGESLTDSVTPPGKDLLKDLLEEVEDEDSIHSLMLGVLDNRFVISCSGIQAGKHVRHSLHRK

SEQ ID NO: 327455 - protein, 156 aa, Zea mays
  Clone ID: MRT4577_61706C.1.pep
MSSFTEKLSAFAESIAYPNKDTHAGHLEHDAAHGAALVEHEPATGVWDRLHGENTARQIRSQGDCGVGMEDGLQRKAIRQQEQVAERSRLAREGLFEPHMKHEEMTNLTEEHRDVASGSQVFGGPEEAKAAIAESLKDGGIGKQVLENQKMNSSAF

SEQ ID NO: 327456 - protein, 351 aa, Zea mays
  Clone ID: MRT4577_61707C.1.pep
CIHIRDGKIHIVGVFTEFSGTEFTNFLEVAEKLRSDYDFGPTVHANHLPRGDAAVERPLVRLFKPFDELVVDSKDFDVPALEKFIEASSTPKVVTFDKNPDNHPYLLKFFQSSAPKAMLFLNFSTGPFESFKKAYYGAVKEFSGKDVKFLIGDIEASQGAFQYFGLKEDQAPLILIQDSDSKKFLKEQVEAGQIVAWLKDYFDGKLTPFRKSEPIPEANNEPVKVVVADNVHDVVFKSGKNVLIEFYAPWCGHCKKLAPILDEAAATLQSEEDVVIAKMDATANDVPSEFDVQGYPTLYFVTPSGKKVSYEGGRTADEIVDYIKKNKETAGQAATEKAAEPAATEPLKDEL

SEQ ID NO: 327457 - protein, 127 aa, Zea mays
  Clone ID: MRT4577_61708C.1.pep
RPPLFPFSRLGIAFFQQQQLFPFNQLAALTPPVFLRQQILLPFSRLGAATRASFLTQPRLLPFSPRFGANPPPLFQLPQLLPFVPLALADPGAPSPQPILGGAPFWMAYWVESQNKVFWVREGAPPK

SEQ ID NO: 327458 - protein, 109 aa, Zea mays
  Clone ID: MRT4577_61709C.1.pep
AAFFTGGGGALKSLFSRRIPIIFLPRKNNLGKPRSKKGFLGAPHCPNEGRILIRGRAGRINRRWAWINRGHRHGCAQWGGTPWAEAFPGVPGRPLWFHTREGAPGKPPA

SEQ ID NO: 327459 - protein, 41 aa, Zea mays
  Clone ID: MRT4577_6170C.1.pep
PPKAPSFCASQLSSFVVQKNEYWRNWTIEHLKFAGHRTRAV

SEQ ID NO: 327460 - protein, 105 aa, Zea mays
  Clone ID: MRT4577_61710C.1.pep
MSIMPHKSNHQDWEMMLVLAKLSDKERFMVSDHDRLAKLNGSKQRRMGQLAIDSDIFNVKPIFHVVDVTKSAGETLAYDMFCISGLRISLSDIGMGTRCDVNMDP

SEQ ID NO: 327461 - protein, 57 aa, Zea mays
  unsure (1)..(57): unsure at all Xaa locations
  Clone ID: MRT4577_61711C.1.pep
QQCYNLCAEIGCTIISTSPTPGGGTITKLTPPYFHHVSIPVIRLTTLGHPXYTVLPD

SEQ ID NO: 327462 - protein, 66 aa, Zea mays
  Clone ID: MRT4577_61712C.1.pep
TSNLICLFCYQQHQNAYHDNYYMPGWPLLTLTTLSLKHLCIQMYANCSLYHISCYTTHGASQHHLI

SEQ ID NO: 327463 - protein, 100 aa, Zea mays
  Clone ID: MRT4577_61713C.1.pep
SPPFLVSLSAGEALYDSQQRVTSSKFISAEEVELESLGRWFLLCEEKEPSKACKDGRSGSCSVCEFIKTPVCILFRGLWVLFEVHGLFEGTPKCSRGFFA

SEQ ID NO: 327464 - protein, 82 aa, Zea mays
  Clone ID: MRT4577_61714C.1.pep
SGQIQGRYEMISQCRHYSQCRCSGLCTLDLIRCSVFSFQRLVSRSRSIYTVIQADPSKYRLAPLWSPHAALHALSSCSTSVL

SEQ ID NO: 327465 - protein, 84 aa, Zea mays
  Clone ID: MRT4577_61715C.1.pep
MDTVREEAWPVAAPRQQPSAPQPQQQQQNGRIDLRELKAQMEKRLGPDRSRRYFGYLNGYLSERLGRQDFGKLCLHTLGRENFT

SEQ ID NO: 327466 - protein, 187 aa, Zea mays
  Clone ID: MRT4577_61716C.1.pep
TGINPNLSLTRRSEEQIRHEASEPIPTHEAAAAAAGSRLATRPSNAAERATRPPVGSEGNSSSAGPRPAPARQPQLLPSRGQLNSCCFSDSIRFRRARHLPRRRSSSYELAGARDHASIALGFGRVIQLARLARGFHARFRPAAPLPGRLLDPAAVGVAPAEMRSPPWPASWEFGYGLALCRKRRKP

SEQ ID NO: 327467 - protein, 281 aa, Zea mays
  Clone ID: MRT4577_61717C.1.pep
PPYALNLGLHPQLHFQLRETEHLNPNLPSVFGSDLITSIDRDMDGLWHLGDELRGQPKVVEDRQWSLMTSKLAEITRSRGERTNDLDYARMNAAPDAKRWGKAASYQHHDEGRMDHHVGLSLKMNDLKMNEAAAAAVMKLPFRGVPYNVNPMYPKGSNANANVNAFKMNVGVNKYSSSANGKDAGGKSSGGGSNNNSGGGGNGNGTANGSSAVDKRFKTLPTSEMLPKNEVLGGYIFVCNNDTMQEDPQRQLFGLPARYRDSVRGITPGLPLFLYNYTLTS

SEQ ID NO: 327468 - protein, 93 aa, Zea mays
  Clone ID: MRT4577_61718C.1.pep
EQYGSTVHFFIGTGRSPCKITPMPFTFANNSIVIHQGLNSLFIFKPVSFSAIMAKLSCSQLRRCINLRILWASPTGVLIQIRKYFGKKSQGII

SEQ ID NO: 327469 - protein, 64 aa, Zea mays
  Clone ID: MRT4577_61719C.1.pep
EEHGFGEASVLGTRTELALGRLACHSIAGINKLVYNLPWQLWARKSNPACALRFMRTREQKPSY

SEQ ID NO: 327470 - protein, 36 aa, Zea mays
  Clone ID: MRT4577_6171C.1.pep
KPGSSRLADRVFFFFFLSLNRSFRYCYTDTATHGEA

SEQ ID NO: 327471 - protein, 237 aa, Zea mays
  unsure (1)..(237): unsure at all Xaa locations
  Clone ID: MRT4577_61720C.1.pep
MDGLWHLGDELRGQPKVVEDRQWSLMTSKLAEITRSRGERTNDLDYARMNAAPDAKQWGKAASYQHHDEGRMDHHVGLSLKMNDLKMNEAAAAAVMKLPFRGIPYNVNPMYPEGSNANTNVNAFKMNVGVNKYSSSANGKDAGGKNSGGGSNNNNGGGGNGNGTANGSSAVDKRFKTLPTSEMLPKNEVLGGYIFVCNNDTMQEDLKRQXLFGLPARYRDSVRAITPGLPLFLYNYP

SEQ ID NO: 327472 - protein, 322 aa, Zea mays
  Clone ID: MRT4577_61721C.1.pep
MDGLWHLGDELRGQPKVVEDRQWSLMTSKLAEITRSRGERTNDLDYARMNAAPDAKQWGKAASYQHHDEGRMDHHVGLSLKMNDLKMNEAAAAAVMKLPFRGVPYNVNPMYPKGSNANANVNAFKMNVGVNKYSSSTNGKDSGGKSSGGSNNNSGGGGNGNGTANGSSAVDKRFKTLPTSEMLPKNEVLGGYIFVCNNDTMQEDLKRQLFGLPARYRDSVRAITPGLPLFLYNYTTHQLHGVFEAASFGGSNIDPTAWEDKKCKGESRFPAQVRIRVRKLCKPLEEDSFRPVLHHYDGPKFRLELSIAETLSLLDLCEKEGI

SEQ ID NO: 327473 - protein, 200 aa, Zea mays
  unsure (1)..(200): unsure at all Xaa locations
  Clone ID: MRT4577_61722C.1.pep
MGLPTAVPRSTSAFRRCRRARCCRSTSSLGRYILSATQLPWWNKRFNRLPTSEHVPKNEVLGGYIFVCNNDTMQEDLKRQLFXCYSSAGLPARYRDSVRAITPGLPLFLYNYTTHQLHGVFEAASFGGSNIDPTAWEDKRCGRESRFPAQVRIRVRKLCKPLEEDSFRPVLHHYDGPKFRLELSIAETLSLLDLCEKEGI

SEQ ID NO: 327474 - protein, 138 aa, Zea mays
  Clone ID: MRT4577_61723C.1.pep
MSQLKNPKTAKKGEETTVAKSEKRGQESKTNAKKKILGRSRKCAHAEPDGENRNGCSSTDADENSLAETAASDQERKVVLQELRIEVDTSRADNSNDNKENLSSAPSDEEALNNSHSENENRQLENNENVPLNENVAL

SEQ ID NO: 327475 - protein, 190 aa, Zea mays
  unsure (1)..(190): unsure at all Xaa locations
  Clone ID: MRT4577_61724C.1.pep
MDGLWHLGDELRGQPKVVEDRQWSLMTSKLAEITRSRGERTNDLDYARMNAAPDAKRWGKAASYQHHDEGRMDHHVGLSLKMNDLKMNEAAAAAVMKLPFRGVPYNVNPMYPKGSNANANVNAFKMNVGVNKYSSSANGKDAGGKSSGGGSNNNSGGGGNGNGSXNGSSAVDKRFKTLPTSEMLPKNEVL

SEQ ID NO: 327476 - protein, 217 aa, Zea mays
  unsure (1)..(217): unsure at all Xaa locations
  Clone ID: MRT4577_61725C.1.pep
MADQELKLFQEEVEAVKQWWKNPRFAQTTRPYTAEQVVSKRGTLKQTYPSNIQAKKLYATLEAHAAKGTTSHTYGALDPVQVTQMAKHLETVYVSGWQCSSTASSTNEPGPDLADYPYNTVPLKVEHLFMAQLFHDRKQREERSNMSPEQRAKTPVIDYLRPIVADADTGHGGLTAVMKLTKLFVEKGAAGIHIEGPAPGTKKCGHMXXGRVLCAIQ

SEQ ID NO: 327477 - protein, 37 aa, Zea mays
  Clone ID: MRT4577_61726C.1.pep
LEENHCISTKASKPVDTIQGFLKTGSVYFFVYPSSAL

SEQ ID NO: 327478 - protein, 257 aa, Zea mays
  Clone ID: MRT4577_61727C.1.pep
MLTLHTIQSCPSLRRSSLFRRALLGRKRSFISASSSEDAESGTPPPLGGDKHQQEVLAQIAMLQTQKVRITDFLDERSAYLTKFAKDADSEFDLIGQNAMKELDAVGDQILERLDSKMQAFEETAEVQRQEIEMNDKVLEDFEDWIEKEKNEGMFFKSLGKVKPRNKMEIKVKAKVEAQKVKEIAEESAGSKTRMNIYLGLMGILGITIANAIFATPEVEWRKVAALGLIFIGLVAQVIYEQDISPPEAEKTEKIEE

SEQ ID NO: 327479 - protein, 85 aa, Zea mays
  Clone ID: MRT4577_61728C.1.pep
GSEYSRCRPHRPRYACACCALVRDSLGRRKKGRIDLGAASCESPICIRPYNRLTALSRQRLNLHSGDHSSGVKSLHPIGLRRIFN

SEQ ID NO: 327480 - protein, 290 aa, Zea mays
  Clone ID: MRT4577_61729C.1.pep
GSHRTIAAAAAARAAYAPPIITGNGHEHAIAYTAPSQQPVYGAKATINVWDPAIQESNGFSLSQLWVLSGSFNGSDLNSIEAGWQVSPELYGDSRPRLFTYWTSDAYEATGCYNALCPGFVQTSSRIAIGASISPVSSAGGAQYDMTLLVWKDPKLGNWWLSYGDQLVGYWPAQLFTHLSDHATMVEWGGEVVDTRPGGAHTATQMGSGRFAAEGFGRASYFRNLETVDADNSLAEVALDAIQTLAEDPACYDIRKAYDDDDDDGGQHSARGGWGTHFYYGGPGHNPACP

SEQ ID NO: 327481 - protein, 150 aa, Zea mays
  unsure (1)..(150): unsure at all Xaa locations
  Clone ID: MRT4577_6172C.1.pep
MIQVHGXTSSETTKQRVVKQVPRGGEIKKTTNLTTDGVFFFFFFFYDTSTRATSSETTKQRVVKQVPRGGEIKKTTNLTTDGGFFFFFFFYDTSTRATSSETTKQRVVKQVPRGGEIKKTTNLTTYGVFFFFFFFYDTRTRAISLETTKH

SEQ ID NO: 327482 - protein, 110 aa, Zea mays
  Clone ID: MRT4577_61730C.1.pep
ERGDFHPTCPPGVFQVGRPPHRGPGHSGKGDLGRGPLNLKKKTSVSQGFQPNGGLGGRSPWGFPPRLHWPTPKIFLGAQTAFSQRKKRKKKKKKKKKKKQKKKKKKKKKT

SEQ ID NO: 327483 - protein, 122 aa, Zea mays
  unsure (1)..(122): unsure at all Xaa locations
  Clone ID: MRT4577_61731C.1.pep
MGKRWIPLEANPDVLNQFIWGLGVHEEDVQFCDVYGLDDELLAMVPQPVFAVLFLYPLTSLDEEKEECXSAATSTSAGKVWLYHPVLFFSCAVMVMFLTQCLGHFSDALWSKSVPWSRKEKV

SEQ ID NO: 327484 - protein, 48 aa, Zea mays
  Clone ID: MRT4577_61732C.1.pep
NVIPSIKFPEVLSYLKPLLTYDYVNNNPYQYLPRSINKSIDTSSTRPV

SEQ ID NO: 327485 - protein, 72 aa, Zea mays
  Clone ID: MRT4577_61733C.1.pep
CVAVTDVPSLLLSIGMLISFSSSSLLSCKAFFALAAASRYRSLLLPAADEGLPYALDFTVTPSDLILTPSFA

SEQ ID NO: 327486 - protein, 402 aa, Zea mays
  Clone ID: MRT4577_61734C.1.pep
LAFPFLHRGGDGRLHHADAGVHSFRLGLNRFADLTNDEYRATYLGVRSRPQRERRLGDRYLAGDNEDLPESVDWRAKGAVAEIKDQGSCGSCWAFSTIAAVEGINQIVTGDMISLSEQELVDCDTSYNQGCNGGLMDYAFEFIINNGGIDTEEDYPYKGTDGRCDVNRKNAKVVAIDSYEDVPANSKKSLQKAVANQPVSVAIEAGGRAFQLYNSGIFTGTCGTALDHGVTAVGYGTENGKDYWIVKNSWGSSWGESGYVRMERNIKASSGKCGIAVEPSYPLKKGANPPNPGPTPPSPTPPPTVCDNYYSCPDSTTCCCIYEYGKYCFAWGCCPLEGATCCDDHYSCCPHDYPVCNVKQGTCLMGKDSPLSLSVKATKRTLAKPHWAFPGNTAADGMKSSA

SEQ ID NO: 327487 - protein, 470 aa, Zea mays
  Clone ID: MRT4577_61735C.1.pep
MGASTTPLASAAAALLLLLLAPLAAAADSMSIVSYGERSEEEARRMYAEWMAAHGRTYNAVGEEERRFEVFRDNLRYVDAHNAAADAGVHSFRLGLNRFADLTNDEYRATYLGVRSRPQRERRLGDRYLAGDNEDLPESVDWRAKGAVAEIKDQGSCGSCWAFSTIAAVEGINQIVTGDMISLSEQELVDCDTSYNQGCNGGLMDYAFEFIINNGGIDTEEDYPYKGTDGRCDVNRKNAKVVTIDSYEDVPANSEKSLQKAVANQPISVAIEAGGRAFQLYNSGIFTGTCGTALDHGVTAVGYGTENGKDYWIVKNSWGSSWGESGYVRMERNIKASSGKCGIAVEPSYPLKKGANPPNPGPTPPSPTPPPTVCDNYYSCPDSTTCCCIYEYGKYCFAWGCCPLEGATCCDDHYSCCPHDYPVCNVKQGTCLMGKDSPLSLSVKATKRTLAKPHWAFSGNTAADGMKSSA

SEQ ID NO: 327488 - protein, 98 aa, Zea mays
  unsure (1)..(98): unsure at all Xaa locations
  Clone ID: MRT4577_61736C.1.pep
TKKRPGGGYLIRRLAKGWLLPILLKKSCRQVLFMLPTYIHIQKKSWLGNTPCQKQGLGTNLGALFFPSRKETTPSLPSNYWGGGXXXXXFFPPCHGAC

SEQ ID NO: 327489 - protein, 114 aa, Zea mays
  Clone ID: MRT4577_61737C.1.pep
MTELGLAKPVQVESSVVQDSDASVQQHTSEGLPSQGQASHLEAAADKLVGSDGIAASVDETVTVNATIEDVPLAVNDSEPCVDGSAGPSVVNLVQMDGPLFDAQGTVLSADFQH

SEQ ID NO: 327490 - protein, 104 aa, Zea mays
  unsure (1)..(104): unsure at all Xaa locations
  Clone ID: MRT4577_61738C.1.pep
HGNQTTPSSIKAKRRLASESAPKDMVWQLPVQRQKGDLCFYSAGVWGGICFHKIRGSIPRPQTTAVCFKMAQEEFRFCLFFRPKKKKKKKKKKKKKKKKXSKGG

SEQ ID NO: 327491 - protein, 55 aa, Zea mays
  Clone ID: MRT4577_61739C.1.pep
FHDLFFVLFHYILGAVPPKRENADRGNMMYLSLHHLIESAHAHCFYDGPHTCLWS

SEQ ID NO: 327492 - protein, 81 aa, Zea mays
  Clone ID: MRT4577_6173C.1.pep
PFPFLLHISIKLKIKSFCADYARSESLKLYAKVFNQGNFFIYISQPDVHHLHGTKYYIYKTKCYFLLSPQIIHASSLIISN

SEQ ID NO: 327493 - protein, 77 aa, Zea mays
  unsure (1)..(77): unsure at all Xaa locations
  Clone ID: MRT4577_61740C.1.pep
PIAYYQQQLLACKSLTMTNFPISQHQQQLXQILPQITHFVIHNPIDYLQQHQHLLSTQLDINNIPTNIQQLFLQQHL

SEQ ID NO: 327494 - protein, 67 aa, Zea mays
  Clone ID: MRT4577_61741C.1.pep
DGSASLVSHTQWPRDFSGHLVVEGLLIAVIVFQLSRKSYKPPKKPLTEKEIDELCDEWEPLWLLLHE

SEQ ID NO: 327495 - protein, 40 aa, Zea mays
  Clone ID: MRT4577_61742C.1.pep
LKNYCEVMKCCSYLRFLQNLKPTWLPSYGLPCKIGSVSAN

SEQ ID NO: 327496 - protein, 96 aa, Zea mays
  Clone ID: MRT4577_61743C.1.pep
RPPPPRLPLCRTRARPRRCQRQPPSSRPSCPAARRPRPSTRARRRPIPARRRSRPRRPTPSRAPTPGTSQPCRRRVPRRTRWSTRRRRRCTTRRYP

SEQ ID NO: 327497 - protein, 48 aa, Zea mays
  Clone ID: MRT4577_61744C.1.pep
SARAKRGEAQVVPRRAVAFPADFRSGTCTTGTAIRTHRCCRHSQLGTT

SEQ ID NO: 327498 - protein, 101 aa, Zea mays
  Clone ID: MRT4577_61745C.1.pep
CIAVRASLQRSLAAARRSLSQRMVGCRSRVARSPASGRPEAAPAARALPALDAGCGIRQTTTIQRRCLLPHRSDTDVAHILQMRDILDHACPDHHDEQHLT

SEQ ID NO: 327499 - protein, 81 aa, Zea mays
  Clone ID: MRT4577_61746C.1.pep
GSSRQSLGAYPRFFVGSLGLMQFFIGVGTPSMGRTPPRSGGWQSTKGFSSSPAGIHFPKGGPGVQVVSRLRSLLAMTDPVN

SEQ ID NO: 327500 - protein, 106 aa, Zea mays
  Clone ID: MRT4577_61747C.1.pep
SSGRPQVKKKKKKKKKKKKNYKKKKKKKKKKKKKNFGKKKKKKKKKKGWSLGPGPPWGGFRRIPFPRGAVRPSFWGAHFPLWGGVYQSPGRGFPPWGRGNPGGPPP

SEQ ID NO: 327501 - protein, 38 aa, Zea mays
  Clone ID: MRT4577_61748C.1.pep
TVSAVCLPSADDDFPAETLCATKGWGKTKYNANNNPDK

SEQ ID NO: 327502 - protein, 64 aa, Zea mays
  Clone ID: MRT4577_61749C.1.pep
RFFPPNKPGVSPGEKKIPPKAFFLFFFPKKKKKKKKKKKKKKKKKKKKKKKKKKKKKKKTRGGA

SEQ ID NO: 327503 - protein, 60 aa, Zea mays
  Clone ID: MRT4577_6174C.1.pep
WYSAAIEIPLTVRARRLLTDTVNTILLTVAPSIREKVCYGRVGFNGTEICPIGALWGSIR

SEQ ID NO: 327504 - protein, 82 aa, Zea mays
  Clone ID: MRT4577_61750C.1.pep
FILDFYSVRTDRNFSGLFASIDHIEFFFLQFYFFYLCNFTLMCWPALSLGVYHHMSTPSHTLWMLKRRYLDWTGLAAGPVKD

SEQ ID NO: 327505 - protein, 64 aa, Zea mays
  Clone ID: MRT4577_61751C.1.pep
GSVMGDERVLFIMDDHEGLADSKRIGVAYNLHMQTKHLGLLTEVLFASKGDFTLGFTRLIMQLP

SEQ ID NO: 327506 - protein, 109 aa, Zea mays
  Clone ID: MRT4577_61752C.1.pep
NRTPSKTLLFVTNLPFRLDGNTFGQIFKDAGVNFKQAYVVKNQRSGRSKGFGFAEFENEADQRKALNAVNGKTVDERTLVVKVALTEAPQQAKKPEENKAASPAPAQKQ

SEQ ID NO: 327507 - protein, 92 aa, Zea mays
  Clone ID: MRT4577_61753C.1.pep
LKINSVIDMIPKAHILMEIIRQPCLVMLLKEIMRYTMMKYIVMHIMKGSVIIITAGLYRLLLLHVQACLLNYVGVSKFLAPAFTQLFDVILQ

SEQ ID NO: 327508 - protein, 104 aa, Zea mays
  Clone ID: MRT4577_61754C.1.pep
QQSITSTICNGSALRNQSGRTEVQHITGAPGVEYLQISKAPLSTADRRPIRGWTYTTLLLRASGTKASRVEIDANYVFLQTKQIKNPLAPIKSYTYGRTCNLTI

SEQ ID NO: 327509 - protein, 40 aa, Zea mays
  Clone ID: MRT4577_61755C.1.pep
SPMAFITIREPGPLHLEDEAAMDCASYIMTPPWPPDVYLA

SEQ ID NO: 327510 - protein, 98 aa, Zea mays
  Clone ID: MRT4577_61756C.1.pep
LQFWLFENRSAVVLKIMFFWISFICKLNLGVVIVLMLTGQLKSSSFCLDSSVTLNSCYLLRRDPLVAALCLFFLFSSFIVLLIFDKLRCCDWLYVQGP

SEQ ID NO: 327511 - protein, 59 aa, Zea mays
  Clone ID: MRT4577_61757C.1.pep
AWATLHRHAWVMHHWNPLLFNVLNDGCQHWVLRLVMPDLVGGLMGQRASASHAFMLMSL

SEQ ID NO: 327512 - protein, 184 aa, Zea mays
  Clone ID: MRT4577_61758C.1.pep
MWDGTGTSCTAPPHSYIVYCCCAHSWYICITACFWNQERRSPLHSRRHPPLPLLFLEMTMTTMKKQQQLLLLLSLMFLVAVTAAAVAADPHPQQVQVQQQQQAQMRINRATRSLLPQPPPKLDCPSTCSVRCGNNWKNQMCNKMCNVCCNKCSCVPPGTGQDTRHLCPCYDTMLNPHTGKLKCP

SEQ ID NO: 327513 - protein, 66 aa, Zea mays
  unsure (1)..(66): unsure at all Xaa locations
  Clone ID: MRT4577_61759C.1.pep
RHQEQSSIQDVKPDXXXXXXXXVVLPGVNLIFDGAELHPFDIAACLQARQPLWLISEASTASSTLL

SEQ ID NO: 327514 - protein, 61 aa, Zea mays
  Clone ID: MRT4577_6175C.1.pep
TEFAMLFIHLQALHLLILWARVAHSHLPRMMVHDADPPINDVPVAFLPSRTETYTCLPRSL

SEQ ID NO: 327515 - protein, 859 aa, Zea mays
  Clone ID: MRT4577_61760C.1.pep
VPNFTAADALRLTGVGRNEFIDIMNKCRSKKLMWKLNKSIAKEMLPTQPVDFPVEPWWGVCLVNFTLEEFKKLSEEETTTIDKICKEEANSYVLFDPKVIDGLYKRGLVYFDVPVYPDDRFKVSRLENFVSNKDQSYEDPIEELLYAVFVVSSANATVAELAATLQADLYQLQAAASFACRLGWAAKVMDANSVLNEERLPAFPSSILSDDEEGSNTSIHSEKSGQQLNGMDSDGPRKISGTAHVGFVVDANVTSYLMMGSLSPGLKSHAVTLYEAGKLGASCIAELCSDLASLEGKKFEGVLEEFASHAFSLRCFLECLQSGGVSANEITDNTSEAKTPRSSVHDIDNAADHLSKVNIEGVADNNHNEFSEHNQCVGELDNSDGNIVSPAMVILESVESMVKNDDKNDSTVQLNVSTESRVLKNKRKYKVDILRCESLASLAPATLERLFLRDYDIIVSMVPLPSSSVLPGPSGPIHFGPPSYSSMTPWMKLVLYTAGHCGPVSAVFMKGLRFRLLPEPLAGCEKALLWSWDGSVVGGLGGKFEGNLLKGNLLLHCLNSMLKQSAVLVQPLSIHDLDTSGNLVTVDIPLPLKNDDQSIESVVAQTNLPKEQILDLTSVLKDLSSKFELSTLGYLRLLRLHRIDEPDKFDPENVSYKWVPLSLEFGVPLFSPKLCEKICERVVASHMLQKDDLIEHSDVMQNVRRQLRELCSEYQATGPVAKLFNKRGSSRDSPRALINSISGRWNLSNDPSTPSGGAPSEHERLKFVGRQRPRTEVVSFDGSTVRSYALDPEHNEEQSSIQDVKPDPEETDSKDVVLPGVNLIFDGAELHPFDIAACLQARQPLWLISEASTASSTLL

SEQ ID NO: 327516 - protein, 144 aa, Zea mays
  Clone ID: MRT4577_61761C.1.pep
MPIGSLFVSRLARSSHALPAAAAAAISQAPRPQHIASPIFSGLGAAARDFSSRALWKGAFVDAFLARIKKNRENMNGKKIWSRRSSILPEFVGSTVLIYNGKSHVRCKITEGKVGHKFGEIALTKRRRPHRTITGKGNQGKGRK

SEQ ID NO: 327517 - protein, 61 aa, Zea mays
  Clone ID: MRT4577_61762C.1.pep
ISQVQRPKPEKRWAKIGPTANHPSIFPYHLQFSFCDIFLNHWRKNEIFSNLFFYNTLYRAM

SEQ ID NO: 327518 - protein, 102 aa, Zea mays
  Clone ID: MRT4577_61763C.1.pep
STISCHDQASLHTVVPGEKQLTARLGTFQLEIWSPIQERTTISPQSFLGMGPNPFLECHQDNHTMPTYRLYAPAGQDLSNYHIPWCSECKSCFTLITPQTCY

SEQ ID NO: 327519 - protein, 170 aa, Zea mays
  unsure (1)..(170): unsure at all Xaa locations
  Clone ID: MRT4577_61764C.1.pep
APFLQGGRGEAPLWISSDPMGSAAPSEVKAIAAGGGGPLGAATFAGNNKKPEPPSRGRGGGDRTATDPSAPERAPTTTFLATETFPGPGAEGGGSKKAPPGATPSGPFRTTKEAGAFSPRGAVPPSTGGTKATTKIFFFFFFFFFFFFFLIFFFFFPFFCXFFSPAXPRG

SEQ ID NO: 327520 - protein, 100 aa, Zea mays
  Clone ID: MRT4577_61765C.1.pep
KNKFGFNFFKGWFQWHPLFQVGFLPPPHLFTGFPNIHFQPVAIARPNAFSILGPPSCNVFFPVRFLKDFNFFFWAPQFKNFGKACFNLKYPKPSRFFPPP

SEQ ID NO: 327521 - protein, 78 aa, Zea mays
  Clone ID: MRT4577_61766C.1.pep
QQNQLQINFSVCAEREENGLNRKIINICYYRIQFYSTSFGILLLGWIAHLWSTFSAIVIKASLKRCLSARAVEGHLRG

SEQ ID NO: 327522 - protein, 67 aa, Zea mays
  unsure (1)..(67): unsure at all Xaa locations
  Clone ID: MRT4577_61767C.1.pep
DGQVNPPPQQEGXQHEHCPPPHPQVWXQTATGREKVERERHESGPGERGKERRGPEEXLPPSHDWSE

SEQ ID NO: 327523 - protein, 115 aa, Zea mays
  Clone ID: MRT4577_61768C.1.pep
CLVALFACLCPLDSAVSPSILLVACLIFLLLARSLPSPTHELLDQHIRRGKQSSAPGEERREAEQALGWRRNSSGERVREEAATLKGVGIWSLTKPHQVGEEAREHIRPASRVPM

SEQ ID NO: 327524 - protein, 35 aa, Zea mays
  Clone ID: MRT4577_61769C.1.pep
STLSVCDLSILFQHIRNSMSITIEVIMLSDLTNSV

SEQ ID NO: 327525 - protein, 33 aa, Zea mays
  Clone ID: MRT4577_6176C.1.pep
FFFFFFFFFFFFFFFFFFFFFFFFLKGTRKKLG

SEQ ID NO: 327526 - protein, 30 aa, Zea mays
  Clone ID: MRT4577_61770C.1.pep
SLFFPTYDRSTSARKAAVSCPSDHQLTSFA

SEQ ID NO: 327527 - protein, 80 aa, Zea mays
  unsure (1)..(80): unsure at all Xaa locations
  Clone ID: MRT4577_61771C.1.pep
SNNILVMYDCYTPAGEPSGTNXRHNAXKSISSPEVTAEEPXYGIEXDNTRLQSRTNWACGWRSGSIPRPHXPYHCGSSAE

SEQ ID NO: 327528 - protein, 76 aa, Zea mays
  unsure (1)..(76): unsure at all Xaa locations
  Clone ID: MRT4577_61772C.1.pep
YSPARCCLSFTSIFARVLVAGSDSNWGTYSTVRYRQGRRPKTQAFSSYIFRVQLLRSDFITYIYIYIYTYIXCIMY

SEQ ID NO: 327529 - protein, 129 aa, Zea mays
  Clone ID: MRT4577_61773C.1.pep
LHGAVAHDLSRSVHVSCLPCWSTASRSAPTCLLMYTDAVPMLTFSKEKLDTADHQNNGLTHMVEDGELAHFYMNFKITLNATSAIVADEGGSRRQMVHGVRQGQHTRCPTRDLSMTPPPRRCTILTYTF

SEQ ID NO: 327530 - protein, 43 aa, Zea mays
  Clone ID: MRT4577_61774C.1.pep
PTRNNIRTVTCIFFHSSYNKSIIWKFHFICQRYMEYLNSNTKS

SEQ ID NO: 327531 - protein, 138 aa, Zea mays
  Clone ID: MRT4577_61775C.1.pep
LLPLCQTPFQLSSLLFISFLSLYFLPILSLLCVCCCVRHRPNSKSRPTTKYRSVTMIITRALSITNFVVASSALSFQVGVLYPWHKQLDDDFEALKREHLRVLTAVEGKVGRTQEPALLQENRPGILSMIGNLAPWKA

SEQ ID NO: 327532 - protein, 51 aa, Zea mays
  Clone ID: MRT4577_61776C.1.pep
TSTPQSLTIGRMCGRSMISTSIWPLLSSDYPPLTNHIGRRMNSKCDHIGQS

SEQ ID NO: 327533 - protein, 91 aa, Zea mays
  Clone ID: MRT4577_61777C.1.pep
PISGGPPGEVVNPLYPGGSFAPPGLAGAPEAFPGLKVKGLKTGPPPMFSMLGFFVQAFVPGKGPLENLPAPIVAPVNTKAWAYPPNFVPGN

SEQ ID NO: 327534 - protein, 79 aa, Zea mays
  Clone ID: MRT4577_61778C.1.pep
PTRPPTRPPSRTESASGEWCVSCSLCCYTLPYHQCLIWNCVMPSVNAAVNDLFLVNLVCMPTECDFYFMFCFLCFVIMC

SEQ ID NO: 327535 - protein, 106 aa, Zea mays
  Clone ID: MRT4577_61779C.1.pep
TSFHRAQSQFNTLANEAGVFFFFFLNQFQPAQITLQHVAQRGRSFFFFFFNPVSTGSNHTSTRCPTRQEFFFFFFLIQFQPAQITLQHVAQRGSSFFFFFLIQFQP

SEQ ID NO: 327536 - protein, 141 aa, Zea mays
  Clone ID: MRT4577_6177C.1.pep
SSKSGHKMSLNFLQALKFEGDTEQPLLGKLSGELSYSKLLITLWLWPQKVNIPLGLAWENWIHRKANGLYEKEVVGHSIGCTLLTSGPMWCGATFSSTTHGYMLADSGTVHDVDASSSACFTILRTSGDTSAAGGTTVVRM

SEQ ID NO: 327537 - protein, 58 aa, Zea mays
  Clone ID: MRT4577_61780C.1.pep
MASWAALLALLLSAFSAAAAAQLDERFYGQSCPSVEDVVRKEMVRALSVAPSLAGPLL

SEQ ID NO: 327538 - protein, 174 aa, Zea mays
  Clone ID: MRT4577_61781C.1.pep
MAIYSFLSVRKRPVVVVAAVTLFIVVSSLFLLFSPAPTALPFFSSSSSHLSSQASIAAVSSNAFPPETPTSVVSNWVSSNTSADRVSADASPPVVGTAIASDAVSNSTADPPRPDTTAAAGDAKADVSQPDHGMPPAATEASGSAGNGETAAGVSSERDEEGQGGGGAVEELPS

SEQ ID NO: 327539 - protein, 191 aa, Zea mays
  unsure (1)..(191): unsure at all Xaa locations
  Clone ID: MRT4577_61782C.1.pep
IEEQDREGQPTWPLKPTSPIAQENLRAEERAGRIPRHVTPVPGEGGHTCRLSLSPGAAAAALDLDGNSGAPLSICMIGAGGFIGSHLCKKIMAETLHGILCVDIYXYKIRQLVXPASSHIELCICFQRLNIKNDSRXEGLIKMAELTINLECICTPKDYDXRPLYCIYSDFIDVLSVDKYCSDDSKRLIRF

SEQ ID NO: 327540 - protein, 115 aa, Zea mays
  Clone ID: MRT4577_61783C.1.pep
CMRPISNKKSHSQRVGSKVRGATKKKNKKKPGYREARRSRASMTDPKLRALDDQTISQEDSRPKLWARSLKLLYSTSWTRCHSPGYPLKKRPLTSGLAHNRATPMRFLLPHFCPA

SEQ ID NO: 327541 - protein, 82 aa, Zea mays
  unsure (1)..(82): unsure at all Xaa locations
  Clone ID: MRT4577_61784C.1.pep
MQRVLSERRQKSNVLTGMTRNHVFMAVLXSCTGIFQFIMVHHLREYPNTTPLIIHQSLSSLLLLLPGMPIDDAAKLIPVCSS

SEQ ID NO: 327542 - protein, 173 aa, Zea mays
  Clone ID: MRT4577_61785C.1.pep
MHSGARKLMWGTSPDRPDDHDVVIVLASLLCALITVLGIGLVARCACARGPSAQAAAAANRGVKKSVLRRIPTVPYAACSQGEGDDADECAICLAEFEEGEPTRVLPQCGHAFHAACVDRWLRAHSSCPSCRRILSLQLPPGERCRRCGARPLDDGDAGWKPTYYSAMPPFLA

SEQ ID NO: 327543 - protein, 58 aa, Zea mays
  Clone ID: MRT4577_61786C.1.pep
RPVKVLKLWSNWLDMTRKGRSGVACIRIFGVWRGATPGEIRSPQCAQEDSGLVLAVEQ

SEQ ID NO: 327544 - protein, 1298 aa, Zea mays
  unsure (1)..(1298): unsure at all Xaa locations
  Clone ID: MRT4577_61787C.1.pep
MIEKLTGTISVLQNDVESLKKDKAPSSSPSGSGGQHHIDRPPRFQKIDFPRFDGKSDPMLFVNRCESYFHQQRIMEEKVWMASYHLESVAQLWYLQLQTDEGTPRWHRFKDILQLRFGPPLRSAPLFELAECRRTGTVEEYQNRFQELLPRAGPLEERQRVQLFTGWLLPPLSHAVRIHNPQSLVAAMSIARQVELMELDRAPAPAQTRPAARAVLPPPPPRPAPLPAPHVPLTLPAPPAGAAPGRGEGRRLSTEEMAERRRLGLCFNCNDKYSRGHNRFCKRIFFVEGVEIMDEDGTDHPDGPNAEASCFSLQAVSGCPVADTMQVAVMLGATPLVALLDSGSTHNFISEAAARRSGLPQQQHPRLSAMVANGERITCMGVIRNAPLTVGGDAFLADLFVMSLAGYDVILGTRWLGALGPIVWDLACRRMSFQHHKRTVCWTGVPTSSAPVLGATTAAEPLLAALLDTFATVFAEPAGLPPLRAHDHRIILKQGAQPMAVRPYRYPAAHKDELERQCAAMIEQGIVRRSDSPFLSPVLLVKKPDGSWRFCVDYRALNAVTIKDAFSIPMVDELLDELHGARFFSKLDLRSGYHQVRMRPEDVHKMTFRTHDGLDEFLVMAFGLCNAPATFQALMNDVLRPFLCRFVLVFFDDILIYSKNWEEHLHHLRIVLEELQRHQLFVKRSKCAFGAPSVAYLGHVISATGVAMDXPAKVQAIFDWPVSRSARAVRXFVPNYDTVAAPLTALLKKDGFAWDDKAAAAFGVLKAAVTSALVLTMHDFTKTFVVECDASSHGFGVVFTQEGHPVAFFSRPIAPRHQALAAYERELIGLVQAVQHWRPYLWGRCFVVKTDRYSLKYLLDQRLSTIPQHHWVDKLLGFTFTMEYRSGATNVVADALSRRGTEESVLLAISAPRFDFIARLRQAQAMDPALAAIHEGVGTGTRDAPWAVADSMVTYYGRLYIPPALPLLQEIVAAVHDDGHEGVHRTLHRLHRDFHFPNMRRLVQDFVRACKTCQRFKSEHLHPAGLLQPLSVPSAVWADIAMDFVEALPRAFFTDIVRLHGIPQSIVSDCDPLFTSSFWSELMRLMGTKLLMSSAFHPQTDGQTEAANRVIVMYLCCLTGDRRRQWLRWLPWVEYVYNTAYQSFLHDTPFRVVYGRDPPSIRSYEPGDTRVAAVAQEMEAREAFLADVRFRLEQAQAVQKLQYDKHHREVTYEVRDWAFLRLRQRVAVSLRRTITGKLKPRYVGPYHVTELINDVVVRLELPPGARLHDVFHVGVLXKYVGSPPTTPSALPPLLNGAV

SEQ ID NO: 327545 - protein, 147 aa, Zea mays
  unsure (1)..(147): unsure at all Xaa locations
  Clone ID: MRT4577_61788C.1.pep
MADAEDIQPLAXDNVTGMCKADFAGDDAPRAVFPRIVGRPRHTGVMVGMXGQKDAHVXHEAHXSKRCILTLKYPIEHGIASNWYDMENMWHHSFYNELRVEPEXHPVLLTXAPLNPEANGQKMTQIMLETFNVPAMYDAIQCVLSVH

SEQ ID NO: 327546 - protein, 69 aa, Zea mays
  unsure (1)..(69): unsure at all Xaa locations
  Clone ID: MRT4577_61789C.1.pep
STIXHLEGLRGYAAEDPVNEQFRTLSNSLVSAQAYVGLFTHGPAVVFLHHRGFELHLVFDNSQPSAAPE

SEQ ID NO: 327547 - protein, 47 aa, Zea mays
  Clone ID: MRT4577_6178C.1.pep
RMNSFVHFKSPVHIPLLLCWPLFWLLFHSVPIRLDPAPVGGLKSLSL

SEQ ID NO: 327548 - protein, 94 aa, Zea mays
  Clone ID: MRT4577_61790C.1.pep
CVPWQYTCRYTMLLVMVVLIALDIRPDPYSTAAESRGWRTGCLGFCIESARGSGCGAVLRKIRLGMPKPSSVETPALDGWLDVRRGSNKDREHN

SEQ ID NO: 327549 - protein, 178 aa, Zea mays
  Clone ID: MRT4577_61791C.1.pep
MTIKTLKARILRALKSSLPAAGGADGAAPPSARQYHGDVDALSDDASFFDAREPETPTKAHRRRRPSAEPLDAWELVDPDQDQDQDQDQEDARASPDPLLGFPRGGGGSGSGSGSGVVLYTTTLRGVRRTFEDCNGVRALLEGLGARFQERDVSMDRGLRDQLWAAAGERAVPPRHSC

SEQ ID NO: 327550 - protein, 42 aa, Zea mays
  Clone ID: MRT4577_61792C.1.pep
HLNKYSDLSLTRPAQQLFTSSVHQLSLNFFDLDNLFNYWIHN

SEQ ID NO: 327551 - protein, 68 aa, Zea mays
  Clone ID: MRT4577_61793C.1.pep
ICFCLCETNHLRSCMRETVFDSGGGQTMCELLLVSVRGQTMPLFSFQLPAFIGGNCQFQKQTHTTISF

SEQ ID NO: 327552 - protein, 200 aa, Zea mays
  unsure (1)..(200): unsure at all Xaa locations
  Clone ID: MRT4577_61794C.1.pep
MWALPDHEFRRALGPSLLQVRSARRRGSRSRRARHPPRRNCEHRSLRSTAGADLRPXRRPSRRGAGRDDGTRAPPRPPSSWPTPPAPPXARRRPPPSASPWRRRRPSTARSRPWTGRSRWTRTPRSXPPRGRRRLTCLDARKXRRAPWRRSAGRGTPSPRRSARPPRPRRARTACPLPRRHQRHPSCLLASSAFPSDSGA

SEQ ID NO: 327553 - protein, 80 aa, Zea mays
  Clone ID: MRT4577_61795C.1.pep
SRASYLFPFACIFFVLFCSIPRISIHIKFCRANTVVRVDALCLHFCLVLVKTSVAVWTMLHSFHVNYLGIPVPSSSGFLV

SEQ ID NO: 327554 - protein, 53 aa, Zea mays
  Clone ID: MRT4577_61796C.1.pep
PFACDLLSFVMYQLHLMPSNLIIPSKECLPRQPLCSSRLVPSWSLFKPLLVHP

SEQ ID NO: 327555 - protein, 119 aa, Zea mays
  unsure (1)..(119): unsure at all Xaa locations
  Clone ID: MRT4577_61797C.1.pep
FGPRPYVENIMIHADPFPKYCVAFVVAAPIXLEKWALQQGIKYSDFSNLCQKQKAVKKVLGFLTKASKQARLXSFXIPVKIKLIPKPWTPESGVVTPALKLKREVIRKTYENDLGELNA

SEQ ID NO: 327556 - protein, 174 aa, Zea mays
  unsure (1)..(174): unsure at all Xaa locations
  Clone ID: MRT4577_61798C.1.pep
MDSEDFEPAANARSRLRREAMVEADADQDDEEDDSDHELELXLERRMRRSSALFIVLEAVRDRDEVRGSDDTDSDTERGRKALILINSNNEGIILKGTFGSDDNQEDSSNTSSGVSLGDYFLGPALDTLLQRMAESDLSRSGTPPAKKEAVAALPTVNIEEALGCSVCLEDFEM

SEQ ID NO: 327557 - protein, 113 aa, Zea mays
  unsure (1)..(113): unsure at all Xaa locations
  Clone ID: MRT4577_6179C.1.pep
GGHRDGPQPNAPTKAKTRTENGPGGGQXGGEREPHRPPEEEAHAAARRRQKGGSXQEDDEDHXGTRXGRATGGPXXTTSDDEEAPRDEDGPRRGPKRAQRRERHRTTKGAHPA

SEQ ID NO: 327558 - protein, 69 aa, Zea mays
  Clone ID: MRT4577_617C.1.pep
VLPPSLFCCGGECKRRAGGKNSHGNLSHNGPVEARRQGLGAVGSFYKNRNGFVVLLTGDDCKKGCFFIL

SEQ ID NO: 327559 - protein, 59 aa, Zea mays
  unsure (1)..(59): unsure at all Xaa locations
  Clone ID: MRT4577_61800C.1.pep
GKRCDASQXSIKGKGYXKANFLKGKLXXMLFEHXYQRQYVLESHSQXISVWVLRASXVY

SEQ ID NO: 327560 - protein, 73 aa, Zea mays
  unsure (1)..(73): unsure at all Xaa locations
  Clone ID: MRT4577_61801C.1.pep
RTTVAKHGPRKRKPGPKKANAAPRKQDQPPHSGRERGPSRPKXGXPPPPPINXXXKXFFFXXXXXXXFFXLKR

SEQ ID NO: 327561 - protein, 88 aa, Zea mays
  Clone ID: MRT4577_61802C.1.pep
KNLRGALVAEFLRRFLPSLDREALCGPLIPCSSSWLPQRGDRDSPDYLPNIVRTRPHLAPVLAHVSRSLRAPLSVRVSLHHTNQPCPR

SEQ ID NO: 327562 - protein, 148 aa, Zea mays
  Clone ID: MRT4577_61803C.1.pep
AAGAGVVLYTTTLRGVRRTFEDCNGVRALLESLGAPFQERDVSMDRGLRDQLWAAAGEKAVPPRLFVRGRDLGGAGQVLALHEQGRLAPLLPCGEAGARSRCGACAGVGFVVCGSCDGSRKAGGDGGGRCRGGCNENGLVMCPLCLSI

SEQ ID NO: 327563 - protein, 116 aa, Zea mays
  unsure (1)..(116): unsure at all Xaa locations
  Clone ID: MRT4577_61804C.1.pep
MGSPTMAAKTSCLLMLLDLSXSSAPASMVPQCSHARIAYFIAPYRSPAVSSVYENPVIHPYRIQQGLAAGILHLSPLLLEQLARLLQQLPLVHSLEHNIRAQQLQQLVLGNLAAYS

SEQ ID NO: 327564 - protein, 108 aa, Zea mays
  Clone ID: MRT4577_61805C.1.pep
LPRRSWILRAAPFFVYIETGADIIQQKNTSLIKLTQLVGIVKLHLKQEEAAIVITNCLNRIQTCYKSLGLRSDTYSMRYRKLAVALYITREPRFNQKLRSCCNCWHSK

SEQ ID NO: 327565 - protein, 42 aa, Zea mays
  Clone ID: MRT4577_61806C.1.pep
CSLLTLRVPQCTVPVTCGAGSSWLLLPRLSPTLSPLALCFCV

SEQ ID NO: 327566 - protein, 102 aa, Zea mays
  Clone ID: MRT4577_61807C.1.pep
ALPFSLASVDARFSPIYPGIREWMFGTVGSAVNHARASVSSTEVFYRTNVQSLVARPLRRLHPCGLVPQHLHGSLGVVHRAAKPIHSTHCLEAGIICNQTGA

SEQ ID NO: 327567 - protein, 123 aa, Zea mays
  Clone ID: MRT4577_61808C.1.pep
MNAKRLTPILLAVLMMTCLVFAANCAIAGSHDVETTPASGLRRPPPDAEKTMLGSSDINIKLCLKAQCAGYKSCYCCFTLPGLPCWPDQNTCWQECPNRQRLRSTRSMKHSDAMPSIGPSRFS

SEQ ID NO: 327568 - protein, 117 aa, Zea mays
  Clone ID: MRT4577_61809C.1.pep
KLFSIVLGLKVYFKIWILQKKDNFQHLHLAKEQGLSQETCHASGQTARRDGAAVGGEPCNLHVLETLCAGRDEYTHRHSANAVVRDRYETWRAQLLQGQRPADVLRGSRSLLRGQAR

SEQ ID NO: 327569 - protein, 136 aa, Zea mays
  unsure (1)..(136): unsure at all Xaa locations
  Clone ID: MRT4577_6180C.1.pep
NLACSPGQKLNLPTLATITSXSHPRTVDLRRVLREYHAKKILLDEYVXTLMQEINTVXNLQEDLDIDXLLHGXPERNDLVAYSGEQISGSSFTANGXRHTYGLRSXQPPIIYGDDVPPLPPDRPLPGDLTDWASIP

SEQ ID NO: 327570 - protein, 847 aa, Zea mays
  Clone ID: MRT4577_61810C.1.pep
MPASAHKNLDSGCPRRSTRFKDIHVVYEDSDRDPSSFKRIKTEVIDSELSVGSVSDKDSEHNCHDVLLKDLRTQCKAKNRKISKITLEGCGIKNQVKTEDDIDLDKPIVALKQKRLKTSPAKANIKMDALRSSPCAAKEKDTTSARDKILSSAQTFLLKATMQDRGLEKPGRRIAELEQSKVVIDSAEEIVGEQIYCAEVNNTAGVLAGCVKPDVLYEIKTEDTNYSEFGTSMCSIKNPDHSSFELQQKLVDDDDCVPPFCFMTRPAQLADVCDHSCEQTCSSKENNSDDITAAKATDVVSSLGLTDEVSNHQKTSENITNLDVDKSSTANGLMASFSESCHDRIDKDEQWNLFAHGNEPAKILEELSPIDESSTDTQSDLCRSTEMNFTSLEGVVRMEAEGQLDSIVCCGVRPKHMLLDMEIGHTATGTFTFDKTIDLAHPANFVAQDGRLESIVYDVLNNHAQRTTSKSKSSVGLPDTAVLQSSLIEFTDNCLEDKRASDDKFSHPNNVDLPLKDTLNSTIDYDICRSINNEGSEEEIVPQHQLYQSCSDKFNLSSVMPEISNAEKSQKLSAGTQNSSATSLETDGRIKRPNFFVDEESIEEHAPKVLLSKRKIMSPTSQEKLYSAVTGIDLCDGVQRSNSKIIIEDCDKTTISLPQPAHMQGKSMFHTDRRLKDRTSVSPTSKGLLKSTGSPPNQQTCSCMRSSPVVLDTEKAVEFSQRQMHDIENIAAKLIRSLKHMKSIVDESLSTEAYSLLPNFNIAQIRAASEDALEVERTTRKWLSIMNKDCSRFCKILSLAKKNDVSHPEAPRKQRKITFADEAGGMLCHVKFFKDGQASLSECQSDL

SEQ ID NO: 327571 - protein, 66 aa, Zea mays
  unsure (1)..(66): unsure at all Xaa locations
  Clone ID: MRT4577_61811C.1.pep
SYRHDFGYMGPIRLNANPFLVXLVPLTKSSSQGIAGVPQRVSSRVKANGLVVHRGPQRPFDVFSNL

SEQ ID NO: 327572 - protein, 70 aa, Zea mays
  Clone ID: MRT4577_61812C.1.pep
KAKEQEAPGRFSPKFVMRKGFPKMAKAVKTRVSGNYYRPVLAKPPLVGLSPGFPTPQVPKSGVKKKNGRS

SEQ ID NO: 327573 - protein, 161 aa, Zea mays
  unsure (1)..(161): unsure at all Xaa locations
  Clone ID: MRT4577_61813C.1.pep
MRLLTCLGSDNTERSPRTMKGGKKKTDDACSDNEGXDITAAASLRARHMGXKNLGSPKQGTRIASEGLKHLHHEACLDELQAHDCQDDKKXRSEAEEEHRTNGLTICXGMKFTTDXLRCLAMTWLTXIQLHDDVKTTEPYMVSLDCISLPNRGPNHIQTTS

SEQ ID NO: 327574 - protein, 58 aa, Zea mays
  Clone ID: MRT4577_61814C.1.pep
KKKGRGPFFQFGNFPGKGPGWKISWGAFFLGRKYIKGGPLKYFCRNRAKAPGLFILLP

SEQ ID NO: 327575 - protein, 213 aa, Zea mays
  unsure (1)..(213): unsure at all Xaa locations
  Clone ID: MRT4577_61815C.1.pep
ARTLPLVRGRVPRCLLAPILLCSAPRSSSPRAAVLCLVLSQPRPCARRWSSHALGHPPPCSLASFSSYALSALWYLAHGRTPAVLVGISLCASLLPCARTLLPSSVLSISLRSVSSSLCAPLFMGRGGVVAWETSCTSRQLSWPQSSPRHRVRSTTVSXELRXSLAVRSNIGYRRFCHNVHERSLLYLFRYGQFLHGSISCWLPPCALAPHPS

SEQ ID NO: 327576 - protein, 55 aa, Zea mays
  Clone ID: MRT4577_61816C.1.pep
CGQVSHYLQIFLQFIKSHSILGTMHREPGITMCAALLLPLCPRYLTVFADHEQSS

SEQ ID NO: 327577 - protein, 79 aa, Zea mays
  Clone ID: MRT4577_61817C.1.pep
KKKRGGRFFLKKRAPPIMGLSRLGREFFKHLRFQFRGFKKILEGKGPLKKGGKKNNLGKGVVSPPTFVYWKKTRYPPGG

SEQ ID NO: 327578 - protein, 99 aa, Zea mays
  Clone ID: MRT4577_61818C.1.pep
QASAMSKPRLDGKVAIVTGGASGIGEAAARLFASSGATVVIADVQDALGEAVAASVGPRCAYARCDVTDEAQVEATVARAVAAHGRLDVMLSNARVLLP

SEQ ID NO: 327579 - protein, 92 aa, Zea mays
  Clone ID: MRT4577_61819C.1.pep
ADSWSDSWAVSWADSWALLKIVVRVGLASLTEAFFNWAGFWSAMASNVTFQSRNVLSKKLMVHKEESLYNINLFSIITDMSFFLYIIVTLLT

SEQ ID NO: 327580 - protein, 174 aa, Zea mays
  unsure (1)..(174): unsure at all Xaa locations
  Clone ID: MRT4577_6181C.1.pep
MSSPSMRRKMXLINLMMMDYXIEYVXEGMQECFVDCWSXNLNIYRRGLXRXKVDVPHDYHYQPXSTACHNKMYHPXTTECXGALMLSAYNQTWKPMIELVNEDEDCLTQLIVYILNLHEPLYGDAPSVMMRDRPAYVAQSTDDITSKRRMLVSARPTSPVTNSCMKRKMTRLMK

SEQ ID NO: 327581 - protein, 69 aa, Zea mays
  Clone ID: MRT4577_61821C.1.pep
WGDIAGDTPWALRSLYLAAACSMRYQSKSRHVFGVVPLQCHGSFGRSRYSTRALSVIGTVHPSFGSHQP

SEQ ID NO: 327582 - protein, 69 aa, Zea mays
  unsure (1)..(69): unsure at all Xaa locations
  Clone ID: MRT4577_61822C.1.pep
DKKDKTLDVGGRKIGTLKTRGGCPFFLLDFDFLFLFFIFFYLSAFLFFPFSLFFFFLKTSSQCNNQFSX

SEQ ID NO: 327583 - protein, 110 aa, Zea mays
  unsure (1)..(110): unsure at all Xaa locations
  Clone ID: MRT4577_61823C.1.pep
MATKVATARKVQVATMKVAPMAERATVQVPVKRMDLSLQKNHFPPCVQNHIHYFLGGRLVHLYLDVLKLTGFPTQDIXMSRLFTMHMLLASRNYEDTVTVLYLVTINYGH

SEQ ID NO: 327584 - protein, 64 aa, Zea mays
  Clone ID: MRT4577_61824C.1.pep
ITRVLSQNLYRRFCNIRGGMTNISCTPTITRASRRRSPCINLPDEKGIECPPRLSSSLEEQLQR

SEQ ID NO: 327585 - protein, 419 aa, Zea mays
  Clone ID: MRT4577_61825C.1.pep
MAVSFKYWDDCLDPEDMRLMWQDPVVSKEWNDAGEEQGQKVHLSRDPDGEAYLTQTEMMAVAAITVHRHFKSQLDPYMIGALAEIASGRRLFVDTYDRKTKETKVGILQVAPEVAQWLGRELGYKSYDIEDNTNLLYWPLVNVYFGAAYAKWLFSCDDRQRTEEFVVRAYKGGKKKAAHKSTSPIFQRYLYVKENLLSIRQPEICHDLAPDQEKLSSTESQLIYWDSKVSEADMDAMWKHPDVYKEWIKSGERRGNVRFSHDAKNRPYLSRVEVKAVAEIIISRHLSTRGVKPEALAALAEVCSMRFVHGVSTRTGLMGIDYPTAVWLSRDCGYRAYTLISVDDLYNPFASMYFGASYLAWLSQYEGREQSYEFIVQAYLGGPENVSLQETGPFWNQFLESLTQYQDPKKDNNNSCCIL

SEQ ID NO: 327586 - protein, 94 aa, Zea mays
  Clone ID: MRT4577_61826C.1.pep
GKLVSASDDLPHVWKIGSSPQAKKAFPTAKDASGHDHPKLGYTRCLMMAMEFWTCVCSYVPHRTMCLMPITMYQIALQYEPILSPCHQPMQAYT

SEQ ID NO: 327587 - protein, 109 aa, Zea mays
  Clone ID: MRT4577_61827C.1.pep
MCPQPTPDQLILRAGTPLLRASDQASASVLCSNGRQCLGRAVPRREPGGVRHGQRLRWQLPHADPVHPAVCLCTAIKGEVLGIKLNLPVDLSLILNHCGKTVPTGFKCL

SEQ ID NO: 327588 - protein, 131 aa, Zea mays
  Clone ID: MRT4577_61828C.1.pep
MAGNASVALFLAVNLVVFAMASACGGNCPTPTPSTPSTPTPTPASFGKCPRDALKLGVCANVLGLIKAKVGVPPTEPCCPLLKGLVDLEAAVCLCTAIKGEVLGIKLNLPVDLSLILNHCGKTVPTGFKCL

SEQ ID NO: 327589 - protein, 128 aa, Zea mays
  Clone ID: MRT4577_61829C.1.pep
MAGNASMTLFLAVSLVMFAMASACGGNCPTPTPSTPTPTPASFGKCPRDALKLGVCANVLGLIKAKVGVPPTEPCCPLLKGLVDLEAAVCLCTAIKGEVLGIKLNLPVDLSLILNHCGKRVPTGFKCL

SEQ ID NO: 327590 - protein, 131 aa, Zea mays
  Clone ID: MRT4577_6182C.1.pep
FYADSISRDAEGLLAKLKDSATEIVKELRSLVQNYSSRRVVQEQDGGITSLTAYLMRYIRLLTKHKSSLDTMLGHGHTDHLLTVEVINPTARLLLELIADLDSVLEKQTESFSSRELQCLFLMNNTHFILQ

SEQ ID NO: 327591 - protein, 84 aa, Zea mays
  Clone ID: MRT4577_61830C.1.pep
GYLEAGQCKIRKTLPKWSSQVRVSAVQDVSPLDDGLSWRKYGQKDILGAKYPRSARRRHTIERTIFFRIQTGLRARTSGAVSLC

SEQ ID NO: 327592 - protein, 107 aa, Zea mays
  unsure (1)..(107): unsure at all Xaa locations
  Clone ID: MRT4577_61831C.1.pep
KLFSAMVVRRPAHLFLDELGVGYDEAEXYVGGKQAALFRSAGMRRRLARGNVKLFNAVAVEDLIVRQGRVGGVGTNWGXLVSMNHXDRKSYMDPNVMEXAQVVVSSC

SEQ ID NO: 327593 - protein, 704 aa, Zea mays
  unsure (1)..(704): unsure at all Xaa locations
  Clone ID: MRT4577_61832C.1.pep
TPTKREASSSPCPRACVRAWPEAGWEEDLTPSRVAVLGAAARDRGPTRLPPPLGTRSSWRSCTCRLPVLCNLQNVSASSVNXMEGLLTLDDWKERRSDVDNSEDERRRLSIGSLKKKALNASNKLTHSLKKRGKRKVEHRASSFTIEDVRDEQEERAVFTFQQKLLDMNLLPDKHNDYHSLLRFLKARKFDTEKAIHMWAEMLQWRKESGADTILEDFSFEELDDVLCYYPQGYHGVDRQGRPVYIERLGKVEPNKLMHITTVDRYMKYHVQEFERAFRDRFPACSVAAKRHIDSTTTILDVDGVGLKNFSKTARDMLSRMQKIDSDYYPETLHQMFVVNAGSGFKLLWSSVKGFLDPKTASKIHVLGTKFQNKLLEVIDASQLPEFLGGTCTCAAVGGCMRSNKGPWNDPDIMKLAHNKEAKFTRHTRRLSEIEQGRSSFARLHLLKGRNSDTSTVESGSEIDDLGAPIMRSTVGCSRLAPVREEMQMRARDSAAYYSCDDHFVVVDKTVDYGRGGSPSDKSSASEVRTHVRPLDASTAXPTWQVPQVTGELQLCLKRFQXEGVFRRFVRLLLAFIVKVFAFFHIVRSQQETRVNNLLPPAEPELISDDHPAVETFNVDHISPVIERLQRLEGKVDELGSKPPAIPVEKERSLLESWDRIKCIESDLERTKKVLQATVRKQLESAESLEEVIRSSLPRRRFCL

SEQ ID NO: 327594 - protein, 239 aa, Zea mays
  unsure (1)..(239): unsure at all Xaa locations
  Clone ID: MRT4577_61833C.1.pep
MGLGLRLPFCLLLLLLVSLGSAQGRSTVFLDIQEEARGPGQIINDQLTLSKIPVRVERGSPLCPACEKFTDEALSYLSQKQSQDKMMEVLHEACSQTFSLEKKCVEFVDSYATLLFAKIAEIKPEEFCKRNGLCRDNALLSGVRSESTCVFCHHLMDEVLSKLKDPDAEFEIIQILLKECKKIEGHXQQCKRLVLQYIPLILVNGEKFLEKNDICTIVQACDAGKRRWSAILPRGLLRD

SEQ ID NO: 327595 - protein, 59 aa, Zea mays
  Clone ID: MRT4577_61835C.1.pep
LESEHQERVLRNKTGITRCRSFFHPGVSGVLTPEPKKTCQTLGFPGTTFFNPAVLVVYW

SEQ ID NO: 327596 - protein, 85 aa, Zea mays
  Clone ID: MRT4577_61836C.1.pep
VRSAQFISKVCTRQEPLISFLRWHVSDRLSCYSNLCPNLMRRTKNDYTGHIPKKFFVTSEHPASSNILAIAFTVVALRPDESFMR

SEQ ID NO: 327597 - protein, 136 aa, Zea mays
  Clone ID: MRT4577_61837C.1.pep
MLQRAASNAYSWWWASHIRTTQSKWLDANLQDMENRVKIMLKLLGQEADSFGKRAEMYYHTRPEVISHVEQVYRAYRALVERYDHISKELHKANHTIATACPEEVQYAMLEEEDHDFPKAITPIQTHQSSVQEILH

SEQ ID NO: 327598 - protein, 127 aa, Zea mays
  Clone ID: MRT4577_61838C.1.pep
FNANPGDLMNLHTKGTKKPGLPGAPPKPRGGETNQPQRGHRKKLQAKGGETRRPHKRQKGGGKKGAPPRERGSQPHPHFKSQNNQGKGSPPNQGSPRRTKPARKPKAEIQEIEPLDAKGRVREGGNQ

SEQ ID NO: 327599 - protein, 547 aa, Zea mays
  Clone ID: MRT4577_61839C.1.pep
MASRKLGHYFRAYHMVVPSSQPLKDIMRNREATGRIIKWATELNEFSIDYVHRSSIQSQALADFIANWTLGAHEEEATKDAEAWTVFCDGSWGTFGAGAAAVLVAPSEVKTCYAARLNFSCTNNIVEYEVLLLGLRKLKAMGIRRAILKTDSQVISSHVDKTSKARDPKLEKNLDIVRRLEASFEGFSVKNIPRGENEHAYLLAKLAAQGLPLPLEVFFETIKAPSVELLERAVLAISPMHSKDWRTKIIYFLQGNCLSDDEVYNKRMEARTRPYVIIEGELYKHGVCSPLLKCLSRTEGIELMKEIHVGSCGSHNRSRPLLGKVFREGFYWPKAASDATDLVQKCENSQKCARDQKQPSSLTQLIQPTWPLQRWGLDLLGPLPPAQGNLKYVVVAVEYFSKWIEANPLATITSVTVQKFFWQNIVCRFGVPKAITVDNGTQFDAGAFKDFCDQIVTKIHFASVRHPESNGLVERANGIIMTGIMKLIFNQPRGKWPDKLIKVVWSHNTIASRSTGFTPSMLLFGDEAITPKKKKKKKKVLCVVTTA

SEQ ID NO: 327600 - protein, 128 aa, Zea mays
  Clone ID: MRT4577_6183C.1.pep
RPCPGSWSLSFWPRGCPPSAWRCAGAGGCGGPGPRLAPRRFLCRWCLGSCRRRGPRGRAGACGVGSGAACRSALWAWAGGTPWLPASCSSVVLVPSALVSGAGCPLCLLRLPAAWLLGSCRRGLGGPG

SEQ ID NO: 327601 - protein, 69 aa, Zea mays
  Clone ID: MRT4577_61840C.1.pep
FKAMSIMNSFINDIFKKLAPKAAKLARYNKKPPFPSREIQTSVRLVLPGKFPKHPVSKGTKAVSKFPSS

SEQ ID NO: 327602 - protein, 58 aa, Zea mays
  Clone ID: MRT4577_61841C.1.pep
NPRLKRFFKFLFQILFLKETFALLQKRRIGIRFYFFFGGPGGFLNPRVFRIKFTKKMP

SEQ ID NO: 327603 - protein, 139 aa, Zea mays
  unsure (1)..(139): unsure at all Xaa locations
  Clone ID: MRT4577_61842C.1.pep
DXKQEAMKTNTSQFQDHCPAYLKQIYRNKVTSIIVLVFTARDIHLKYIFSSSEIVQHKLKPGEWIGGLSSTTQVLCLTPHGSKFQAKVKNIPYFVPYSHDKQAQGPALVAVILTWAMVPLCMGGPGAQGLSYPLQVKFF

SEQ ID NO: 327604 - protein, 60 aa, Zea mays
  Clone ID: MRT4577_61843C.1.pep
NKTGNIMNNFIIECDKINKYIFAIHTDTEIESCLIQNQNNTDNFTQRFLAQVANIICIYR

SEQ ID NO: 327605 - protein, 121 aa, Zea mays
  unsure (1)..(121): unsure at all Xaa locations
  Clone ID: MRT4577_61844C.1.pep
IGQNGLKVAPMLRLSPLLPFSLGSSVYGLTSVKIFPYVLASWLETLPGSCANVSAGAIGRPLIQHXSAIGLGGTDLPMATGRCIIXYTALAAAYVAGLPKHDVKQIPHYHRKQAKYKGPSS

SEQ ID NO: 327606 - protein, 115 aa, Zea mays
  unsure (1)..(115): unsure at all Xaa locations
  Clone ID: MRT4577_61845C.1.pep
LSSVLFCCWXVSFXSSVLXFPVVAXSFLLXLCFLLXXVSCXRXFVPGSSWXXSVAGFFGFLPXXPXXLXXSGVXVAVSFLSSTEAPXXXPXFLKQYLGGXLSXSAXSFSPPPCGS

SEQ ID NO: 327607 - protein, 80 aa, Zea mays
  Clone ID: MRT4577_61846C.1.pep
PRSIRLDASSCSIKYEPWFYQPSCMVAAVVRCSGCVAMTCMCRSTKDVRWTKAGGYARRYPQVHLVGFSPSQSGLRSSSK

SEQ ID NO: 327608 - protein, 291 aa, Zea mays
  unsure (1)..(291): unsure at all Xaa locations
  Clone ID: MRT4577_61847C.1.pep
PILDNVLCALHSSVSHFLLNATRITSRSFIVTTIRFRQTQSQCTTPASSLPPLAPRSPLLRTTXPPALDTTTLTSTTTRVITLTQCNPTVTDCPLRTHTSTEVVVTTSTAXPRSLPSLPPLSTLLLPPASTSPLSTQLATTXPTIVNTPTISTTKKAPLPKTTYYPAGTQPSMLVLLLPSLTSPSFLSPAATAPPRSLVTRLLLPPPRLLQASPPLVPTVSSPLQASLVPLWSPPWLLSSSSTFHLVDLSGLSLDRCRTFTSYYDTFLFFGRTFGDLFQCMILALAARHLL

SEQ ID NO: 327609 - protein, 39 aa, Zea mays
  Clone ID: MRT4577_61848C.1.pep
APTRAPWSVPRLGCRWRGTGRTFRSISTSINYLHLVNLY

SEQ ID NO: 327610 - protein, 64 aa, Zea mays
  Clone ID: MRT4577_61849C.1.pep
YLRRSAASSGPGFAAPIILFPSTEPDVTEPGGLAPIVVTNCGFATTTAPGYYFSSHIIRGVAYI

SEQ ID NO: 327611 - protein, 165 aa, Zea mays
  Clone ID: MRT4577_6184C.1.pep
MAILDRFRGRDSTSTSESTVLEKDVEAKPQMLKGGMKEIFRMRIIAMAIIVSMGGFIFGYDTGQISGFLEMPDFLERFADNRDPQTGKRSFSNWKSGLIVALLSIGTLMGALIAAPIADKFGRKYSIVFWNIIFCVGVIVQITTTNVWYQISLGRWVAGLGVGAL

SEQ ID NO: 327612 - protein, 54 aa, Zea mays
  Clone ID: MRT4577_61850C.1.pep
KYIFFFFFFIRNTSQSVLEVPTYRLHHDSPLNQYLKFQHTDYIMTVHLLLLSYK

SEQ ID NO: 327613 - protein, 45 aa, Zea mays
  Clone ID: MRT4577_61851C.1.pep
DGERVSRSREKHALLEGRTKELGYTVKKHLQDLSGRISRARHNEL

SEQ ID NO: 327614 - protein, 68 aa, Zea mays
  unsure (1)..(68): unsure at all Xaa locations
  Clone ID: MRT4577_61852C.1.pep
MEHVNFYRNYGKTSKKPRRSYEKERLDAXPKLGGESWLRCKRQLWRVQYALSRIRNAARDXLTLVEKN

SEQ ID NO: 327615 - protein, 91 aa, Zea mays
  Clone ID: MRT4577_61853C.1.pep
PCGLEGVLVQERLDTVVIHVLVGRIEETTLHLVWGTGGSLHLPRSPPARCSASPFFRGPRECALAMSRVPCVARGPAGSEEAGVPRRCFRA

SEQ ID NO: 327616 - protein, 70 aa, Zea mays
  unsure (1)..(70): unsure at all Xaa locations
  Clone ID: MRT4577_61854C.1.pep
THQRKQHPHHHQQHHHREPTYHHQEAXRQNVHRKNRSNKLNXHHQQVQRQPTRQQTQQQKTTTTTPNTEP

SEQ ID NO: 327617 - protein, 112 aa, Zea mays
  Clone ID: MRT4577_61855C.1.pep
LNQTQGGVLKCWASHFPGATQGGKILIACQARPNTIIIPVEGELGVREGDHALSFLSLLQLTFLTLWKDRRLGPASFIFACQPLACPTAYPPLLGVGFCLPAYPQRSLKAKT

SEQ ID NO: 327618 - protein, 91 aa, Zea mays
  Clone ID: MRT4577_61856C.1.pep
PRVRPSGLNSSTPRKSPPKKFFRQLKNRGPHYVGAAHKKMVCGLEPKIFCFFSPPKVLEAYFPPPWLKTHCSNSVWPCHARNKKSDGFPCF

SEQ ID NO: 327619 - protein, 271 aa, Zea mays
  Clone ID: MRT4577_61857C.1.pep
MMWLPFLYPAPASAYMAAMSAVSFVSMANAGLAELRGDHMPYSKFWHAVAGAAGGDTRQRGGMPLLRSRDGMLLAYAPALLAAAASFAVPGAVEGARAELLSAALAAHFLKRILEVLCVHRYSGSMPLGTAATISCSYLVSTATMVYAQHLSRGLPDPAVDLLCPGVLVFAVGLAGNLYHHRLLSGLRADDGTGYKVPRGGLFGFVACPHYLFEILAFFGFAMISQTLYALAVATGTAAYLAGRSCATRRWYRSKFQDFPPRIKALIPYVL

SEQ ID NO: 327620 - protein, 170 aa, Zea mays
  Clone ID: MRT4577_61858C.1.pep
MGKNKKDGSSSHHSGDKRKREPSPPSEDFGDSEYSKEEFSSKSEGAPVYASPLVSSNDSDDSHGIAAEVWTYIRAVERSELEGSDESEVSSDEENSSDSSKEESGGDGDDEGDGGDGGDGGDDGDDDDEGDGGKSGKGDSNGDKGDDDGRGGGGSMGGGGSSKASGKAPS

SEQ ID NO: 327621 - protein, 192 aa, Zea mays
  unsure (1)..(192): unsure at all Xaa locations
  Clone ID: MRT4577_61859C.1.pep
PSPPPERPPPPPPXGAPGPPRPPLGPPPGRRWGPXPPPPGPAXPPGLASYARPAPASGGGFVPPXPGPPGGSPALPPCSVGRPVLIPAPXGLXPSLGRSPLRXPPSGGWPPPPPPPPPPPPASWLVPPPSPXPPALRPTPVAGPAFCSWPGCLLARRRESLRALSDLVSLSALRYPLVALCPQKVIIKKKKT

SEQ ID NO: 327622 - protein, 52 aa, Zea mays
  Clone ID: MRT4577_6185C.1.pep
RTLTSHSRAASWNCLLVSGCQSPLSSFHGRLGIAWQDTRWQQSVIRRWDKER

SEQ ID NO: 327623 - protein, 117 aa, Zea mays
  Clone ID: MRT4577_61860C.1.pep
MPKMTEKDASNAEPGLVRLCYKHKFEDEFGEPLNRKPKCCIGPLRYEINVYWIVFFDAIGFFYPDYPYAVQETKKRKKQILKVMIKRRKILKVKPETTSSQASEETGDTQNYEVAYD

SEQ ID NO: 327624 - protein, 113 aa, Zea mays
  Clone ID: MRT4577_61861C.1.pep
VQSLECSICHCSLGLGTTARAPPVLHDDSLLHAEIDTSEASLFTSGVTRRRRSSGNQLCLSSIAASQLGLRCRALHPRDGDEGRGEAGLDAGPRRVRRAGRRPWVARQRRHAE

SEQ ID NO: 327625 - protein, 42 aa, Zea mays
  Clone ID: MRT4577_61862C.1.pep
ALMVHRHGSLSIYQTTGHKKHKSLFLSCSSKLFDLWYYSSQS

SEQ ID NO: 327626 - protein, 462 aa, Zea mays
  Clone ID: MRT4577_61863C.1.pep
MTMSASTAAIRTANTNGNHAVSSDSHSSQDARQRTAGITKRKALPSILQKIPSNDLSHTIRGESVLQKSNYSSEGRKDVVASATAERQNKNTTNVVASAAAVRQKKSPTKQENANWVTALSVLVKLCLLISATAWMGQVFWRWQSGELSFTTLDMENRLSRVEGFKKTAKMLQLQLDVLDKKLENEIDKAKGVIAKQFEDKGNKIEKKMKILEDKTDKLDKSLAELSDMGFLSKNEFEEILSQLKKKKGFGGTDDEISLDDIRLYAKDVVEMEIARHSADGLGMVDYALGSGGAKVVSHSEPFMNGKNYLPGRSNVHTTAQKMLEPSFGQPGECFAVKGSSGFVKVKLRTAIIPEAVTLEHVDKSVAYDRSSAPKDFQVRGWYQGPHDDSEKDSNVMSTLGEFSYDLDKSNAQTFQLERTAQSRVVNMVQLDISSNHGNLELTCIYRFRVHGRKPVSPSTGG

SEQ ID NO: 327627 - protein, 190 aa, Zea mays
  Clone ID: MRT4577_61864C.1.pep
MKTILATETMDIPEGVTVTVAAKLVTVEGPRGKLTRNFKHLNLDFQLQDGGRKLKVDAWFGTRRTMAAIRTAISHVQNLIAGVTKGFRYKMRFVYAHFPINASITNANSAIEIRNFLGEKKVRKVDMLEGVTILRSEKVKDELVLEGNDVELVSRSAALINQKCHVKKKDIRKFLDGIYVSDKGPIFDEQ

SEQ ID NO: 327628 - protein, 36 aa, Zea mays
  Clone ID: MRT4577_61865C.1.pep
LPLSILHRPPYFFSCAGHFLNLKLFHLPRFLFSYLF

SEQ ID NO: 327629 - protein, 114 aa, Zea mays
  Clone ID: MRT4577_61866C.1.pep
LLFFFFFFFFKGFFLPNYIVNQQWYNREQKTTGVPKDFFKGNRQPGDPRQVGPPLTREAQENPPEKIKFPEGTQAGKSETQKDGPFFFGDPVGIYHVGNPHTWDPPGGGDRRRN

SEQ ID NO: 327630 - protein, 51 aa, Zea mays
  Clone ID: MRT4577_61867C.1.pep
NLFGLALAMGSGVVAWASWAAVGDSAHYSSQTLAALPPHPSPFVQPPPHFP

SEQ ID NO: 327631 - protein, 66 aa, Zea mays
  Clone ID: MRT4577_61868C.1.pep
LRGGRGGSADVPGCCSTDGGARCSTSCRSGKPAPGALRFRLEMMSRAATPRRGAGAWRCSWSCSTS

SEQ ID NO: 327632 - protein, 53 aa, Zea mays
  Clone ID: MRT4577_61869C.1.pep
ARSDSQFVSPLEIGPREAMVFRGHMLPVVGFISQVQHFIRCLDHSAFSPRIAV

SEQ ID NO: 327633 - protein, 109 aa, Zea mays
  Clone ID: MRT4577_6186C.1.pep
GVRRRAAGRSGQAPWLGALSRGSITAVANGWGGSGVDPGLEKNDGRRGGRRSKQRPDIHGSRRSTVELRQGSDARQPCARIERRTEKTRGELGSRESARGTQGEGLFGP

SEQ ID NO: 327634 - protein, 85 aa, Zea mays
  Clone ID: MRT4577_61870C.1.pep
LFNLHGKAKKKNRGCPSLVEFCELQKTKKNAFPTPQGVCLLVPLCYPQKKPTFFFQPPLAFFVNVPLLQEGLKRPLNSCRLFKPI

SEQ ID NO: 327635 - protein, 125 aa, Zea mays
  unsure (1)..(125): unsure at all Xaa locations
  Clone ID: MRT4577_61871C.1.pep
MAPKADKKPAAKKSAEEEPATEXGKKGKKKAKKSVETYKIYIFKVLKQVHPDIGISSKAMSIMNSFINDIFEKLAAESAKLARYNKKPTITSREIQTSVRLVLPGELAKHAVSEGTKAVTKFTSS

SEQ ID NO: 327636 - protein, 153 aa, Zea mays
  Clone ID: MRT4577_61872C.1.pep
MAPKADKKPAAKKSAEEEPATEKAEKAPAGKKPKAEKRLPAGKSAGKEGGGGKKGKKKAKKSVETYKIYIFKVLKQVHPDIGISSKAMSIMNSFINDIFEKLAAESAKLARYNKKPTITSREIQTSVRLVLPGELAKHAVSEGTKAVTKFTSS

SEQ ID NO: 327637 - protein, 153 aa, Zea mays
  Clone ID: MRT4577_61873C.1.pep
MAPKADKKPAAKKPAEEEPATEKAEKAPAGKKPKAEKRLPAGKSAGKEGGEGKKGKKKAKKSVETYKIYIFKVLKQVHPDIGISSKAMSIMNSFINDIFEKLAAESAKLARYNKKPTVTSREIQTSVRLVLPGELAKHAVSEGTKAVTKFTSS

SEQ ID NO: 327638 - protein, 153 aa, Zea mays
  Clone ID: MRT4577_61874C.1.pep
MAPKADKKPAAKKSAEEEPATEKAEKAPAGKKPKAEKRLPAGKSAGKEGGEGKKGKKKAKKSVETYKIYIFKVLKQVHPDIGISSKAMSIMNSFINDIFEKLAAESAKLARYNKKPTVTSREIQTSVRLVLPGELAKHAVSEGTKAVTKFTSS

SEQ ID NO: 327639 - protein, 89 aa, Zea mays
  unsure (1)..(89): unsure at all Xaa locations
  Clone ID: MRT4577_61875C.1.pep
ERLESDEDVLQASLDAVAEEKPHVLRYMSKTIRDLEVVEGSAARFDCTIEGYPDXEIAXLRDDQAIRESRHLQIDYDEDGNCSVIISDV

SEQ ID NO: 327640 - protein, 168 aa, Zea mays
  Clone ID: MRT4577_61876C.1.pep
AHGGLDLAGRDADAWADAWADAWAAAKKPAEEEPATEKAEKAPAGKKPKAEKRLPAGKSAGKEGGEGKKGKKKAKKSVETYKIYIFKVLKQVHPDIGISSKAMSIMNSFINDIFEKLAAESAKLARYNKKPTVTSREIQTSVRLVLPGELAKHAVSEGTKAVTKFTSS

SEQ ID NO: 327641 - protein, 153 aa, Zea mays; identical to SEQ ID NO: 327637
  Clone ID: MRT4577_61877C.1.pep

SEQ ID NO: 327642 - protein, 104 aa, Zea mays
  Clone ID: MRT4577_61878C.1.pep
MNYRFQNLLGAPYRGGDAVFAGDSPVLLSAVGNRVASTDLTASSSLTLPFESSSNVTRLATSPSGDFLLAADDNGRALYANLRRRAVLQRVFFKGAPLSGRFNP

SEQ ID NO: 327643 - protein, 81 aa, Zea mays
  Clone ID: MRT4577_61879C.1.pep
MKLLLLLLCLGLTLVCGHADEASLERGNLDVDKLNGDWFSIVVASDRRDSIDEHGSMRVFVQHIDVFENSLGFTFRIKDNG

SEQ ID NO: 327644 - protein, 119 aa, Zea mays
  unsure (1)..(119): unsure at all Xaa locations
  Clone ID: MRT4577_6187C.1.pep
TISHIPKPYDTLNGCTIHDLFRESITLHIIRNLXNPXNHRLPILDVTYTLHISPHEVTCKTMTHPHXIPSAAXTLPQIPYEETYNLLCVILKDVHPYCYIHYXLQVGLTVDLPIIRHFT

SEQ ID NO: 327645 - protein, 62 aa, Zea mays
  Clone ID: MRT4577_61880C.1.pep
LMQSCRQQLEFGVCMLKQFLHAKVCTPGCEAGMMHGHAQAITQWQISLWPKGLQWFIAAPIA

SEQ ID NO: 327646 - protein, 177 aa, Zea mays
  unsure (1)..(177): unsure at all Xaa locations
  Clone ID: MRT4577_61881C.1.pep
QDKEXKLAXGSXGDAGSATXXKAXGAEXXATXXXXXAGXXXAXAXGQXTKGGAXDPAGRGAXAXAHARAXXXGXXXAANXXGGHXNPAXTXGXAXXGHXTXXTGXXXGGAQRRGATXAXXXXGXXTHGKAXPTHAXAAGXSEXEGXXXEGXXTPAPXHTXXATAADPKKGXXGTXAP

SEQ ID NO: 327647 - protein, 83 aa, Zea mays
  Clone ID: MRT4577_61882C.1.pep
SFLLAQTSLIVKVGSWYEILSRQTLTAQLRLEHQLIFFVPGSICLCLSYSTKVCSSITGVSILTEHFFFYSGLYLTAWWVVTS

SEQ ID NO: 327648 - protein, 190 aa, Zea mays
  unsure (1)..(190): unsure at all Xaa locations
  Clone ID: MRT4577_61883C.1.pep
ARGTVYFRTVGVNSITCAPFSQAHPLFMVIGFIICTGEAVMAYRIVLGPRSAKKAVHLLLHLVALTFAAVGLYAAFKFHHDVGLPDIRSLHSWLGIATIALYGLQWLMAFVYFVFPGAVMTMRADYAPWHIFFGLAIFLMAICTAETGLAKFVSAFIAYPGEVFVVNFTGIAILMFGVASXLAVILPSRY

SEQ ID NO: 327649 - protein, 139 aa, Zea mays
  Clone ID: MRT4577_61884C.1.pep
GTSSRAGLIDYSLTPLAPIHPLATSSSRLAADTPLVLCSLRSTHKLPSLPPPPPPQIGDGSDGEGADAGRGGNGGGVGRVGLHGGGGVQHPENPGEAQRVHEVMKGDQREGPGRRNFFFRTTTGLAVAKGEMSQLDDGK

SEQ ID NO: 327650 - protein, 116 aa, Zea mays
  unsure (1)..(116): unsure at all Xaa locations
  Clone ID: MRT4577_61885C.1.pep
AASHALLNIVPLHMMCSASDLGTECANPHESRGIPDRILLYDRHPGGIGIASQAQMLFGELLLAALEVVSTCNCTSAVGCPNCIQSLTCSEYNEVLXQEAAILILKGVIRLREIVF

SEQ ID NO: 327651 - protein, 107 aa, Zea mays
  Clone ID: MRT4577_61886C.1.pep
RGLPGRTRTIFTLHCKLVRERPTARGWCFQTDLQTERQRGSRGPLRARRPPMATTGTTVAAAITMLAAVAAVFLTVLLCFYIALCSKQYRGEAPCSGLLAVVGGAIV

SEQ ID NO: 327652 - protein, 107 aa, Zea mays
  Clone ID: MRT4577_61887C.1.pep
RFSPARKKFVLARPEASKPEARRARAGPARPGPTCRTTRDAGCYLRLPVIWGRQWGAGCGLIKGAGAVHMGRPGGVPRRFHRGRPNLDRRQLPGVAAWDMWWPDRLW

SEQ ID NO: 327653 - protein, 63 aa, Zea mays
  Clone ID: MRT4577_61888C.1.pep
SRELACPAARAVRRRCSPCATHTHIACWAAMDASASSGVRQLRADAVVVRRADACVGSRAVDS

SEQ ID NO: 327654 - protein, 66 aa, Zea mays
  Clone ID: MRT4577_61889C.1.pep
AKFVPDLANWIIGYHGKNTYMGMSVELITKDSLSRGERAWESADYIVPVLREPWQAAVSTRTEFQV

SEQ ID NO: 327655 - protein, 58 aa, Zea mays
  Clone ID: MRT4577_6188C.1.pep
NSRIQPGHVGLRDVHTGEKDIMMQSIVLADTLKYLYVHFPRPSVIAVDEWVFNVDAQP

SEQ ID NO: 327656 - protein, 66 aa, Zea mays
  Clone ID: MRT4577_61890C.1.pep
CYLQIHVLTWTKMDAVCAHNIQFIYDVHLLTRHLYVYDRSHSLYRGNFISGSLFNAGYSQLLYCGT

SEQ ID NO: 327657 - protein, 196 aa, Zea mays
  Clone ID: MRT4577_61891C.1.pep
MRDGGGAMDVDMQARGGGASHGGELDDDGKEKRTGTVWTASAHIITAVIGSGVLSLAWAMAQLGWVAGPVILLLFAAITYYTSCLLTDCYRFGDPVTGKRNYTYTEAVESYLGGRYVWFCGFCQYANMFGTGIGYTITASASAAAILKSNCFHWHGHDADCTQNTGSYIVGFGVVQVIFSQLSNFHELWWLSVLAA

SEQ ID NO: 327658 - protein, 44 aa, Zea mays
  Clone ID: MRT4577_61893C.1.pep
GQRVVRRVVAALPAPSLASRHSLPKKPAGRRAAVDWRETRAQAP

SEQ ID NO: 327659 - protein, 117 aa, Zea mays
  Clone ID: MRT4577_61894C.1.pep
MKYEWDDDMSLQRKDRHKLEFAFLRSLRMMLPVYSTLAVCFLACHIAREAILPSDIYRWAMEGNIPYVAAFTEVDRFLGSSFQDCPLDARQLFRPVRVIGAWQLEAAAGSIAQRVAL

SEQ ID NO: 327660 - protein, 185 aa, Zea mays
  Clone ID: MRT4577_61895C.1.pep
RPAPRAGAGAQEGPRVRRGAARARRLRRPAGGRRREGASPGGPAARQRRPQGQRGRGQGARRRAPGAARGGERAAGSASAGGQVEARGRAGQAGRGGVPGLRKAGGPGRKDRMFASLSNLAELKSAAALDDYGYEFDHLNLGQYGDGTERKVNKRRSILRKFGDLFRRSRSLYKPNLAPVLHNHY

SEQ ID NO: 327661 - protein, 84 aa, Zea mays
  unsure (1)..(84): unsure at all Xaa locations
  Clone ID: MRT4577_61896C.1.pep
GRTPIPVXPENKSNFRQKFPDYPGNGHPEIPVGMGPFXKLKYPLEPXANGKWRFPGIREFQFYYQDMGPRVRPKGQPRGRPRVR

SEQ ID NO: 327662 - protein, 64 aa, Zea mays
  Clone ID: MRT4577_61897C.1.pep
WNHAVASLVKIDGPVWLDDKSGSHGYYSAWIGHSAHYDYERLNEFGKQNARSTSFDQDVFASDF

SEQ ID NO: 327663 - protein, 52 aa, Zea mays
  Clone ID: MRT4577_61898C.1.pep
KIIDTLETYQAHARQGVACALADGDHLSATGLGQDGGEEDDAESPPCKRAKI

SEQ ID NO: 327664 - protein, 72 aa, Zea mays
  unsure (1)..(72): unsure at all Xaa locations
  Clone ID: MRT4577_61899C.1.pep
MXSEPVPVPVPPPSFFFGVLALQARSVFLPPFCPRQRVGVNEPSFLLCSGPFWHFVPRVFVYKNKSCRERLC

SEQ ID NO: 327665 - protein, 126 aa, Zea mays
  Clone ID: MRT4577_6189C.1.pep
MSSMMNALANWLANPRRNPLARLHMHAVSSRLRKYGLRYDDLYDPYFDLDIKEALGRLPREVVDARIQRLKRAMDLSMKHQYLPEDLQAQQVPFRGYLGDMLALVKKESAERQSLGALPLYQRTLP

SEQ ID NO: 327666 - protein, 56 aa, Zea mays
  Clone ID: MRT4577_618C.1.pep
QLWVGVKHGCPGPSFLKHVKFQVLVVASRLPWGLVRCVPNPVQEGKSRIHPGSFRP

SEQ ID NO: 327667 - protein, 129 aa, Zea mays
  unsure (1)..(129): unsure at all Xaa locations
  Clone ID: MRT4577_61900C.1.pep
KTHPAALTTTKYGLSSWESLKAVMSREQLLMKRNSFIYIFKGTQLIILALMSMTVFLKIKMPHGQIADGTKFFGALTFGLITIMYNGFAELQLTINKLPAFYKHRDFLFFPAWXYEWQTXILKVPVSFV

SEQ ID NO: 327668 - protein, 90 aa, Zea mays
  Clone ID: MRT4577_61901C.1.pep
IPKLKFPYIVNCITYHYNLYNNIDLNFCLEAGMTTLSHRRVASMSSPPNATVALVIFAWRKPHNASCSVSLHNSFFSLSMCMSSKVSEEK

SEQ ID NO: 327669 - protein, 125 aa, Zea mays
  unsure (1)..(125): unsure at all Xaa locations
  Clone ID: MRT4577_61902C.1.pep
FIRTVGAVLMVLYHGPVVHFPWFMGQHHHDSSVCHGANSAGCGGXLSXIITITFACVCXSCLFVLQGNTLKSYPAELSLTALICLMGSLMSXLLALICAPEHSCXVIICDTRILTVVYAVIVCSG

SEQ ID NO: 327670 - protein, 52 aa, Zea mays
  Clone ID: MRT4577_61903C.1.pep
ICEPTSCLERDATVVRTNAPPSVGSARATAGRLSVRALRPSARANTGGPRAG

SEQ ID NO: 327671 - protein, 158 aa, Zea mays
  unsure (1)..(158): unsure at all Xaa locations
  Clone ID: MRT4577_61904C.1.pep
MLLIIYGNFSFGIKKKKKKKKKKKKKKKKKKKKKKPPPPPLSGETPPKREPPPAKSPPPPQPRPQKGPPXPRRPPPSAPPPFPXTPPPPHPPPPPRPPPPPPPTXPAAASGPPRRFPPNPPPPPPPPPPPPCPPQVDWGANFFVLLRGVKGGFGGKWG

SEQ ID NO: 327672 - protein, 209 aa, Zea mays
  Clone ID: MRT4577_61905C.1.pep
MVTTAVAAVAGAVPPARKAQAVTVATTTALPPTLTRRQLLAAVATGSTLPTAAASAAAPRFAEIPGSGGVKALDLREGSGEIPAVGDQVAVHYYGRLAAKQGWRFDSTYDHKDETGDPMPFVFTLGSGKVIPGMEAAVKSMRVGGLRRVIIPPSQGYQNTSQEPVPPNFFDRQRLFTTIFNPTRLANGEGSTLGTLIFDIELINIRQRP

SEQ ID NO: 327673 - protein, 140 aa, Zea mays
  Clone ID: MRT4577_61906C.1.pep
GALMETKNLIVSKHAIDEEAQAAYVEKIIKRIGNPHLEDAVERVGRAPLRKLSRKERFIGPAAELAENDQPIKYLLDAIEMAFRFQDVPDDEESKQLAEIMSENGPEDVVKQVCGIQDNEKIFPQLVNVVQRVQADSAEE

SEQ ID NO: 327674 - protein, 208 aa, Zea mays
  Clone ID: MRT4577_61907C.1.pep
MKNRHPRDGLNLYSDASVDYTDVILGTTVKVETIEGLKDLHIPPGTQPGENLKFSQLGVPDIKKPNVRGDHYFMIKVKIPKSISGQERLLVEELAALKKAQNISVPEPTKIENFRERNHHPSTKRRSFWGRVWNLFRDDKGDKRFASISVQPIIPGWNSCRGTDTAVPLLLKGFLMTAIFLFVIRSKLRYTGKRIDRPTQAKIPVEPE

SEQ ID NO: 327675 - protein, 74 aa, Zea mays
  Clone ID: MRT4577_61908C.1.pep
SKSYIHPYNLFNTIHNIVVHVLNESNVFCYVSPYHHIIFFNVPLQAFFKSIASMYGSFAVRVGVRVRLARNSNS

SEQ ID NO: 327676 - protein, 96 aa, Zea mays
  Clone ID: MRT4577_61909C.1.pep
MLFKMPAATRSTRDAGRDDAPPEHSTCRHRRGPLKKGAHKQPDFLTLNPFGQIPALVDGDEVLFESRAINRYIDSKYASEGTDLLPATASALNLDV

SEQ ID NO: 327677 - protein, 126 aa, Zea mays
  Clone ID: MRT4577_6190C.1.pep
MSSMMNALANWLANPRRNPLARLHMHAVSSRLRKYGLRYDDLYDPYFDLDIKEALGRLPREVVDARIQRLKRAMDLSMKHQYLPEDLQAQQVPFRGYLSDMLALVKKESAERQSLGALPLYQRTLP

SEQ ID NO: 327678 - protein, 83 aa, Zea mays
  unsure (1)..(83): unsure at all Xaa locations
  Clone ID: MRT4577_61910C.1.pep
MAAPPQLXALLQAVNKLLRQRRYHAALAVIKGFRNGAVYGVRIRAPHALLRTFLFRSGSLQEKLQAILKATYTHSRNLACFVF

SEQ ID NO: 327679 - protein, 397 aa, Zea mays
  Clone ID: MRT4577_61911C.1.pep
MDYLKVQVVESSFVVPSEPTPTKALWLSCLDMVQSNKAHTPTIHLYSSNDAAAADFFDLGRLKKATAKALVAFYPLAGRLVDSDDGRKEISCNGEGALFVVARADGDLTIDEVKKFKPSPELRRLFIPLIEPSSIIMAIQTWSAFCKHGDSAAVELPCHDRTLLRARSPPTVHPDALSTLQPRLVLTEPEGPLAIEIFTISRDHVAALKQLCGGTSTFCAVSALIWQCACVARRIPPDSQVRVMFPADVRRRMRPPLPTHYFGNAVIRLYAAGPAGDIGTAALASVAGRIKGAVERMDDELVRSAIDYYEMAETNKRRTGTGILPRTDLNITSWLGRPQHDADFGWGKPQSMSRAESVRGGSMHLMNDDGGTGNVRVLVCLEAENIKELGRLLYAKL

SEQ ID NO: 327680 - protein, 426 aa, Zea mays
  unsure (1)..(426): unsure at all Xaa locations
  Clone ID: MRT4577_61912C.1.pep
MDYLKVQVVESSFVVPSEPTPTKALWLSCLDMVQSNKAHTPTIHLYSSNDAAAADFFDLGRLKKATAKALVAFYPLAGRLVDSDDGRKEISCNGEGALFVVARADGDLTIDEVKKFKPSPELRRLFIPLIEPSSIIMAIQVTFLKCGGVVLGTAIHHAATDVSSAFHFFQTWSAFCKHGDSAAVELPCHDRTLLRARSPPTVHPDALSTLQPRLVLTEPEGPLAIEIFTISRDHVASLKQLCGGTSTFCAVSALIWQCACVARRIPPDSQVRVMFPADVRRRMRPPLPTHYFGNAVIRXTPLARQGTXTAALASVAARIKGAVERMDDELVRSAIDYYEMAETNKRRTGTGILPRTDLNITSWLGRPQHDADFGWGKPQSMSRAESVRGGSMHLMNDDGGTGNVRVLVCLEAENIKELGRLLYAKL

SEQ ID NO: 327681 - protein, 67 aa, Zea mays
  Clone ID: MRT4577_61913C.1.pep
SVDVYYCSELFALRSNYRIRYSLSTRNTNYWKYTHKYWHRHAHMHTVIRRSQLHTGLILLPLLLKTG

SEQ ID NO: 327682 - protein, 164 aa, Zea mays
  Clone ID: MRT4577_61914C.1.pep
MGAPRELELSDEMEGEEDGTTDFVFRLAGDPIPLLPTDSNPLPLFDLLSPPARPLAVSDRHATVFLAHPSGFIAVRTKELIEASKEAREKGKSSTRCAQDCCVADVPLPGVSLIALSHDESVLAACTHTEIQFFSLASLLTHKDVGPSSSCSLERAVPGKDSRG

SEQ ID NO: 327683 - protein, 183 aa, Zea mays
  unsure (1)..(183): unsure at all Xaa locations
  Clone ID: MRT4577_61915C.1.pep
HASAVHLDGEDAVLVXAILSIKAIVKMDPVSHEKVIVRLVRGLDKLKEPAARSLIIWMFGEYSFMGDLTTKIVPPVLKYLAWSFVAEVVETKLQILNSSAKVIMRCTEEDMEEFKSIVAYVIELATCDLNYDVRDRARLLSRLLPCYMTHQGSSHQPQNGDIYKELANHIFNGKVAXTSHPAS

SEQ ID NO: 327684 - protein, 42 aa, Zea mays
  Clone ID: MRT4577_61916C.1.pep
MIPDFLNEAARTKNYSGAELEGVVKSAVSFALNRQITMDDLT

SEQ ID NO: 327685 - protein, 38 aa, Zea mays
  Clone ID: MRT4577_61917C.1.pep
GTSSRRKEILSLLPRLWHNPGKEGDITIADATTLYNVS

SEQ ID NO: 327686 - protein, 97 aa, Zea mays
  unsure (1)..(97): unsure at all Xaa locations
  Clone ID: MRT4577_61918C.1.pep
PAHTLINFIFSPLRVRGPDPKNTPAPMGTRARGPQSKHRKPGQATPGGGGPKPKNPPPQGGGPGGTNAWAGGGGPAGDRPPRPLPPXPGGESPCGGG

SEQ ID NO: 327687 - protein, 65 aa, Zea mays
  Clone ID: MRT4577_61919C.1.pep
SLDEAMRGDEVRREGARLSSTSCHSKGSPNPQQRLKMCVSVKPKADCTNREATLHREHLGCLSTQ

SEQ ID NO: 327688 - protein, 120 aa, Zea mays
  Clone ID: MRT4577_6191C.1.pep
MSSMMNALANWLANPRLHMHAVSSRLRKYGLRYDDLYDPYFDLDIKEALGRLPREVVDARIQRLKRAMDLSMKHQYLPEDLQAQQVPFRGYLSDMLALVKKESAERQSLGALPLYQRTLP

SEQ ID NO: 327689 - protein, 124 aa, Zea mays
  Clone ID: MRT4577_61920C.1.pep
MAGRGEGPVMGIDLGTTYFCVGGGQHDRVEIIANDQGNRTTPSYVAFTDSERLMGDAAKNQVAMNPINTVFDAKRLIGGGFRDAFAQRDIKWGPLKVIFGPGEKPRIVAQPRGGEKQLRVEEIS

SEQ ID NO: 327690 - protein, 46 aa, Zea mays
  Clone ID: MRT4577_61921C.1.pep
IKKKKKKKKKKKKKKKKKKKKKKKKKKKKKKKKKKKKVFFFGRKPP

SEQ ID NO: 327691 - protein, 86 aa, Zea mays
  Clone ID: MRT4577_61922C.1.pep
PSHACCLMHRCSASYQWPCCLSPCSEGLCHVGLILVCHSRRNINDNQGALAMNVEAFPSPAVVFLRTIVSTLVALYNTDSVASQSV

SEQ ID NO: 327692 - protein, 82 aa, Zea mays
  Clone ID: MRT4577_61923C.1.pep
SYVHGREGWLVCPLLGYLLPSCAEIHGVLRLQRPARRCAAHGWTADPCGSVHGRGVLVARRPAGLRRAERRRSGSYTRLTTW

SEQ ID NO: 327693 - protein, 102 aa, Zea mays
  Clone ID: MRT4577_61924C.1.pep
PQKFQKALRNCLGHFKRTGHMFFFFGDKFAPANSFFGGKNFLGVPVRRFITRQVKISKGPFSALLKNWEKVTTKFTGKKLAPSPKGSNYPKEWRAGFFPLEL

SEQ ID NO: 327694 - protein, 99 aa, Zea mays
  Clone ID: MRT4577_61925C.1.pep
NLARGFPYINGYGIFQGILKAPGLPGFTVTNQGFFGVGRKNGQVTCFPFQTPWANRNEYLFWGAFPPPEGGNILVGWRGFRAGLPFDVPPMDLGPLARI

SEQ ID NO: 327695 - protein, 114 aa, Zea mays
  unsure (1)..(114): unsure at all Xaa locations
  Clone ID: MRT4577_61926C.1.pep
SHSPSPSSTTSVASDRTRTRKPILTLGGQQPPPSSTTRCRKPRSXNGLTXTCSHPTDATTTTSSTTSSSPPRPSRRSPTTTTTSPTTCNIYTSKLHRPCLPNTKMHSLCQIFIF

SEQ ID NO: 327696 - protein, 236 aa, Zea mays
  unsure (1)..(236): unsure at all Xaa locations
  Clone ID: MRT4577_61927C.1.pep
MKLTLLSLALMSGALAAPAPAPVADPEAFSITEAPRGVSLEEHAISKRQYSSSSYNQLTDGTACRPISVIYARGTSQAGNVGDSASVGPLFFNQIASRVGGTSQLAIQGATYPASVSGFLAGGDAAGSTTMTNLISSTATRCPNTKIVLAGYSQGAQLVHNAAGRTSTANAAKVAAVVVFGDPKRGQSLSPIAASKVLTICHDGDNICEGGSSITIAHLTYQMDVATAXAFVAGKV

SEQ ID NO: 327697 - protein, 38 aa, Zea mays
  Clone ID: MRT4577_61928C.1.pep
PCMKMVAVTALSSRTTWISTAQYFACHCWNTTVLSMML

SEQ ID NO: 327698 - protein, 68 aa, Zea mays
  Clone ID: MRT4577_61929C.1.pep
QKDTSHAFLASGFLPGPLWIIKINYKHALPWTWRHHLYPTFQLKHITWGSGPMFVFLKTRTNESWQNI

SEQ ID NO: 327699 - protein, 169 aa, Zea mays
  Clone ID: MRT4577_6192C.1.pep
GHENKQPKIIKKILTTLREESKFRESNSPVRASRVKLNSPSNRERSSDDSKQSDISSSSRSSEVMSHESANASCEPVKRGHASPPLKHFSPIVEHSPKVKIKVDELLHPHLAKQVGEVVDAAAGKVKNRTPPIFIKCTSIPTRRQGVASPSRQHTGVKRAHNKVMAEHA

SEQ ID NO: 327700 - protein, 113 aa, Zea mays
  Clone ID: MRT4577_61930C.1.pep
RQKAEKRDQHTANSQQAARTAHEICQQVQQEAIRGSRQEQREQANVSGKAQVQVDEAGKYRQPQACSVGPHPKPSRSHESRKKKTDRVDKKGGRCKMRKSWTYEFGRRLEHVK

SEQ ID NO: 327701 - protein, 102 aa, Zea mays
  unsure (1)..(102): unsure at all Xaa locations
  Clone ID: MRT4577_61931C.1.pep
TRPDGGHLPFTIDPGYHDLVCYNCGEPGHFVGICSKPKICFICGIPGHHMNECPAWKVLTPFRSAKYSRRCNTHFVRKKNLKGXNYIKKKKKKKKKKKKKKK

SEQ ID NO: 327702 - protein, 101 aa, Zea mays
  Clone ID: MRT4577_61932C.1.pep
LLIFELARDAHRDTDTPGGWPWPHPFTNKDSKSEAPTASKMYAASSHPGTSSSTYQHGGIPWHRHRRRRHLRRRQRSCTPPERNREPCAGEVGGSESRWRL

SEQ ID NO: 327703 - protein, 60 aa, Zea mays
  Clone ID: MRT4577_61934C.1.pep
APKFALMYPKGPFLPWYFGKGMKKVYFFKALEALAALEKASKEVGLYFNKGEDGPKGSES

SEQ ID NO: 327704 - protein, 80 aa, Zea mays
  Clone ID: MRT4577_61935C.1.pep
NPRVPHRAGPAPTAAPFLITAIFVPRAVGFSGVITGRPEWEQAARMTDSEGVASESEGSLHMPTCATATAVPGNTRWPHT

SEQ ID NO: 327705 - protein, 84 aa, Zea mays
  unsure (1)..(84): unsure at all Xaa locations
  Clone ID: MRT4577_61936C.1.pep
PGTGKTQTILGLLGXVLHSAPARMQIKGGFDVLKHGPELDIDGKRAHWIKASPWLLGANPRDLIMPVDGDDGFYPTGNELKPEI

SEQ ID NO: 327706 - protein, 271 aa, Zea mays
  Clone ID: MRT4577_61937C.1.pep
MALSWPSAVRLAVAAVLLAAVVVALFTLPVEKILKDFLLWIKENLGAWGPLVLALAYIPLTVLAVPASILTLGGGYLFGLPVGFVADSIGATIGATAAFLLGRTIGRPYVLSKCKDYPKFQAVAIAIQRSGFKIVLLLRLVPLLPFNMLNYLLSVTPVGVGEYMLASWFGMMPITLALVYVGTTLKDLSDVTHGWSEISTTRWILIISGFVLSVVLIICVTKIAKSSLEKALAENGELDVGTSQLPVVASPSDLQQPLVIKIDTSNEDHEK

SEQ ID NO: 327707 - protein, 293 aa, Zea mays
  unsure (1)..(293): unsure at all Xaa locations
  Clone ID: MRT4577_61938C.1.pep
MALSWSSALRLAVAAVLLVAVVVALFTLPIEKILKDFLVWIKENLGPWGPLVLALAYIPLTVLAVPASILTLGGGYXFGLPVGFVLXFLGAVIGATAAFLLGRTIGRSYVLSKCKDYPKFQAVAIAIQRSGFKIVLLLRLVPLLPFNMLNYLLSVTPVGVGEYMLASWLGMMPITLALVYVGTTLKDLSDVTHGWSEISTTRWKWTLICMLPXLLLTPMLVFSLQILIISGFVLSVVLIICVTKIAKSSLEKALAENGELHVGTSQLPGVASPLDLQQPLVIKIDTSNEDHEK

SEQ ID NO: 327708 - protein, 105 aa, Zea mays
  Clone ID: MRT4577_61939C.1.pep
RTPSPSTSGFTLTAPNHGHLVITYGASSLYLAPLPTLHFHPQPSLSTSLMTARKYYYTYMLISRPCDLAPTPLTGTAPSSGGSRIGTSSCSPSEGHRAVPSTCCS

SEQ ID NO: 327709 - protein, 126 aa, Zea mays; identical to SEQ ID NO: 327665
  Clone ID: MRT4577_6193C.1.pep

SEQ ID NO: 327710 - protein, 163 aa, Zea mays
  Clone ID: MRT4577_61940C.1.pep
EYVQDRGSLAPGHDLGEANISHQTAFIIFFVFDSVSLFISLAVVVVQTSVVVIERKAKKQMMAVINKLMWVACVLISVSFLALSLVVVGRTERWLPVSVTIMGATILVTTIGTMLYWVIAHRIEAKRIRTIKRNTLTHSRSFSCSGMSEGEWVDEDFKRMYAI

SEQ ID NO: 327711 - protein, 94 aa, Zea mays
  Clone ID: MRT4577_61941C.1.pep
RGPKLNWGISDTNSLNENQVERGRKKTNKRKTKGGHCHRRAQSEHAHPLGMRGSSKAAQRNQVFPPTLGFSLRLRFLVRGVFEWFPLSRGPRRP

SEQ ID NO: 327712 - protein, 56 aa, Zea mays
  unsure (1)..(56): unsure at all Xaa locations
  Clone ID: MRT4577_61942C.1.pep
EVSQIVDQFVGCHRSSRLRLRRGMDGIEIRAFQVALHSKLXWVNRSVRVDGAGREI

SEQ ID NO: 327713 - protein, 677 aa, Zea mays
  unsure (1)..(677): unsure at all Xaa locations
  Clone ID: MRT4577_61943C.1.pep
MEVAAAAAGKPLTPEEEALRRSTDCVYFLASPLTCKKGNECDFRHSEGARMNPRDCWYWLNGSCLNPKCAFRHPPIDGLFGAPTSGLPPVSAHYGAYNLGKQMVPCYYFQKGNCLKGDRCPFYHGPQTASNDLAEQAAKVSSFPLEPSQAQNNEEAVAPNNSTQQEARMTENRTSIHVSKSGVGATPADVASNALKPGTNFEQAPSNTLAAKKSSTTXGSSYALSEPGSXRSILSKTGXNFEVSPTDYLPQDSREADDILGESSPGFDVLVDNDVDVAEDFARDMYPVEDYEYVTSDFDARAHHESEQFNDGMGVNGRIGQYDGYERKRRRSSSERNLDRHYHPDGRFLHRELDRGEIDGSDLRHQLRRRRINGPSTTISPERANGDRHGRDEPYRERAHGGHHTYRDRFRGPRGSNLSSRLQARIKLPRRSPDRVDTRFEDERDRRRFRDRFSPMRRMDFHGGRHQEAGHNQERGHRKLSELVSTVRHADGLSARRDAVGSTHFAARRNLGEPRKANGLVESEASLDFEGPKPLSVILQRKREAAQGNNYEKFAEVAVTQTGSLDETKKSCDNVTRFADCKSGSGDEEYKEQDHILVDAHRQSSDHGDKFEAGYAAEVDAEGKQEADDYDQREGESDDYETFEGHDYKSEDENVYQDDEDFDDNDDFARKVGVLLP

SEQ ID NO: 327714 - protein, 108 aa, Zea mays
  Clone ID: MRT4577_61944C.1.pep
DYQEKQAKPPRTKRSPMIPTAEMGLSLHPAVMSSSCCLRHGPNKIWYGMVTVAYSSLATASACCGTRWCLHKREKSRDGEPSLPGASRQARHSFFFIASSRKHQRSKC

SEQ ID NO: 327715 - protein, 82 aa, Zea mays
  Clone ID: MRT4577_61945C.1.pep
KLTCFFPGPHPNGKVFFRWGHSPNNLGFLFGFPLEGPFGREKFPPPLVFFLKKNPSGGFNGGPFFYFLGGLKKGPPWCRRKN

SEQ ID NO: 327716 - protein, 147 aa, Zea mays
  unsure (1)..(147): unsure at all Xaa locations
  Clone ID: MRT4577_61946C.1.pep
EERRKTRECISXVHIAACRASTVVQRSAWELYCRXYSIHADDQVSVDKTARHHDDAFYTFFSQTAAAKHVPREIFADVKPTVIDDACTATXVELFHPEQLISDEEDAANNFARAHYTIVKDIVDLCLDRIRKLADNCTVLQSFLVFN

SEQ ID NO: 327717 - protein, 65 aa, Zea mays
  Clone ID: MRT4577_61947C.1.pep
EGRAHRRLTPFTIKMTRNLSNTRLVLLDDVLLTSSLCLGTRSIIHLQIHPTDDVVLRRCPLLAPS

SEQ ID NO: 327718 - protein, 55 aa, Zea mays
  Clone ID: MRT4577_61948C.1.pep
IVQRSQYNTTTIIYTTIYNTILYTSSDTNHTHSSQYYLSAHLYSYALIEQISPYA

SEQ ID NO: 327719 - protein, 59 aa, Zea mays
  Clone ID: MRT4577_61949C.1.pep
SFFFFLFIFFHFLISPKIKPFFCTFHKKPSKKTTLLSPFPAITKLYTYRLFFPPKLLIP

SEQ ID NO: 327720 - protein, 126 aa, Zea mays; identical to SEQ ID NO: 327677
  Clone ID: MRT4577_6194C.1.pep

SEQ ID NO: 327721 - protein, 48 aa, Zea mays
  Clone ID: MRT4577_61950C.1.pep
ASFPLCCLCFLTELLLVTASGCSKQESTAILADTSACSISMLWLPDAW

SEQ ID NO: 327722 - protein, 78 aa, Zea mays
  Clone ID: MRT4577_61951C.1.pep
MAASLQVQAGATLMQPVKIDGRAPSASLPSSRPSSQLARAFGVDAGAGRITCSLQSDVRDVVSKCVDAVKLAGFALAT

SEQ ID NO: 327723 - protein, 134 aa, Zea mays
  Clone ID: MRT4577_61952C.1.pep
CSSSTGWGERRGYLEPQRAAQAGNSWCLLRTARKGEWVGAANRRRNQRARGSCSPHPPSLCLTEIKDTDATGSRTQWQCVRTVRSFRQGLEASQSQGQSVANAHRRTTGQVGCSVRAAYKSDRYVRTPRYRNNI

SEQ ID NO: 327724 - protein, 52 aa, Zea mays
  Clone ID: MRT4577_61953C.1.pep
MKLVAAYLLAVLAGNSSPSAEDLTAILESVGCEDDNELMELLLSQLIRRDII

SEQ ID NO: 327725 - protein, 83 aa, Zea mays
  Clone ID: MRT4577_61954C.1.pep
NEIDNKGGFLAWEQTERHGTGRKKMTSSWGLRSPGCHQIGAPAREPLEQLKQKPTSHPQAKGTNLMHKKGLGTQKTAIYPDKL

SEQ ID NO: 327726 - protein, 50 aa, Zea mays
  Clone ID: MRT4577_61955C.1.pep
LRFLAMPFLIGCAIVQLRTAVSHQPWPSNMSRSRCTSSSSRSSRRVTSSR

SEQ ID NO: 327727 - protein, 169 aa, Zea mays
  unsure (1)..(169): unsure at all Xaa locations
  Clone ID: MRT4577_61956C.1.pep
THQSHAYFERSKGTSREARXANTDYRRIIRMIRPEYDMXDTPRYRCAGRFTNDDIARSNIISXVYHGDTVLASAYSPELPRHALEIDLTFYAAAYCTGLLLARRVLKTRALDNEYEVYVEATGEDFSVEPADERRPFRALLDAALIMTTTGKPGFGAPPATLHAGLDIP

SEQ ID NO: 327728 - protein, 62 aa, Zea mays
  unsure (1)..(62): unsure at all Xaa locations
  Clone ID: MRT4577_61957C.1.pep
AAAREDRANGTHTPRACNIERRILHRNQGRDDXNIYIITXRFQVFQESTLPVVXYYDKXGKL

SEQ ID NO: 327729 - protein, 113 aa, Zea mays
  Clone ID: MRT4577_61958C.1.pep
EPTLPDSNRRRRRRESRDSPQRRPATTRYPAVPSPQTAFAPTPSRPVPSPSRRPESFELPRLSRRVVHRAAAAAGVTKRGGNSGAGCRDPSAMRGSEYGCDPTGKLWTLLVED

SEQ ID NO: 327730 - protein, 54 aa, Zea mays
  Clone ID: MRT4577_61959C.1.pep
SRLVVWSAVGSQYFLHHDICFGRYCGCYYTTTPFRVCGTLSIVNNCGVRVTHAS

SEQ ID NO: 327731 - protein, 133 aa, Zea mays
  Clone ID: MRT4577_6195C.1.pep
QKLRGDPRGRDPEAPFSGAFKGRDGMAWVSNVIGAGASLGILTSLMVAMLGQARYLCVIGRSGVVPAWLARVDPRTATPINASAFLGLLTAALALFTELDVLLNLVSIGTLFVFYMVANAVVYRRYVGDPCPG

SEQ ID NO: 327732 - protein, 61 aa, Zea mays
  Clone ID: MRT4577_61960C.1.pep
LAIILEGKPGYFCALSILCAKKGNLKVNWCRRLCAFLGGMAMAADSKYACPQELEHQCYPK

SEQ ID NO: 327733 - protein, 77 aa, Zea mays
  unsure (1)..(77): unsure at all Xaa locations
  Clone ID: MRT4577_61961C.1.pep
VAFRSVAEGGRVCARVLLSSPLLLVTFWVAAGLSLWRAWFFVGPTLWLFSVGPRVVVCPSFPVSGPPGVGGIGEVXR

SEQ ID NO: 327734 - protein, 239 aa, Zea mays
  Clone ID: MRT4577_61962C.1.pep
MPPTPARPPPAVAAGEPSAMGSDQGLPPHGAPWPQRSDYDPYAYARHSAAAASYYYQPPPPGTEHAAPVAASSSWSSAAGSSDNVIVGGPGAEPLAVPALSQPTGSIGWSGGDVGHLPYYDPQYQTAQHPAAVGGGIGTLNGVNRGHGPSHGGGRGGSSMYHPLIWNAGITSPRGRGLGRGRGSGRGRRNKSSDWQLAIQASGGSFALQAQPETVCAPAHMVQATTISSTRYCCSSCLV

SEQ ID NO: 327735 - protein, 96 aa, Zea mays
  unsure (1)..(96): unsure at all Xaa locations
  Clone ID: MRT4577_61963C.1.pep
MKFNIANPSTGCQKKLEIDDDQKLRAFYDRKMGQEDRGDALGEEFKGYVFKIMGGCDKQGLPMKQGDMTYGRXQLVLHRGTTCLQGYGKQNEERKR

SEQ ID NO: 327736 - protein, 356 aa, Zea mays
  Clone ID: MRT4577_61964C.1.pep
MTKHSEKQWRFQQALAWMVSVDSGDDYAAKQGERCGGWHRRSARGSESRRGGDAESKSDVNCVEKMATRRKEPLTSPILSDLFVSRLEDSGSGYRGKEHAEGRVEEINLALDGWIWNPEMTKHSEKQWRFQQALARMVSVDSGDDYAAKQGERCGGWHRRSAKGSESRGGGDAESKSDVNCVEKMATRRKEPLTSPILSDLFVSRMEVSGSGYRGKEHAEGRVEEINLALDGWIWNPVGLMHGRACAGCRANDFATGLSETAVTSVVKTDCVLTLLAAASAIAAWGPLRVDVRVTRKFRVGYFRFLKFRVLRIDTRNYNEFCNNRKIGYPEFRVRVRVFPNYPNYYVGFVKTHTPY

SEQ ID NO: 327737 - protein, 63 aa, Zea mays
  Clone ID: MRT4577_61965C.1.pep
RVGGPRRHGPRVPRRHAQLQDLHGRRGGWLHGLRVITSLCSLFVDLTLYYVICMAIIFSDTML

SEQ ID NO: 327738 - protein, 54 aa, Zea mays
  Clone ID: MRT4577_61966C.1.pep
IHIIKNTILLTSSPTYHLSWLSKIIAPLIHAESYHLHTHNIYLHLSHILLPIIY

SEQ ID NO: 327739 - protein, 79 aa, Zea mays
  Clone ID: MRT4577_61967C.1.pep
RNSPASHPTSFVTSRLILSSPLVCFRITAELCDPTGGFWWSWVILLHSRRLPWVGGRTYATALLIGLHRPRLLGRPHEL

SEQ ID NO: 327740 - protein, 82 aa, Zea mays
  Clone ID: MRT4577_61968C.1.pep
MGLDLYASLDMRAGSAGACVDIKESCAKTPDPDVCLLALHADNDSKTHRDLSDAALRAETTAVEAEVDYARNEMDVVKDNDM

SEQ ID NO: 327741 - protein, 63 aa, Zea mays
  Clone ID: MRT4577_61969C.1.pep
IIFHLHITFFLFHFNTLLDRIFFEGAILINFILSYAPIYTSIFLTYQQFIYIFLIYYNVYIKN

SEQ ID NO: 327742 - protein, 126 aa, Zea mays
  unsure (1)..(126): unsure at all Xaa locations
  Clone ID: MRT4577_6196C.1.pep
AAGAGSLTGFEGVSTLVDVGGGVGVTLHDITSRHPHISGVNLELAHVISEATPFPGVRRAPGRMLASGPAGXDPSIMKWILXDXSYSHCANLIKICYHLLPQNGDGILPECTLPVCFYGTPQAHGV

SEQ ID NO: 327743 - protein, 26 aa, Zea mays
  Clone ID: MRT4577_61970C.1.pep
SFFYISPSNPRGGYFIKMGGLPNKIL

SEQ ID NO: 327744 - protein, 85 aa, Zea mays
  unsure (1)..(85): unsure at all Xaa locations
  Clone ID: MRT4577_61971C.1.pep
MQPQGQAHHHRQSYYAVLGVQPGATAAEIRAAYHRLAMRWHPDKIASGGGAADPARAEEAKSRFQQIHEAYQVLXDDKRRALNNA

SEQ ID NO: 327745 - protein, 78 aa, Zea mays
  Clone ID: MRT4577_61972C.1.pep
WTRGRTRGRTRGKKKKKKKKKKKKKKKKKKKKKKKKKKKKKKKKKGGGPLKGPKITSPAMQPHISFIGPPKLNSRPVV

SEQ ID NO: 327746 - protein, 89 aa, Zea mays
  Clone ID: MRT4577_61973C.1.pep
PPSAERTIMEASLQGLSNGGSGLGGRSVHARSGGRRSAAAVKRLLSRLRRSWRRRAARPRRTAVRFGYDLHSYYQNFDDGTASRAHHRL

SEQ ID NO: 327747 - protein, 49 aa, Zea mays
  Clone ID: MRT4577_61974C.1.pep
FTRMGECRMLFQILFLGPSNLFELNASFCSNVAKNDCLTNCEHDCLQQS

SEQ ID NO: 327748 - protein, 139 aa, Zea mays
  Clone ID: MRT4577_61975C.1.pep
LEPPDDPMNLSRHPMHKSHQDHKEDREEQHQWLEGIKNPCAITIEWMDKTNLRDNPRGILSIHEESSLEFENVRKNSEHGNYFINTSPSPWSYKTSPQSIGLSNITAFEISNPLFLSIYKNFKGVVIDAYVYNKNCRYR

SEQ ID NO: 327749 - protein, 120 aa, Zea mays
  unsure (1)..(120): unsure at all Xaa locations
  Clone ID: MRT4577_61976C.1.pep
NCDHAAGVSPLRGQDLENAVAPSVNTVWDDLTMADLVWSWLRARSWVVPLRGEPLMLPDADWNSTASCSVLLLPEFGVAXGAXRERGRARSWSLKRTQEEEVNCEEGACSSVGDSVVNSI

SEQ ID NO: 327750 - protein, 84 aa, Zea mays
  unsure (1)..(84): unsure at all Xaa locations
  Clone ID: MRT4577_61977C.1.pep
KVLLLIKLREWAPGDAMPPRVLLYASAMWTRLGLPLRPPRNHNNGHGLPLQATQNPHSPSAFPSVLCATAMVFPSXQPQQPPCP

SEQ ID NO: 327751 - protein, 125 aa, Zea mays
  Clone ID: MRT4577_61978C.1.pep
LASVLRLLLVFCALDLALSWDSRRLVCRLPGGPPLRWALLLLVDVALMLRCPGARSVSSSSQDASVPCRSCPGLCRFLLSRFPLGVWSICSVFSGLPSSVCFRFAPRARGSSRAFRAGLLRAVLP

SEQ ID NO: 327752 - protein, 94 aa, Zea mays
  Clone ID: MRT4577_61979C.1.pep
FRRWWPRCADDSPTPSTAKTTNTYLMVNHSDPTTASTTRYLGLHKPLILPTPDRISEYCTATPGAKCCRWSHAYFQLNRLERQLSPHLLPMYGD

SEQ ID NO: 327753 - protein, 274 aa, Zea mays
  Clone ID: MRT4577_6197C.1.pep
YQLAQQYHKVVAERDQAIAVKDRLESLCREFQRQNKMLKEECQRVSTEGQNMRTELSEKFDHAIKGVSAKLEEQRVERISQLEENNTLRSKLKDLADQYNITQQKYAHQLKEKMLELELADLRLQQHQEKAAQEHTQMQLYAEQVSQLMTTEKNLRLQLASDGERFQHFQDALSKSNEVFETYKQEMEKMISVIKNLKKENEFLKGKCENSDIAIVKLIEERELTKKQIEKLKNQKEKLESLCRTLQAERKQGPSASIPDAPSSQEVSATSQES

SEQ ID NO: 327754 - protein, 41 aa, Zea mays
  Clone ID: MRT4577_61980C.1.pep
EDGGEAPALEDRRLSLSTLLTLMFSPKSVRSVERPQARRLG

SEQ ID NO: 327755 - protein, 64 aa, Zea mays
  Clone ID: MRT4577_61981C.1.pep
GFHTLGVFFIWPRANGLGWGAPKNGGYKDGFWVSGLGGNPLKKKKKLRAPPIFKRKGTPARFFF

SEQ ID NO: 327756 - protein, 117 aa, Zea mays
  Clone ID: MRT4577_61982C.1.pep
SAATSYLPAGTAPSACKASVRLGEDGHSLRSHAKPGDAEQTHFALEAEDPCPLLLSSRRGPASPLKAIHSDNATHQAVQPLNGDPFIGSLQTRDTSSPLERGDLANFFFTAPPRARC

SEQ ID NO: 327757 - protein, 114 aa, Zea mays
  unsure (1)..(114): unsure at all Xaa locations
  Clone ID: MRT4577_61983C.1.pep
MAAYSCALWTVASVVAFLVIGVAEGRYGGPGQWRRPAPAPVVPVAALVSEQLYGSLFLHKDDDACPAKGFYTYASFIQAAMTFPTFAXTGDLITRKREVRAFLAQISHETTCGW

SEQ ID NO: 327758 - protein, 56 aa, Zea mays
  Clone ID: MRT4577_61984C.1.pep
GNGLVLLKKRFWLVFAPVPSQIVFVFIHPYIATNFTPLWAPPPGLPMNKKFSVHGP

SEQ ID NO: 327759 - protein, 66 aa, Zea mays
  Clone ID: MRT4577_61985C.1.pep
VSAADVGSLSFLYVQSRCGVCSRGVKSGGSSAVFTDDCSHAFHLPCIVGHARSCCDNRVLFCPVCA

SEQ ID NO: 327760 - protein, 50 aa, Zea mays
  Clone ID: MRT4577_61986C.1.pep
CCWLLLKFGENGWTFVYGVFNIIVGLYLFGQRTDAFNIFCNKFICVLVQT

SEQ ID NO: 327761 - protein, 55 aa, Zea mays
  Clone ID: MRT4577_61987C.1.pep
MPPPGVETPEWLRNLPVAPEFRPTAAEFADPIAYILKIEPEASRYGICKIVPPLA

SEQ ID NO: 327762 - protein, 105 aa, Zea mays
  Clone ID: MRT4577_61988C.1.pep
GGDSGGGEVGRSPEEHLLRHCSPAFGILAGIIICDLVRCRPYLGSGAHSAMSSLGLFQRMVDRGLNAPTLFLGSYWVSPEATMGCRRGSWQQREAEPFSPPLLAN

SEQ ID NO: 327763 - protein, 91 aa, Zea mays
  Clone ID: MRT4577_61989C.1.pep
SLYDLLEWRTDPIASLACSSDAHTRQTVITTSRLGLIHTSNHSAHPPFGYPLKGPTQIPIKPISPFYSSSTTGFSCMRHTVPPIRLEDQPP

SEQ ID NO: 327764 - protein, 61 aa, Zea mays
  Clone ID: MRT4577_6198C.1.pep
ASYVEYAFQQWKLSLLLSSSSRLLFCLTCLPSSHAVDVHQSWEWTQTFNCCQNNDSICMFK

SEQ ID NO: 327765 - protein, 233 aa, Zea mays
  unsure (1)..(233): unsure at all Xaa locations
  Clone ID: MRT4577_61990C.1.pep
MSSLYDVSCFAAGLAGNVFALALFLSPVPTFKRVLKAKSTEQFDGLPYLLSLLNCCICLWYGLPWVSDGGRALVATVNCTGALFQLAYISLFIFYADSRTTRLKVAGLLVLVVFAFALIAHASIAFFDQPLRQLFVGSVSMASLVSMFASPLAVMGXVVVRTECVEFMPFYLSLSTFLMSASFAVXGFSCVISSYTSRMGSESSWEQCSWCCTRTTAGDGKAATRQHRCLPDH

SEQ ID NO: 327766 - protein, 90 aa, Zea mays
  unsure (1)..(90): unsure at all Xaa locations
  Clone ID: MRT4577_61991C.1.pep
AWDAPAXAAGRMVAMAGSGKLFVGGNWRSHGTEDFISKLXTNXNAATVETDRDVVEAPTFIYLAQDQNSLTGRVEDYAHNVWSAEGGAYT

SEQ ID NO: 327767 - protein, 292 aa, Zea mays
  unsure (1)..(292): unsure at all Xaa locations
  Clone ID: MRT4577_61992C.1.pep
MSSLYDVSCFAAGLAGNVFALALFLSPVXCCQHPHRFFNFLFSYQHRTXVAAAARLLLAFCTPSSRPTFKRVLKAKSTEQFDGLPYLLSLLNCCICLWYGLPWVSDGGRALVATVNCTGALFQLAYISLFIFYADSRTTRLKVAGLLVLVVFAFALIAHASIAFFDQPLRQLFVGSVSMASLVSMFASPLAVMGVVVRTECVEFMPFYLSLSTFLMSASFAVXGFSCVISSYTSRMGSESSWEQCSWCCTRTTAGDGKAATRQHRCLPDHVAEFVSPIARAVLSVVLCSAIL

SEQ ID NO: 327768 - protein, 225 aa, Zea mays
  unsure (1)..(225): unsure at all Xaa locations
  Clone ID: MRT4577_61993C.1.pep
MNSLYDVSCFAAGLAGNVFALALFLSPVPTFKRVLKAKSTEQFDGLPYLLSLLNCCICLWYGLPWVSDGGRALVATVNCTGALFQLAYISLFIFYADSRTTRLKVAGLLVLVVFAFALIAHASIAFFDQPLRQLFVGSVSMASLVSMFASPLAVMGXVVVRTECVEFMPFYLSLSTFLMSASFAVYGLLLRDFFIYFPNGLGVILGACAACCTRTTSRRWKSSDS

SEQ ID NO: 327769 - protein, 72 aa, Zea mays
  Clone ID: MRT4577_61994C.1.pep
AQLDPQFIDTVVIHKKRALVMWRKSNDLSINGVTLVCLVSGPRSSLHGGLFSLDPGPGAGVSVSRRRSPPWR

SEQ ID NO: 327770 - protein, 50 aa, Zea mays
  Clone ID: MRT4577_61995C.1.pep
IIKQIQKAYMHITMPLRKHSALTLLPRVNEHVDRARYSGSRACRRAHSSL

SEQ ID NO: 327771 - protein, 95 aa, Zea mays
  Clone ID: MRT4577_61996C.1.pep
GAQTKAFGSSAQIKNKSVIVSKEKNLEQPLKEKAHQLELARKAKELDRKAKELARKEEELRKERDAAEKERLRMDQKAKAKEAKERKRRKPKKHV

SEQ ID NO: 327772 - protein, 38 aa, Zea mays
  Clone ID: MRT4577_61997C.1.pep
VNQPPMHGGGLLECLRADVDGACRLRGPCRPHHFMYAD

SEQ ID NO: 327773 - protein, 167 aa, Zea mays
  Clone ID: MRT4577_61998C.1.pep
RIDGVAGQRFGITRARTVRANGELIEKDAVLLLRRNQTVRVVGSEALPKSGRISRYDVKIKHKAGEEQEETGKAQDKVEKIQVNASGIQESSKEILGKTDKLLDALEPNLDKEEKVQEKEEQHLDEVDNVQENEGKVQCPAEKIQEGGEVQCPRQRKSRKVEDSETK

SEQ ID NO: 327774 - protein, 180 aa, Zea mays
  Clone ID: MRT4577_61999C.1.pep
MARLLLVVLALHLTAARAFAASSVGGRNGDFDPSRVVQLSWHPRAFLHKGFLSDAECDHMIELAKDKLEKSMVADNESGKSVQSEVRTSSGMFLEKRQDEVVARIEERIAAWTFLPSENGESIQILHYKNGEKYEPHYDYFHDKNNQALGGHRIATVLMYLSNIEKGGETIFPNAEGKLT

SEQ ID NO: 327775 - protein, 35 aa, Zea mays
  Clone ID: MRT4577_6199C.1.pep
GEGPHPKVAIHRLEHGLQVLESTAHELFKFIINFL

SEQ ID NO: 327776 - protein, 57 aa, Zea mays
  Clone ID: MRT4577_619C.1.pep
RDGSAEPRLSSRCCDSVLLSAWHEYHQTLWENLRPCVLSADCILQLGPMPLLDYGAC

SEQ ID NO: 327777 - protein, 63 aa, Zea mays
  Clone ID: MRT4577_61C.1.pep
HSTFFFFFLIFYIFFFSHYTKYFLGGNHNTFYRLKLRFKSTFTGKKTLLLKHTNFTSNERAKN

SEQ ID NO: 327778 - protein, 57 aa, Zea mays
  Clone ID: MRT4577_62000C.1.pep
MSRRALLVPPFGPPINLLAWEWKKKKKKKKKKKKKKKKTKKKKKKKKKKVLCVVTTA

SEQ ID NO: 327779 - protein, 88 aa, Zea mays
  unsure (1)..(88): unsure at all Xaa locations
  Clone ID: MRT4577_62001C.1.pep
QPSPELKTYXAKLVIFPXRARKVKAGDSTPEELATATQVHCVYMPFTRGGXGGVXVVKVTDEMKSWAAYXKLXLVRXNKKHLGARPKK

SEQ ID NO: 327780 - protein, 49 aa, Zea mays
  unsure (1)..(49): unsure at all Xaa locations
  Clone ID: MRT4577_62002C.1.pep
XCIPKAQIHRTAASFESCTHKMATQQLFKQIRTVAGSGRVGGRVGGRVG

SEQ ID NO: 327781 - protein, 90 aa, Zea mays
  Clone ID: MRT4577_62003C.1.pep
SGLVAAAAPPGPLLGPPLPGGPLKRGPPPPAPAGAKKAPPVPGVPAKVLSPRKGKGPLKEAVAPLREKGYPVLYLGPDPVPLVPEMYLFV

SEQ ID NO: 327782 - protein, 120 aa, Zea mays
  unsure (1)..(120): unsure at all Xaa locations
  Clone ID: MRT4577_62004C.1.pep
MMCKRPITPVRAARATAAAAKRHADTHAASAANAMSTTDTVIAHGIDMMPCLALPLPTPDPGSAARSFYVALEATDLAGNTCRCRAWTNKIMAWTEGWFVLGKXKRSGVWACHGRGYVPA

SEQ ID NO: 327783 - protein, 58 aa, Zea mays
  unsure (1)..(58): unsure at all Xaa locations
  Clone ID: MRT4577_62005C.1.pep
KGLLRLDFAVAAQNCWVRKGGAFTGEISAEMLVHLXVAWVMVTTSERRALLGESVMCC

SEQ ID NO: 327784 - protein, 78 aa, Zea mays
  Clone ID: MRT4577_62006C.1.pep
EKRLVVPVFSMATQKLFGSVALVPVASSSNVFNNCIKWGRGDSAIRWGGKTGANFGLGIVGASCKKLTGWQQIERAPP

SEQ ID NO: 327785 - protein, 106 aa, Zea mays
  Clone ID: MRT4577_62007C.1.pep
KCSEALNRQFNMGVTATQVERHYRHYKENWKFVAAALSKSGNTFDTTRSMVLISESEKANLKDRARRLLSKPIKFFNEMQELFIDSSADGFLALDVPSCMNESHPG

SEQ ID NO: 327786 - protein, 87 aa, Zea mays
  Clone ID: MRT4577_62008C.1.pep
RTSTYLCPFFFFSFILFLLETVTLFFNKPQGQPALQGGRNSKKLPACVLGWGGGPTGAKRKNTWLPRGKGGSGTHAPNRPSPKRKNK

SEQ ID NO: 327787 - protein, 68 aa, Zea mays
  Clone ID: MRT4577_62009C.1.pep
QTLRWTHGIKQKPTACGAGIGGPHTAKRWTKTHSLKRRGGTTKPAASTGIERGCTSRHPRSLWGGAPG

SEQ ID NO: 327788 - protein, 90 aa, Zea mays
  Clone ID: MRT4577_6200C.1.pep
THVPTIQLLQKQQPYKDTTRHGTRRNNTRREPGSWRAAAPHGELVSNSEVLIHCYTKIQQDAVFRVSNILLSNDQFLERCCSSWPPDTQT

SEQ ID NO: 327789 - protein, 51 aa, Zea mays
  Clone ID: MRT4577_62010C.1.pep
FILAGKELDLHLKKLHRKIGKITVPYIMSHGLLSTQMSVLMSTLFLYSRCK

SEQ ID NO: 327790 - protein, 111 aa, Zea mays
  Clone ID: MRT4577_62011C.1.pep
TKAYVDQFSRCLYVEYKSKGIDVQCQVPLYVATKMASIRKSSFLVPSADTYARAAVRHIGYEPRCTPYWPHSVVWFLISILPESLIDSVRLGMCIKIRKKGLAKDAKKKAL

SEQ ID NO: 327791 - protein, 70 aa, Zea mays
  Clone ID: MRT4577_62012C.1.pep
LIAELSSTLFVVTQTQPPPHPPLATSHGPSRGAHVDGPHAAALGVPVPEAARRRHVATAAAADERERRQG

SEQ ID NO: 327792 - protein, 177 aa, Zea mays
  Clone ID: MRT4577_62013C.1.pep
FWGPRLGPFKKKWGSQAPFGRALLSLKIFLANWSGFWASFLAPRWALAPSVPPKTVVFVPPSFLGFQAPKNKRPFGETPLFLGFLPPAPWGPNFSSGGPVPFCGGPCFGPGCPLPPYRCFGCYPFFRPLPLCPPEKIFFRGPPKKKKKKKKKKKKKKKKKKKKKTKGRPSRPRTSRT

SEQ ID NO: 327793 - protein, 326 aa, Zea mays
  Clone ID: MRT4577_62014C.1.pep
MAGTCAHVEFLRAQPAWALALAAVGLLVAVRAAARFALWVYAAFLRPGKPLRRRYGAWAVVTGATDGIGRAVAFRLAASGLGLVLVGRNQEKLAAVAAEIKARHPKVPEVRTFVLDFAGEGLAAGVEALKDSIRGLDVGVLVNNAGVSYPYARYFHEVDEELMRTLIRVNVEGVTRVTHAVLPAMVERKRGAIVNIGSGAASVVPSDPLYSVYAATKAYVDQFSRCLYVEYKSKGIDVQCQVPLYVATKMASIRKSSFMVPSADTYARAAVRHIGYEPRCTPYWPHSVVWFLISILPESLIDSVRLGMCIKIRKKGLAKDAKKKAL

SEQ ID NO: 327794 - protein, 94 aa, Zea mays
  unsure (1)..(94): unsure at all Xaa locations
  Clone ID: MRT4577_62015C.1.pep
NLKNKKKGKIVNFKVFRAPTPXKXXQNTXTNXKXDQQPXHSKLXXQNKKTIQPQHSKPIRIDGAFKAAQKRGRLHVNPKKDDQPKKKSPLGNPP

SEQ ID NO: 327795 - protein, 35 aa, Zea mays
  Clone ID: MRT4577_62016C.1.pep
ALRAALLERMLLHVHELHPPGNRAGQGWAEGTKGD

SEQ ID NO: 327796 - protein, 55 aa, Zea mays
  Clone ID: MRT4577_62017C.1.pep
RSGYPGRPAPTPLPSILGRGALPTVRREKRRMENTHVIPKGIQEHWQNLSRTWFN

SEQ ID NO: 327797 - protein, 224 aa, Zea mays
  Clone ID: MRT4577_62018C.1.pep
MASQSHQAVSPSATKLVLPITSGSSFEPANKKQKKEPQRRVQYIGVRGPYIKSKWSHVPITFSQEDLQLKDYPHNDAGFLVHNVLVDTGSAADIICEKAFRQMQEQDDMIHDATHPLCGFGGKHIVTLGKITMPITFGYVHNTRIEQVVFDIIDMDYPYNAIIGRGTLNAFELSEDKEKALSKFLFDNKDVFAWSANDLCGVNRDVIERSFNVDLAIRPRKQKL

SEQ ID NO: 327798 - protein, 176 aa, Zea mays
  unsure (1)..(176): unsure at all Xaa locations
  Clone ID: MRT4577_62019C.1.pep
CRRWTRRGSNADAAPGGHGGXEARGRTLGAVIKEKDEELALFLEMRRREKERGAAAAAAAAADQLLLSGDSVTGDGMLLLGPPPPAEPKPVAYKVAGGGFRRAPGGADDFLHADAGDKNDYDWLLTPPGTPLFPSLEVESKRSPVSQAGTPKTRPTALKIKVGPTHQILPSETTSH

SEQ ID NO: 327799 - protein, 90 aa, Zea mays
  Clone ID: MRT4577_6201C.1.pep
SGKRGVNHILIARPRPLHHTMYYIGNTKTSTQNLGRWCIQSVTAQQVFPFLQRWLPQQALQTQGMIGRQKKSRLQSRSEDQLAVDLGKDL

SEQ ID NO: 327800 - protein, 445 aa, Zea mays
  Clone ID: MRT4577_62020C.1.pep
MFGTPSITPAFGNPSSTPVFGTPSATPAFGATSSTPAFGTLSSTPAFGTPSSTPAFGTPSSTPAFGTASTTPAFGASSSTPAFGTTSTTPPFGSLNFGTPSSTSAFGTPSSAPAFGALNFGTPSSTSAFGTPSSAPAFGATPSPSPFGFQQQATPCPSPFGLLGGGGAQITTQMAPVAPLPLSPSDRDIQAIVDAYKEDPGNPRYAFRHLLFSVTEPSQRVKPVAASDIMWAEAMGKLECMDSADRERLWPQLVQGFKDLSHRLKLQDEVLVSDTDRLSMTHSNVKKLQRHFQADTYPWIQRLKQQELAIQRRLLRFVRIVEALENRGYRCPLTKEEADLYERLVAILKRLKGHNADLSKRVNTLVSTSRLLASSGGAGGSVYIPSSAKVDERSVTELLEALQQQTEAVAKLGNVLKRDIRDMEIIQSEGTDMAEDNVGRRAQKI

SEQ ID NO: 327801 - protein, 60 aa, Zea mays
  Clone ID: MRT4577_62021C.1.pep
CLCEHLRLAYSGIHHKCIHFSEATVSAFRPPYILIEGVYFHAHESRILKSCTLFVHPELL

SEQ ID NO: 327802 - protein, 151 aa, Zea mays
  unsure (1)..(151): unsure at all Xaa locations
  Clone ID: MRT4577_62022C.1.pep
MATALXGSPRAPAFFLSSFFLRASLAPTAVAMPAAKAGIMGRITSSRGRLSAQVTYNVKLITQEGKVELQVPHDVYILDHIQEDGIDLPYYWRSWCCSSCSCKGVCGSVDQSDQSYLHDCQIDGDWVLSCHVYCNSDVIIETHMEEEITDA

SEQ ID NO: 327803 - protein, 72 aa, Zea mays
  unsure (1)..(72): unsure at all Xaa locations
  Clone ID: MRT4577_62023C.1.pep
LVCSLRRFPLGGRRGXGXIKLPXDVWHNNYSKRSTAGLILLXFGHXXAIPEMSCRYRVRHMPRQCYVGSDKK

SEQ ID NO: 327804 - protein, 115 aa, Zea mays
  Clone ID: MRT4577_62024C.1.pep
TTESSNSLLSFLVHMPVLHMQIQCLVPKNRNERKPNTDEQIRKMKSKELQGGGGWNIQMREFISGTVNRNCCWRFGEEADQLPVLGNRSVERGFEGAAGCAFYSTVDGPKIEAHK

SEQ ID NO: 327805 - protein, 385 aa, Zea mays
  unsure (1)..(385): unsure at all Xaa locations
  Clone ID: MRT4577_62025C.1.pep
MAPFPRRLPAAVPLLLLLGAAVASAGAEDTDGGNSRRRHSRLLFAFGNSLTDTGNGAIFPVTAGGPFTRPPYGETFFGRPSGRACNGRLVLDFLVEELKVPEPTPYLAGRTAADFAKNGANFALGGATALDQAFLASKGIKSFVPISLINETSWFQNVSKLLDASHYDERKIMAKSIFYVGEIGVNDYFAALSNNDSVDVAVSLVPHIIDTIRSALTVMIDAGARTVVITGMLPIGCEPQQLAQFAGSPAGDYDPTTGCITRFNQLAEHHNHMLRMMLRELRTKYXGAXLTLHYADIYRPVIEAVASPASYGFGDRPLAACCGGGGGPNNFNFIAFCGTPASTTCTDPSKFVSWDGIHFTEATNRLLARKMLQELLSRGAYNVAI

SEQ ID NO: 327806 - protein, 63 aa, Zea mays
  Clone ID: MRT4577_62026C.1.pep
LYTILAHFKYPASFPQWHAMLQLAYNIAQKIENIVRMIPVFTLHTLYLGCKSIQVVTSIQLPF

SEQ ID NO: 327807 - protein, 131 aa, Zea mays
  unsure (1)..(131): unsure at all Xaa locations
  Clone ID: MRT4577_62027C.1.pep
QAAADLDGTDCXGTRVIIQEEDDQTSXTGSIYELKPGLDGVTVHALGDTXNNCMNXTGPHLNHDAKDHGAXEDEDRHXSILTNVTXAGEDGDDNANITDRHIHHAGPHFIIGQAGDGHADPNDXGTGAHDL

SEQ ID NO: 327808 - protein, 225 aa, Zea mays
  unsure (1)..(225): unsure at all Xaa locations
  Clone ID: MRT4577_62028C.1.pep
VVRVFHAHHALRWPAYELQLDHGSSWQIVAVARAGDGGGDHLRRRWRAGASCRKGALAAGSACCGRTAGAAGGVLPSGSGXYTSIGQALAEAGKLVPKVKHRFVVLIKTGEYIEQVNITRRNVVLLGEGRGNTVISGNLSNLTSTAMVMTVTVNVVADSFLHQNLTIRNEAGPQGRQAVALRSNSNRTVESGCAIEGFEDXLYSENGVQEYLETDIYGTVDIIFG

SEQ ID NO: 327809 - protein, 45 aa, Zea mays
  Clone ID: MRT4577_62029C.1.pep
RKASHAPHGLLLMKRCRKDKSLSLPYPGRSGRLIYKDEPPFNSYH

SEQ ID NO: 327810 - protein, 115 aa, Zea mays
  unsure (1)..(115): unsure at all Xaa locations
  Clone ID: MRT4577_6202C.1.pep
PPELSGGRAGTMSSHXGEIRNDQKEDSHGDQHDYLDLDREPATYSWTENCMSGTDSHNEICTPDTPXPPRPPHTRINMLQGCTSGDETERLNKTNEATYAVAYTARDKTTSEIAA

SEQ ID NO: 327811 - protein, 65 aa, Zea mays
  Clone ID: MRT4577_62030C.1.pep
SYKASPPCVTYPPPPKFLSPFRFFTQKKTGGCFPKKKKKKKKKKKKKKKKKKKKKKKKKKKKNTH

SEQ ID NO: 327812 - protein, 113 aa, Zea mays
  unsure (1)..(113): unsure at all Xaa locations
  Clone ID: MRT4577_62031C.1.pep
LLVRCGLCPLPFLVVSVSASLLACGRPVWVXLAGVGCGVSAWRCFAGVPRLRVCXLVLFFCLRRGRRRLFLSGLALPAPLWWSSGPGFAGPCPLPRPRGSGLLLRPSRLLSCL

SEQ ID NO: 327813 - protein, 433 aa, Zea mays
  unsure (1)..(433): unsure at all Xaa locations
  Clone ID: MRT4577_62032C.1.pep
MGAPDSPPTVELDRCAGDRCSAWHTGQSGVTPDSPVNYSGGSPQKPEGEEFELIHPGAPDSPERFDPISLSGTKWVFRNKQDEHGVVTRNKARLIAKAYSQVEGLDFDEIYAPVARLQSIHILLAYATYHGFKLYQMDVKSVFLKGPIKEEVYVDQPPSFEDSDNPSHVYKLSKELYGLKQAPRAWYECLRDFLITNGFKVGKVDPTLFIKTITKDLFIYQIYVDDIIFGSTNKSSCEEFSRIMIQKFEMSMMGELKYFLRFQIKQLQEGTFICQTKYTQDILKKFGLKNAKPIKAPMGTNGHLNLDTGGKSIDQXRPDIMLXVCMCARFQANPKEVHLRAMKRIIRYLVYTPKFGLWYPKGSTFDLIGYSNVDYAGCKIDRKSTLGTCQFLGRSMASWASKKQNSVALSTAEAEYIAAGHCCAXILWMRQTL

SEQ ID NO: 327814 - protein, 90 aa, Zea mays
  Clone ID: MRT4577_62033C.1.pep
RTTAVIAGATSPSVIMTPLWGRGSSIRSPSIFRREAPHVISFFNKPETEIACHRLLLTGVTRQILDEKKRTAIEPDSARTARSVGHPPCG

SEQ ID NO: 327815 - protein, 50 aa, Zea mays
  Clone ID: MRT4577_62034C.1.pep
SEKNTEQPKLGRDTQYTGAQSFCAGWHTASIVEPSKIGPYGPGSFKCRLR

SEQ ID NO: 327816 - protein, 50 aa, Zea mays
  Clone ID: MRT4577_62035C.1.pep
ARVIFCFPKKKKKKKKKKKKKKKKKKKKKKEKKKKKKKKKSTLRCYHCLR

SEQ ID NO: 327817 - protein, 79 aa, Zea mays
  unsure (1)..(79): unsure at all Xaa locations
  Clone ID: MRT4577_62036C.1.pep
PIDKAVSQVEYRCSYSGXLAWATDDPFLHNAFNTYGEVLXSKIILDRETLRSRDISFSTFSXTEDATRNANEGMNRKDL

SEQ ID NO: 327818 - protein, 82 aa, Zea mays
  Clone ID: MRT4577_62037C.1.pep
MAPPIWRDGRHGISVLNTVKQDITARTSAGEATTVATRSTTKQKASRDWNKSCLSFAIGRAHVRYDIYIMAGQCSKLRKARL

SEQ ID NO: 327819 - protein, 59 aa, Zea mays
  Clone ID: MRT4577_62038C.1.pep
RHGPAGTTVDTRFKTNCGPPCCHHPPPTNVFDQKKKISHHPAPRLAAQFVVLVSILEEI

SEQ ID NO: 327820 - protein, 48 aa, Zea mays
  Clone ID: MRT4577_62039C.1.pep
PVTVNFTIDGGPAYIIQIFLYREGVRLNKPKHRSHLLVILTDPWADPW

SEQ ID NO: 327821 - protein, 34 aa, Zea mays
  Clone ID: MRT4577_6203C.1.pep
RTGSVRVGYALNICPCLTLAHTCSDDLGLASHPA

SEQ ID NO: 327822 - protein, 59 aa, Zea mays
  Clone ID: MRT4577_62040C.1.pep
GPARNEFCGTVLKIMERVLLYTDSLCAPSLTPTDRASHAMTHPSRSLARIMPSMNWPLN

SEQ ID NO: 327823 - protein, 80 aa, Zea mays
  unsure (1)..(80): unsure at all Xaa locations
  Clone ID: MRT4577_62041C.1.pep
VQAVYNHYTMASFNVYLTTITVDTMGVYYQHIYXYIXIMFPMLYQDESXDLLIKWLMIIACMVNCVYTASIIFFLCTAYF

SEQ ID NO: 327824 - protein, 57 aa, Zea mays
  Clone ID: MRT4577_62042C.1.pep
LRTRALKKIRMHNNYITVLTSLNLILVPVVMHMPPGYALVNFRWLYEPQKSLNPAAP

SEQ ID NO: 327825 - protein, 49 aa, Zea mays
  Clone ID: MRT4577_62043C.1.pep
FLIPYEAPLGRRPTPPNKSLLRVHDAFRGASGNAVLPSRGRPHVCCSPA

SEQ ID NO: 327826 - protein, 159 aa, Zea mays
  Clone ID: MRT4577_62044C.1.pep
VSRVRRVHPFNVLACLCSLPYVLKCWFVPALVVANVWFRMHACLPALLRGFVRSSASCAALCCLSVVVGPWWCCALVGRRGERSAGGSFAPFASFWRGPLKPPLSVSVVPGWHCRLRPSLRRGVAGELLVAGDGLGGEPAPFCSLGIGWRGWHRPPVWA

SEQ ID NO: 327827 - protein, 125 aa, Zea mays
  Clone ID: MRT4577_62045C.1.pep
RSPPRVDPASAPVVTVSEEPAPEAAKEVVKKPEEGKKPDEEGDERKKADPAAEKEKKARKPRSRKPKSAGLHHPPYFEMIKEAILSQDGGKVGASPYAIAKHMGEKHRDVLPPNYRCLGAVEGGT

SEQ ID NO: 327828 - protein, 55 aa, Zea mays
  Clone ID: MRT4577_62046C.1.pep
IDNTTRVYDTADQNTRTRSSSSGNKVDDNYNARKEESTNSIEGSIKQQLISILPS

SEQ ID NO: 327829 - protein, 235 aa, Zea mays
  Clone ID: MRT4577_62047C.1.pep
MATVTEEVAPVVTVSEEPAPEAAKEVVEKPEEGKKPDEEGDERKKADPAAEKEKKADPAAEKEKKARKPRSRKPKSAGLHHPPYFEMIKEAILSQDGGKVGASPYAIAKHMGEKHRDVLPPNYRKVLAVQLRGFAAKGRLVKVKASFKLAAAEERKPSKKKPAAGMAKRKRAAAPAKMKPAAAASAPSASAPSREARKVRAKRARKVAPAPAQPKPKPARAAASGAGKKVNKASA

SEQ ID NO: 327830 - protein, 58 aa, Zea mays
  Clone ID: MRT4577_62048C.1.pep
NAWRKGYFGKTKRRGKGMVLTGLSGKTAGFSLYLGCAKKDNVFRMGGIIRVGSIKQPP

SEQ ID NO: 327831 - protein, 88 aa, Zea mays
  Clone ID: MRT4577_62049C.1.pep
AAPDGFYLYPGIGPSWKCTYYDYVTTISSHLNHVQCQRETLSSGLFTELSILCICLIILPLYVPSKPPYLVPYTPSYFKPVRSHSIST

SEQ ID NO: 327832 - protein, 38 aa, Zea mays
  Clone ID: MRT4577_6204C.1.pep
EDRTRLIIRAYAACLSPCSTSLVMHQMRMFFNTMTSML

SEQ ID NO: 327833 - protein, 51 aa, Zea mays
  Clone ID: MRT4577_62050C.1.pep
PFLIILPGKKTRAGGFLRIGTMTLEDHYATGKPKTRDWSTLHGPGEKALEK

SEQ ID NO: 327834 - protein, 68 aa, Zea mays
  Clone ID: MRT4577_62051C.1.pep
VILFPSFPSVSFPGESRRSRLAVNMCPDGQAFGFRPLMELLFTLSQSVRRCFTANWRGWIIMVVFKSF

SEQ ID NO: 327835 - protein, 481 aa, Zea mays
  Clone ID: MRT4577_62052C.1.pep
MTTPRRDGQHHGDKRTVTRAASRNSDGHGAGDLSFGSTAGPRFAVAPPRPWAPPPEHAAVFVQPPDDPSTLIMLWGPPGEVPVAGFAAAPEGLPDAFAGSASCLPLARQVGLQAAGGQQGARNFVVSPLSFHAALALVAAGARGETQRELLRFLDSESLGELHRAAATALVARLSDLPQTSFACGVWVDRSRALTPEFMDTAASRYAAVAESVDFLKNSEAARQQINAFVKGATKGLIDDVLPPGSVDSSTALVLANAIYFKGAWARPFDPSRTIFAPFHLPDGGTVRVPFMTTTTSGFEDQRVAVFPGFKALKLPYKNDGGAQQDAFYMLLLLPDGETLTLNDLYDKVVSSPGFIRKHTPVDEVPVGRFMVPKFKFTFEFEASHDIQKLGVNRAFQSGDFSGMVSGGNGLIISGVYHKATVEVDEAGTVAAAATAEFMFMCARMHPPPVDFVADRPFLFAIVERSGVVLFLGHVVNPLVG

SEQ ID NO: 327836 - protein, 77 aa, Zea mays
  unsure (1)..(77): unsure at all Xaa locations
  Clone ID: MRT4577_62053C.1.pep
GHIKLIFHTSSRQYLYSASXAGLQYLTILLYMTQEAIDARILXLLSLTLKYQYALLQQAYSEHLNLTRIEAQQLLEQ

SEQ ID NO: 327837 - protein, 155 aa, Zea mays
  Clone ID: MRT4577_62054C.1.pep
GDHDWFCFHKPHRSPPYIYVSFNPHIINQYSAVHLLSWYRSGAGCLGWQNVEKTSSGVECLSPVRRGNAGRCCPQLRRSPCRTHKCLLNHTSSMPATDRNATRCSSSDNTQIRHFPGWPTPPASLPRWSPGSGAKIKTRRGKPWRDLGGPRERGT

SEQ ID NO: 327838 - protein, 100 aa, Zea mays
  unsure (1)..(100): unsure at all Xaa locations
  Clone ID: MRT4577_62055C.1.pep
PFVRPDHGLIENRGKGILNMTSQGKKEGQTDKLEXSQDKGRLSKEEIQKIVHDSEKYKSXDEEQQKKVXSRXSEEYYVYIMRNMIEDEILSSKLAADDKK

SEQ ID NO: 327839 - protein, 64 aa, Zea mays
  Clone ID: MRT4577_62056C.1.pep
TYLGKCKCTHISVYRMVYPSVFTPCLMSIKRVYRASRRQHPQQAAVEHPVVEHRPRRPRSAARM

SEQ ID NO: 327840 - protein, 95 aa, Zea mays
  unsure (1)..(95): unsure at all Xaa locations
  Clone ID: MRT4577_62057C.1.pep
FVSKAASVSCSSTRDRDQGVDPKIRREGWHIGFPPPPRRWVCGAGRGNNGPRSTMCPPTLREPSVGQGPSTPPYRTAIDTAASSQLTHSPTTRXP

SEQ ID NO: 327841 - protein, 51 aa, Zea mays
  unsure (1)..(51): unsure at all Xaa locations
  Clone ID: MRT4577_62058C.1.pep
ACXYRYGISDCTHASXYPYLIPIDKKDCYEAYPSFRRAKRFVLRQNVILHT

SEQ ID NO: 327842 - protein, 79 aa, Zea mays
  Clone ID: MRT4577_62059C.1.pep
CCFFFFFFFLFFFFFFFFFRGKAIFFLTTNYLGNSLTIDTPLSGGNKTKLFLETQFVLPQPISPFFFRKRKKVFSSPLV

SEQ ID NO: 327843 - protein, 447 aa, Zea mays
  unsure (1)..(447): unsure at all Xaa locations
  Clone ID: MRT4577_6205C.1.pep
MESLILASSCSASPRLPLLSSAARFRGLPVSVPPPSSASISGAARKGPMRPRLFVAAAAAPRGSGNVFEGLRAKGFASMSSSTGNENMSTGTGTLPPMPPTSSYIGSPVFWIGVGVALSVAFTTVSSMLKRYAMQQAFKSMMTQSAPNSFGSNSPFPFSMPPQASPTAPSTYPYLEPKKDTSPHVSTVDVSANEVEATGTSKEVDVTETPKPSKKFAFVDVSPEELQQKNLQSSPETVDVKHDSTYSESKEDTEEQVPTISTNTESKEDTEEKVPTNGASFKLNEGAAHGPTESNNSASMLSVETIEKMMEDPAVQKMVYPYLPEEMRNPNSFKXNPMYRQQLQDMLNNMGATPDQWDNRMLDHLKNFDLSSPEVRQQFAQVGMTPEEVVSKIMANPDVAVAFQNPKIQTAIMDCSQNPLNIVKYQNDKEVMDVFMKISQIFPQING

SEQ ID NO: 327844 - protein, 49 aa, Zea mays
  Clone ID: MRT4577_62060C.1.pep
VCYVVVVDTPGTLTGIPLVFQFCYASNFNRTRRSLMFYIVDDMLRCGYR

SEQ ID NO: 327845 - protein, 49 aa, Zea mays
  unsure (1)..(49): unsure at all Xaa locations
  Clone ID: MRT4577_62061C.1.pep
MANARPGAAANDQRLLQFAELPPNRLHRFPPPTMDDXFMEIVVDQVADR

SEQ ID NO: 327846 - protein, 78 aa, Zea mays
  unsure (1)..(78): unsure at all Xaa locations
  Clone ID: MRT4577_62062C.1.pep
FADSAGAATFNDINRCKXTLWPAALPGGGARLDPGKTXTVHVPADTAHARVWARTGCKXDGRGRGTCQTGDCRGTLAC

SEQ ID NO: 327847 - protein, 34 aa, Zea mays
  Clone ID: MRT4577_62063C.1.pep
RDDSSYVNIRGLKCLPLHNRLTIFAYIKSYYSLA

SEQ ID NO: 327848 - protein, 53 aa, Zea mays
  unsure (1)..(53): unsure at all Xaa locations
  Clone ID: MRT4577_62064C.1.pep
MIKANKKPLLKCSLNEYKPKVIILTTIRATIQLSEKFXFESMSQVISVIFLRY

SEQ ID NO: 327849 - protein, 59 aa, Zea mays
  Clone ID: MRT4577_62065C.1.pep
GFSSPLPLFGSLEKRQGWMGSTHPGGRVVFFHGKRAKYEVISGGLAQWWFSDRGENETD

SEQ ID NO: 327850 - protein, 63 aa, Zea mays
  Clone ID: MRT4577_62066C.1.pep
KLMLSTLLPYNLLKHASMHPLQNEFTPNGLNEWCWLLLIDRHRISRISFELPPSDVAQKKKNR

SEQ ID NO: 327851 - protein, 81 aa, Zea mays
  Clone ID: MRT4577_62067C.1.pep
RTGTKLKKIFFFFFFLRFFFFSFLSFFLSISFSLSFFFFVSGLFSYLFFFGGGGAPSLKGVSPHNGGRPSSRQLKGQAWGA

SEQ ID NO: 327852 - protein, 35 aa, Zea mays
  Clone ID: MRT4577_62068C.1.pep
SPQPPLHTRMGIIPASNPYAGSTLGANNVLGPESS

SEQ ID NO: 327853 - protein, 98 aa, Zea mays
  Clone ID: MRT4577_62069C.1.pep
DDFEPSWPARRVSVSPVHPKNPPQSGSSADETRWINPLNRAPIAATGARPASPYASERSPDTILSPPRCTTAQSSVLLMQLLSMMFLMLRTATLQLEH

SEQ ID NO: 327854 - protein, 433 aa, Zea mays
  Clone ID: MRT4577_6206C.1.pep
MESLVLASSCSPSPRLPLLSPSARFRRLPGSMPQAPASTSGATRKGLRRHMLFVAAATATPSGSRNVFKELRAKGFASMSSSTANENMSTETGTLPPMPPPSSYIGSPVFWIGVGVALSVAFTTVSSMLKKYAMEQAFKSMMTQAPPNSFGSNSPFPFGMPPQASPTAPSSFSYLEPRKGTSPQVSTVDVSATEVDAAGTSKEVDVTETPKPSKNFAFVDVSPEDLQQKDLQSSLEMVDVKHDSTESESKEDTEEKAPRNGATFKLNEDAARGPTESSQSGPMLSVETIEKMMEDPAVQKMVYPYLPEEMRNPDSFKWMLQNPMYRQQLQDMLKNMGGSPDQWDNRMLDHLKNFDLSSPEVRQQFAQVGMTPEEVVSKIMANPDVAVAFQNPKIQTAIMDCSQNPLNIVKYQNDKEVMDVFMKISQIFPQING

SEQ ID NO: 327855 - protein, 171 aa, Zea mays
  Clone ID: MRT4577_62070C.1.pep
VAWEKKKKKKKQKKKKKKKKKKKKAVIIQGTTLQADLWRNCNVSLVSADCIGTCRSLARRSRPGNPLAWPTWWILGSASSFGPARASSPVRLASTRCFGDNCPRPTGRLHPPLWPFCLGGELTLIPRRCPPCPLPLPPTCFATCLCVSPNARGVAFFLLCALPLFGSLTRC

SEQ ID NO: 327856 - protein, 90 aa, Zea mays
  unsure (1)..(90): unsure at all Xaa locations
  Clone ID: MRT4577_62071C.1.pep
SDDKRFYIITPTKTLQLKTGCDYIRATWIEALVTAXSVYTFNGDLSGDQNDASFSTEKLRHRLNAEGVGEAVIKDCEQIIHSEFSQYQTQ

SEQ ID NO: 327857 - protein, 94 aa, Zea mays
  Clone ID: MRT4577_62072C.1.pep
QKFFLCVVSRVLFFLLFGTLTIDNLNGTNKRKFTPMTCRSLSDLPTKLYLTIELNMIQDTLPAKLHGIYQLNLPEKTCIDADFNTLTVIKQSKR

SEQ ID NO: 327858 - protein, 153 aa, Zea mays
  Clone ID: MRT4577_62073C.1.pep
MALLLRLAAPSVPPRRSSGLRALPRVVLPEVVSKQSFLRLLVDSTASMPCPIKCSAARCAPSLTEHNDSRNNGIHASSVYGHDLMKSMSDLQEVVFSSFSKACLLSSCIIYGLPPSCIAEPCEQEYFLPNMPLLFAIAMVGATVGGKLITLIT

SEQ ID NO: 327859 - protein, 79 aa, Zea mays
  Clone ID: MRT4577_62074C.1.pep
KFNFPKLSVKRVTKIPQPSQRKGPVKVKWLRFGSGWKDHPPKRKGLRLGFGIRVKEPFSGWALAPHFFQKNLWLVNFKR

SEQ ID NO: 327860 - protein, 147 aa, Zea mays
  unsure (1)..(147): unsure at all Xaa locations
  Clone ID: MRT4577_62075C.1.pep
KVLRPAGYXPYLAGDLGPCQPHPNVNLGGAGXTPDSAGGLESPDRIYDGGLPYYLTEAEVRXSLKCFAPLREFHRAKDRDTADXRGYALCVYQDLTVSHIDCGALNGMKTGVKTLTGRRANQGADXARPEQDSMLLQAQLHAHMLKL

SEQ ID NO: 327861 - protein, 174 aa, Zea mays
  Clone ID: MRT4577_62076C.1.pep
MPAPAPKALPRLLAAISAAASSATDLRRLSLLLLSPSAPVPPIRCLNTLLMALARHGMLSDMESLAARMPVRNLHTYTTLINAYCHAGDLPAAKRHLSSLLRAGLAPDSHAYTSFVLGYCRTGLLAHACRLFLLMPQRGCARTPFTYAALLQGLCGAGMVPERWRFSLGSGLMA

SEQ ID NO: 327862 - protein, 232 aa, Zea mays
  unsure (1)..(232): unsure at all Xaa locations
  Clone ID: MRT4577_62077C.1.pep
MALVQTDPDAYVIKPAAAAPAIDTSDWPLLLKNYSDLLVRTSHYTPIPNGCAPLSRDLKSYISSGVINLDKPSNPSSHEVVSWIKRMLRVEKTGHSGTLDPKVTGCLIVCIDRATRLVKSQQGAGKEYVCVIRMHDKLPGGEAQFARALETLTGALFQRPPLISAVKRQLRIRTIHESKLYEFDNERXLGVFWVSCEAGTYIRTXCVHLGLLLGVGAHMQELRRVRSGAMDE

SEQ ID NO: 327863 - protein, 308 aa, Zea mays
  Clone ID: MRT4577_62078C.1.pep
MDGGGGGVGGGGVGAGVMVGGGVGPGGGVGGGGDVELVSKTLQFEHKLFYFDLKENPRGRYLKISEKTSATRSTIIVPVDGVAWFLDLFDYYIRTDERDAFSKELRLQTKVFYFDIGENKRGRFLKVSEASVNRNRSTIIVPAGSSGEEGWEAFRSVLLEINNEATRLYVLPNHPNQQHMEPPERLPGLSDDVGAGFIAGHGSQSASGPEVDVERLVDLPPQEEISGMGMSKVIRADQKRFFFDLGSNNRGHYLRISEVAGADRSSIILPLSGLKQFHEMVGHFVDIMKDRLEGMTGANVRTVEPSQR

SEQ ID NO: 327864 - protein, 758 aa, Zea mays
  unsure (1)..(758): unsure at all Xaa locations
  Clone ID: MRT4577_62079C.1.pep
MPVTCSIYRSSLHPSTPSACRVERQRKKKKTSMTQAHSKSCFQQFWDGVQVKRNSGSFTIELLPSLGATINQSNKLRKFIISPYDPCYRYWELFLIVLVIYSAWFCPFELAFLRDLPSKLLLAENIVNGFFAVDIVLTFFVAYVDTKTHLLVDDQKRIAVRYLSTWFIFDVCSTAPFQPISLLFTRKGNGLAFKILNMLRLWRLHRVSSLFARLEKDIRFNYFWTRCSKLISVTLFAVHCAGCFNYMIADRYPDPEKTWIGAVMPTFRSESLWARYVTALYWSITTLTTTGYGDLHAENPREMLFDICYMLFNLGLTAYLIGNMTNLVVHGTSRTRSFRDSIQSASEFASRNQLPDKIKQQMLSHFCLQFKTEGLSQQAMLNCLPKGIRSSIAYNLFFTIIRKAYLFHGVSNNFIAELVMEVQAEYFPPMEDIMLQNEAAADIYIIVSGVANLITTANGNEQVYEKVEEGDMFGEVGALCDIPQPFTCRTTTLSQLLRIRKIRLTEIMQEHKEDSKILMNNLFQKLKLHESLPELKQLDRRFMHKYELFHAPQEAWLLPQPYLQYTEHKLEDIRXETIPTFCGDYGSTKLAAETNQVRLTQQGNSHDHGDYMATDGMAGEEGERNEVHINCETKEVSIHIKSEDCDAASHWQTDHETVRLGSSHNTSDGITMSENQDSSNIKSSNKRVTIHTYPHNAAGSLVQNGKLINLPGSLDEIFEIGCQKFPGLRPTKLFSGDYAEIDDISVIRDGDHLFLLRM

SEQ ID NO: 327865 - protein, 41 aa, Zea mays
  Clone ID: MRT4577_6207C.1.pep
HRNSVVALTQLRQTSQLPTQTATIVAKYATNIQPFTYRQTD

SEQ ID NO: 327866 - protein, 86 aa, Zea mays
  Clone ID: MRT4577_62080C.1.pep
VSVGALSRRSESGHDREEEEKREQEQGAGGGLKPRSYRQVRSRIKEGSVIVILARHPPALVAGEVKNIAVRYISSMHLHRRDPVAL

SEQ ID NO: 327867 - protein, 276 aa, Zea mays
  unsure (1)..(276): unsure at all Xaa locations
  Clone ID: MRT4577_62081C.1.pep
ALRHLSTWFMFDVCSTAPLEPITLLFTHPGNGLAFKILNMRGLWRLHRVSSLFARXHRSSFLNISMTNDKWHHFDRLSSTSRLEKDIRFNYFWTRCSKLISVXFQKFRNKKKIQDLLLRKKLSKLAKRLCLLIGRNLLITKCXTLFAVHCAGCFNYMIADRYPDPGKTWIGAVMPTFRSESLWARYVTALYWSITTLTTTGYGDLHAENPREMLFDICYMLFNLGLTAYLIXNMTNLXVHGTSRTRXFVFFSTYWSPLILNSGTSASLQSFDTDFL

SEQ ID NO: 327868 - protein, 210 aa, Zea mays
  Clone ID: MRT4577_62082C.1.pep
MQFPCIATGLLTTLTTSGVVNHTILQANEPKIVSNEQYISDEEAGTVQLPNPAKQDILEADSAVEQPYVINNEQQIMEEQPGVENQQNVAVNQQHKPDEQAGIMQEQNIGNALEENVPEDPTVFADIFNFPLNNELMDLSNIEDNLEDSTGVQDEQTIMNNQQLIPDQQAGLVHQQNPENAIEKVVAEDDPAVLGDIFSFPLSNQLMDLD

SEQ ID NO: 327869 - protein, 59 aa, Zea mays
  unsure (1)..(59): unsure at all Xaa locations
  Clone ID: MRT4577_62083C.1.pep
GPRPKLSPGGSCRVGRLNPRGNPWGLLKGPKPPWFRLFWVWGPQGQFCWGLLKKKTXGK

SEQ ID NO: 327870 - protein, 64 aa, Zea mays
  Clone ID: MRT4577_62084C.1.pep
KNSVIDLIKCVGPIRVRTAIPPPIYRDELGSLKRISGLVISGNPRGLYLICEILIHFPISQAQL

SEQ ID NO: 327871 - protein, 125 aa, Zea mays
  Clone ID: MRT4577_62085C.1.pep
FTSTTAVAASLAVVRSSCVPAERAALLSFKASITSDPAGRLRSWRGHDCCQWRGVSCGNRSHAVVGLDLRNDYWQHDSFFSDHDSGNHWLRGQISPSITALRRLRRLDLSGNLLGGPGVTIPGFL

SEQ ID NO: 327872 - protein, 77 aa, Zea mays
  Clone ID: MRT4577_62086C.1.pep
MGGGNAQKSKMARERNLEKLKGGKGSQLEANKKAMNIQCKICMQTFICTTSEAKCKEHAEAKHPKSDLVQCFPHLKP

SEQ ID NO: 327873 - protein, 65 aa, Zea mays
  Clone ID: MRT4577_62087C.1.pep
QLRADLVRVAKPIPFSPGVFSLRTGAPAMAGVGSALRLLYLSVYNWVGFFGWAHVLHYAVLTLPL

SEQ ID NO: 327874 - protein, 77 aa, Zea mays
  Clone ID: MRT4577_62088C.1.pep
MGGGNAQKSKMARERNLEKLKGGKGSQLEANKKAMNIQCKICMQTFICTTSEAKCKEHAEAKHPKSELVQCFPHLKQ

SEQ ID NO: 327875 - protein, 51 aa, Zea mays
  Clone ID: MRT4577_62089C.1.pep
VYGPICALALPLFLKSVHTLLVLVIVVDHALNSLLYSRHLHLATLSAQNVE

SEQ ID NO: 327876 - protein, 46 aa, Zea mays
  Clone ID: MRT4577_6208C.1.pep
GSLFLLKPSTSPWFISLQGCKKRLGKELQKTGCQKQNVFVQIWHFL

SEQ ID NO: 327877 - protein, 100 aa, Zea mays
  Clone ID: MRT4577_62090C.1.pep
RIRLFPSSFDSLGIRSHYPWVPPVPRDLFFVKCYQMSCLALTARPMEYASHGDSFPGHEDGHLWMHPCQRREPLLSHSILPKVFWRAATCRGRESCSMPT

SEQ ID NO: 327878 - protein, 74 aa, Zea mays
  unsure (1)..(74): unsure at all Xaa locations
  Clone ID: MRT4577_62091C.1.pep
CDCGSSCACGSSCIGMSPTVETAAVSISMTMVLAAPTINASACGFHAAIEGGRCDCSSWXCGSICXXCTCCSCS

SEQ ID NO: 327879 - protein, 73 aa, Zea mays
  Clone ID: MRT4577_62092C.1.pep
MGRLDGGLGAATPPSFVRAAWQAVRWSVVVPALQLAVYICAAMSLMLFLERLYMAVRGHGALAAPAPAPARRR

SEQ ID NO: 327880 - protein, 169 aa, Zea mays
  Clone ID: MRT4577_62093C.1.pep
AGPGPQPPDHNRNPKMRNGDVSAAPNRDARRRRRRDLQGHDEEHVLHWSEERPTPEVGPPEGDHNGLHHLLSFQRGHVGLRDTARRHLLGIDRVAALSITENHKRKALEGLHLRPVHAQQSQESTSSGADTQGWERYYRTDPSRSSPATSRTRYRTLRVTKCAAENTNM

SEQ ID NO: 327881 - protein, 50 aa, Zea mays
  Clone ID: MRT4577_62094C.1.pep
QTRPVLSYKFNHQTIKKTPKVQLILASLFYIKHPTITPKHPRTTSIAKIY

SEQ ID NO: 327882 - protein, 69 aa, Zea mays
  Clone ID: MRT4577_62095C.1.pep
FLFQFRCGVGDDFAQQNPPLVGFFFLSKIKNGARSRKKNSPKLKKRVFCIVGAPGVLIIINGAAPLFFG

SEQ ID NO: 327883 - protein, 65 aa, Zea mays
  Clone ID: MRT4577_62096C.1.pep
LATNLVYFVLLLSQPDKQEAKKKMHLIQKHQLTNAHEISKNTNTKSGENSSHSCKFRNYLIVCIL

SEQ ID NO: 327884 - protein, 107 aa, Zea mays
  unsure (1)..(107): unsure at all Xaa locations
  Clone ID: MRT4577_62097C.1.pep
TRRKLGSRLELYSFSRSRHSLSTSRAPQQSEEGEAGHLAEAGGARAVERNSPRAGASPSKPRNPDEILRDXHGGHPAAVFSGSFGGGAALACVGPFCSATDTYQRMF

SEQ ID NO: 327885 - protein, 131 aa, Zea mays
  Clone ID: MRT4577_62098C.1.pep
MRLLTHNMLASNVRGATTGYPLTLEATNWCTKEVELNSDFIRGLLPKIDWRALVAATRAIGLPELLPEEQPPEEEIFAEGAADVEGSAIRRIHHALLEVHVQEGSLVCPDTSRCFPINKGIPNMMLHEDEV

SEQ ID NO: 327886 - protein, 98 aa, Zea mays
  unsure (1)..(98): unsure at all Xaa locations
  Clone ID: MRT4577_62099C.1.pep
QVSFLHLPPPLPTGLIHSTPKXPPXXXPVFHCIVCLVSVTXRSRRTKCHGXCKSSAIRGNVLIYGSSQKISGLHXMQCFMLPLFRQTSFFFLLPQHAH

SEQ ID NO: 327887 - protein, 119 aa, Zea mays
  Clone ID: MRT4577_6209C.1.pep
PILSLFITCLTQGPRGPPGKTGTRPQGHTTTHPEAQKKSRGSLKRELTREKALRSQTAHQKGNRTKKLKPGGAQSAAKAKKSGGPQGAVSQDQKDGHQLINQNRQPPKKGQQANPPAGA

SEQ ID NO: 327888 - protein, 197 aa, Zea mays
  unsure (1)..(197): unsure at all Xaa locations
  Clone ID: MRT4577_620C.1.pep
GREPRVRRARRGHRACTGRAGAPRARRSHAGTGAARGCRGRAGAGARPPRAPSGGRRRAARHSRAMAARAAAPAXPRGGAGGAGPAAPWEGAGAGEAGPSATXRARAGEAGGRGREGGAEFAAPREDAXAMAGRAEGRGQDGXAGPLGRGAGLPGRHGXRTRGRGRAPPTARGGRRRARGMGREGGKEGERGGRGSP

SEQ ID NO: 327889 - protein, 68 aa, Zea mays
  Clone ID: MRT4577_62100C.1.pep
GTPFAVQFGCDGISQLFGSARPFRSVKARTKVSHQVCISGGPGPVRIAREAMYLGSFKFFPNHGLLFV

SEQ ID NO: 327890 - protein, 81 aa, Zea mays
  Clone ID: MRT4577_62101C.1.pep
MSCCGGNCGCGSGCKCGNGCGGCKMYPDLGFSGETTTTETFVLGVAPAMKNQYEASGESNNAENDACKCGSDCKCDPCTCK

SEQ ID NO: 327891 - protein, 127 aa, Zea mays
  unsure (1)..(127): unsure at all Xaa locations
  Clone ID: MRT4577_62102C.1.pep
DPRGRPGDTPTREGGKHVLYDLSLCSMTTMAFLCSDSNADPCFRGRPGSRSRVDQGTGLLQPSSFARHTSXQSGQLALRWAARCAPSAARETRAGCARALRGHGSDEGAESGRHVHRRGIEDRRHSG

SEQ ID NO: 327892 - protein, 88 aa, Zea mays
  unsure (1)..(88): unsure at all Xaa locations
  Clone ID: MRT4577_62103C.1.pep
AVPRHKYQFGRFSVLCGGECHVFQWLVSILNLLFVLRSRIISAIMFFYVNKKFCVLLFLNVCMFFFYFLVFVANVKVKFNGFLFWXNI

SEQ ID NO: 327893 - protein, 161 aa, Zea mays
  unsure (1)..(161): unsure at all Xaa locations
  Clone ID: MRT4577_62104C.1.pep
SLPPTIPACDPHDGPASLQLIEDLTTHAGAIQQRVLGEILAMNAGTDYVRGFLGANDDDEXAEGRHADELAATFKERVPVVEYEDVKPYIERIANGAPSSLVSSKTITELLTSSGTSGGQPKLMPSTEEELDRKTFLYNLLVPVMNKXYVEGLDEGRCMHL

SEQ ID NO: 327894 - protein, 94 aa, Zea mays
  Clone ID: MRT4577_62105C.1.pep
LMRAKKGSKKRSVLPPMLCNAPWIFFPVPCKKRNQTFSSYSKVESILNRVNHVGNTPPNNTRSLHPTFSFLCIGMWELDGFLYQPKEARSSFIF

SEQ ID NO: 327895 - protein, 610 aa, Zea mays
  Clone ID: MRT4577_62106C.1.pep
RSSSRTAPGPPDAMSIRKALGAVKDHATIGIARVTGAVAPDLDVAIVRATSHDDAPPDERHAREVLRLASATGAAPACIASLARRLSRTRDYVVAAKCLSLLQRLASAEGDVEGGAGTRPFLHELLRPAVSGRRAGEPVLALLLDFRDDAHPGSWDHSAFVRAYATYLLDRVRFLVLLLPAPPRFSDGRVAPGPPQAPADDMDAEALLGRARHLRHLLDRLLACRPAGAAGASRVVRAALHPMLRDSFRVYEDVALLLALLLDRFFDMDYSDCVKAFETYVGTAKQIDALRAFYAWCEDAGIARSSDFPDVKRVDDKLLETMEQFLRERGRAGRAWASPPAPSRLAHQPDANAQGDDGHVDGMNSIKVLPAPSTRSIGAEPATPRPAEEASQSDLVDLRETAATADEEGNKLALALFSAPPATNGSWVTFPSGPDAAPEPAVTSAWHTPAAEPRNADWELALVETASNLSKQAASLGGGMDTLLLGGMYDHGAVRRQVAAPGSASSMALLPGHQVAPVLMLLGPDGSTARQVAGGDPFAASLAVPPPSYVQMAEMERKQQLLVQEQQMWAQYRHGGMQGQPAGFNNGLAGGSVFAPNAAMAVPYGGYGYY

SEQ ID NO: 327896 - protein, 67 aa, Zea mays
  Clone ID: MRT4577_62107C.1.pep
RPKMWPSAKSSQGDYPLFTGGLTSRNNLPWENEVPKLALKNIMFTLKCIYVCYSTRKYIDTHQTCPP

SEQ ID NO: 327897 - protein, 267 aa, Zea mays
  Clone ID: MRT4577_62108C.1.pep
MAAARMALVSCARRLPSLPSPLTLSRPRAGAVSFLAAQPSPATAPRSGRNLALFCSLSPTSPSLTEAAVALPPPKAAVEETKPPVPSGDEKGEPTVEELAGLLDVRVGRVVKAWRHPEADTLYVEEVDVGEAEPRTICSGLVNFLPIEELQDRNVIVLANLKPRNMRGIKSNGMLMAASDASHENVELLIPSEGSFPGERVWFGSEEEKNRQSDPASPNQVQKKKIWEAVQPHLRTTDNCIAVLGDKQMRTSAGLVFCKSLQGARVS

SEQ ID NO: 327898 - protein, 75 aa, Zea mays
  Clone ID: MRT4577_62109C.1.pep
HLLISLVPPYQGEHLGGAWSIIRVQCLSASVSLGRWLQPSWRPLLLWCPCFCCAWASLSPAPSRRATWTRSWTSL

SEQ ID NO: 327899 - protein, 35 aa, Zea mays
  Clone ID: MRT4577_6210C.1.pep
IWGCHTGHKTNWGNNDRHSSLQMEPATFLPIIHEI

SEQ ID NO: 327900 - protein, 91 aa, Zea mays
  Clone ID: MRT4577_62110C.1.pep
GRKTDSKTEQERTHHHRIHTTTPPSPPPPPLPTLKPKPYQIHARVSSDGSAPFPDAASGHAKHLSMGSDDHLSCSRQSTMSTSADHTLVDE

SEQ ID NO: 327901 - protein, 114 aa, Zea mays
  Clone ID: MRT4577_62111C.1.pep
TILKLSVHISLGGAPGLVNKDPRGGGFTTSDRSTTLLKEPRPNAMGRFNPSPKDNGPNLRISAGSYHPSTVRVGSLGRAKTGGNSGGSLVGRFLGHQNLHWGLPSRGHPKTKLF

SEQ ID NO: 327902 - protein, 237 aa, Zea mays
  unsure (1)..(237): unsure at all Xaa locations
  Clone ID: MRT4577_62112C.1.pep
MSHGALLRPSRGLHVQPTRCRPNLRLPPPHEPAASFLHSADVYAADPATLVAGHLPAVLASPKTSDERRYWYFFGSAKARSVRDKRRSRVVGDGKGQWHSEKGRKVVSDDQGRNIRGYKQEFTYKPTNADGSEEEVWLMVEFGVDQEDEDETGKSIPTLCKIYPSPRKPKSSTPIPSTSSTRMRNRKARDTPLPASSPXLRRRLLVSPAAPILRQRLGWRLLGRASSRSSCPASHPN

SEQ ID NO: 327903 - protein, 377 aa, Zea mays
  Clone ID: MRT4577_62113C.1.pep
MHISYALHSLDCNLADGEYVLIPEQGPVQEEDQEQASETAIEDLPAAPAIEGKPRYGGYKCGHCTAAAGVSGALYAKAVPFRKWLTMNSPTPASGGDSRFSSDFLSRDGFPSILWEVLNSAGYPTPPLYTVQLYEEHRVPRCRVWLTLEAHPLQPGWRSLDSETIGLRTDDTVEAAAMKTLTTFCGYHPLEMVMHPLGLFPAEKKDDPMWCNRVSHVKDVWVMYPDLVGRVTVQCMSVLYRLQALQSVAMALLANTAQTAKLTLDSREDFVVDLSTELVEKDLQVERLSQRITTLEQQVEIRDNTIDVLENQLHDVQRELEEANDHLDMHHLEMEANEAGSEGEEAPEELGPAPGVNGTTSAMPPSPVSSVASTTQG

SEQ ID NO: 327904 - protein, 89 aa, Zea mays
  unsure (1)..(89): unsure at all Xaa locations
  Clone ID: MRT4577_62114C.1.pep
FTYLLXPNLSHDKICGLLTRNKIGFIYTVASSHINYFPITRRRVPTITFGVEARTNYVERITTFLSSYPPFFCFDHWISSPFKSTLGPF

SEQ ID NO: 327905 - protein, 137 aa, Zea mays
  Clone ID: MRT4577_62115C.1.pep
MSSAGSGRGKGKAVSKTVSRSSKAGLQFPVGRIARYLKIGKYAQRVGAGAPVYLSAVLEYLAAEVLELAGNAARDNKKTRIVPRHIQLAVRNDEELSRLLGAVTIAAGGVLPNIHTTLLPKKVGKGKGDIGSASQEF

SEQ ID NO: 327906 - protein, 89 aa, Zea mays
  Clone ID: MRT4577_62116C.1.pep
ELDTELCTANWKTKGYSNGYSTAATGIPSALRWTRRSWRPWRHCGGHGTLGRRLRPSSCPSSCSARRCGSRWSRTWCRCYSRCCSTGRS

SEQ ID NO: 327907 - protein, 70 aa, Zea mays
  Clone ID: MRT4577_62117C.1.pep
HASAHSSAHASGCFELFFIICSTCWVNLKNWICVKKKKKKKKKKKTNKKKNKKYYNKKKIKHITFGAPLL

SEQ ID NO: 327908 - protein, 116 aa, Zea mays
  Clone ID: MRT4577_62118C.1.pep
LGCRYCRVADSTMRIYSSVAVVHNAVDRGASEFGVITLRDVLSVALVARAHGGRATLVESVIDAEYGSLENMAHSVIVLHVVFNLDETVVSQLIKEDPLRGVEEARVEKSQGIGWA

SEQ ID NO: 327909 - protein, 55 aa, Zea mays
  Clone ID: MRT4577_62119C.1.pep
LTLDHQCSAHALLTNLKMNLLLYKCLTTLERTMSGTSYLCPWTKLYTHPRLLPYW

SEQ ID NO: 327910 - protein, 32 aa, Zea mays
  Clone ID: MRT4577_6211C.1.pep
HQVLAHLSCATSKGPIIIRFWHIYLVQHLRGP

SEQ ID NO: 327911 - protein, 260 aa, Zea mays
  Clone ID: MRT4577_62120C.1.pep
LSSHSPCSQDNSNGSSDECFENYAAEEDLHQISRLNVPQQIYPEHPSHILTNSTSANILDFSSSCFGDESDWTAPSAGKKLLSPFLLSNMLDLSGDLELHLGCLRKVQYHLESLFDELLQAVEEACLADVLDEDSFKMSDIILKLKTSTRSSSLSLVSSTDSDRRKLSHVYWSHSTGDDLQLSHAEVQVDMVWQQNVPLSPNGSTFTPSPSNNSDNYHVSWVWFSPTSHGTGTYIPNMSYHTYRERMMLERETIRARKQR

SEQ ID NO: 327912 - protein, 274 aa, Zea mays
  unsure (1)..(274): unsure at all Xaa locations
  Clone ID: MRT4577_62121C.1.pep
MVSSHGFLLSLQALTMVSTIMTNTGVIATQGQAFCPXLLCXASAHASAFRMQGDPQGCGFPEYELVCIDSKAIIHINNGRYFVTSISYSNSTFWVVDANLDNSSCPIPASNQRPYVNGLPSEGRTLLDPDTVTWAAFVSCSEMLSDVSSPFLSCCSGIYQPVNCRSTKNSFAYVFTTTFFPMVGDIKPSCRYLPMIPFGSRHVKRPDNASYDDIVKFMKNGFAVNFPYRNGRSYHLVINTCLERCKWVTSTIKYSNFPPWGTKTLAWRFFGESN

SEQ ID NO: 327913 - protein, 64 aa, Zea mays
  Clone ID: MRT4577_62122C.1.pep
MRRPVKCFLFLSNASCSLVNLPSVQSDLCSCGVRFIVCLSPVGFSHTFHAIIHPFSAVCRDRCR

SEQ ID NO: 327914 - protein, 116 aa, Zea mays
  unsure (1)..(116): unsure at all Xaa locations
  Clone ID: MRT4577_62123C.1.pep
VKIWNVDDGXXVKKFEGDMXSVLRXLXXXDXGSKFVXCGXDGGGKXWXIKXNEXIVXYEKXDGKVWELVVXKKXEMXVXGGXNCNVXVWXNXXMEEXKEDLFKKEEEVLKXEELEN

SEQ ID NO: 327915 - protein, 201 aa, Zea mays
  unsure (1)..(201): unsure at all Xaa locations
  Clone ID: MRT4577_62124C.1.pep
MHAFLPRGSPSSSPPCTAWXTTPTPPAAAAAALANCSLRRPPSRVACRSSFPGITTSSSTNRPSSRNGKEGAASAGATATAAGGRLGRAAASPGNGARRRSPXKDXCRWAACCWGGARCGSTPRAPPAASGSPAAASRTAASARRPPRPSAQPSPAYLWTTYTWAAQVNKCFTSPAPALFRTQTLPWQAVSWHLRDVPCGP

SEQ ID NO: 327916 - protein, 259 aa, Zea mays
  unsure (1)..(259): unsure at all Xaa locations
  Clone ID: MRT4577_62125C.1.pep
GGCSRSRCRRTRRCWRRSRRGTATCTTPAASRPLTRRPSRRSSASSISRRSSSPTEAPSCRRRRRPRRRRSLLPARCRGSTSRPRPRRARXRLVAGRAAEAQASDHRGHGEEERELLHQEGLLRVAAALHRGARLREHRGRXTCSRTXRRGRGRGRGRRRRAQGHGHGERQRRRGGGEGGEAAKDVPAADTVHRARRQAVRVLPVVPGGRPVRAAGGGDPREGAPAGHARGRPAQAAVRQRCRSSRRWCGCRRRVGARR

SEQ ID NO: 327917 - protein, 213 aa, Zea mays
  unsure (1)..(213): unsure at all Xaa locations
  Clone ID: MRT4577_62126C.1.pep
GYPRVLPTFPTRTPPPPAPCWLPRCCRTPVTTSALRRRSHRHERRSPPPSPHPPRPSPPLIRWARAQAPAVICPPPRPSTRRAGTGAPCRGWSLPRATWPPPPXPGYKGEATPYDIYSRNHFSNLFGLHSLRSESSNLTSEKHPGNWQESSETLTKDFGPSVFHQQQSAFVSKLLDHSGAEDTGPYPPRQDLNQDPFGSTYDKYMTQLSSCST

SEQ ID NO: 327918 - protein, 52 aa, Zea mays
  Clone ID: MRT4577_62127C.1.pep
FSICLNNKITSDTKHQTCLNRTCLTADSMHRPAQDDQKNHEPTLNPGNGRYR

SEQ ID NO: 327919 - protein, 82 aa, Zea mays
  unsure (1)..(82): unsure at all Xaa locations
  Clone ID: MRT4577_62128C.1.pep
MSSLQLLQLTERVRNLLSSRRRTLAIVSGAVLAVGALPYAQSGRXNKHQXANSCCDANSHSINNGRITQNGIDGRSVSTRKN

SEQ ID NO: 327920 - protein, 60 aa, Zea mays
  Clone ID: MRT4577_62129C.1.pep
FRFQITIKQRNENTSPFTIESSNNLPLHILSKGHECPNGLRCCAHLLPIFSQELFEIRFF

SEQ ID NO: 327921 - protein, 96 aa, Zea mays
  Clone ID: MRT4577_6212C.1.pep
NFAFSLTPTRFFLFLASLRSSKFSSLIFLTLDVLAILPAAPALFFCAVGMTKSSSELTSFLTFEEAFILHCCLSASRFPSWPWKVREERCPSRRHR

SEQ ID NO: 327922 - protein, 77 aa, Zea mays
  Clone ID: MRT4577_62130C.1.pep
AAPLVSYGGPPTRPSVHTRLPLARPALADKPESPRLDLSSRHPPHPLREIPTLCDLVRDANVLVAPPPAPHKLWTLR

SEQ ID NO: 327923 - protein, 74 aa, Zea mays
  Clone ID: MRT4577_62131C.1.pep
QRVKKGGQGNENRGPKKKDNTSQAGGRKLGTQRRAAPIIIVYLFFYVCFFFFFIFFFFFFFFFFFIFFFFSLFY

SEQ ID NO: 327924 - protein, 58 aa, Zea mays
  Clone ID: MRT4577_62132C.1.pep
FTRGGQDPTSPITQNSSGKGYLRGSTKAMAAGDAEYLYSNIGLAYVPTSEWLEKHFIS

SEQ ID NO: 327925 - protein, 236 aa, Zea mays
  unsure (1)..(236): unsure at all Xaa locations
  Clone ID: MRT4577_62133C.1.pep
MNPLLILTFVAAALAAPFDDDDKIVGGYNCEENSVPYQVSLNSGYHFCGGSLINEQWVVSAGHCYKSRIQVRLGEHNIEVLEGNEQFINAAKIQFHQCGQGQTLNNDIMLIKLSSRAVINARVSTISLPTAPPATGTNLXISGWGNTASSGADYPDELQCLDAPVLSQAKCEASYPGKITSNMFCVGFLEGGKDSCQGDSGGPVVCNGQLQGVVSWGDGCAQKNRPGVYTKVYNYV

SEQ ID NO: 327926 - protein, 71 aa, Zea mays
  Clone ID: MRT4577_62134C.1.pep
SRRCMPALRPAYTTKSQVQGMHIKGHKLIPIKHHLICSSTGNSPTGQGCTTSMTKRYRPCLDKAHRRVTWW

SEQ ID NO: 327927 - protein, 62 aa, Zea mays
  Clone ID: MRT4577_62135C.1.pep
NLMDPPSSFFLSKSGPLPVGEQNKKGHFCFLNLIPPSLKKKLKVCVNEVNLYFVQWGVGNIL

SEQ ID NO: 327928 - protein, 76 aa, Zea mays
  Clone ID: MRT4577_62136C.1.pep
KMIVVATMVLHNFIREHRIEDLDFAQFDRDPDYVPPIPERYNKFATGFDGFTTMPNAPTMDMFRDALATQLALAWN

SEQ ID NO: 327929 - protein, 683 aa, Zea mays
  Clone ID: MRT4577_62137C.1.pep
ASDRPLARVSSVRLPATAPLRIPSPSLARPGIPRGPWRLKRHRRRRRLSSSAPRPPAAAASASGGGGGGAPGSAESYIGSLISLTSKSEIRYEGVLYDINTEESSIGLRNVRSFGTEGRKKDGVQIPASDKVYEYILFRGTDIKDLQVKSSPPQPPPPQAASLHNDPAIIQSHYSQPASTSSSLPSAGGAVLPDFSSQAVQYGLQRPTFQSNLPLYQPGNTPWGSSVAPPAGNAPWGSSVAPPAGNASTLSVPSMYWQGYYAPSSGLPHHLQPPPLLHPTPGLSVPQNLQYPGLNPSLQSGPQKLSELQPSLMPPITSQGPSSGILPATTAPASATLLAPESSKPLLPNMGSLFAPRATSLGATFPLPSQPTAVAETSATVSQNLTSFGSSKVPALPGSTLAYQTVSQSVSSTIAPSSSAQAEMPVPLLAPSGQLLQNTSSILSSSHSMQAPLQLASKEVKPVEPKAKVAEPLLPDPLLPDPPSRAMPEIKEPILPLPKQTPQKYNGSGSRNHHNFRGRGRGRGSAFSQSVTAFTEEFDFTAMNEKFNKDEVWGHLGKKSQSRDKDGEVGDDVFDEELEAEETDNPELAVKPVYVKDDFFDSLSSGTFGRGGPNGRGRPSERRRVDTETFGEFPRHRQPYRGGGRGYRGGGRSRGSYYGGRGYGNTGRGGPGNSYPHWGNGRD

SEQ ID NO: 327930 - protein, 46 aa, Zea mays
  Clone ID: MRT4577_62138C.1.pep
LASSAVETLQKDTALPFASGTTLPSMGYGFRGLTSGMRAFWKQLEV

SEQ ID NO: 327931 - protein, 180 aa, Zea mays
  unsure (1)..(180): unsure at all Xaa locations
  Clone ID: MRT4577_62139C.1.pep
MLRYQDLLSGDELLSHSFTYKELQNDVLXEAEGKWGTQRPVDVDIGANPSSXEGGEDESVDDTAXRRVDIXDTFRLQEQPPFDKKSFVSYIKKYIKNLTAVLEPEKLHEFTKGVEGXATKFXLLSKLKDLQFFVGEPMNDDASVRFTYYNDGATNPRFLYFSHGLNDIKCYARGEISYPC

SEQ ID NO: 327932 - protein, 22 aa, Zea mays
  Clone ID: MRT4577_6213C.1.pep
VKGNIMYEVYALSSLLKDPILL

SEQ ID NO: 327933 - protein, 84 aa, Zea mays
  Clone ID: MRT4577_62140C.1.pep
LHGCDHKWGREQDPGSPSSPSTWVFSIRHIQSTLAFFLPTLTAQRNVPHLPSPLCFKSSFDPLRCPTAGLSAASQPSSGCNNQT

SEQ ID NO: 327934 - protein, 85 aa, Zea mays
  Clone ID: MRT4577_62141C.1.pep
VAAGLEPAGEGGTTNNKILVVVVVVHWFNKVGVHLAPSEAVAALESVAAPAVASEGRKSFFLGIPFKLVHAKRRNLGAYTNTTRN

SEQ ID NO: 327935 - protein, 90 aa, Zea mays
  Clone ID: MRT4577_62142C.1.pep
VMCRVIVHPYSVFSLVFTIQRAFILNQYGGSASCYRILVATFPGTWMTSPGFRVFSAPPSPQRYPTGSGCCGSMVERSRVFRRQLVLVRA

SEQ ID NO: 327936 - protein, 208 aa, Zea mays
  Clone ID: MRT4577_62143C.1.pep
MGTPSSRQLLLVAAVCLVVVAVDTAAAAAAAAAAAMRGRRRVHLRVYMHDVIRGPGQTAIQLVWGVGPPHATMPGRSFGDTAAIDDLLTEGPDIGSAPVGRGQGTYMLSSQREAVLVVDVTLALTAGPYNGSTIVVAGRDRVQDETRELAVVGGTGDLRGASGYVLWRTAKVWSEVHMALEIDVHASVPLPLPDDDDNNDLVLGSRDE

SEQ ID NO: 327937 - protein, 205 aa, Zea mays
  Clone ID: MRT4577_62144C.1.pep
MGTPSSRQLLLVAAVCLVVAVDTTAAAAAAVMRGRRRVHLRVYMHDVIRGPGQTAIQLVWGVGPPHATMPGRSFGDTAAIDDLLTEGPDIGSAPVGRGQGTYMLSSQREAVLVVDVTLALTAGPYNGSTIVVAGRDRVQDETRELAVVGGTGDLRGASGYVLWRTAKVWSEVHMALEIDVHASVPLPLPDDDDDDNDLVLGSRDE

SEQ ID NO: 327938 - protein, 68 aa, Zea mays
  Clone ID: MRT4577_62145C.1.pep
STSTHFPNLGTDAWGLRGRSRGALASSWRKVLRRSEVPFLKIMKLGYFWLVTLLYQVLEAWSMRIWIG

SEQ ID NO: 327939 - protein, 129 aa, Zea mays
  Clone ID: MRT4577_62146C.1.pep
TDASTLSSLDKENLKASSGVPVQALEKHDVSVGSSLNKKDHTKASGASMQAEGARHIKYTFNRRKRKGMSINSTPQRVVPEESSDLCSPTNKQKLHPDHVELDHLIDSPQGDSLLAQVAEQIILLSEHM

SEQ ID NO: 327940 - protein, 40 aa, Zea mays
  Clone ID: MRT4577_62147C.1.pep
MKLHAWKLEHIFQDLASSYLHLLLGSDSINGCRIRPAICV

SEQ ID NO: 327941 - protein, 40 aa, Zea mays
  Clone ID: MRT4577_62148C.1.pep
HLALGAFLGGGGHWFVCMDYGCPFWIKCGPRSVPGPPSHS

SEQ ID NO: 327942 - protein, 305 aa, Zea mays
  unsure (1)..(305): unsure at all Xaa locations
  Clone ID: MRT4577_62149C.1.pep
MASGSDPPKQYGITKPLSLLGPVEADLQRTAELEKFLVEAGLYESPDESARREEVLGKLGQIVKDWVKQLTSQRGYTDQMVEEANAVLFTFGSYRLGVHGPGADIDTLCVGPSYVNREEDFFIVLHEILAQTEDVTELQPVPDAHVPVMKFKFHGISIDLLYASVSLLVVPAELDISQGSVLYDVDEATVRSLNGCRVADQIIRLVPNFENFRTALRCLKYWXXXRGAYSNVTGFLGGVNWALLVARVCQLYPNAVPSMLVSRXXRXXTQWQWPNPXMLCSIEEEELGFPVXDPRXXPRDRCHHM

SEQ ID NO: 327943 - protein, 117 aa, Zea mays
  unsure (1)..(117): unsure at all Xaa locations
  Clone ID: MRT4577_6214C.1.pep
FVRSHLKSQSDGGWGCIGLAIGVSFFYFPGARAGTSSCTRYGFISHASLSASSTRPSLLKLLVSVLAVFFLFCDAGGAAFACCGGFFLSSARMISSSWGGPPLLFKCXSXALCCWAP

SEQ ID NO: 327944 - protein, 70 aa, Zea mays
  Clone ID: MRT4577_62150C.1.pep
WTTANRAMQLQSQGLQRFRGESHFIGTRPISVRCRFTPREKLASSIIAGSGQAQAARGADTDNVLAVDGW

SEQ ID NO: 327945 - protein, 52 aa, Zea mays
  Clone ID: MRT4577_62151C.1.pep
IDCAQTIMREEGAGAFFKGIEPRVLWIGIGGSIFFAVLEKTKSVLAERNTRR

SEQ ID NO: 327946 - protein, 547 aa, Zea mays
  Clone ID: MRT4577_62152C.1.pep
MFVLHHAVLCNYLPYDSVSLLVVPADLDISQGSVLYDVDEATVRSLNGCRVADQIIRLVPNFENFRTALRCLKYWAKRRGVYSNVTGFLGGVNWALLVARVCQLYPNAVPSMLVSRFFRVFTQWQWPNPVMLCSIEEEELGFPVWDPRKNPRDRCHHMPIITPAYPCMNSSYNVSTSTLRVMLEQFQFGNRICQEIEMNKTSWPALFEPFQFFEAYKNYLQVDIIAEDDEDLRLWKGWVESRLRQLTLKIERDTYGMLQCHPYPHEYADPSRQCAHCAFFMGLSRKEGVKIQEGQQFDIRGTVDEFRHEINMYMFWKPGMELAVSHVRRKQVPAYVFPEGYKRPRPSRHVNHQSDKNDTEDGTATRSPDSQLKRKHDSVGTDDIRYAKRSSTSPVHPKNSPQSGSTGDETRCNNQIKRAPSDASGGSPASPQASERSPDTILSAPRCTTTGAVCSGDAISKHSSVPLVENCTTPTVAVCTTLKRVAEKVVSELVGSERLGSNNSAELLESMEKEDVLAENVRFGGNGVAQGGLPEELEPNNRIEAVS

SEQ ID NO: 327947 - protein, 321 aa, Zea mays
  Clone ID: MRT4577_62153C.1.pep
MASSSFTSLSVMVLLCLAAAAVASAQLSPTFYSRSCPRALATIKAAVTAAVAQEARMGASLLRLHFHDCFVQGCDGSVLLNDTATFTGEQTANPNVGSIRGFGVVDNIKAQVEAVCPGVVSCADILAVAARDSVVALGGPSWRVLLGRRDSTTASLTLANSDLPAPSLDLANLTAAFAKKRLSRTDLVALSGAHTIGLAQCKNFRAHIYNDTNVNAAFATLRRANCPAAAGNGDGNLAPLDTATPTAFDNAYYTNLLAQRGLLHSDQQLFNGGATDGLVRTYASTPRRFSGDFAAAMIRMGNISPLTGTQGQIRRACSRVN

SEQ ID NO: 327948 - protein, 280 aa, Zea mays
  Clone ID: MRT4577_62154C.1.pep
MGGGGNGESCDLLQVLFEGALAGGAAGVVVETALYPIDTIKTRLQAAQGGSKIQWKGMYDGLAGNIVGVLPASAIFVGVYEPAKRKLLELFPKNLSAIAHLTAGAIGGAASSLIRVPTEVVKQRMQMSQCKTAPDAVRLILAQEGIKGLYAGYGSFLLRDLPFDAIQFCIYEQLRIGYRLTAKRELHDTETAIIGAFAGAITGALTTPLDVMKTRLMIQGQTNQYRGFIDCAQTIMREEGAGAFFKGIEPRVLWIGIGGSIFFAVLEKTKSVLAERNTRR

SEQ ID NO: 327949 - protein, 560 aa, Zea mays
  unsure (1)..(560): unsure at all Xaa locations
  Clone ID: MRT4577_62155C.1.pep
FLILEQLSTSCNPEPDAHAPLRKFKFYGLSIDLPYARVSLLVVPAALDISQGSVLYDVDQATVRSLNGCSVADPIIRLVPYFENFRTALRCLKYWAKRRGVYSNVTGFLGGVNWALLVARVCQLYPNAVPSMLVSRFFRVFTQWQWPHPVMLCSIEEEELGFPVWDPRKNPRDRCHHMPIITPAYPCMNSSYNVSTSTLRVXMLEQFQFGNRICQEIEMNKTSWPALFEPFQFFEAYKNYLQVDIIAXDDEDLRLWKGWVESRLRQLTLKIERDTYGMLQCHPYPHEYADPSRQCAHCAFFMGLSRKEGVKIQEGQQFDIRGTVDEFRHEINMYMFWKPGMELAVSHVRRKQVPAYVFPEGYKRPRPSRHVNHQSDKNDTEDGTATRSPDSQLKRKHDSVGTDDIRYAKRSSTSPVHPKNSPQSGSTGDETRCNNQIKRAPSDASGGSPASPQASERSPDTILSAPRCTTTGAVCSGDAISKHSSVPLVENCTTPTVAVCTTLKRVAEKVVSELVGSERLGSNNSAELLESMEKEDVLAENVRFGGNGVAQGGLPEELEV

SEQ ID NO: 327950 - protein, 138 aa, Zea mays
  Clone ID: MRT4577_62156C.1.pep
SCQSERARLHALDYHRCRSHAGRWAMHLSIRLGDHRSTSYGMGVSVSRAVSSRKKGVLGPNACLMVMIASPLYEASAIRLVILGPPQSELYVCSGLSAQASHGHGSSSSMMLSICPSLLTSPGDGAVDVFRTRPVRPY

SEQ ID NO: 327951 - protein, 152 aa, Zea mays
  Clone ID: MRT4577_62157C.1.pep
DAWDLAPSDASGGSPASPQASERSPDTILSAPRCTTTGAVCSGDAISKHSSVPLVENCTTPTVAVCTTLKRVAEKVVSELVGSERLGSNNSAELLESMEKEDVLAENVRFGGNGVAQGGLPEELEPNNTIEAVSCSDAWLVASTTQDWGKMV

SEQ ID NO: 327952 - protein, 153 aa, Zea mays
  unsure (1)..(153): unsure at all Xaa locations
  Clone ID: MRT4577_62158C.1.pep
MGKDKTHIYIVAIGHVHSGKSTTTGHLIYQLGGIDKRVIERFENEAAEMNERAIKHACGLDKLKAERERGITIDIALEKXESTXKHYCTVIDAPXGPVHFIKKMSTGTSQTDCAARIIDSTTGGFEVEISKDGQTRXEHGLLDFSLGRYYMIC

SEQ ID NO: 327953 - protein, 36 aa, Zea mays
  Clone ID: MRT4577_62159C.1.pep
SEAQLKLEVSVIYPIPTPDDYNEIILSYGRDVSILN

SEQ ID NO: 327954 - protein, 102 aa, Zea mays
  Clone ID: MRT4577_6215C.1.pep
GGARAPTRIPYRARPLFFFFCGGRSQPQTILFHIPPCGGYQKTSPRVLQEHRPPLMGGRKKGGLRKAQTPLEFQISPLLPPHTWQPDSTPNTVVITPLAPAY

SEQ ID NO: 327955 - protein, 91 aa, Zea mays
  Clone ID: MRT4577_62160C.1.pep
MTKGTSSFGKRHNKTHTLCRRCGRRSLHIQKHTCSSCGYPAAKTRKFNWGEKAKRRKTTGTGRMRYLKTVSRKFSNGFRVGAPAGAKGPAA

SEQ ID NO: 327956 - protein, 56 aa, Zea mays
  Clone ID: MRT4577_62161C.1.pep
GISSCTQMFLKMRTVGKLFIIIGNEEIPIGYIFTSAFLEQFTALIFKLCLLAPFPF

SEQ ID NO: 327957 - protein, 94 aa, Zea mays
  unsure (1)..(94): unsure at all Xaa locations
  Clone ID: MRT4577_62162C.1.pep
RNMEVQNFSFSXQMLDLLYSRARPTNHDERIILIDICVQRGLSNKSIDPLEDPYQFRCMTLIPLSTIFHFVCDLCCAKFSALSAPRCAIRCMGC

SEQ ID NO: 327958 - protein, 100 aa, Zea mays
  Clone ID: MRT4577_62163C.1.pep
MVKNEKEQTILLGILLIRKKTVNIQSTYILHIISFSRVQPSLRFPFMRQLIIQKREQKYYGYTDSAGLSLATEEGSASRSPMLTGGPMLHRAVFFFLFFF

SEQ ID NO: 327959 - protein, 69 aa, Zea mays
  Clone ID: MRT4577_62164C.1.pep
MATHRLVMVRHGESSWNQENRFCGWFDAELSEKGAEEAKRGATAIKDAKIEFDICYTSVLKRAIRTLWT

SEQ ID NO: 327960 - protein, 93 aa, Zea mays
  unsure (1)..(93): unsure at all Xaa locations
  Clone ID: MRT4577_62165C.1.pep
EIFFLPKAPVGLGGIRLGTIPGGPMFYCQLGGYSRRGPSWGRFLKNRGEQKSFVVPPKFPPTSGNXPPPPPPPLPFGPLFPKPIPIGGFPCAI

SEQ ID NO: 327961 - protein, 385 aa, Zea mays
  Clone ID: MRT4577_62166C.1.pep
MSTPAAAYYAAAARKQYFCYQCNRTVLIAASAAAAGELSCPECHGDFLEEVTVPAPTFIPLPFPFPFAPTTIPAASTTPAPAPAAGSGGSPSLSSSSSSAATSPSQPNDISSILNSFLGLGEQPIRVGGSASRAAAGTATPENEPEPFDPVMFFQNYIHSLVEGGANIQVLLDDASVTLGSGPGLGRIGGASFGDYFVGPGLEQLIEQLAENDPNRYGTPPAAKSVLSSLPDVLVTHAMVAAAEGAECAVCKEDFSPGEVAKQMPCKHIYHTDCIVPWLELHNSCPICRFELPTDDPDYEGRKGTNPQPAVGVAAAASGSSTAAEGQMEERQENPRVVERRFNVSLPWPFSGLGGQTSQQDGNSGGSGSNSQGNAQDGDPPSNKN

SEQ ID NO: 327962 - protein, 130 aa, Zea mays
  Clone ID: MRT4577_62167C.1.pep
MHVYNKQGKEPFCRGGYRRLLFDCVNECLETRRTAYFRAGYAAWSKGAAALIRGVEAQVCSEITSWKSMGDWTEDELVDKDMSSGLGTWVDFLVEEFEAGVEVENHVLGSLLDEVVADMVVGRHGRSVNL

SEQ ID NO: 327963 - protein, 122 aa, Zea mays
  Clone ID: MRT4577_62168C.1.pep
MGSVGTGLLKGLRRVLEQQRKSVDLCRTSRAWSSTVSFSDIDEKDDMGDDGDLKDSRRELEPQSVDPKKGWGFRGVHRAIICGKVGQAPVQKILRNGRTITIFTIGTGGMFDQRVIGSADTP

SEQ ID NO: 327964 - protein, 138 aa, Zea mays
  Clone ID: MRT4577_62169C.1.pep
MAGTIIMDDSAASTSGLGDHNVSADSLSEWRSCEHVDNGIPSTSPPFWDTDSEDDDPGPRPSDLFGRYTWKIENFSKEKKREMKSEPFEAGGYKWYILVYPQGCDVSNHLSLFLCVANHEELLPGWGHFAQFTIAVGN

SEQ ID NO: 327965 - protein, 88 aa, Zea mays
  Clone ID: MRT4577_6216C.1.pep
AMAILAVSSPLKSLNPMPGEHSRCRLSSSLLQLPLPVHDGAASGAPLSRVRRRRSHVDNDRAYPGHSLEQGALQLGAAHWDCMHRRRA

SEQ ID NO: 327966 - protein, 80 aa, Zea mays
  Clone ID: MRT4577_62170C.1.pep
MGKYVELLDMGVRIAARFHSHCPQTARMYYHPPASSSAAPGAGDAGGMVPGEGGAVAMAMMKRQQRAAIDATEIILYTVV

SEQ ID NO: 327967 - protein, 203 aa, Zea mays
  unsure (1)..(203): unsure at all Xaa locations
  Clone ID: MRT4577_62171C.1.pep
PRVRKLFVSWGAGNEEVGELDSIDAMTMEQLAKSLADELWDQPATTTHHQEQQQVEXRMQGRQLTNTTGFPFLGDMSRRSYAEADEGFLPTTAAISAGGNDSLFSFTGGKSKQLSFASREPKHESNGGGTTAAGTPMESSKGGRRASSGVHEHIVAERMRRQKMNHQFAALASMIPDITKTDKVSLLGSTIEYVQHLRGRLKA

SEQ ID NO: 327968 - protein, 47 aa, Zea mays
  Clone ID: MRT4577_62172C.1.pep
AWIAATLANSPYSPVLWIMCVGCAMMSLIPALPVSTKGEYHATDDLC

SEQ ID NO: 327969 - protein, 141 aa, Zea mays
  unsure (1)..(141): unsure at all Xaa locations
  Clone ID: MRT4577_62173C.1.pep
MARLGAGAVLALLVAVAAVAAFLAVPASAKSGELSAMGXWRRRAAAARAXKCSGAVGECDVDEAEELGLSGGGLGSDDAVRRTLAQRKPTNRYISYAALRADQVPCNKRGRSYYSNCEAQKAANPYRRGCSAITRCARNMN

SEQ ID NO: 327970 - protein, 54 aa, Zea mays
  Clone ID: MRT4577_62174C.1.pep
TWLQHTRSNKLGKKCYFSCISQVAFRYKPQSSTGVTDFLEDRPPPENCVALGAV

SEQ ID NO: 327971 - protein, 46 aa, Zea mays
  Clone ID: MRT4577_62175C.1.pep
LFYREVLKTTPIFKSPGLGGSPPTFFFKEGGILQGSFQLLIQNLIC

SEQ ID NO: 327972 - protein, 101 aa, Zea mays
  Clone ID: MRT4577_62176C.1.pep
WPIWGGIQQPSGKVQPKTTRAKPTTSMSRCFSLHKLWINDMFLFKTYERASDVSDLCLCLTLMFFMDIYVGGAGFKKKKKRGGPVIFFSFFWFSSVFPCFL

SEQ ID NO: 327973 - protein, 74 aa, Zea mays
  Clone ID: MRT4577_62177C.1.pep
VNSLSYSMASQQHTGAKENKFGANSNGGKYNGVPKASRWQQRKVFTDGYLKSLFNCTTSRIKKQRRTESLSSPY

SEQ ID NO: 327974 - protein, 47 aa, Zea mays
  Clone ID: MRT4577_62178C.1.pep
SASCALNLLSSCCVSVFPLKSGALSKRSGISQHSDSRSPPVICSYVP

SEQ ID NO: 327975 - protein, 97 aa, Zea mays
  unsure (1)..(97): unsure at all Xaa locations
  Clone ID: MRT4577_62179C.1.pep
MDRDSSLSVSASDGSSEAGERGGCCSSPPPSTRSLVDTAGNLSRTVSDASTSLSDRCSSVDVDHSGPFQPVDCVAKLIGRSFPAVXASSRLDCSTLS

SEQ ID NO: 327976 - protein, 50 aa, Zea mays
  Clone ID: MRT4577_6217C.1.pep
KHRMQSFLCNHESNLLIHRLVIDVLVDSYSFACLSLCLYNYKMLDFSAGL

SEQ ID NO: 327977 - protein, 46 aa, Zea mays
  Clone ID: MRT4577_62180C.1.pep
GFPVHSSLALPIAPYSVKEILTYHTYNTLFSEGLISPRRFLLFLDT

SEQ ID NO: 327978 - protein, 94 aa, Zea mays
  Clone ID: MRT4577_62181C.1.pep
QNCWGKKGGAFTGEVNAGGRVNRGGPWVILGHSERRALLGETKESGGDKGAYALAQGLKGIAWGGETHEQREAGATMEGGAAQTKAIAEKIKDR

SEQ ID NO: 327979 - protein, 51 aa, Zea mays
  Clone ID: MRT4577_62182C.1.pep
QVTRCMVSERIDKNFQIKAARSGTRCYFRYKRWMGSTCSIRGRFTMHSRVS

SEQ ID NO: 327980 - protein, 59 aa, Zea mays
  unsure (1)..(59): unsure at all Xaa locations
  Clone ID: MRT4577_62183C.1.pep
RAFYVHXXLETFSMVIMPRLIPFHRLTKNWVLGTIFYCSWFIYXTCTVVFQIMXFLLLD

SEQ ID NO: 327981 - protein, 129 aa, Zea mays
  unsure (1)..(129): unsure at all Xaa locations
  Clone ID: MRT4577_62184C.1.pep
MDIMLLLLLALNLLLAATPHGCQRYCSTPGVPIPXVMPTALLHIHRRCAHDMLKIKVCDNVLRILKVMIAHFXHCCPLLQNLADLDDELRLWTDVKANDLEVHLSVPLILNLILNKCGKIWPQDLTCPN

SEQ ID NO: 327982 - protein, 767 aa, Zea mays
  Clone ID: MRT4577_62185C.1.pep
MAGGDGDRHRAPKRHKSSAPSKAALVDESAEFDYADDFDDDAHDADTEVKKRDFTKLELKVDHASRPLWACADGRIFLETFSPLYKQAYDFLIAIAEPVCRPESMHEYNLTPHSLYAAVSVGLETSTIISVLSKLSKTKLPREIIDFIHGSTANYGKVKLVLKKNRYFVESPFPEVLSTLLRDEVISRARISPEDSLGAPSFTVSKTSGQIASGHEDLLNGMEIAAATEDKETHSFEIDPSQVENVKQRCLPNALNYPMLEEYDFRNDTVNPDLDMELKPQARPRPYQEKSLSKMFGNGRARSGIIVLPCGAGKSLVGVSAACRIKKSCLCLATNAVSVDQWAFQFKLWSTIKDENISRFTSDNKEKFTGMAGVVVTTYNMVAFGGKRSEDSEKIIEEIRNREWGLLLMDEVHVVPAHMFRKVISITKSHCKLGLTATLVREDERITDLNFLIGPKLYEANWLDLVKGGFIANVQCAEVWCPMTKEFFAEYLKKENSKKKQVLYVMNPNKFRACEFLIRFHEQQRGDKIIVFADNLFALTTYAMKLRKPMIFGATSHAERTRILYQFKNSPEVNTIFLSKVGDNSIDIPEANVIIQISSHAGSRRQEAQRLGRILRAKGKHQDRMAGGKEEYNAFFYSLVSTDTQEMYYSTKRQQFLIDQGYSFKVITSLPPAEEGPNLSYYTLDEQLELLSMALNAGDDMIGVERLEEDSDGKALIRARRSAGSMSAFSGAGGMVYMEYSTGKGKGVQKKHKDPSKRHHLFKKRYA

SEQ ID NO: 327983 - protein, 82 aa, Zea mays
  unsure (1)..(82): unsure at all Xaa locations
  Clone ID: MRT4577_62186C.1.pep
FLQQNGQGSHTYIFKSXXLDVLNARAKCPNKKTKRAPPFFFALPGVLPCLPIILFFWPCGGFFPKEWSFLKRGERPFTSYFF

SEQ ID NO: 327984 - protein, 110 aa, Zea mays
  Clone ID: MRT4577_62187C.1.pep
SVMVVTRLLCSLTILCLFRSIVRFVRAFHHLLGVIMQFRSGISCFLRRIRHQRRRTPHLLASQCTAGLQSRPGLPDRASSVSTLFSRSESLPLDQVHYSSPAPHACADAR

SEQ ID NO: 327985 - protein, 156 aa, Zea mays
  unsure (1)..(156): unsure at all Xaa locations
  Clone ID: MRT4577_62188C.1.pep
RPLSRFPWAPLRXETKMFKLSKGRFFPFGQKGIPPLNPFEGGAHPYPGPLLKGHGPLKIVLGAPKIMGFPKFYVPHKVMVTGGGNPQGVGVLQNRGKPQGRLFCLGPFAKARFFPFVGPENLKKNSNLGGPKRWGLLFIKKSRVYLRANRWFLVLI

SEQ ID NO: 327986 - protein, 67 aa, Zea mays
  Clone ID: MRT4577_62189C.1.pep
INKTQSGGLSCKLQWPSRRAREPRPGPPAPSASSLRNLVNAKPPRSPQQGAAAPDLAWPGPLTCQGL

SEQ ID NO: 327987 - protein, 139 aa, Zea mays
  unsure (1)..(139): unsure at all Xaa locations
  Clone ID: MRT4577_6218C.1.pep
CFFFCRAPLLGDFCSFPSPWGPFDLSFWGPISPFSGSFSISLAAFLHRRAWKTLGVPHFIPFAALPLFPSWLITKKAPPVPLSQHFPTLIGNWPPPXSGALTPGGVVVPPSVPVSLASAFAPVLFVFFPSFFAPFAGFP

SEQ ID NO: 327988 - protein, 110 aa, Zea mays
  Clone ID: MRT4577_62190C.1.pep
LYVNLRALLLPEAAGNNQLPPFDQALLSPTSPHGLLDADAMWFQAPSLAVAEPSSACVSGAHQHQQHLRCQQHHFLGTCRPWRRHRANMHCPRLSSCPRGPRRRTELHTT

SEQ ID NO: 327989 - protein, 98 aa, Zea mays
  Clone ID: MRT4577_62191C.1.pep
SCLALLSSFVAFCVCLGRLSSHSKLSSPGPRGPMWHRPWPSAFRSRSGVVPPARCLPHLPPPPRKRRSPPGRRCFCLTYHGGSCPTLGARGGSVIVTW

SEQ ID NO: 327990 - protein, 108 aa, Zea mays
  Clone ID: MRT4577_62192C.1.pep
EIPQSARPPTHGDLTSPVDGGSGPDPVLSRAIAASSEGPDPAPDRLVAGGLAAPTDLPCSKLQPCVDKFSKVLYSDVQRITSLHPLSYPTRPFSTCCLHPCDSSSAIW

SEQ ID NO: 327991 - protein, 70 aa, Zea mays
  Clone ID: MRT4577_62193C.1.pep
KVGVQMSPQPLEVGQRRDTHSHINGGSVDARYLEDAFLQEPGLGLYLVEKTFGINVLECILGLEGAFSFC

SEQ ID NO: 327992 - protein, 91 aa, Zea mays
  Clone ID: MRT4577_62194C.1.pep
VYTQLLLPLIDDDDGEQHRHAWLTSYGSYDAASVSASAVVELIAVAGVMDWYSNLRTGTYRASSLILALQACSLIISLLASQAVLVLIFMT

SEQ ID NO: 327993 - protein, 68 aa, Zea mays
  unsure (1)..(68): unsure at all Xaa locations
  Clone ID: MRT4577_62195C.1.pep
PPPVFPPKSPFNFKRYLMGEILSVGPHFNKIKPGKKFFFSNINPYKVALYTDXKXSFSPESNFLPVVE

SEQ ID NO: 327994 - protein, 144 aa, Zea mays
  unsure (1)..(144): unsure at all Xaa locations
  Clone ID: MRT4577_62196C.1.pep
MNFYIMYLQGPMSSIIRSRGEYHIFNTYFFSKLEAIATKVPQQQNDYDCGLFVLYXYMQRFIQEAPERFRKKDYSMFGKRWFRPEEPSQLRDQIRHLIHSCRETELTKDNSVVWGRANPRLVMMTDPSDASEPKTPKHLSDRTG

SEQ ID NO: 327995 - protein, 89 aa, Zea mays
  Clone ID: MRT4577_62197C.1.pep
YSSKHISTAARTQLQAVVGAGGTAVVEVLVVAMQVIPEPHRGSPWPRCASSPRAPQPRQQPLHRRSWPAAAAPSVDEPPAQAAAPGVRA

SEQ ID NO: 327996 - protein, 39 aa, Zea mays
  Clone ID: MRT4577_62198C.1.pep
WQALVTRALTFNIHYHTVQSYVQSSPRHLSLYYVIVRRF

SEQ ID NO: 327997 - protein, 207 aa, Zea mays
  unsure (1)..(207): unsure at all Xaa locations
  Clone ID: MRT4577_62199C.1.pep
MNTYMSLSLERSSSVVRDVATPAPPATSGASAPYPRAGAGASLSLPGAAAAHGHSQYLPLNEDDSLDMVLFDVLREASGPGSASAAAPDTXTAALVAAYAQGARXGAARRGSRTAYAPKAATAGHHYRGVRRRPWGKYAAEIRDPARHGARLWLGTFATAEEAAAAYDRAAVRMRGAKALLNFPPGVAGCGSAATATAKQAGLTEAK

SEQ ID NO: 327998 - protein, 89 aa, Zea mays
  Clone ID: MRT4577_6219C.1.pep
PTTPNPVHSAAAQDVGCSSDLLYSTTRCLQGMLPMNQRKRSYIYIISTHKFTRAQAKKAYCCTFLGSGRTHQHRYRIVPFQDCHCNKMP

SEQ ID NO: 327999 - protein, 111 aa, Zea mays
  Clone ID: MRT4577_621C.1.pep
CQGSSNSLIDIWKLLGPIWQHRYSLKPATISSVDLVHPIFRSLYSKIDPLGPLLYEPLLLLVQQPWIVGRESFCLLCAPPPLSFFPSPLPSLGMRRISLLHRRHDPIRSIC

SEQ ID NO: 328000 - protein, 84 aa, Zea mays
  unsure (1)..(84): unsure at all Xaa locations
  Clone ID: MRT4577_62200C.1.pep
XXFFFFFFFFWGFLKNLACFQQVPRKKIFQFIYKKTAVQCTLFSQYDIALHAYDSGSLQIYAFQMLKRSPLFNIFFYPHKEIIL

SEQ ID NO: 328001 - protein, 193 aa, Zea mays
  unsure (1)..(193): unsure at all Xaa locations
  Clone ID: MRT4577_62201C.1.pep
MFLWDWFYGVLASLGLWQKEAKILFLGLDNAGKTTLLHMLKDERLVQHQPTQHPTSEELSIGKIKFKAFDLGGHQIARRVWKDYYAKVDAVVYLVDAYDKERFAEXKKELDALLSDDSLANVPFLILGNKIDIPYAASEEELRYHLGLSNFTTGKGKVNLGDSNVRPLEVFMCSVVRKMGYGDGFKWVSQYIK

SEQ ID NO: 328002 - protein, 60 aa, Zea mays
  Clone ID: MRT4577_62202C.1.pep
QCWLGRLLNGGRGDFLICRGPSRISFLQQKENYRGPQGTFLSLKKTTGVFCPLHTGKDFF

SEQ ID NO: 328003 - protein, 193 aa, Zea mays
  Clone ID: MRT4577_62203C.1.pep
MFLWDWFYGVLASLGLWQKEAKILFLGLDNAGKTTLLHMLKDERLVQHQPTQHPTSEELSIGKIKFKAFDLGGHQIARRVWKDYYAKVDAVVYLVDAYDKERFAESKKELDALLSDDSLANVPFLILGNKIDIPYAASEEELRYHLGLSNFTTGKGKVNLGDSNVRPLEVFMCSVVRKMGYGDGFKWVSQYIK

SEQ ID NO: 328004 - protein, 116 aa, Zea mays
  Clone ID: MRT4577_62204C.1.pep
MRVLLVDLDLLAIDGSATYTHTTGRCGCQPPSTVYLPTPVHLPPAVHLTPAAHLPPTVHLTPTVHLPPPCHVPSTAHVAAATCNYTTKPARAQAHAQSHPCPCQQANSSPCQLQGT

SEQ ID NO: 328005 - protein, 193 aa, Zea mays; identical to SEQ ID NO: 328003
  Clone ID: MRT4577_62205C.1.pep

SEQ ID NO: 328006 - protein, 193 aa, Zea mays; identical to SEQ ID NO: 328003
  Clone ID: MRT4577_62206C.1.pep

SEQ ID NO: 328007 - protein, 38 aa, Zea mays
  Clone ID: MRT4577_62207C.1.pep
ALFKFTLDMVIYNLPLIPYYPYLAHLCLFYLFLLLVFY

SEQ ID NO: 328008 - protein, 212 aa, Zea mays
  unsure (1)..(212): unsure at all Xaa locations
  Clone ID: MRT4577_62208C.1.pep
MTIRYNQKLVNNHFRKDWQRRVRTHFDQPGKKSRRRTARQAKAAALAPRPVDKLRPVVRCPTIKYNRRVRSGRGFTLAELKEAGIPKAFAPTIGIAVDFRRQNLSEESLAANVARLKAYQERLILLPRRSNAPKKGDTKTDVSKVEKAAQIAAAFPIAATDLXQGDLQERHALQHRGXGAYRTLRVARANARYEGARQKRVRDAAEAESAKK

SEQ ID NO: 328009 - protein, 298 aa, Zea mays
  Clone ID: MRT4577_62209C.1.pep
MSTNSRSNSRANFNNEIHDIGTAQNSSMPPTYYDRSLADIFPPHLLKKVVSEVVSTFLLVFVTCGAAGIYGSDKDRISQLGQSVAGGLIVTVMIYAVGHISGAHMNPAVTLAFAVFRHFPWIQVPFYWAAQFTGSICASFVLKAVLHPIAVLGTTTPTGPHWHSLVIEIIVTFNMMFVTLAVATDTRAVGELAGLAVGSAVCITSIFAGAVSGGSMNPARTLGPALASNLYTGLWIYFLGPVLGTLSGAWTYTYIRFEEAPSHKDMSSQKLSSFKLRRLQSQSVGVGADDDELDHIQV

SEQ ID NO: 328010 - protein, 103 aa, Zea mays
  Clone ID: MRT4577_6220C.1.pep
GGVFFFFFLMAKNHCLKSNPKLGRVASQRTKLTAQWGGGSFFFLPTQQRLLHFIPPRDNALLQIPNWACYKPNFFIGRLSSLLSGAANPLFFIEFTSFGAPCF

SEQ ID NO: 328011 - protein, 211 aa, Zea mays
  Clone ID: MRT4577_62210C.1.pep
MSTNSRANSRANFNNEIHDIGTAVHNSSSLPPAYYDRSLADMFPPHLLKKVVSEVVSTFLLVFVTCGAAGIYGSDKDRISQLGQSVAGGLIVTVMIYAVGHISGAHMNPAVTLAFAVFRHFPWIQVPFYWAAQFTGAICASFVLKAVLHPIAVLGTTTPAGPHWHSLIIEVIVTFNMMFVTLAVATDTRAVGELAGLAVGSAVCITSIFAG

SEQ ID NO: 328012 - protein, 73 aa, Zea mays
  Clone ID: MRT4577_62211C.1.pep
AFKKKRPCPFSMQLFSPKIFCALLPQLCFPLPFQKKKKGPPFPKKIKLIPPGITFPGKALPATCPVKKNLFVS

SEQ ID NO: 328013 - protein, 428 aa, Zea mays
  unsure (1)..(428): unsure at all Xaa locations
  Clone ID: MRT4577_62212C.1.pep
MGISSKWIKSLVGIRKQEKAQNAEKQEKGWNAESSETKSSANQSLHKRKHSLDXELHLQSKKLQXSEALTDNKSAQMVSNSFFSDSTPLDVHISQAEHHSNEDLAATVVQSAFRAFLARRALRALKGIVLLQALIRGHSVRRQTAETLQCMQALVKAKARVRARQVRVALENQVARKKIPEQDDHENHVREVEGGWCGSIGSMEEMQAKALKRREAAAKRERAMAYALTHQRQAGSKQQNSLSLQGLELGENHWESNWLDRWMAVRPWENRLLDCNAKESLPTHEDKDEEANSQITPKGKVSTSNTPGLSKKKGVNHKKSYSDVSCTSFARPANVLPSTSLGSSKQKAKAVGEVFEEVSSQPTDIGSKDVHNSKDKLVQVNGPAKKRLSLPNNVGRESGKGPTRRNSLNRSAPKARADSPNQGDELEA

SEQ ID NO: 328014 - protein, 61 aa, Zea mays
  Clone ID: MRT4577_62213C.1.pep
LLSNGHKTAPVHTETPNSNLNPKGRAEPSHRPRSPANRTDHAESLEISWKHSGIQMPGWMR

SEQ ID NO: 328015 - protein, 59 aa, Zea mays
  Clone ID: MRT4577_62214C.1.pep
ASAVLPPFLPDHIGPAEPPMHMAPSHGLRTSQYQYLLSHLPLASQGQRLTDLLTQSSSL

SEQ ID NO: 328016 - protein, 263 aa, Zea mays
  Clone ID: MRT4577_62215C.1.pep
MMGSGMGAYGGALRPVESAAGETMLLWGLGQPESHRNNALVRQAAHAFELDACGRRLSLLQSPSSMATPGVTGAVVWDSGVVLAKFLEHSVDSQRLLLRGARAVDLGSGCGLVGCVAALLGAHVVLTDLADRLKLLRKNVALNVDDPHVPGSARVTELVWGDNPHHELLEEPLPDFVLGSDVIYNEEAVDDLLITLNQLSGKHTTILLAGELRNDAVLECFLEAAMEDFLIACIEQDQWHPEFRSNRVALFILVKKPEKPSAE

SEQ ID NO: 328017 - protein, 68 aa, Zea mays
  Clone ID: MRT4577_62216C.1.pep
CRGLNLLIASDRKYKSVTLVRTSQISKADSGVKKNCNWRNQFFFSVALQHAVKSPRRFSRQHHILLSF

SEQ ID NO: 328018 - protein, 38 aa, Zea mays
  Clone ID: MRT4577_62217C.1.pep
FLRCDRAFPASCGNKPFHALRVWWLCPVLARWQVLTVL

SEQ ID NO: 328019 - protein, 143 aa, Zea mays
  Clone ID: MRT4577_62218C.1.pep
MHSQNHWGGAFDIDGAEDDQSRNMDIDRGALQHQHQLDETQQSWLLGPPEAKKKDRYVDLGCVVVKRKLLWWMLWVVLGAFVLIGLPIIIAKNIPKKKPHAPPPDKYTDALHKALLFFNAQKSGKLPKNNGIPWRGNSGMKDG

SEQ ID NO: 328020 - protein, 72 aa, Zea mays
  Clone ID: MRT4577_62219C.1.pep
VISLKHRSLPSLLQHPHLPRHPQPLPPESHSQVESSPFLKHSICSRYASSASSSCAYQICAVPPQIRVRASS

SEQ ID NO: 328021 - protein, 43 aa, Zea mays
  Clone ID: MRT4577_6221C.1.pep
ATRPITLQDEGRGLYYLRRGHNRLNLFHTLTPTYYGLQTPASS

SEQ ID NO: 328022 - protein, 101 aa, Zea mays
  Clone ID: MRT4577_62220C.1.pep
STGAKPDPPHDAPHKKKHSPFRPDLNNAKLLTRKKKTLSPCPGGRQPFVPPRTTSLAMAKLPIPKNPNVTLGGGRFFLYGGVGHRVLGQFNWGPLGHLKVV

SEQ ID NO: 328023 - protein, 244 aa, Zea mays
  unsure (1)..(244): unsure at all Xaa locations
  Clone ID: MRT4577_62221C.1.pep
HASAHASAHASGEMCGVFRETFVKSAKDGLLKDTAVAVSSEPRTSAASKNDSAKAPVKTRAVNSDGDSMRKHASMSYDKANSTQLPSAGSSLGAEKKKKTPVLSEEVPVDRIALLASDGFQSKGNQNSGASSSSQNDNVIQKLSSDVGQLNVNKNNVNVTKSCLPDEYKPEKWMLADLESRALSQLNLAIVGHVDSGKSTLSGRLLHLLGRXISKKYMHKNEKESKEKGKGSFAFAWAMDESSE

SEQ ID NO: 328024 - protein, 36 aa, Zea mays
  Clone ID: MRT4577_62222C.1.pep
ASSPTTEVSVVGAAGGNLLFRVAHLLESRLLLRKRI

SEQ ID NO: 328025 - protein, 196 aa, Zea mays
  Clone ID: MRT4577_62223C.1.pep
MVATAKIPQRQLFIDGDWRAPARAALKRNRGRDWSRAPGAVRAKYLRAIAAKMIERKSDLARLEALDCGKPLDEAAWDMDDVAGCFEFFAGHAEALDKRQNAAVALPENFKCHLKKEPIGVVALITPWNYPLLMAVWKVAPALAAGCTAVLKPSELASVTCLELGDVCKEIGLPSGVLNIVTGIGNEAGAPLSSHP

SEQ ID NO: 328026 - protein, 45 aa, Zea mays
  Clone ID: MRT4577_62224C.1.pep
VEPDHQTQVEQAVDQVFHGERVKDPKVVGQDNSVEHQHGVHRDEP

SEQ ID NO: 328027 - protein, 182 aa, Zea mays
  unsure (1)..(182): unsure at all Xaa locations
  Clone ID: MRT4577_62225C.1.pep
ASKKTPAGLRPGMNPAAIAKVRMGLAQQRAAGMYPXMVGMPGSSSSILPSSAGLSMMGQPLNRGNLGPLQRAMMSSMGPPKMPGGNFQLNAQQQIHLQHQLQHLQQNPQQQLQQLQQQQQIQQLQQQQQQQLQQQQLQQQQQMGSPLQQAQVGSPAGSQQSPMMHQQQISPHQMGQQAAMSP

SEQ ID NO: 328028 - protein, 63 aa, Zea mays
  Clone ID: MRT4577_62226C.1.pep
GSKPGKRYPDLEGTGPAGQATEVLALSPNRKASPDFFKAAMDFLRASNPCGCGGSCKGGPHSC

SEQ ID NO: 328029 - protein, 102 aa, Zea mays
  Clone ID: MRT4577_62227C.1.pep
DPHESLRVVLVDRQSRPARHRAALRVAGQSVLCRPEELSGRNCTARSVSIRSNGQSGVGACEVAQDRGAFSFGCRPMDSSCKSSISLSCSAVQFSPVQSRRI

SEQ ID NO: 328030 - protein, 44 aa, Zea mays
  Clone ID: MRT4577_62228C.1.pep
QEPVFIIKVIFDVNKMPQLQIKLRTLQSQCKQSNGTPVIKIVIH

SEQ ID NO: 328031 - protein, 57 aa, Zea mays
  Clone ID: MRT4577_62229C.1.pep
RRESVEEPPRAVAAEDSYSARLILWNKTQGRGRGRKGEIRMARDLTNLRTVTKHTGD

SEQ ID NO: 328032 - protein, 369 aa, Zea mays
  Clone ID: MRT4577_6222C.1.pep
MKERQRWRPEEDAVLRAYVRQYGPREWHLVSQRMNVALDRDAKSCLERWKNYLRPGIKKGSLTEEEQRLVIRLQAKHGNKWKKIAAEVPGRTAKRLGKWWEVFKEKQQRELRDSRRPPPEPSPDERGRYEWLLENFAEKLVGERPQQAAAAPSPLLMAAPVLPPWLSSNAGPAVAAAAVAHPPPRPPSPSVTLSLASAAVAPGPPAPAPWMPERAAADAAPYGFPSPPQHGGAAPPGMTVVDGQALAELAECCRELEEGRRAWATHRREAAWRLKRVEQQLEMEREMRRREVWEEFEAKMRTMRLEQAAAAERVERDHREKVAELRRDAQVKEEKMAEQWAAKHARVAKFVEQMGACSRSWSSATDMNC

SEQ ID NO: 328033 - protein, 113 aa, Zea mays
  Clone ID: MRT4577_62230C.1.pep
VYFSMVDGDFMKFEGKWSIRSGPSRSSSAVLLYEVNVIPRFNFPAIFLERIIRSDLPVNLRALACRAEKIYLENQGCGSRKFSVEDLKPSYTSQLNNYHSTTVETSKFKQAPP

SEQ ID NO: 328034 - protein, 98 aa, Zea mays
  unsure (1)..(98): unsure at all Xaa locations
  Clone ID: MRT4577_62231C.1.pep
EALLRVIKQVLGDKVDKVVVSVRVVDSPSCLVKAQSGXRPTVERVSKAQALGDSALXGNMSSNLPMKITAIVTIMEQMRKRASPVKIDKSVKHSCTVI

SEQ ID NO: 328035 - protein, 79 aa, Zea mays
  Clone ID: MRT4577_62232C.1.pep
LVYERQTRMHLFVHKNAFIEILTSQGKYSHTFVRIVYQLTASPSNEVTWGQAIWANINSCDTMACNVLLVSRLDEIYLT

SEQ ID NO: 328036 - protein, 62 aa, Zea mays
  Clone ID: MRT4577_62233C.1.pep
AQLDETDKEVLSETPNTKARAVSELVCCGVLLDADQQVLVTAYKYDSINAAVSALCGVLSSL

SEQ ID NO: 328037 - protein, 151 aa, Zea mays
  unsure (1)..(151): unsure at all Xaa locations
  Clone ID: MRT4577_62234C.1.pep
GTSSRRETFQKSHSQADSPPTCEQSHASVKRRNGRLARTQAAGALVVVAALLLLAAWATTSXAAITWGXVRSAIAPCLSYARGTVTSPSASCXNGVRNLKSADSTAVDRRAACICLKNAARGGSGLNAGNDASIPSKGVVSIPYTISTSTD

SEQ ID NO: 328038 - protein, 87 aa, Zea mays
  Clone ID: MRT4577_62235C.1.pep
HPWLWRRNPTLFQLKSEKKCIPKGLLPRQSPGLSWLLIKRARGFWVWHPPNKTKTGGTIWPLNFQSFHVPPLSRINYQKVGLERFNS

SEQ ID NO: 328039 - protein, 125 aa, Zea mays
  unsure (1)..(125): unsure at all Xaa locations
  Clone ID: MRT4577_62236C.1.pep
SYTGREGSCAVRTGKRLDNHVSNLCAPVQLDDQEPKLCLRRPYGLLWIRLPQRITAWKIGPLGIDGLPRENTQDLETDLSYQSXAGSPLQGALQGYLVGLFEDNKLCAIHAKRVTIMPKVMQLAR

SEQ ID NO: 328040 - protein, 89 aa, Zea mays
  unsure (1)..(89): unsure at all Xaa locations
  Clone ID: MRT4577_62237C.1.pep
AGLTKLDEYLPTRSYITAYQARKDDLHVHTXFTGAPSSKYINAAXRCLNHIVALVRLTVPTADGPGVEXTPPHAPSGPTPDAAAAQAPS

SEQ ID NO: 328041 - protein, 85 aa, Zea mays
  Clone ID: MRT4577_62238C.1.pep
SPFSFFFFFFFFFLFFFFFFLFRFLLPRGPSQGKTAQRGPEKGGRAPPVSSNLGRPREHLSGARGCQWAPTLPTGAPSGGDPPIG

SEQ ID NO: 328042 - protein, 240 aa, Zea mays
  unsure (1)..(240): unsure at all Xaa locations
  Clone ID: MRT4577_62239C.1.pep
GEWDPRGRPGSSLTSSSASTIQSTPAPLHQIVTIKLTKKNFLLWRAQLLPYLRSNKLMRFLDGSQPIPPAMVPASTSAGAELIVNPTYETWYDQDQQLLGGLLSSMTEEVLADVQSATTAKEAWDSLLRIYASSTRARTVQIRVELANIKKRDLTAATYFAKVKALAAEMAAAGAPXLGDEDIISXLLAGLATDYDAFVTSTXTRSDRFPLDXYSIFMVFEARLHATRRCRCISILNYAR

SEQ ID NO: 328043 - protein, 91 aa, Zea mays
  Clone ID: MRT4577_6223C.1.pep
VDYISRANVAVQNGITCQEIGLHFLFQPRLICYAKCSHSNLQVLYPVMLLCAINYLVEHVSLMPLPSLIPNFLCLSCYVVFLINIVVLWFF

SEQ ID NO: 328044 - protein, 121 aa, Zea mays
  unsure (1)..(121): unsure at all Xaa locations
  Clone ID: MRT4577_62240C.1.pep
CTITLLXLMAVAAAGSIERLCSLASMATLIRQSLXPSRCSVCEDAMRIGYMIQQVLVAXLLDMCXLLVRQSSSILHTMXIRRLDXRHIPSQRLPLLVLTLLDAYCDAQLTPEVHLVARSIP

SEQ ID NO: 328045 - protein, 53 aa, Zea mays
  Clone ID: MRT4577_62241C.1.pep
YYVLTTLWCGTVSEGPCVGKENSNLCVLPPDDKNINGPRPRREGHWRLKAGPR

SEQ ID NO: 328046 - protein, 102 aa, Zea mays
  Clone ID: MRT4577_62242C.1.pep
RIHRPGGAPTVPAGTDPATGVVSKDIRDGPASARVYLPPGAAGKIPVVVYFHGGGFVVGSPARSGTHNYLNDLVARSGAIGVSVYYRLAPEHKLPAAFDDAW

SEQ ID NO: 328047 - protein, 118 aa, Zea mays
  Clone ID: MRT4577_62243C.1.pep
FKGRFLNKGWNITSKTVLCSICNQDRRLCQLGRDDDSTIHALTYSIPKTPPARAKVAAGANTSGPRTQFRLADSDGCNGPRKRPRPLTPSAGRDPVPHSPRKLRRPRHLGRPSPLAKA

SEQ ID NO: 328048 - protein, 161 aa, Zea mays
  unsure (1)..(161): unsure at all Xaa locations
  Clone ID: MRT4577_62244C.1.pep
KTKELILKYIGQLFERILSPVAESPVYCGSLASMLHIAFTIAGKKFKVNPEQFILKVGEGQTXQCITAFAAMDISAPRWPSWVLGNVFMGVSXTVFEYVKLRVGLPRVVLGGCMAAGRTTGPRCNLCVYAPAYVCIYAPTCLVGIPRLETTPVCFTVGQEK

SEQ ID NO: 328049 - protein, 103 aa, Zea mays
  unsure (1)..(103): unsure at all Xaa locations
  Clone ID: MRT4577_62245C.1.pep
SSAWGFCXCLXXCXSLRLLXCXXVFXCLFXXXSXXLXLCLAFLXXPXXXXXAXXSSSXXXXXGXXXXXFLAGXXSLXXXVXXPXAVPXXVPPXXXCXAXXGXX

SEQ ID NO: 328050 - protein, 158 aa, Zea mays
  Clone ID: MRT4577_62246C.1.pep
IKALLNTQFAAASGTATKSNIVDWAEKLYGQSIGAVKNLLSDSRQLALTRTVEALMEGKPNPEVDDYLLFDPRAPRSGTSGQFKGPFREAVVFMIGGGNYIEYKSLIELKQRSQPSKHVIYGATEILSGAEFIHQLAELGQKAGLGGGSSNIPPGSAQ

SEQ ID NO: 328051 - protein, 88 aa, Zea mays
  unsure (1)..(88): unsure at all Xaa locations
  Clone ID: MRT4577_62247C.1.pep
AALVVPRXVAXLLLGXLAPLPRXGSPPVCLXSAGCAALXPLXRSWPRWLXGCXGPAVWVVRGACLFLCSFRFPPRVLVLWPSLLLFVS

SEQ ID NO: 328052 - protein, 89 aa, Zea mays
  Clone ID: MRT4577_62248C.1.pep
FDPRAPRSGTSGQFKGPFREAVVFMIGGGNYIEYKSLIELKQRSQPSKHVIYGATEILSGAEFIHQLAELGQKAGLGGGSSNIPPGSAQ

SEQ ID NO: 328053 - protein, 621 aa, Zea mays
  Clone ID: MRT4577_62249C.1.pep
MTLSLRRKQLDVIVRMLHLNQQQLPNGGEGQGEDDAYKILVMDPPCISILSPVLKLGDLRHQGVTLTLAIDRPRQAVPDAPAVYFVRPTPGNVDRVAADAAAGLYGSFHVNFSTSVPRPLLERLATACAAAPPACAGRVARVADQYIDFVCIEDDLFSLAQPRAYVALNDPAAADADITALVDAVALGLFCVVATLGVVPVISCARGGPAEMVAGALDARLRDHLLAKPNLFTEAASAAVTSFQRPVLCLFDRNFELSVGVQHDWSYRPLVHDVLGLKQNKLKLPAEKYELDDSDKFWVANSWSPFPKVAEEIEAQLAKYKQDVDEVNQHTGGGKVGVEFDGTDLIGNTKHLMNAVNSLPELTERKNMIDKHTNIATSLLGHIKERSLDGYCSCENDMLVSGTVDRNTLLSLIRGKGTKEDKLRLAVTYLLSFATPPSSELEQVEAALRESEVDMSAFQYVKRIKALLNTQFAAASGTATKSNIVDWAEKLYGQSIGAVKNLLSDSRQLALTRTVEALMEGKPNPEVDDYLLFDPRAPRSGTSGQFKGPFREAVVFMIGGGNYIEYKSLIELKQRSQPSKHVIYGATEILSGAEFIHQLAELGQKAGLGGGSSNIPPGSAQ

SEQ ID NO: 328054 - protein, 368 aa, Zea mays
  Clone ID: MRT4577_6224C.1.pep
RPRVRGRVGRGLLPNGKEIAVKQLKLGSGQGEREFQAEVEIISRVHHKHLVSLVGYCISGGKRLLVYEFVPNNTLEFHLHGNDRPTMEWPTRLKIALGAAKGLAYLHEDCHPKIIHRDIKASNILLDFKFEAMVADFGLAKFTTDNNTHVSTRVMGTFGYLAPEYAASGKLTEKSDVFSFGVMLLELITGRRPIDTTQTYMDDSLVDWARPLLMRALEDGEYDALVDPRLGKDFNPNEMARMIACAAACVRHSARRRPRMSQVVRALEGDVSLEDLNEGVRPGHSRFFGSYSSSDYDSGQYNEDMQKFRKAAFNNNTYTSSQYSAPTSEYGQVPSGSSSEGRQTQEMESGAVKKGGYSGYSSGYSGAS

SEQ ID NO: 328055 - protein, 164 aa, Zea mays
  Clone ID: MRT4577_62250C.1.pep
MAPSYDKTIATAASLAASLMLVRSLASELLPSEVRDALSAALNSLRSRMTWQHTIVIEETEGWSGNRVYGAVKAYLATRINANIDMQRLRVSSTEEDAKKMVVSMGAGEEMVDLYEGVEFRWFLVTREVKGDLNNGGGGAREDTSYEVRFHKRHKDNALKEYLP

SEQ ID NO: 328056 - protein, 116 aa, Zea mays
  unsure (1)..(116): unsure at all Xaa locations
  Clone ID: MRT4577_62251C.1.pep
GVRGGFWAVSGGVPVLARLLLLHPLWVVLCSQPLVGCRGARLLLSPGVVLSAVVLFNFGPACPFCPRVLSGLLLVLLVAFFGFVVLSVVSRGCCFXVLDSPPLGGWVXXGEYLIGG

SEQ ID NO: 328057 - protein, 75 aa, Zea mays
  Clone ID: MRT4577_62252C.1.pep
ARDQVQAGRDVPAEAAARAAGDASRRLPEGQMQARQARQELLANEPAKWRVLFNLLNLCSSNELVIDDCAFFFKF

SEQ ID NO: 328058 - protein, 137 aa, Zea mays
  Clone ID: MRT4577_62253C.1.pep
MASGAGAAAAVAVFAIMVLSSLGHPRTGPLCSDCGSLCTANCTGEVATSCRSYCENPLAARQSCERQVLQACTVSFCCYGNCTRDCNLEAHNACQSVHDTTIDCQSCTGGIFQSCFPACNSNCNSTCVNKEHGCLRT

SEQ ID NO: 328059 - protein, 46 aa, Zea mays
  Clone ID: MRT4577_62254C.1.pep
TDGGLRLRGGAGHGSLRGGRKHSLGSFRIEINGARCSSPPPAVRVG

SEQ ID NO: 328060 - protein, 97 aa, Zea mays
  Clone ID: MRT4577_62255C.1.pep
HRTIVCQAASSISADRFPDMDKRKLMNLLLLGAISLPTVGMVVPYGAFFVPAVSGNSCGGTYAKDKLDNDITVDACLNTHGPNDRTLPQVLKGDPTY

SEQ ID NO: 328061 - protein, 115 aa, Zea mays
  Clone ID: MRT4577_62256C.1.pep
MSYDRHNVIKDGSGVELLENNIAAIEQGEDGISLSDEDNMVELYTSDQLRATLDDHAAANQKVVEQEGDIVERVVTTDGISIEDYEKEVEQSTGDESRSTKGVNFAEDNENVDPE

SEQ ID NO: 328062 - protein, 96 aa, Zea mays
  Clone ID: MRT4577_62257C.1.pep
IGYLEAGRGISCDVNSFRSLRVLRKGRSTHPQVDRPRNAPPPASHHRGLGVVSDIPRRRTYFPPGVGDHVDRSGHVPSTYPHHVVQCPDPTTTRRP

SEQ ID NO: 328063 - protein, 93 aa, Zea mays
  Clone ID: MRT4577_62258C.1.pep
DSTFNFDGPEWNDQHLLQRGFEGQQLSRHPDSWRWFVSMLRSLLHGSIFSSTPETSSVQHNTQESICYIVFKGLIGYIDRRESYASFRSRPGR

SEQ ID NO: 328064 - protein, 108 aa, Zea mays
  unsure (1)..(108): unsure at all Xaa locations
  Clone ID: MRT4577_62259C.1.pep
DEAKVQRLEYDHCLCDERCSDYXTDRSAPVMWMKWNADMGNGLHHLQVQIDMHGMSXSKWMGVMVHSTCAMNPVENDSIVAEMLRRYYDSVELFDVTNELTELVRRPG

SEQ ID NO: 328065 - protein, 82 aa, Zea mays
  Clone ID: MRT4577_6225C.1.pep
TCIGHGFRANAFNLNASRSNLATAIVFIISTRLPGHTFVYCPKFPTAATLFFLSQKKIGVGLFSSPMWLIPLSNQLKVVGLI

SEQ ID NO: 328066 - protein, 108 aa, Zea mays
  Clone ID: MRT4577_62260C.1.pep
EIVPVVAVRGVPLFWGGLFFGMVFVGTPLFGFKEGCFFFVWGGLPLGPKGRAPLGLFFCPPWSVFFSLVPFASVVRAVFFGGFLCLQVLPGLDVDRWLPVTPTENILN

SEQ ID NO: 328067 - protein, 90 aa, Zea mays
  Clone ID: MRT4577_62261C.1.pep
RYAFQPLAVYLFNTKASKLMNNEARQAKIVKFSESIWKLTYYASVQAWVLMIIKQEPWSLDMMQYFDGWPNQPIVGTSCDLLLKMGYTNF

SEQ ID NO: 328068 - protein, 75 aa, Zea mays
  Clone ID: MRT4577_62262C.1.pep
WGWGSGCQCGTGFGGSKMSPHMETPPPVGIKPMVLVAPTPKASAGGFKAPVKGGGCDCNPCKCGSSCGCSFCSCN

SEQ ID NO: 328069 - protein, 76 aa, Zea mays
  Clone ID: MRT4577_62263C.1.pep
FFFFKSGLLWRGGILVGYTQHRFDSQNLQYVQRHSDTRTNGPAYLAAHIVYDTRRLCSTNPTVFTDAGFTTQSCEY

SEQ ID NO: 328070 - protein, 65 aa, Zea mays
  Clone ID: MRT4577_62264C.1.pep
LLFLLKVDEITVRPNYFRTCLTHGLFYVLLLNCSIPFAAPRLLHGNVCFLCSALLSAVLCCNGRS

SEQ ID NO: 328071 - protein, 63 aa, Zea mays
  unsure (1)..(63): unsure at all Xaa locations
  Clone ID: MRT4577_62265C.1.pep
FLNSVTISCEHCNVYLMLSYRYVSFLVDSICIELIEIWIRQRXCQDTXCIPYSSLFKASPLSF

SEQ ID NO: 328072 - protein, 76 aa, Zea mays
  Clone ID: MRT4577_62266C.1.pep
GASSRYKRVSLLKSYDDFQVLVKRVTDLVNAENYVDDVPQRIELHVMIIDPQVMNSILKCGTPHEHFEHELERWPS

SEQ ID NO: 328073 - protein, 95 aa, Zea mays
  Clone ID: MRT4577_62267C.1.pep
RRPPSFFLVFLENTSFFSCRDEPMFRYRSFPFMVQTGTSSRSHACEHLHFRIPEQFWVEIATTNFPGTLEVAYDYALHMSGSSKMTERFWSGPFA

SEQ ID NO: 328074 - protein, 215 aa, Zea mays
  Clone ID: MRT4577_62268C.1.pep
MGRFEQVTPEGPETNQHDEQRSIRLHAFSDLSHVPAATFIYLLKDCYGYGTNKATSKFKILMQLVKVALHNGPQPGPFTYVVQCMYIVPLLGKTYSEGFSHMLTSSLKHLKSVESAQKDFLEAKHLAAQLVLDILDSIVPHENRILVKLLETFEIELRDMARALYDSELDDGDLMKAREHLRQQVKRCMESESNALAVTLITHFSIQCCDESFII

SEQ ID NO: 328075 - protein, 106 aa, Zea mays
  unsure (1)..(106): unsure at all Xaa locations
  Clone ID: MRT4577_62269C.1.pep
PNSFCTDGHTXGGAHGRGGESNPTTHLKSQIPQHHSSNTPHRLRQEHNHPTTRSTSPDTSTLQKILRRKARPLNKTIFSINYSCLLPHPHHKXLEGKNHRLWNANX

SEQ ID NO: 328076 - protein, 51 aa, Zea mays
  Clone ID: MRT4577_6226C.1.pep
TELLPTNAILFKAIITLATGYWTTFEGPQGADSFTTRVGSRHTSPCGEANS

SEQ ID NO: 328077 - protein, 102 aa, Zea mays
  Clone ID: MRT4577_62270C.1.pep
ASPPRVDRRCARSSMTMHFYSPPTRGSSRFNWPGLGRGRPSLRLRGIGISSWSPAGIFTSSDSPPCRLPCLPFHVPVRVRGTARRSRRRRCCDAPTRLATRP

SEQ ID NO: 328078 - protein, 103 aa, Zea mays
  Clone ID: MRT4577_62271C.1.pep
QEEVRRDDETPYWGFFFIGVGLGIMVIKGMVGTRAVDSSREDIDNERITRCCRCRRRHAGSRSGIYSRRGRRGTAGACTCGSTAMAVGGIGGRGGPLGHQSPL

SEQ ID NO: 328079 - protein, 106 aa, Zea mays
  unsure (1)..(106): unsure at all Xaa locations
  Clone ID: MRT4577_62272C.1.pep
MDSNDTGSXAKGKKGADGRKDCNPRKKSESEAVKAILQLHVCRIVRYLKKGRYTQHVSTCANVYLAAVLEYLAAEVLELAGNAARDIKMTRIITSHELMAIRNDEE

SEQ ID NO: 328080 - protein, 238 aa, Zea mays
  unsure (1)..(238): unsure at all Xaa locations
  Clone ID: MRT4577_62273C.1.pep
GTSRPAGILVPSPHSLVKSQRTHPPSFISYIRIYPRRPWATPSQDLKSGFQKFKTDVYDKKPELFEPFKAVQVPEYMVFACSDSRVCPSETLGLPPGEAFTXRNIAAMVPAYDXTKYTGIGSAIXEYTVCALTVEVLVVIGHMCCGVIRALLSLHDGAPDYFHFXDXWGKIRFPAEVEVKKEYASVPFYDQCSILEKEAENVSLENLETYPFIQEGLDKGTLKLVRAHYDFWSRNFLV

SEQ ID NO: 328081 - protein, 343 aa, Zea mays
  Clone ID: MRT4577_62274C.1.pep
TRPVKFVVITVFVGLTFASIALSTRLQPGLEQQIVLPRNSYLQDYFDDLAKYMKVGPPLYFVVKDFNYSSASVDTNQICSISQCNSNSLLNEISRQSLSPETSYIAKPAASWLDDFLIWMSPEAFGCCRKFVNGSYCPPDDQPPCCQLDQVSGSCMTSKTCSNCTTCFLHSDLDNGRPSTTQFRDKLPWFLDALPSSDCSKGGKGAYSTSLDLSGYESGIIQASAFRTYHTPLNKQSDYVNSMRAARDFSSKMSRDLQMKIFPYSVFYIFFEQYLSVWKTAIMNICVCLGTIFVVCFIVTSSLWASAIILTVLAMIVLDMMGVMAILGIQLNATSVVNLVMSI

SEQ ID NO: 328082 - protein, 76 aa, Zea mays
  unsure (1)..(76): unsure at all Xaa locations
  Clone ID: MRT4577_62275C.1.pep
LTPKNRGRPSRAVHQLIMGGGNSRVTSGCPSSKNSKHPYRREPGMTFMSTGSSRAPXXRTRTPTEPPPNSITFFRG

SEQ ID NO: 328083 - protein, 130 aa, Zea mays
  unsure (1)..(130): unsure at all Xaa locations
  Clone ID: MRT4577_62276C.1.pep
YERLPQSELPIRRKHRDSQGNRXATTATPSSCNATPRVHEVPPEVPQGSTCTGPGPPSSSQCSCPRGYTTELRYKHNVRSISICKDDQAQVVAIHTTRPVRLQASHTYRRSLTHHTLSGSTREIGDRAQA

SEQ ID NO: 328084 - protein, 45 aa, Zea mays
  Clone ID: MRT4577_62277C.1.pep
PTGPVQVFPSNPKIIGSRGGGKILVPGKLILSHFEDNLVAHLPLL

SEQ ID NO: 328085 - protein, 178 aa, Zea mays
  Clone ID: MRT4577_62278C.1.pep
SLAGIPFNACDNDEFKQMCEAIGQFGPGLTPPTQDAFRGSLLEQEYERTKCVLQEREAEKMKNGCSIMTDAWADRKRRSIMNICTNCADGTSFISSKEMSDVSHTSEVIFELVDKAIEDIGEENVVQVVTDNASNNMGAKKLLLEKRPQIFWTSCAAHTINLMLQGIGKLPRFRKVID

SEQ ID NO: 328086 - protein, 849 aa, Zea mays
  unsure (1)..(849): unsure at all Xaa locations
  Clone ID: MRT4577_62279C.1.pep
MTSSAAAAAAAAQVAGGGGGGEGDAAAAARGGGGTEDGMYTELWNLCAGPLVTVPRVGDKVYYFPQGHIEQVEASTNQVAEQHMQFYDLPWKILCEVMNVELKAEPDNDEVYAQLTLLPESKQPEENGSSEEMPASPPAALARPRVHSFCKTLTASDTSTHGGFSVLRRHADECLPPLDMTRQPPTQELVAKDLHGVEWRFRHIFRGQPRRHLLQSGWSVFVSAKRLVAGDAFIFLRGDSGELRVGVRRAMRQQANVPSSVISSHSMHLGVLATAWHAVNTGTMFTVYYKPRTSPAEFVVPCDRYMESLKRNYPIGMRFKMRFEGEEAPEQRFTGTIVGNVDPDQAGWAESKWRYLKVRWDEASSIPRPERVSPWQIEPAVSPPPINPLPVHRPKRPRSNAVASLPESSAPTKEAAPKVTLETQQHALQRPLQTQDNVAPKSVFGDNSELDSAHKSSLRPSGFDLDKSTIGMQRKLGSDIWMRMNRPDGYSEMLSGYXNHLMKVHGIRXFCSLPDQIAAGRPNFXHCKRSLXDQQGNHNLFPGSWSMMPSSTGFGMNRQSYPMIQEVGGMSQSCTNTKFGNGVYAALPGRGIDRYPSGWFGHTTPGGRVDDAQPRVIKPQPLVLAHGEALKMKGNSCKLFGIHLDSPAKSEPLKSPPSVATPAAEKWMADGIDADKSPEPHKTPKQLGATQVDPVPERCPQASRGTQCKSQGGSTRSCKKVHKQGMALGRSVDLTKFNGYTELVAELDEMFDFNGELKGCSKEWMVVYTDYEGDMMLVGDDPWNEFCSMVHKIFVYTREEVQRMNPGALNSRPEDSGLANSTERGSASTAAAREAPGYQSASSLNSDNC

SEQ ID NO: 328087 - protein, 311 aa, Zea mays
  Clone ID: MRT4577_6227C.1.pep
CISGGKRLLVYEFVPNNTLEFHLHAKDRPTMEWPTRLKIALGAAKGLAYLHEDCHPKIIHRDIKASNILLDFKFEAKVADFGLAKFTTDNNTHVSTRVMGTFGYLAPEYASSGKLTEKSDVFSYGVMLLELITGRRPVDTTQTYMDDSLVDWARPLLMRALEDGEYDALVDPRLGKDFNPNEMARMIACAAACVRHSARRRPRMSQVVRALEGDVSLEDLNEGVRPGHSRFFGSYSSSDYDSGQYNEDMKKFRKMAFNNNYTSSQYSAPTSEYGQIPSASSSEGHQTQEMESGAMKKGGYSGYSSGYSGAS

SEQ ID NO: 328088 - protein, 89 aa, Zea mays
  unsure (1)..(89): unsure at all Xaa locations
  Clone ID: MRT4577_62280C.1.pep
GWLLVLLSRSVRRRLWTGGKINKFTVKCQQINSLSAELGTGGGYGHWELWAEVKGRREEGAGXRRRTWRLWSGGGYEHWGTGSCGRRQR

SEQ ID NO: 328089 - protein, 261 aa, Zea mays
  unsure (1)..(261): unsure at all Xaa locations
  Clone ID: MRT4577_62281C.1.pep
AAAAAAAQVAGGGGGGEGDAAAAARGGGGTEDGMYTELWNLCAGPLVTVPRVGDKVYYFPQGHIEQVEASTNQVAEQHMQFYDLPWKILCEVMNVELKAEPDNDEVYAQLTLLPESKPEENGSSEEMPASPPAALARPRVHSFCKTLTASDTSTHGGFSVLRRHADECLPPLVACWILDLILPVHQLXFAICCFTGSGNLCFGFLXDMTRQPPTQELVAKDLHGVEWRFRHIFRGQPRRHLLQSGWSVFVSAKRLVAGDAF

SEQ ID NO: 328090 - protein, 116 aa, Zea mays
  Clone ID: MRT4577_62282C.1.pep
YIYKNFFFFFFFFFFFLGQICTALNGTSFAKHTLGRGDQLKLATSEGETKTAGRANQLKTPALDTTTGRYGLIQCILKRGKKGIKLRYKENYGYICLGLYYLGRPASCQGINSCRS

SEQ ID NO: 328091 - protein, 79 aa, Zea mays
  Clone ID: MRT4577_62283C.1.pep
LYYKTFALTRFNRCFQIFEKLVSGMYLGEIVRRVLLKIASQSSILGDVSHTNLKTRFSLRTPDISAMHHDGTPDLRVVA

SEQ ID NO: 328092 - protein, 87 aa, Zea mays
  Clone ID: MRT4577_62284C.1.pep
RTVGLDLADIVDSSMYVPTNEADAPVSGLCSSNRPAEDYSSSAEGANSCSEAVVPSPPPPPGVTTTTTTNMVMERTRRTKLNERLYA

SEQ ID NO: 328093 - protein, 74 aa, Zea mays
  Clone ID: MRT4577_62285C.1.pep
PTRPCNSNNTPRLYRQHGLACQAQTWPRCLPQQQAPDEVPPPDHRARDHRRHGPPTRLTPTTSPTTAAAAARTS

SEQ ID NO: 328094 - protein, 143 aa, Zea mays
  Clone ID: MRT4577_62286C.1.pep
NAKNSATASPIRPAYRATAPPRPAPPPTPSWSRPHADEVNLHLVLLSSSSSCCSLWTRPSALAAAACGATPTLMAVARAGQRRSPRRRPRGPLRRVPPPMVLATLAVSPTPRRPPRTDPSWKTRAWWRWMHERPRNGCREDWI

SEQ ID NO: 328095 - protein, 94 aa, Zea mays
  unsure (1)..(94): unsure at all Xaa locations
  Clone ID: MRT4577_62287C.1.pep
PRDRXGXERXAQGHXNTRGXATQDGGTANNAGAXXXXGRXXXDGPKRTHPXPPAXTAXETTPEHHXEDTRXQEXNAXRPPTPTRGRXQAPNNDR

SEQ ID NO: 328096 - protein, 55 aa, Zea mays
  Clone ID: MRT4577_62288C.1.pep
SQLAPWVATPLRKVPQSSSDPFLSCLGFFPNLPRSSLQDGVELPGKRIYWRFTCT

SEQ ID NO: 328097 - protein, 119 aa, Zea mays
  Clone ID: MRT4577_62289C.1.pep
ASATMARPRLLLRFMLADGGRADHGARRRARQVEARQYERRRLERAPPDREDLGEEHADREAGRGVQDRTVRHRLGARRVRAVGHHLRQLWAAQGQSCDTGEKPFIFLRGNGKGRDSIS

SEQ ID NO: 328098 - protein, 136 aa, Zea mays
  unsure (1)..(136): unsure at all Xaa locations
  Clone ID: MRT4577_6228C.1.pep
VSAVVSHFKVDTHEALSSERRNGHPKIIHRDIKASNILLDFKFEANVADFGLAKFTTDNNTHVSTRVMGTFGYLAPEYAASGKLTEXSDVFSFGVMLLELITGRRPIVTTQLALLAISTYVLPFACCIILIPIAKL

SEQ ID NO: 328099 - protein, 65 aa, Zea mays
  Clone ID: MRT4577_62290C.1.pep
IRLRSLWATPKYQESELVIIQSAWLMRISPHDVSVSGPEVCVIHISHLKLWQVVVPKQKKIAPRP

SEQ ID NO: 328100 - protein, 131 aa, Zea mays; identical to SEQ ID NO: 228168
  Clone ID: MRT4577_62291C.1.pep

SEQ ID NO: 328101 - protein, 50 aa, Zea mays
  Clone ID: MRT4577_62292C.1.pep
LLWRICPYSHFLCRTSIHKIYTPVNHTWPSTDISSQNLGISIQTIKGEAL

SEQ ID NO: 328102 - protein, 68 aa, Zea mays
  Clone ID: MRT4577_62293C.1.pep
LVLLMEYIIPKHRHGKLFGDTACALNAEQTAHCKSSYSTEHNMDQLVHETRKTVKQYNNCCINQHTHI

SEQ ID NO: 328103 - protein, 89 aa, Zea mays
  unsure (1)..(89): unsure at all Xaa locations
  Clone ID: MRT4577_62294C.1.pep
EAAQIDVPSLQVIKLMQNFKSSEYVREXFSWQYYYWYLTSDGIDHLRNYLNLPSEIVPATLKKSAKPPGRAFGSGPPSDXPRGPRSFDG

SEQ ID NO: 328104 - protein, 54 aa, Zea mays
  Clone ID: MRT4577_62295C.1.pep
FSPFSQGLGALKAAVFLCPAPRANFLGINLNLPINLSLLVNFWGGRVPWGFQCF

SEQ ID NO: 328105 - protein, 132 aa, Zea mays
  unsure (1)..(132): unsure at all Xaa locations
  Clone ID: MRT4577_62296C.1.pep
KKKKKKKKKKKKKKKKKKKKRKNEKQKKKKKKNNKXKKKHKKKKGGGLFKGSMFSNPSFQTYFFFFGPPNLISWAGFLKLGPWKTLCLPNFNSFGQIPFFPNWVIKKKAPPISFSKNLSTFNGNWAPPFTFL

SEQ ID NO: 328106 - protein, 35 aa, Zea mays
  Clone ID: MRT4577_62297C.1.pep
KVVNRSLPNRDELVAFFTASKERYKSWVRAQVERH

SEQ ID NO: 328107 - protein, 98 aa, Zea mays
  Clone ID: MRT4577_62298C.1.pep
FTNFMHIVRDMYRLVYFCTDLTHQAIQPCIPNCTNYNERSSPTMGVLRFPNSLHGIMSLGLNLALPLRCPSESDPIVAGPFPKALLAPLRSLFVDPKP

SEQ ID NO: 328108 - protein, 84 aa, Zea mays
  Clone ID: MRT4577_62299C.1.pep
VLTPIFKFFILLIQGRFKKKLKRAPNKQGNTAPNKDMVIYRNPCAKHKRGKGPGKTGLPLTRNLLKIPNFKRGLPYFNKKGCFK

SEQ ID NO: 328109 - protein, 150 aa, Zea mays
  unsure (1)..(150): unsure at all Xaa locations
  Clone ID: MRT4577_6229C.1.pep
MTYLHLXGNDRPTMEWPTRLKIALCAAKGLAHLHEDCHPKIIHRDIKASNILLDFKFEYKVADFGLAKFTTNNNTHVSTRVMGTFGYLAPEYAASGKLTEKFDVFSFGVMLLELITGRRPIDTTQLALLAISTYVLPFACCIILIPIAKL

SEQ ID NO: 328110 - protein, 253 aa, Zea mays
  Clone ID: MRT4577_622C.1.pep
FPTAASLIFIYPRFLVLALHRRSPGSLTSLLVACRRRFLVHMAWTESTGVIFGFRAPDLKFQPWRTQVSPCARVLLFLPPLCSVSLAAPSLPPFWPRAPGRSGLQRRRLVPVPRSCSRPCSSRPCGPPVRALLSLPSLSSLPASFPWRAPVRWPSARRACSVFPARAEQLPRPALCPVSKLAVEAPLPRPWLGLRAVRAAPRAHPNQTVPPSARSLPCSSPARRCFTSARTLLLSSVLSISPCSVSSSPLHDG

SEQ ID NO: 328111 - protein, 46 aa, Zea mays
  Clone ID: MRT4577_62300C.1.pep
KPHRQTFINTQQSYSLNLTPLYKLSCLSTLYTESLVCTNKHMNMNK

SEQ ID NO: 328112 - protein, 87 aa, Zea mays
  Clone ID: MRT4577_62301C.1.pep
HCDIQFFHIVRRRGICFYHVDATCGMSYVNVTHRRVIYVSHLELGQGICVQDRVSRHCSCSCQHIARTEHRCLPALAYPCETYVHIP

SEQ ID NO: 328113 - protein, 48 aa, Zea mays
  Clone ID: MRT4577_62302C.1.pep
GNPNCSGFRKGSDLIRSYSTRPFPGIAKSFPQLRHRTLWSQVNSFHCV

SEQ ID NO: 328114 - protein, 50 aa, Zea mays
  Clone ID: MRT4577_62303C.1.pep
NLCIQLTYSTPTYRARKHTGVIAWACLDEVRLTSRLICGCASLAASFQLG

SEQ ID NO: 328115 - protein, 51 aa, Zea mays
  Clone ID: MRT4577_62304C.1.pep
FVACVSGCCILHYSVCLRVKRSKFSGIRSLGCFNRNGVLKAHPCPFVWCVG

SEQ ID NO: 328116 - protein, 37 aa, Zea mays
  Clone ID: MRT4577_62305C.1.pep
SVYALRRICWWAPPPPPSPPPPPPPPPPSPPPPPPPI

SEQ ID NO: 328117 - protein, 218 aa, Zea mays
  unsure (1)..(218): unsure at all Xaa locations
  Clone ID: MRT4577_62306C.1.pep
RQCAAAPARRVVGVEATLHMPECRRSAHSRRRRRQSVACSVLRGMIQQVACRREGASAGVAAREDESRSGAAARSRRGGWSGRRSPRTGVGVGDESQHSGAMVGCCFSERAGAAVRASAMLACAAAARPRRAHHPSMRSEVAHTDLRWALLGEDERTTKHQPSIRLRAGSTSLLGKMACWLALYGKKIARSSMHPRSGRRVSAMYSSDFXRHGXEGYP

SEQ ID NO: 328118 - protein, 483 aa, Zea mays
  Clone ID: MRT4577_62307C.1.pep
MSLCNRCLAAGVDASARLTAAAGNESKSLNCFYLTVLYAAGISSSAGPESPVTARCALGLALSTPPPTSSPTSSSATHTTNIAVAATVPIASLLLVSLVALLVWRYRHELSKDRRSIQISEERRSRPRPNTGSVMFDICELAKATGGFAERNLIGRGGFGVVYRGVLVDGTVVAVKKMLEPDVEGGDEEFTNEVEIISHLRHRNLVPLRGCCIVDADADPDPDEGKQMFLVYDYMPKGSLDQYIFDDAQGRRRPALSWAQRRTVLLDVARGLEYLHYGVKPGIYHRDIKATNILLDADMRARVADFGLARRSREGQSHLTTRVAGTHGYLSPEYALYGQLTEKSDVYSFGVLVLEVMSGRRALDLSDPSGVVLITDWAWAHAKAGRPGDVLAQALRKEPSTSVAAMERYVLVGILCAHVTVAFRPTMPEALRMLEGDMDVPDLPDRPQPFGQRIAFDEGETNFSASSILSGGGPFVDFGDMLR

SEQ ID NO: 328119 - protein, 55 aa, Zea mays
  unsure (1)..(55): unsure at all Xaa locations
  Clone ID: MRT4577_62308C.1.pep
PPPFPPPLAPPPPTPPRPRPHPPPPPTPPXAPPPLPAPLPVTPQAPTRPPPVGMA

SEQ ID NO: 328120 - protein, 87 aa, Zea mays
  unsure (1)..(87): unsure at all Xaa locations
  Clone ID: MRT4577_6230C.1.pep
STCVEVSHERACANELQPISHGHPEQITQEQSADCYNILTNDCQEHLAMKHFVLINQLDFKXVDYMILTXPFDLCDTKNKLNNFKLY

SEQ ID NO: 328121 - protein, 136 aa, Zea mays
  unsure (1)..(136): unsure at all Xaa locations
  Clone ID: MRT4577_62310C.1.pep
XXXXXXXXXXXXXXXXXXXXXXXXXXXXXXXXXXXXXXXXXXXXXXXREKKVYQQKQNKRLVKTPHINPPIQDGHLHGARHGAPYGLSKSKVPWSPAKGSSSAGVVASRPRDGRQRAAASTTATQQAAGVLLANQR

SEQ ID NO: 328122 - protein, 122 aa, Zea mays
  unsure (1)..(122): unsure at all Xaa locations
  Clone ID: MRT4577_62311C.1.pep
GDGVNDAPALKKADIGIAVADATDAARSASDIVLTEPGLSVIISAVLTSRAIFQRMKNYTXVRRKPNEINFQKIVAFSDPPSPLQIYAVSITIRIVLGFMLLALIWEFDFPPFMVLIIAILN

SEQ ID NO: 328123 - protein, 51 aa, Zea mays
  unsure (1)..(51): unsure at all Xaa locations
  Clone ID: MRT4577_62312C.1.pep
YTFIYFFTKXTPGGQAQKLYYNNIAGSTMTVMTETFFQAQGRKENLVGKGA

SEQ ID NO: 328124 - protein, 43 aa, Zea mays
  Clone ID: MRT4577_62313C.1.pep
MGSSIARAVEAPFCQIFSLWNHCSNSKSMYPCDLCLNQSTDVT

SEQ ID NO: 328125 - protein, 263 aa, Zea mays
  unsure (1)..(263): unsure at all Xaa locations
  Clone ID: MRT4577_62314C.1.pep
MSGGTAASGSLRTAFSYCVQQVRSYDYHNYLCLLHLPPAMRKAAFTFRAFNVETAKAMDVVSDPRKGLMRLLWWKDVVDKVCAGKKVEHPVALALSSVLSEQKVSKHWLKRSLEARINDGNRDEDAIPENVPELERYAEDTQSTILYMTLQAGGIQSTVADHAASHIGKASGLLLLLKALPHHVSKQGKIPYIPASVAEECGLLAREGGRTEVRMGDALPDAVFKVASVAEAHLQKXRELAALCPAEAVPVLSXXVPAPGLLD

SEQ ID NO: 328126 - protein, 67 aa, Zea mays
  Clone ID: MRT4577_62315C.1.pep
PRSITIPLFHSWTLTASRPSSSPLSLLDSSPSHSTDNLSRKYLGSHHYRHHLCVLQDDSTARYRLAL

SEQ ID NO: 328127 - protein, 297 aa, Zea mays
  Clone ID: MRT4577_62316C.1.pep
MPVAALRPPPVAVGAGRRSARLQARFALRASSLEASAAVTVTVNGSAEAAVERKEKVQEDKDNEGLPVKEEQERGLEVLYDDGFGSVTVKDYFAAAKVLCRDDGGPPRWFSPVECGHPAVDQAPLLLFLPGMDGVGTGLILHHKSLGKVFEVRCLHIPVNDRTPFEGLVQIVENLIKHEHDLSPDRPIYLVGDSFGGSLALAVAARNPQIDLVLILVNPATSFAKTPLQPVLSLLESMPSECHATVPYFLSFVMGDPLKMAVVSIENNLFPSETLQILSGQPHINAYFAFKNCLYII

SEQ ID NO: 328128 - protein, 72 aa, Zea mays
  Clone ID: MRT4577_62317C.1.pep
HIQILCQKDIYYKYNNDIFSIHSLYSGMVQWYCLVTKHSVPADKPEWPLEHRQAWLYKNKPEEKGSQRSIGS

SEQ ID NO: 328129 - protein, 81 aa, Zea mays
  Clone ID: MRT4577_62318C.1.pep
SFSPSKTSAHSRVKAHQANPLNAQARRPARGRACKCCTHSRNLCSFSSMLACTISYRHYTCIHRSYLRGLLPYTPHSPIAS

SEQ ID NO: 328130 - protein, 59 aa, Zea mays
  Clone ID: MRT4577_62319C.1.pep
KGGPSKIKQLPFFEGVNWALIRCASPPDVPKPLGLEVSSKPSVFSERKVGAGQKQKGPP

SEQ ID NO: 328131 - protein, 577 aa, Zea mays
  Clone ID: MRT4577_6231C.1.pep
PRVRVAPWEKEVINDPCTPKPNPNPFTYVPEPKSEHVFQTVDGVIHVYADKDCTESIYPVADATTFFTDLHYILRVTAAGNTRTVCHNRLNLLEHKFKFHLMLNADREFLAQKTAPHRDFYNVRKVDTHVHHSACMNQKHLLRFIKSKLRKEPDEVVIFRDGTYMTLKEVFESLDLTGYDLNVDLLDVHADKSTFHRFDKFNLKYNPCGQSRLREIFLKQDNLIQGRLLHDFLKQVVGLDLVDDERRAERRPTKHMPTPEQWTNVFNPAFSYYAYYCYANLFTLNKLRESKGMTTIKFRPHAGEAGDVDHLAATFLLCHNISHGINLRKSPVLQYLYYLGQIGLAMSPLSNNSLFLDYHRNPFPTFFQRGLNVSLFTNDPKQIHLTEITIMKFRPHAGEAGDVDHLAATFLLCHNISHGINLRKSPVLQYLYYLGQIGLAMSPLSNNSLFLDYHRNPFPTFFQRGLNVSLSTDDPLQIHLTKEPLVEEYSIAASLWKLSSCDLCEIARNFVYQFGFSHALKAHWIGKNYFKRGPAGNDIHRTNVPHIRVQFREMIWRNEMKLVYSDNEILIPDELDL

SEQ ID NO: 328132 - protein, 142 aa, Zea mays
  unsure (1)..(142): unsure at all Xaa locations
  Clone ID: MRT4577_62320C.1.pep
THASLATIAXASPWSMPAHGPAGAVTTSLHAWELDRPGPGEMWCEEAASQAPAADAGASKRQGVIVVALPMPMNISRRTAACYREAEAEADRWATPPTRSRGAWALRIRISTRGGMQKPAAWRPCVAVDGYGQTGRGARTRG

SEQ ID NO: 328133 - protein, 48 aa, Zea mays
  Clone ID: MRT4577_62321C.1.pep
ELNLWSIILTCFQYMLFLLQKAMLSVSAFVSLEMDEVDANSPYFSPIK

SEQ ID NO: 328134 - protein, 234 aa, Zea mays
  Clone ID: MRT4577_62322C.1.pep
MATPAAVMKLYGWAISPFVSRALLALEEAGVDYELVPMSPQAGDHRRPEHLARNPFAMVPVLEDGDLTLFESRAIARHVLRKHRPELLGAGAGGSLERAAMVDVWLEVEAHQLSPPAVAIVVECFAAPLLGRERDQTVVDENVEKLRKVLEVYEARLGECRYLAGDFLSLADLSPFTIMHCIMATEYAAALVEALPRVSAWWEGLAARPAAKKVAEFIPVGAAGLLEHPPKQQD

SEQ ID NO: 328135 - protein, 59 aa, Zea mays
  Clone ID: MRT4577_62323C.1.pep
HWRVFSIAKVIQNYDRMGDTSMHERSYVKDPVLGYMVWNDIQGTRNTDKCFETMPVALA

SEQ ID NO: 328136 - protein, 46 aa, Zea mays
  Clone ID: MRT4577_62324C.1.pep
KKNLNKSSSIIVHIYSRLLAAMVIPPFLGSIIPGPQLLRNYPTVSA

SEQ ID NO: 328137 - protein, 47 aa, Zea mays
  Clone ID: MRT4577_62325C.1.pep
QAQLSAAGLLTHLLSPRTWNKHPSGSHDPWAVKIIHSLILTYPWLLV

SEQ ID NO: 328138 - protein, 73 aa, Zea mays
  Clone ID: MRT4577_62326C.1.pep
LDVLSVLVQTVRPLCDDIALQLAPPPEFKNSTYLLSVPSTSPLEPPSNSPYGGIHYTRCTAQYSLPPHRMLEL

SEQ ID NO: 328139 - protein, 66 aa, Zea mays
  Clone ID: MRT4577_62327C.1.pep
RSIKHSKHSHLAADTSAGGGRTLTLKPSSCARRAQRRTRKRRGGGGGRNQSLFRPIVSLLSLDRTR

SEQ ID NO: 328140 - protein, 35 aa, Zea mays
  Clone ID: MRT4577_62328C.1.pep
MALGTGTRKGSRRARGLRILKGHQGSARVRPRCRR

SEQ ID NO: 328141 - protein, 54 aa, Zea mays
  Clone ID: MRT4577_62329C.1.pep
PPVLRRVVQVVRLPLVPRLLIWCHGRLRAEHEAASTAPTFLWSIISHGGAAIVV

SEQ ID NO: 328142 - protein, 62 aa, Zea mays
  Clone ID: MRT4577_6232C.1.pep
FSHALKAHWIGKNYFKRGPAGNDIHRPNVPHIRVQFREMMWRNEMKLVYSDNEMLIPDELDL

SEQ ID NO: 328143 - protein, 75 aa, Zea mays
  Clone ID: MRT4577_62330C.1.pep
NPIIITQCSLSLTGSISQNLTPTTTMGFKHPAIQTYTLQQALASNVLKQPISQFQQQSLAHLTIHTISNASSTNN

SEQ ID NO: 328144 - protein, 164 aa, Zea mays
  unsure (1)..(164): unsure at all Xaa locations
  Clone ID: MRT4577_62331C.1.pep
MFRQINQIILVCAVFAAANCFPDGGPADTCVKPERFNQPNHGQARTQPLNTLPFDVIATTDQYQPGQQIQVTIRGRDYFRGFFIQARDAETNEWIGSWQDSQHTKTIXECASITHADNRDKEGANLIWNAPQHKSGRVYFTGSVVKNYSTFWADIVAKIPIYQR

SEQ ID NO: 328145 - protein, 55 aa, Zea mays
  Clone ID: MRT4577_62332C.1.pep
AGPLGFRHGNRLTLEVLELHTGAGRSISLVTVARLIWGFGAFFPLKGRGEVVRRL

SEQ ID NO: 328146 - protein, 107 aa, Zea mays
  Clone ID: MRT4577_62333C.1.pep
MFHADAVAFCCFQVKLVNVMYLHVIFWSCFCDKKKKKKKKKKKKKKKKKKKKKKKKKKKKKKKKKKKKKKKKKKGGGLLKRTKFNYPGNAKKNFFYGATKIKLIARF

SEQ ID NO: 328147 - protein, 79 aa, Zea mays
  unsure (1)..(79): unsure at all Xaa locations
  Clone ID: MRT4577_62334C.1.pep
MSPLRPAHSSSSSSXTRSNSRARTLAQTTLDAELCAESEKSGEPFDYSKWFEPQRSTPPYHXAPSVKVIAYLPSFQRGK

SEQ ID NO: 328148 - protein, 163 aa, Zea mays
  Clone ID: MRT4577_62335C.1.pep
MAAAAAAAKDAAVTLSSGHRMPAVGLGVWRMDKPDVRGLIHAALRLGYRHLDCAADYQNEAEVGDALAEAFQTGLVKREDLFITTKLWNSDHGHVLEACKDSLKKLQLDYLDLYLIHFPVATRHTGVGTTSSALGDDGVLDIDTTISLETTWHAMERTLVPWG

SEQ ID NO: 328149 - protein, 58 aa, Zea mays
  Clone ID: MRT4577_62336C.1.pep
KMEPTECSKISSGLFLLVHSFGMHGVTVCHGTPEYALLVRIIGETYDFRGCRDYNLKA

SEQ ID NO: 328150 - protein, 92 aa, Zea mays
  unsure (1)..(92): unsure at all Xaa locations
  Clone ID: MRT4577_62337C.1.pep
NPALTQLNVFSEHSPIPRWYNTXQTRTYGPSQNLLSLNGXCNTPCTCSSNPAGAVVTPRDAHKVANDLGPGSSAHLPYLIATIPXFPYQALN

SEQ ID NO: 328151 - protein, 92 aa, Zea mays
  Clone ID: MRT4577_62338C.1.pep
MGYLQEARENHVKKKVEEALRSKMKQKALQECDFYCSKYAECARGRTFSVVWQCRKQAKELNECLHQYTNDAILEEMKKAYMIEQKSKEINQ

SEQ ID NO: 328152 - protein, 122 aa, Zea mays
  unsure (1)..(122): unsure at all Xaa locations
  Clone ID: MRT4577_62339C.1.pep
MLVYKDAFTGDEVCSDAMKNLHEEENGLLLVCDSYNISKGGEDYGIEVNNDEDEEGGGGGADNAVEQVNIVVESFGLQPFPISKKDFQVTIKRYSKRVKDYLEXEQPDRVEKFMEGMKSWLP

SEQ ID NO: 328153 - protein, 268 aa, Zea mays
  unsure (1)..(268): unsure at all Xaa locations
  Clone ID: MRT4577_6233C.1.pep
SEFGSRNADREFLAXNTAPHRDFYGVRKVDTHVHHSACMNQKHLLRFIKSKLRKEPDEVVIFRDGTYMLLKEVFESLDLTGYDLNVDLLDVHADKSTFHRFDKFNLKYNPCGQSRLREIFLKQDNLIQGRFLAELTKQVFSDLSASKYQMAEYRISIYGRKQSEWDQLASWIVNNELHSGNVVWLVQIPRLYNVYKEMGIVTSFQNLLDNIFVPLFEVTIDPASHPQLHVFLKQVVGLDLVDDESKPERRPTKHMPTPEQWTNVFNPA

SEQ ID NO: 328154 - protein, 69 aa, Zea mays
  Clone ID: MRT4577_62340C.1.pep
AIIRCHRLVTSQKVHQDITVMSDLGGHLLIHVNLALGSEQCPSDNAREASDRSGHRYMLYAAALASTQA

SEQ ID NO: 328155 - protein, 204 aa, Zea mays
  Clone ID: MRT4577_62341C.1.pep
MAATAGGNKIRNAKLVLLGDVGAGKSSLVLRFVKGQFVEFQESTIGAAFFSQTLAVNDETVKFEIWDTAGQERYHSLAPMYYRGAAAAIVVYDITNAASFTRAKKWVQELQAQGNSNTIVALAGNKADLLDTRQVSADEAKAYAQENGLFFMETSAKTATNVNDVFYEIAKKLLQGQQVQNPQGGMVLNQRPPERMVSSSSCCA

SEQ ID NO: 328156 - protein, 51 aa, Zea mays
  Clone ID: MRT4577_62342C.1.pep
SRVVPLPFHLSAYKYKLTGHGMVFFFVGSVHGSFSLKSCFSLTIWKFILNS

SEQ ID NO: 328157 - protein, 103 aa, Zea mays
  Clone ID: MRT4577_62343C.1.pep
MTLSRKMCMLSNLLALNIEGTFICQPKYIRDILKKFGMKNAKPIKTPMGTNGHLDLDTGGKSVDQKGSTFDLIGYSDADYAGCKIDRKSTSGTCQFMGRSLVS

SEQ ID NO: 328158 - protein, 74 aa, Zea mays
  Clone ID: MRT4577_62344C.1.pep
TAVMAVVVNTSPTCCCRLHLGRCHQYQPFCCNLCCSPCRVRTFRNRFARPRQTWLPACCFLVTQSVQKKSIAEC

SEQ ID NO: 328159 - protein, 158 aa, Zea mays
  Clone ID: MRT4577_62345C.1.pep
PEPHDVGRYIQAEVKSGGQISIPKTAGSIDPAAGLVEYVETLVRNPETDYNVVIIQVNGVAQAADSVHVLCIGRLRMRLAKEKTVVAKEFYSSSMQLCGVRGGGDAAPQSIFWQPRKGLSFVLAFETTRERNSALMLARRFAIDCNIILGGPGDKTSW

SEQ ID NO: 328160 - protein, 574 aa, Zea mays
  Clone ID: MRT4577_62346C.1.pep
MSLSSARQRRATAASPPTDDGYAKDAKDRRRRPGGDGDSEDEGIKWFLPFLALGLLRHMSASSNLIHDCDEVFNYWEPLHFLLYRSGFQTWEYSSDFALRSYLYLFFHALVAGPASLIFGEHKVRVFYSVRIFLGLISTITETVLVVALSRRYGKRLACYVLAMLCLSSGCFFASTSFLPSSFSMYAVTLSSALFLLEKYAGAVSVAAAGVILGWPFSILVFLPVTVYSLIRGSFRRVFLSGFVTSLCFLVLSFVADYYCYGRLTFSVFNLLKYNVIGGGESHLYGTEGFSFYFRNGFNNFNFAFILALLFLGVVPFARKKYAPDLLIVVSPVYIWLAFMSLQAHKEERFLYPIYSLICVAAAAVIDSLPDFFHDKYSSDQSIFEKIAKGLRPLILGFILCASHSRTFSMLNGYGAPLQIYQHLEHHDDTGPGSILCVGSEWHRYPSSFFIPSYISEVRWIDDGFRGLLPFPFNETLGGTTAAPSYFNNKNKAAEGQYLKDIGACNLLVELDLRRPYPSRGSDLSTWEALAALPFLDRELSPALYRSFFIPYRWQQNNVFGLYKLLRRLHPDHA

SEQ ID NO: 328161 - protein, 207 aa, Zea mays
  unsure (1)..(207): unsure at all Xaa locations
  Clone ID: MRT4577_62347C.1.pep
AKGLRPLILGFILCASHSRTFSMLNGYGAPLQIYQHLEHHDDTGPGSILCVGSEWHRYPSSFFIPSYISEVRWIDDGFRGLLPFPFNETLGGTTAAPSYFNNKNKAAEGQYVVSFFPELQQGNRLIXTLSATCFYFPVQLKDIGACNLLVELDLRRPYPSRGSDLSTWEALAALPFLDRELSPALYRSFFIPYRWQQNNVXGLDKLL

SEQ ID NO: 328162 - protein, 94 aa, Zea mays
  unsure (1)..(94): unsure at all Xaa locations
  Clone ID: MRT4577_62348C.1.pep
MSLSSARQRRVTAASPPTDDGYAKDAKDRRRRPGGHGDSEDEGIKWFLPFLALGLLRHMSASSNLIHDCDEVFNYWXXXXXXXXXSGFQTWEYR

SEQ ID NO: 328163 - protein, 84 aa, Zea mays
  Clone ID: MRT4577_62349C.1.pep
MARAASMPAATAVGIVVVMLLAVGFPLAEGKSCTNALPGLTSHTERAEAHLQAAAPATVLQPMIHRHRHGHEQDLTPTDEYTWM

SEQ ID NO: 328164 - protein, 42 aa, Zea mays
  Clone ID: MRT4577_6234C.1.pep
IKLVKKSNFWIFDPFPKKKKKKKKKKKKKKKKKKKIFLKKPT

SEQ ID NO: 328165 - protein, 101 aa, Zea mays
  Clone ID: MRT4577_62350C.1.pep
MACKKRGVICPLDHLTWLLEAHVVRGVDLGIQDLRSSDPYFILRICLAQQVTTHVVKNSLNPEWNDTPTLSIEDPGDDMRLEVFDKDTSIDDAIGYTELDI

SEQ ID NO: 328166 - protein, 97 aa, Zea mays
  Clone ID: MRT4577_62351C.1.pep
PFSVGKGWGETGPKNRQAGSIKGKSLGGQKGEQKEMNYLKGTAGGPKGKPKLPKVLRNPPTRRKRGNGYGAQRKKTFQPGGGGKLERGQPVGPYRAE

SEQ ID NO: 328167 - protein, 120 aa, Zea mays
  unsure (1)..(120): unsure at all Xaa locations
  Clone ID: MRT4577_62352C.1.pep
IYRRPLXQREWPSVGGGAWTPXPFXMGAPRRGTPQAPGRVDPLIIISAICAMVLPAIKLVPAQILLCKYHNHNPNKSKNKTITIWRMIVXMIFMATTKIIITSMNLTLTSTLLINLMIWI

SEQ ID NO: 328168 - protein, 57 aa, Zea mays
  unsure (1)..(57): unsure at all Xaa locations
  Clone ID: MRT4577_62353C.1.pep
SPPPXNNYGTDLFKILSAHLTTHKYSTSSSNYYNFSYNFHSSQPLPHSHKKYSSKPS

SEQ ID NO: 328169 - protein, 347 aa, Zea mays
  unsure (1)..(347): unsure at all Xaa locations
  Clone ID: MRT4577_62354C.1.pep
MAALATLLRHSRRSHAHVLPISRALSTTTPTTGGTDPVAITLSDAKRQLLRERDPDRVVSILDAIDTASISAASTRHALSLAARRLSRSRRFADAEALLSSHLTASTTEAHLAAVLCSYASANLPEKAIDAFRSAAPSLPTPNSPLPFNALLSTFIRCRRYRRVPVLFAELSKEFSITPNATSYGILVKAYCMARDDAKAKQALDLMREQGISPTNRIYTTLIDSMYKRKMTNEAESLWKEMVESECEPDVATYNVKAMYYALHGKPEEVMEVMTEMEAAGVKPDTTTYNFLMTSYCKSGKLEDAKVLYHSLAEKGCSADAATYKHMLAELCAYGDXDAXLGIFKDS

SEQ ID NO: 328170 - protein, 53 aa, Zea mays
  Clone ID: MRT4577_62355C.1.pep
RAPRHRRSGRVGAVGQHLKRSCVRCKAELDREEMPATTNITGKIITKQLSSCI

SEQ ID NO: 328171 - protein, 142 aa, Zea mays
  unsure (1)..(142): unsure at all Xaa locations
  Clone ID: MRT4577_62356C.1.pep
NYTGTPPTNTQRSNGTKLVVLPYGTXSVELVMQGTSILGAESHPLHLHGFNFFVVGQGFGNFDPAKDPAKYNLVDPVERNTVGVPAAGWVAIRFRADNPGVWFMHCHLEVHVSWGLKMAWLVLDGDRPNEKLLPPPSDLPTC

SEQ ID NO: 328172 - protein, 69 aa, Zea mays
  Clone ID: MRT4577_62357C.1.pep
QSVDQAHGEYRREGENMNLKQETTVQAPKIKDLELIALHEGVGARKGVEAERTRNRRRTREQKCKCGAP

SEQ ID NO: 328173 - protein, 87 aa, Zea mays
  unsure (1)..(87): unsure at all Xaa locations
  Clone ID: MRT4577_62358C.1.pep
XGLNHLYAMRXGTIPVVHGTGGLRNTFEKFNPYADGVAGTGTWWVFTPLSKENKVSSLMLAASTYKEYXQSWXGLMKKVMTLNYSWE

SEQ ID NO: 328174 - protein, 74 aa, Zea mays
  unsure (1)..(74): unsure at all Xaa locations
  Clone ID: MRT4577_62359C.1.pep
KNEPESAKKLASVADLYVNDAFGTAHRAHASPKSYKYXEAAVAGXLMQXELDYLWSCANQEACVCVTSQRWHER

SEQ ID NO: 328175 - protein, 233 aa, Zea mays
  unsure (1)..(233): unsure at all Xaa locations
  Clone ID: MRT4577_6235C.1.pep
MKMGRGAGRALLLALALLLAVHATPASAATKSYLVMACQRPASWSDLLTPITSQFRIFYIFDAIKGIALQIDSIFVPALKLLPGVVVIEDKLYQVQTTHSWGFLGLGGLDGEPINVWKNIANFGQGVIIANVDTGVSPISASFRDDGTLPKPDRWSGGCQQGFSGCNNKLIGARVFNEGIKLLSKQSGKQLNETEVNSSSDYEGHGTHTLSTAXXGGLVPNVGXWGHGTGTAK

SEQ ID NO: 328176 - protein, 30 aa, Zea mays
  Clone ID: MRT4577_62360C.1.pep
PKSSLTMRKIASISFYISLQFNYYFLTMYF

SEQ ID NO: 328177 - protein, 63 aa, Zea mays
  Clone ID: MRT4577_62361C.1.pep
FLLFLFLFMVLLFFLFFFFFFSFFFENKRTSSDSLTTGLRSHILAYTSKYAKSMSALEIGGVG

SEQ ID NO: 328178 - protein, 74 aa, Zea mays
  Clone ID: MRT4577_62362C.1.pep
EHTAVLKLVLESNPLRTSILSMTSLGKNNQVSFCTNISLQFYQGIQLQKLTQEHHSFGCHVWGTRTTASQISSV

SEQ ID NO: 328179 - protein, 95 aa, Zea mays
  unsure (1)..(95): unsure at all Xaa locations
  Clone ID: MRT4577_62363C.1.pep
GVXFLWRLLGGSXSLPGFXAXAXVASLCAXVVRSSCVLSFVSCCXFGCLVSGXSCAFFFPVXCFWYAPSXVLRLFCGCPASPFSVLPRVPCXXXM

SEQ ID NO: 328180 - protein, 174 aa, Zea mays
  unsure (1)..(174): unsure at all Xaa locations
  Clone ID: MRT4577_62364C.1.pep
GGPPAGAPGAGRPAGFRGPGAARQGWPRVGVSRGPPFLRGRPSGVGGLVNFPGPVGGFRAFVGGXLXVAPEKALFVGAEGAGIVSFAVFRAPAQLFLVSEEVLGRLASMAWLSCGCFGSSPVFWGVNFGSRSGLLCFSVVLGCLVGGPFWVAWALSGGLFAGLVSPGFGPPVRF

SEQ ID NO: 328181 - protein, 46 aa, Zea mays
  Clone ID: MRT4577_62365C.1.pep
YVKQRVLVMCRQGCDSLNDVSSHQVECCRRNYIEHVLSSHARVGEF

SEQ ID NO: 328182 - protein, 113 aa, Zea mays
  Clone ID: MRT4577_62366C.1.pep
IGGGTMMKPPTIYCGLSAPHHSTSRKSDTISSLPIIALHPSKARQVMHARSLPVPMRLLRIHSDITDHNILIQAILTLTSSAETEQLYDSYRDKICALRIPDFRVVVLSRDHM

SEQ ID NO: 328183 - protein, 54 aa, Zea mays
  Clone ID: MRT4577_62367C.1.pep
LLQQESATRRCSPTTWHAHQAPRFPYMYPWQGPKRSREHRTIRAKLSVIKVSQH

SEQ ID NO: 328184 - protein, 67 aa, Zea mays
  Clone ID: MRT4577_62368C.1.pep
SIVYRHALCVLRRLASGFLSSPLLSSPRVESEEEDGCQKLLLLLPRPHPLTRGDTARSIEFVGSCAA

SEQ ID NO: 328185 - protein, 85 aa, Zea mays
  Clone ID: MRT4577_62369C.1.pep
PSPEEAPPPGRNGPRKRASCPPPRGPIIFFPAPSVLSVSMVHSVSLLTLPTHGDGFTFRLLIACFNEFSLLVILFVFFFFLIYAW

SEQ ID NO: 328186 - protein, 70 aa, Zea mays
  Clone ID: MRT4577_6236C.1.pep
LVAFYPQGGGNINGFLQQQQLVPFYPQNVANIGGFLPQPPLVAFNPHALTNSYNLLEPATIGGGIFLNFY

SEQ ID NO: 328187 - protein, 100 aa, Zea mays
  Clone ID: MRT4577_62370C.1.pep
QVVVDKLGEPNLTYDDFAATLPADECRYCVYDFDFVTEEGCQKSKIFFIAWSPDTAKIRSKMLYASSKERFKRELDGIQVELQATDPTEMGIDVIRGRAN

SEQ ID NO: 328188 - protein, 69 aa, Zea mays
  Clone ID: MRT4577_62371C.1.pep
KGIKLGLGKKKNFKSEKIALNSVNLGGLEFGIEQKGRIMYFKKSVKWGIGFTVFFLIFSRGLDFLGGGF

SEQ ID NO: 328189 - protein, 52 aa, Zea mays
  Clone ID: MRT4577_62372C.1.pep
TTIGAWGSRCFAGVNHPHSDLVCLQPVHHVTMVTMQPEYSSHRGQKTKKRSK

SEQ ID NO: 328190 - protein, 125 aa, Zea mays
  unsure (1)..(125): unsure at all Xaa locations
  Clone ID: MRT4577_62373C.1.pep
MAGEKVEKPDTKEKKPEAKKVDAGGKVKKGNLKAKKPKKGKPHCSRNPVLVRGIGRYSRSAMYSRKAMYKRKYSAAKSKVEKKKKEKVLATVTKPXGGDKNGGTRXVVKLRRMPRYYTTEDVPQS

SEQ ID NO: 328191 - protein, 74 aa, Zea mays
  Clone ID: MRT4577_62374C.1.pep
KMCLVWLGVITRPGWLKTPPVAYGEMYWAPCCLRGIISFAWVEPRAVFWDLWDSRIVLFDLNLPRPESYFWPVF

SEQ ID NO: 328192 - protein, 59 aa, Zea mays
  Clone ID: MRT4577_62375C.1.pep
TTTGGFIKRYKMQVALTLHITCLLEILTNPFYLFLRETRLTGVTASQMEPSNIPSEATK

SEQ ID NO: 328193 - protein, 73 aa, Zea mays
  unsure (1)..(73): unsure at all Xaa locations
  Clone ID: MRT4577_62376C.1.pep
VPKLPFFASKVRLGRCGIXEILPLGPLNEFQKFGLEKAKKKLAESIQKGVFFFKLGRGRPPPHKKKFGVFLLF

SEQ ID NO: 328194 - protein, 69 aa, Zea mays
  Clone ID: MRT4577_62377C.1.pep
RIVLATGCRHIVVVQNVLLGNHYGGARLMFHTSAEDYPNSRPGGLSLLNVSPPPVGVSIATRTDVSFVA

SEQ ID NO: 328195 - protein, 117 aa, Zea mays
  Clone ID: MRT4577_62378C.1.pep
GIRSGGGGVKLNTKRQPGPKPGGVPGPGAPVKFFFSINKQKKGVGTKGHGGPPLMGGEKYFFLRGLEHGGDQGHNPVGVPPLGGVPKNNLEKRGVKGNPGLGVKKLTLLSPGKSGET

SEQ ID NO: 328196 - protein, 54 aa, Zea mays
  unsure (1)..(54): unsure at all Xaa locations
  Clone ID: MRT4577_62379C.1.pep
VSYLEVRTRFLDRPSAPSHCDHRYARTSRVDPXIGYLSEERQXARADTLLRTTL

SEQ ID NO: 328197 - protein, 66 aa, Zea mays
  Clone ID: MRT4577_6237C.1.pep
IRWRSSTPASSAPTAATAPRRASSGATRMSATYPFSRSSSPSHGLARVRHRHRDLKIPENVSKCID

SEQ ID NO: 328198 - protein, 90 aa, Zea mays
  unsure (1)..(90): unsure at all Xaa locations
  Clone ID: MRT4577_62380C.1.pep
MDNVESAPDSPAQAPPSSASSLPKEQSQVELELRLLQALEFYPPSKLKGIHRHYVLXAFMEYLRKSLDRPVLTXDEVLPDLDEMDNSRKA

SEQ ID NO: 328199 - protein, 117 aa, Zea mays
  Clone ID: MRT4577_62381C.1.pep
MDNVESAPDSPAQAPPSSASSLPKEQSQVELELRLLQALEFYPPSKLKGIHRHFVLYGLMEYLRKSLDRQFSSDEVLQLLDRFFNLEMLVSGKPISELLCYISLLFLSYIVWTIGVY

SEQ ID NO: 328200 - protein, 116 aa, Zea mays
  Clone ID: MRT4577_62382C.1.pep
MDNVESAPDSPAQAPPSSASSLPKEQSQVELELRLLQALEFYPPSKLKGIHRHFVLYGLMEYLRKSLDRQFSSDEVLQLLDRFFNLEMLKPEDDEKDNFRQGEEFSLPESFLNKEE

SEQ ID NO: 328201 - protein, 251 aa, Zea mays
  Clone ID: MRT4577_62383C.1.pep
VSDGGADSPAWLPGELRRRTSAVPVRDRPWLLPRRLQPHLRRGAAPGEAAAGGRRRGARHLLAGLHGLFVLSPIGPQSSDFRCLSSNSFSYTIIGNYDRRRCNCSHGYEGNPYIADGCQDIDECQLPDIYPCHGTCINVPRTYRCSSKKGIKSLLGLIAIIALSAGFGLLFSILGVSNIINKLKQRRAKLLRQKFFKRNHGLLLQQLISSNKDIAERMKILSFEELEQATNMFDQNRIIGDGGHGTVYKGD

SEQ ID NO: 328202 - protein, 75 aa, Zea mays
  unsure (1)..(75): unsure at all Xaa locations
  Clone ID: MRT4577_62384C.1.pep
INNNAIESELFIRKKKKKKKKKKKKKKKKKKKKKKEKKIKKEKIKKKKIIYKRKLNKIKXKEKKKNEKKWENLCK

SEQ ID NO: 328203 - protein, 71 aa, Zea mays
  Clone ID: MRT4577_62385C.1.pep
RLNLRGIADEQIKPTEMATALLQITDRSYTRTKALCVSSSDQQRTVKVTSEAMEKDVHKKGYTMVTTNVML

SEQ ID NO: 328204 - protein, 58 aa, Zea mays
  Clone ID: MRT4577_62386C.1.pep
LHPYVAQVKHMHWYQVGDTVSPCECRCSRARLPPSRYTIFTMLLVRPCCTHAGYTFLY

SEQ ID NO: 328205 - protein, 139 aa, Zea mays
  Clone ID: MRT4577_62387C.1.pep
VVDKARNSKGGSSDSEADPHHSTTPYSSEASQQWRIASAGRDRRRRRLEQQWLPWRAAVLRCPQQLCRRLRLPRMKRFRWRHIDSVLSTVSFGFVATDILVSMFLAMAILEHFLRPRAHTLGHTPPRWIRRQLPFFLGR

SEQ ID NO: 328206 - protein, 110 aa, Zea mays
  Clone ID: MRT4577_62388C.1.pep
LSRLGELVYTGSGGKISGNKGEGDQKLERGNLALKNCIRTKSPVRVIHTFKCLDREEGNHSMAKETTIFTYDGLYNVVDCWSEGQPGSKVFKFKLQRIPGQTQVLSTNRI

SEQ ID NO: 328207 - protein, 37 aa, Zea mays
  Clone ID: MRT4577_62389C.1.pep
GPDGPTQDETNEGHGPWATPRFNSGLLIHPDFNPRGL

SEQ ID NO: 328208 - protein, 211 aa, Zea mays
  unsure (1)..(211): unsure at all Xaa locations
  Clone ID: MRT4577_6238C.1.pep
EPTTSPHHSKIPIIVDLTDILTNAHLKDNVLIALNTXIGLDLTSXISKSLLYNVGQFLEQEVYCQLIISDVLDSTCVHHXNMRAEASLKKCLLNHSTFLTNENQYLCTFHCHMNKQTISIVIIIYNNHASKCFLKTITLNEVLGHFTXIVFVVNSWIYPKSKQRYDRVFLSMDTYLPTQXMSTKLKTYRYQKLLNLMTADQQDSEHYHERI

SEQ ID NO: 328209 - protein, 132 aa, Zea mays
  unsure (1)..(132): unsure at all Xaa locations
  Clone ID: MRT4577_62390C.1.pep
FGSSPVRKTSLLTSLSSPRPRASTSRVKWACLTACTKELFTASKSILMDLKDLFMDPPTLCSAGSAVQDISHCQATVVGPPDSXYAGGXFIANIYMAPDYRLKPPKIFFRTMAFHSNINRNGXICLDIDKEQ

SEQ ID NO: 328210 - protein, 100 aa, Zea mays
  unsure (1)..(100): unsure at all Xaa locations
  Clone ID: MRT4577_62391C.1.pep
LVWFVXXLXFAGFFFGVRLLPFVWLXXXXACFCARCWXXXXWPCVXXGCCXGPXXXFCGVXXAXXCLSLCXCVLSLXSLXFSLXCXXXGXPGXXXXXXXX

SEQ ID NO: 328211 - protein, 121 aa, Zea mays
  Clone ID: MRT4577_62392C.1.pep
RGEREGGGGGRGSERKAKALESPSPQARDCSRGQTGPFPAAGGGLQGPGSSLPLNGFNEPPGHSSHRLFLGGAFEAGAKFCSVTFFLRFTGDRNLAHPLWPSGVSTSNWWEPKSLLWDGIR

SEQ ID NO: 328212 - protein, 220 aa, Zea mays
  Clone ID: MRT4577_62393C.1.pep
MDLSVVPSLSLSPRRALPLPARRAARRPAFVCRCSCSLDASPVATRRLFASLLATAAAVGVGVAGGGGEAGAVSTSRRALRASKIPESEFTTLPNGLKYYDIKVGSGAEAVKGSRVAVHYVAKWKGITFMTSRQGLGVGGGTPYGFDVGNSERGNVLKGLDLGVEGMKVGGQRLIIVPPELAYGKKGVQEIPPNATIELDVELLSIKQSPFGTPVKIVEG

SEQ ID NO: 328213 - protein, 195 aa, Zea mays
  Clone ID: MRT4577_62394C.1.pep
MRPPRGRGGGGRFGGGGGRGRGGGRFSGGGRGGGGGRFGGGFRDEGPPAEVVEVSTFLHACEGEAVTKLTNEKVPYFNAPIYLQNKTQIGKVEEIFGPINESYFSVKMMEGIIATSYNEGDKFYIDPMKLLPLSRFLPQPKGQSQGAPRGGGRGGTRGGGRGRGGSFRGGRGPPRGGGRGPRGGDRGGFRGRGRF

SEQ ID NO: 328214 - protein, 82 aa, Zea mays
  Clone ID: MRT4577_62395C.1.pep
RFTLRLASCNAICTYSKKHGLAVSLRGGVQPVFVGGTAVVHLYTTWYSPALGLPSSSAPPPSPTPKTLTYPNPQPHGKEKPG

SEQ ID NO: 328215 - protein, 97 aa, Zea mays
  Clone ID: MRT4577_62396C.1.pep
SSGPRRPRMSRSRGCGTLSSSDWSVYLLGVRRSSWILVRCPPPGPLWRGDVFLCMLCGGSNTPGGGLFKFFIFSLGFFSFLCSQELHPLCKAQREVV

SEQ ID NO: 328216 - protein, 33 aa, Zea mays
  Clone ID: MRT4577_62397C.1.pep
SGRTQRSCCDSKIRKWYLVLTICSQLIVSTRYH

SEQ ID NO: 328217 - protein, 85 aa, Zea mays
  Clone ID: MRT4577_62398C.1.pep
TEVCSKQKNIYCWDKTTIQQPKVIRGADGKIANEHIGLSLHAQFFGEQAEALKPTPCEYVSPGEPREPTMRNHGRSWFLEPRNGP

SEQ ID NO: 328218 - protein, 70 aa, Zea mays
  Clone ID: MRT4577_62399C.1.pep
MAKSKSYAKAGPPLLGKYELGHLLGRGNLRKGYHARCLGGGDPMAGKVLDKAGLTTTGMAARGPARGVSH

SEQ ID NO: 328219 - protein, 58 aa, Zea mays
  Clone ID: MRT4577_6239C.1.pep
AAFFFFFSKFTSLSVYVSHIFCIDSTRHAMPSHASTLAQLGSLTCGASFLIFNLPPAG

SEQ ID NO: 328220 - protein, 60 aa, Zea mays
  Clone ID: MRT4577_623C.1.pep
YDPTRAPRSTRPCAQLTSLTAHPHAVLTPILLFRRRACKLARSRGHGLGSWSNGREPARC

SEQ ID NO: 328221 - protein, 49 aa, Zea mays
  Clone ID: MRT4577_62400C.1.pep
TTLMSKCCKNCMCVYDYCVLNFANGLTNWIVMVILNFLVWLMHLSISVT

SEQ ID NO: 328222 - protein, 156 aa, Zea mays
  unsure (1)..(156): unsure at all Xaa locations
  Clone ID: MRT4577_62401C.1.pep
YHNNCGCYGFIARSNASXPVPTFRKRWPWSCMEEWFYVKNNLIEKEDIKGIIQRPIXLASSLRRPTVAIENHVEACQKAFSNVCAFIGTRDLIQEHIAYRVWPLVDNWXMPKETAAGSSQGGLICLKYTFRYRDRFDEPNDGWLKCIEATSEEELG

SEQ ID NO: 328223 - protein, 77 aa, Zea mays
  Clone ID: MRT4577_62402C.1.pep
LNMWDIQCKENFLNVKFIGKKNFVYGVSIDAFFSRGPFKGVSPLYPFCGPFLALSPVIENMMRLTYQNSREALVPFL

SEQ ID NO: 328224 - protein, 78 aa, Zea mays
  Clone ID: MRT4577_62403C.1.pep
SRVGPRFGWARSCNKKGPYLPLSRTFVRTCKYDEYGRLLEPTSHKYNSMTVLFRCKDYRQSGFIMGSEARTAYGEHAL

SEQ ID NO: 328225 - protein, 105 aa, Zea mays
  Clone ID: MRT4577_62404C.1.pep
RSDPSEGYTSPKDLSNPMEGGDSYGADASRSLVYRAVIANFIATLLFLYMNVATVIGYKHQTDALASGPDSACGGVCILGIAWAFGGMIFILVYCTVGISCGHIN

SEQ ID NO: 328226 - protein, 128 aa, Zea mays
  unsure (1)..(128): unsure at all Xaa locations
  Clone ID: MRT4577_62405C.1.pep
LADARPCCVVWSVVLCVGWLEQGVVPSCPRGCCAXFAVPCPCARVPVVVSLVWVFCWNCLWGRLGMRFADFSPRPGRVWPAAGVCLPLLPCALRSALAGLLLSSFAVRAAALSPSSHTGPRFASAGXX

SEQ ID NO: 328227 - protein, 27 aa, Zea mays
  Clone ID: MRT4577_62406C.1.pep
LAKVFKTPSLFIFIHDHLTVIWVPYVT

SEQ ID NO: 328228 - protein, 237 aa, Zea mays
  unsure (1)..(237): unsure at all Xaa locations
  Clone ID: MRT4577_62407C.1.pep
MVRLSNTVIGILNAVTFLLSVPILAGGIWLRARADGTECERYLAAPVIAVGVFLMLVSIAGLVGACCRVTCLLWFYLVAMFLLIVVLLGLTVFAFVVTHKGTGEAVSGRGFKEYRLGDYSNWLQKRVENDKNWNRIKGCLQDAKVCKSLEDKTVDQFMSSDLSPIQSGCCKPPISCGFTYVNSTQWTGPAKSTEPDXCGAWSNDXALCYGCQSCKGXGVVATLKRNWKRSAIITSSS

SEQ ID NO: 328229 - protein, 322 aa, Zea mays
  Clone ID: MRT4577_62408C.1.pep
MVRNPSPSCRREGLRIGSSRWRRSPWPSVNFAVRAQQRRRHWHQGIKRKAPERALRWTSSASIARGGERRTPFFAEQHILSPLRHDRIVRLLGTCADDGERMLLTQYMPNGSLHDHLHGHHLSSSSASPVTASWRTRVQVLLGTARAVEHLHCHAVPLIIHGNVASSNVLLDAAWAPRLAGFGASVWRAAGVDSQPVEVAGAASCGGYADPEYCGTGRIRPASDVYGLGVLMLEVLTGQPPVVSVWDAAKQGVVAVTLASFALPSIQAGRLGDVLDRRPAPQQLQPLQLVANMAARCLHMQGGSRPAISDVVANLEQALRLI

SEQ ID NO: 328230 - protein, 47 aa, Zea mays
  Clone ID: MRT4577_62409C.1.pep
YLSAEICFPRETALAMCYSGFPGGIAAGYVFGFPGVFPGKWWVWWFF

SEQ ID NO: 328231 - protein, 115 aa, Zea mays
  Clone ID: MRT4577_6240C.1.pep
AHLNPDEIMKERVEQRQPQPQSQQPQAVVGDYNRIDGAGSNDDDDDEDDYDEDDDDEDDDGNKMQYEIQFQHHQQHPNVVRSNAGAGGGNPPGTAAPSTAAAPTTTAGSFLGMVQ

SEQ ID NO: 328232 - protein, 196 aa, Zea mays
  Clone ID: MRT4577_62410C.1.pep
MVRLSNTMIGILNAITFLLSVPILAGGIWLRARADGTECERYLAAPVIVLGVFLMLVSIAGLVGACCRVTCLLWFYLVAMFLLIVVLLGITVFAFVVTHKGTGEAVSGRGFKEYRLGDYSTWLQRRVENDRNWNRIRGCLQDAKVCKSLEDRRDTVQQFMSSDLSPIQSGCCKPPISCGFTYVNGTQWSGPAKSTE

SEQ ID NO: 328233 - protein, 104 aa, Zea mays
  Clone ID: MRT4577_62411C.1.pep
TIVTDLTFRPLVSNYFIPHGTTLHYLFIAELGHPCTKSCLFHRALDESNTNRTCYYATIEKTRRMMLLKSFNQQGLTAIHLLHTGITIFWDLVLILELTTRPTI

SEQ ID NO: 328234 - protein, 83 aa, Zea mays
  Clone ID: MRT4577_62412C.1.pep
SIIYPIRLLTATVTAFYICFTKLNLYNCYVLTSFSNLYSCHPFFLFIFHFLYFFLSSVFICLFFILFRTRARTSVRTRIRTRG

SEQ ID NO: 328235 - protein, 64 aa, Zea mays
  Clone ID: MRT4577_62413C.1.pep
AELRTGPRQYYYFLDKKKQILMEQTQHTTIKPPYYTNSTWARSSQAYSPSIAMLKLWITCPAQT

SEQ ID NO: 328236 - protein, 150 aa, Zea mays
  unsure (1)..(150): unsure at all Xaa locations
  Clone ID: MRT4577_62414C.1.pep
WQGRRHACVHRRRQAAARAAAADGXGGGDDRRRWRARVAEAHGETGKERKGEGVLTGGGGDDRRRGATEGGRQAVDGVRDDLKNEKEKIREGERGHRRRECRPKAVDMAALTIARREWRSGGEPRRRRGERGGSRPLEPNVGDGAVWRRA

SEQ ID NO: 328237 - protein, 250 aa, Zea mays
  Clone ID: MRT4577_62415C.1.pep
MVEPSVKSSDQHGGGGVDVLFLPPGFRFHPTDEEVITSYLLQKLLNPSFAPHAIGEVDLNKCEPWDLPSKAKMGEEDSKEWYFFCRKGMKYPTGTRANRATKEGYWKATGKDREIFFKPVAGHDDVDRREQLVGMKKTLVFYTGRAPRGTKTNWVMHEFRLIEGRHRTTNDDLLLRFNPKDEWVVCKVHHKGGQHDASAAKAAGGGGKEQHYSSAAGTPNVSSVETGGGDDHDVPSDSCCWGYTQQLPLH

SEQ ID NO: 328238 - protein, 147 aa, Zea mays
  unsure (1)..(147): unsure at all Xaa locations
  Clone ID: MRT4577_62416C.1.pep
ARTRSHQTLPRHAGPRRQRQLAPGGGAGRLKLREGAHPPRAVSRRRSDGASTLLRTHFHDCFVRGCDASVLLNATGGSXAEKDAGPNLTLRGFPAIDRIKALLEKECXHARSCADIDALADRDSVGVMGGPFCSAPTGRPDGPGIMK

SEQ ID NO: 328239 - protein, 335 aa, Zea mays
  unsure (1)..(335): unsure at all Xaa locations
  Clone ID: MRT4577_62417C.1.pep
MVRRTVLAALLVAAALAGGARAQLKEGFYDYSCPQAEKIVKDYVKAHIPHARRRMPDMPMPTMTDRAMRSRRCTXRGCDASVLLNATGGSEAEKDAAPNLTLRGFGFIDRIKALLEKECPGVVSCADIVALAARDSVGVIGGPFWSVPTGRRDGTVSIKQEALDQIPAPTMNFTQLLQSFQNKSLNLADLVWLSGAHTIGISQCNSFSERLYNFTGRGGPDDADPSLDPLYAAKLRLKCKTLTDNTTIVEMDPGSFRTFDLSYYRGVLKRRGLFQSDAALITDAASKADILSVINAPPEVFFQVFAGSMVKMGAIEVKTGSEGEIRKHCALVNKH

SEQ ID NO: 328240 - protein, 60 aa, Zea mays
  Clone ID: MRT4577_62418C.1.pep
IGEGQQGVLRVSWQRASHIEESAHRVSDIVCGRALNPLTASGMPFGPIRSLMRMSGGPSA

SEQ ID NO: 328241 - protein, 89 aa, Zea mays
  unsure (1)..(89): unsure at all Xaa locations
  Clone ID: MRT4577_62419C.1.pep
PKGRGGSXGISXAVALPAGGKAAKEGLLRENIKSAASSPGNLPLRVPKSNPAPGEVIGVFMRGQPSAPGLGVXAPRNVKIPGVWDAQPE

SEQ ID NO: 328242 - protein, 91 aa, Zea mays
  Clone ID: MRT4577_6241C.1.pep
SGICTLLLSRLLSSSASSQKLVRSVRTRSLFMAFSSPPHLISCRKPFNRHAYIADTDPAWDDAPPKGKEQQAPYDGAKEVKQIICELRSLC

SEQ ID NO: 328243 - protein, 196 aa, Zea mays
  Clone ID: MRT4577_62420C.1.pep
MTSVRSCAASLTPSIRGMSGLVRQEALRRELDGCQLLAGIWCHGFTVAQLRSIRASLPDAARLVVAKNSDMAAAVAGTRWEALRPCARGMNAWLFVRSDEIPPALKPYRDFQKEWKLQLNDFTGAVYEGRLYGPDDFAQLENMPTRAQSYQYLLGCLQMPAVNVLAVLRARQEALSAEADKPPAEGEGEAAAPAEK

SEQ ID NO: 328244 - protein, 81 aa, Zea mays
  Clone ID: MRT4577_62421C.1.pep
YVLLRRAAHLFFEPWPHAASISLGNSYTQIKLILFMSVPSVFESKEEKRILKISFLSSKRKIHLEANLKASKKPCKYWVCH

SEQ ID NO: 328245 - protein, 721 aa, Zea mays
  unsure (1)..(721): unsure at all Xaa locations
  Clone ID: MRT4577_62422C.1.pep
MHSSENKLGWNETSMGLVPVPKRPARPDASHQCKSDSFMKRSPRKVRNATLAKSIKSKYHYSPLKQRKGSDSVPGKIVTGLTARKKKKRKIQITDEATRLERRARYFLIKIKLEQNLLDAYSGDGWNGQSREXINLERELQRDRKLIIKCKIAKREIIXPIDGHEEMLIIDGSLMTREQTTNPEHTMCSTCKSHESFPSNKIIFCKGPCKRACHEKCLEPPLNKSVLPTSSHGWLCKFCLCKVRILETINAHLGTSFTVKCHFEDIFKETTELIDSEDALDEDWLSEYSGDEDYDPDENEASGDCMDSGEKIMSDDSNGSGSPLYSPNDDIPDFISADLNVVEGFCHTNLDLGIDAVEDDFAQILTYQRPRRDVDYRRLNEEMFGKITGNEEQSEDEDWGHERRKKRTHSGVAGDNSVGFLNVISDEKSQKKGRKLFRIPPAAVEVLRRAFAENELPPRDVKENLSRELGISFEKIDKWFKNTRCAALRDRKAEGNSHNTAPSKSSKNKGKAGISGKTGRNGHVTGPCNNLRTNEEKTGISGKFDSGDNSCLVPFSEVINVPTRLPHNFEMRKMESTRSPARLHNKGGFLSATVQIKESTLLPTGKPCWQSEMSHPTTNEVSTSAQATTWIDAGACAEEQEPTPWVDIGVSDYQPFLDVIDDMCGLEWRLQRLKENMLSSSIDGQTAASESDKRNQTVVLVPTAELKEKLPHDGLFGHYCP

SEQ ID NO: 328246 - protein, 76 aa, Zea mays
  Clone ID: MRT4577_62423C.1.pep
MGRGLEVEDLRAEVGASKGDGRKLPAATVPHPQRSFVSKPDHHFHRDAKDLGDSGTKPASNDASEGLKKALEARRK

SEQ ID NO: 328247 - protein, 222 aa, Zea mays
  unsure (1)..(222): unsure at all Xaa locations
  Clone ID: MRT4577_62424C.1.pep
PVTKEEGKCEISSGWTMITRDAGMAVDLLRVHRILSTLLETKGITVTRPPTRPPTRPKTTELLLEAGEQELLRTWEDPMDEQCKQDSKDSIRRTIVEHDKVFRQQVHELHRLYHVQKTLMAECDSHRYQPRAEGTHEVVQGSRSNLKCSPSTSGTNQSALLGNAQYPAPQQVQEDLSLHECKPVNCLSLFGEENSAAKERFHXENHKSVEDESWSAAVESDL

SEQ ID NO: 328248 - protein, 403 aa, Zea mays
  unsure (1)..(403): unsure at all Xaa locations
  Clone ID: MRT4577_62425C.1.pep
PTRPVADTFCRSIPELMFWPTFIIAILSAIIASQAMLSGAFAILSKALSLGCFPSVQVIHTSKSYEGQVYIPEVNFLMGSASIIVTITFRTTTEIGNAYGICVVTVFSITTHLTTIVMLLVWRKNFIIVLLFYVVFSSIELVXISSILMKFIQGGYLPFCFSLVLMALMITWHYVHVMKYWYELDHVVPANEVTTLLEKHEVRRIPGVGLLYSDLVQGITPVFPRLVQRIPSVHAVFLFMSIKHLPIPHVAPVERFLFRQVGPREHRMFRCVARYGYCDKLEESGLFKGFLMESLKTFIQDEAAFKTNSTAGDTKELTDPKVSGHDLARWVEKEKQMIDKEMERGVVYLMGEANVIAGPESSAAKKIVVDYVYAFLRKNLTEGEKVLSIPKDQLLKVGITYEI

SEQ ID NO: 328249 - protein, 71 aa, Zea mays
  Clone ID: MRT4577_62426C.1.pep
WGGVINASDASPSLSSMKCILYEMDRDIDLNRRFVSGHPRSPLRDYEFRDRYLYVYALCACVRITEEENAV

SEQ ID NO: 328250 - protein, 476 aa, Zea mays
  unsure (1)..(476): unsure at all Xaa locations
  Clone ID: MRT4577_62427C.1.pep
MGDANGGSMHVVMLPWLAFGHILPFTELAKRIARQGHRVTLFSTPRNTRRLIRIPPELAGHIRVVDIALPRVERLPEDCEASIDLPSDDLRPYLRVAYDAAFADKLSAILQEPGPQRPDWVLIDYAAYWAPAAAARHGVPCAFLSLFGAATLSFYGPPEGLMGRGKYARTKPEDLTVVPDYVPFPTTVAHRGFEARELFKPGLVPDDSGVSEGHRFGVSIGESHIVGIRSRTELESEWLQVLGKLYKKPVIPIGLFPPPPTQDIAGHEATLRWLDRQAQGSVVYAAFGSEAKLTSAQLQTIALGLEASGLPFLWAFRPPADAAPGQGTGGLPEGFEERVNDRGLVCRGWVPQPRLLAHESVGGFLTHAGWNSIAEGLSRGVTMVLLPLMFDQGLNARLLMDKKIGIEVERNEDDGTFAPKDIADALRTAMXGEPRDGTRVKELAEVFGNDEANDQCLRDFLRYLSEYIRQHQGMTY

SEQ ID NO: 328251 - protein, 111 aa, Zea mays
  unsure (1)..(111): unsure at all Xaa locations
  Clone ID: MRT4577_62428C.1.pep
ASQGRVPVRPVLEHARGHTRTACATIDRXXSSCARRGHCGRRRCSPEARRRRRPAQRERSAAKRIGFGGSIGEQTKPRRTDDDQLHARRLLIILKMAWCLTNGNVGSRNGR

SEQ ID NO: 328252 - protein, 100 aa, Zea mays
  Clone ID: MRT4577_62429C.1.pep
FCEYVVGMVARQVMSAGVNIQYMLGSGRRACCPVAYRSCAHHCFSSLGLLCHERTSRCIYVLRCMHGRRHACGVAISCMPTYLAIHGQRRCGGRGRFVRD

SEQ ID NO: 328253 - protein, 47 aa, Zea mays
  Clone ID: MRT4577_6242C.1.pep
MPAGHGLRSRTRDLFGRPLRKKGSIAVTTYVGKYKNVYYENEKMNGG

SEQ ID NO: 328254 - protein, 45 aa, Zea mays
  Clone ID: MRT4577_62430C.1.pep
FLLIYVLLQNTMFHIYNRVKNLSKTFPHWGGGGIPKQRPFYKAIF

SEQ ID NO: 328255 - protein, 42 aa, Zea mays
  Clone ID: MRT4577_62431C.1.pep
RSCDLNHLTLAFMYAAMGQVTIYFGLASPGSTKRQTAEEHVL

SEQ ID NO: 328256 - protein, 91 aa, Zea mays
  unsure (1)..(91): unsure at all Xaa locations
  Clone ID: MRT4577_62432C.1.pep
ARAVSSEFGSSAACYRAVFNVAGRLSSDSRCVYVQRAVFDARTLGAKCTTQLAIRDLTENYGGFRDPSXDRAPMCTAHTISHNIDHCLTCC

SEQ ID NO: 328257 - protein, 73 aa, Zea mays
  Clone ID: MRT4577_62433C.1.pep
CSCCTFLSPVTRFEGSSLCIYKGIGSCVVLSVLAACLQYYPNMFYVSSINLYADCGILSMEHSCFILWCKFPS

SEQ ID NO: 328258 - protein, 69 aa, Zea mays
  Clone ID: MRT4577_62434C.1.pep
SRFFEHCRFLTMNVVARDKLQLLAVTALLVAAKYEEIESAEMKVVKMEADLLKSLNFQIGGPTVTTFLL

SEQ ID NO: 328259 - protein, 49 aa, Zea mays
  Clone ID: MRT4577_62435C.1.pep
CTWAGRKTVDFLAQFLKKKYHIPRRFNIRFDPLLSARTCDAELPLGSAL

SEQ ID NO: 328260 - protein, 58 aa, Zea mays
  Clone ID: MRT4577_62436C.1.pep
IYHILTSILEKEGRLWVERIYGGIRDSISKRTIQSDLHFKKLLNVIAKLVAVLGILRG

SEQ ID NO: 328261 - protein, 64 aa, Zea mays
  Clone ID: MRT4577_62437C.1.pep
LKLLARSVHFTVAILTGGTRIRALNTKSLSMMPPKTSFGYEPYLTKLVYFPTFRTPSTQIATVK

SEQ ID NO: 328262 - protein, 65 aa, Zea mays
  Clone ID: MRT4577_62438C.1.pep
KSVLGEHKPEIVAVKLSVIVHPESNHKNQSLSSQFLYQSTLIFFAYKTAKCPVMNSLKQCHFRST

SEQ ID NO: 328263 - protein, 453 aa, Zea mays
  unsure (1)..(453): unsure at all Xaa locations
  Clone ID: MRT4577_62439C.1.pep
MGNSTLTDMTLLPGVEPIVAGLAAGPSSPGQEGKAKKKPMKSLYLRFFETALDGKSRICRLCRKSYCMTTATGNLGKHLNNRHPGYHQLPEGVSFTNQSTIEATMLNRSRKPHVPVRARAQAQPQVQSQSQVQDQAQPKLRSQPKTKATVDIDHVNWLLLRWLISASLPPSTLEDNMLIDSCKYLEXSVRLWPKEKVQEVIIEVFRSMKEDVKETLQCITSRLSVTLDFWTSYEKIVYMSVKCHWIDENWVSQNALLDVCRIPYPSTGSEVFQALMDVLVMYNIDSRILACTHNNSQHSIHACHELARQLKTRNLPFCYIPCAARTLKTIIEAGLENVKPILSKIREFILHIHSNQEMMEDFKHWTEVYQEGSWKLPFDHSANWNSDYNMLDVVKKAPNAIENTIKKVEEIFLPRDWVLTTAEKSVIDVLHSYLEPFFKTTTNLCNCKLPTLG

SEQ ID NO: 328264 - protein, 44 aa, Zea mays
  Clone ID: MRT4577_6243C.1.pep
FWCFGLIASKKSFIVDCLEEVMKDPVWDYEINHELGFMYLLVQI

SEQ ID NO: 328265 - protein, 199 aa, Zea mays
  Clone ID: MRT4577_62440C.1.pep
FSASPTDREAGGARGKFSGEISAPAKSGAVAWATQDRVSPSRREKPGHDPLLPADSFFPIKSSTATLAQFIPWRSYVAPLRPLLSARPCPRRHHPLCSACPFSTPSSRHRPRLVYAPTVESPPPRYLLCILTQCASFGSDVRQVLACAFSDLPRVIRALVPGIAHRTDASPPGRLNSRTNRLRSRLPTSKPLWNLRFNK

SEQ ID NO: 328266 - protein, 86 aa, Zea mays
  unsure (1)..(86): unsure at all Xaa locations
  Clone ID: MRT4577_62441C.1.pep
PGFSKDPPFLQGGLGRSVNGPTSPGIXGRAPGGPQNPWFGPPGDPPGAGVGTPETPKLVWSSPREVIXNVGPGPQKWGLPSPPFFV

SEQ ID NO: 328267 - protein, 212 aa, Zea mays
  unsure (1)..(212): unsure at all Xaa locations
  Clone ID: MRT4577_62442C.1.pep
CFPLGASXXCLSSCLLLXPPLVXPRXLXXXPXXLALWACSXXGLAXXXXWPCSCLXXXVSGFXXCLPXXCPGXXXXLXXAXXVXXCXXXGSXXWVASCRCXGLXXXVXXCXXXGLXXXGXXXXLRXXXXRPXCSLAVXXCXXXXXGPXXXXXPASPLFPLASXVXAPCLXXLGGXLRPXXSVXPXXXXALXLWQGWXRAXLXFGXGWGGPVG

SEQ ID NO: 328268 - protein, 111 aa, Zea mays
  unsure (1)..(111): unsure at all Xaa locations
  Clone ID: MRT4577_62443C.1.pep
QHRKHNTNKAXQKXXLXXLXXXXASAATATIFPKCSQAPIASLLPPYLSPAVSSVCENPILQPYGXQQAIQLAFTYTVLKISAIHITCDYAQNQEHSHWYNCAIRQVSYTL

SEQ ID NO: 328269 - protein, 172 aa, Zea mays
  Clone ID: MRT4577_62444C.1.pep
MSLNDMGRRLALVIVCCILLSSLRTAAATGKTGRITVYWGQTSSEGSLREACESNLYSTVILSFLTNFGRGKYELNLAGHPWKAVGPHVKYCQSKKILVLLAIGGGIGKYSLASRADAKKVAEHLWNYYLGGKSRDRPFGNAVLDGIDFDIELGSRAHYDDLARHLKAYGDR

SEQ ID NO: 328270 - protein, 329 aa, Zea mays
  Clone ID: MRT4577_62445C.1.pep
MTSTSGSGSQAPCPPPSSQDGLRRQISNRASATTPTSVGVATDTPTPSSSAAAGGGTPTPIDGGTDNVVVSGEDANVIVGSKRKLKSDVWLEFEQVTCQKGLKQSILKLGKNEKGGAVVEKYVFDQVVARKELALMICVHEYPLFMVDHVGFRRFCAALQPLFKVVSRNTIKKDILDMYEVQRPSLVNSFQQCQSRIDVTTDMWTANHQKKGYMSVTVHFINDDWKLKSFLLRFIYVPAPHTGEVISDVLYEVLQDWKIEKKVSTVILDNCTTNDSTMSSMQDKLPLVSLMLDGKLLHMRCAAHIINLIVKDGMTVMDKGIERVQKVHI

SEQ ID NO: 328271 - protein, 897 aa, Zea mays
  unsure (1)..(897): unsure at all Xaa locations
  Clone ID: MRT4577_62446C.1.pep
MTCRMTASKQNKRQTNCTNSEQCRPGKKAKFDTSHCLVSLKPHISLKWDQYLRKVVPEKEQVGILWSDLAPFMESQKHCSGLADVMYVPPEIFSLKSLKGVLSYEAWSTSLTEAERKFLIQFLPSETDAEENVKLLLTGQNHHFGNPFLSWSSSLCYGDIHPDALLNKEKHIKKDEKAYHVNLLNYHSNMVETLKSWRKRWLSCGDTENXCSGITLVIRCXGVMQLKATNSGMPMKVAQRIDVSKFMSYIKVSRTQLNHIKRLKQSGDGIQTKHVSRVIGGLDKSHVKPYGALLEDEQRRLREHWLEMSCNDLPAAFEVLRERKVLMEKSIKLLGLELQQKNVSVLRKADQLTDIMKGLGQPGASENDGTPVFQNDQVECSPQSILQGGHVQSTSLHHQDDEQSVYHIHRMNVEDHDLMVVRGIDITSQSEKNSDVPDQSRNGISCVDKGIYCCANNPDKQSDVLMDIKLCKGGLVVYNPDCKNTQLEDLDGVSYKGPSVHACDQDQDLESIGHAVVNHNCHNSPNISSEMSHPTTNAVIDQETENVMKPSCSSSQLPKSSGEQMHVEDFLYLNDQAAKFEKVSGQLAGPLGPPENMMYNDSGDLQIKQTYLSSGQHFSSVYLNNGILSHQQPQLATPAFALDNPASFIEPFSNLQGLELPETEKDIGAVFYPFRHSTNIKQSASLHCLVNKGLAQSASFPRLLQERHQLIDQSDSDLYAQPHEDYCTDVSCPTKVNLHISEQHSYTAFASMDHRYNWFPEGCQSHNNNDNLLGLQSGNFLPQALPSGSSTDGALFSTASQYNQPSVHMGHGGSNRSQLIEPRNQFGPPQNFLSKSQDTNPMFPDMYGFTQNIASGTSSQVAPIGSLDCSHWTNFIQQNSGMPSDFTNRPSRGPWTR

SEQ ID NO: 328272 - protein, 97 aa, Zea mays
  Clone ID: MRT4577_62447C.1.pep
PAGKKLIILARVSTHLTAEARASPPSMSWHSRSVHQSHRQVTVHHLRITSLDPPLFRDFHSTLPGALSSIMSFPPSYTPSGAHPLLPQTTPGDKQEK

SEQ ID NO: 328273 - protein, 64 aa, Zea mays
  Clone ID: MRT4577_62448C.1.pep
GGKISSSKLRRVVYRLSLSAALFYESDFTLKNNKKSMGLVSDRTSLQASHPSSSSSSSRCPSGR

SEQ ID NO: 328274 - protein, 81 aa, Zea mays
  unsure (1)..(81): unsure at all Xaa locations
  Clone ID: MRT4577_62449C.1.pep
LADGIYPNWPTFVKAIRHPYEEKKVFFTQMQKSCRKNIEGAFGVLQARXAVLRGPAYGWDCTRLTKIITACIIMPNMIVEN

SEQ ID NO: 328275 - protein, 79 aa, Zea mays
  Clone ID: MRT4577_6244C.1.pep
GWVCLLARCERDRPSSVFLPSWSAPIPCGGKIRVGGTGRRSWCVLRLFVLWCHIVVECCSMTFLAGGGPHPPSWLAACS

SEQ ID NO: 328276 - protein, 37 aa, Zea mays
  Clone ID: MRT4577_62450C.1.pep
VNLFLLCYYSFHYAVNPLYAKLYVYCYCIIWDLLFKK

SEQ ID NO: 328277 - protein, 85 aa, Zea mays
  Clone ID: MRT4577_62451C.1.pep
IEDTKYSEAMEHLDSAKRLGRDELIAEDYGEADIAYELAPVTAQLAYAHQLHGQSHEAMPTYAHMINGQSADLSSLAVATTYLIS

SEQ ID NO: 328278 - protein, 128 aa, Zea mays
  Clone ID: MRT4577_62452C.1.pep
GQGNRQEHLQGQLGPKTKWPRKKKKKSPPRASPSYCRGATGFHHHHHPTPNPSLHKRPLVHERMRKIPSEKGPKLKRKGKLFIFFFQNPPSVGGGRPLSPKGKRTLFVHGLAGNLPPPWGCGKGATPV

SEQ ID NO: 328279 - protein, 211 aa, Zea mays
  unsure (1)..(211): unsure at all Xaa locations
  Clone ID: MRT4577_62453C.1.pep
MDSQGDVAAKAXDETTTPHLQEDGCQIKDDMTDLLMLTDKAQLXELLMLLRNYDDLMMSQVIKSHTXRIDDLKTWIDCYTRTMKLLDDSMPDRTTLPPVXGMTSLLXRDMDDXYCIYSLYTSLHNVRNCCEHLYGIDXLQLHXYNALADAVDDPGANVEGLAADASEXYEADMRQYCYNQRSGSVRENSRGYSQALKLEGIDFAEAAAEAT

SEQ ID NO: 328280 - protein, 485 aa, Zea mays
  unsure (1)..(485): unsure at all Xaa locations
  Clone ID: MRT4577_62454C.1.pep
MSGILPHFKFQIHPLPLLTIHGSRARRSIQYIPSPSHPVVSHPHPIPSPSHPIPFRRAPPMEWDGDCSEVGMNSVPDGVVQLILSMLSNARDVAACACVCRRWRDCVPYLPALFFPRNAFEPARGAADDVIGRMVASVARLRELVIYCPFSMARLPVWLAERSATLRVLELRMDAAADKVPEGGHLDCIGLTANLEELRLWGVSLTAPPAWGRMERLRVLEVVGAPLRDSAVRDAIAACPNLTDLSLLGCDCSGTVAIDLXXLERCRLDILGAGNCSLLLTASRLESLEIQGFTWITLRGGHNLRRLSIAKSTGRLHKVDTGNLPDLDHLSLRGVQWNWGAVSSVLQCASEVKHLVMKIEFCGDLDALQPFPEVDLVDFFDNHPKLRKFEIHGAMFAALCQKNSLKNLNSRFLIPCLEEVLITVRSPLNAEQKLNTLESLLKYSVKLRTMIIRISQMKNCHEAADEFFEDICKFKYMNYKKVRIE

SEQ ID NO: 328281 - protein, 150 aa, Zea mays
  unsure (1)..(150): unsure at all Xaa locations
  Clone ID: MRT4577_62455C.1.pep
LGFKIKKKGVGKQKERGKGPEGKEGGTSPGGGGQKRXKGPNRXKEGTPGKNRGGGGGPGGGPGKTRPGPAGGXLSPGGGRXAGGKQGNSXPGGKGNPRTRAHKIRPGGXRGKPGGPKKGGHPNQGRGAXPRGHAGKPDGPXPPKRTGPPP

SEQ ID NO: 328282 - protein, 170 aa, Zea mays
  unsure (1)..(170): unsure at all Xaa locations
  Clone ID: MRT4577_62456C.1.pep
TSRPRTNARRRRRIAVISHLSRPSTASDYWRPLGAPGSPEFVFLMITFTSSACSAALIIYSTSAXREREYALFAQTRQHALLAFTLXAKHMXLCCCNKMNATTPEYSKARXYDEIVTEVSSYLKKDAYNXPDKIAFVXLSGFEGDXLIERSTNLXDWYXKVQSXLEALDQ

SEQ ID NO: 328283 - protein, 137 aa, Zea mays
  Clone ID: MRT4577_62457C.1.pep
MAAEAEVGSGLAAGEKQRTVVVVAVDDSDHSYHALEWTVRHVAAPGGGVAGGAADLVVARARRVCAASSARALVEVVEGEPRTVLCSAAEKHRADLLVLGSHGYGAVKRALLGSVSDYCAHHAPCSVMIVKQPTKSK

SEQ ID NO: 328284 - protein, 52 aa, Zea mays
  Clone ID: MRT4577_62458C.1.pep
PTLFLYFTKLLFPQILNSLSIPNKKLIYLPNYLSPFIHPLFLKIKPTLPPPI

SEQ ID NO: 328285 - protein, 90 aa, Zea mays
  Clone ID: MRT4577_62459C.1.pep
HWVPRGRPGPVTSWPRATCMHCSIQSVQPNTPIQSNPSRVSVDYQSRFHKHRRRYRSSLLHRTARAYMAAEAEAGSGLAAGEKQRTVVVV

SEQ ID NO: 328286 - protein, 112 aa, Zea mays
  Clone ID: MRT4577_6245C.1.pep
IGLDTSFEDLPGDAVLMRNLYNRHLMCFQHAIPTRILVACRPLFHQVDTHIFSSPCGKMRRNIFSHNFSTMCHQGVTKWILTGEDIVLLRYSGGGGSVALFRRQSLLSRYSG

SEQ ID NO: 328287 - protein, 85 aa, Zea mays
  Clone ID: MRT4577_62460C.1.pep
IVNSSLKQQTEILNHRTVPRRRFRRRREGAATRGQARGGGRLARHGGGPSPRPQASVPAGRRSLTRAEPPYGDSATSFPTTTPLP

SEQ ID NO: 328288 - protein, 308 aa, Zea mays
  unsure (1)..(308): unsure at all Xaa locations
  Clone ID: MRT4577_62461C.1.pep
LISKPYVQNVLPKLLELGAVRIAPFSNRLAQSVPLNIQALRCLVNYHALRFAEPIRILSDELVGRMTKKSLLTGGKYVSVHLRFEEDMVAFSCCTYDGGWREKTEMDNARERSWRGKFRRHGRVINPEANRRDGKCPLTPLEVGMMLMGMGFDNTTSLYVASGKIYNSEKYMAPLRQMFPLLTTKDSLALPEELAQFKGHSSQLAALDYTVCMHSEVFVTTQGGXNFPHFLMGHRRYMFGGNAKTIKPDKRKLVLSFDDPNIRWDQFKQNMQEILQHSDMRSIALRKPNDSVYTFPMPDCMCKQDGMI

SEQ ID NO: 328289 - protein, 73 aa, Zea mays
  unsure (1)..(73): unsure at all Xaa locations
  Clone ID: MRT4577_62462C.1.pep
KXSLLRADSIYTLVIENPFIQRIVNWQWLWTNLLKAMLIIFIFKQFRVWEIGFHLIVKWLVITDILYGNSNLL

SEQ ID NO: 328290 - protein, 100 aa, Zea mays
  Clone ID: MRT4577_62463C.1.pep
RVLHLEPVILGPRLGQVHRSDALSILAVGQSWWKNDILDALRRVVAHDQDVLRPGVGQVVHSQPFVIEGVVLGLLIVEPAVLVVGRSHKNECWFFRLEPN

SEQ ID NO: 328291 - protein, 137 aa, Zea mays
  unsure (1)..(137): unsure at all Xaa locations
  Clone ID: MRT4577_62464C.1.pep
GDQASEIPPETGLPGLMSGANPPPATWNYWADSRTLFVLNMALMGLAEHRRLQDWVQPGXSMGKQNFLGLKKFLAGSGDPSYPGGPFLNPFGFGRTEKEMNDLNLKGIKTXRSPMFAIFGNLIQGFVTVVGPFKNFV

SEQ ID NO: 328292 - protein, 68 aa, Zea mays
  Clone ID: MRT4577_62465C.1.pep
MASVTVCIPVVVLCPSVSLKSSSSSVVAFLGHSSHLGRTATASSTRRSYKAVVKGEWLPGLPSPAYLD

SEQ ID NO: 328293 - protein, 381 aa, Zea mays
  unsure (1)..(381): unsure at all Xaa locations
  Clone ID: MRT4577_62466C.1.pep
MAHAKAGASLPVPNVQALAQTWHGSGEPVPFRYVRTEEIVAGEVVAGCAIPVVDLSRLLDPRSSEEELANLGSACQHWGFFQXYPYMIRHVLTRLIRHCTAHALLVXLINHGVPDEVIQDTKKDMVEFFKLPVEAKKVHAQVPGGIEGYGQAFVFSETQKLDWADMIYLMISPKESRDLRFWPTRPPSFRDSIERYSAETAKVTACLLRFMAKDLGVEPERLLEEFRGLPQSMRTTYYPPCRLAADVLGLSPHTDATGLTLLLHVNDVQGLQIRRDGKWLAVDPLDGALVVSIGDILEILSNGRYRSIEHRAIVHPDKERISAAMFHQTCPNTTVGPLQELVERDSGGARYRSMDYMDFMKGFFAAKLDGRRSHMDALRIY

SEQ ID NO: 328294 - protein, 119 aa, Zea mays
  Clone ID: MRT4577_62467C.1.pep
MFQYENAAKALSKHDPPIVLAKVDANEEKNMPLATKYEVQGFPTIKIFRDQGKNIQEYKGPREADGIVDYLKKQVGPASKEIKSPEDAVALIDDKKIYIVSFQFKVFTCFYSVITESVL

SEQ ID NO: 328295 - protein, 97 aa, Zea mays
  unsure (1)..(97): unsure at all Xaa locations
  Clone ID: MRT4577_62468C.1.pep
MAEEDRQRRWRRRRFANLRSVRWRIDLGILPASPGASVDELRRAAADSRRRYVSLRRRLMVDPHLPRRRTDHPXLVVDNPLSXNPDSSWGXRFFRRA

SEQ ID NO: 328296 - protein, 138 aa, Zea mays
  Clone ID: MRT4577_62469C.1.pep
MDRPLNVFGRPLAQCGTSPMTGFYRDGYCNTGPADGGSHTVAAVVSQKWLEYSASKGNDLRPILSQGCSWCLCVTRWKQSLDAFKRGELPKEGVPKIKLEATHQRALDVVSLDELRGFALEEGGGRSTQDPAMGGPIR

SEQ ID NO: 328297 - protein, 167 aa, Zea mays
  unsure (1)..(167): unsure at all Xaa locations
  Clone ID: MRT4577_6246C.1.pep
LKKKEAPETLEKHPGGRHRPGNRATRQDSGRTKRARKPGGPKTQAGRATDGGPREAEHQESSPPKAGGRTQHSETQAKPSKGSPERNQRAKPARRPHKRPATPKTNSNKTKXPPAQDAQQEQPGNQERHRPRQQAPTERRTRRPPRQPRRGPHTTTTPTHTRKPAER

SEQ ID NO: 328298 - protein, 112 aa, Zea mays
  Clone ID: MRT4577_62470C.1.pep
QREIERELNLATIYIQGEHEAPAYIYRCVPLYRSTQRDRYTSCNRCPLLPKGCSHACVLRPSIDTYPQLAAAGQRHRLRLQILTPRTSPRLPGPSAIPPPAKSITALAAPRL

SEQ ID NO: 328299 - protein, 138 aa, Zea mays
  Clone ID: MRT4577_62471C.1.pep
TNNGDSLSPLEGSTPKPRTWVLPTTTALMGGSIPSNPPTMKRTKPPRKLIHNSLQGGGFTGLTRRQQINQKTRLCKGHGIIRKKSFVQRKTGAPQGKVQRGLLCCRAVAVHLAGALPHKIFKVGRQAFGKLLEPQRGP

SEQ ID NO: 328300 - protein, 54 aa, Zea mays
  Clone ID: MRT4577_62472C.1.pep
DRPASSADFDVRAVTRTPCGRYLISTGHLTLGKKKVVMNWFILFTRGSVHQFLP

SEQ ID NO: 328301 - protein, 65 aa, Zea mays
  Clone ID: MRT4577_62473C.1.pep
ITPNGVYKTEPVILLQMGHDKSYICLSKKRAGETAIWFTTPNITLGPPWVWKNCLENRPPRGGGG

SEQ ID NO: 328302 - protein, 88 aa, Zea mays
  Clone ID: MRT4577_62474C.1.pep
MRVALCKHIAKLQNECGLSVKAAVQKGLQYMRDRVGGTAGVVTVDSEGKKVILHSTPHMVWACADSESKQITYGISQDDLRIAPFDIN

SEQ ID NO: 328303 - protein, 183 aa, Zea mays
  Clone ID: MRT4577_62475C.1.pep
GGTPRPSGRRRGRTRCCRHVFAVADASYRAMVNDSRSQSILVSGESGAGKPEPTKLIMQYLTFVGGRAALDDRTVEQQVLESNPLLEAFGNAKPVRNDNSSRFGKFVEIQFDSSGRISGAAIRTYLLERSRVVQITDPERNFHCFYQLCASGKDAELYKLGHITQFSLLNQTHTHDLEGTDST

SEQ ID NO: 328304 - protein, 215 aa, Zea mays
  Clone ID: MRT4577_62476C.1.pep
MSPFGAVITPETLKYMSKYQGREITQVDCAREAMRLIHAEDKNLKAEDSAWELKKKFGNGVSTMVLVYNATGASLSLVDDGKDWMGSVYSSPIPDTFHNGQWIAFLHVKPGSLAQGSQAARVFRGRDVDGRTRDFVVAWYIPWDNIPTRAYTEIGSENYFKTRWSSVKTSLGHSRRVTRAKDENCASTVSIGGYTTAFCIAVLQHQFQPLPEERE

SEQ ID NO: 328305 - protein, 132 aa, Zea mays
  Clone ID: MRT4577_62477C.1.pep
FSLRNNGYLKHEKSTHLTLLNSSVNTLNGCGVCMTFSLSLYGSSGCIGNLSRSQSLPDSKPKRSLRKKYQDSSTGNRRRWQSGLEAMEKNVSISVSLEGNISSIPNSIANDSKTSMENRVDTSFINHGTISF

SEQ ID NO: 328306 - protein, 157 aa, Zea mays
  Clone ID: MRT4577_62478C.1.pep
NSARGRPPPARHTTTGQAEAATAAPPRSPPARATPPGVTSTSPQLHSSSPSVPCEPEPDHWSTSIAIGPPPHGHRPSPASSSSPARRLSQPRLPTCVPLVSDPKFRVNPNAIPAIHQSRNKRTETQKRWNLQPVPKGRSPTMRSHGRLRAGPSTYSR

SEQ ID NO: 328307 - protein, 101 aa, Zea mays
  unsure (1)..(101): unsure at all Xaa locations
  Clone ID: MRT4577_62479C.1.pep
QVPKSIVAPGLDPRAIVQVSYAIGVSEPLTVFVHTSGTGAIPDKEILKIVKXNFDFRTGMIIINLALKKGGNGRYLKTAAYGHFGRGDPDFTWXVVKPLKA

SEQ ID NO: 328308 - protein, 134 aa, Zea mays
  Clone ID: MRT4577_6247C.1.pep
PLLAPFGGYSVFSVPVKGFFSPPRVCLFPRPVFPKEGSQPSPPNCWTRPRGASFSLGPRLLARPRAKPRFLPWGFSGFPIPGPFSQFVFGPPGGGAGFHLNGLFVPLHCLGVLPQWGPGFFLFPLPGFWVGRVP

SEQ ID NO: 328309 - protein, 130 aa, Zea mays
  unsure (1)..(130): unsure at all Xaa locations
  Clone ID: MRT4577_62480C.1.pep
PCACCGWVFPSRLEHRGQGFGPLVARPVWLPPWCLVGLPRCRCSRAFRLVVSLGCGIFGFVFWGCLVVRWCLCVVSACALAQWVCFALRLCVVGCFVCVAPPGLCARSSSFYVLXPGVXWVVFYHIGLDV

SEQ ID NO: 328310 - protein, 66 aa, Zea mays
  Clone ID: MRT4577_62481C.1.pep
NTKHFGCLGFLCFGQNKKNPNSYRLELKPDDNTINKTFKIPNCSNPKGLLEENGQISKQAQNPSII

SEQ ID NO: 328311 - protein, 211 aa, Zea mays
  Clone ID: MRT4577_62482C.1.pep
MSCSPPPPILRLHPPSSISSFSSPRRPHLSPRTCPWRLAAAHEMPWPHVLTVAGSDSSAGAGIQADVKACAALGAYCSSVITAVTAQNTAGVQGVHLVPEELIREQLQSVLSDMSVDVVKTGMLPSAGIIKILCESLQKFSVKALVVDPVMVSTSGDSLSDPSTLTYYRDELFAMADIVTPNVKEASKLLGGVSLHTIADMRDAAESIYKF

SEQ ID NO: 328312 - protein, 117 aa, Zea mays
  unsure (1)..(117): unsure at all Xaa locations
  Clone ID: MRT4577_62483C.1.pep
QDRDCIYLQGSTCTFSESILGSCGFHTGLFTSPHLMDVRERFQLDGENFXKYSWWCXEQVEAYFRFLALLAFKIFSAEQVDVAILEVGLGGKFDATNVVVSSRECPVVSKYKASVRT

SEQ ID NO: 328313 - protein, 115 aa, Zea mays
  Clone ID: MRT4577_62484C.1.pep
QRRVLFFFFFFFFFFTFFFFFVFLFFFFFFFLRRKEVPRVFKAKVESTRVWIFWGGGGNYMWKKKDPFTEWVKKRSLAEGQNIRRYLLVPWHITKPSTLPCETVWVWTKPTLAIF

SEQ ID NO: 328314 - protein, 182 aa, Zea mays
  unsure (1)..(182): unsure at all Xaa locations
  Clone ID: MRT4577_62485C.1.pep
TLLIEAAKGTSIDQHYEARTRGRTRGRTRGRTRGCTFTESILRSCGFHTGLFTSPHLMDVRGRFQLDGVNISEEKFLKYFWWCWNKLKEKTDDDIPMPAYFRFLALLAFKIFSAEQVDVAVLEVGLRGKFDATNVVKXPVVCGISSLGYDHMEILGNTLGEIAREKAGIFKKGVPAYTAPQP

SEQ ID NO: 328315 - protein, 60 aa, Zea mays
  Clone ID: MRT4577_62486C.1.pep
CRFWECLIEFYTSSRKRKPDQVIISRDDVSESQFNQVLNIELQQIIDGDCHRSQKTTVSI

SEQ ID NO: 328316 - protein, 90 aa, Zea mays
  Clone ID: MRT4577_62487C.1.pep
SWMLKDVDGFGTQQQEEIPPTTLHIPIAFSPKTAHVAPHNCSLQLLDVEHCSPPKRARPPWLAGMVEARRANNIGTTRTTRVFLEHAMKL

SEQ ID NO: 328317 - protein, 97 aa, Zea mays
  unsure (1)..(97): unsure at all Xaa locations
  Clone ID: MRT4577_62488C.1.pep
DAWGTLCEDNDPLDVLVLLQQPVIRSSLLPARAFRLITIFHRGXXDDEMIIACSADPEYHHHHNHHLLPSHHLLEVKTPFFDYYKKDDYNVVAVAAL

SEQ ID NO: 328318 - protein, 56 aa, Zea mays
  Clone ID: MRT4577_62489C.1.pep
GFLKKFNRSTVRRQRLEDTRLFPPSPGSVHWPPHSTPASCLGKEALRSVQVQCIGP

SEQ ID NO: 328319 - protein, 67 aa, Zea mays
  Clone ID: MRT4577_6248C.1.pep
ENSSGAVFITTYHNRSGHHLIEFLMVKWGLKCLKLLDGFSFLPPFKAALLQGNIQLVEIALAKEKHK

SEQ ID NO: 328320 - protein, 86 aa, Zea mays
  Clone ID: MRT4577_62490C.1.pep
AKKEADADADADASARAAECLSVSGVVERDYFSGSLIESGKKRGGDDALLLKRSSSCNADRSWALSVFQLNSITHLHSYVCCPVCN

SEQ ID NO: 328321 - protein, 51 aa, Zea mays
  Clone ID: MRT4577_62491C.1.pep
VHHSSVSVRRHRSSGLVSPQEGAQCVDAKSAVRRGLDGVPRRWVEVVKLYR

SEQ ID NO: 328322 - protein, 36 aa, Zea mays
  Clone ID: MRT4577_62492C.1.pep
SDHITSTNIPRGPPNLGRSKPRPLPSKVQTYLLSFS

SEQ ID NO: 328323 - protein, 225 aa, Zea mays
  unsure (1)..(225): unsure at all Xaa locations
  Clone ID: MRT4577_62493C.1.pep
MAAEEGEKAKSGGGGQQMTVVRGLDVARYMGRWYEIASFPSFFQPRDGRDTRATYRLLEDGATVHVLNETWSKGKRDYIEGTAYKADPGSDEAKLKVKFYLPPFLPIVPVVGDYWVLYVDDDYQYALVGEPRRKNLWXLCKPINCQLFHLQAACVLARSCMYVQILCRKTSIDEDVYNQLVERAKEEGYDVSKLHRTPQDDPPPESDAAPTDTKGVWWFKSLFGK

SEQ ID NO: 328324 - protein, 68 aa, Zea mays
  unsure (1)..(68): unsure at all Xaa locations
  Clone ID: MRT4577_62494C.1.pep
HDVSRHIFSPRGDXPTAVTGSVSWLKAGLHGFHVHALGDTTNGCMSTGPHYNPASXEHGAXEDENAMW

SEQ ID NO: 328325 - protein, 112 aa, Zea mays
  unsure (1)..(112): unsure at all Xaa locations
  Clone ID: MRT4577_62495C.1.pep
TPLLLLRTWLNDRHIGINLHRHPVSMACGYFPEYIAGLLAXCRCDEGGIITSVDRVTYLSIIETPALVAVAFCAMVSCESCRYMNDRMRRYFRTAHVFALVRDRVVGFVDGE

SEQ ID NO: 328326 - protein, 56 aa, Zea mays
  Clone ID: MRT4577_62496C.1.pep
IIGHFYRSRVGDAITEFNTNCPQKLQQKNITLIGSTNTTLQRLPSDSVSWLPAGNS

SEQ ID NO: 328327 - protein, 50 aa, Zea mays
  unsure (1)..(50): unsure at all Xaa locations
  Clone ID: MRT4577_62497C.1.pep
MVSGFGRXAKRIVEDARHLMLGRLSSIIAKELLIGQKVVSVRLEKICMSD

SEQ ID NO: 328328 - protein, 94 aa, Zea mays
  unsure (1)..(94): unsure at all Xaa locations
  Clone ID: MRT4577_62498C.1.pep
FTITKSCFACTQIXILVSRAYMTNLGLATDRNMPCTAWPIRAEQYTLSSYREREISGRRKVITAITSQNGMENWISCKLLLTRGGQHLPIFHES

SEQ ID NO: 328329 - protein, 177 aa, Zea mays
  Clone ID: MRT4577_62499C.1.pep
CPRSQRWTARRSEGAAQRLPAEAGGTSLGTQWAGSGWEDSSALMSDNLSGMKRPRDSSEPGQSGLTHQFSVPKTSSEMATIEKFLQFQDAVPWKIRARRGCATHPRSIAERGRRTKISERIRKLQELVPNMDKQTNTSDMLDLAVDYIKDLQKQVKVLKESQDNCTCSASKNQQHSC

SEQ ID NO: 328330 - protein, 223 aa, Zea mays
  unsure (1)..(223): unsure at all Xaa locations
  Clone ID: MRT4577_6249C.1.pep
RPPFFFFFWLLNTAYLTLIPKKTNAMTAGDYRPISLIHSFAKLTTNLLANRLAPLLNKLVEANQSAXFVRGRSIHYNYMLLQQSIKSLHRKKVASLXLKSDITKAFDSVSWAFLLEVLSHLGFGNRWRDLISSLLATSSTQVLINGFPIDQIRHHRGLRQGGALSPMLFVLLMDVLSSLFKVAEEELLYNLEDAIVKTRLSLSRRSPIESNPTQLRTAPLATR

SEQ ID NO: 328331 - protein, 109 aa, Zea mays
  unsure (1)..(109): unsure at all Xaa locations
  Clone ID: MRT4577_624C.1.pep
GACYTAFEDDEEKYSSENDCRVDVAGPDLCPPEGKLPDAGTSSPADHLMEVFYRTGLNDKESVALPGTHTPGRPRPELIGXGFPXTNYTTSGSGAPGGHSWTDQRLRIA

SEQ ID NO: 328332 - protein, 79 aa, Zea mays
  Clone ID: MRT4577_62500C.1.pep
GRFLESLVVHVWHSSGTGGSGDGVRGTAGISDPYGWVYIRSASRCHRGHQLLVIWASSVIVKAGIGVTVILGAGRNRTT

SEQ ID NO: 328333 - protein, 110 aa, Zea mays
  unsure (1)..(110): unsure at all Xaa locations
  Clone ID: MRT4577_62501C.1.pep
GADACADANDKQVRHITATPRPRGGXGDKGEPPPPHPRPPHHGTPPPPGPADEAPEPTTGQTGRTRQSTRPPRPPKRPRTRPGRAPETTDGTPPGRPRTRQRPPGTRPRN

SEQ ID NO: 328334 - protein, 36 aa, Zea mays
  Clone ID: MRT4577_62502C.1.pep
EKYTLYLYGAPTGKSPMTIFTKLFYQNKNFCVALLN

SEQ ID NO: 328335 - protein, 105 aa, Zea mays
  Clone ID: MRT4577_62503C.1.pep
TPLQQDFCLLGPTSVGRFLQLFQGPAVKGNQLFPVSLGKKKTPLGPNSQTPFSRGLADFFIQLAPPVFPLENGQLGPPHLFWFAPFFGPPGFSLFSSGFFFFWNF

SEQ ID NO: 328336 - protein, 76 aa, Zea mays
  Clone ID: MRT4577_62504C.1.pep
AQIRLRSTQFVNSQKPQWLFTRHLEHGYHPRLLYPATLNSQEQIHIPLEFCSFCVNRAAAVYAVESHDLRTIHGSC

SEQ ID NO: 328337 - protein, 35 aa, Zea mays
  Clone ID: MRT4577_62505C.1.pep
PIFFLLHLCGGNLTKVLFYFLFRSNNIVSPLTKVY

SEQ ID NO: 328338 - protein, 119 aa, Zea mays
  unsure (1)..(119): unsure at all Xaa locations
  Clone ID: MRT4577_62506C.1.pep
RGGKGFPKKVVKKKKSLSVFLPKKGAPPLLVXTPRVFGTKGNPQALKKVPFFFKTLFPGKFLGGEPLLGWVNPPFPPGKDSPVFKKAHPFFEGVQNPEFFPREGDKKKGEGVFLFRGSL

SEQ ID NO: 328339 - protein, 101 aa, Zea mays
  unsure (1)..(101): unsure at all Xaa locations
  Clone ID: MRT4577_62507C.1.pep
MRPAALFLAAVLASVVLLLAXPAAPRATXSALAPCDVTQLTPCASAFAGKASPTAACCAKLLSHGPGCLCRYKDDASLKRLVDARHKRRVFTACKVPVPSC

SEQ ID NO: 328340 - protein, 98 aa, Zea mays
  Clone ID: MRT4577_62508C.1.pep
FAQHITSIWNRYAFSGKQNITCLFHIHNKNTQVHFFSIVSPNWEKIRKGTSHRLCFIEHHVYVHAYMTMFYRLVYIVYDHVMLHGRYVNTKRGCNCEL

SEQ ID NO: 328341 - protein, 67 aa, Zea mays
  Clone ID: MRT4577_62509C.1.pep
LHSQIIKCKVIRFHVCIYEYSVLYISTTMKNVRGRLPPRSALPRPLFVRPQQKKIATRLRDRTLDDL

SEQ ID NO: 328342 - protein, 63 aa, Zea mays
  Clone ID: MRT4577_6250C.1.pep
LELFKLIFKGNVTTVPQNVIHHVLQHGFLDHRPQADTLVEAVYNRTPWRAPSTGRARRTGPTR

SEQ ID NO: 328343 - protein, 107 aa, Zea mays
  Clone ID: MRT4577_62510C.1.pep
AQHSTVPAMADKMPRHATRPGRKGCAGNHTITTHRCYDSIASFLAPHIKPAVATGKPNPTTLPDPTRHASTDGTLTTLASPTLLRPITAHTLPAVNGSAHHITAPPP

SEQ ID NO: 328344 - protein, 107 aa, Zea mays
  Clone ID: MRT4577_62511C.1.pep
YVENFSQFAVASPFGVHISAMQHNMVIYNVNQPVEHGHICVDIYMVFNKTWAMACTFSYFFPVRGHDGKKMNLCIFVVNMEKACYILLTGESIPVPDRSYMLCKSAC

SEQ ID NO: 328345 - protein, 361 aa, Zea mays
  unsure (1)..(361): unsure at all Xaa locations
  Clone ID: MRT4577_62512C.1.pep
MADESWRVPTPVQELAAGVVEPPTQFVLQEQDRPGSGTLLFATDMPEPIPVVDLIMQCEPTNSIVCIVQVTKHGIEASLMDDVMAASRDFFYQPLEAKQEYSNLIGGKRFQMEGYGNDMVKSKDQILDWQDRLQLRVEPQDERNLAYWPKHPDSFRYLTRLLVSSLKYPLIXDLLEKYASKTKIVRNKVLRAMGKTLELGEDYFISQIGDRASAIARFNYYPPCPRPDLVFGIKPHSDGGAVTILLVDKDVGGLQVQKDGVWYTVPSMPHTLLVNLGDSMEIMNNGIFKSPVHRVVTNAEKERLSLAMFYGVEGQRVLEPALGLLGEERPARYRKIMASDYIIGLRQGIAEGQRFIETLKI

SEQ ID NO: 328346 - protein, 36 aa, Zea mays
  Clone ID: MRT4577_62513C.1.pep
ITPCERPTHVTSPTVVESTTPETLRTDQDLNQWRAA

SEQ ID NO: 328347 - protein, 58 aa, Zea mays
  Clone ID: MRT4577_62514C.1.pep
GVPTISLYALCFFSHTLPRFNGKTNVTLSQQATTDYHIPVSTELYESWHWANIATLTL

SEQ ID NO: 328348 - protein, 248 aa, Zea mays
  unsure (1)..(248): unsure at all Xaa locations
  Clone ID: MRT4577_62515C.1.pep
MADESWRVPTPVQELAAGVVEPPTQFVLQEQDRPGSGTLLFATDMPEPIPVVDLSRLAAADEASKLRSALETWGLFLVTKHGIEASLMDDVMAASRDFFYQPLEAKQEYSNLIGGKRFQMEGYGNDMVKSKDQILDWQDRLQLRVEPQDERNLAYWPKHPDSFRDLLEKYASKTKIVRNKVLRAMGKTLELGEDYFISQIGDRASAIARFNYYPPCPRXPDLVFGIKPHSDXXGAVTILLVDKDGGGL

SEQ ID NO: 328349 - protein, 69 aa, Zea mays
  Clone ID: MRT4577_62516C.1.pep
SKLGITKKHPTDGARGRLKSLDVESMASPPGKLVERDPRGVAPAQGHVMSFDNVPYLVMDILLFAAARW

SEQ ID NO: 328350 - protein, 63 aa, Zea mays
  Clone ID: MRT4577_62517C.1.pep
FITATADSPKHIETTLTRAKFEELYSDHLDRLRTPVDNTLRDAKLQFKDIDEVILVGSSTRIP

SEQ ID NO: 328351 - protein, 78 aa, Zea mays
  Clone ID: MRT4577_62518C.1.pep
PAGQNKNSSYFVEWIPNNVKSSVCDIPPVGLSMSSTFVGNSTSIQEMFRRVSEQFTAMFRRKAFLHWYTSEDGEEEHA

SEQ ID NO: 328352 - protein, 110 aa, Zea mays
  Clone ID: MRT4577_62519C.1.pep
KNSSYFVEWIPNNVKSSVCDIPPVGLSMSSTFVGNSTSIQEMFRRVSEQFTAMFRRKAFLHWYTSEGMDEMEFTEAESNMNDLVAEYQQYQDATAEEYDEEEQDGEEEHA

SEQ ID NO: 328353 - protein, 235 aa, Zea mays
  unsure (1)..(235): unsure at all Xaa locations
  Clone ID: MRT4577_6251C.1.pep
IGTSFLESKXTSAESHTGELIFEYVDSCIEKVGVEXVVQIVTDNASNNMAAXKLLSVKRPNIFWSSCATHTLNLMLEGIGKLKRFKSTLDRAKALTIFIYAHHNTLSLMRKYTKKRDIVRPGVTRFASSFLTLQSLYEKKNELRAMSQSDEWEKISHVKKSPKGVQATATLTKPTFWGGVALCLRVFEPLVKVLCLVDGDVKPSMAFLYGDILKAKKEILTGLGNVDKAATQNLY

SEQ ID NO: 328354 - protein, 445 aa, Zea mays
  Clone ID: MRT4577_62520C.1.pep
MREILHIQGGQCGNQIGAKFWEVICGEHGVDSTGCYSGVSPQQLERINVYYNEAGGGRYVPRAVLMDLEPGTMESIRAGPFGGIFRPDNFVYGQSGAGNNWAKGHYTEGAELIDSVLDVVRKEAENCDCLQGFQVCHSLGGGTGSGMGTLLISKIREEYPDRMMLTFSVFPSPKVSDTVVEPYNATLSVHQLVENADECMVLDNEALYDICFRTLKLTNPSFGDLNHLISATMSGVTCCLRFPGQLNSDLRKLAVNLIPFPRLHFFMVGFAPLTSRGSQQYRALTVPELTQQMWDAKNMMCAADPRHGRYLTASAMFRGKMSTKEVDEQMINVQNKNSSYFVEWIPNNVKSSVCDIPPVGLSMSSTFVGNSTSIQEMFRRVSEQFTAMFRRKAFLHWYTSEGMDEMEFTEAESNMNDLVAEYQQYQDATAEEYDEEEQDGEEEHA

SEQ ID NO: 328355 - protein, 488 aa, Zea mays
  Clone ID: MRT4577_62521C.1.pep
MAMLCRTTRVLRKVCELGPAAAARRLSAAEAFAACEGSLLRPLPGLDLPPCLPDNLSRSPTRITTLPNGLRVATEDVPGPSACIGFFVDSGSIYESGETTGVSHLLERMAFKDTKHRSHLNIVSELELAGGNVGASASREQMVYSYDTLKGYMPEALEILIDCMRNPLFLQEEVERQLVLAREEVKELQKNPEKFLHEQLNLVGYSGALANPLIAPEDALARINDKIIQKFYHENFTADRVVLAASGVDHEHLLGYADLLLKDWHKGTPMEKPKSTYVGGDSRHRADSDMTHVALAFEVPGGWLQERDATIMTVIQTLMGGGGSFSSGGPGKGMHSRLYRRVLNKYHLVDSFSAFNNVYDSSGLFGIYLTTPSDFVAKAVDIAVSELIAVATPGEVTEVELQRAKNSTISSVLMNLESRVVVAEDIGRQLLSYGCRKPIDYFLQCMEEITLDDVATFARKMLATQPTMASWGNVDKVPPYEFICKRLQ

SEQ ID NO: 328356 - protein, 418 aa, Zea mays
  unsure (1)..(418): unsure at all Xaa locations
  Clone ID: MRT4577_62522C.1.pep
SGFQVCHSLGGGTGSGMGTLLISKIREEYPDRMMLTFSVFPSPKVSDTVVEPYNATLSVHQLVENADECMVLDNEALYDICFRTLKLTTPSXVDLSSKFNFPVFKMCYLRYTLSEDLYSYYGFATIYFCSIISLSFYLFXVSRLDTHGCXIIKNKLAFDLYXFQTMNLLLSVYRNHVVIXFLKFLNTFDSLFLNXGDLNHLISATMSGVTCCLCFLGQLNSDLHKLAVNLISFPRLNFFMIGFAPLTSCGSQQYRVLTVSELTQQMWDAKNMMCVADPRHGRCLTASAMFRGKMSTKEVDEQMINVQNKNSSYFVEWIPNNVKSSVCDIPPVGLPMASTFVGNSTSIQEMFRRVSEQFTAMFRRKAFLHWYTSEGMDEMEFTEAESNMNDLVAEYQQYQDATAEEYEEEEHDGEEEHA

SEQ ID NO: 328357 - protein, 122 aa, Zea mays
  unsure (1)..(122): unsure at all Xaa locations
  Clone ID: MRT4577_62523C.1.pep
NDSTNHVWSFLDNNGAYPGVDLLIGLAVSSEDDEDGGCKKKPHVNHRKFNAEPWTDGHATYYCWRDGLTDTTDVRACGYKXAGXDYDSLTATVGPXLYTNGTCCSACYELKVPKGTEVETVT

SEQ ID NO: 328358 - protein, 447 aa, Zea mays
  Clone ID: MRT4577_62524C.1.pep
MREILHIQGGQCGNQIGAKFWEVICGEHCVDSTGRYSGTSSQQLELERINVYYNEAGGGRYVPRAVLMDLEPGTMESIRAGPFGGIFRPDNFVYGQSGAGNNWAKGHYTEGAELIDSVLDVVRKEAENCDCLQGFQVCHSLGGGTGSGMGTLLISKIREEYPDRMMLTFSVFPSPKVSDTVVEPYNATLSVHQLVENADECMVLDNEALYDICFRTLKLTNPSFGDLNHLISATMSGVTCCLRFPGQLNSDLRKLAVNLIPFPRLHFFMVGFAPLTSRGSQQYRALTVPELTQQMWDAKNMMCAADPRHGRYLTASAMFRGKMSTKEVDEQMINVQNKNSSYFVEWIPNNVKSSVCDIPPVGLPMASTFVGNSTSIQEMFRRVSEQFTAMFRRKAFLHWYTSEGMDEMEFTEAESNMNDLVAEYQQYQDATAEEYEEEEHDGEEEHA

SEQ ID NO: 328359 - protein, 98 aa, Zea mays
  unsure (1)..(98): unsure at all Xaa locations
  Clone ID: MRT4577_62525C.1.pep
KVRFFYPKDSYEEILLKKEISCKAKNYPDRFKKYXVLNQPLSVREAGLGFVPKXRIHAQCIARAALLEALRCGPPPMNKAMSEHVNGLGXTKEMQFQL

SEQ ID NO: 328360 - protein, 447 aa, Zea mays
  Clone ID: MRT4577_62526C.1.pep
MREILHIQGGQCGNQIGAKFWEVICGEHCVDSTGRYSGTSSQQLELERINVYYNEAGGGRYVPRAVLMDLEPGTMESIRAGPFGGIFRPDNFVYGQSGAGNNWAKGHYTEGAELIDSVLDVVRKEAENCDCLQGFQVCHSLGGGTGSGMGTLLISKIREEYPDRMMLTFSVFPSPKVSDTVVEPYNATLSVHQLVENADECMVLDNEALYDICFRTLKLTNPSFGDLNHLISATMSGVTCCLRFPGQLNSDLRKLAVNLIPFPRLHFFMVGFAPLTSRGSQQYRALTVPELTQQMWDAKNMMCAADPRHGRYLTASAMFRGKMSTKEVDEQMINVQNKNSSYFVEWIPNNVKSSVCDIPPVGLSMSSTFVGNSTSIQEMFRRVSEQFTAMFRRKAFLHWYTSEGMDEMEFTEAESNMNDLVAEYQQYQDATAEEYDEEEQDGEEEHA

SEQ ID NO: 328361 - protein, 90 aa, Zea mays
  Clone ID: MRT4577_62527C.1.pep
FGSSPPRTFSRTHSLPTPNDASPDPGGRTHSSADEDYEHAHRPTPRVELSAELNRQPSGCRPKCSDITSTSEDRGDQQLGGASASPYPGH

SEQ ID NO: 328362 - protein, 276 aa, Zea mays
  unsure (1)..(276): unsure at all Xaa locations
  Clone ID: MRT4577_62528C.1.pep
MREILHIQGGQCGNQIGAKFWEVICGEHCVDSTGRYSGTSSQQLELERINVYYNEAGGGRYVPRAVLMDLEPGTMESIRAGPFGGIFRPDNFVYGQSGAGNNWAKGHYTEGAELIDSVLDVVRKEAENCDCLQGFQVCHSLGGGTGSGMGTLLISKIREEYPDRMMLTFSVFPSPKVSDTVVEPYNATLSVHQLVENADECMVLDNEALYDICFRTLKLTNPSFGDLNHLISATMSGVTCCLRFPGQLNSDLPQLAVNLIPFPRXTSFMVGFAPLT

SEQ ID NO: 328363 - protein, 65 aa, Zea mays
  Clone ID: MRT4577_62529C.1.pep
AHYSAKVIYDVRKDMLFYDYGHRDRLSGHHVWHSKTQLPEIHYGSSKPDSAYAEPRGAEQPAEQR

SEQ ID NO: 328364 - protein, 130 aa, Zea mays
  unsure (1)..(130): unsure at all Xaa locations
  Clone ID: MRT4577_6252C.1.pep
AHQATHTTNILTTIATTMCSIISLLALLATPTNTSTNPQILLHPTLIITHILPPVTSIATXHPSEQAYMLQHTIPLSLLQHPIHQLLQQFLPHLTIHIILPQHQQQQLPQLIHLLILKPVVYFQHYLLQY

SEQ ID NO: 328365 - protein, 61 aa, Zea mays
  Clone ID: MRT4577_62530C.1.pep
MVPWEGYVSDETMGTFSPIVLYWLYAGGYQLILHRRPLERYRLHTRDEEEEKNLGSLSTVV

SEQ ID NO: 328366 - protein, 149 aa, Zea mays
  Clone ID: MRT4577_62531C.1.pep
PNYLFWDRAGGQGGAGGGPGGRRGYKRGGGEGQARTERKTTPGKGREGPHPQAKRPRGGANSTHNKPKKKGDWVIATKRNSRTKAWTAGGFGKKGPEAAGAGAKPRVTGEKESGQREQPRVDRPKHKFKECSHPKKKRQHLKKRGLSSP

SEQ ID NO: 328367 - protein, 135 aa, Zea mays
  unsure (1)..(135): unsure at all Xaa locations
  Clone ID: MRT4577_62532C.1.pep
GALHARAASSSDSSAVDGGGPQARLHRVPHARLWWTEELHRQFVKAVECLGXARTISXWPLRKQERLPALSKXRGGFVKSSTGRTVCLRVNPADTVHTVKTKIQEQQYLVYDGVQXEDDRTLADYGMEHKXVLDL

SEQ ID NO: 328368 - protein, 140 aa, Zea mays
  unsure (1)..(140): unsure at all Xaa locations
  Clone ID: MRT4577_62533C.1.pep
LRPQPSSARHPGRLRLPRHRQSLAALSCSLASPARCSPVAPAPWGNRVPWLTRRRRPTVGLAPSPLACSAAALLARRPASLAHSLFSVSVTLLTEEQRIRNGYAGHKEASVFEPPTTPTPSLSERRPKIPNAAAAASSXP

SEQ ID NO: 328369 - protein, 152 aa, Zea mays
  unsure (1)..(152): unsure at all Xaa locations
  Clone ID: MRT4577_62534C.1.pep
MKIFVKSSTGRTVCLRVNPADTVHTVKTKIQEQRYLVYDGVQLEDDRTLADYGIEHKSVLDLKEKMQIFIVETLAGTTITLEGERSETIDNIKERIKESEGLXPKGQEGLIFGHKEVXDNRTLWDXHISEGSTLLLGLRHMLLRGTMHISIY

SEQ ID NO: 328370 - protein, 229 aa, Zea mays
  Clone ID: MRT4577_62535C.1.pep
MGKEKGHVNVVVIGHVDSGKSTTTGHLIYKCGGIDKRTIEKFEKEAAELGKGSFKYAWVLDKLKAERERGITIDIALWKFETPKYMITVIDAPGHRDFIKNMITGTSQADCAILIIAAGTGEFEAGISKDGQTREHALLAFTLGVRQLIVAINKMDTAKYSEARYEEIIRETSNFIKKVGFNPKNVPFVPISGWHGDNVLEPTTNMGWYKGWKKDTKGGEVKGITLLDA

SEQ ID NO: 328371 - protein, 130 aa, Zea mays
  unsure (1)..(130): unsure at all Xaa locations
  Clone ID: MRT4577_62536C.1.pep
KKKKKTPSLSPSSNKSFPRPPSPSPSPEGNFHHHRRTAPTLLPSRAMAQTVGLKVGMSCEGWVEAVKRVLGKMEGVKSYNENIMEQKVTGKGNGTPDAVLXIVSKTGKKTSFWEAEAVTSESATPAGATA

SEQ ID NO: 328372 - protein, 137 aa, Zea mays
  unsure (1)..(137): unsure at all Xaa locations
  Clone ID: MRT4577_62537C.1.pep
VTPFVVLSCVVAGSGGVLFGYDLGISGGLTSMDCFLKRFFPXVYRQKQDSKVSHYCEFNSELLTVFTSSLYIAGLVATLAAATITRRYGRRTSMLIGGSVFIAGSVFGGAATNIPMLLMNRXLLGIGLGFTNQVTYT

SEQ ID NO: 328373 - protein, 41 aa, Zea mays
  Clone ID: MRT4577_62538C.1.pep
MCILVTILCLAPKALKHLVSVLGCTITWSCLPIIPVFYFGA

SEQ ID NO: 328374 - protein, 89 aa, Zea mays
  Clone ID: MRT4577_62539C.1.pep
KSSIKLASTPSSFMHPIPQVGWQKDGGFAAAGGKGMPRSQRIGGKLQFAMPEVPQIGSSQQRLRCGVQAGREAGVFLSTKSSALGVLDG

SEQ ID NO: 328375 - protein, 95 aa, Zea mays
  unsure (1)..(95): unsure at all Xaa locations
  Clone ID: MRT4577_6253C.1.pep
MQRLGDFRLPPFFNYPPYFTLQPVRETRKKQVQLWKDLILDYCXSQKIHTIXXEEDLPLFSNEXIERSLKYXKKEDELENIXKKRRTKRMNKRKK

SEQ ID NO: 328376 - protein, 57 aa, Zea mays
  Clone ID: MRT4577_62541C.1.pep
ADGQPLLTGAAAMVHVNIYHSYCNTLYMPWRAPDKERLDYYMYRVYEYFLKCKRKSF

SEQ ID NO: 328377 - protein, 135 aa, Zea mays
  unsure (1)..(135): unsure at all Xaa locations
  Clone ID: MRT4577_62542C.1.pep
MGGYNYVSQLWRRKQSHVMRFVQRVRCWEYRQYTSIVRLTRATRPDRXRRLGYKDKQGYVAYRVCVKRGGRKRAVTKDIVYVKXPRYQIITQLKFLRNYTTVTDYRAGLQLGVLRDLNSYXVNDDSTYKYFEIIL

SEQ ID NO: 328378 - protein, 49 aa, Zea mays
  Clone ID: MRT4577_62543C.1.pep
WRHHQSKFKKLLVLVCARSGYDNFWYSIFRTAAQHFQIHLIWSVWGAMT

SEQ ID NO: 328379 - protein, 60 aa, Zea mays
  Clone ID: MRT4577_62544C.1.pep
NIFLFFFFFPPPFLGGENEIPPFHNPCNFWPMGPTQGKLFKQYMIRGTSPPTTIRVGPRY

SEQ ID NO: 328380 - protein, 51 aa, Zea mays
  Clone ID: MRT4577_62545C.1.pep
QASAQKQGDKASKKESTSSKKAKTDGREGEEAVKSEVEDDDEQDGNEDENE

SEQ ID NO: 328381 - protein, 134 aa, Zea mays
  Clone ID: MRT4577_62546C.1.pep
EFPGESRVQTEEHRQVLPKWSFPVYLGGDPVVWLDRCMEYFTIYSVPKLMWVSAASMHSDPNVAQWWRCHKLCHGMSIWQGFVSAATQKYGVDAYSKALRRLMNLRQTRNIKCVYYSSYLFEIINVMLSVRANR

SEQ ID NO: 328382 - protein, 40 aa, Zea mays
  Clone ID: MRT4577_62547C.1.pep
LLPMLLNHSSYQFYSAPFVSELLSRITHCVMITKLFLGDH

SEQ ID NO: 328383 - protein, 108 aa, Zea mays
  Clone ID: MRT4577_62548C.1.pep
IPVSPRHFYPKLWGPYVKKFNPEGFFYVWPQQHLYLPFGAGARTSLGQGFSMVELKNLIFFIVSKFVFKLSPPYQHFPTLKLIVEPKLGVAPPLTKGQRVCFKRGPPI

SEQ ID NO: 328384 - protein, 69 aa, Zea mays
  unsure (1)..(69): unsure at all Xaa locations
  Clone ID: MRT4577_62549C.1.pep
GILTELPACRPAHDSFDFPVLHLRRRTPRVGPLRQHTGLLNSRFCQLHISLLXTVLCLLKQKLAMRGYV

SEQ ID NO: 328385 - protein, 178 aa, Zea mays
  unsure (1)..(178): unsure at all Xaa locations
  Clone ID: MRT4577_6254C.1.pep
MQRLAYITLPPFFXYSSYFTLHTVRETRXEKQVQLWKDLILDYCRSQKIHTISLEEDFPLFSNAKIERSLSYEAKEVFLAALVSEGRAEWMDKGHKKCLILWLRIQDWANFILNFVKDNGLEVMTIEEIRSGIDTRGTELEGIDRGVLMRALRQLEQKGKAAIFKGTSADDEGVKFSV

SEQ ID NO: 328386 - protein, 201 aa, Zea mays
  Clone ID: MRT4577_62550C.1.pep
MHSGARKLMWGTSPDRPDDHDVVIVLASLLCALITVLGIGLVARCACARGPSASTGGGEEVGEWAEQSSRSALSLFKEKEEEIERKKVEVRDKVFSMLGRVEEETKRLAFIRQELELMADPTRREVDAIRKRIDKVNRQLKPLGKTCLKKEKEYKMCLEAYNEKSNEKATLVNRLLELVSESERLRMKKLEELNKTIESLY

SEQ ID NO: 328387 - protein, 81 aa, Zea mays
  Clone ID: MRT4577_62551C.1.pep
DARTHTCAESCGLPKTHPKLDFRDHGYGYVGDGTVHGFDGSTTPTSKQSVYTALPAQLSWAIQKKTPSCLIHPPRGRFRGF

SEQ ID NO: 328388 - protein, 47 aa, Zea mays
  Clone ID: MRT4577_62552C.1.pep
FLELYVHWNQYGCNERVHTHTLYKVTICTCRAEGQSRLMFLKTTTET

SEQ ID NO: 328389 - protein, 74 aa, Zea mays
  Clone ID: MRT4577_62553C.1.pep
GFFTCQDWRSTGKTEALKQTSKERKDVTDQNSMLQDYDEPYRRGPEAASNIQPALTQPTLNVQTHTLEQAQSRE

SEQ ID NO: 328390 - protein, 73 aa, Zea mays
  unsure (1)..(73): unsure at all Xaa locations
  Clone ID: MRT4577_62554C.1.pep
WSEAPGIMLNNLCYRRKGVDNIGCTKVIYXFDWDDLPEEPIEVVFSIPAEGGEYPIGFLQKVRALSLCMCAVG

SEQ ID NO: 328391 - protein, 83 aa, Zea mays
  Clone ID: MRT4577_62555C.1.pep
ALDCHLIRVFLAWLVPSIHSSRTSSLKCFDRPDVCLVQGQVILGDEPLVVALTLAKELGSFVAAAGRMFKRSPPGHRAPRGLG

SEQ ID NO: 328392 - protein, 119 aa, Zea mays
  unsure (1)..(119): unsure at all Xaa locations
  Clone ID: MRT4577_62556C.1.pep
CIQPACDLVLSSWFCFEMKACLLHIPISKLEAIREEFRLSARSRIFRCFLQLLFSIGLSLIILXXSXXCFAERRKKXWHFHVGXADALGWLGQIPLFSSIVRAINLNFPSMLPRSRGRP

SEQ ID NO: 328393 - protein, 37 aa, Zea mays
  Clone ID: MRT4577_62557C.1.pep
GTESRHGIGCLCAIMQKRHHAVCCRCKLFKSIPGTAR

SEQ ID NO: 328394 - protein, 108 aa, Zea mays
  unsure (1)..(108): unsure at all Xaa locations
  Clone ID: MRT4577_6255C.1.pep
FLLRPLSVGNEPRYLKQQLLQQXFVPAVFRLAVANLNAFLQQLFPXFNQLVVSNYAVYLQQRHQLLNPLAVANPLVANFLQQQQLLPYNQFSLMNPALQQPIVGGAIF

SEQ ID NO: 328395 - protein, 118 aa, Zea mays
  unsure (1)..(118): unsure at all Xaa locations
  Clone ID: MRT4577_62560C.1.pep
RRRRGSWALRWCLTRERFXICQEEEDWKRIEDRIGCGQVEELIEEAEDELKLIAKMIEWDPWGVPDDYECEVIEDDTPIPKHVPQHRPVALPEEFFKALDAVKSDPALQGDAPPQVKA

SEQ ID NO: 328396 - protein, 173 aa, Zea mays
  Clone ID: MRT4577_62562C.1.pep
MFLRRILTGGGGLAALRAARAVKETTGIVGLEVVPNAREVLVGLYERTLKEIKAVPEDEGYRKAVESFTGHRLQICQEEEDWKRIEDRIGCGQVEELIEEAEDELKLIAKMIEWDPWGVPDDYECEVIEDDTPIPKHVPQHRPVALPEEFFKALDAVKSDPALQGDAPPQVKA

SEQ ID NO: 328397 - protein, 94 aa, Zea mays
  Clone ID: MRT4577_62563C.1.pep
SYSRGPYHGGGTPTRCRSAPLHRSEWGRRTPCTCLWYPARALVGHARMALVHSWWMGVALTRSSLMAIIWPALFFTVLTFPTPLQSLGLSSSTC

SEQ ID NO: 328398 - protein, 98 aa, Zea mays
  Clone ID: MRT4577_62564C.1.pep
MAFMRYRALPRGELTAEEFRAWLAQFDADSDGRISREELRHALRSLNVRFAWWKARGGVRAADADRDGGVQLGEDEVARLFAFAQSHLRVKIAQLGYY

SEQ ID NO: 328399 - protein, 173 aa, Zea mays
  Clone ID: MRT4577_62566C.1.pep
MFLRRILTGGGGLAALRAARAVKETTGIVGLEVAPNAREVLIGLYTRTLKEIEAVPKDEGYRKAVESFTNHRLQICQEEDDWKRIEDRIGCGQVEELIEEAEDELKLIAKMIEWDPWGVPDDYECEVIEDDTPIPKHVPQHRPVALPEEFFKALDAVKSDPALQGDAPPQVKA

SEQ ID NO: 328400 - protein, 55 aa, Zea mays
  unsure (1)..(55): unsure at all Xaa locations
  Clone ID: MRT4577_62567C.1.pep
RSIARRKSLLNDKALTSLAESXWRILHICGSDVTDAGSATVANVCSNLRPADISR

SEQ ID NO: 328401 - protein, 69 aa, Zea mays
  Clone ID: MRT4577_62568C.1.pep
MAWWRARVVAPARRAWLAVVAARVRRRTERAGIVDLHRDVQTCGYHDVEVMWGMLGLDAGPASAPERRN

SEQ ID NO: 328402 - protein, 166 aa, Zea mays
  unsure (1)..(166): unsure at all Xaa locations
  Clone ID: MRT4577_62569C.1.pep
AGVGLRASGLPASATGEPYPSISHGDRGARPAPPPAPPLPLARSLCLRSXPRPPPRVAPANDKGADRIARVLAIDLKGARREGVGLSGQTLLRALANAELIEPVFHRLEDIAACSGECEAHTSQEWLDKLPSPCYEERNTLTRASSNRELKKHARLGCQGPLTPGL

SEQ ID NO: 328403 - protein, 219 aa, Zea mays
  Clone ID: MRT4577_6256C.1.pep
LLHAVGHQSSPTTTRPSSGSFIRDVRVAVLRHDLTRALCLLPKPSSAAPAPAVPPPQRPPHQFLLRGARRPAEHQQQRRRWLSSIAFAALHLFRKCPAPPPTCTAAWPSYSAASEISLPRRPEICECKSVSIGLFYSSIGSDFGWAQLRRCRGWGISGSLPSSTTRLTSRNSPLFSLYLLPFILFQTLRRLGLCLLSVTMPLDVSVICNLAAVCGRDGP

SEQ ID NO: 328404 - protein, 76 aa, Zea mays
  unsure (1)..(76): unsure at all Xaa locations
  Clone ID: MRT4577_62570C.1.pep
MCCARFPRAVRNLTWPSRRWWTTXVLFPPVDQTAGSGGSHFLGGASVRSLEIGGNFIKETVIGLYQEDATVPALVN

SEQ ID NO: 328405 - protein, 130 aa, Zea mays
  Clone ID: MRT4577_62571C.1.pep
RRERKSRGHAPGPFSSLHVALGVGRGGAALSGTGTQESRTPLGAGERQLAQNTATACRCRAARARCGRRRGAVAGCALHLDPGMARTYATVDTRPTSPRSKRRCPCRSVLGPGRLLFFSAPPRQASTTNI

SEQ ID NO: 328406 - protein, 96 aa, Zea mays
  unsure (1)..(96): unsure at all Xaa locations
  Clone ID: MRT4577_62572C.1.pep
LRAIAXAKADSSSHLCMPTLDGHLYVTISTIYLHLGFLGLQLLGLHLISIVLQLEVELVLLXPXGKIVLLRHVPSVAVAADRHDSSQGKERREQRV

SEQ ID NO: 328407 - protein, 80 aa, Zea mays
  unsure (1)..(80): unsure at all Xaa locations
  Clone ID: MRT4577_62573C.1.pep
GPIFSPFPPGVGKFFSLWPRQKILFPRKVQILKAEGGFFAAGIFGKGTIKIGSEPFXPNGSQNWIVFFXGQNFKIWEGFL

SEQ ID NO: 328408 - protein, 108 aa, Zea mays
  unsure (1)..(108): unsure at all Xaa locations
  Clone ID: MRT4577_62574C.1.pep
YRWNNFFSVXWHIVNGVSDNILNHIILENNENKPVTNSRDTQEICLEQGLHILKIFEDYHVSKTSILNDLASAMGNTPNPYEQAMSTCVNDQAMMLSHMVWHESTISL

SEQ ID NO: 328409 - protein, 63 aa, Zea mays
  Clone ID: MRT4577_62575C.1.pep
GKWVFSPQMVWQKKCPFPTIGPSFLKGRHCIFSKPHLQQFFLYLPDQTPKPQGIKILQILCPS

SEQ ID NO: 328410 - protein, 67 aa, Zea mays
  Clone ID: MRT4577_62576C.1.pep
QPPKVPGILLEMDHPGVLPLLESPNPLKPRVSKPMGVPPFAQLLQQSIVFFDPHRANQPLNKGVVPP

SEQ ID NO: 328411 - protein, 61 aa, Zea mays
  unsure (1)..(61): unsure at all Xaa locations
  Clone ID: MRT4577_62577C.1.pep
TLGQNQILQKSGGEIYTCRVMLIHYFCESNQQGIISDIEARRRLTNMRLGLIXGFEXWTLC

SEQ ID NO: 328412 - protein, 69 aa, Zea mays
  Clone ID: MRT4577_62578C.1.pep
SGLRPPGAYPGGPNSFFLFHWSCYPPSIFNSLFSLQNLLKTRCIFLYPPRGANPNSIFPGIGVFLRSLA

SEQ ID NO: 328413 - protein, 186 aa, Zea mays
  Clone ID: MRT4577_62579C.1.pep
MDEAQVVESKDGTISVASAFVAHQEAVQDRDHKFLTKAVEEAYRGVDCGDGGPFGAVVVRNDEVVVSCHNMVLKHTDPTAHAEVTAIREACKKLGKIELSDCEIYASCEPCPMCFGAVHLSRIKRLVYGAKAEAAIAIGFDDFIADALRGTGFYQKANMEIKKADGNGALIAEQVFEKTKEKFQMY

SEQ ID NO: 328414 - protein, 42 aa, Zea mays
  Clone ID: MRT4577_6257C.1.pep
CKLLLHFLIHYHLGNNEQFELFKCCLCCRFHKIKHINFQLTC

SEQ ID NO: 328415 - protein, 141 aa, Zea mays
  Clone ID: MRT4577_62580C.1.pep
MASGRRKSGIPALGWWLMAVGTIRSAIVWSCLFSSASLCLAVYPEMTGVQERAMAAWTLLSCTLSFLCAFNMESKPLYVATFMSFVYVAGYLLVECFFYHSVHAASIAPYCFIAGTSMVWMLLQWNSHGRGRRPREASKQP

SEQ ID NO: 328416 - protein, 92 aa, Zea mays
  Clone ID: MRT4577_62581C.1.pep
SILKNEALYCQLLSCFTPLPYDMEFYNQGVELELLKLEVAVQSIHDNLLLLKSKSVHPFVFSSFMLRLSTYLADIQGTIAIYLTKLFSVQRS

SEQ ID NO: 328417 - protein, 102 aa, Zea mays
  unsure (1)..(102): unsure at all Xaa locations
  Clone ID: MRT4577_62582C.1.pep
LAYSAEKVIEVNVLAKALAGXKNEASFLINPPAQASRRSSPRVASEQVQMAPAALKGYDPLRATTAAARLDDQQRXLILTVHPSSSIGSVPQPXKLSRVHNE

SEQ ID NO: 328418 - protein, 123 aa, Zea mays
  Clone ID: MRT4577_62583C.1.pep
DTGIWPESPSFSDHGMPPVPKRWRGQCQGGDANSPSNFTCNRKVIGGRYYLSGYQTEEGGAIKFVSPRDSSGHGSHTASIAAGRFVRDMSYGGGLGTGGGRGGAPMARIAAYKACWETGCYDV

SEQ ID NO: 328419 - protein, 93 aa, Zea mays
  Clone ID: MRT4577_62584C.1.pep
LVLDRGRPFVPTRPPTRAPGRKRWRYDSYHADHPQPLPPPGVAAGDPELGLTLHLHQHRAAGPQRAALPLLAAHLLSQANCRGKCTYHKQCSV

SEQ ID NO: 328420 - protein, 74 aa, Zea mays
  Clone ID: MRT4577_62585C.1.pep
MSEGYGSSRLIIIEKFRPTCTFSPCFSSPEIASLPPHKSSSLEPSFSFPPWVVLTKRQKVFLRTFGLIASVVLI

SEQ ID NO: 328421 - protein, 96 aa, Zea mays
  unsure (1)..(96): unsure at all Xaa locations
  Clone ID: MRT4577_62586C.1.pep
MCRRDADRLGADRGGCLGGERAALDSAGGGSRHTKPRIRRLVGRGGVKRISGIIYEETRGVLKIFLENVIRDAVTYTEQRRXKTVTXALYVSYALK

SEQ ID NO: 328422 - protein, 111 aa, Zea mays
  Clone ID: MRT4577_62587C.1.pep
QLGPKSKCRPDKKKKSPRRAGASYCSGATGFHHQHHPTPNPSLHNRPLVHERMRKLPSQNGLKLKKKGKLFIFFFQNLPSLAGVPPLSPKGKRTLLVHGLAGHLPPPFGCG

SEQ ID NO: 328423 - protein, 119 aa, Zea mays
  unsure (1)..(119): unsure at all Xaa locations
  Clone ID: MRT4577_62588C.1.pep
MRVLLVALALLALAGSATSTNTSEGLGVSVLQQSNVQXNKHMLTHVKIQAIRAHQXQQLLPAVSQLAMGNHGDYLXEQVLACNTLAVANVVVYQYQQQLQQFMVTFRKLAMENPVNYVQ

SEQ ID NO: 328424 - protein, 100 aa, Zea mays
  unsure (1)..(100): unsure at all Xaa locations
  Clone ID: MRT4577_62589C.1.pep
GEEKKRKKKKEDKNPRKKKGEKKKGGKKRRKKKKKEKEKXKKKEKKKREKKRGGWKKKGERNQPWGNRGVGHKEGGPRGWGRNDWSTGGGGPTGTDQGGP

SEQ ID NO: 328425 - protein, 50 aa, Zea mays
  Clone ID: MRT4577_6258C.1.pep
IPGATELTMRRPALPISDYIKKLVLSFSCMCLPKGKAPRVRRGVGHKPFT

SEQ ID NO: 328426 - protein, 68 aa, Zea mays
  Clone ID: MRT4577_62590C.1.pep
WFHYVFLCQEAHDLCSLVLSNGRYRILSESYLHNRPSLLITTWQLAPTARLARESVVTSVCFSRCASS

SEQ ID NO: 328427 - protein, 128 aa, Zea mays
  Clone ID: MRT4577_62591C.1.pep
HTSPYSDYSPLRDVLRDAHIDDDVVEADLATVVIWPGSRSRRSSAHGAPPDFIPEVLHEEEKAEDARRGSALASALQQMAEMHTAGEPDLVPLVRCQPCPSWWMGVGFSEQTERVLSNRQPSRRQREW

SEQ ID NO: 328428 - protein, 171 aa, Zea mays
  Clone ID: MRT4577_62592C.1.pep
LTTNATEYQCAQYAKPNPHHQERMARTWAKTQPGTDRAASGSPTGASVRTDSQRAIVTWRSRRAPSAATPPRPPLRPPPPHAERAPSCSSGDIRRARRAPTADVAACCQPQYTERGSRGSCRHSPSTCAQSVDALGDVTLRLEECPRGRDAGRSLSLLRLAGEDGQRRPPS

SEQ ID NO: 328429 - protein, 114 aa, Zea mays
  unsure (1)..(114): unsure at all Xaa locations
  Clone ID: MRT4577_62593C.1.pep
LDDRCRVHTDTIDLCHSVGERKFLDWIAVQPIHLCQPIRDKHLVVGVEGDXGTLLRASHFLDDSCPILGVNSDPTCTKEVEELTDEFAARMITLYLCAASAGNFEHILGATLDG

SEQ ID NO: 328430 - protein, 77 aa, Zea mays
  Clone ID: MRT4577_62594C.1.pep
SHYFLLFSLQQQVSIPPPIIYMFGISFCAIVLKFVSSHFGCSLTIFCTHIFIGPSFYFFETLFFQNSVFFFSLKIII

SEQ ID NO: 328431 - protein, 352 aa, Zea mays
  Clone ID: MRT4577_62595C.1.pep
MRRSLPLLLARQVARRRRLSNVPESTVYGGPRPQESSAARRVTVTTLRGKHRRGEPITVVTAYDYPSAVHVDSAGIDVCLVGDSAAMVVHGHDTTLPITLDIMLEHCRAVARGAPRPLLVGDLPFGCYESSAAQAVDSAVRVLKEGGMDAIKLEGGAPSRITAAKAIVEAGIAVMGHVGLTPQAISVLGGFRPQGKTVDSAIKVVETALALQEAGCFSVVLECVPAPVAAAATSALKIPTIGIGAGPFCSGQVLVYHDLLGMLQHPHHAKVTPKFCKQFGNVGDVINKALSEYKQEVEAQAFPGPSHTPYKITPTDVDGFADALQKMGLSDAADAAAAAAENREKGGEPKGE

SEQ ID NO: 328432 - protein, 207 aa, Zea mays
  unsure (1)..(207): unsure at all Xaa locations
  Clone ID: MRT4577_62596C.1.pep
MRFPFLFALQLVALAAAASAAEVAVTRSSRMVHRLSDEARLEVGPRVGWWPQRGSGEYYRALVRSDIQRQKRRLAVLSLSKGGSTFSPGNDLGWLYYAWVDVGTPATSFLVALDTGSDLFWVPCDCIQCAPLSGYRGNLDRDLRIYRPAESTTSRHLPCSHELCQSVPGCTNPKQPCPYNIDYFSXNTTSSGLLIEDTLHLNYREDH

SEQ ID NO: 328433 - protein, 145 aa, Zea mays
  unsure (1)..(145): unsure at all Xaa locations
  Clone ID: MRT4577_62597C.1.pep
SGVYPRVPRPPTRPPTTTGRSHGNTPPYMGXMGWAGDGTYRPPTGLSASXSHSRLDLSFMDNEKLGDIXKVLEPVFTYWKGTRQERESFRSFTNRTGSEQLQEVVNEWSIATVTRPKISLSLDKIPGSQHNFGHGSKYVTRRKTH

SEQ ID NO: 328434 - protein, 500 aa, Zea mays
  Clone ID: MRT4577_62598C.1.pep
MRFPVLFALQLVALAAAASAAEVAATRSSRMVHRLSDEARLEVGPRMGLWPQRGSGGYYRALLRSDLQRQKRRLAGKNQLLSLSKGGSTFSPGNDLGWLYYAWVDVGTPTTSFLVALDTGSDLFWVPCDCIQCAPLSSYRGNLDRDLRIYRPAESTTSRHLPCSHELCQSVPGCTNPKQPCPYNIDYFSENTTSSGLLIEDTLHLNYREDHVPVNASVIIGCGQKQSGDYLDGIAPDGLLGLGMADISVPSFLARAGLVQNSFSMCFKEDSSGRIFFGDQGVPSQQSTPFVPLYGKLQTYAVNVDKSCIGHKCLEGTSFKALVDSGTSFTSLPPDVYKAFTTEFDKQMNASRVPYEDTTWKYCYSASPLEMPDVPTITLTFAANKSLQAVNPILPFNDEQGALARFCLAVLPSTEPIGIIGQNFLVGYHVVFDRESMKLGWYRSECRDVDNSTTVPLGPSQHGSPEDPLPSNEQQTSPPVTPATTGTVSSFSAQNKRRLP

SEQ ID NO: 328435 - protein, 105 aa, Zea mays
  Clone ID: MRT4577_62599C.1.pep
LQGSWSELLHYICSGLLTRMILKKKLPIHCIIFQAKAVQKARLNTKLALLNNKYLITGFRILEAIVTMNVVVPFLAVVAGLMPHTSMLGEWSGHLQNISWFAVPL

SEQ ID NO: 328436 - protein, 120 aa, Zea mays
  Clone ID: MRT4577_6259C.1.pep
ISSPLFPRFGLAMVVAQLRTRGDGDLSRAHGIDVEPRRSYSRGRKVSEWGTTYRRVCCDFLEVCYGVLVFVTKEKDLTGRFIVSWKSIVRGDTTENTRRCQGAQPSTTERSVWVMSAMTL

SEQ ID NO: 328437 - protein, 93 aa, Zea mays
  Clone ID: MRT4577_625C.1.pep
CLLDYGLFLAFVLLGPDRENPGFTQFYCLGELSPFPRWGNNQKAPTDSLFPTFPNPNGQWKFHTLIFCSNLPYFFGHPPSFFSTLALSSYLPF

SEQ ID NO: 328438 - protein, 269 aa, Zea mays
  Clone ID: MRT4577_62600C.1.pep
SNVTFVDAPYWSLHPTYCTNVTISGVTILAPVNSPNTDGIDPDSSSRVKIEDCYIVSGDDCVAVKSGWDEYGIRFNMPSQHIVIRRLTCVSPTSAMIALGSEMSGGIRDVRAEDSVAINTESAVRVKSGAGRGGFVRDIFVRGLSLHTMKWVFWMTGNYGQHPDNTSDPNAMPEVTGINYSDVFAENVTMAGRMEGIPKDPYTGICISNVTARLAPDAKELQWNCTNVKGVTSHVSPKPCPELAAEGKPCAFPEEELVIGPPELPKCSY

SEQ ID NO: 328439 - protein, 63 aa, Zea mays
  Clone ID: MRT4577_62601C.1.pep
SLRRRRLHQLCRRRRRPSKSRPSPWRRRSLPSPPSSASSSGRGHRLAHAAWPSPLRASRLHYR

SEQ ID NO: 328440 - protein, 126 aa, Zea mays
  Clone ID: MRT4577_62602C.1.pep
ACSPRTSIWVRVTCWLRAVPRQLPKAHCIAHMETPMLAESVLVLLLSMHRIGCYSDFRISTHPVRFSVPSMSVSGYVFFNESPSAQAVSPSVRCRSEKGGKEFHSSSGCVCVYYVYIGKREAHATK

SEQ ID NO: 328441 - protein, 231 aa, Zea mays
  Clone ID: MRT4577_62603C.1.pep
MAASRRSSVELPVADPAADPDQARLHQLGYKQELKRGLSVLSNFALSFSIISVLMGVTITYNTGLRYGGPVSMTLGWFLVSALNACVALSMAEICSAYPTSGGLYYWSAKLAGKDWAPLASWLTGWFNIVGQWAGTTSVDFSLAQLVQVIVLLATGGLNGGGYMASKYVVLAIYGAILVIHGLMNSLPIQYLAWFGHLGAFWNTAGTFALVIIIPAVATERASTEFIFTHL

SEQ ID NO: 328442 - protein, 77 aa, Zea mays
  Clone ID: MRT4577_62604C.1.pep
DHETEDPDHMQGESGEPPERTQGTAQNTEEGIPTRRARGSPQGPRGETTRPAAQLAARQAKQDEAGRLRHAIPVAPA

SEQ ID NO: 328443 - protein, 286 aa, Zea mays
  unsure (1)..(286): unsure at all Xaa locations
  Clone ID: MRT4577_62605C.1.pep
IGTSSRRDVVVNTTFRTHLAAVAGDDGDXAWRSRARSLLLLRSTIPRSPPAPYPTRVLTQLPLPRPFSRFLFSPDPIPDAYFSAAAVPFPEAFSFSTEVSQDGTXGREDNLTSMWEEAGDADDIFASPCGADSVADDEEVARVRAVVETTPEDKIASTLADMIVDFNEPLLAAVLLAAEQCSYKKLVSQFNYATKNSPVAKSLSNLEILVSKVADSDEMDKTDAYLLWDSIKEIGSVPGSVSTLLLNKMIAIFWKLEKSKAAVEGLSQFDEFGCTPDSDSYYPGIE

SEQ ID NO: 328444 - protein, 296 aa, Zea mays
  Clone ID: MRT4577_62606C.1.pep
MPTTMAAAAAASAPSSLCVDGKRVLLSQPNLLRIHAPVKICGDIHGQFVDLLRLFDLGGYPPASTYVFLGDYVDRGKQSLETICLLLAYKIRYPEKIFLLRGNHEDAKINRVYGFYDECKRRFNVRLWKIFSDCFNCLPIAALIDDKILCMHGGLSPEWTSLDQIKDIERPAEIPDYGLLCDLLWSDPSPDGEGWGESDRGVSCTFGADKLVEFLEKNDLDLICRAHQVVEDGYEFFAQRRLVTIFSAPNYCGEFDNAGALLSIDESLMCSFQILKPTDMGPPHARKQIPNKPARG

SEQ ID NO: 328445 - protein, 150 aa, Zea mays
  Clone ID: MRT4577_62607C.1.pep
MPTTMAAAAAASAPSSLRVSRQGTIGGGHVLYSRSQRAATVSARASMNITCCANQTQTAQRKSYSGTTSPPSGSVKEKVKPRLDDGGVGFPPFRFGGGGGGGGGGGSSSSGGFILFVVVLLLDYLKEFERNLQNGPRRSGSGYDDGLAPQ

SEQ ID NO: 328446 - protein, 322 aa, Zea mays
  Clone ID: MRT4577_62608C.1.pep
MMMTRAPMGPMEGAAVDEMVRRLVEGGRGGRQVQLSEAEIRQLCVEGKRVLLSQPNLLRIHAPVKICGDIHGQFVDLLRLFDLGGYPPASTYVFLGDYVDRGKQSLETICLLLAYKIRYPENIFLLRGNHEDAKINRVYGFYDECKRRVNVRRWEIFSDCFNCLPIAALIDDKILCMHGGLSPELTSLDQIKDIERPAEIPDYGLLCDLLWSDPSPDGEGWGESDSGVSCTFGADKLVEFLEKNDLDLICRAHQVVEDGYEFFAQRRLVTIFSAPNYCGEFDNVGALLSIDESLMCSFQILKPTDMGPPHARKQIPNKPTRG

SEQ ID NO: 328447 - protein, 139 aa, Zea mays
  unsure (1)..(139): unsure at all Xaa locations
  Clone ID: MRT4577_62609C.1.pep
MGLASKVLTDMESNGGVFLAVDLLHFTVGNACGSCPTPAPTXTXSPMPTTATPPPSSRGKCPVNVLKLVVXDHALPARERQGGKAPAGACCNLIKRLADFNAGVCLXTAIKGNXLDLVIDVPIQLKSLLNYCGKRVPKV

SEQ ID NO: 328448 - protein, 77 aa, Zea mays
  Clone ID: MRT4577_6260C.1.pep
SIRTSSHTCRCCRIHYINDRAKTVKTQSLYTTTSNLPSYQASPVSYTRSSTNCQPYSLAQSSAQTIRATTTATTRAT

SEQ ID NO: 328449 - protein, 92 aa, Zea mays
  Clone ID: MRT4577_62610C.1.pep
MSCFTSAICKALDASPPVIFELGTMIQVPGMPEHVVVREKEAPVGVTKRVDPDNPFTRFFMDEISDSDVRSWGVLSNSLDAAYVPALRVDLR

SEQ ID NO: 328450 - protein, 60 aa, Zea mays
  Clone ID: MRT4577_62611C.1.pep
EVVRSPRLKPAQQISCFSLLNSPLFLRFRLYTSIVLPSILAIAASIHSLIQAKQTAACSG

SEQ ID NO: 328451 - protein, 114 aa, Zea mays
  unsure (1)..(114): unsure at all Xaa locations
  Clone ID: MRT4577_62612C.1.pep
AWELRVGHLDTTGEGXLDRRSTDAWSRNSCAXKYVCRAVDLLXDTEDTEEVLVIMRLNSMLINMIMYNCNDMMINDVNVTVSGYSFNTDGIHMGNSIDVYITNTDIGVGDHCIY

SEQ ID NO: 328452 - protein, 63 aa, Zea mays
  Clone ID: MRT4577_62613C.1.pep
FICRRSQCPITYMYDLVAERRPCAHLIKTAAILSEFTKLALNSVSNGLSDGKGLNRRSCSNRG

SEQ ID NO: 328453 - protein, 156 aa, Zea mays
  Clone ID: MRT4577_62614C.1.pep
VFNPNAFIAQECAMIPIEWVSRRVATGSYLRRNPNVKEGYRFAPVKLETFFKDDENHDPFWSIDSVIEARLVCGGLEITRNHVYEMFRVTELVFEVLERAWSTVDHALIDMKIEFGVISRNGKLEIVLGDVIDNDSWRLWACGDIRLMLDKQVTLT

SEQ ID NO: 328454 - protein, 87 aa, Zea mays
  unsure (1)..(87): unsure at all Xaa locations
  Clone ID: MRT4577_62615C.1.pep
VCHASSSPCRYRAITSAYYRGAVGALVVYDVTRHVTFENVERWLKELRDHTDANIVIMLVGXKADLRHLXAVSXEDAKGFAERESTF

SEQ ID NO: 328455 - protein, 100 aa, Zea mays
  unsure (1)..(100): unsure at all Xaa locations
  Clone ID: MRT4577_62616C.1.pep
XXXXXXXFXXXRXXXFXAXXXCLXXXFFXXVAYXSLSLLRLDFXWGEXWXXXPXRAXFXXLFWLLLXVWLXXXXVXXVWXXWXWLXXXXXGXXELSXWVX

SEQ ID NO: 328456 - protein, 89 aa, Zea mays
  Clone ID: MRT4577_62617C.1.pep
MAEAVVFALAKISVSLAGSAISGLREHASIIKELPGKVRRIEAQLSIINGALQQQDSAYLSDHAYMKWIAYIKTLALPGEDIMDTYSHH

SEQ ID NO: 328457 - protein, 124 aa, Zea mays
  unsure (1)..(124): unsure at all Xaa locations
  Clone ID: MRT4577_62618C.1.pep
KEEFWFTSXHKNMGSHWADLHDMAREAXDSHDNLXIKITIPKYRDFPQVIQATTDRCGNTDDNSRPTGTGEAFPHIKCTGRATPKNIATKPGEGARINYVEXRHEQXITPAQNVVLKIGCTHLT

SEQ ID NO: 328458 - protein, 73 aa, Zea mays
  unsure (1)..(73): unsure at all Xaa locations
  Clone ID: MRT4577_62619C.1.pep
MSFTVSHDKCXACDXTVHIIDLLSAYCFSYHMTFFKCIHCNDVLSISRYSLMDGVLFFMTHSVQLFNYTGTLS

SEQ ID NO: 328459 - protein, 143 aa, Zea mays
  unsure (1)..(143): unsure at all Xaa locations
  Clone ID: MRT4577_6261C.1.pep
NKTPGDETXDVGTLGRKRGTHTRRGTDNHRTEPSGGAKEGSRTEELTKNGRQGCRQARXRDDRKRRQGTGAPTDVKRERVERQNAEAENKGAGLLPRERPTPKGDRAERRHKRQPHKSSHQKRRNWTTPNNAGGGETRTAREA

SEQ ID NO: 328460 - protein, 129 aa, Zea mays
  unsure (1)..(129): unsure at all Xaa locations
  Clone ID: MRT4577_62620C.1.pep
FGSSEVHNLIDMARPVPEREQTVELQLLARSGWPEQDASVRELDNQLTINNVESKYNSLKIEFSQTENQRLQTQLSQNSKIFSELEATXNKMHVSEEEVYIXAEQAQEQHISLEKTDYSLQHKQTVEEK

SEQ ID NO: 328461 - protein, 615 aa, Zea mays
  Clone ID: MRT4577_62621C.1.pep
FAASNGEFSENLDKTYYVYLPPELCLVHPLPGSLVRGAQRLPSIMRRVESMLLAIQLKDIIGYPVPANKILEALTAASCQETFCYERAELLGDAYLKWVVSRFLFLKYPQKHEGQLTRMRQQMVSNMILYQYALNKNLQSYIQADRFAPSRWAAPGVLPVFDEETRDSEPSIFDEEFTPSSELQKNLYDDYDGDSMQEDGEIEGDSSCYRVLSSKTLADVVEALIGVYYVAGGKIAANHLMKWIGINAELDPQEIPSSKPYNIPESIIKSINFDTLEGALGIKFQNKGLLVEAITHASRPSSGVSCYQRLEFVGDAVLDHLITKHLFFTYTDLPPGRLTDLRAAAVNNENFARVAVKHKLHVHLRHGSSALETQIREFVKDVQEELSKPGFNSFGLGDCKAPKVLGDIFESIAGAIFLDSGCATSVVWKVFQPLLDPMVTPDTLPMHPVRELQERCQQQAEGLEYKASRTGNVATVEVLVDGIQIGVAQNPQKKMAQKLAARNALVVLKEKETAAKKDTEKDGEKKNGSQFTRQTLNDICLRRQWPMPQYRCINEGGPAHAKRFVYAVRVNTSDSGWTDECIGEPMPSVKKAKDSAAVLLLELLNRNYRGKPDGK

SEQ ID NO: 328462 - protein, 81 aa, Zea mays
  Clone ID: MRT4577_62622C.1.pep
IRGLQYPISTYHHFLYCNLQLLFVSCDLSTSPVKYLVVTSDKTNNNNPLISLPIALLMLALNASISPIPPPRTSTNHCMGV

SEQ ID NO: 328463 - protein, 257 aa, Zea mays
  unsure (1)..(257): unsure at all Xaa locations
  Clone ID: MRT4577_62623C.1.pep
PAGKKNSPTTACPPLPPPIPNXPPIPSPPRAAYLASYXAPPLPPPSGAPPDPPSPPVHCTSPRXAPPXPPLWSSFPGPQRPAVMHSPNHHASPDPPPPRCGXAPSPGIHWDGSGPIPLPRPXRPPAPPLLWWPPAAFRRAGGARPLPPXLPWSSPPSPXLQRRTSPVVDRLXPPPDASPDRRIHAAPPPPXPMPSARPXSPPPAYASTKHGIRCSPHRSTVAGQLLAAKSPRSIEPEMALYAAAAGHLDQTPPGPSS

SEQ ID NO: 328464 - protein, 76 aa, Zea mays
  Clone ID: MRT4577_62624C.1.pep
VDSSIQEELNTGIQDANKPPGNFTILDTCLASIIDLALLCSSAALRSTGAAEHRPEHGRGGVRRVGAAEEVRGSSC

SEQ ID NO: 328465 - protein, 109 aa, Zea mays
  Clone ID: MRT4577_62625C.1.pep
SCMPSEWRNTAEIVLRCNSLQLLDAILWLHSRSRSPETCQRRPPQLRKQWQAYIDTTTNNNHSQHNHGQRSAAPDVNDDHKTYVSLYVLEEEAYNDRRACLVSIRCAWT

SEQ ID NO: 328466 - protein, 74 aa, Zea mays
  Clone ID: MRT4577_62626C.1.pep
PRHDAHLSAAALLNFCSRIWPNHTQKRPMHRSGLITIHRDGKEQTLSILHRHLRGEKPIQLLTIWPNHMPKLEL

SEQ ID NO: 328467 - protein, 118 aa, Zea mays
  Clone ID: MRT4577_62627C.1.pep
EGPNKQSFFVHEGNGTKYLTSTTHLQQIPTKSGRGHFGQKPRMSNGKLKSVRRGHYWGRTICRPEQLWAPTASAAEDMKTSVLLRRGDHNLLLKDRRHHSRCPKNQVQTGEIHPRVLA

SEQ ID NO: 328468 - protein, 63 aa, Zea mays
  Clone ID: MRT4577_62628C.1.pep
ADINERAKFKLGIHAIRSICPPGISLRRMGKLRRRLAGTKSTSSIYGSVTLGCVGRALPYGRK

SEQ ID NO: 328469 - protein, 93 aa, Zea mays
  Clone ID: MRT4577_62629C.1.pep
INSTPGDRQSISICLLAHLALGHQCAQPNTLRLRRGWQIGNGKLQVSALHHSFMHSENTTKALAHTTHRGFSKERRWRRRPAECSRQWYTTGV

SEQ ID NO: 328470 - protein, 63 aa, Zea mays
  unsure (1)..(63): unsure at all Xaa locations
  Clone ID: MRT4577_6262C.1.pep
AFLGSARIFSELQNAASGRPWLKMSCEPNCTQPCMQPKFILAKADLHHSTLNSLQKLNFXPIE

SEQ ID NO: 328471 - protein, 82 aa, Zea mays
  Clone ID: MRT4577_62630C.1.pep
VPLRYGVYFGPLSSCVCLPLLSLCCGCFFGLPILGQCFYRGRFFYPEYFVFCVSPQFVIFFVPQCVSALSSVGVCLFLGRPL

SEQ ID NO: 328472 - protein, 183 aa, Zea mays
  Clone ID: MRT4577_62631C.1.pep
KKKKKKKKRKKKKKKKKKRERSTSPFSTVRSVAILALICCSLSCPAAARVALDGGREQGIPPPVAGNPVQVPSPGFLPPPPPPGSPVNTPCPSTPNDATPLRPVYGNPVTPSPSVPIPPPPILVGGNQLVTPIASVPSPPLPPVQVPVSTPCYSIPIHALPVPEMTAPTPHRKTLQHVVKNIG

SEQ ID NO: 328473 - protein, 77 aa, Zea mays
  Clone ID: MRT4577_62632C.1.pep
DNARIQKVQYAYPMWPIAFNLSGYMQTHRQANSESCMFHCALHSYSKMAVMFFDTLTRIVDQICACHAAVTVSLHRV

SEQ ID NO: 328474 - protein, 84 aa, Zea mays
  unsure (1)..(84): unsure at all Xaa locations
  Clone ID: MRT4577_62633C.1.pep
MVDVHLRIFHWPSLITILDEPKAHKSFRDMDISLDSKFLVSSSTDGSARIWNIDEGSPLTNLTRAXDEKIEYCRFSRDGAKPFL

SEQ ID NO: 328475 - protein, 77 aa, Zea mays
  Clone ID: MRT4577_62634C.1.pep
QCATTLLWRMATHVYPSTYTTTQFKTMILDRSWIPTTNNKFKGTLAPKNGFLETPPWWTSRKTFVCPLRTLCSSCWP

SEQ ID NO: 328476 - protein, 561 aa, Zea mays
  unsure (1)..(561): unsure at all Xaa locations
  Clone ID: MRT4577_62635C.1.pep
MDRDPSVSDEDDDLETLVPQNHAKPPSPSARSRSPPSSFSVAALRPTLPSSAASLRRVLWSRRYLVLFVSLPLLFLILFXLRGCVLPPPARLHPPPLRRTRXDPAASRMREAELHALYLLRSQRSGLLSLFNRTAAPTNGSAPAPISLSDLQSALESQIKINREIQAALLSSHRSGSGNATEDGLDLDLPFSGCRKRELPASRRTIEWNPKKDRFLLVICISGQMSNHLICLEKHMFMAALLGRTLVVPSQKADYQYDRVLDINHINDCIGRKVVITYEEFVEKRKKVAIDQFICYAASPPCFLDEEHIKKLKGLGISLSKIEAAWPEDAKLKEPKKRSVGDIAPKFSTEAEVLAIGDMFYADMEDEWLNQPGGPLAHKCKALIQPSRLIVLTAQRFVQTFLGGNYIALHFRRHGFLKFCNVKKESCFFPIPQAAECILRIVEKANAPVIYLSTDAAESETNLLQSLVVFNDRQVPLVKRPEHHSSEKWDALLNRNRMGGDGQVDAMLDKTICALSNVFIGSSGSTFTEDIFRLRRGWGSASHCDEYLCQGELPNFIAELD

SEQ ID NO: 328477 - protein, 73 aa, Zea mays
  Clone ID: MRT4577_62636C.1.pep
MGFVLVVSLPFIFLSILLGFGCYFLGKHRGREEMRTGVGAQIYGTPLPPPGVVGASSPPPEPFHSKKQWSEAV

SEQ ID NO: 328478 - protein, 73 aa, Zea mays; identical to SEQ ID NO: 328477
  Clone ID: MRT4577_62637C.1.pep

SEQ ID NO: 328479 - protein, 73 aa, Zea mays
  Clone ID: MRT4577_62638C.1.pep
MGFVLVVSLPFIFLSILLGFGCYFLGKHRGREEMRTGVGAQIYGTPLPPPGVVGASSPPPEPFHSNKQWSEAV

SEQ ID NO: 328480 - protein, 73 aa, Zea mays
  Clone ID: MRT4577_62639C.1.pep
MGFVLVVSLPFIFFSILLGFGCYFLGKHRGREEMRTGIGAQIYGTPLPPPGVVGASSPPPEPFHSKKQWSEAV

SEQ ID NO: 328481 - protein, 101 aa, Zea mays
  unsure (1)..(101): unsure at all Xaa locations
  Clone ID: MRT4577_6263C.1.pep
CTYLSLIPEGTPXSFTLSSILINLIYIILIFHIERISTQERGSSSHTLPTTHLILTAHLIFTHNLFFNKTYLIAQKLLLHILLFSTSSISPSLDLALLQFH

SEQ ID NO: 328482 - protein, 102 aa, Zea mays
  unsure (1)..(102): unsure at all Xaa locations
  Clone ID: MRT4577_62640C.1.pep
MKTILASETMDIPEGVTVTVEAKLVTVEGPRGKLTRNFKHLNLDFQLQEGGRXISHVQNLIKGVTKGYRYKMRFVYAHFPINASITNSNTAIEIRNFLGEKK

SEQ ID NO: 328483 - protein, 43 aa, Zea mays
  Clone ID: MRT4577_62641C.1.pep
VPYLIQKSLGKYIYYTPIFKLNNMLNLMRMNPNRIILKYKEKT

SEQ ID NO: 328484 - protein, 75 aa, Zea mays
  Clone ID: MRT4577_62642C.1.pep
RVKRSDRIFFRGLPHYFTVGGQPQLVESFRPMKGFHVRTESQTGNSKGYALWVYQDLNVTDIASAAINGMPMGDK

SEQ ID NO: 328485 - protein, 73 aa, Zea mays; identical to SEQ ID NO: 328477
  Clone ID: MRT4577_62643C.1.pep

SEQ ID NO: 328486 - protein, 146 aa, Zea mays
  Clone ID: MRT4577_62644C.1.pep
FQLQEGGRKLKVDAWFGTRRTMAAIRTAISHVQNLIKGVTKGYRYKMRFVYAHFPINASITNSNTAIEIRNFLGEKKVRKVDMLDGVTILRSEKVKDELILDGNDIELVSRSAALINQKCHVKKKDIRKFLDGIYVSDKGVIEEEQ

SEQ ID NO: 328487 - protein, 190 aa, Zea mays; identical to SEQ ID NO: 325958
  Clone ID: MRT4577_62645C.1.pep

SEQ ID NO: 328488 - protein, 44 aa, Zea mays
  Clone ID: MRT4577_62646C.1.pep
VLLVPLRDQLSPGDPLSSTKKKLPRPMADLLEESEHRRPMPCAT

SEQ ID NO: 328489 - protein, 190 aa, Zea mays
  Clone ID: MRT4577_62647C.1.pep
MKTILASETMDIPEGVTVTVAAKLVTVEGPRGKLTRNFKHLNLDFQLQEGGRKLKVDAWFGTRRTMAAIRTAISHVQNLIKGVTKGYRYKMRFVYAHFPINASITNSNTAIEIRNFLGEKKVRKVDMLDGVTILRSEKVKDELILDGNDVELVSRSAALINQKCHVKKKDIRKFLDGIYVSDKGVIEEEQ

SEQ ID NO: 328490 - protein, 222 aa, Zea mays
  Clone ID: MRT4577_62648C.1.pep
LTDSLPQREWVADDHIHPFPPFPSPTSPPPLALALPQPESGGNGREGRTRFYGDGGAGPHHQYHYQGLHPFPLPFHVPLHAGAGAPAAGPGPGADADASTHNANAAHHSQPPRGFTDWSASNSAFAAVASQPAPATTNTPFHYNLSQSYALWTHYMLNKNVSYSTYPTPHEEHPHPLRHTHIQENPHPLRHTHIPDKDSGCASSLGFDSFTTMSLGPNICFH

SEQ ID NO: 328491 - protein, 190 aa, Zea mays; identical to SEQ ID NO: 325958
  Clone ID: MRT4577_62649C.1.pep

SEQ ID NO: 328492 - protein, 93 aa, Zea mays
  Clone ID: MRT4577_6264C.1.pep
ERFIIFQNGMSSELCDLHMKCYHRSHLVVVLLCRLLCFLLCVLFFYFSFAQSGFIQVLFRILHHTGRWMMHIYMHPHNIRYYISNGSSSTLCA

SEQ ID NO: 328493 - protein, 51 aa, Zea mays
  Clone ID: MRT4577_62650C.1.pep
SSRLHPHHSRPAVRSAGQAVSRLTACAPSALLPEQASSCAPCDDPSSSCSV

SEQ ID NO: 328494 - protein, 276 aa, Zea mays
  Clone ID: MRT4577_62651C.1.pep
VAGRPHPSVPPFPSPFPLSGARVMGQMGGPDGDGPHHQYHYQALLAAVQNPSQGLHVPLHAGAGAPAAGPGPRPGADADASSTHNANATPHSQPPRAFTDWSASNSAFAAQPAPATTNTPFHYNLSQSYALWTHYMLNKNVSYSTYSTPHEPLRHTHIPDKYSGCAFSLGFDSFTTMSLGPNICANMTPMERSISAKEPENSEDLPTVVRSSDEMDTRNSGDVRRDTVDTLPESKQSHESCARYQVILRKELTKSDVANSGRIVLPKVAYPIILGS

SEQ ID NO: 328495 - protein, 369 aa, Zea mays
  Clone ID: MRT4577_62652C.1.pep
MGQMGGPDGDGDGGAGPHHQYHYQALLAAVQNPSQGLHPFPLPFHVPLHAGAGAPAAGPGPGADADASTHNANAAHHSQPPRGFTDWSASNSAFAAVASQPAPATTNTPFHYNLSQSYALWTHYMLNKNVSYSTYPTPHEEHPHPLRHTHIQENPHPLRHTHIPDKDSGCASSLGFDSFTTMSLGPNICSHMTPMEGSISAKEPENSEDLPAIVRSSDEMDTRNSGKVHRDTVGTLPESKQSHESCASVNNKFNSGEYQVILRKELTKSDVANSGRIVLPKKDAEAGLPPLVQGDPLILQMDDMVLPIIWKFKYRFWPNNKSRMYILEAAGEFVKTHGLQAGDALIIYKNSVPGKFIIRGEKSIQQTNP

SEQ ID NO: 328496 - protein, 72 aa, Zea mays
  Clone ID: MRT4577_62653C.1.pep
TNLEMNPFEKHKIYSSLFLHSKDGLQLSLEAQHFTLSATYYYNFKNLNPRSKRFRFPSLPGILGTPIISNPM

SEQ ID NO: 328497 - protein, 77 aa, Zea mays
  Clone ID: MRT4577_62654C.1.pep
AKMVIQRKPPIITPVRTPGLCPGNPSPLSAGCVALGGIQICAVFGLIRLCGIGIFQPLKLYGCVHCAQQSKKKRANC

SEQ ID NO: 328498 - protein, 82 aa, Zea mays
  Clone ID: MRT4577_62655C.1.pep
TSQPTGKDADTITFKNNDGFPHDVVFDEDEVPSVGDATNISQDENLNAPGETYSVTLTVPETYDFYCETHLGAGMAGKITIN

SEQ ID NO: 328499 - protein, 334 aa, Zea mays
  Clone ID: MRT4577_62656C.1.pep
MANTAKGKVCVTGASGFIASWLVKRLLESGYHVLGTVRDPGNGKKVGHLWGLEGAKERLQLVRADLLEEGSFDDAVMACEGVFHTASPVVTGSNSKEEMLDSAINGTMNVLRSCKKNPSLKRVVLTSSSSTVRIKDEADLPPNVLLDESSWSSIEFCESLQIWYAVAKILAEKAAWEFAGEHRIDLVTVLPTFVVGPTLSPELGPTASDVLGLFQGETGKFTTYGRMGYVHIDDVARCHMLAYEAAGARGRYICSAAVLDCGDLAALLARRFPAYPVPRSLPRAYGEQSYGFDTSKARALGLAEFKGVEEMFDDAVASFIGHGHLPAAEERRHA

SEQ ID NO: 328500 - protein, 88 aa, Zea mays
  Clone ID: MRT4577_62657C.1.pep
KVGPKKTQPKGALAPLKNPILGPLGKVLGHLGRGVSCQRGFFSKQAPGKKPASRLSFNGEFWGAAKGQFWGAAQGQFGGGGQGFPGGK

SEQ ID NO: 328501 - protein, 42 aa, Zea mays
  Clone ID: MRT4577_62658C.1.pep
DQGWPASSQSIETGSNWAPISGRVSALSIVRRARGCRKLHTI

SEQ ID NO: 328502 - protein, 210 aa, Zea mays
  Clone ID: MRT4577_62659C.1.pep
SHINILINSRYTYKKSLKKLKVIKLQKSNPMDFNGRTPLVGGASPCAALALVVAAWLFFLLLAVAPTPAGIRGQRRDTGLSVVEVGTIDGGGSGRSLSTFLPCSSAVFIGVGVDEDAIRASRRAAADGCGCPSVQQAAADGLCLRASGGPGRLGLRGPGSASEAPGERRSGRLGELCPASGGRRLRTAQCLSEQLMGASGWLPAGREGLT

SEQ ID NO: 328503 - protein, 113 aa, Zea mays
  unsure (1)..(113): unsure at all Xaa locations
  Clone ID: MRT4577_6265C.1.pep
ECGFDAYLQXXLXPFXQXXTXYSKQXQLIIFNQLXALNPAXYLXQXXLLPCSQXXASSXASFLTQEQXLPFYQXXAXNXXTXLQLXQXXXFXXLALTXXVFCYQXHXIGXALF

SEQ ID NO: 328504 - protein, 98 aa, Zea mays
  Clone ID: MRT4577_62660C.1.pep
NWTFFKFKQFKTTIFYPPVMGEKKLTNLRQVNGNIRLGHISITQGYGALKNKPGWFKKKPRGTTFNFVLSAPPSVDGPDQQPMANGVRYISMPRGKPT

SEQ ID NO: 328505 - protein, 70 aa, Zea mays
  Clone ID: MRT4577_62661C.1.pep
YFSNPLYLGPCAVNKTLTCPHFKIPHLSQNPAARPCQALQPFRRPPGPRASISTVTTESVAKAEDRSSAA

SEQ ID NO: 328506 - protein, 143 aa, Zea mays
  unsure (1)..(143): unsure at all Xaa locations
  Clone ID: MRT4577_62662C.1.pep
ETSPNIYPQKKATKTRGTTKHQHTRPRSQEHAEEQTKTTAAAKNTRGTNNPPGAQPAPHRNHTEEDAEHNRHTEGQKPGGNAKEXGYFFYPPPPGEXXHATENPEQPTEKKETRKTGPDTKKATAHHKNKAEGNTTGAKEKTK

SEQ ID NO: 328507 - protein, 75 aa, Zea mays
  Clone ID: MRT4577_62663C.1.pep
FKKLVTCQFKRFGAPQKFPTKKERFQAGTLETAMPMKIFFSQKFHPKIQPGQRLEHPTHKTQSPSSTHLYHLPPQ

SEQ ID NO: 328508 - protein, 107 aa, Zea mays
  Clone ID: MRT4577_62664C.1.pep
NVLLVAGRLKLADALQNYNLYFPTFLDFRGRNYRYGPFHYHERDLVRSLILFAQSGVTDTPPDKGSQGIRTFMASTAFHYSKYWKNYNEGIIWVIKNIHECPDLNSN

SEQ ID NO: 328509 - protein, 156 aa, Zea mays
  unsure (1)..(156): unsure at all Xaa locations
  Clone ID: MRT4577_62665C.1.pep
RATCLSTGTSRIKEASLPTASCWTLPDHPKLPKGKPWAVVELDGWGEANPDQYNCIHVAQTPVMDSVKNGAPEKGRLANAHATGVGLASDDDMGHSERGHNALGAGRTFDQGAKLGEQALVSXKTYDGHGSNYIEEPFENGTLHLIELXSDWGVHS

SEQ ID NO: 328510 - protein, 76 aa, Zea mays
  Clone ID: MRT4577_62666C.1.pep
PTLTLTFSHLRTMTFIVIIENILLTLRLKNSNTQHNRNTTSLYILTTTLSQTSIIYTSQILSIIHTLTPSTSYLTF

SEQ ID NO: 328511 - protein, 99 aa, Zea mays
  Clone ID: MRT4577_62667C.1.pep
GNAPPFRFPPRVLGIFGLPLLSFWAFPIMPSFPFFLLKLCVFRSPFSLGSPFRLLAPAAASPHFYIFFFFFPFFFFFSLFGETPDKIQKNPPRRKKYKK

SEQ ID NO: 328512 - protein, 73 aa, Zea mays
  Clone ID: MRT4577_62668C.1.pep
RLIANWWHKHLRAKVWAQKWGIIFLLSGGGLSQTFGLKHRLVFLGAGDPPRGTSVRGGVRLVANKTVSGGAGP

SEQ ID NO: 328513 - protein, 80 aa, Zea mays
  Clone ID: MRT4577_62669C.1.pep
RSLDRPGVHRDALSCPCPPPLLHLRSARGGLPTPRHIVFMHLPVSASQLSRPRCAIRCSPLLRRRRGKGKKREGGSTWGF

SEQ ID NO: 328514 - protein, 110 aa, Zea mays
  Clone ID: MRT4577_6266C.1.pep
TIIYIQVLSIHMFFLVFRSDATTLRSLGASLSTVLDGKHIFRQYMGFLEMRLVNKGSNKHLCFVDFATPAQAFFAMRNLQGYKFDEQDPHSRILNLQFSRSPRMGSHGGS

SEQ ID NO: 328515 - protein, 116 aa, Zea mays
  unsure (1)..(116): unsure at all Xaa locations
  Clone ID: MRT4577_62670C.1.pep
GEPPVGGHHKAKFLKAGAPGSRGGPGPRGGGDRERGGPPGEKRGPVFAHLKVPPEEGVLAPPRGGGPPQSPRGWEKKGSVLFPPETSQGVFFSETNTAGGPPPLGGMXERPPQRVF

SEQ ID NO: 328516 - protein, 54 aa, Zea mays
  Clone ID: MRT4577_62671C.1.pep
ALQGYSCRIIRGKIECQLPPLLPGQENTSRIQFPQDCIPQVTHMTQLFGAQMAK

SEQ ID NO: 328517 - protein, 81 aa, Zea mays
  Clone ID: MRT4577_62672C.1.pep
MAKDLAFVLLVLAALAAFSSATKLTIHNLCPHPVWPLVTPNAGLPSISDNAARLDTNAILSLTFPSTFWAGRVAARTGCDD

SEQ ID NO: 328518 - protein, 119 aa, Zea mays
  unsure (1)..(119): unsure at all Xaa locations
  Clone ID: MRT4577_62673C.1.pep
VCKKDDIXRGMVLAKPGSITPNTMFDADEYVLKKEEGGRYXPFFPGYQPHFSFKXTDVTGNVTEIMNDKNDEANICMPVDRIKMAVQNIHPAACXQGMRFAIPXDGKTVGAGFINKIIE

SEQ ID NO: 328519 - protein, 303 aa, Zea mays
  Clone ID: MRT4577_62674C.1.pep
MKNVAKCDTWCELQNPANHRVFERKLRPRPLGRGHACLGVTLRAHLKGWKFLYLNDVECQCELPESYEAYRKQQHRWHSGPMQLFRLCFVDIIKSKIGFWKKFNLIFLFFLLRKLILPFYSFTLFCVILPMTMFAPEAELPAWVVCYIPATMSLLNILPAPKSFPFIVPYLLFENTMSVTKFNAMVSGLFQLGSAYEWVVTKKSGRSSEGDLIALVEKQPKQQRVGSAPNLESLTKESSSLKRDSKRKKHNRIYRKELALSFLLLTAAARSLLSVQGIHFYFLLFQGVSFLVVGLDLIGEQVE

SEQ ID NO: 328520 - protein, 96 aa, Zea mays
  unsure (1)..(96): unsure at all Xaa locations
  Clone ID: MRT4577_62675C.1.pep
GEGVESSAAGERQGVPFALGGPLFVPFMVGPITTIPEFNVSALHELQALEDELGDTRDEFSNELCVDELKVLSEEELVERALQEAMEDSXWHSTTT

SEQ ID NO: 328521 - protein, 134 aa, Zea mays
  Clone ID: MRT4577_62676C.1.pep
GINHSISLYTNNKGWHIGKPQRTNCLKGGQSCGGQSRRVILKSKTYPPSFIDPQHKHNQSFTCQAPPFLSRAIQDRRPAQPGETCLGGSRQIHPKTGLPPKVSKQPSCQGQLSVDMTPGIASTISGHPRGEGLW

SEQ ID NO: 328522 - protein, 110 aa, Zea mays
  Clone ID: MRT4577_62677C.1.pep
AAAGLCLADIGDMMTREFTAQQDVLSTLEALCKQARDSVLLLPRLPSFRHPSTDGDGVDEGTAVSGGRKHVSFGDLSFAEWASFLERFEQLLPAALEAKKRAGLRTSSSF

SEQ ID NO: 328523 - protein, 156 aa, Zea mays
  unsure (1)..(156): unsure at all Xaa locations
  Clone ID: MRT4577_62678C.1.pep
MKDLHRARRLSGGMVGSFLNQDGISLDQALPVNPNQVQVPAPSAPKSSAASSSGFVHPQQRSSITKICSHPGCXKRARGSSGRCIAHGGGRRCQKEGCNKGAEGRTIFCKAHGGGKRCERLGCTKSAEGRTDFCIAHGGGRRCSHDGCKRAPRSWL

SEQ ID NO: 328524 - protein, 106 aa, Zea mays
  Clone ID: MRT4577_62679C.1.pep
ITKKNHSFFFFFFSFFFSYCFLFFPIERELNTTPRKYSRDPTKHQRKNGGNLIKKARNIKRKIPLIGKKNPGSQKEKHPLKKNKNLAKKKTHLQKKKEPPKPKKEF

SEQ ID NO: 328525 - protein, 43 aa, Zea mays
  Clone ID: MRT4577_6267C.1.pep
LGFLQSSWDPYWHSFYAVGLIVTKYRTTDISKSQYYAAYINSI

SEQ ID NO: 328526 - protein, 631 aa, Zea mays
  unsure (1)..(631): unsure at all Xaa locations
  Clone ID: MRT4577_62680C.1.pep
MEPRHGRSAFTISFSNPNGFANQCTAIPAVSYSAAGSSQLDVLAPTRGCKRKWTELALGLGDTSSSDSSKQSMGTGCTVSSLKGSDDVSCMDYDISFKLSLGNEDTSKLHKQACGSKRTMEKPRLDLKLSLAPSQSDVTDADLIRSSAPQDMFXAVLDVLSANXDEGSTSAXSIWRHGGFLPXQAGISPNQLPPLNSHLVQGPACSAPTVLQLPKSSAATSSGFVRPQQRNGSTKICSEPGCAKGARGSSGRCIAHGGGRRCQKEGCNKGAEGRTIFCKAHGGGKRCERLGCTKSAEGRTDFCIAHGGGRRCSHDGCKRAARGRSGLCIKHGGGKRCQTLNCTKSAEGRSGMCIAHGGGRRCQYAGCGKGAQGSTNFCKAHGGGKRCTHPDCSKGAEGSTAFCKAHGGGKRCSADGCTKSVHGGTQFCVAHGGGKRCVVEGCGKSARGRTDRCVGHGGGKRCHSAGCGKSAQGSTDFCKSHGGGRRCSWGHPGSDLGSGGAPCDRLARGKKGLCDRHNPLVHDNSVHGGASFGGFSVVSAAALSEGDGSPSPGTETSMRSFFMHAVEAPRCVAASAHEGRVHGGNFMPIMLDGGVGLGKRPADNADAGASAPPRSWKSMEKACGSAPRSWL

SEQ ID NO: 328527 - protein, 94 aa, Zea mays
  Clone ID: MRT4577_62681C.1.pep
VLWHTFSSLALKELNHRKIKDRSTSPDSMPMKEPIAVAQARRFSRLTSFPDIFLNAKYIPETATNTPPKEGSHRQLSPSNRIFRSTSGNDNVHS

SEQ ID NO: 328528 - protein, 410 aa, Zea mays
  Clone ID: MRT4577_62682C.1.pep
PLSGSSPSSFSTKSSAASSSGFVHPQQRSSITKICSHPGCAKGARGSSGRCIAHGGGRRCQKGGCSKGAEGKTIFCKAHGGGKRCEHLGCTKSAEGRTDFCIAHGGGRRCSHEGCKRAARGKSGLCIKHGGGKRCEKPNCTKSAEGRSGMCIAHGGGRRCQYAGCGKGAQGSTSFCKAHGGGKRCTRPDCSKGAEGSTAFCKAHGGGKRCSADGCTKSVHGGTQFCVAHGGGKRCVVEGCRKSARGRSDRCVGHGGGKRCHSAGCGKSAQGSTDFCKSHGGGRRCWWGHLGSGGAPCDRLARGRKGLCDRHNPLVDDNSVHGGVSFGGFSTLSEGGAETSFFMHTVEDPRHVAPSAREGRVHGGNFMPFMLDGGVGLGKKPANNADASTSAPRSCKNMEKPGGSAQRSWL

SEQ ID NO: 328529 - protein, 218 aa, Zea mays
  Clone ID: MRT4577_62683C.1.pep
MVKLTMIARVTDGLPLAEGLDDGRDLKDADFYKQQAKLLFKNLSKGHHEASRMSIETGPYYFHYIIEGRVCYLTMCDRSYPKKLAFQYLEDLKNEFERVNGNQIETAARPYAFIKFDTFIQKTRKLYLDTRTQRNLAKLNDELYEVHQIMTRNVQEVLGVGEKLDQVSEMSSRLTSDTRIYADKAKDLNRQALIRKYAPVAIVIGVVLMLFWLKNKIW

SEQ ID NO: 328530 - protein, 64 aa, Zea mays
  Clone ID: MRT4577_62684C.1.pep
ELFSFLSCRRRRQRQAPAASAWLTDVHAQELRTPRRAMSDVQGAAYDRQSHVARSSTSPLLSFS

SEQ ID NO: 328531 - protein, 218 aa, Zea mays
  unsure (1)..(218): unsure at all Xaa locations
  Clone ID: MRT4577_62685C.1.pep
MVKLTMIARVTDGLPLAEGLDDGRDLKDADFYKQQAKLLFKNLSKGHHEASRMSIETGPYYFHYIIEGRVCYLTMCDRSYPKKLAFQYLEDLKNEFERVNGNQIETAARPYAFIKFDTFIQKTRKLYLDTRTQRNLAKLNDELYEVHQIMTRNVQKFLGVXEKLDQVSEMSSRLTSDTRIYADKAKDLNRQALIRKYAPVAIVIGVVLMLFWLKNKIW

SEQ ID NO: 328532 - protein, 115 aa, Zea mays
  unsure (1)..(115): unsure at all Xaa locations
  Clone ID: MRT4577_62686C.1.pep
MVGSVVIVGIFVALLAVDDEEAVYTVVNQCPFTVXRVPVPVGXGGRQLNRVESCWITDPAGTTGAHIWARTVCQFDASGRGSCPTYDCAXLIKCTELRRAPNTLAEYAMNHCHNP

SEQ ID NO: 328533 - protein, 163 aa, Zea mays
  unsure (1)..(163): unsure at all Xaa locations
  Clone ID: MRT4577_62687C.1.pep
NFWVDPPVRERFGYAFMTPVHIFMDGDGLKXSTGHGPVINQSHVQKVEKLINDPTSMGANGMLCGIRHILGMIFYEPTVLGDGSNDLLLFQDEGFGPFVPLXIRSRTVEEAVXTVSDTHTGLAAYIFTESXVPHAWRVFESIEYXLIXGVNMGIILADVATFG

SEQ ID NO: 328534 - protein, 70 aa, Zea mays
  unsure (1)..(70): unsure at all Xaa locations
  Clone ID: MRT4577_62688C.1.pep
ADAGVGEEKTLITPVQCKNLWRQFRAXTDYTVTQAIAAQEADKKDNHWLATPXWALAAMAILGFXEFMTL

SEQ ID NO: 328535 - protein, 52 aa, Zea mays
  Clone ID: MRT4577_62689C.1.pep
TTPLIKKTLSNHNPNIPQTYHQPKPFTTSHTSHNFKPLTKKQTLPSSNPKRK

SEQ ID NO: 328536 - protein, 205 aa, Zea mays
  Clone ID: MRT4577_6268C.1.pep
IKTWFNQPARKYRRHQNRIKKAKALAPKPAAGPLRPVVHCPTLRYHTKVRAGRGFTLQELKGAGLNKHYARTIGIAVDTRRRNKSVESLQVNIERLKEYRSKLILFPLKSKTNKIKKGEATEEECKTATQLKGVVLPIQQAASKEPEARAITEEEKKFNAFNAICQARLEAKLIGIKEKKAKEAAENPDAAKKATDKKGKGKKKK

SEQ ID NO: 328537 - protein, 83 aa, Zea mays
  unsure (1)..(83): unsure at all Xaa locations
  Clone ID: MRT4577_62690C.1.pep
HSIAWSHGQLPLLFLFPLYNPIPAIPGSLKLDRDACANIGAVLTPCHGEMRELKGEHHHKVVEISEKXAGRCLFRIGVDSGVG

SEQ ID NO: 328538 - protein, 181 aa, Zea mays
  unsure (1)..(181): unsure at all Xaa locations
  Clone ID: MRT4577_62691C.1.pep
PRIQISERRPFVLVFPTAARRGVVADSVDSVVSSAAAALLLPHPRRTAVEVQDGRRARLTDEDLDERGPGQRVSAHEPQRGEQRRHEDLLGXRPGGAGARPARAGRQTRCRSRAPARNGMEGEPRRRARWPARRGRRPGLRRRSRPGGGRRTFSAAAGTWRTGRGDADRFGRSPQGVSKLY

SEQ ID NO: 328539 - protein, 508 aa, Zea mays
  Clone ID: MRT4577_62692C.1.pep
RPGRPRLLICGGESVGLDHVGPAVLHELEKFSVHSLGLPSLLSDPSAKTPEEALVHIFGEAKRTTPSILYIPQFHLWWDTAHEQLRAVLLTLLNDLPSNLPVLLLGTSSVVFTDLEEECASIFSSRNVYQVDQPSFDDRLRYFSILFESLLSFQMEESRNKSKKQKSAIDLPKAPKEVEGPKVSELKARAEAEQHAVRRMRMCLRDICNRILYNKRFNVFHFPVLEDEVPDYRSIIHKPMDMATVLQRVDSGQYLTRAAFIKDIDLIVSNAKTYNGDDYNGSRIVSRACELRDVVQGMLSQMDPSLVSFCDKIASQGGPLQAVDDEDRAILQAAPVAQLVSGTRISARLRNVQPEVNLSQSYEVLRRQKKSAENEQSMTRDEKSPEDVDLSKPTDAEEAAKEPESNGTTKEANDSPAKEPEVSTSPEPMESDNGKIAAATGDDLLEQLEALKQRFMELTASYGVPQLERLYSKIMKGAIELTSKESNEDHRRLVVRYLWTFVENSNNF

SEQ ID NO: 328540 - protein, 590 aa, Zea mays
  Clone ID: MRT4577_62693C.1.pep
ITYVHITYDAEQSKCKYLGVELGKTQDLEDTKRAHDLEEQYNEAKSTIKEKEYVIFNLLKSEKSLVDCAYNLRAELENAAADVSGLFSKIERKDRIEDGNRSMVQRFRSQLTHQLDALHKTVSSSVMQQEDHLNEMEHDMQSFVSSKDEAAQGLREGVQKLKVLHGSGITALDELAGEIDMNSRTTFERLNSQIQSHTSALENCFGGIASEADNLLDELQRSLSKQEERLAHFAVKQREGHLRAVEASRSISKITAGFFHSLDVHASRLTSILEDTHSVQDQQLLDLEKKFEECAANEEKQLLEKVAEMLASSNARKKKLVQTAVGSLRESAVNRTSHLQKEISTAQDLTSSVREKWGFYMEETEKNYAEDTKAVDSGRSCLAEVLVECKAKATVGAQQWKNAEDSLFSLGKGNVESVDSIVRTGTEANELLRSKLSSAASATLEDIDVANEALLSSIDSSLKLDRDACANIGAVLTPCHGEMRELKGEHHHKVVEISESPGKCLEEEYLVDEPSCSTPRRRRIDLPGVESIEELRTPGYAELLKSFREARGSWKLANGDVTGHLPEAAQDPASSPPPAVGSRTPLVGRN

SEQ ID NO: 328541 - protein, 59 aa, Zea mays
  Clone ID: MRT4577_62694C.1.pep
MALSACPAQEELLQPAGRPLRKQLAAAARSINWSYSLFWSISSTQRPRVLTWTDGFYNG

SEQ ID NO: 328542 - protein, 221 aa, Zea mays
  unsure (1)..(221): unsure at all Xaa locations
  Clone ID: MRT4577_62695C.1.pep
RYQVDQPSFDDRLRYFSILFESLLSFQMEESRNKSKKQKSAIDLPKAPKEVEGPKVSELKARAEAEQHAVRRMRMCLRDICNRILYNKRFNVFHFPVLEDEVPDYRSIIHKPMDMATVLQRVDSGQYLTRAAFIKDIDLIVSNAKTYNGDDYNGSRIVSRACELRDVVXFVLTFSYIRLLTMPLQIIVVVSNEPLFGQVQGMLSQMDPSLVSFCDKIASQG

SEQ ID NO: 328543 - protein, 246 aa, Zea mays
  unsure (1)..(246): unsure at all Xaa locations
  Clone ID: MRT4577_62696C.1.pep
GRALLTPSCCYLPLLCCTPCPCSPRLQAPSLGLISLSLPPPNVSQSVYPLRSDSNHQRCSRRRHHLSVRHLDLRAHLNRGAPPLLLQWRRLYPPHLNLSTASRRSSIRRCSPRCGSWAKTRCPGPRSSRSSSVSLARRPSCTSTAVRLGWGRNAALLTTLSTLSGTTPLLAAVGKTSTKGQRSERKDRIEDGNRSMVQRFRSQLTHQLDALHETVSXXVMQQEDHLNEMEHELQSFVSSKVEAAQG

SEQ ID NO: 328544 - protein, 242 aa, Zea mays
  unsure (1)..(242): unsure at all Xaa locations
  Clone ID: MRT4577_62697C.1.pep
PPTLQQEAPPPPRATSGSSSPPESRSTAPPAPTVLPLPAVFPPLVDPRCLPPRAYPNXSSTPPPTAPTASPSXSPPPSTRGSPLLLASPQARHYCPRRSPDPAAGSRSRRXADGIRTPAGARLRHXLMPRVRRTCSCAAGPGLSPGPRRSSCRCCSPRCGSWAETRFPGPRSPRSSSVSLARRPSCTSTAVRPGWGRNAALLTTLSTLSGTTPLLAAVGKTSTKGRRSGHCTSWDGGETDAI

SEQ ID NO: 328545 - protein, 125 aa, Zea mays
  Clone ID: MRT4577_62698C.1.pep
MFLRRLRTSAAVRRGATDGGVLAAVRAELANEISSSAPPPFRSELAPDFDTVSDAPRAQDVLLRRRAGSEEVLVSALLAPLRFVGRDPLPRAALVKVFVSKPGAAPVLHFDCRASWVGGGGARRC

SEQ ID NO: 328546 - protein, 212 aa, Zea mays
  unsure (1)..(212): unsure at all Xaa locations
  Clone ID: MRT4577_62699C.1.pep
PTVHTAGSPWQRRNQIGVTGSAAQSNQYRDHHHHHKNANPLQPDSRLIGLPIHPVTWQFPSYFTVAINPESKSRATNREVLNELIKLYGKTSLGGKLPAYDGRKSLYTAGSLPFESEEFVVTLVDPEKKEKERVEREYKITIRIAGRTDFYHLQQFLLGRQRDMPQETIQVLDVVLRESPSXDYVTVSRSFFSTTFVTEVISXGLECWRGYY

SEQ ID NO: 328547 - protein, 42 aa, Zea mays
  unsure (1)..(42): unsure at all Xaa locations
  Clone ID: MRT4577_6269C.1.pep
ATPLGEGKXGEMIDVTNNFVLHPCSYHIIRSNLKFIFLVNRN

SEQ ID NO: 328548 - protein, 363 aa, Zea mays
  Clone ID: MRT4577_626C.1.pep
MSCCGGAEEDSYGPPANQAVPPPNANAPGNRGGPRGPGAPRVGGPAKPVSIDVPAIPFDELKRITNNFSDRALIGEGSYGRVYNATLSDGRAAVIKKLDTSASQDSDTDFAAQIAMVSKLKNEYFLELLGYCLEDGNRMLTYQFATMGSLHNILHGKKGVQGAEPGPVLNWAQRVKIAYGAARGLEYLHEKVQPSIVHRDIRSSNVLIFDDFSSKIADFNLTSQGTDTAARLHSTRVLGTFGYHAPEYAMTGQINQKSDVYSFGVILLELLTGRKPVDHTMPKGQQSLVTWATPRLSEDKVKQCVDPKLDSDYPPKAVAKLAAVAALCVQYESDFRPNMTIVVKAITPLLNAPKPAAPAAPQS

SEQ ID NO: 328549 - protein, 80 aa, Zea mays
  Clone ID: MRT4577_62700C.1.pep
PPETPAATHAGGESLGSKPNLLYGLVGFCSTCKKGQEMGGAGAGTNWIHHIQPLIAAKVSVEAVELRQSPVIDASLNLIL

SEQ ID NO: 328550 - protein, 58 aa, Zea mays
  Clone ID: MRT4577_62701C.1.pep
RSRNIPGSYPRRLVRTTHYNSRSSSHNPHLSAPSACKECRSLCDKPVTRQRRISRSSV

SEQ ID NO: 328551 - protein, 92 aa, Zea mays
  Clone ID: MRT4577_62702C.1.pep
SPCPCIRCGVSPSLWGSVLIFKMRGIFSDYSVELEICVFVSIVVIPGVLLLLLVRAGCHMCLPLDFCRLLAEALWFSFFWFVLGVSAFALAT

SEQ ID NO: 328552 - protein, 138 aa, Zea mays
  Clone ID: MRT4577_62703C.1.pep
GFPRQVGLPVLQAGGSKLLSSTSSVTNAGSADGAPFEPAAVLQETPAVATAAASTAQNTKHRRLFNLSADFQAWFQKPLSKEAGAALEALFNIHMPDTEHVDKALMGIAGEAIEEIQDEMGNLQAEARSNAAARLVAV

SEQ ID NO: 328553 - protein, 39 aa, Zea mays
  Clone ID: MRT4577_62704C.1.pep
QHNQQSLGHVQQHEQSHEQHHGQSPASQHWQLYQGDDKL

SEQ ID NO: 328554 - protein, 115 aa, Zea mays
  Clone ID: MRT4577_62705C.1.pep
RGGNRRPGCYHLGGAPGIMHQVYCSREHEPTDALTCRELRLPHNTSTTLCQTQWTHHRQRSLMTGDHPAHYICELELWVELQTARVIVPPVGCEGFHALQSSGNHSKKFMIDPFY

SEQ ID NO: 328555 - protein, 351 aa, Zea mays
  Clone ID: MRT4577_62706C.1.pep
MTSHARVRKLGIRLEAAHQLLPWLGAAPFSEPAAVAGLGAAMGAYACDGVGGLGHGGVFGFGFDAAVQQQQQQQRAADGSGKAVVVSGLLGSLQAELGRMTAREMMDAKALAASRSHSEAERRRRQRINGHLARLRSLLPNTTKTDKASLLAEVLDHVKELKRQTSAMMAATDADADADDEGAGRTQAQAQAQLLPTEADELCVDAGADGAGRLVVRASLCCEDRPDLIPDIVRALAALQMRARRAEITTLGGRVRSLLLITADRRADVQRGGGGGGGDGDDDEEEEDEEEGGERAASHRRHECIASVQEALRGVMDRRTASSCDTSSSGGGGGSIKRQRMNYGAQEQCSV

SEQ ID NO: 328556 - protein, 59 aa, Zea mays
  Clone ID: MRT4577_62707C.1.pep
VICCTASPRSTSMITRMRHLPHGWLSMLVSLGIQPVIAGCEVVLHRPYLYIYPSRSLSA

SEQ ID NO: 328557 - protein, 51 aa, Zea mays
  Clone ID: MRT4577_62708C.1.pep
RRPVSSMILRPASTCINESLRPPNESRGPVMQGPGAATYDDDSGITAVNDR

SEQ ID NO: 328558 - protein, 70 aa, Zea mays
  Clone ID: MRT4577_62709C.1.pep
GGACLVLLVLNIRSCRLCLVCFRCMGCCDLCVCVCGARGKPPHILLKNPPIKKGGGRRENGRPRSYFRRG

SEQ ID NO: 328559 - protein, 94 aa, Zea mays
  Clone ID: MRT4577_6270C.1.pep
VTVMVITFSRMILSLRRGLLLHQEYDGHYGVHHSQHPGLELVYVLDVVAKFHQFVFCVGPFRVSSRPFRRPEVASHYLTSWSIHRRFYNVSEIE

SEQ ID NO: 328560 - protein, 129 aa, Zea mays
  unsure (1)..(129): unsure at all Xaa locations
  Clone ID: MRT4577_62710C.1.pep
HRAAAYEQQQFIPLFHGCSLYAAFYVQRYLLPYSQILCTSAQQFLTFIKLLALNSXCYLQQQXLTPFNSVLYVSPPPFVTQQQLXPFCLHSAPNCGASSEXQHSPPPHHLALATPAAFYHXPIIGGALF

SEQ ID NO: 328561 - protein, 84 aa, Zea mays
  unsure (1)..(84): unsure at all Xaa locations
  Clone ID: MRT4577_62711C.1.pep
RKGNEPVTVSKLLGYSSAAVWTFHEFVKSEIKSFRENADGAAVAVSSDDWYHPQSIEELXRLFDSYWFDESYVKIVAAKSGSGV

SEQ ID NO: 328562 - protein, 88 aa, Zea mays
  Clone ID: MRT4577_62712C.1.pep
RSSFSSNGGSSSSVSVGKSVRTFRTREPAVFQDQSQELPDDSGDDRARAGRARIRGAVRLQSLSVHFQVPVREVQERPYLGGVAVSSD

SEQ ID NO: 328563 - protein, 45 aa, Zea mays
  unsure (1)..(45): unsure at all Xaa locations
  Clone ID: MRT4577_62713C.1.pep
LPPTPWRTKSNNVATRPHENTMACAFFXRHRAGRRARRARPGRVR

SEQ ID NO: 328564 - protein, 36 aa, Zea mays
  unsure (1)..(36): unsure at all Xaa locations
  Clone ID: MRT4577_62714C.1.pep
GVRQVVCSSPSCFWXSLSELRPKSETLRLPCLDVWV

SEQ ID NO: 328565 - protein, 89 aa, Zea mays
  unsure (1)..(89): unsure at all Xaa locations
  Clone ID: MRT4577_62715C.1.pep
MEHTPPALFLKPRNAQRGPTPPGKGQGGSRAPXENPGGAPQGGPEETHHGSPKGPPGKGPGGPGGPQPQPIVEKKGXPPPPKLPWAPNP

SEQ ID NO: 328566 - protein, 303 aa, Zea mays
  Clone ID: MRT4577_62716C.1.pep
RPGSTSRPSPRRCLYVYGSASALPKLLLLLLAASSSAQAQQAARMKTDPVEAAAVNALFAKLRQTASSEWNISGDPCTGIATDGTVIEDNGNFNPGIKCECSDQNNITVCHVTKLKIYALNAVGPIPQELQNLTRLINLDLSKNYLTGSLPSFLGNLTAMQYMTLGTNALSGSVPKELGNLVNLESLDIDSAGLSGPLPSSFSRLTRMKTLRASDNDFTGEIPDYIGGGAGSADVGGGGGGAHGGVPVSPYMCIATLLVRLVVFALCRPSLVVVRDTATWNRTIRRKGRGPASQATENNSQFA

SEQ ID NO: 328567 - protein, 62 aa, Zea mays
  Clone ID: MRT4577_62717C.1.pep
FNKKVRRFQSHVRTFSPVMHGPCTADRSRYLMQPCESFPAAMDTSPSPRHSLVHGSFPTRAS

SEQ ID NO: 328568 - protein, 197 aa, Zea mays
  Clone ID: MRT4577_62718C.1.pep
KVHDGIILTQERYASDLLKKVGMSNCKPASSPLSTSEKLSLHEGSLLGSNDATQYRSIVGALQYLTLTRPDIAFSVNKVCQFLHAPTTVHWAAVKRILRYIKQCTKLGLHIHKSPSTLVSAFSDADWAGSIDDRRSTGGFAVFLGSNLISWSARKQPTVSRSSTESEYKAIANATAEIMWVQILLKELNISSPSPRV

SEQ ID NO: 328569 - protein, 79 aa, Zea mays
  Clone ID: MRT4577_62719C.1.pep
YLCIVLLNPILALLRSPFNPRGHFYEEDHPSQLVITLPFYPLSVNEILSLIFLTSLHPSFTPSFMSLICLRRKLWFLSL

SEQ ID NO: 328570 - protein, 101 aa, Zea mays
  unsure (1)..(101): unsure at all Xaa locations
  Clone ID: MRT4577_6271C.1.pep
ANCGGGCPLYAGGGPLDGGRLPAPFLLPPTGPCPTFSFCASLPFFGGGAXGXAPREGRGRGGVPRCRVYCGPHRRSFVPSVRPPLLXVXVGGPPLCPLGAV

SEQ ID NO: 328571 - protein, 243 aa, Zea mays
  Clone ID: MRT4577_62720C.1.pep
MTSRAAAEAALLLPLRLHSAPLRLRFFCTSASRLRWACSAAALLAVVSLVTAICAMPDAGAGTNVEADADALRLEIEALRLKVARLESLLEANSKALDIKASILEEDNKLNEAMEREIQLLTNGPDRTKVRQLQHEIIKINSNSYTVESLAHDTEKRVEALSLEVKKIEDMTAEQWIQIRQLEQAFVLTKMMTSKVHERSRPSDTVYKWPGKEIIVKYVRNIKLDGIYLTGASYVRSCFSHTY

SEQ ID NO: 328572 - protein, 381 aa, Zea mays
  Clone ID: MRT4577_62721C.1.pep
MTSRAAAEAALLLPLRLHSAPLRLRFFCTSASRLRWACSAAALLAVVSLVTAICAMPDAGAGTNVEADADALRLEIEALRLKVARLESLLEANSKALDIKASILEEDNKLNEAMEREIQLLTNGPDRTKNSQSKSYSAGNIKSMEDEVRQLQHEIIKINSNSYTVESLAHDTEKRVEALSLEVKKIEDMTAEQWIQIRQLEQAFVLTKMMTSKVHERSRPSDTVYKWPGKEIIVKYVRNIKLDGIYLRGASYVRSCFSHTYKQSRSFVQAISRCYHEISRFRKAIRHRYTSDINKPDVFFLGGTISRSNISLPYNQFKIFISLARKFHYKAQCFIRDVMESNKYSCGLSNEPVTFILAYLVVISPLWIAWFLYSTWFSSRK

SEQ ID NO: 328573 - protein, 67 aa, Zea mays
  Clone ID: MRT4577_62722C.1.pep
MADAKQQQQQPQQAAAAATGVWKTVKPFVNGGASGMLATCVIQPIDMVKVPYHRTALSPGFLHSARE

SEQ ID NO: 328574 - protein, 163 aa, Zea mays
  unsure (1)..(163): unsure at all Xaa locations
  Clone ID: MRT4577_62723C.1.pep
MPKATHNRPVSLSXNNSPGLQRNAQSIPEIIYAGDKYTSGYLFTYDTMRNRKLTDLRYQIMSSTRIFLAGQKVMQISLVRSPADEATTCLHILSEILQGNSGLLFIDLPRHDVDRMFRXLWEHDFARTGTTAIHTLDLNKGPLEHFTHEMESFLLSSRTSSSL

SEQ ID NO: 328575 - protein, 117 aa, Zea mays
  unsure (1)..(117): unsure at all Xaa locations
  Clone ID: MRT4577_62724C.1.pep
KGREKKKNKASGDKKKGGGPPPFGHKKKKSGKKRPGEVTGREKRGGRSPPPWKKGGKXGKKGXRGPLEGKXGPGKKTRNGKKGGGGPFXPPYPKARKKPGGPPPAQGGKISRQGKRG

SEQ ID NO: 328576 - protein, 32 aa, Zea mays
  Clone ID: MRT4577_62725C.1.pep
KSTYTSHQQCTYIYLQIKIKQTLLTANTTLDS

SEQ ID NO: 328577 - protein, 228 aa, Zea mays
  unsure (1)..(228): unsure at all Xaa locations
  Clone ID: MRT4577_62726C.1.pep
MDGGRAAAVGGDPSPIAAPSNPPALSSRPVDVSLFTHTPCYCEENVYMLCNELIRTGVADPAGTDLYVVFISNEEKKCXSWYFLMCIWKSRRSKEVLDFVWDLDSDLPFPSPFIQYVSEAIQPLSFGNSRYARLFRVVHAPVFLQSFASDRSHMKDPEGNWIQLPPKYEPIVAEDGTTNNLNEYIMMSVGDVADRERMANDVYCNKLGVVLNETIFPEFFAQLPAPHT

SEQ ID NO: 328578 - protein, 34 aa, Zea mays
  Clone ID: MRT4577_62727C.1.pep
AYSKNRHRLYSHIDMSKSEAKSIFRAELTKNTST

SEQ ID NO: 328579 - protein, 242 aa, Zea mays
  Clone ID: MRT4577_62728C.1.pep
MDGGRAAAVGGDPSPIAAPSNPPALSSRPVDVSSFTHTPCYCEENVYMLCNELIRTGVADPAGTDLYVVFISNEEKKVPLWHQKAGHSDDGFICWDYHVICIQSRRSKEVLDFVWDLDSDLPFPSPLIQYVSEAIQPLSFGNSRYARLFRVVHAPVFLQSFASDRSHMKDPEGNWIQLPPKYEPIVAEDGTTNNLNEYIMMSVGDVADRERMANDVYCNKLGVVLNETIFPEFFAQLPAPHT

SEQ ID NO: 328580 - protein, 303 aa, Zea mays
  Clone ID: MRT4577_62729C.1.pep
TKSIVSHLHTKYIVDLQTMESTIAEIDRLRDQQLGPKLLELVKGFAHMWDVMYARHKAQLKIITELKASDISVATRETSEQHHERTLQLWNVVQEWHVQFDRFMTYQKEYIGSLYSWIKLNVIPIDTNIKPNSSQPHEATPPIKRLLHAWHDILEKLPDNETKKAIHTFAEVVNTILVHQDDELKLRLKIDDTRRDLEKKRKQFDSWAQKNWDRGASIPDGDNPGRVDPAAERKAVVDRVENALKDLEDNYRTQCRVVRDKSLNLLRSNLPELFRAVSEFSLQSAGYFKGLWSIAQTNDQLDD

SEQ ID NO: 328581 - protein, 173 aa, Zea mays
  unsure (1)..(173): unsure at all Xaa locations
  Clone ID: MRT4577_6272C.1.pep
HNPPQSQPPGKGVNPXPKKGGGKGPGPARPPKGTKEITPPKPGSGAKLARFLKKPPPPXAAGPQPXGPAPPIHRNPXRXGPINPNPSPPPPXPRPWESHPPPKKNAATPXPPPGGNPPKGKPLQSGPWRPAFPPPGRHPXGVKEHPGGPSQAKRGPPPKTPPTKTRPPKGGSP

SEQ ID NO: 328582 - protein, 49 aa, Zea mays
  Clone ID: MRT4577_62730C.1.pep
RDDTTRQLRVVDKITLYRRVADVKVDHSVLLQEEVVLGGDEQMRVLVVR

SEQ ID NO: 328583 - protein, 34 aa, Zea mays
  Clone ID: MRT4577_62731C.1.pep
IRRAYFKDKQILNTHLNNLSPSIYTTQNFFPITK

SEQ ID NO: 328584 - protein, 76 aa, Zea mays
  Clone ID: MRT4577_62732C.1.pep
TNRNAERPTVLMQGPKKKSPEQKGRKTGLTRGGKNKRSARQPGPLEHDDQSLQRHRAGSHAEPIGLEAPTPEREAA

SEQ ID NO: 328585 - protein, 46 aa, Zea mays
  Clone ID: MRT4577_62733C.1.pep
KIFMAHLPPLHTKSPPFYRVPKFHSLPPGLTTSFLFKTMPIQNSIF

SEQ ID NO: 328586 - protein, 70 aa, Zea mays
  Clone ID: MRT4577_62734C.1.pep
TSPPFKFQRGVFSQKKFWNFDFKQSFKFSFFTPPHAPQQSKVFFKKGAQHLGWLIFPGFVPRILNGRAGN

SEQ ID NO: 328587 - protein, 83 aa, Zea mays
  Clone ID: MRT4577_62735C.1.pep
VIPASTTAGGRTPALVDRVQGITREISNSHQLMGGGSYTNRYTARTDSLLACLRGDSLAIPKRLKDVNVLMDMLFCAVKLNGY

SEQ ID NO: 328588 - protein, 228 aa, Zea mays
  Clone ID: MRT4577_62736C.1.pep
MGNGPSLSPCLNPHLPESSATVRLVYWGGRARQLALTGGGDDAIVTAGDVAAELPPPATGYAVCPADAFFIGLPIPAMSPGEELLPGRTYFVLPAARLPCLKALTPATLAALSQSHGRKKQQPIFAVAGCPFEHVKGAHGGAPLIRVLPEFIEKLITACDAGANASANKDTAAKQAAELCSTPELKRHYAQLVGAGRSRPWSPRLETIAERGRSRWMRLAARTMLSSR

SEQ ID NO: 328589 - protein, 71 aa, Zea mays
  unsure (1)..(71): unsure at all Xaa locations
  Clone ID: MRT4577_62737C.1.pep
DLSFPFHTIXKLHSMASTYLFHFIPXLNYIPWHQYLLIPKKGAALYEVQEPAPEPATEDLPAAYAFEGKPR

SEQ ID NO: 328590 - protein, 92 aa, Zea mays
  Clone ID: MRT4577_62738C.1.pep
YIIVHFLLSSLCTQDVTRWAAVHCPVVLVAESCYIHLGWCIMASQRSHHPVLEGSLAQREWFPVQALASTCLSCTGNTDDQPTSRWCWLLTS

SEQ ID NO: 328591 - protein, 62 aa, Zea mays
  Clone ID: MRT4577_62739C.1.pep
HGHGAPRCKQQLTSHTRWEKLELGLHSSPLLWMGPETGRERDSRSYEDRPSLLLRYACACVT

SEQ ID NO: 328592 - protein, 98 aa, Zea mays
  Clone ID: MRT4577_6273C.1.pep
RLFFFFLRKDFFEPFLNLLKLSHWCVILFLAHSCVKRSTLKGGYTCHCAESSGSLSQSLLLFIFTPARHFRLHSRGQGSSLYVLSEHQGQAAAMVWKN

SEQ ID NO: 328593 - protein, 50 aa, Zea mays
  Clone ID: MRT4577_62740C.1.pep
DRTRPSTPILTPILSTFTKLLSTIPVGLLFYADKHTHHHGAFLINPNPQH

SEQ ID NO: 328594 - protein, 59 aa, Zea mays
  Clone ID: MRT4577_62741C.1.pep
GDFCVPFTLIYRVFKRVGMSLRPNHNFTSTRVKKHYFNLFVDFTYGPGRTWAPIRRGSG

SEQ ID NO: 328595 - protein, 72 aa, Zea mays
  Clone ID: MRT4577_62742C.1.pep
RRIRVRHRGWCRQSREGKPTVATVAAPSLTNHQADAAPPSHADGSGKGARARRCGNQGVGPKRWAQLTAVQA

SEQ ID NO: 328596 - protein, 94 aa, Zea mays
  unsure (1)..(94): unsure at all Xaa locations
  Clone ID: MRT4577_62743C.1.pep
KQKPREQQGNKQAEGPKKGEPKTKPRACANGPSRTSLLGTRLTVNYAXAMRIQTKLWRRHEAILTSKSLDRLGYKGERPIEPSRSXAPPKRPSR

SEQ ID NO: 328597 - protein, 99 aa, Zea mays
  Clone ID: MRT4577_62744C.1.pep
MRVHPAPRKRTIAVQRCASAAAGALGGKKLRRLPHIFDKVLELPFAADADVSVEEDAAALRFVAAADEFSLAGARAHAVEIHPGVTKVVVRGLSSSSLG

SEQ ID NO: 328598 - protein, 54 aa, Zea mays
  Clone ID: MRT4577_62745C.1.pep
AEPCWVTKNTPLKGQALKAPPPQVEPRMRPPIYYCPVLFCLPKSKISKIIYRLG

SEQ ID NO: 328599 - protein, 71 aa, Zea mays
  Clone ID: MRT4577_62746C.1.pep
SPPPRSWGGPSDIPPYELGILGPPIRLDAWAYCLWPLKEGLLTPVDMEGFFLIQFGSWLLRHPFPVLRPWN

SEQ ID NO: 328600 - protein, 148 aa, Zea mays
  Clone ID: MRT4577_62748C.1.pep
LNPPADLGAGHPSSAFREKLSAGSSDDEHGSEEDNNLSSDEDGEEEEEEEEKGDGNNWKGSVDPNSLEAEEKNGSSESLMALRRAKNALLFDLDRRLMDLQAADAVSKMEAASRFRVQVLFIYTPRRPVPSDDPAQGDTVELPQIPGS

SEQ ID NO: 328601 - protein, 93 aa, Zea mays
  Clone ID: MRT4577_6274C.1.pep
SKKRNWNLYPACLREMSRVCTPTTGRAVLLTQDTKCFTKALSGMRHVWRKVDTVWVNVGGLRAAVYVLIRTPQAFVHPSEQDGERGTLWQCKE

SEQ ID NO: 328602 - protein, 97 aa, Zea mays
  unsure (1)..(97): unsure at all Xaa locations
  Clone ID: MRT4577_62750C.1.pep
GSRAAITSAMMTXAIAEDRMGLPIXDDHYRDATFYTLGAGYVHPALTFYPGLLYHLRADDYIHYLCGQGLGDDRVTXISHRQANCGELRAATEAEHD

SEQ ID NO: 328603 - protein, 110 aa, Zea mays
  Clone ID: MRT4577_62751C.1.pep
MPHPGQPAGASKPNPLDSDLDSETSNEPANKSGASSYHAPADGQKRDKDWSRAWGRLQNHPGAALEYYTGHKGADTTRPLSGCLRHHKDSRPDARDTLITVRQAGEQNSR

SEQ ID NO: 328604 - protein, 42 aa, Zea mays
  Clone ID: MRT4577_62753C.1.pep
VNILFYYIYQGVAREPSRASLGANIEPIRASSLSSCNGRAER

SEQ ID NO: 328605 - protein, 77 aa, Zea mays
  Clone ID: MRT4577_62756C.1.pep
VGNIVRGNLVISINNVGHRCEFFEINRDKGVNSLWREIGWLKAFVRVEVGPLELHDPLLHDLDTVSSGTAIYSPTRR

SEQ ID NO: 328606 - protein, 162 aa, Zea mays
  unsure (1)..(162): unsure at all Xaa locations
  Clone ID: MRT4577_62759C.1.pep
SRNPTPLLHSTPPIPSRAAPPLRDDKRCPLRAIGPPLLIHLVTTYSRVVAXQHDRSEIIVNDQRNRTTPSYGVSTDSQRLIGDASNNQPAMNPINIAPSFXRLIHRRLSAASLQSAIIFWPFTPISSPPATPILSCSAHAARRRQSHSSSISSMLLIQTLSH

SEQ ID NO: 328607 - protein, 30 aa, Zea mays
  Clone ID: MRT4577_6275C.1.pep
LQIVVIFNVNHLQDQNVICVDIAGYVDGPL

SEQ ID NO: 328608 - protein, 64 aa, Zea mays
  unsure (1)..(64): unsure at all Xaa locations
  Clone ID: MRT4577_62760C.1.pep
EKEDKGDKWHRVERSSGQFGRRFRLPDGHRAQGXSRSLRLRAXTVTVPKAEVKKPEVKSIQISG

SEQ ID NO: 328609 - protein, 43 aa, Zea mays
  Clone ID: MRT4577_62762C.1.pep
MFNWLRCCRNTYSFFFLRQGSYICGSFFNLLDVRSQVVFLYLN

SEQ ID NO: 328610 - protein, 77 aa, Zea mays
  unsure (1)..(77): unsure at all Xaa locations
  Clone ID: MRT4577_62763C.1.pep
YIGVXVCVSSQSNNCLRWHSLGRGMIIIAYGGFLSSPGLLGRFWRAGCFVLWVPHTNRLTMCPAVLCHHPFIILSIP

SEQ ID NO: 328611 - protein, 70 aa, Zea mays
  Clone ID: MRT4577_62764C.1.pep
PQGILKAVLGSGKEDLVSPHFQGDNRFSIFFGKEGFSLWGKFENMVSWEFTEWENSTRGVVLIPPLYRPT

SEQ ID NO: 328612 - protein, 50 aa, Zea mays
  Clone ID: MRT4577_62765C.1.pep
MGERAGDRVLSRLHSVMERIGDSLSAHPNELVAVFTRRKKLGKGMLQPHQ

SEQ ID NO: 328613 - protein, 193 aa, Zea mays
  unsure (1)..(193): unsure at all Xaa locations
  Clone ID: MRT4577_62766C.1.pep
MHIFDKTLTGKTITLEVESSDTIDNVKAKIQDKEXMHPDQERLIFGGKQFEDGRTLADYNMQNESTLHLVLRLTGGKQIFVKTLTGKTITLEGENSDTIDNVQANIHDKEGIPPHQQRLIVVGKQLEDGRTLDDYNIQKESTLHSWLRLRGGMQIFEKTLTGKTITLEAGSSDTIDNAKAKIQDKEAIPPDHQ

SEQ ID NO: 328614 - protein, 49 aa, Zea mays
  Clone ID: MRT4577_62767C.1.pep
MGVHQEDVGAAITSDLKPYNLVETDTSGRCGRELLDRGGARTRSRGSGC

SEQ ID NO: 328615 - protein, 84 aa, Zea mays
  Clone ID: MRT4577_62768C.1.pep
ECCLRGVRGGCYHNGVVMCQSSVHDDIHLEVCSKLDDGTHIMVVIPQMDDDMPIEDEDKPLVEKVLLVHTQGSPAEEIPGADYP

SEQ ID NO: 328616 - protein, 112 aa, Zea mays; identical to SEQ ID NO: 198984
  Clone ID: MRT4577_62769C.1.pep

SEQ ID NO: 328617 - protein, 199 aa, Zea mays
  Clone ID: MRT4577_6276C.1.pep
PHDRLVLNMSIVRTPVFYQAPRGEFRQTLGHGIARYGFFGFLNSDRSKSDMGPYVQSNLPPQMQALSVQYLARKKSQRKRGLKRQLLARLTQFSPFGFVGKLASGIDRTSSAAVAPLVPIVSAAEVFSGISPAKNELTRDSNWGTSTVKTDSLQGDLLWSTTVRVGSSSQPPRINIDTGSADFFLFDPKCQSCALDTHA

SEQ ID NO: 328618 - protein, 202 aa, Zea mays
  Clone ID: MRT4577_62770C.1.pep
MAGSEELKLLGWWAPGVSPFVLRAQMALAVKGLSYEYLPEDRGCKSDLLIASNPVYKKVPVLIHDGRPVCESLLILEYLDDAPGLAGNGTSILPTDPYSRAVARFWAAYVNGKLFPSCIGILKTAKQEERAGKVEETLSGLRHLEGVLAECSKGEAEAEAPFFGGDTIGFLDIALGCYLPWFEAVGRLAGLGPLIDPARTPK

SEQ ID NO: 328619 - protein, 55 aa, Zea mays
  Clone ID: MRT4577_62771C.1.pep
DAWADAWADAVTTDISPHLYFICLLHLANEHSLKLCDRPTLDEVDIYMPTSPIVK

SEQ ID NO: 328620 - protein, 83 aa, Zea mays
  unsure (1)..(83): unsure at all Xaa locations
  Clone ID: MRT4577_62772C.1.pep
MAGYAFFLPPKKEPLFKRFFENRFPAKQKGVMGARGFAPPRYEELRKTXGVGGXXPPLQGRTPFAGAGAGRENGHFPSYCHCH

SEQ ID NO: 328621 - protein, 103 aa, Zea mays
  Clone ID: MRT4577_62773C.1.pep
LGPPGFPLFFPVCFLGELWGESIFPRDSPLPLFSPSFFPPLFRETWWPPGSRSGFPGGTPGSPPGSGNASRFKKGRVFLPFPVFSPGCSICFSVCRKTFLKAF

SEQ ID NO: 328622 - protein, 239 aa, Zea mays
  unsure (1)..(239): unsure at all Xaa locations
  Clone ID: MRT4577_62774C.1.pep
MAGGEELKLLGWWAPGVSPYVLRAQMALAVKGLSYEYLPEDRWCKSDLLIASNPVYKKVPVLIHNGKPICESLLIVEYLDDALGLPGNGKPILPADPYSRALARFWAAYANDKLFPSCAGILKTVKQEERAGKVEETLSGLRHLEAILAECSKGEVEAPFFGGDAIGFLDIALGCYLPWFEAAGRLAGLGPIIDPARTPKLAAWXAERFSVAEPIKALLPGVDKLEEYITTALYPKGTS

SEQ ID NO: 328623 - protein, 103 aa, Zea mays
  Clone ID: MRT4577_62775C.1.pep
LRCLCNGLLSWMSDASSAEMDSTFVETLSVADLSYEFAKSYLCYSSCHLALLDYSMQNVAVFLHMEVHLFHSILLFLVNDSRPEMKKKACSSLSVQFQWLLWT

SEQ ID NO: 328624 - protein, 82 aa, Zea mays
  Clone ID: MRT4577_62776C.1.pep
VWSGLVCLGFIMLYLRVLPVILNLPLAYQFDLYCPCPNKWQVLGVDLCLLICLLGIYLLVLLVMYSFSSHELILRVVPLFFE

SEQ ID NO: 328625 - protein, 49 aa, Zea mays
  unsure (1)..(49): unsure at all Xaa locations
  Clone ID: MRT4577_62777C.1.pep
FSKILERRVLSTLLDYYYFFLXLVFMSLVGGYVGLAHXFTXFVLLSLFV

SEQ ID NO: 328626 - protein, 75 aa, Zea mays
  unsure (1)..(75): unsure at all Xaa locations
  Clone ID: MRT4577_62778C.1.pep
SSVICSHRHISFTCMNIKSKTSHQFKWYEIAGSSGSXFFFFLXLNSDLTKNGHRKFAIYKTQPPYIYIXITRRNP

SEQ ID NO: 328627 - protein, 213 aa, Zea mays
  unsure (1)..(213): unsure at all Xaa locations
  Clone ID: MRT4577_62779C.1.pep
MSRVCVTGAAGYIAAWLVRKLLERGCVVHATLRSXAFVAGDEKKTGLLRSLPGAAERLVLFEADIYDAASFEPAIQGCEFVFLVATPLLHDSSSTKYKNITEAIVDATRIILQQCERSKTVRRVIHTASVTAASPLKEDGDGYKDSMNESCWSPLNLSYGYSNVHLDAYVSSKRLSEEELLGYNXSRRAXAFEVVTLACGLVGGDTIQPILWS

SEQ ID NO: 328628 - protein, 194 aa, Zea mays
  unsure (1)..(194): unsure at all Xaa locations
  Clone ID: MRT4577_6277C.1.pep
MSLAGARPSLQTTLVGLYQGSLRPIIGSLIQNAVRPTSLSSRTDDDGKRMMRGVGGPLLTIGDLLSDLAXSTTHSSASEXSVPSSPSAAQQAGKANPSDLSRLFEEHYDDLMKALQEKDPSWPSLMLKLCATLKTADRLMSCADTNAEQLLEKVKALEGVLDRSGHAVAEIVEALQRSGLANDGHGSQSKSASK

SEQ ID NO: 328629 - protein, 92 aa, Zea mays
  Clone ID: MRT4577_62780C.1.pep
PSAVGSSYAGDSSKAWTTSFQPSRLSAEEKLTRLMPLLTVGTTSAKHEPQGVRRNVGASHGCELFDARGCLLAWPGAQASAHESEHASEHES

SEQ ID NO: 328630 - protein, 66 aa, Zea mays
  unsure (1)..(66): unsure at all Xaa locations
  Clone ID: MRT4577_62781C.1.pep
PIQKIKLPFPKLTPPSPKKGVFFFPGLIFLTPKKKKKKKKXKKKXKKKKKKKKKKKKKKKKKKKKK

SEQ ID NO: 328631 - protein, 145 aa, Zea mays
  unsure (1)..(145): unsure at all Xaa locations
  Clone ID: MRT4577_62782C.1.pep
GGAGGPADRRPAAPRGGXGXXERAPKGGGAGGGGPGGXXSGPPRXGGTGPQXXAXPAGRAQPRHXAGXXGXXQGPTTAAXXGRGAXAGGQGPRPAGRARQEPAAGAAAAAAFFGEPDGGEAPARGPRLPPGRQPPPELPGQKKKF

SEQ ID NO: 328632 - protein, 67 aa, Zea mays
  Clone ID: MRT4577_62783C.1.pep
MAMVQPADTAVKANEILARFRPIAPKPTLAAAAAAAAAPVAQAAAEGVVAANRVLCHLQSRPCRARK

SEQ ID NO: 328633 - protein, 74 aa, Zea mays
  Clone ID: MRT4577_62784C.1.pep
IPCETPPKVFAPPCLRHVSPKFFFFCIPRDLCHPHFGRRREFETVEVPTKLVWVGQRVPSCSKKAPFAFLMGKK

SEQ ID NO: 328634 - protein, 78 aa, Zea mays
  unsure (1)..(78): unsure at all Xaa locations
  Clone ID: MRT4577_62785C.1.pep
MGRLFLMHLDGNVYSCKHCKTHLGVGSDIISKAFQXVTSGVKEDRMMITGMHTVSDIFCVGCGSIVGWKYVRFAKVVS

SEQ ID NO: 328635 - protein, 69 aa, Zea mays
  Clone ID: MRT4577_62786C.1.pep
TTRPKTEHLVELTDEERNVLAVAYKNVIAARRASWRIEPSIEQKEDSHKNNKHVNLIKEYRAKIEALLN

SEQ ID NO: 328636 - protein, 129 aa, Zea mays
  Clone ID: MRT4577_62787C.1.pep
MGRLFLMHLDGNVYSCKHCKTHLGVASDIISKAFQCKHGKAYLFHKVVNVTSGVKEDRMMITGMHTVSDIFCVGCGSIVGWKYDAAHEKGQRYKEGKFILERYKVSGPDGSQYWVPQDAHLGGSDADDI

SEQ ID NO: 328637 - protein, 201 aa, Zea mays
  unsure (1)..(201): unsure at all Xaa locations
  Clone ID: MRT4577_62788C.1.pep
CPRSRCSASRSRRPATSPASSWRTRSSWTSPRRRAAAPSSTPTTMPRPPLPSSRRPSRAXRAPRERHEGELLLRLPKFDRGQEELLQEAVSSRPPAGSSSSXRRRRSRPRQXPVVXRRRSRSRRQEANRRQERAACSPASPAADKQAKCSGQHDVSVNSHLGVRVRGNVRVSVRARGFRVQRWCWRFLQCKEVYICMYVEF

SEQ ID NO: 328638 - protein, 43 aa, Zea mays
  unsure (1)..(43): unsure at all Xaa locations
  Clone ID: MRT4577_62789C.1.pep
VTAVVLVHEVAHLQVLVQFLHGQAPRHLKKTPLFXLVHADASK

SEQ ID NO: 328639 - protein, 64 aa, Zea mays
  Clone ID: MRT4577_6278C.1.pep
DSAAACTRSLPEVRVMLCGSRRFSVTVPWTAHRDAGGHSLRNMCPRRRPLGSHVRSHVVSALAT

SEQ ID NO: 328640 - protein, 102 aa, Zea mays
  unsure (1)..(102): unsure at all Xaa locations
  Clone ID: MRT4577_62790C.1.pep
TLLSLKDDKEKGGFVFTKSIFKQPDEEVRDTKIKFLFSVKQLTEEDKFAWSELVVXLKSEYSKFTPLLSKILQCVLHKGTDGDKISHEKQGIXAADEVVGSI

SEQ ID NO: 328641 - protein, 67 aa, Zea mays
  Clone ID: MRT4577_62791C.1.pep
WRHSAHELARCWAFKGSLSHVINGCHIGSYQSVSMSRLLSSVKVFFIPAAHKLHLFRDLILVLDTDL

SEQ ID NO: 328642 - protein, 104 aa, Zea mays
  unsure (1)..(104): unsure at all Xaa locations
  Clone ID: MRT4577_62792C.1.pep
PDRNCRVDPRVRALFFSDRISMGDVLWNLEYALELQDANPPEGARQGGDGDDQDGAAAAGGXFSDPFFTYPTDLDVVNPRPGTLRWGVIQPGPLWIIFARSMII

SEQ ID NO: 328643 - protein, 55 aa, Zea mays
  Clone ID: MRT4577_62793C.1.pep
TKNESTLADMLTKKIMNAAAASSFFKCCNVQDGYVDLSEAILAQVPKKDDKPTML

SEQ ID NO: 328644 - protein, 64 aa, Zea mays
  Clone ID: MRT4577_62794C.1.pep
MEARSRLTVAPYSTSFSGGASATGPTLGLVLEPLPWRWMEVRPSIGGEGVGDEEAEKEGRWREE

SEQ ID NO: 328645 - protein, 149 aa, Zea mays
  unsure (1)..(149): unsure at all Xaa locations
  Clone ID: MRT4577_62795C.1.pep
MAPKAEKKPPPKKPPEEEPAAEKATAGKKPKAEKRLPPGKSPGKEGGEKKGKKKAKKSVETYKIYIFKVLKQVHPDIGILSKAMSIMNSFINDIFXKLAAEAAKLARYNKKPTITSREIQTSVRLVLPGELAKHPVSEGPKTVPKFPSS

SEQ ID NO: 328646 - protein, 115 aa, Zea mays
  Clone ID: MRT4577_62796C.1.pep
AEKVSVGGSVVPGNVLGAHPGVGPFHELRPPGAHPVQAPRGHPRGNGPPPQGPPPRRVGRIPLNPGHAVRRPRVVRGPPLRGNEALLYLQRGRIKKHAFVRGYGMCFRPNGRAYP

SEQ ID NO: 328647 - protein, 82 aa, Zea mays
  Clone ID: MRT4577_62797C.1.pep
CASSKPSIICAGAAIDLVPPLIVQDRRVGLVSGCIAIIRYLFLCVYENTRVGIERRIVDLCRFEFAKAGRPCGSEVVSRSVL

SEQ ID NO: 328648 - protein, 59 aa, Zea mays
  Clone ID: MRT4577_62798C.1.pep
LHFGLTLFRPEVRLDGLFGDYRFRARTPWRAQGRRPAGRATRHAAANYAGADLPTLKRG

SEQ ID NO: 328649 - protein, 69 aa, Zea mays
  Clone ID: MRT4577_62799C.1.pep
VFRPPRGAHREEFFPDFAGSMVKMGSVGVLTGGQGRVRKKCNVVNYLFIGPLGKQGFFLFHFWVPANID

SEQ ID NO: 328650 - protein, 106 aa, Zea mays
  unsure (1)..(106): unsure at all Xaa locations
  Clone ID: MRT4577_6279C.1.pep
MGGEEERNEKIIRGLMKLPPNRTCFNCTSVGPLCVCPNFWTFICLSCSGVSLGFTLLVKSVSLSKFTTHEVXALGQGGYRXARDVYLRDWDWGLMRVALITAPGRR

SEQ ID NO: 328651 - protein, 82 aa, Zea mays
  Clone ID: MRT4577_627C.1.pep
TGPAVGDTLTSTDCGGGGGGPKTSGPEVVGLTLKDPKKVILRARPAPAFWWLPVGSGWTGVNGLNRVRFLVDMFAQTPKMGC

SEQ ID NO: 328652 - protein, 66 aa, Zea mays
  Clone ID: MRT4577_62800C.1.pep
KTVNGSFVRPSNAGGDVYPVESYESSPNQELDANWGVLYNDNATELLLHTLSILANDCPGGLNICN

SEQ ID NO: 328653 - protein, 105 aa, Zea mays
  Clone ID: MRT4577_62801C.1.pep
GRFFFFFFLFFFFFFFFFFFFFFFFFFFFKTKRKTGPLLKDPLGEGGFFTNAKKLAQTASQGRTTQWSHQNKSGLGPSHRPTPADPPIFFYEKEKVLSLPPALKR

SEQ ID NO: 328654 - protein, 79 aa, Zea mays
  unsure (1)..(79): unsure at all Xaa locations
  Clone ID: MRT4577_62802C.1.pep
EVHLPATTIGNAXRDSEIXVRKDADGAGTCDRDIHPRAEPEQYLTSDDAAELAYSGAHELHALSMRTARESDDPVRAKN

SEQ ID NO: 328655 - protein, 105 aa, Zea mays
  unsure (1)..(105): unsure at all Xaa locations
  Clone ID: MRT4577_62803C.1.pep
MECNKDEAQRAKGIAKKKFEAGDLQGARKFALKAQTLFPALEGVDQMIAIFDIYLASEGKVAGEKDWYSILSVPLNANDEKIKKQYKKLVLQFHPDXNKSVGAEG

SEQ ID NO: 328656 - protein, 186 aa, Zea mays
  Clone ID: MRT4577_62804C.1.pep
MADSPRRRYSRPSRSPSPYKGRQKQMSRSRSPVAQSQSRSPSPDPRAQARSRSRSPAREREPEAVNHGNTLYITGLSSRVTDKELREYFNKEGKVVSCHVVLEPHTRVSRGFAFITMDTVEDAERCIKYLNQSELQGRNITVEKKTLCKLCASNQDAEFINFNFSSYILISGQPKGLPCTTRFTTT

SEQ ID NO: 328657 - protein, 273 aa, Zea mays
  Clone ID: MRT4577_62805C.1.pep
MARTSKADPEHHSLHQETEEMRQNTFYPRPVAPTAAQIHCLQFLICELVSGGNLRKVGGLFGNSGSGIPVEDLKQLETFFYKLSFFLHILDYTATIGTLTDLGFLWFREFYLESSRVIQFPIECSLPWMLVGHVIESEDAGLLESILIPFDLYNDSAQHALTSLKQRFLYDEIEAEADLCFDLLAQKLNEIIFTYYKSCAASTLLDSSFTYACDDGDKYFVKPLRFDAIFKLRRVMVLGRTIDLRSIITQRMNKIFRENIDFLLERFENGDLC

SEQ ID NO: 328658 - protein, 50 aa, Zea mays
  Clone ID: MRT4577_62806C.1.pep
MQAPDPFMGTTTNQARLLLSKQVTELAKHPVDGVSDALVLYSNVFEWQVT

SEQ ID NO: 328659 - protein, 185 aa, Zea mays
  Clone ID: MRT4577_62807C.1.pep
MADSPRRRYTRPSRSPSPYKGRQKQMSRSRSPVAQSQSRSPSPDPRAQARSRSRSPAREREPEAVNHGNTLYITGLSSRVTDKELREYFNKEGKVVSCHVVLEPHTRVSRGFAFITMDTVEDAERCIKYLNQSELQGRNITVEKSRRGRPRTPTPGSYLGHRYERREMQRGGRFRRGGYGRDDYY

SEQ ID NO: 328660 - protein, 338 aa, Zea mays
  Clone ID: MRT4577_62808C.1.pep
PPAGPGESSAVLCTPTTTERESRRGKGEKRPRRQTLAPRKRPWGSSTPPRRPPSPFRDMADSPRRRYSRSPSYSRGHPKGRSRSQSPARSQSRSPVPDPRSQARSRSRSQEREEDAVNRGNTLYVTGLSSRVTERDVKDYFSKHGRVVGCHVVLEPHTRVSRGFAFVSMDTVEEAERCIKYLNGSVMEGRNITVEKSRRGRPRTPTPGSYLGHRYERRERGRFHRGYGGGRDEYYGNGGGGYGYRRSPPPMYSSYRESRDYYPSYKDSRDYPPYRDGRDYSPPHRDPRDYYESRGGRGYSPPPYGGGRSRRDRSVSPYRMPERGYGGGRRVGGGGYDR

SEQ ID NO: 328661 - protein, 74 aa, Zea mays
  Clone ID: MRT4577_62809C.1.pep
PRLPVAFSLARLLSPLPRESRRPASGLRFPRTQWAPWTLRSPRRLSGSPPEPARAPPLPRGRPASSSRPAATSP

SEQ ID NO: 328662 - protein, 194 aa, Zea mays
  Clone ID: MRT4577_6280C.1.pep
RGRPGRDLGLDLPCDWTVEIPSYALSVSGVDTASSGGNSPASGSWRISSPGNRRLNRDTPAQSLTLITLPIASRFLFCCPSVLSTSAPADRLVRTHASCVGPAEPMRSLLARPASPTRSIRRRAHVHLASSRRGRGGICTHSTSHGAESHPTAASPLCLCPALPGSALERTKFKEHARQVLWSCSKKHALCMGM

SEQ ID NO: 328663 - protein, 61 aa, Zea mays
  Clone ID: MRT4577_62810C.1.pep
RKGLSFFFPNCAGCYRASGDAGRARIQIQGRNMASKRILKELKDLQKDPPTLCRAGMSWIY

SEQ ID NO: 328664 - protein, 70 aa, Zea mays
  Clone ID: MRT4577_62811C.1.pep
LQKFRHFNSGKAWCPVVNKTVNVYETRRGVVSFNCKLPWVTEIMQKATDSAEPFRAQIILEYISHLQGFS

SEQ ID NO: 328665 - protein, 399 aa, Zea mays
  Clone ID: MRT4577_62812C.1.pep
MARSWLITCRGIAKKIRYTNPGANHHISELVAEARRECPNCSYIIDNSDVAMQWPGLPAGVKFDPSELELLEHLEQKVGLGDSRPHVLIDEFIPTIDNDEGICYSHPENLPGMKTDGSNAHFFHRVSKAYGCGQRKRRRTINCSDHTVSDEHVRWHKTGRSKAIYENGVIKGWKKIMVLYKISQRGRKPDRAKWVMHQYHLGKEEDEKDGELVVSKIFFQLANKSMEISETETACEEPDAPASVIGPKTPKTITPQPRHPKSSPCETEQNIFIVQDQLLLDGEDEPTMPIVSLADDAMNPAWCAVAEEEQVVGEASRAQSNSDEPLLCREDPNSLNDEALLPWDYPILSQCRSEIFDRNLNGYGLPDLHNVDLGTPPDLQLADFQFGSQESLGSWLDRI

SEQ ID NO: 328666 - protein, 81 aa, Zea mays
  Clone ID: MRT4577_62813C.1.pep
ITCGLARVDVRRVEGFGHQNAMRGSHYIMWDTLDRATFDIPRHPRSTAPLHTGAERVHSHRRKNYALNKSFHEPDTGNRDK

SEQ ID NO: 328667 - protein, 78 aa, Zea mays
  Clone ID: MRT4577_62814C.1.pep
HTCQESGINQALSHMPRQHVVIGGEMAFSLDVLCRQDVAGSANHRVYDRLIIRTVYDFNATYSDSYPSSEIVLEKYLA

SEQ ID NO: 328668 - protein, 59 aa, Zea mays
  unsure (1)..(59): unsure at all Xaa locations
  Clone ID: MRT4577_62815C.1.pep
VPGPSLPLPFFFXAPVSLAGLLPPCVPLAPPGXWVXCACPPPCGXPSNSAAAXPGCVFF

SEQ ID NO: 328669 - protein, 86 aa, Zea mays
  Clone ID: MRT4577_62816C.1.pep
YLLDSLSRCYFCGIRGGLIIVLWFTTKKKKKKKKKKKKKKKKKKKKKKKKKKKKKKKKKKKKKRGAPQKVQTLITRQRKIKPLQNC

SEQ ID NO: 328670 - protein, 119 aa, Zea mays
  unsure (1)..(119): unsure at all Xaa locations
  Clone ID: MRT4577_62817C.1.pep
VDLRVRKPRRGHQRRRRPKLVFHKDILSGHRSLSGPEDIEEVHLFDGLVHASGGSWEWSLSTPRRFGGRTRGKKPRTTVVTRVVQDEGXVSPPGKPVGTGDLEADDRRLGGWGITTWRC

SEQ ID NO: 328671 - protein, 340 aa, Zea mays
  unsure (1)..(340): unsure at all Xaa locations
  Clone ID: MRT4577_62818C.1.pep
MKKSSMMAPMTIMARVAAVLVLSSAAMASAAGAAGLDMNFYGSTCPRVEAIVKEEMVAILKAAPTLAGPLLRLHFHDCFVRGCDASVLLDSTPTSTAEKDATPNLTLRGFGSVQRVKDRLEEACPGTVSCADVLALMARDAVVLANGPSWPVALGRRDGRVSLANETNQLPPXPTANFTRLVSMFAAKGLSVRDLVVLSGGHTLGTAHCNLFSDRLYNFTGANSLADVDPALDAAYLARLRSRCRSLADNTTLNEMDPGSFLSFDSSYYSLVARRRGLFHSDAALLTDPATRAYVQRQATGLFTAEFFRDFADSMVKMSTIDVLTGQQQGEIRKKCNLVN

SEQ ID NO: 328672 - protein, 80 aa, Zea mays
  unsure (1)..(80): unsure at all Xaa locations
  Clone ID: MRT4577_62819C.1.pep
MILXLGVLAFIALVSSVSCTQTGGCSCGQQQSHXMSHYPQQHYSHKLQHQPPPXHHPLKRHQQQHVHMLPHXHQQRQEVH

SEQ ID NO: 328673 - protein, 82 aa, Zea mays
  Clone ID: MRT4577_6281C.1.pep
RSSAFAICRTAGTRNPMSPPHCFCAVKGSRSFTRVLGWEYDRAAQARRPYSLGEHIAAEIHRMLVFVVTNAGSASIVNMPQW

SEQ ID NO: 328674 - protein, 101 aa, Zea mays
  unsure (1)..(101): unsure at all Xaa locations
  Clone ID: MRT4577_62820C.1.pep
LPFGWFFVSLFSLCVALFLFGRCGRLGLGCVLVLGAGSLCSLPAGLFLAWACLGALSAGGSAVVGCGPFGALPVLXFVVLVEVWLXFLVASFVVLPVPGCG

SEQ ID NO: 328675 - protein, 162 aa, Zea mays
  Clone ID: MRT4577_62821C.1.pep
FAHRLLLFLVHSSPPLLKRRSAHTLSHGVGILHPVHVKLPLRHVLCASRCPLVCIPQPHGHTPAPLPGTTSRAPPPSARPTTLFPRRSSSTTPMRPPCSSMLRSARSSSGNNVSSIFSRRASSPSHSVVTPWCIPPRLASPSPSALRQTSLVHDSSARAVVC

SEQ ID NO: 328676 - protein, 96 aa, Zea mays
  unsure (1)..(96): unsure at all Xaa locations
  Clone ID: MRT4577_62822C.1.pep
SLRVSGSPGVGVSLGGGPLVLLVCAVGRFFAVSPFVRAFLLWVLVXVXXAXRFFSCARSCGSLXVXVCVACAVALLCVVCTRLLLINPPXGGXCAS

SEQ ID NO: 328677 - protein, 58 aa, Zea mays
  Clone ID: MRT4577_62823C.1.pep
PTPSTTTYSTMPSSSTITSLYFNIQSPPLYDIQSIPQSFSLPFPTRSTYSIITLLLST

SEQ ID NO: 328678 - protein, 119 aa, Zea mays
  Clone ID: MRT4577_62824C.1.pep
VLDALHASIGLCQRNSQRLDPEESQSLWFQLLDSFSEPLKKLYGIKDVNGKGVKSNWSEASMEHLKEKGLSQQMRISTKQKCLNVLRKVFSQCVGEIIEAMAGYIPLPAIMAKLLSDNG

SEQ ID NO: 328679 - protein, 178 aa, Zea mays
  Clone ID: MRT4577_62825C.1.pep
MGKIPPRVQMTVPQEHSAVYPSMTGFYQPAANHSLAYSSEAYGTRERAHMEDLLKNFGCGQNIVAHQISPDPYARAMDGLQTNGYSSSKNAESISDMLSLGTRTYPLHSSASELLETVCNHREGAPSANAVAEAEESRQFTYTYARRKPHKRSTMAERTVPPSAVDGMAIMKAKAIRL

SEQ ID NO: 328680 - protein, 38 aa, Zea mays
  Clone ID: MRT4577_62826C.1.pep
FSQDINMCQAPCLLIKFRFDFDRSLILYVVLTKPEVWL

SEQ ID NO: 328681 - protein, 100 aa, Zea mays
  Clone ID: MRT4577_62827C.1.pep
RGPWPWPPTSWVGGPLGVLKTEIQTKVVENPGPGFFFLPPVWALGGFVFFPLKKIPGPGGGKVLCFCWGVFGGVQNPFQKKNHCLGSSFKGPRLEKGVNP

SEQ ID NO: 328682 - protein, 76 aa, Zea mays
  Clone ID: MRT4577_62828C.1.pep
LLPLNIPNFSSTLGGGGAHLLPFAQKKKNPCNLHLFHQKPPFFPIIPRLCNPLILLLLLKPHSKPGFSTVLAVPKP

SEQ ID NO: 328683 - protein, 156 aa, Zea mays
  Clone ID: MRT4577_62829C.1.pep
NPVVKLHKLPKDLGRVPRGWAPANIVNPGNSSWETPALPPAPFFSHVLLPTTLLLGIAVPGAPLCSPPREFRPRHLVSSKMICTSPPPQKTLFMGDRLSPPHNQHSCQKKKRTVVLPRGIKWTTAPSNSNRQLCVKRAKKKKKKKKKKKKPKKEVF

SEQ ID NO: 328684 - protein, 162 aa, Zea mays
  Clone ID: MRT4577_6282C.1.pep
QGTHGYLDPEYYYTSRLTEKSDVYSFGVILAELLTRIKPVFSTHSSEGKSLASHFVSVIKDCSLLDILDPQIVEEGRAKDAEAVARLAEVCLSLKGEERPTMRQVEITLEDVLGPNVHSSCRVSRTSQGALKDQTQNQNKGNEGTRLYSLEKEFIRSSEIPR

SEQ ID NO: 328685 - protein, 127 aa, Zea mays
  unsure (1)..(127): unsure at all Xaa locations
  Clone ID: MRT4577_62830C.1.pep
RGGAKSRXXNRXGEKGEXXSXPQPRNHREXANXKKTEKTPQSGRRGRGGXAGXTXEEAXXTPRPEXSNQGEXAGGAXETRPERATXXPPRXTRGRXAGRDAXKXDEDKKXGEKRXADXKRPXPAAEN

SEQ ID NO: 328686 - protein, 82 aa, Zea mays
  Clone ID: MRT4577_62831C.1.pep
LYSPARLRTLHPRAAFGAGEPSRRSSSDPSLSRPFSLPLPAQGEERERMNPHIQQHRLGRKGRVFSSPTVSLSLYYTTRKNI

SEQ ID NO: 328687 - protein, 107 aa, Zea mays
  unsure (1)..(107): unsure at all Xaa locations
  Clone ID: MRT4577_62832C.1.pep
PNVVAVKHCFFSQAHTEPHNHDAVLRYQPDTANRALQQYTKRNQPKIFIYAQSYMCQTSRQAAYIRSPIRLRQRHIKPQDYEVXAHAHYLHSKDFASAYVADQGEPD

SEQ ID NO: 328688 - protein, 132 aa, Zea mays
  Clone ID: MRT4577_62833C.1.pep
NNTRGGDVPNDLYTRAECLNSPHPGTNTTRVNYGRSGVCKQPAHNGNRDYFTRARRGELHLDYFMRAGPVALVGIFNKERRPQESTLAGREKIPVFFPRARVQDRIRGPLGGLNIRGEGAQWGGKDNDYLVP

SEQ ID NO: 328689 - protein, 274 aa, Zea mays
  Clone ID: MRT4577_62834C.1.pep
MASPTNRALERYKSAITAATSVVGAAMLLRRLVAGVLPAGTPPLVGALLLLPPPSARRHAVVIEEFDGAFYNRVFLAVRAYVSTLLAAAPTGAPPVVKASLPRGAGAGAEQIRLAMGPGTAVVDVFRGAELTWRLRSHGHGGGAGEAFRLSFDGQHRDLALGAYLPFVMARFEAMARDRRQAKLYSNEWGKWRSVRLRNASTFATLAMDAALRQDVLDDLGRFLGQKEYYERTGWAWKRGYLIHGPPGTGKSSLVAAMSNHLHFDVYDLDLGAV

SEQ ID NO: 328690 - protein, 197 aa, Zea mays
  Clone ID: MRT4577_62835C.1.pep
MAAPPSSVSVRAGASVSAKLTPRQAARAGFGGRVSVSSGRKCGGPVRASLFSPEPAVAMDARPTKVQELHVYELNERDRESPAYLRLSAKQSQNALGDLVPFTNKVYNGSLDKRIGITAGICILIQHVPERNGDRYEAIYSIYFGDYGHIAVQGPYLTYEESYLAVTGGSGVFEGAYGQVKLNQIVFPFKIFYTFYL

SEQ ID NO: 328691 - protein, 131 aa, Zea mays
  Clone ID: MRT4577_62836C.1.pep
NSRPGRVLSSVSPLRGSHRVPPPYARCPYVRRHRARGRRRRTPSRGRRMGEFDDYWARAYRGDPAVPHSDPQRLISTWTGAFALGAAACVHHHASALASHLKSLPATWQDMTLALDQKRWKKAFEKKRQQP

SEQ ID NO: 328692 - protein, 140 aa, Zea mays
  Clone ID: MRT4577_62837C.1.pep
MAHSLAASFSPAAARRQMTNVIPSWSSVSFQSHRRASVSIRSRPNSLGFKICCSAKKETVDKVCSIVKEQLALPDGTAITGESKFAELGADSLDTVEIVMGLEEAFNITVDETSAQDIATVQDAADLIEKLMLEAPPKVV

SEQ ID NO: 328693 - protein, 62 aa, Zea mays
  Clone ID: MRT4577_62838C.1.pep
MTLNGVSTQCISLHSTVNVCNPYDYHFGICEVTYTLLYACKVVVCSTMRLHLLDPRQPVHLA

SEQ ID NO: 328694 - protein, 124 aa, Zea mays
  Clone ID: MRT4577_62839C.1.pep
LFSFFIKRAQGGLPEQKRANTDPTQDTNSRNYDHPQKERAPDHTSTWAAKTTPEQKTTRETEPKAEGAPLPEGGAGPGADMPHPLAGEGHTQEGGRDARPDTGPGRNTAQGDPAHRSKGEGTTR

SEQ ID NO: 328695 - protein, 105 aa, Zea mays
  Clone ID: MRT4577_6283C.1.pep
RNQLPKLSTSTHVSARREGLRPNKSNPMADGTGAHHASGSVPRRSAGSTVGPSSAAGTGTSYAASIAANEANWTPPMLTCSAYANYINALVPDQDDAPMMHFVRV

SEQ ID NO: 328696 - protein, 56 aa, Zea mays
  Clone ID: MRT4577_62840C.1.pep
SFKKIFSIWFIIRKTENQTKVLSCSKNDAFGFVKEWVDFVAVLHFQPHPGLVAGKA

SEQ ID NO: 328697 - protein, 30 aa, Zea mays
  Clone ID: MRT4577_62841C.1.pep
LLVALVAINSPAFGLYFGLLGAGPRSRWAP

SEQ ID NO: 328698 - protein, 73 aa, Zea mays
  Clone ID: MRT4577_62842C.1.pep
SPVKWQAWHEYNYSRLLEVSNEWCSQRCTVIVERVIKAYSTLPSYSLCHGITRRPCWSTLLLASVPSRPAGPG

SEQ ID NO: 328699 - protein, 102 aa, Zea mays
  unsure (1)..(102): unsure at all Xaa locations
  Clone ID: MRT4577_62843C.1.pep
ASSFKXLLARLPPRVHSVYYRDEIGNISSSHLRSDSHKSDLEIEPRYPLFGGWHCTFTIGYGLPLQDFVFESVDGRRYINLTFGCPLLLTVIDEVTILVLAH

SEQ ID NO: 328700 - protein, 68 aa, Zea mays
  Clone ID: MRT4577_62844C.1.pep
FFFSVGGVVLLRLVSAWSSVVLCACGPSPGVRARLAGRGLCVGLPFLGGVPPAFSLAPPLLALVGWFT

SEQ ID NO: 328701 - protein, 472 aa, Zea mays
  Clone ID: MRT4577_62845C.1.pep
MPFSSSTNFDCLQIDLTGPIVKVFLTLKVMSCSDGHPVASSSIGISHNFSTPLCQVENAPTASEASRVLLAFTPTEFQHLSIVKATRAEGKRKKKAFVPLSVQASELATTAPDAPRLYSVLLSTPLKPGDATTLEVLYMLTHSLEPFPAEISQSESQLVYYRDSAVLLSPYHVLEQVTYIKMPSNRIESFTRVDPTTRAGSEVKYGTYSNQMPNSYLPVLVHYENNRPFAVVEELVRKVEISHWGNIQITEQYKLKHGGARHKGVFSRLEYQSRPSISGASSFKNLLARLPPRVHSVYYRDEIGNISSSHLRTDSHKSDLEIEPRYPLFGGWHCTFTIGYGLPLQDFVFESVDGRRYINLTFGCPLLDTVVDDLTVKVVLPEGSKNPEHVVPFVTEKHLETSYSYLDVVGRTTVVLKKKNVVGEHNVPFQVYYEFNPIFMLAEPLMLISAVLLFFVAFIAYLHMDLSIRKSS

SEQ ID NO: 328702 - protein, 78 aa, Zea mays
  Clone ID: MRT4577_62846C.1.pep
IVMIYPLPPVSIFAEQRGGFQGAIVCSLTGGIHTRALAWCLALEEFRRQGFLSWLVWSISCCFFFYYYTLSSGIHVQN

SEQ ID NO: 328703 - protein, 126 aa, Zea mays
  Clone ID: MRT4577_62847C.1.pep
MSRAQAARSFRGKPCHGHNSKAARRWPSRLVDGFRRMLVGLFSFPPRPPKVTFSVVHDHRAAAAAAGAGAPATATGGCGGGDASKRSSWSSSNLHPLNAHYDEAIADCVEFFNKSARVDLRSRPHF

SEQ ID NO: 328704 - protein, 241 aa, Zea mays
  Clone ID: MRT4577_62848C.1.pep
LAARGGRRPGRCKGCCEDERQGVSVVQGEAGSTGDWLGTAEYTKVAAAPWEADKRGGGRPLLAAFAEEGVVGSFCRRVRPGASMEPSSCCLGGGGEKTRRLGGEEEESRWGKGAPAQGWRAGVLGTSQRRDGEARRHGEFDEAEVAPAPRTEEGVGHHGSRGAEQRARREGVRAHGWRAGAAAPCAEPDQRGARRPPWGGENARGWPSELRRPSRGKPGSMGGTHAPRRRRGKALRILMLA

SEQ ID NO: 328705 - protein, 85 aa, Zea mays
  Clone ID: MRT4577_62849C.1.pep
KQTPGEKKKPPGFGKKATKLKRKTSKGPVRSQKLNPIKKESKKEKGKHPFKKGGQKKGKKTGPNLIGGLMDSKRGKFGRETQKNF

SEQ ID NO: 328706 - protein, 113 aa, Zea mays
  Clone ID: MRT4577_6284C.1.pep
RPHKKSRTTRHAVVRQLEIRPRKTCTFFRVSAAHPRHVHLSVLFVTKRQPGRTMGKSRACSISGLPAKLLTVSRNEMSRYEPGHYYGLGGPWVPVPKITPLDRTVFSLQVQDF

SEQ ID NO: 328707 - protein, 79 aa, Zea mays
  unsure (1)..(79): unsure at all Xaa locations
  Clone ID: MRT4577_62850C.1.pep
MEFNLLQQAMLPDSFSFTCLLKTDEFLKRGESGGTCCVIALLRKGRLVVSNIGDCHVVLTRAGKAEGLTSDPSASXEDE

SEQ ID NO: 328708 - protein, 59 aa, Zea mays
  Clone ID: MRT4577_62851C.1.pep
RSCFPRMKTGELSLNEEPDLLFRSRYLIGGGGIQIMCSKSSATNSIPVLLPRTLRCYHC

SEQ ID NO: 328709 - protein, 69 aa, Zea mays
  Clone ID: MRT4577_62852C.1.pep
KITDCTYLLFFCYIIIFCYILVLCVNSKSVVQVESTEQQSLQGSACWGINGNHTHTGSSLINIILIVTC

SEQ ID NO: 328710 - protein, 61 aa, Zea mays
  unsure (1)..(61): unsure at all Xaa locations
  Clone ID: MRT4577_62853C.1.pep
LVDVSGTGTLSQSYHYEVCLTGDSXVSEFKFLKPIIPNLLPQGAGEEIGQTAAFRNSFGLN

SEQ ID NO: 328711 - protein, 103 aa, Zea mays
  Clone ID: MRT4577_62854C.1.pep
DRGTCVLLISSPLGVELEPGPRSIARLLLHRPLLQKKHRDRPPLPHCHCMERLRLRLRSMGDGDGYEPMRRLKHGERRPRQAYLRRPHSIGFAPVDRYASRMH

SEQ ID NO: 328712 - protein, 30 aa, Zea mays
  Clone ID: MRT4577_62855C.1.pep
NLSFHLLLPCLMPCSVFLPDFILPVLLNIA

SEQ ID NO: 328713 - protein, 107 aa, Zea mays
  unsure (1)..(107): unsure at all Xaa locations
  Clone ID: MRT4577_62856C.1.pep
XFFFFFFLFFFFFFFIFFFYHIKIWKCNFLFLVGHIHQPKNIMKESQLIRRGKEGTFFYVQSAGGPRACQRRADKRHPLLELKHGCRANRKPPGKKQEPRQPGSQTH

SEQ ID NO: 328714 - protein, 43 aa, Zea mays
  Clone ID: MRT4577_62857C.1.pep
YNIHITIAISLHTNKMLKHGRVNSKLGGAFYTTPYNTPLYNTT

SEQ ID NO: 328715 - protein, 260 aa, Zea mays
  Clone ID: MRT4577_62858C.1.pep
TQCCSQHAEDTAAVTAVKFSAEHPYGKAVALVDTESEFISVDEDWFLLPWIAISFLFLNSIGKDGAKLIEGAMVQKAETVETDTTVVSQTVKGGAAGATAGSAQCGACGTAGGGDMVMASDKAGHASSVIASAKVADSKCGGCGSGCGGGCGVSVVTMSYKNGHASCGIVAGGENGHIESTGCGSGCGSSCGGNMVIESSKEGKTKSGGCGSGCGGGGCGSMAIEGSKAGIAKSSGCGSGCGGGCSGMVVEGSKMAMPSQ

SEQ ID NO: 328716 - protein, 162 aa, Zea mays
  unsure (1)..(162): unsure at all Xaa locations
  Clone ID: MRT4577_62859C.1.pep
FLPELSXLAMVNPTAYLQQQQLLSSSPLAVANAPTYLQQQLLHQIVAALSQLVVANPAAYLQQLLPFNNLAMLNFVGYRHQGRQLLNPLAVANPLVCAFLEQQLLLPFYQFSLLHPVLXRXQPIVGGCFFLFHMSMSSIMVPSLSCICFAIYILYLDVDVCQ

SEQ ID NO: 328717 - protein, 74 aa, Zea mays
  unsure (1)..(74): unsure at all Xaa locations
  Clone ID: MRT4577_6285C.1.pep
FPVLLLLLVLFAVPRLAFVAGGRRGLPCPRGASXGVVGXACRSCPASTASSASAPSVLLSXAGLGRCRALSRGA

SEQ ID NO: 328718 - protein, 89 aa, Zea mays
  Clone ID: MRT4577_62860C.1.pep
ESRVVCYIQNMCIVAFGLDGSDRPSPVVKCQVSSHCAYSFWAPVEGCWPGSFSVCSTVIVLDSLWFGYIGACAVPSSVLLNLGWLKSSL

SEQ ID NO: 328719 - protein, 68 aa, Zea mays
  Clone ID: MRT4577_62861C.1.pep
SSPHTQAGGAGTDINCSLHSDKTNKVPLYKLKRPISPSASPTDAPPSTPLSCSDSKRAITEGGLGYHT

SEQ ID NO: 328720 - protein, 107 aa, Zea mays
  Clone ID: MRT4577_62862C.1.pep
MIYKAAAFLIGPVQFDRFVHATLFLCAMEATRKPAVCRALLVLLIVVSSAAVSTAQDESCWKDDDHHPICLPEDCVATCRDHGHADGRCSWAWSWRPYCQCLLADCQ

SEQ ID NO: 328721 - protein, 211 aa, Zea mays
  Clone ID: MRT4577_62863C.1.pep
MNLQNKGILNNVSSSLDASSPNLQSSLPSSYVSKTMPSVIPDQLGAAQSTSLWRPTTYTDRMSSSSVFSDGLASAFGSPKSKKTGAEAKDELLSNILSRQTAAGSSSAIPLASNGVVPPQLANTGSSSDQLGASSFSLQYVQRMLEESLGSVQKSIHEDVRNLHIELLRQFHMHEMEMSGVLNLVLEKVEGLTKEVQQLRRENQQLRQQLL

SEQ ID NO: 328722 - protein, 319 aa, Zea mays
  Clone ID: MRT4577_62864C.1.pep
MALLLRLAAPSVPPRRSSGLRALPRVVLPEVVSKQSFLRLLVDSTASMPCPIKCSAARCAPSLTEHNDSRNNGIHASSVYGHDLMKSMSDLQEVVFSSFSKACLLSSCIIYGLPPSCIAEPCEQEYFLPNMPLLFAIAMVGATVGGLLARQRRGELARLNDQLRQINAALRRQAKIESYAPALSYAPVGSKIPESEVIVDPQKQRLIAYLRTGKNYLRNQAPDKAFPEFKAALDLARSLGDHVEEKKAARGLGASLQRQGKYKEAINYHSMVLNISKVTGEDAGVTEAYGAIADCYTELGELEKAGKFYDKYIARLENE

SEQ ID NO: 328723 - protein, 151 aa, Zea mays
  unsure (1)..(151): unsure at all Xaa locations
  Clone ID: MRT4577_62865C.1.pep
RILGTTHPCGDAFWNLMKPINEFFDHWVPDEAVGVFTERSAHINAFNRTHECRNCGDIFCYQSTHRRTTLTTHAHAQPVLFCDRCMAYVTQRLNNARAVASTTYXVHSHQDLAKKLQEAMDIHKRSXSRTLPTNVTAKRLRXVPCPTCTAH

SEQ ID NO: 328724 - protein, 28 aa, Zea mays
  Clone ID: MRT4577_62866C.1.pep
NLRHDPSVYVYAHSGYSECGIYYAKVKA

SEQ ID NO: 328725 - protein, 404 aa, Zea mays
  Clone ID: MRT4577_62867C.1.pep
MAGELRHRRAPSEDEGVASSQRLDSAPAGNGKAGTSSGGGEGAEPRGGKRDALGWLEWCRGWMAIVGEFLFQRIAASHLANPLELPPLDGVSIVVTGATSGIGLEIARQLALAGAHVVMAVRRPKVAQELIQKWQNENSETGRPLNAEVMELDLLSLDSVVKFADAWNARMAPLHVLINNAGIFAIGEPQHFSKDGHEEHMQVNHLAPALLAMLLIPSLLRGSPSRIVNVNSIMHSVGFVDAEDFNLRKHKYRSWLAYSNSKLAQVKFSSMLHKRIPAEAGISIICASPGIVDTNVTRDLPKIVVAAYRFLPYFIFDGQEGSRSALFAACDPQVPEYCEMLKSEDWPVCACINYDCNPMNASEEAHSLETSQLVWEKTLEMIGLPPDALDKLIAGETVPCRYGQ

SEQ ID NO: 328726 - protein, 70 aa, Zea mays
  Clone ID: MRT4577_62868C.1.pep
PTPSSSKMIGAGQTLTNLPTQTQNTAHSLSPKKKLAHSNKKNRLSLFKNAPTHPSNPLTPPIEPPNPIST

SEQ ID NO: 328727 - protein, 127 aa, Zea mays
  unsure (1)..(127): unsure at all Xaa locations
  Clone ID: MRT4577_62869C.1.pep
LSSSGNASPXNKDLTTILKTVECEVINERTELMLSHMSGKTIXRLIDTDRENFTSLPCGAGGVDVTAASPHAAGAAXTAQPKKEEKVQEKQXTHHDIGYSLLVKGAQASQYCLGQCNQRKTRDHVYI

SEQ ID NO: 328728 - protein, 72 aa, Zea mays
  Clone ID: MRT4577_6286C.1.pep
MYTRRKYRTRTNTEDMAQLTPIQESGQEEIEEARAPEIEVEDLPSDDMPIALRKEPRTGAESLLRGMDLITT

SEQ ID NO: 328729 - protein, 442 aa, Zea mays
  Clone ID: MRT4577_62870C.1.pep
MTPKWSACSSNSYRELPLHENGECKSTLTESVPSPTSCFGLHTANTMCSLSSQKKDGNVYKRRKMDKDSNSPITFEEAKEMATQSCTISDDHSSLLLPIISSESEALLLNSTAGVAGPILDCEEPADVPLEPNSGTDDRCFISNMSPTSMTPDKKNAAECSSSNIGPTESITEHISPRDLCIAILMKDGLINESRTRMAHKEEFTDNDANPLLACNNCGCLEHSLKMLICDSCEAGFHLSCCIPCIKELPTDEWYCAPCLCKKPKSLYGKLSEGRINPSRNTNTRPHGMSHIEYMLKDAEPYVTGVRLGRDFQAEVPEWSGPSSSSDVYFDEPCAIDSAELTTFNLCKMSNQSHSSIGNWIQCRETLNPGDSDKQVVCGKWRRAPLYVVQSDNWDCFCCLLWDPVHADCAVPQELKTSEVLKQLKFVNMLKNQLVDQNQKPA

SEQ ID NO: 328730 - protein, 100 aa, Zea mays
  Clone ID: MRT4577_62871C.1.pep
MDKSEVFNEKTLAEEKKDIHDIEPQIDLDEEDDSPIEEVRVTVTNTDDPSLPYNTFRMWFLGLTFTAIISFVNEFFYLRQTTVSIGYSVVALISLPIGHF

SEQ ID NO: 328731 - protein, 44 aa, Zea mays
  Clone ID: MRT4577_62872C.1.pep
THSDARWSTSTLYMSLYITNISKIIVIFVEKGNAYCLHNQGSKT

SEQ ID NO: 328732 - protein, 371 aa, Zea mays
  unsure (1)..(371): unsure at all Xaa locations
  Clone ID: MRT4577_62873C.1.pep
MTPKWSACSSNSYRELPLHENGECKSTLTESVPSPTSCFGLHTANTMCSLSSQISNMSPTSMTPDKKNAAECSSSNIGPTESITEHISPRDLCIAILMKDGLINESRTRMAHKEEFTDNDANPLLACNXLWLLGTFXKMLICDSCEAGXHLXCCIXXXRELPTDEWYCAPCLCKKPKSLYGKLSEGRINPSRNTNTRPHGMSHIEYMLKDAEPYVTGVRLGRDFQAEVPEWSGPSSRDEGXYLALEPFIXESKSSDVYFDEPCAIDSAELTTFNLCKMSNQSHSSIGNWIQCRETLNPGDSDKQVVCGKWRRAPLYVVQSDNWDCFCCLLWDPVHADCAVPQELKTSEVLKQLKFVNMLKNQLVDQNQKPA

SEQ ID NO: 328733 - protein, 142 aa, Zea mays
  Clone ID: MRT4577_62874C.1.pep
AIEYLKTLQLQVQMMSMGTGLCMPPAAMLLPAMQQQLLHHHPMAHFPHLGMGLGFGMGAAAGFDMLPFPCVAAGAHFPCPPGAMFGVPGQAMPSLPAAFAHMYGAGSGAGPAGQTEAADAAAPARPGEAEQGDQQVQHAKQT

SEQ ID NO: 328734 - protein, 203 aa, Zea mays
  Clone ID: MRT4577_62875C.1.pep
LIEQHTATDSYKSWHMTPKWSACSSNSYRELPSHENGECKSTLTESVPSPTSCFGLHTANTMCSLSSQKKDGNVYKRRKMDKDSNSPITFEDAKEMATQSCTISDDHSSLLLPIISSEALLLNSTAGMAGPILDCEEPADVPLEPNSGTDDRCFISNMSPTSMTPDKKNAAECSSSNIGPTEPITEHISPRGSLHCHTDERWT

SEQ ID NO: 328735 - protein, 84 aa, Zea mays
  Clone ID: MRT4577_62876C.1.pep
VKWRANFNFTQGAVIAMHLTRVQLSLSKANNTCELVGPLFFFLYLDEMSPHARHIYHLYIHQHALIIDQVVSTWIALDGSSLYS

SEQ ID NO: 328736 - protein, 89 aa, Zea mays
  Clone ID: MRT4577_62877C.1.pep
TKENCLRKLTPQPTCHNKWEGPLKKKENRGVTTRLKMVPFKPTNLEEFNFPPLCSLKRAPRIMICILKQTCLFGLKILLCRKLAPLLFY

SEQ ID NO: 328737 - protein, 55 aa, Zea mays
  Clone ID: MRT4577_62878C.1.pep
ARAKDTSHAPGRWLVEGPQRPHLGPTLIVYERFYLDHNSLNSQNGGIYLIWATPN

SEQ ID NO: 328738 - protein, 32 aa, Zea mays
  Clone ID: MRT4577_62879C.1.pep
VTLYTSFLIANHLFVSMLPLHRPLTLIVSDAW

SEQ ID NO: 328739 - protein, 98 aa, Zea mays
  unsure (1)..(98): unsure at all Xaa locations
  Clone ID: MRT4577_6287C.1.pep
FDLDDTCQIGEIISRFEKKGFYLMDLKLVNVERSIAEKHYADLASKPFFQGLVDYIISXPVVAMXWEGKRVDTTXPKIVGATNPLRFEPGNLRGALCL

SEQ ID NO: 328740 - protein, 193 aa, Zea mays
  Clone ID: MRT4577_62880C.1.pep
MQKQHNHSKGLDQSFQSMGSRFPSHQLSNGLYVSGRPEQPKEKAPVICSSAMPYTGGDIKKSGELGKMFDLHRKSGPLGNPPSRNTSFGGAAANSGPVSNAVGRSNYSGSISSAVPGTGGSSRTKSNSGPLNKHGEPTKRLSGPQSSGVNPMARQNSGPLPPVLPTTGLITSGPITSGQLNSSGAQRKVSGPL

SEQ ID NO: 328741 - protein, 47 aa, Zea mays
  Clone ID: MRT4577_62881C.1.pep
SLVNKTYTLGKSNDTMLIKLSVATLPRATCPAIGSRGKEGESWSEAW

SEQ ID NO: 328742 - protein, 362 aa, Zea mays
  unsure (1)..(362): unsure at all Xaa locations
  Clone ID: MRT4577_62882C.1.pep
MQKQHNHSKGLDQSFQSMGSRFPSHQLSNGLYVSGRPEQPKEKAPVICSSAMPYTGGDIKKSGELGKMFDLHRKSGPLGNPPSRNTSFGGAAANSGPVSNAVGRSNYSGSISSAVPGTGGSSRTKSNSGPLNKHGEPTKRLSGPQSSGVNPMARQNSGPLPPVLPTTGLITSGPITSGQLNSSGAQRKVSGPLDSSVSMKMRVTSFAHNPAVTNINXGDGYSIRGSIPTTIIWLVALLFLVGFVAGGFILAAIHNPILLIVVVVIFGFVATLVIWNICWGRRGVIGFISRYPDADLRTTKDGEYVKVTGVYGNLCTLTLQVVTCGNLPLESSFQRVPRCVYTSTCLYEYRGWDSKAANSTHH

SEQ ID NO: 328743 - protein, 75 aa, Zea mays
  Clone ID: MRT4577_62883C.1.pep
IKKATLYTKKRKRGKGHGERNESNTHNGELKDHRCVHTATKRAPAPDFRDHRKGKNSARTELKGPNPKDIQPSAL

SEQ ID NO: 328744 - protein, 83 aa, Zea mays
  Clone ID: MRT4577_62884C.1.pep
RNGQKNQCKNCFMYRLKLSYTFTTKNSKQRKQLFTATRSIYSLALLESESALFFMKGAGRFGNFGMTLFLLVSGSGGFWAGAV

SEQ ID NO: 328745 - protein, 49 aa, Zea mays
  Clone ID: MRT4577_62885C.1.pep
PFFFFSLFFFFFFGLFGFSFKKRTRSLLTYQLYLKGDPKRDKAIMKRAA

SEQ ID NO: 328746 - protein, 158 aa, Zea mays
  Clone ID: MRT4577_62886C.1.pep
SMPFMKKTADLQLGRRNIVGPSSVGTRASLGTRPSMREGTEVIRPSPKVSAAVYQGPIHAVRQDQAHRPCQQLLTSSLTLEIGTILKSEDVSSLHTRAHRCIRNEPRPEQPQIHSFSPSQCQGSQAPCSRRLSEFHSARTHLDLYLVLLVEALAIWGR

SEQ ID NO: 328747 - protein, 73 aa, Zea mays
  Clone ID: MRT4577_62887C.1.pep
VHEDPDPRQERRVLFFCFPWGMGHFGPVKIVLVVFFGLTKDIFFIIERSLGRAALRCSLHRPRIYKNFQNSSR

SEQ ID NO: 328748 - protein, 163 aa, Zea mays
  unsure (1)..(163): unsure at all Xaa locations
  Clone ID: MRT4577_62888C.1.pep
TGDHIEMNERDVIKRRRFHEIRVRTETAQQXSTRTRLVLCXLYGVSDAMDMVDYNLISASSAAYLTGYNXNDETDRRWISYKYKKVQPIYGDANKFNHTHALKDIKKLIMYXMTRVDRYSKMKGVVYMYWKKARLREMKNVVNVVGEQXLESYDWEEQAEFKK

SEQ ID NO: 328749 - protein, 131 aa, Zea mays
  unsure (1)..(131): unsure at all Xaa locations
  Clone ID: MRT4577_62889C.1.pep
GMWALDMTTAAMSFSLGESYTCIRRSYPVMAGIQYGAVTISTSFSACRKCKACIGTSTHCHIEMSSTSLTRHDRIARIRXDPTERVSSQNLCMLPLLELKSRVXTSISSTHTLPFPFHIRDPSCELFEFAR

SEQ ID NO: 328750 - protein, 55 aa, Zea mays
  Clone ID: MRT4577_6288C.1.pep
LAKSGPLRAIVILWRIPAPKISCLTASARCVTKRTNNPACRCRDNKWRYACMSCH

SEQ ID NO: 328751 - protein, 260 aa, Zea mays
  Clone ID: MRT4577_62890C.1.pep
PAGPGHLECANIKKTYKTPHICKSDNPDAAWYTQMEACVTPLPEVSNQGEVAGGAVEKWPERAFLVPPRIKRGMIPGLDAKKFDEDKKLWEKRVAYYKRTIPIAENRYRNVMDMNANMGGFAASLVKYPVWVMNVVPVNSDRDTLGAIYERGFIGTYQDWCEAFSTYPRTYDLLHADNLFSIYQDRCDITGILLEMDRILRPEGTAIIRDTVDVLTKVQAITKRMRWESRIMDHEDGPFNPEKVLMAVKTYWTAEAEEEH

SEQ ID NO: 328752 - protein, 634 aa, Zea mays
  unsure (1)..(634): unsure at all Xaa locations
  Clone ID: MRT4577_62891C.1.pep
MAKDYPASPKAQQLQESKKQRLTYILVVSALCIAFYVLGAWQNTTLPKPIGNSAITRVGCDPTAATTQSSGSVPSFGPGSGEVLDFDAHHRLTINNTDGDGELQQFPACPLNFSEYTPCEDRRRGRRFDRNMLVYRERHCPGKDEQVRCLIPAPPXRYRTPFKWPRSRDYAYFNNIPHKELSIEKAVQNWIQVEGDKFKFPGGGTMFPRGADAYIDDINKLISLSDGKIRTAVDTGCGVASWGAYLLKRNIIAMSFAPRDTHEAQVQFALERGVPAIIGVMAKQWLPYPSRAFDMAHCSRCLIPWDEHDGLYLXRHAEVDRILRPGGYWILSGPPINWKTHHRGWERTKDDLKREQDKIEDVAKSLCWNKVVEKGDLSIWQKPKNHLECANIKKTYKTPHICKSDNPDAAWYTQMEACVTPLPEVSNQGEVAGGAVEKWPERAFLVPPRIKRGMIPGLDAKKFDEDKKLWEKRVAYYKRTIPIAENRYRNVMDMNAASLVKYPVWVMNVVPVNSDRDTLGAIYERGFIGTYQDWCEAFSTYPRTYDLLHADNLFSIYQDRCDITGILLEMDRILRPEGTAIIRDTVDVLTKVQAITKRMRWESRIMDHEDGPFNPEKVLMAVKTYWTAEAEEEH

SEQ ID NO: 328753 - protein, 127 aa, Zea mays
  Clone ID: MRT4577_62892C.1.pep
HEGGRGVLDELERSLKLSAWHMEPSRMTLCRFGNTSSSSLWYELAYCEAKGRIRKGDRVWQIAFGSGFKCNSAVWKALRTVDASEEGNPWTPEVHVLPIHVPRVSPIDETAYTFPDGATYKVSVSHA

SEQ ID NO: 328754 - protein, 61 aa, Zea mays
  Clone ID: MRT4577_62893C.1.pep
CWETEQQRAGEARSSPAPQRADEMHGSRWAPVNKQERSRRPLGYRKRSGLVGSLELLDPPG

SEQ ID NO: 328755 - protein, 51 aa, Zea mays
  Clone ID: MRT4577_62894C.1.pep
FPSRGRNLGVLSGGWSKKKKKKKKKKKKKKKKKKKKKKKKKKKLEEGPGVP

SEQ ID NO: 328756 - protein, 210 aa, Zea mays
  unsure (1)..(210): unsure at all Xaa locations
  Clone ID: MRT4577_62895C.1.pep
IRHEGPAASPETAAHPAKHGKDHGAPVAAPSNVSHHHSMPANIVHGKTHATPVVVPEKRRHHHLPANITNVKGPAVSPSKSPIIHRKEHGIPVAAPPKEHSSYLPPANHRHHKGSPRPAPHKSNSTSAPSHGYPGSTAPAPVRLPPPKGKGEGNFAHAPNHPNQYHXTSYSPGSALPPAHPPDIPAFRKPKIAPAPSQSLLPSPTNSYCT

SEQ ID NO: 328757 - protein, 62 aa, Zea mays
  Clone ID: MRT4577_62896C.1.pep
PSGKQKLLVQKTLRVQIVLISQTRAFVGVIGLVWKLYFSKEFLFFSRKIKLFFWNLEILLEI

SEQ ID NO: 328758 - protein, 92 aa, Zea mays
  Clone ID: MRT4577_62897C.1.pep
GLEPNLQQSLQGLGQFLHLYWTQCLGGAQLLLAYKHDTLGGTLHDAYGLEDNSIHLDHLRNRLPLVGNNSPPSILMLVFDGRRIERASSLLT

SEQ ID NO: 328759 - protein, 145 aa, Zea mays
  unsure (1)..(145): unsure at all Xaa locations
  Clone ID: MRT4577_62898C.1.pep
PPKFLSPSVPLVSVTAGMHGSYIGVKGEPIFLPPPQWVAVDPCGAGEAYAFGFLFGVPRGVFALKGIGLLGSRVTSVVVGQQGPRFGVQDPDKLVXCFSXPLDSLGFCSDVLINPSANVWFDCICFFPQPLKFFWSCSYLPNLGL

SEQ ID NO: 328760 - protein, 89 aa, Zea mays
  unsure (1)..(89): unsure at all Xaa locations
  Clone ID: MRT4577_62899C.1.pep
SIGNQVWYTREVPAFLDPGGMPALPGVKTKELLIWVPFSELVLSPSGPKFVFRPPGGVGRAFPVPPFQFEPXGPPRPGTPPPPPPIVLF

SEQ ID NO: 328761 - protein, 241 aa, Zea mays
  Clone ID: MRT4577_6289C.1.pep
MDLLIAQITTDLRSSDALRQSSALLQALQQCAAGRDVSALARTAATEILSAPSSAVCKRLALDLLRALPLPPDLLDPLLLSSLRSDLSFPDPDVASSSIASFPSLPSHLLPSLLSSAHAEIANALSSPAESLRLAAVTSLSSLLPRDDLTLMCSTNPSLMAHATTWWGRLAELALDSADAVSAGAFEALARLFQELEGRRMSRLAGDKLVDGEGALAVRAQWAADAIDFIWSRRNMLIARS

SEQ ID NO: 328762 - protein, 128 aa, Zea mays
  unsure (1)..(128): unsure at all Xaa locations
  Clone ID: MRT4577_628C.1.pep
YRTNIGRTIILLPYAPGTIWKGWYANIVPHCXNNVLACLISPTCNKRPSLMFETPIXINTYRIQHEIATGIIPLSPLIVQQPXSLLQQLPLXHLVAQNIRTQQLQQLVLSNLAAYSQQHQFLSIKQLG

SEQ ID NO: 328763 - protein, 96 aa, Zea mays
  unsure (1)..(96): unsure at all Xaa locations
  Clone ID: MRT4577_62900C.1.pep
GEEGHGRAQGRLADKNSVSRSCRAGLQFPVRRVGRYFIMGRFAYRVGTGAYVYLAGVLXYLEGDVLDLDGYAVIDNENTRMIPRHVLFSIRNDEEI

SEQ ID NO: 328764 - protein, 81 aa, Zea mays
  Clone ID: MRT4577_62901C.1.pep
PRFSAHYKGGIKPPQAPIPLQFIPNRTFFLALNKIHTLENSRPFETSNGPQVSGFFIQKGKGNPFKGGGEDQSPRGFFLFF

SEQ ID NO: 328765 - protein, 75 aa, Zea mays
  Clone ID: MRT4577_62902C.1.pep
EASAKKKKKKKKKKKKKKKKKKKKKKKKKKKKKKFLGFFGTGAIQRSVFIAEAEEGAVIEPTHLKRGWPKLLLDF

SEQ ID NO: 328766 - protein, 298 aa, Zea mays
  unsure (1)..(298): unsure at all Xaa locations
  Clone ID: MRT4577_62903C.1.pep
MSGGGPGGACGPDSRVETISRLAQWRIDTFGPCSYRRSDPFKLGIWNWYLSVEKSRSIFVRLFPEPGRVAKEQPPLARFLLRVSWAGPPRRSCVSPGYXESSSVWPNEGMVQKIASKSALGCLSHMLADSIHADVTINTTDGVLKAHKAVLAACSPVFKSMFVHDLREKESSTVDIGDMCVESCSALLGFVYGTIEQGQFWKHRLPLLAAADKYGIGDIKDCCEESLLEDIGSGNVLERLHVAWLYRLERLKKGCLTYLFVFGKIYDVRDEMHGFFHHADRELMHDMFQEVLSVWKPM

SEQ ID NO: 328767 - protein, 159 aa, Zea mays
  Clone ID: MRT4577_62904C.1.pep
MDGEVMRMGGGLSACSPVFKSMFVHDLREKESTTVDIGDMCVKSCSALLGFVYGTIEQGQFWKRRLPLLAAADKYGIGDIKDCCEESLLEDIGSGNVLERLHVAWLYRLERLKKGCLTYLFVFGKIYDVRDEMHGFFHHADRELMHDMFQEVLSVWKPM

SEQ ID NO: 328768 - protein, 82 aa, Zea mays
  Clone ID: MRT4577_62905C.1.pep
KLLQLPSYSSTLHGKVASSCDINTTIQDFHLYPSPFVLNSLVHIHTLSHPGIRPFCQQAMVYCSYLDFRQLELQKLLECPDC

SEQ ID NO: 328769 - protein, 72 aa, Zea mays
  unsure (1)..(72): unsure at all Xaa locations
  Clone ID: MRT4577_62906C.1.pep
PPPPLLRRRKSPKKRKRKKXPLPRPPRRLLLLLMQQLLQNSPLGRPRQKLRLPLPLPWGSRPRPRRKPPRPS

SEQ ID NO: 328770 - protein, 336 aa, Zea mays
  Clone ID: MRT4577_62907C.1.pep
MSGGGPGGACGPDSRVETISRLAQWRIDTFGPCSYRRSDPFKLGIWNWYLSVEKSRSIVVRLFPEPGRVAKEQPPLARFLLRVSWAGPPRRSCVSPVHEHLLRTSDDFIWQVDAMPHGRFTIDVEFLDLRIATNNATESSSVWPNEGMVQKIASKSALGCLSHMLADSIHADVTINTTDGVLKAHKAVLAACSPVFKSMFVHDLREKESSTVDIGDMCVESCSALLGFVYGTIEQGQFWKHRLPLLAAADKYGIGDIKDCCEESLLEDIGSGNVLERLHVAWLYRLERLKKGCLTYLFVFGKIYDVRDEMHGFFHHADRELMHDMFQEVLSVWKPM

SEQ ID NO: 328771 - protein, 47 aa, Zea mays
  Clone ID: MRT4577_62908C.1.pep
RGLPSLAHQYGKFISCGVFDGKPLSIGPVCSAYSPLRRCARKTLEPN

SEQ ID NO: 328772 - protein, 99 aa, Zea mays
  Clone ID: MRT4577_62909C.1.pep
GYLEAGRGHVSHQRDRRHVVPKEHGGYRHPDRAHLTAPHSLLMEHVFRLHARDADRRSAATGRVECLMAAARGINQTSEEKYTEPDRWAMAAFFITGKT

SEQ ID NO: 328773 - protein, 68 aa, Zea mays
  unsure (1)..(68): unsure at all Xaa locations
  Clone ID: MRT4577_6290C.1.pep
PGFWSSGRGALWFRASFLSVAGRGRSFAVVSVPGPPVLPLGFFAPXPPVCPPGGLVPGGCIYGWVPPV

SEQ ID NO: 328774 - protein, 51 aa, Zea mays
  Clone ID: MRT4577_62910C.1.pep
YFRLVCAKHIPSGTNGPGPVIFDYTYYYPNARLSVKRMLPYQRYTIHGCKT

SEQ ID NO: 328775 - protein, 76 aa, Zea mays
  Clone ID: MRT4577_62911C.1.pep
MNLGLAAPVYAMGCVLHLTAWALVAAVPCPDRGNALQAHHLPAAPSRAAFPWAPTLLALQERLAEEGKRKDRRHSC

SEQ ID NO: 328776 - protein, 55 aa, Zea mays
  unsure (1)..(55): unsure at all Xaa locations
  Clone ID: MRT4577_62912C.1.pep
MPKIAEHELENEKFKFARSMLYSGRHPGIKDGXGFXXXDQRQTSLPHXXLSNFVK

SEQ ID NO: 328777 - protein, 48 aa, Zea mays
  Clone ID: MRT4577_62913C.1.pep
DSRPTAYAIWLHPSPLVIGGTMITRPTGLQRTTTSSTSSRMRHNRKLD

SEQ ID NO: 328778 - protein, 101 aa, Zea mays
  Clone ID: MRT4577_62914C.1.pep
LGWEEVLEELPVKILDDPPPKRLFLARGKLQKILVEFVPPKIKLPKVVELFFKGIQTGVKREVYFWHAFYNKRLPVGANALLKLEKFVAKFMSIPRKSILH

SEQ ID NO: 328779 - protein, 43 aa, Zea mays
  Clone ID: MRT4577_62915C.1.pep
AGGAPHHRGQQALYGQYGIQRMTLGDIHTLAFIRLSVLELYQA

SEQ ID NO: 328780 - protein, 187 aa, Zea mays
  Clone ID: MRT4577_62916C.1.pep
TYWVPNKLCVNTKHFYNDDLQANHSLVTLNVFIQFRKQNLRPLPYPYVLFLHVYGIQQTYFHFHAPDAPIVFSAELPFLAFAGRVLVGIPTILAVKSCSKALSRWLLPVMCSTLGIPIVSSCYVPALKIDGGSSKSRQAAGGHLQRLLSHFPQKAYDVDTGIRFVQYASLAWSVVDLVPAIFAHLDL

SEQ ID NO: 328781 - protein, 68 aa, Zea mays
  Clone ID: MRT4577_62917C.1.pep
TNWFSFLLLHFFVVLTSFYGCSKQVRCLGKYLSISFIWNCFKWFFSGVGDSCGFDNFPSLGLAAFKNT

SEQ ID NO: 328782 - protein, 52 aa, Zea mays
  Clone ID: MRT4577_62918C.1.pep
VGVSVVLVPANALICDGPIWDLRLVAARVSDPFTVTGSVLLDAVLDPTSGRY

SEQ ID NO: 328783 - protein, 76 aa, Zea mays
  Clone ID: MRT4577_62919C.1.pep
NPGRPHASGTRGRGSGPESSIRFLTKYATLLRRAGVPTMALTTASTDSSPSRIIRRFSSSQDSRPPSSLLHLAPRR

SEQ ID NO: 328784 - protein, 91 aa, Zea mays
  unsure (1)..(91): unsure at all Xaa locations
  Clone ID: MRT4577_6291C.1.pep
GDALNGYKRVIFFQGPIGFFKESINLGSNVQGFFVWFLLDNFXWFPGFPQRYGIVFVAPHNNCPRYIKEFPKWFKQFTPPKNPTKKIFSPP

SEQ ID NO: 328785 - protein, 61 aa, Zea mays
  Clone ID: MRT4577_62920C.1.pep
CRSRIFLYGCSSGFLYNVVLGYRYLFLLIILCRVVMHLYRRTFSFKFVTMACAEHRWSNVK

SEQ ID NO: 328786 - protein, 59 aa, Zea mays
  Clone ID: MRT4577_62921C.1.pep
KGNCSIIVRCVCTVYLTIVFFKQCRLLACAVVTTFMYKERCSIIVDDTYAFVQGYTSVC

SEQ ID NO: 328787 - protein, 267 aa, Zea mays
  unsure (1)..(267): unsure at all Xaa locations
  Clone ID: MRT4577_62922C.1.pep
LGPSGRPDLWLPLLESXKAFHSREAACVTASSLGRVLMLDLILRNEDRLPCRQLGWRGNPANLMISDKSSLPNLDRLDDFKSSTDSPNQLITHFLHREKRSHSLNGKFGSPGLDPMSPKLEPLINEKENAERTNGDFRIVAIDTGVPRRPPVGRRVKDHERYPKVVELILNSSDYSASILYEISGCKLGHPRPDEVTSSDSCCSLSDEDNAGVIHEFRGSFRAALRDLEGFHLFLLQLYQKLDGVLRVFLSIITKTSEESDNNDAAL

SEQ ID NO: 328788 - protein, 128 aa, Zea mays
  unsure (1)..(128): unsure at all Xaa locations
  Clone ID: MRT4577_62923C.1.pep
VGXXXXXRVXRRLRGSVAXSAAXVPSPPXCXWLSARLFLSSCXXXSSLGAPSFGSSLLLLLPLXXRRLPPPVPXSAVSSSLXXPPPCGSPPPXCSFRLVSSGFLSLPASPXXLFKKILFFFFFFCFFF

SEQ ID NO: 328789 - protein, 110 aa, Zea mays
  unsure (1)..(110): unsure at all Xaa locations
  Clone ID: MRT4577_62924C.1.pep
WIACTYPGQKQSLYTEQGSNPVYLWELVXVKVSXADLVQMDLIEPNSGSWSSMRESXGSIXRLDSGHRLAAPFSLRITNESGKTLVANQVIPANWVPNTYYRSIIQYYAL

SEQ ID NO: 328790 - protein, 211 aa, Zea mays
  Clone ID: MRT4577_62925C.1.pep
SSGNNAEYGVKEPILPLHEQTPQKYNGSGLHNHHNFRGRGRGRGSAFSQSVTAFTEEFDFTAMNEKFNKDEVWGHLGKKSQSRDKDGEVGDDVFDEDLEVEETDNPELSVKPVYVKDDFFDSLSSGTFGRGGPNGRGRPSERRRVDTETFGEFPRHRQPYRGGARGYRGGGRSRGSYYGGRGYGNTGTGGYGNTGTGGPGNSYSHRGYGRD

SEQ ID NO: 328791 - protein, 102 aa, Zea mays
  unsure (1)..(102): unsure at all Xaa locations
  Clone ID: MRT4577_62926C.1.pep
TVAPPVSHVPDAASSMTTSPMSTTPAARRVECLFFFFRRGDGDXIFXQXKQXXXIHLMPPFLXXKSSNSXXFTXTXXLLTXXTLPSXSPHXPXPXXIPHNIH

SEQ ID NO: 328792 - protein, 268 aa, Zea mays
  unsure (1)..(268): unsure at all Xaa locations
  Clone ID: MRT4577_62927C.1.pep
MAVPLLASSGQLLQNTSSMLSSSHSMQAPLQVASKEVKPVEPKAKVAEPLLPDPLLPDPPSQSLPENKEPILPLPKHTPQKFSQSVTTFTEEFDFTAMNEKFNKDEVWGHLGKKSQSRDKDGEVGDDVFDEDLEVEETDNPELSVKPVYVKDDFFDSLSSGTFGRGGPNGRGRPSERRRVDTEXRNYPFPPLIFLLVLYPFLLAXTFGEFPRHRQPYRGGARGYRGGGRSRGSYYGGRGYGNTGTGCYGNTGTGGPGNSYSHRGYGRD

SEQ ID NO: 328793 - protein, 26 aa, Zea mays
  Clone ID: MRT4577_62929C.1.pep
LPTSSGLDESQLFLLYVERSRGSLMS

SEQ ID NO: 328794 - protein, 38 aa, Zea mays
  Clone ID: MRT4577_6292C.1.pep
GLWRLGRHWPSTSLSASHRIGYPSALRTHTSCRARSRT

SEQ ID NO: 328795 - protein, 77 aa, Zea mays
  unsure (1)..(77): unsure at all Xaa locations
  Clone ID: MRT4577_62930C.1.pep
PNDPPFMYIKAQDHHSKDLFXPSTPPFSNTXYDPYHEGTHFLRRNPFNLTQGAHTDVFHTLXENIPDYDTPTHLCQA

SEQ ID NO: 328796 - protein, 91 aa, Zea mays
  Clone ID: MRT4577_62931C.1.pep
MMLGPEGGEGYVVKLRGLPWSCSIEDVQNFLSDCTIHDGVAGVHFIYTREGRQSGEAFVELESEDDVKLALKKDRESMGHRILEVLKSHRT

SEQ ID NO: 328797 - protein, 169 aa, Zea mays
  Clone ID: MRT4577_62932C.1.pep
LNSSLLKVKLIMEVKFTINNRQFSVNPSIVPVDTTLNTFIRSYARLTGTKFMCLEGGCGVCIINIAGLKTDSNQTRSIAVNSCLWLVYACHGLNVTTIEGLGGREYGYHPIQHTLYEYNGSQCGYCSPAMIMNMYSLLEQNNGKVTMQQVENSFGGNICRCTGYRPILD

SEQ ID NO: 328798 - protein, 40 aa, Zea mays
  Clone ID: MRT4577_62933C.1.pep
FVSFSRDLSVSRRYTGPLPFPDKPHEQPGTEESVLAKCVI

SEQ ID NO: 328799 - protein, 44 aa, Zea mays
  Clone ID: MRT4577_62934C.1.pep
MDLPESSVPRADKGPAPRRLCPVDREELVRAMAQSLYSLGYRRA

SEQ ID NO: 328800 - protein, 58 aa, Zea mays
  unsure (1)..(58): unsure at all Xaa locations
  Clone ID: MRT4577_62935C.1.pep
QWKAAKEELRDEDEEEPESALEALERKRQKEIEEWRKQQIASGEAXXNANFVPVRGDW

SEQ ID NO: 328801 - protein, 68 aa, Zea mays
  Clone ID: MRT4577_62936C.1.pep
RKIGMHPSPNGAYITCMGGQGSPFFENKGLLGGQLYTGKVFVEVEGDLNRGGKQKFMFLCQHPEIPPP

SEQ ID NO: 328802 - protein, 903 aa, Zea mays
  Clone ID: MRT4577_62937C.1.pep
MSPLPRALPRSLAFLGWVLLILLPARAADAGPLATELLRPPFTASNILYVDTGGAFLESTSGAFRAAVFNPGKQQDRFYLAVLHVPSATLVWSGNRDAPTTSSGPVNLTSQGITVSKPDGTLLWSTPSQLRSPVVALRLQDSGNLQLLGAGNATLWQSFDTATDTLLPGQLLRAGAYLSAATSATDLAEGNYRLGVTAADLVLTWQASTYWRLSNDARSYKDRNAAVASVSVNASGLFAVAADGGLVFRVNIGAAAFPVLSLGYDGRLRITSYALVNSSASLGSDFVAPANDCDLPLQCPSLGLCSPAAGNSSTCTCPPLFAASATTPGACTPGDGSALASPALCQSNNSTVSPSYLALKSQVAYFATKFDPPIKTGVNHNACRGLCSTSCGCLAYFYDNLAQSCYLIQDKQLGSLYFSSSASALGYIKTVPSANNATRNNPSSSSANRAIPIILPSIAAFLLLAVIICYLCWRRMSKNGKKRKGKGTGVKQVYMGRQKDTGSADDDEDDDNVVVPGMPTRFSYMEIAAMTANFGTKIGSGGFGSVYKGELPGVVEGLVAVKKLEAVGVQAKREFCTEITVIANIRHVNLVRLRGFCAEGSRRLLVYEYMNRGSLDRSLFGRTGPVLEWGERMEVALGAARGLAYLHTGCDQKIVHCDVKPENILLADGGQVKIADFGLAKLMSPEQSALFTTMRGTRGYLAPEWLSNAAISDRADVYSFGMVLLELIHGRKNRGEQTNDNAAVAVAAAGSSVQSDWPSGWSSATATSSPSGASGSSDEYFPMVAMELHEQGRHLDLVDRRLEGRVDGAEAARAVRIALCCLHEDPAQRPSMAAVVRMLEGTVAPPEPRVEALGFLRLYGRGHAVPNTSLIAMAGTSGSAGTSSSMAGVAQLTDTSQSVSAPR

SEQ ID NO: 328803 - protein, 290 aa, Zea mays
  unsure (1)..(290): unsure at all Xaa locations
  Clone ID: MRT4577_62938C.1.pep
FCCCCSLSLSLCVCVCVCVCVCVGAALRRIGVKGVEVRKPEQLLGIDSLIIPGGESTTMAKLANYHNLFPALREFVGGGKPVWGTCAGLIFLANKAVVLLSGQKTGGQELVGGLDCTVHRNFFGSQXFLLQLQSFETELSVPKLSEKEGGNDTCRGVFIRAPAILEVGPDVEILADCPVPVDRPSITISFGEGTEFLLVLXSSEPVNMXFLGKQEEEYSKDRVIVAVRQGNILATAFHPELTSDSRWHRFFLDMDKESPAKAFSALSLSSSSRDTEGLPKNKPFDLPIFE

SEQ ID NO: 328804 - protein, 66 aa, Zea mays
  Clone ID: MRT4577_62939C.1.pep
TESISLLGNFKGVLGDSLNRFNYKLYSTAIIVHNTQSLTDSHIIVKQVIFITHNYILMSSLLLKHS

SEQ ID NO: 328805 - protein, 120 aa, Zea mays
  unsure (1)..(120): unsure at all Xaa locations
  Clone ID: MRT4577_6293C.1.pep
PGYKSAVLLGVVLASVLLGFLDVVYARELTEANGSGVKNNVKPAGEPGLKDEKWFGGGYMHGGGSGNGQPGXYGGGGNMQPGYGGGGNIEPGFCGGFRRHYCGGGFGSGHGGAVCGCGGG

SEQ ID NO: 328806 - protein, 256 aa, Zea mays
  unsure (1)..(256): unsure at all Xaa locations
  Clone ID: MRT4577_62940C.1.pep
MAVVGVLALQGSYNEHMAALRRIGVKGVEVRKPEQLLGIDSLIIPGGESTTMAKLANYHNLXFPALREFVGGGKPVWGTCAGLIFLANKAVGQKTGGQELVGGLDCTVHRNFFGSQLQSFETELSVPKLSEKEGGNDTCRGVFIRAPAILEVGPDVEILADCPVPVDRPSITISFGEGTEEEEYSKDRVIVAVRQGNILATAFHPELTSDSRWHRFFLDMDKESPAKAFSALSLSSSSRDTEGLPKNKPFDLPIFE

SEQ ID NO: 328807 - protein, 96 aa, Zea mays
  Clone ID: MRT4577_62941C.1.pep
MSIFRKTPCRKVGTVIKTEETKPCCHSYSSVSASRIIVMPIVDYYRFFRNLVSIPLLEVWRWSLTVLMPFLCAMNEWFCAVRLMDMAMSSGSRSVD

SEQ ID NO: 328808 - protein, 29 aa, Zea mays
  Clone ID: MRT4577_62942C.1.pep
MAQAQAQHHHLNLLAALSGAARRAEEETR

SEQ ID NO: 328809 - protein, 48 aa, Zea mays
  unsure (1)..(48): unsure at all Xaa locations
  Clone ID: MRT4577_62943C.1.pep
IGYLEAGRVRFVRFIPXLAYKIFRCYSLSSKITKLIVIGLDVTPSIPK

SEQ ID NO: 328810 - protein, 41 aa, Zea mays
  Clone ID: MRT4577_62944C.1.pep
RLHGRLSDEHPLVLEERRQTGVRGSVDMHPQKLKPLRVTCP

SEQ ID NO: 328811 - protein, 69 aa, Zea mays
  Clone ID: MRT4577_62945C.1.pep
NPAKMVEQKGGPLTKGPKGGAIQIRNNFNKQHTFWSGTRPFLHPLQGGLFLKVGWGEAPKKPSVLEGPG

SEQ ID NO: 328812 - protein, 52 aa, Zea mays
  Clone ID: MRT4577_62946C.1.pep
HVNSIGIPQFYSCKVASQRMELGTLRESSIFFFISSLKFPSFFCFLPLTFFF

SEQ ID NO: 328813 - protein, 57 aa, Zea mays
  Clone ID: MRT4577_62947C.1.pep
MNAPSDMPTTPVIPSRLPNVGTTIFTVMSALAVEKGAVNLGQCFPDFDCDPCIVDAV

SEQ ID NO: 328814 - protein, 192 aa, Zea mays
  Clone ID: MRT4577_62948C.1.pep
PRPHHQFFELHRLIVQQSAVWKAYTPDLQKSRPGRKPSRKASASHHHQNKAGTRDTAKNPEGAQGSEKTEWAREDGFKEICRSWIVLRKESRSWFLSFLEDALESGFMSEGQTTKNTRERVRGQPKPKGGDGRIAVLLSQLKETSNWLDQLLQDEADTSADGLAETVDQLKQKVYKCLLGTVETAASALGGR

SEQ ID NO: 328815 - protein, 94 aa, Zea mays
  Clone ID: MRT4577_62949C.1.pep
PTRTQPYKAQNYTFTTIQNIILAGPTCTFFNTCYPNPFTTILTLFYSIPTTPIPLITHTLTILKHQSKYLHNPPLSLYMNLTIITHFPLQPTYI

SEQ ID NO: 328816 - protein, 92 aa, Zea mays
  Clone ID: MRT4577_6294C.1.pep
LVSLCSKLSVFVVAMMVVVLVGPVRYSVLAITQSLFQYYPTISIGGGDVAEGAGIGGGGGGATLAKKRRLGRDDAGGGGRITMGNDLWYGPD

SEQ ID NO: 328817 - protein, 366 aa, Zea mays
  Clone ID: MRT4577_62950C.1.pep
MLAASLRPGPSLAAFPGTAQRSPVPFLPFPARLHHRPVLLSATAEGTGAPAGQGDASAAPLDEVRLPQFAADWESARACKDQGRIFSLPVLRANSGGLIVRFNSLQGFVPNPLLSPAHWCKDPKRPIQDVTKDLVGTSISVKVAEVNEEEKKLVFSEKDASWSTYSSRIKIGDIYDGIVGSVFHYGAFVHLRFPDGLYHLTGLVHISEVSWDLVQDVKDFLNEGDAVKVIVVNIDMTKSRIALSIRQLEEDPLLETLDKVIPLEADQSPNRMIGLPEVELLPGLDGICNELLQEDGITDVQFGRQALEKRVVSQDLELWISNVQAKDNRFTLLARAGRQVQEVYLTTSLDQEGIKKAVQRVLGRVP

SEQ ID NO: 328818 - protein, 101 aa, Zea mays
  unsure (1)..(101): unsure at all Xaa locations
  Clone ID: MRT4577_62951C.1.pep
EGLKNRVFEVXLSDLQGDXEDQAYRKISLRAAHVQGKXNVLTNFSXVSFTNDNLRYLTKKWLTLIEAHXVDVKTTNNYMLPVXSAFGFTKRRPSQVKRTCY

SEQ ID NO: 328819 - protein, 72 aa, Zea mays
  unsure (1)..(72): unsure at all Xaa locations
  Clone ID: MRT4577_62952C.1.pep
LENRFSTRCVSGSRNTPXSTLCTAFFMPSWSREVVKYTSWTCQVIRRNYNPYNSIYSETNQPRPDSSTMKLL

SEQ ID NO: 328820 - protein, 88 aa, Zea mays
  Clone ID: MRT4577_62953C.1.pep
ARLFRGGPASISKGLHQGQDLVSIGGWCEPRTYTLTSIMLNKYNPHIRNMRGHLLCLFVSTIQTRPEVDTLLTMAQLTKGACTMAVHI

SEQ ID NO: 328821 - protein, 64 aa, Zea mays
  unsure (1)..(64): unsure at all Xaa locations
  Clone ID: MRT4577_62954C.1.pep
LHDLKCLKDRKDETIGKLQIDIGSLKLQCDYLXTLLSIKESEKDNLAFQVLELRRSLETREEGA

SEQ ID NO: 328822 - protein, 46 aa, Zea mays
  Clone ID: MRT4577_62956C.1.pep
PGLLDARVGAGTPAVAIARRVANLLLGAAAGGGRRRATVRDSVSVS

SEQ ID NO: 328823 - protein, 37 aa, Zea mays
  Clone ID: MRT4577_62957C.1.pep
SIGGVASRNRSKPCEAIIKLFSIYLVSKRSCLLSKNK

SEQ ID NO: 328824 - protein, 436 aa, Zea mays
  Clone ID: MRT4577_62958C.1.pep
MGCFLSCFRGGSNPSGDLRDPLVRESRIGDAFVNDEKKLDEATAKLDVEAATDHGVDDELRREANYLKSCGTISQTPPEFLDSIPINSEDANECGDTPTNVQQTKDVVVVEENSSELLNSDDHDVLHKQDTDEGRTLRTGSETQPSLEEVKPSCHQNVVRDQSTDSSDSPYPTPLVLRGDIQTPGTVYAAAHKEAWKPGKRARAFIYPVLRPIENKMQWMELKAAESPTVLSPNPPKRRNLSAAGSGDKAHQPPTRSAFAGSSEHGSFPNTYSRAAQDGVMSPDEPKCQNGLEQQDGREELSTRSSGRGKRGVASLSHWLKPSSSSADDGSPDDGSSNFVGTEEKTRCGANVSDVPFFPAFGLDWEGETDKPTPVLPKAWDGNGIPNTTTKYKEDQKVSWHATPFEERLLKVLSDEKPRHERRISGKLIHLDENAE

SEQ ID NO: 328825 - protein, 183 aa, Zea mays
  Clone ID: MRT4577_62959C.1.pep
LIQIPLLPPPPTLAASPVATSFPLSISVPPLPIPKPYLPQTRGGCGGDCWVSLVMGCFLSCFRGGSNPSGDLRDPLVRESRIGDAFVNDEKKLDEATAKLDVEAATDHGVDDELRREANYLKSCGTISQTPPEFLDSIPINSEDANEVRIFHPQACLKIRHLIFLGGVYSAAIHRPTCSRRKM

SEQ ID NO: 328826 - protein, 56 aa, Zea mays
  Clone ID: MRT4577_6295C.1.pep
FLYLLLSAGVAGGDGKKLSPAGTPAGYLAGAPCCVPCYRPSCSKGAIPFLTHHLSA

SEQ ID NO: 328827 - protein, 126 aa, Zea mays
  unsure (1)..(126): unsure at all Xaa locations
  Clone ID: MRT4577_62960C.1.pep
IRLEHGWTAQNAGQPGKIHRAXVYYPTIEENTTSSGTDIKGGIVIQEKPPTVIRGNTSRDAINEPRELLMWDILKFYRXPMVHXGLQXLDKXRTDLTRFPIAERADEARKQIDLAIGIKETVGDSK

SEQ ID NO: 328828 - protein, 135 aa, Zea mays
  Clone ID: MRT4577_62961C.1.pep
MTRSSERGKRGVASLSHWLKPSSSSADDGSDDGSSNFVGTEEEKTRCGANVSDVPFFPAFGLDWEGETDKPTPVLPKAWDGNGIPNTTTKYKEDQKVSWHATPFEERLLKVLSDEKPRHERRISGKLIHLEENAE

SEQ ID NO: 328829 - protein, 63 aa, Zea mays
  Clone ID: MRT4577_62962C.1.pep
MATLQSSVRSITLLLLFTRGEHPSQLVTGRQPSAQEVSRATINNTGCSWPPRPPHTRVRCSFD

SEQ ID NO: 328830 - protein, 89 aa, Zea mays
  unsure (1)..(89): unsure at all Xaa locations
  Clone ID: MRT4577_62963C.1.pep
RSPGGCSARAPSSGXXSWSCSPWCSPSGGAPASPRSSLGPAVRSVSPSVPFGPFVSGFLGRVPVSVGSLCSXXVLVVVRCSSGLSXCLS

SEQ ID NO: 328831 - protein, 256 aa, Zea mays
  unsure (1)..(256): unsure at all Xaa locations
  Clone ID: MRT4577_62964C.1.pep
GLRGSPLRNQPPPHRPPXSSSVHPSRRHEAHSPPHALPPXPFXPPRPGRXSPRPRALGAALPCAWPXXLPVXCPVPPPLPVVAPLSPPSSPXLXSRPRPPRXLSVPLSPSPPPGRXCPLPPVLPPCPPLXXPPRLPRXPPPXPCPPPXXSPXPPPFFXPPPRPPSPPPSPPASPGAPPLPSPPPPPLPPPXPPSPPPPPPPPFSFPFSLPPXXPFPPPAPFSPFFPPPXPPPFAPPRFRFPPLPRXSLAGSPAPPL

SEQ ID NO: 328832 - protein, 112 aa, Zea mays
  unsure (1)..(112): unsure at all Xaa locations
  Clone ID: MRT4577_62965C.1.pep
NTHHARILAGIFHSTXCIPSINCPGVVVELGVGIPHEPVSNVHHCVIKNAVDPVLPLPFHHRDPMPPMVGGHLGWKGVACTISIANDRQNGSAPCWSSLVGYYVAPFVFRSP

SEQ ID NO: 328833 - protein, 91 aa, Zea mays
  Clone ID: MRT4577_62966C.1.pep
ISTNARPQLGAGARSQGPTRSGSYSCLVITLSARISDSRLWDLAQVQGTVTGVVMHCRRSSLEIPWRSYERRGWLLPLLGRNRSRVSSRRK

SEQ ID NO: 328834 - protein, 89 aa, Zea mays
  unsure (1)..(89): unsure at all Xaa locations
  Clone ID: MRT4577_62967C.1.pep
NPLPQPWELXSPISSPILPLSPLFLQQPLPLLQHIPXLHLFAQNINSQQQQHLLLGNTAAYSQQQHFLPFNQLSVFNSFSYLXHQLPFI

SEQ ID NO: 328835 - protein, 267 aa, Zea mays
  unsure (1)..(267): unsure at all Xaa locations
  Clone ID: MRT4577_62968C.1.pep
IRHEVEEMXMSAFLDQFPPSNHALYPPPPPQLPTCVLPAGVRIYSSGLDTDDVSTYPRSYPIVLTEGDGSKIYVSCIAFRDPICEDIIEAYQIPANSFADKCICLVSHSPSFQVLRDALEEIFVLCFSPSGCSKPLWDIISHMVSHVTLPTPGKNRVLFAIEKILHEAEAPPKEWLPHADISFQPLVQCLDVDKLILLFTAVLLERRILLRSNKYTLLTLVSEAICHLIYPIRWQHVYIPIIFCSGGDYIDAPTPYMMGLGCGVGAC

SEQ ID NO: 328836 - protein, 48 aa, Zea mays
  Clone ID: MRT4577_62969C.1.pep
NKQYSRISYKYRFSLESNQSITKQQSSFILTERNTKMISLYFNKYIFF

SEQ ID NO: 328837 - protein, 105 aa, Zea mays
  unsure (1)..(105): unsure at all Xaa locations
  Clone ID: MRT4577_6296C.1.pep
DNPDQPLYKDIVPRLVXTNLPVKVQRRRVIPLPLLELQRXCVARELSGRNNPPXSEDSGMXDVKAFYXKLEAHGWPTRXAHVLSEXQVEFDDGLAEKRGHPPAEE

SEQ ID NO: 328838 - protein, 71 aa, Zea mays
  Clone ID: MRT4577_62970C.1.pep
LPNSCRQGYKFKGVKRGNSHLESPAFIPHIALTQLRRGNSLKQNMPCAWGWAIHCTFWLLEPEKLDYASTH

SEQ ID NO: 328839 - protein, 49 aa, Zea mays
  Clone ID: MRT4577_62971C.1.pep
KNLALHTPTATKMGALPIDCMGLRILYASPLKPYWVVISYMHSLTKTCL

SEQ ID NO: 328840 - protein, 66 aa, Zea mays
  unsure (1)..(66): unsure at all Xaa locations
  Clone ID: MRT4577_62972C.1.pep
YFFFNFANAIDLTFALKEVNGKYVGNWPIKLHKCTWKNEIDLEALEKEXTQPQKKMKGGKKKCLHK

SEQ ID NO: 328841 - protein, 116 aa, Zea mays
  Clone ID: MRT4577_62973C.1.pep
RTRGRKPFPALPFVLGTRNFGAPLFSKQGGFSRGLQNPRGAKKEGLLKFKDRGFPREEIFFPKKPRGFFPPKGGFVFPGAPLTVYFLAGGGKREKRGATFWIWGPGPKNLGGVFFF

SEQ ID NO: 328842 - protein, 74 aa, Zea mays
  Clone ID: MRT4577_62974C.1.pep
ETLDKSAIEKEGGSTDELSLALYEMSSLPEFLPVLSVIPELPPESQQQLLLLPADLTNRILSRAVARTIRRLFM

SEQ ID NO: 328843 - protein, 199 aa, Zea mays
  Clone ID: MRT4577_62975C.1.pep
ISPLAPVFLLSLFDTVAATPTSPNNPLHPREDAELFVQRHLPRRNPAPARPSVAPLSAPQIPRLRSHARAPPPRRRPQRRRPPPHVMVASAVTHQSQTHAPSSTPHLSHCHARRREPSTTTIEVCVPMFAGRRRSDLLSSASPLDGLVVAEEQAARRRVIPCVPSPRRRHGCTDVCVTSGRRGQVVVAMASADARLRGS

SEQ ID NO: 328844 - protein, 60 aa, Zea mays
  Clone ID: MRT4577_62976C.1.pep
IQRTITSTTAQTTLTEPLSMTYDITNLYYSVLLPAFRTYQNKHMHSPIIRHKLCLIHQRS

SEQ ID NO: 328845 - protein, 80 aa, Zea mays
  Clone ID: MRT4577_62977C.1.pep
METETEMEEQEEVVDVPSWLWGMGMGRYPAAFEAHEVDAEVLPWLTMDDLRDMGIGAVGARRKLFCAIQRLNLQPPPSRR

SEQ ID NO: 328846 - protein, 36 aa, Zea mays
  Clone ID: MRT4577_62978C.1.pep
NHPFFVQGRHWAFVNKPFGNGADSISPRYFVLSPPI

SEQ ID NO: 328847 - protein, 63 aa, Zea mays
  Clone ID: MRT4577_62979C.1.pep
SARGEKLCFLGATFFILAWLPIIMRQNMVLRVHMKKALPTYWGRHGAAKVMLSMWMKHYLGSD

SEQ ID NO: 328848 - protein, 87 aa, Zea mays
  Clone ID: MRT4577_6297C.1.pep
RVVRVRVVGNNCDYPSSSLYFNELHPFVFSNSSPLSLVWIQYSFFSSSLLVFYSLTSYKSHYPSSHYASLSHLAPVVAVVVLQATLF

SEQ ID NO: 328849 - protein, 395 aa, Zea mays
  Clone ID: MRT4577_62980C.1.pep
DSAERSLTNVASENREDKICHENTSSGDVCAEPKESMLLQENGIPVGTGNMVEEKVDAQPHVVVQQYKEETNLSPLTDALKKSLMQETTLSPFAASHKDSLTQEDGFMQEADLSPLTANHRDSLIEETKLLPTTAFHKVSLIEETGLTRTISYENNLKLQFKEGTKIGDIDMLPQDVDLIELPDQRKIIGHDVGAETVIEMEKGKLDQSSSLNLSDLDLVRGTEVAAVHNCPALVQPSAAGSSAESNNKQQEGPETFTGANASHTYDLCQIPLDNKDVQVIDIECGTPVEVDGFDLSKSKNEMMCSSMDSMMDPGHGIHTDILPGIQDGYSLAFSDFLGSDIPCYPSMQSDLHAGIGANDSEGIAVMDDPIYGSLSDIGFMDVWGQPTQDYDKFF

SEQ ID NO: 328850 - protein, 70 aa, Zea mays
  Clone ID: MRT4577_62981C.1.pep
VLNFKIDFFTNPNATSTCNKLEQSTSKLITTYSYLFPSIHNVFYHENKILGNHENYSALFQDPLFDEIAL

SEQ ID NO: 328851 - protein, 193 aa, Zea mays
  unsure (1)..(193): unsure at all Xaa locations
  Clone ID: MRT4577_62982C.1.pep
PLQPSSSRERPSRRQGVRPPPDLRLHRTAAERARVEERSRPIHVGWAVAEPPGALQPRSRARGGPPWSAGACRGRPTGHAPRWDAWVLVLGSDRARPCARSEAEAEAGCALARRQSISLLVPTWRPSRPACACGGRGGPPALCQSRCRAARVAFVRRLPRASCTRAGANRCRARASSGAGRAAXAPGASSTRR

SEQ ID NO: 328852 - protein, 86 aa, Zea mays
  Clone ID: MRT4577_62983C.1.pep
NGHDYSINRFRAVLVSLKPGFVPKRRRRQFSVARSPPSPSRSPPSPSCSPPYPSRRWTWSWISELSLRPSVRSALSASLGLLPVAC

SEQ ID NO: 328853 - protein, 97 aa, Zea mays
  Clone ID: MRT4577_62984C.1.pep
GQTHTKNEQSRAEGNMTERGQARGDTEDCGLTRSCSQGLQREIAEVMPKREALALSGWGHDRTDQQGQFEQAVQVQVLLIRPIPQREWPEARCLPRG

SEQ ID NO: 328854 - protein, 236 aa, Zea mays
  unsure (1)..(236): unsure at all Xaa locations
  Clone ID: MRT4577_62985C.1.pep
MLSVQEALELASSSCGTTMDVTTCGFTPWGPESCPGLEQVMAASTPAAAARHPDPEEEEEERRRRQRRKLSNRLSARRXRARKQQRLEELRAEAARLRGEKRELEASLQALARHGLAVRCQNARLRAEAAALARRLLAIASYAQMPQHKAGVARARARAGGGAAGAAGVADDVGGWREGRSSARWNEVSRPLALSSRALVSHAMVNWKHAWAVGHTHRRLASTVHAAVSRLALYYH

SEQ ID NO: 328855 - protein, 101 aa, Zea mays
  unsure (1)..(101): unsure at all Xaa locations
  Clone ID: MRT4577_62986C.1.pep
VFPDNRVSLPIPTQIFTYPLPPIPVFFPPNITPNXMSPFFIPSMFSPIVLPSLISQIMFPPCPWNPLFPFFFPPPFPFMFNPMALLIPPFFFXHTFVGVAF

SEQ ID NO: 328856 - protein, 92 aa, Zea mays
  Clone ID: MRT4577_62987C.1.pep
LARKIEFPLPSREARARILQIPSRKMNVNPDVPFEELGGSPDVFNGAQLKPVWVKVGMLPLPRDAPGVPPGVFTGGFFQVQAKKKSRFNFSG

SEQ ID NO: 328857 - protein, 231 aa, Zea mays
  Clone ID: MRT4577_62988C.1.pep
SPHLCAWGNDAAYEVIPRRVNCWLKTISKPPLWPSGPLRISGRAPSLCRGESPNLFLDPTLLDGMQTTTFTATPSLCLAHGQWTEFAPVGSKTYQSQVSYIQPLGNGNAIYIGDRWVSTNLAASTYVWLPLKVEGTKVTLSWYDSWSPNVSKGTWSETKMTKLEGENAVMANDARVISCNECSGSKAVGYIGGDKKGTLTFKSVKSSGGLSTINIKYRNGDTGSRYANCFS

SEQ ID NO: 328858 - protein, 34 aa, Zea mays
  Clone ID: MRT4577_62989C.1.pep
FLFFIYLYYILTTYPPLGPFYFYTYPPIKLNFPL

SEQ ID NO: 328859 - protein, 58 aa, Zea mays
  Clone ID: MRT4577_6298C.1.pep
NNHVMSLLVGSSGTTSTSLTLIFLTPHNALFPPLTHSRCDAARLRPFLAPLSLGPFSL

SEQ ID NO: 328860 - protein, 47 aa, Zea mays
  Clone ID: MRT4577_62990C.1.pep
MAISGVPVLGFFIMAVLLSAQESWAIKEEHVIIQAEFYLNPDQSGEF

SEQ ID NO: 328861 - protein, 63 aa, Zea mays
  Clone ID: MRT4577_62991C.1.pep
PCILPTWKRTQKRYQRNLLEDPSIHKSTAIITIAYDTLTHIDQNINILNQTQTKEKENLFRIN

SEQ ID NO: 328862 - protein, 96 aa, Zea mays
  Clone ID: MRT4577_62992C.1.pep
HVFVAIYRVRELEHGTRSVRGGFPQPDLAGVVVGQLRLVRQQHVVGGRKQGVSRSGTSYGVQKSSPSAVPPPVAPRVGHILRCVCSDCITQRVQVS

SEQ ID NO: 328863 - protein, 52 aa, Zea mays
  Clone ID: MRT4577_62993C.1.pep
NSTKGCMGPGLHTLGRPFKGTHGSLRVPLRIDFFQASHQGKGGATPFTRPAG

SEQ ID NO: 328864 - protein, 76 aa, Zea mays
  Clone ID: MRT4577_62994C.1.pep
FGPNPNAPINTGIPDKGNIKGVQPTNPPPNPNANVISPTPAYTTSIRLPPNIYKALIYFVLHESPPLPLKIPMSIH

SEQ ID NO: 328865 - protein, 301 aa, Zea mays
  Clone ID: MRT4577_62995C.1.pep
MAASTTSRTNSRVNYSNEIHDLSTVQGGSAAAAAAALFYPDSKSIADIFPPHLGKKVISEVVATFLLVFVTCGAASIYGEDNARISQLGQSVAGGLIVTVMIYATGHISGAHMNPAVTLSFACFRHFPWIQVPFYWAAQFTGAMCAAFVLKAVLQPIAVIGTTTPSGPHWHALAIEIVVTFNMMFVTCAVATDSRAVGELAGLAVGSAVCITSIFAGPVSGGSMNPARTLAPAVASNVFTGLWIYFLGPVVGTLSGAWVYTYIRFEEAPAAAKPDTQRLSSFKLRRMQSQSALAADEFDTV

SEQ ID NO: 328866 - protein, 164 aa, Zea mays
  Clone ID: MRT4577_62996C.1.pep
MEVEAVGCVGAGGKRARAKGAGAEPEPKRRAVAMAVPAPAAAPWAQQHPASRIYRISRGSGGKDRHSKVYTDKGIRDRRVRLSVATVIQFYDLQDRLGYDQPSKAIEWLIRGAGDAIDKLPSLDTAGSLPAHPAFAKDHAPPAGDNDDHQQQQQLTRSGCNSTS

SEQ ID NO: 328867 - protein, 120 aa, Zea mays
  Clone ID: MRT4577_62997C.1.pep
QRSGGGADPALNAAYAAQLRARCGPASTASSNNVTAVPMDPGSPARFDAHYYVNLKLGRGLFASDAALLADRRAAGMIHRLTRQGYFLHEFQSAVRKMGRVGVRTGAARGEIRRNCRAVN

SEQ ID NO: 328868 - protein, 190 aa, Zea mays
  Clone ID: MRT4577_62998C.1.pep
MDFHHGCHSSSIHAAAPPPARPWSKEENKMFESALVMWPEHTPERWALVAAQLHGRTPREAWEHYEALVADIALIERGGVDVPACWNDDNQVRGGCGSEGGTGNSRRAGADRAHREGRRPGKPWSEEEHRLFLQGLEKYGRGDWRNISRFTVRTRTPAQVASHAQKYFNRQLNPASRNSKRKSIHDITTP

SEQ ID NO: 328869 - protein, 103 aa, Zea mays
  Clone ID: MRT4577_62999C.1.pep
CYLAGRIYVPQDEAFEELKQGAFSSRRLRAVLHTLIPSMIATMSAETHGFQGFHHVDNLYKEGLKLKLSLQEHLFQKIPLVQKIQESSEGMLRYDTPRMFSSK

SEQ ID NO: 328870 - protein, 42 aa, Zea mays
  Clone ID: MRT4577_6299C.1.pep
GFPGKLPRTWFKSVAPLPMNVGDAPFDPLFPLGLGLPPKGPK

SEQ ID NO: 328871 - protein, 509 aa, Zea mays
  unsure (1)..(509): unsure at all Xaa locations
  Clone ID: MRT4577_629C.1.pep
MAAAAAISLSFRFRPPFTPTRHAPFSLFSPSLLAPCRLRVAPGRPSPSPWRPDVRARAGSTIGAPPALVRPGGAVETDRLPSDVRDRAMEAVDHFGGRVTIGDVASRAGLQLAQAERALQALAATTXGVSEDGEVLYVFPRAKLAGKSFRMRVEPLVAAKQVGAYLVRVSFGTALIASIVLVYTTIIAILSSSSSDEDGRGRRRRSYGSTIIIPTDMFWYLDADYYRRRRVENENGMNFIESVFSFVFGDGDPNDGLEEKRWKMIGQYISSNGGVVTAEELAPFLDVPPPSEESKDDESFVLPVLLRFQGHPEIDEQGNILYRFPSLQRTASSKSGRSREYVGTKWSAMFSGVEKYLEEKPWKFSKANATEKAMVAGLGGLNLFGVIILGNLLKQMTVTPGGLISFAAQLYPLLQIYAGSFFAIPLFRWFLLRKTNNGIKKRNKAREQRAQELVSPDSSLRRKLLSARDMAERKVITPEEIVYTTEKDLLEQDYEVKEWERRFKELESE

SEQ ID NO: 328872 - protein, 113 aa, Zea mays
  Clone ID: MRT4577_62C.1.pep
TRPNNLGVSNRFETFLNFPWAFPLPRIGIPKGSLYPLAGLFALAFFAPLAREGFFPEKFQKCWENPWVQSQWKKDENIACEWNHTSGKWNGDAQDQSIQTFQDYRVYSLSTQY

SEQ ID NO: 328873 - protein, 70 aa, Zea mays
  unsure (1)..(70): unsure at all Xaa locations
  Clone ID: MRT4577_63000C.1.pep
SGRAASSELLDDQWRVSVGVCVSWWLVATVVATASRRVRVLLLCLGVLVSCSCRGGQLGPGAGDHVXRRA

SEQ ID NO: 328874 - protein, 199 aa, Zea mays
  Clone ID: MRT4577_63001C.1.pep
LEAGREDVYGIAKELRKLHREGINNATNSVTVVAVLFATVAFAAIFTVPGGNTDDGVAVAVHATSFKVFFIFNAVALFTSLAVVVVQITVVRGETKAERRVVGVINKLMWLASVCTTVAFISSSYIVVGRHFKWAALLVTLIGGVIMAGVLGTMTYYVVKSKRVRKIRKKVKSTRRSGSNSWHHNSELSDSEVDRIYAI

SEQ ID NO: 328875 - protein, 120 aa, Zea mays
  unsure (1)..(120): unsure at all Xaa locations
  Clone ID: MRT4577_63002C.1.pep
HPPTHPRTLPPTQAHRQPLHQQSFLHNPLPPINSLNTSSTSTPTPPTTPKPXTSTPAIPXTRTTYSNSTTTSSQXTNTPXTSTSSSTTISSTTTSPTPTSTTSTTIPSTSCPSTTPTTPP

SEQ ID NO: 328876 - protein, 124 aa, Zea mays
  Clone ID: MRT4577_63003C.1.pep
MQPRVGYVLSNNMKKSVVTAVDRLFHHNAYNRYVERTSNFVAHDDSQHLPFGDRDKLNPSMSLNRHNDCRADEILLSATVYIPPIATAFMERENKSQQTVCGYPMIHLKILITRCILGLIVSLC

SEQ ID NO: 328877 - protein, 110 aa, Zea mays
  unsure (1)..(110): unsure at all Xaa locations
  Clone ID: MRT4577_63004C.1.pep
PPPPLPRVFLRPSLVSXPGVPSLSSLAFCPLPXXACXXWPLLFXXXXXWSFXVFPAPALXXXSXLPPPAFRVPAXSPARLXCFSPFRXXSXAAXXLVPSPSLVGLAGPLR

SEQ ID NO: 328878 - protein, 84 aa, Zea mays
  Clone ID: MRT4577_63005C.1.pep
IVFAGVGTRLASIHWISPSSLQIVHQLHLVVGTTSLARSSSLSPTPYCRRGGGDAMGELAKVRVELGRARSSAPWEGGCCCMGS

SEQ ID NO: 328879 - protein, 101 aa, Zea mays
  Clone ID: MRT4577_63006C.1.pep
ESQRASDRAAEPLKGGVLTFVFCLTSRVVAKASASASFDVSVYLGTRVLLFLTCGACNRLLLLRPSCSDPFRSVHDTVRPSKHLHVSDLTVCVCVSDKLLA

SEQ ID NO: 328880 - protein, 103 aa, Zea mays
  Clone ID: MRT4577_63007C.1.pep
GEDAQFIDGLVKIGRTASSWHQRLRALVNMQVIYFRRIFLTEERERDVLFNNVSDMLSDPQLEVRACAATTLAGMIRCSPGRIRDPLIVRLKRRFEIELDQNP

SEQ ID NO: 328881 - protein, 60 aa, Zea mays
  Clone ID: MRT4577_63008C.1.pep
KPNMTLYRLEGGWLHDRSNLVLICYNPILGGWLTDRSNLILICYNHITSVRNSNLSLLSQ

SEQ ID NO: 328882 - protein, 73 aa, Zea mays
  unsure (1)..(73): unsure at all Xaa locations
  Clone ID: MRT4577_63009C.1.pep
GVHPPLPPQTSRGSQXYRALTVPELTXQMWDAKNMMXAVDPRNGRYLTAXAMFRGKMSTKEVDEQTQNVPNKN

SEQ ID NO: 328883 - protein, 33 aa, Zea mays
  Clone ID: MRT4577_6300C.1.pep
NCNHEATCCWVARWMLRLTLHVKDKYVVFMPLH

SEQ ID NO: 328884 - protein, 182 aa, Zea mays
  Clone ID: MRT4577_63010C.1.pep
MAVGGLLRGLVSPPAWLPCHELFASWHHWLPSLPRLRPPASDGFKLLLVLLLFSAALAEVRYIASSSMAPTLRPGDRAVAEKVTYLFRRPSIGDIVFFKVPTAVQNYGVNKDVVFIKRVLATPGDFIEVRQGQLIVNGVALKEHYAAATSLYTMEAMVQRSLKVTRKKMIKNWTGCSMLLTS

SEQ ID NO: 328885 - protein, 51 aa, Zea mays
  Clone ID: MRT4577_63011C.1.pep
DYDRKREMRPRRVSPPDQMPCSGTLGFRCEEGSPPRMNKTLLRGEGVGSKE

SEQ ID NO: 328886 - protein, 80 aa, Zea mays
  Clone ID: MRT4577_63012C.1.pep
PVAPGAPLPLAGASMTTTVTAALVDIVHVVRLLGGVLMLLVVLLVADRSESRRRCSTEEGGHLVRVRPRRLPGEQMGRGD

SEQ ID NO: 328887 - protein, 39 aa, Zea mays
  Clone ID: MRT4577_63013C.1.pep
FPKVQIFLEKQITLRNFILKLIRDFKSKMGSLLFIYSIS

SEQ ID NO: 328888 - protein, 60 aa, Zea mays
  Clone ID: MRT4577_63014C.1.pep
HTCGWIISGMSCHCRGFSSFCRKTLDLITSWLESLGTRDVQHDLTIGVAGSSEMLSPTET

SEQ ID NO: 328889 - protein, 61 aa, Zea mays
  unsure (1)..(61): unsure at all Xaa locations
  Clone ID: MRT4577_63015C.1.pep
TFPFGSEEEAVTLHIVRTHGPHRNEGICHDSLVITWYKVYAYQRERLKXVHSDHGSKLEQG

SEQ ID NO: 328890 - protein, 125 aa, Zea mays
  Clone ID: MRT4577_63016C.1.pep
IRGQAPLITQKTLLLSYPSFKLKEAPPMTRWQVERFSLGHTTLVEWMTLLPLGDGARRKAQRAGSTDTSVVCITRGLLFTPAGCFIGPTSCLVLCLGEATAATSFHARNCWRVRASFWLEGTWRF

SEQ ID NO: 328891 - protein, 130 aa, Zea mays
  Clone ID: MRT4577_63017C.1.pep
IGCWEALVYYKRHGIMYMGRHGLVAKALGRQAGSFGFVSGQVRGVGPTCYLSVSKGLVGWCQSKSVFGSPMIYRVVGPLRCFTALEAGRSFCNARYRASKQPSERTTLRLRELMHGDLSAFATSPKSKTL

SEQ ID NO: 328892 - protein, 43 aa, Zea mays
  unsure (1)..(43): unsure at all Xaa locations
  Clone ID: MRT4577_63018C.1.pep
SXFPSEGGIPLFIPYHDSTLPTKTQALQIMGRFYYREGGHPLT

SEQ ID NO: 328893 - protein, 79 aa, Zea mays
  Clone ID: MRT4577_63019C.1.pep
PPNKKKKLLKKWRCTNLTQLNFLNPQKSLKGPPLRGITSTKCFIRVYNHPVSSLTLGERQLGQPLSNGKWRFCTTTLLL

SEQ ID NO: 328894 - protein, 29 aa, Zea mays
  Clone ID: MRT4577_6301C.1.pep
LGLDASETRVYSFLVSNRSGDGKDSVPST

SEQ ID NO: 328895 - protein, 130 aa, Zea mays
  Clone ID: MRT4577_63020C.1.pep
RAGSTLRTKRKEKKREKGLVRKTLAQSHPSWRCPSSPWLTWQVSWCSPGTCVSTSSLTLGAGDIRCLRLAKASWGCCTAQLLPIPLWMRVVGFVNLPEARARLDTLSGRSRLFFASLFAVSKAWRMLLRL

SEQ ID NO: 328896 - protein, 168 aa, Zea mays
  Clone ID: MRT4577_63021C.1.pep
MSSPQDRVQGYLKQLDSELSKYPVLNNLEKSTAVPKSYAALGLVALYLFFIIFNLGGQLLTNFAGFVIPGYFSLEALFTSSKNDDTQWLTYWVVFAFFTVAESFVNVVYWFPFYYTFKFIFLLWLSLPYFSGAEVIFRSFLVPTLGRYFNQSGSAGLRAKGDSAAKTE

SEQ ID NO: 328897 - protein, 234 aa, Zea mays
  Clone ID: MRT4577_63022C.1.pep
MALMAAGMDDHDEYAKLVRRMNPPRVVIDNEASDDATVIKVDSVNSHGTLLAVVQVIADLNLVIRKAYFSSDGNWFMDAFNVTDRDGNKVLDASTISYIQKTLEVDDWYYPGAHNTVGIVPSGDYTSIELTGTDRPGLLSEVCAVLAAMGYAVQSAELWTHNTRVAAVVHVTDAETGGAIEDSARIADISARLGNLLREHSDVRAGGGAGSLALHKERRLHQMMFDDRGVEGHA

SEQ ID NO: 328898 - protein, 211 aa, Zea mays
  unsure (1)..(211): unsure at all Xaa locations
  Clone ID: MRT4577_63023C.1.pep
ALDGVLRRTPEPDAPLALLTGSPQRRXVQAVNASARALGLCPGQSLTAAHALTKAFASAEYDPAEIEQWQQFLAAWAYRFSSQVSLRYPRALLFEIESSLGLFGPWPQLEARLREELTGLGFRHRIVVAPNPAAARVLANAYDGLALADNGSLRQALGQMPIDRVGLEKEAATALSRMGLRTLAQVLALPRHSLARRFEASLFKHLDTLLG

SEQ ID NO: 328899 - protein, 219 aa, Zea mays
  Clone ID: MRT4577_63024C.1.pep
LGPSRPAGNSLRSTINTTFTPSLTRSFHASSATMAIKTYFDCQWTGPQITVDDNGKVLSKDDSAVARTGRINFTLYDDVVPKTAENFRALCTGEKGFGYAGSKFHRVIPEFMLQGGDFTRGNGTGGKSIYGEKFADENFKLTHKKPFLLSMANAGPNTNGSQFFITTVVTSWLDGRHVVFGEVTDAESKSVVKSIEGCGSSSGALKVQGGVTIVKSGEQ

SEQ ID NO: 328900 - protein, 61 aa, Zea mays
  Clone ID: MRT4577_63025C.1.pep
HESAHASGDDSVSSNTDNSSSDSGNGGHYTERSLTTDTESTRMTHSEQGSTFPDVDIVRQT

SEQ ID NO: 328901 - protein, 583 aa, Zea mays
  Clone ID: MRT4577_63026C.1.pep
MDADEAVGSSGRMDLNLYLGPPRAPRPRRSDLGSDLALSTPMPSSPSSSAASVDAPPPPPESMHPPYTHSRADLSPPPLPLEVYFPYNPEDSPVPDAHMSYMQPPELLIPGPRNMPPPDSLISGLREGIRELRYAFHPPPPPPPPPPLVRANELLGWEERPSSSTASSSFFPDTAARCGLLLEQTGSRWLRTRRFRSDLPPLSSEARPSGQDATEPVPQHEPAADANELNKVAPNGLELGAPENSSEERSKTATAFECNICFEMASEPVVTSCGHLFCWSCLYQWLNVYSSHKECPVCKGEVTEANITPIYGRGNSDAEKTVEDWKSPGPTIPPRPHGHRLESFWQQFHHIRPISRRLGEAHGILSSWRRLLDQQILGSVSRLEGPSESATQEINDIRQHDHLSGLALASRMRARRFQIEALSRPDGSSTSPPDNGLTGNNPSEILTGNNALLERLAGSNSRRLELLERLAFGIANTAGAMSDDFRRIASPNQYRGSASSSNLQNNEPAVDGARIAGAPSADQASNSSTVAVIQGDGGISESAGEPSNAGSSGSLRRRGRSNASGSLDVDGGSLQQNKRHRMN

SEQ ID NO: 328902 - protein, 82 aa, Zea mays
  unsure (1)..(82): unsure at all Xaa locations
  Clone ID: MRT4577_63027C.1.pep
VRGPLSFSPSVLLLLPVALVRLALFGLSIAIGYAATWVALHGWADTHGSQRVGGGPMLAWRRRLMWITRIXARCILFSFGCW

SEQ ID NO: 328903 - protein, 187 aa, Zea mays
  unsure (1)..(187): unsure at all Xaa locations
  Clone ID: MRT4577_63028C.1.pep
CHSFKLINLVRFWISHSIKKGGPNPSSNTTLSAILEKARELDVPREILERNIKRASEKGQDTYTEKVYEXFRQARVVNIKVTDADKDQLLTVALDAGADDVLEPNFDDDDSEEEAERFYKIVTTSENYPVLLSKLQEEGLKFETDNGYELVPLNPIEVDDEAVELNKELVSNLLELDDVDAVYTDQK

SEQ ID NO: 328904 - protein, 103 aa, Zea mays
  unsure (1)..(103): unsure at all Xaa locations
  Clone ID: MRT4577_63029C.1.pep
HEAPSRAPKGRQQTSSRRRRRRPXRRAAARAEARRRRPGQRRGAGPRXHRPRGESGRRRPGRDPLHQRKRRTTPPGEGAPQAEKPRDRERQRRTENHGRTEGT

SEQ ID NO: 328905 - protein, 68 aa, Zea mays
  Clone ID: MRT4577_6302C.1.pep
IITFLPSIFLYSPNHSFPNLISGIILHTPQHVFVSKLFHPLEHFIILIPMRLLYFLSFYYTFTLCQKK

SEQ ID NO: 328906 - protein, 141 aa, Zea mays
  Clone ID: MRT4577_63030C.1.pep
DAWARAQQFVEHPPRSTATGPRGHHGVRHACSGGAPPQGLVSVFLRSRSPGSLAPPRGRAYWKRRTVPEACGEAADFVVPAALHGKTLLQNRWKEGRQSFGFQNVVDLIHAYAAKAVTEQLDQNENLVSVNADVCQFWEKM

SEQ ID NO: 328907 - protein, 136 aa, Zea mays
  Clone ID: MRT4577_63031C.1.pep
MASATRALGALLHRASSLSSSAPALRGASPLRGDGPIGSAGLFRRHAARRRISSFQPLCMGRRSCKIAGRKVMFSCHDAQCHINEVRDGWLCIFWLAKPWKYPVQSIMLCMRAIKQSNSSNENPIVTASLPLTPSA

SEQ ID NO: 328908 - protein, 207 aa, Zea mays
  Clone ID: MRT4577_63032C.1.pep
MAGSGASDGEVIFEMAQFIRVYKSGRVERYFGSDPVPASTDAATGVASKDRAVSPDVAVRLYLPPPAKDTEDNGGSSKKLPILVYFHGGGFCLHTAFNFVFHAYLTSLAARARAIVVSVEYRLAPEHPLPAAYDDSWRALLWVASHATGSGEEPWLTDHGDFSRLCVGGDSAGANIAHHMAMRASAEPLPHGARISGAAIVHPYFLG

SEQ ID NO: 328909 - protein, 186 aa, Zea mays
  Clone ID: MRT4577_63033C.1.pep
MSGSNGNGGGASSALYGLYGPNVKPDVVFKEAALNSTLNLQDVQGLVTWVIGDGMLPSWVFVKNKPLIPKVVLLYVPGLDAALYMSQTRLLSSLKELCGNPKPVLASSCIPDDRHTIDALLTCRVKRKLDVKTSNQSSKPDRDGKLSSLDDLGDIPFPVTYYTLSEKDLEDNGYPFNLPGFCPYWF

SEQ ID NO: 328910 - protein, 73 aa, Zea mays
  unsure (1)..(73): unsure at all Xaa locations
  Clone ID: MRT4577_63034C.1.pep
GRVGGYLWYEYIYMLDKRTCGKYHPYAWWIALTIYVCLRNCTQQLRSTHLLLFXWIGKITMECYISQFLIWLX

SEQ ID NO: 328911 - protein, 72 aa, Zea mays
  Clone ID: MRT4577_63035C.1.pep
PTRLLIPKRAPRNAYLSKLFRAQLCSWNTTNRPSFWFLRALHKAKQIIFVETGSDYICTDHVRILHWGLFRA

SEQ ID NO: 328912 - protein, 105 aa, Zea mays
  Clone ID: MRT4577_63036C.1.pep
ATRSRPSFTCVSRCYSKIIISHLDYHKVSRTVYMYLVLQNQRKFSKLQSHKTDNLIRRHWQGKNRTGWISFYLMTYDSIAATLTGFITLTMVLMRPNPMSIMPMR

SEQ ID NO: 328913 - protein, 42 aa, Zea mays
  Clone ID: MRT4577_63037C.1.pep
STNARLWETVLQLTSSRNFCIDIILLCVILGIAAYLYNALKK

SEQ ID NO: 328914 - protein, 132 aa, Zea mays
  Clone ID: MRT4577_63038C.1.pep
AVVTTQRTRGVRHLAIKSVRKNTTHLRSRREAITIRRKLWSTREVRSKATTMGSHMTSTPSGMTTTWSLFLRPSSKWQSTSRPTSLNRLSMNTMRRVVHVLPARLRNLPLISLPPKKKKKKKKKSTLRCYHC

SEQ ID NO: 328915 - protein, 49 aa, Zea mays
  Clone ID: MRT4577_63039C.1.pep
LFSLVPGAKPRSPQPKILDREKKKDILQMAQGPVTNRGPPPHSQLIGPP

SEQ ID NO: 328916 - protein, 42 aa, Zea mays
  Clone ID: MRT4577_6303C.1.pep
LKFLINLCNPTVCDNLVSTCSLVSSLMFRVSVGLASRHKGSY

SEQ ID NO: 328917 - protein, 54 aa, Zea mays
  Clone ID: MRT4577_63040C.1.pep
PMGFPLPFVRKGFPPGFFSFLSIPPLFYFSPFFPKGPPSRVFPEFRFIFTLCPG

SEQ ID NO: 328918 - protein, 93 aa, Zea mays
  Clone ID: MRT4577_63041C.1.pep
STADAVLQPTSVPGLYITHRRVKPKAIACPYFRYTMPVSKRRATLDRHWICRQLEGQVRKKRIGLPSFHNTRVVRGHILRAMGSPSQKTQACR

SEQ ID NO: 328919 - protein, 101 aa, Zea mays
  unsure (1)..(101): unsure at all Xaa locations
  Clone ID: MRT4577_63042C.1.pep
ISYAYRLPDIYKNPDSFDPDRLPPAMLVDRDGIPYTFIYFGGGMHGXCLRDPXPYLQIKAINTHLLKNLQSQLVSPLPENHWHTMAFGINVDAIDHYKRHM

SEQ ID NO: 328920 - protein, 123 aa, Zea mays
  Clone ID: MRT4577_63043C.1.pep
SPVDSTSSTFTGGLLFCAAPMSSSFTPGETATIPCSIPHRRYFHMINCVCVLFYFCFVEEGHPVFCEEKASRSTLVGCSERCTNRNRHRPYKHRLGLFMDREMMIVQVKWCQPQEAVGGRPEQ

SEQ ID NO: 328921 - protein, 52 aa, Zea mays
  unsure (1)..(52): unsure at all Xaa locations
  Clone ID: MRT4577_63044C.1.pep
MATKILALLALLALFVSATNAFISPQCFFVPXAIIPQGLPPATAMGXFEHLS

SEQ ID NO: 328922 - protein, 58 aa, Zea mays
  Clone ID: MRT4577_63045C.1.pep
MLLEMDQTEVLHLLESPDALKSKVAEAMDVLRNVAHQQNPNTPTNQLAALSLTEGIIS

SEQ ID NO: 328923 - protein, 38 aa, Zea mays
  Clone ID: MRT4577_63046C.1.pep
TINMLHNSYQLTHIPSFNFTYIHINIINPIIDPNFSHT

SEQ ID NO: 328924 - protein, 53 aa, Zea mays
  Clone ID: MRT4577_63047C.1.pep
LISVSQMCHLKLYLWWAGTFVVDIFFEPRKNRWVPCYRGYWQTLSKTVIFLFG

SEQ ID NO: 328925 - protein, 51 aa, Zea mays
  Clone ID: MRT4577_63048C.1.pep
PNGVSCENRSCSLLCSREEGVIPHPRSIGTCVKTARCVPPDIQLPGMIYKS

SEQ ID NO: 328926 - protein, 53 aa, Zea mays
  Clone ID: MRT4577_63049C.1.pep
WVPYADMLLALLLVSFPERMSRTAIISWAIEIHIRIGYKSHLHLLTQNLGPEH

SEQ ID NO: 328927 - protein, 51 aa, Zea mays
  Clone ID: MRT4577_6304C.1.pep
SGTLNTANVEDTHNETGTLDSALTPTTFSYFPSLLNTYNDYPRKTLKRRLP

SEQ ID NO: 328928 - protein, 86 aa, Zea mays
  Clone ID: MRT4577_63050C.1.pep
NGLFAPVVGHLSQLPARVQAGNYVKELIRIQIQGSHSSQRTVSFPTSLHRSSTIMAKNKKKDIVVRENQWHFSILSLSLSSFFFSF

SEQ ID NO: 328929 - protein, 234 aa, Zea mays
  unsure (1)..(234): unsure at all Xaa locations
  Clone ID: MRT4577_63051C.1.pep
AAWAGTAAGCSSKSPSSVHQCRHCRPHRRRHRHAPAAVSSTPRTVLLLFVLSKAPGLSFATSGASSXRRLPGGLRSFGCYASPQASSMVANLVEGVSYPFFYSLADMGTLPDHXHKNIARLLKAKRFRKPDISETIQELLGGEVGRGQLSGGLVVDVGANVGMASFVAAVMGFRVLALFEPVFENLQRICDGVYLNRVQDRIVVYHAAXAASDRVGTITMHKVIGRLXNSAISA

SEQ ID NO: 328930 - protein, 43 aa, Zea mays
  Clone ID: MRT4577_63052C.1.pep
VCSLSCRSSVPHVQDNNWIYNVQNVNQRARLMVSYKFGRAKIS

SEQ ID NO: 328931 - protein, 63 aa, Zea mays
  Clone ID: MRT4577_63053C.1.pep
GKWALKNGWPLCGPIDIQDSFWGRNGGGIKPPFSPRLLELAKASIGLFPPPPPNFRMGFAIPW

SEQ ID NO: 328932 - protein, 171 aa, Zea mays
  unsure (1)..(171): unsure at all Xaa locations
  Clone ID: MRT4577_63054C.1.pep
PGRRGGVVVEPKARHGVGKVXGAMKPAAVCAPXXEIRKVVNFLLVTEAEWGPFQVVTLYSDDHLGLAXEPAKGMNAHLTAAHASNDPVSLQDVLGRSDHGTTYAGMRARTTDGPQIHWIGLAGDPLRPGICTLVASKLVXCCVIGQIPDWGNLAXSQLIPLATQAAIARWP

SEQ ID NO: 328933 - protein, 99 aa, Zea mays
  unsure (1)..(99): unsure at all Xaa locations
  Clone ID: MRT4577_63055C.1.pep
MPTRXVETRKHRGHVSAGKGRVGKHRKHPGGRGLAXALPPSLLLLRRLLAAARDRLALLFWGWSVLRRPRPRLGWLGGGSCPLRRLPLLGRRCFFPPLR

SEQ ID NO: 328934 - protein, 53 aa, Zea mays
  Clone ID: MRT4577_63056C.1.pep
HPTISAPCLSNCTSILMKILYSKHCLYKTLPISATKKLFILGTKHSEQTEKKT

SEQ ID NO: 328935 - protein, 92 aa, Zea mays
  unsure (1)..(92): unsure at all Xaa locations
  Clone ID: MRT4577_63057C.1.pep
SLFVXWFXXLACSFXGVLPSRRAPCFPAFCXVSFSAAAXPXPCFVFXVXXXXXSAXLFRVVLASSLPLASFWXPFISVLAVGAARGRPXSAG

SEQ ID NO: 328936 - protein, 71 aa, Zea mays
  Clone ID: MRT4577_63058C.1.pep
RGGPSLNPKTNWVLLKHHRIPALGLLPKKKWTTRRPSTSTRDWSLRLSPIGENSPLGPPLGGWALSQSQGG

SEQ ID NO: 328937 - protein, 70 aa, Zea mays
  Clone ID: MRT4577_63059C.1.pep
PTRAETAAAATATATATGGTERWRTLRPSYFDRFCYRVHPSLEGVYLRLWPIRVRMFRFVFADVVAHLRS

SEQ ID NO: 328938 - protein, 90 aa, Zea mays
  Clone ID: MRT4577_6305C.1.pep
KMLVGNKVDKDDERMVTKEEGLAFAEEYGCLFLESSAKTRENVEKCFEELALKILEVPSLLEEGSSSVVKRNILKQKQESDAKNGSGCCQ

SEQ ID NO: 328939 - protein, 221 aa, Zea mays
  unsure (1)..(221): unsure at all Xaa locations
  Clone ID: MRT4577_63060C.1.pep
MAAAIDDSCRRPGSIPFKWEICPGTPKHARSSSASAAPSSSPSPYYSSSSATASVSKVAVSPKLTPPPAMSPSPYHSPRVSYYPARSASVSPSRRRAPHRPTAXSSTSTPGSPPRTAPALLRLRTTRWRWRRPAGASRSPCSGGGTAGKVPEGRRPGQGRRPRRASGRTARRRAGCGGRRRHPRRRACLCRPGVAVSWPRPGRWRPPAPGSTEMAGEPNQR

SEQ ID NO: 328940 - protein, 110 aa, Zea mays
  Clone ID: MRT4577_63061C.1.pep
KRGGDDELPVATPVQFHTTGRLSFCSFSFPRLSELGVRQWPKWGCEKSKFPWTYSAKETCYLLQGKVKVYPEGHGEEFVEIGAGDLVVFPKGMSCTWDVAEAVDKHYNFE

SEQ ID NO: 328941 - protein, 74 aa, Zea mays
  Clone ID: MRT4577_63062C.1.pep
MNGPIRWGCEKSKFPWTYSAKETCYLLQGKVKVYPEGHGEEFVEIGAGDLVDFPKGMSCTWDVAEAVDKHYNFE

SEQ ID NO: 328942 - protein, 114 aa, Zea mays
  Clone ID: MRT4577_63063C.1.pep
MGQTLSEPVVEKTSEKGEDERLIYGVSAMQGWRISMEDAHTTVLDLDTAKTHDSKLSFFGVFDGHGGDKVALFTGQNIHNIIFQQDTFKSGDYAQGLKGRFLATDRAILNDPQY

SEQ ID NO: 328943 - protein, 170 aa, Zea mays
  Clone ID: MRT4577_63064C.1.pep
MRKRERENPCGICGHYHKYEEGEVCGVCGHRWKPSDGEGAPSRHESAFPTEVLKDFLFLGSYDNASRSEVLRTLSISHILNTVPDCHNLYKNSFTYHSLQRDRPLDFDEANQYLEKCERDKSRVLVHCMTGKNRSAAIVAAFLMKSRGWRLAQSFQWVKDRRPQVQLTDG

SEQ ID NO: 328944 - protein, 57 aa, Zea mays
  Clone ID: MRT4577_63065C.1.pep
PAGSRFSLAEQRIVLTLMVRKYIIDIPKNSIHYDHVVFDSTETKAPKSLELTFTKRH

SEQ ID NO: 328945 - protein, 44 aa, Zea mays
  Clone ID: MRT4577_63066C.1.pep
GHLPLHRRCQLSEPGSQLEPITIFMLLCPTILCALCRFVDPDAP

SEQ ID NO: 328946 - protein, 170 aa, Zea mays
  unsure (1)..(170): unsure at all Xaa locations
  Clone ID: MRT4577_63067C.1.pep
PGADGRVLSRLTTRRVLAFSEEDHPPSLQSAPVPRRLKLDDKAHFAPXRTCKRXYAVGLLLGGLHESGDXHMYYNXCPSANYFEHHXLPICLSVSRAAXMFLERELHRYNDYTPEQFIEDALSDVEETLHGDKLSSSNCTLDIVGMKEDGTIHAFEMNVGAGIHELIDSV

SEQ ID NO: 328947 - protein, 68 aa, Zea mays
  Clone ID: MRT4577_63068C.1.pep
RLFGLVPKKKKCAKLFCLTLVLQFERLRLGRMWRLKLTPNMSRRITSPNPTRVLTMVTNLQERNDFKI

SEQ ID NO: 328948 - protein, 209 aa, Zea mays
  unsure (1)..(209): unsure at all Xaa locations
  Clone ID: MRT4577_63069C.1.pep
YIIVPDDLSFARLQDPPPIXSHSAXSTTTMAFKQDAPPPAYGPPPGAPQPTYGGYQQDPYQQGGAPPPQGYYQQAPPQMGYPQQQQGPFPAGQGPHPPQQGPYGQPPPQGYYPHDDQRGNGDGRRRSHDRSSRWLACWLLFGLPLLSVNLTYYSISPPPMNGSTKYEMVGGFDSSPAGKGMDLRRACGASANGKMVSCFHVGGFFNFTH

SEQ ID NO: 328949 - protein, 52 aa, Zea mays
  Clone ID: MRT4577_6306C.1.pep
QGSKQDLSLSRYVRLSNSSRSHCLGGVWLNPLTPSYIRWLIFLMLIPPSYKK

SEQ ID NO: 328950 - protein, 53 aa, Zea mays
  Clone ID: MRT4577_63070C.1.pep
SLKCGINLQISQPVNYSVKGLKTALLCTTFCFVIIQYKHRTDTEINDCKCCLH

SEQ ID NO: 328951 - protein, 345 aa, Zea mays
  Clone ID: MRT4577_63071C.1.pep
MAGRSDKKPASSAPPRKGGYPHGSVYGSSSEPRKQDACTFSPSVSSKDSLHKVVTLTPVQPQKPVDSRGSHCNAGSDSGEAPFDICMSGNKCAVKLKPSIFETNRERKQRDRECSKDVGPLQLRPGMVLLKRFIKPNDQVKIVKLCSQLGVGPGGFYRPGYRNGALLKLWMMCLGKNWDPDSSSYGDRRLFDGAQPPTIPEEFQKFVQDGIQASHEFLKQQKGATNVVQEIPAMSPDICIVNFYNSSGRLGLHQDKDESQSSLDKGLPVVSFSIGETAEFMFGDDRDEEKISKVDLESGDVLIFGGESRLIFHGVNNTKPKTAPKWLTDETSLRPGRLNLTFRQY

SEQ ID NO: 328952 - protein, 90 aa, Zea mays
  unsure (1)..(90): unsure at all Xaa locations
  Clone ID: MRT4577_63072C.1.pep
MARGVRYGVKGSEPSSCASALAVHQEGVYDTDHRXLTREVXEAYGGVDWGEEGPLARVVDRNDEVGRRCHIMALKHTRPTADAEVCAIRE

SEQ ID NO: 328953 - protein, 153 aa, Zea mays
  unsure (1)..(153): unsure at all Xaa locations
  Clone ID: MRT4577_63073C.1.pep
MNATFSRHSTTAAPTPAPTSKNVRLHMLHNFRVKAAXKELYFSXDASDIXKLHSVPSNFAYLAATTLEPNERDGNVDSKDESPWNDFCDDTPARKLDLNDPEIDIESNLMNQTAAKTIDLAGDDTYTSAIPGHRIIAEGAKDEASAANPVHTT

SEQ ID NO: 328954 - protein, 237 aa, Zea mays
  Clone ID: MRT4577_63074C.1.pep
DGFTQGAGLVGLGRGPLSLVSQLGIDRFSYCLTSLDDASGRSPLLLGSAAAVSATAATAPAQTTPLVKNPSQPSFYYVSLTGLTVGSTRVALPSSAFAIQDDGTGGVIVDSGTSITYLELRAYRALRKAFVAHMSLPTVDASEIGLDLCFQGPAGAVDQDVQVQVPKLVLHFDGGADLDLPAENYMVLDSASGALCLTVMASRGLSIIGNFQQQNFQFVYDVAGDTLSFAPAECNKL

SEQ ID NO: 328955 - protein, 86 aa, Zea mays
  Clone ID: MRT4577_63075C.1.pep
RGANCKLRTAAEYLSSSSSSASTWCCSQCATPGVDDGPQRARASQRGPMLVVTNTVYSTVGTAASTATGCRRAAMRTTTRDHAMAT

SEQ ID NO: 328956 - protein, 95 aa, Zea mays
  unsure (1)..(95): unsure at all Xaa locations
  Clone ID: MRT4577_63076C.1.pep
TNRLLMRTGLSLSAATATITTKCSXAHITILFPPYLSPTSYXICEYTILLPYTNHNAFTIQTLPISPSILQQXLTLLHQQHLIHLLSQTINTKQL

SEQ ID NO: 328957 - protein, 68 aa, Zea mays
  Clone ID: MRT4577_63077C.1.pep
KILILTQGLKREHLFKLGKPNGPPPELGFTFGLFKRLGPTSLGGIKNSKNWNGSIYCGPNALFGMKRS

SEQ ID NO: 328958 - protein, 42 aa, Zea mays
  Clone ID: MRT4577_63078C.1.pep
ITSVTKVHHISLTKLLYLRLSKAPRLFQKPSALVYFTLHQSF

SEQ ID NO: 328959 - protein, 23 aa, Zea mays
  unsure (1)..(23): unsure at all Xaa locations
  Clone ID: MRT4577_63079C.1.pep
HLINHMSXLCLSQLHIXPCLXXX

SEQ ID NO: 328960 - protein, 98 aa, Zea mays
  Clone ID: MRT4577_6307C.1.pep
MRKIASRIASAAAAADDGGPACSAPPSWSWRWCSRPPEVAAPYTARGGACCFLFGYPVAVAVVVVVVDVCGGGGEKLWGPAWWVCIGDIGSEAGAIAD

SEQ ID NO: 328961 - protein, 70 aa, Zea mays
  unsure (1)..(70): unsure at all Xaa locations
  Clone ID: MRT4577_63080C.1.pep
TFLLQYAENCAAXAACMVGPKSIISYPQVWKGQGSRKRKLDQSDCFFVQFEAPALRKIWFLPSTIENGQT

SEQ ID NO: 328962 - protein, 100 aa, Zea mays
  unsure (1)..(100): unsure at all Xaa locations
  Clone ID: MRT4577_63081C.1.pep
VLAGTVGRSLGQALRAGIEHVSRDARAYAPQSQEAIDKISEALKNQKQVGLYADSEKDRDWLRTRPAKAKMPSRLYIKQKGPLVGXRTEGCKAVNACPNL

SEQ ID NO: 328963 - protein, 65 aa, Zea mays
  Clone ID: MRT4577_63082C.1.pep
KYNPNNSIKRIEKNGTRFHRTRRILRLASHLYVPLWCYLCPFHFPSFSICLYWENRYCPSYNLLE

SEQ ID NO: 328964 - protein, 80 aa, Zea mays
  Clone ID: MRT4577_63083C.1.pep
QRRGPLTFGGEGTFFGPHLKTGGPPKNLGSWKKFWGTKKPPWRHIVNRGPLAYGAISSIFFKFFTFGAITFLYSLKGFFP

SEQ ID NO: 328965 - protein, 79 aa, Zea mays
  unsure (1)..(79): unsure at all Xaa locations
  Clone ID: MRT4577_63084C.1.pep
MQVSAYVGGPYNRGLSTHYLLALTDVAVLLNNXTIHHMCRLSLDIDRLTYTNLNRILYQVISYLTDFMRIXGLINIHVN

SEQ ID NO: 328966 - protein, 99 aa, Zea mays
  unsure (1)..(99): unsure at all Xaa locations
  Clone ID: MRT4577_63085C.1.pep
GGRFGEXIFWGSAGRAXSPPNALRWWVDEKRNYPLRSNTWDPGKVWGHYTQVVWGRSTRTGWGGVVCADNRGVLMVGSNDPPGKVKGKGPFLTLDGAAK

SEQ ID NO: 328967 - protein, 81 aa, Zea mays
  Clone ID: MRT4577_63086C.1.pep
VSVSQGSFWRTPSTVSGRHGGGRFICSVKPGASDYGTVAALVRVHQRHPACMVAECCHCRQAVSNGLGSDSGLSYCCRCCR

SEQ ID NO: 328968 - protein, 209 aa, Zea mays
  Clone ID: MRT4577_63087C.1.pep
MSHETNVAQTSDGADEEKKIRELAVDPTSSIGTMGNIGNAEDKKPSEETTTDPRPVENTTTQGTEDATDPKPVENTTPQGTEDADSSKQNENTASVGGVEGKKQGEETTADPRSVENTTAQGTEDAESSKQNENTNVMEEERVTVEDTTSREISAIESTDDLKGKATNENEEIADKEMVTDSDKNHVSLKVLLADKNVEAKEKEKKATS

SEQ ID NO: 328969 - protein, 43 aa, Zea mays
  Clone ID: MRT4577_63088C.1.pep
GVWLVRRHIDRPTVWGMITVFIVQNGNGADAQMMPRPPNMPKC

SEQ ID NO: 328970 - protein, 573 aa, Zea mays
  Clone ID: MRT4577_63089C.1.pep
MQENVTSGTIVPSQVHILDSNPSATAHEVNIVGSINDDDEKSQDGKSSADLASYEVKEMVVKDNFEEKQQTKEVIVDPTPHEANNFPSTDNHEENEQNKEIVADTTSHKISAVQSMGSTEEKEHIEDFIAKLASEEIIVTSNRDIVEQQDETDMKTNYEIDRARNLEATEEIAAGGESNTGTITDVVEDKFPNEEITLGTISLNMADSSVKEEKMHDEEVNEDLDSRDDIMVHGPDNVKEKMCEETMSGPTLDKFSLPTSTDSPEEGNKDESTRADPMSHETNVAQTSDGADEEKKIRELAVDPTSSIGTMGNIGNAEDKPSEETTTDPRPVENTTTQGTEDATDPKPVENTTPQGTEDADSSKQNENTASIGGVEGKKQGEETTADPRSVENTTVEGKKQGEETTADPRSIENTTAQGTEDAESSKQNENTNVMEEERVTVEDTTSREISAIESTDDLKGKATDENEEIADKEMVTDSDKNHVSLKVLLADKNVEAKEKEKKATSAKDLVLSFRRRVSKDNVSPPVKPGSPTKDKDGSGQQDWNSPARLPVEKKPKGRKQQWVPFICCSSVQ

SEQ ID NO: 328971 - protein, 215 aa, Zea mays
  Clone ID: MRT4577_6308C.1.pep
MGSPGAGSSGGHECSFKILLIGDSGVGKSSLLVSFVAASHLDGDIAPTIGVDFKIKFLTVGGKKLKLTIWDTAGQERFRTITSSYYRGAQGIILVYDVTKRESFSNLADVWTKEIEANSTNKDCIKMLVGNKVDKDDERMVTEEEGLAFAEESGCLFLESSAKTRENVEKCFEELALKILEVPSLLEEGSSSVVKRNILKQKQESHAKNGSGCCQ

SEQ ID NO: 328972 - protein, 68 aa, Zea mays
  Clone ID: MRT4577_63090C.1.pep
GPANDPLKYSYIAAARRPVNLAELLVSAICCLCQLALSLCSMRTWTVTCYLLFFFLISKVQLLSCVFG

SEQ ID NO: 328973 - protein, 52 aa, Zea mays
  Clone ID: MRT4577_63091C.1.pep
SVLSLGAPAVFVLRRAMPLCIPLEKLPVPLVAPFQVITRGVKNLEPNSELTS

SEQ ID NO: 328974 - protein, 121 aa, Zea mays
  Clone ID: MRT4577_63092C.1.pep
GQVTKWVVSSRCRCTFLSICLVTASPPPPEPLCTKIARHERARDHSTWWVAATASFVACRALSCHPLVLLPPCVCLLACPCCAICMPALGIRQLWLAFEGTRSHSTSSFVLLGDRYAAHIT

SEQ ID NO: 328975 - protein, 137 aa, Zea mays
  unsure (1)..(137): unsure at all Xaa locations
  Clone ID: MRT4577_63093C.1.pep
MTYGGSGMHLTSKDPTLAEPMTDPSKLSKXTDEDXSNTVHGPGEDSEVILHPHAIFLDPFKTPNCILAMCDCYTPAGETIPTNNQVQRTPEIFNSPDVAAEEPWYGIEHEXTLLHKDTSWTLRLPIGGFPEPHGPYY

SEQ ID NO: 328976 - protein, 118 aa, Zea mays
  Clone ID: MRT4577_63095C.1.pep
KNNPSRVPFPPKKNQPPMALGRIQVSPTHIFIILALIGGKTIYSFFNRTFNFKEQHERAETPYRFLDRRGAAPFSLSVASAQRGLLPDLSPNWALAPFAPGFPGLSWPLLPWAKAEAG

SEQ ID NO: 328977 - protein, 77 aa, Zea mays
  Clone ID: MRT4577_63096C.1.pep
GRKDTPPEFVTCKRRICRRPPSCVRTNMTARWITPSTMMQTIVQSAANNCAQIYKKTYAASSYTIMIPLQRRNIGPL

SEQ ID NO: 328978 - protein, 258 aa, Zea mays
  unsure (1)..(258): unsure at all Xaa locations
  Clone ID: MRT4577_63097C.1.pep
LRLLELIIFFVGSAPRAWITMMETEEEQQQRSTRRWQRLQRAASVEELVVPAGADAAAGGGDDDDLEVTRDPTVVRGWRRLKAVSMVVFSGGARPNTTTTTTTTTEMEPLYPAHEPRSDTDIRLRSPQRKAREVEEASVVLKSPHRKTAVAAQVSTQVQQPSLPPQQPDEVGTKNSAAEVVMDVISPKTTQVGVVHGNPVDDDKEQRARYLKYSQKALRLRRLHVCRVRKQRIVHPERGLQDGRRALLRXIIADLLTL

SEQ ID NO: 328979 - protein, 58 aa, Zea mays
  Clone ID: MRT4577_63098C.1.pep
SQFFRVFPNGEVQYPPPKGGVFPEKVTPGREGVGQNFPSIGKNVNPIEVKFPGKAPFD

SEQ ID NO: 328980 - protein, 100 aa, Zea mays
  Clone ID: MRT4577_63099C.1.pep
PHASTPQAFRVHERPLATLYTCNLLHSSDRLVLLPDWLSCHEAMIHHSKYFCRKVSPRAGPRTFSLHNESVCDYSVRPSVYVICDQTNPRHISRYMGLCI

SEQ ID NO: 328981 - protein, 116 aa, Zea mays
  Clone ID: MRT4577_6309C.1.pep
LNPAVFLQHHLFPFRQVGFAYFQQQQLFPFNQLAALNPAVFFLQQILFPFSQLGAANRVSFLSQHRLLPFFHQFGASPPPLFYFHQLLPFVPPALTGRAASPPPHIIGGALFSPPF

SEQ ID NO: 328982 - protein, 270 aa, Zea mays
  Clone ID: MRT4577_630C.1.pep
PGDFAKQFVPCLHPKPCTVSSSTLDLLTGRRFEDLDDEESYERFRRRERREAVARDFTEVCSCIPDSYRRLVVEQRVIMVNWIIQHSRLMKLQPVTMFMGIGLMDRFLTQGYMKGLRNLQLLGIACITLATRIEENQSYNCVLRKTFQVGINIYSQSEVVAMEWLVQEVLNFKCFVTTTHHFLWFYLKAANADDRVADLANYLASISLRNHEQLSFWPSTVAAAVVVLACLATNKESSCHLVTETHIRTQDDDLPECLMVHQPLPHMECE

SEQ ID NO: 328983 - protein, 79 aa, Zea mays
  unsure (1)..(79): unsure at all Xaa locations
  Clone ID: MRT4577_63100C.1.pep
HHDVVRVSEXEDILDASHAPTHVIHSARIVLLNERPHLPAASVPICKARTSSTHSWETCSRVLLGASGLGAVGCPLRAS

SEQ ID NO: 328984 - protein, 396 aa, Zea mays
  Clone ID: MRT4577_63101C.1.pep
LCCAIGVDGQNWMYPVAYGFFEAETTENWTWFFQQLRKAVGDLPLLALCSDARKGLKNAMNTVFPQAEKRECFRHLMQNYVKQFVGSEYMYPAARAYRREVFDHYFSDVQEIPKVSSWLHEHHDSLWYRSGFNPAIKCDYVTNNIAEVFNNWIKDWKDLPVCDLADKIRKEIMELFQKRREIGQRLQGRILPSVVHILHVRTRGLGHLTVKKADNYIAEVRDNNDEHSKHIVNAQLRQCSCNEWQHTGKPCHHALRLITTQQFRDVRMEDFVDDYYSVDKFMKAYSRVVEPIGDKSFWPTVPFAKEVCASIGKRGVGRQRKNMIKGCLEGGSGKKPNENENVKTKKMIRGKFKCPNCGELGHRKASYKCPLNGTKKRKRRARKNVTKGWFPKDVEA

SEQ ID NO: 328985 - protein, 56 aa, Zea mays
  Clone ID: MRT4577_63102C.1.pep
VMSLTYGIESKVRPFIVCGVSVESVMSVHDKVLLECSHEIVSNIKAKYFNVGISIC

SEQ ID NO: 328986 - protein, 141 aa, Zea mays
  unsure (1)..(141): unsure at all Xaa locations
  Clone ID: MRT4577_63103C.1.pep
MAATALSMSILRAPPPCFSSPLRLMVAAAKPLAAPMRRQLLRAQATYDVKXLITPHAXAELQAPDDGYILHFAEDECIDLPFSCRGEYCSSCGCQGVSGSVDQPDQSFRCDHXAAIGWELTCSATPTCDVVIETHKEDELL

SEQ ID NO: 328987 - protein, 59 aa, Zea mays
  Clone ID: MRT4577_63104C.1.pep
EHDYLSGRAPFCIKRNINQSFLFLQEGCLFQKKGAYEIDLGGKRAKTISTRMLMLCSAE

SEQ ID NO: 328988 - protein, 88 aa, Zea mays
  Clone ID: MRT4577_63105C.1.pep
YVGRRPQKHGGGLFGVAGSRTHDMAGGCLPLLLRGPPPHIPMNTPQGGPPLQAPRRALPHLLLNDYMGYTKPYDDATWLLVQDRAQMP

SEQ ID NO: 328989 - protein, 52 aa, Zea mays
  Clone ID: MRT4577_63106C.1.pep
EAIKCQYLETSFRDWHQCCSGVMLSDCLDSNAIITRCDLKLMACGSSEPQPV

SEQ ID NO: 328990 - protein, 42 aa, Zea mays
  Clone ID: MRT4577_63107C.1.pep
HIVRTVCKLQAAEYCQSLRCADVSVSRLRCHGDTSPILRARR

SEQ ID NO: 328991 - protein, 130 aa, Zea mays
  Clone ID: MRT4577_63108C.1.pep
GPGVLPSTRGSCLWACGYDISVAGWLFPSSGRGRDSIQGAGDAPVSQACSCWSWEMVFSGRPQVGPRVVAQVNLCSFVWCLWLCYTYYPSLLYTCVGDPWSLGLPARVDSGMLWAVVWFSLYERVYSCVQ

SEQ ID NO: 328992 - protein, 87 aa, Zea mays
  Clone ID: MRT4577_63109C.1.pep
ELKAFLVVEVRPHESAAGTAISAPQLQRNNTSANSEQELRNQMTNKLQRNNTIVDSEQEPRNQMTISYEPTRRSVPLETHRTYPRSL

SEQ ID NO: 328993 - protein, 49 aa, Zea mays
  Clone ID: MRT4577_6310C.1.pep
AYQYHRFHQLLWDHQISHSFDCRYSFIRMGKLTHHVALTVLHVTLSIHY

SEQ ID NO: 328994 - protein, 73 aa, Zea mays
  Clone ID: MRT4577_63110C.1.pep
HTPPHLLGGKCPAPYFHWRGFNIILPRARGPGGLLGPPKFPGHPTDVGGRPTTVARSPGANATHALKPAGRKA

SEQ ID NO: 328995 - protein, 140 aa, Zea mays
  Clone ID: MRT4577_63111C.1.pep
WGQNPVPGVPFPLFRNRPEKGVGVRFTFFPPLPCGCWAVELFCWVFGVGSPPLFFFVPGCGPPFKVVPPLCGFVLFNQIWFPLMYKFVFSPPGLGICFPFESQRIGAASNVMVLFGFFFAIVLSSYSVGGGGDESRFFGP

SEQ ID NO: 328996 - protein, 268 aa, Zea mays
  Clone ID: MRT4577_63112C.1.pep
RPVTGRARNPPAAQPEASPSPAPPLTVVAGPVSSAPRTVEDIYKDYAARRAGLVRALTSDVDGFYSMCDPEKENLCLYGLPNGGWEVSLPVEEVPPEMPEPALGINFARDGMRRRDWLSLVAVHSDAWLVSVAFFFAAKLNGNDRKRLFNMINDHPSVYEIMADRKGRENNPGVDNSSKSRHSTKRSNDGKIKNSRVAVGECRYENDEDHSETLCGSCSGLYNSSEFWIGCDICERWFHGKCVRITPAKAEQIKHYKCPDCSYKKSRQ

SEQ ID NO: 328997 - protein, 75 aa, Zea mays
  Clone ID: MRT4577_63113C.1.pep
CPIIWLKNLYVSVGIAPFAFFCKHLINRGFLFSPPPLFFSLYYPRAGIIVWVKNPGNPFRSGPVTNIFGGWSFGQ

SEQ ID NO: 328998 - protein, 176 aa, Zea mays
  unsure (1)..(176): unsure at all Xaa locations
  Clone ID: MRT4577_63114C.1.pep
MATEIIALLALLALCGSATNALIIPQXKLLLEPYIPQXLPPGTLMGFEHLAGQAYRLQQALAESDLHHPINHLQQHSLAHLTIQTIVTQQQQQILPALSQLNVENHVAYLQQQXLLSNPLALANVAAYQQHQQLQQSLPALSQLAMVNPAGYLQQQQLLAYSPRAVSSAPTYLLQQ

SEQ ID NO: 328999 - protein, 171 aa, Zea mays
  Clone ID: MRT4577_63115C.1.pep
LRFRFRREFHELVMRTGNNMTIEGFVGVVRLAWSVHLMLTQDRSNSRETSDIWSCLEIICRQNSFEFLREQVLKTAAYQNDDEDIVYMYTGYTHKLMMCFISHPTSRDKIKEIKEKAMTALSPYEPPRGQREDLGRNGEQADQPTKEPFVSLLELVREIYQKVPELGNGNE

SEQ ID NO: 329000 - protein, 83 aa, Zea mays
  Clone ID: MRT4577_63116C.1.pep
DAWEHPEFEGITPSIIVLDPGAGEFIPVDPVSGSFLVNIGDVSTALSNGRLHNVKHRVRCVAPVPCIFICMFLLLPNDYSVSA

SEQ ID NO: 329001 - protein, 41 aa, Zea mays
  Clone ID: MRT4577_63117C.1.pep
TRPFFGFLGADAGLVFSCMGAAYGTAKSGVGVASMGVMRPQ

SEQ ID NO: 329002 - protein, 218 aa, Zea mays
  unsure (1)..(218): unsure at all Xaa locations
  Clone ID: MRT4577_63118C.1.pep
MDDPSSASNKHKRKRGRKPKASPPSPDRSSPSPSAAPAPAGRRGRKPRRHESPADADATRPPSPPRRGEPKPVANGGDVVAVAESGPASWDEVVRVVPCMDAVVKVFCVHTEPNFSLPWQRKRQYSSSSSGFIISGRRVLTNAHSVEHYTQVKLKKRGSDTKYLATVLAIGTECDIALLTVNDDEFWEGVSPVEFGTLPALQDAVTXXXYPIGGDTIS

SEQ ID NO: 329003 - protein, 59 aa, Zea mays
  Clone ID: MRT4577_63119C.1.pep
LLAYEEGKTTSLSVSHVHPGLCLSPVYTITATFHCLLSLPLRILEFYRASNRYATIPHI

SEQ ID NO: 329004 - protein, 100 aa, Zea mays
  Clone ID: MRT4577_6311C.1.pep
SFCKNPKTTAGRGETNTGAQPERSEKGKKKEPEATKHAKTNRANLNRQPKDRDHARNALHQDEKKERTEREPEKKRKHAEIQAQAKENETRKAPAQWNQA

SEQ ID NO: 329005 - protein, 245 aa, Zea mays
  unsure (1)..(245): unsure at all Xaa locations
  Clone ID: MRT4577_63120C.1.pep
MPPRPVPLFSRLLFRLPSCAAVSISTPPXPRRPCTXHRTPLASPFPLSPPCPRILRAAVAVSSLDLRPITGGFALFSMAAASSATSVHDFTVKDASGKDVGLSTYKGKVLLIVNVTSQCGLTNSNYTELSQLYEKYKDQGFEILAFPCNQFGGQEPGTNEEIVQFACTRFKAEYPIFDKVDVNGDNTAPIYKFLKSSKGSLFGDNIKWNFSKFLVDNEGRVVERYAPTTSPLSIEKDIKKLLGSS

SEQ ID NO: 329006 - protein, 97 aa, Zea mays
  Clone ID: MRT4577_63121C.1.pep
VATRRIVRPSKKGSTVQRPRTRTLTPFHDGILEDVVFPVEIVGKRVRYRLDGAKVIEIFLDLKERNNTEYKLETYTTVYRRLCGKDVVFEYHMIDIA

SEQ ID NO: 329007 - protein, 83 aa, Zea mays
  Clone ID: MRT4577_63122C.1.pep
TDPNLLLWGRDGSCKTQTHRTLIDEKACVERMVMKNHLPMTDTSYQHMMIGIYAHGMISVTFTDDKSIGVEHLSLQCSWTQTH

SEQ ID NO: 329008 - protein, 246 aa, Zea mays
  unsure (1)..(246): unsure at all Xaa locations
  Clone ID: MRT4577_63123C.1.pep
MPPRPVPLFSRLRFXASRVAPPSPSPPLHPPRRPCTXHRTPLASPFPLSPPCPRILRAAVAVSSLDLRPITGGFALFSMAAASSATSVHDFTVKDASGKDVDLSTYKGKVLLIVNVASQCGLTNSNYTELSQLYEKYKDQGFEILAFPCNQFGGQEPGTNEEIVQFACTRFKAEYPIFDKVDVNGDNTAPIYKFLKSSKGSLFGDNIKWNFSKFLVDKEGHVVERYAPTTSPLSIEKDIKKLLGSS

SEQ ID NO: 329009 - protein, 73 aa, Zea mays
  Clone ID: MRT4577_63124C.1.pep
RPAGKNTKPISYRVHTAPAIFQSPHEQVCPCGSSFGLSHQMCVAMTSATNDKLVSLVGSKINLPSITQHRKWP

SEQ ID NO: 329010 - protein, 89 aa, Zea mays
  unsure (1)..(89): unsure at all Xaa locations
  Clone ID: MRT4577_63125C.1.pep
LEESFDAHAHKKKGSELPRHTMSNADLRRIINSDEVQPVGKPLYKEVKRREKRKNPLTNMAAVLKLNPXARHCTEDGTLAEAXRVKAGR

SEQ ID NO: 329011 - protein, 33 aa, Zea mays
  Clone ID: MRT4577_63126C.1.pep
CAAVPAALVPPARSAPGGFAPSHGVLTFARPPI

SEQ ID NO: 329012 - protein, 552 aa, Zea mays
  Clone ID: MRT4577_63127C.1.pep
MGGWNWLFCGRSKAGGGELRPPEPFQLPAPLPEWPQGGDFAKGTICIGEVDVTSITKFRSIWTCSDATFYEPEGIPDGFHCLGHYAQQNDRPLQGFLLVAREVASHQVIDTKPALEKPSDYSLVWTSADANEDDNSECGCIWLPCPPNGYKALGYVVTKGPKKPSLEAVRCVRDDLTDTRENFHSIANMDNACQIWKTRPCHRGVGGRGIPVGTFSCETDSTDSDESSTPCLKNVDSNLGAMPNLEQINALIKHYGPTVFFHPQETYLPSSVSWFFENGATLHEKDAKMGDAILPGGLNLPVGGTNDGEYWIDLPDDDRKELVRAGNLKSAELYAHVKPAHGGTFTDIAMWVFCPFNGPATIKVGFASFALQKVGRHIGDWEHFTLRVSNFSGQLSSIYFSQHSGGEWVEACDLEFISGNKAIIYSSRNGHASYPHPGCYLMGSETLGVGVRNDVARSDLSVDSSTRYEIISAGHLGEDAVAEPCWLQYMREWGPTITYSSRSEIDTALSFLPFFLRFTAEAIFNSLPAELYEEEGPTGPKEKNNWEGDERC

SEQ ID NO: 329013 - protein, 68 aa, Zea mays
  Clone ID: MRT4577_63128C.1.pep
LNILCCHALWSVGCACTIGGMLICMLDTMLSLYPLTVAPLHRRDHWISLGRISVLLWKHARNAAHTCC

SEQ ID NO: 329014 - protein, 446 aa, Zea mays
  Clone ID: MRT4577_63129C.1.pep
FNFHSARSRNLEVLGRRNVPVDLVYKFAPDLIMLDAYETVESWMMARNRLNPGKLIPAMMRYVSEPHAKNETHEVIKYLEFCVKDLNNVDPGVHNLLLSLYAKKEDESQLLQFLDTKFGKGQTNGPDFFYDPKYALRLCLQEKRMRACVRIYSMMSMHAEAVALALKVDLELAKAEADKVEDDEELRKKLWLKVAKHVIEQEKGVKRENIKKAIEFLSETNNLLKIEDILPFFPDFVLIDDFKEEICKSLKDYNSQIEQLKQEMDDATRGADNIRSDIGALAQRYTVIDREQDCGVCRRKILTVGGLHQVGRSYTSVGHMAPFYVFPCGHAFHANCLIGHVTRCSNQVQAERILDLQKRLSLMDRKAAKDNGASVNGEPITSTTPVDKLRSQLDDAVASECPFCGDLMIKEISQPFILPQESDEKASWEIKPQPTPQKILPMTMSI

SEQ ID NO: 329015 - protein, 118 aa, Zea mays
  unsure (1)..(118): unsure at all Xaa locations
  Clone ID: MRT4577_6312C.1.pep
ARTKKEAVFLSVRTALRAXVQRQSVGGTNGAKKYIVAPGQRPDTETNKKTTETPIPLIVKKRCSRKKWNKTKFTRTADPIADAGKDTEGLGTLLHDDYQEARTICYVLPTDTAMVQFN

SEQ ID NO: 329016 - protein, 86 aa, Zea mays
  unsure (1)..(86): unsure at all Xaa locations
  Clone ID: MRT4577_63130C.1.pep
GTRTPLVARKTVFRASVALTPTAPSRTGSVQTPPDLESSEEVDAAEGAPEVVGPKSEVDEGHGKLPSMPAAEEMHKPVEQDXLQQV

SEQ ID NO: 329017 - protein, 174 aa, Zea mays
  Clone ID: MRT4577_63131C.1.pep
LLIISRRQSRRLLNERAMADMATSLGFDVRVGDPEASTDVARFARLVNSADVMVGVHGDGLTNMVFLPAGAVLVQVVPYGGLEWLARGMFRDPAAGMQVHYLEYVVRAGETTLSEEYGEDDPVIRDPAAVHRKGWDALKAVYLDKQDVRPHLGRLRNTLLQALKLLPHGRQSTD

SEQ ID NO: 329018 - protein, 100 aa, Zea mays
  unsure (1)..(100): unsure at all Xaa locations
  Clone ID: MRT4577_63132C.1.pep
MKVLSVALALLALAASADSSTSGSCGWQTPPFXLPSSHYMPPSVYLTPHEQPXPWHYPTQPRELSPRQQIGSCSVCSIXRPILGQRVKFLRHQCSSAATP

SEQ ID NO: 329019 - protein, 34 aa, Zea mays
  Clone ID: MRT4577_63133C.1.pep
TNSCDFKDICSKYIGLVSYPALMTSILLWAIHKT

SEQ ID NO: 329020 - protein, 87 aa, Zea mays
  Clone ID: MRT4577_63134C.1.pep
VKLRSPSSTKEVLLRTRYQPEVMLSESRGEGGQAHYGQGGEHKICLRGEDTQSAVTRSPATTDRRVVPKRLTQTDLCVRLYTKMIVN

SEQ ID NO: 329021 - protein, 49 aa, Zea mays
  Clone ID: MRT4577_63135C.1.pep
LGRTKVCYLPSDLTHDWPASRSRSIQNQFSDLSGPAIYTYPCMDGALSY

SEQ ID NO: 329022 - protein, 64 aa, Zea mays
  Clone ID: MRT4577_63136C.1.pep
RFVFTPYTLSGAPEHFQTSIFIFPLLINTLIFISFYYFSITFFSLSALFSFNLISFNFLKFLLH

SEQ ID NO: 329023 - protein, 217 aa, Zea mays
  unsure (1)..(217): unsure at all Xaa locations
  Clone ID: MRT4577_63137C.1.pep
MATPYRLPWRCYALVTALVLFFSVDATEGAIREYQFDVQMTNVTRLCSSKSIVTVNGQFPGPTVFAREGDFIVIRVVNHVPYNMSIHWHGIRQLRSGWADGPAYITQCPIQSGQSYVYKFTITGQRGTLWWHAHISWLRATVYGPIVILPKPGVPYPFPAPYDEVPVLFGEWWTADTEAVISQALQTGGXPNVSDAFTHHGLXGPLXNCSAKERSAE

SEQ ID NO: 329024 - protein, 118 aa, Zea mays
  unsure (1)..(118): unsure at all Xaa locations
  Clone ID: MRT4577_63138C.1.pep
PLLLALGCAGVRLASGVVCRXLSSXRLVLSAAXGRPAARVLXLAPWVGLLXLXGLRCFVRGSFXLPPPLALACXFXLRRRAFASAXACRGXCPWLVSVRSPPPVXGLSSPRLPALGSP

SEQ ID NO: 329025 - protein, 80 aa, Zea mays
  unsure (1)..(80): unsure at all Xaa locations
  Clone ID: MRT4577_63139C.1.pep
DALCQGKVPAERAWWALGVVAGGRRPGTGDGGVGNGQCVVTVVRQREGGNVVGHGGGXVVRHGGGGEWVVAWWWGVVRHH

SEQ ID NO: 329026 - protein, 72 aa, Zea mays
  Clone ID: MRT4577_6313C.1.pep
HPQTNHPCSNFPLAPPPIYIQIDLTPHKHKQHRPRSFFSQCYLANCTVHFTLIHTNPTQCDEISNGEFFFFF

SEQ ID NO: 329027 - protein, 43 aa, Zea mays
  Clone ID: MRT4577_63140C.1.pep
IINRLFFFNALNFKCKLRQKRKHALTLLRSSLNQPNGLWKPYM

SEQ ID NO: 329028 - protein, 74 aa, Zea mays
  Clone ID: MRT4577_63142C.1.pep
LLYKHLQFYQGASFFWTPGLDSGDQNRGFTNQLRLNQPTHKVKHHQNQAQSGEMLVLQLRRRKTCQPLVILGKC

SEQ ID NO: 329029 - protein, 72 aa, Zea mays
  unsure (1)..(72): unsure at all Xaa locations
  Clone ID: MRT4577_63143C.1.pep
LSFFFLESPPAKAGFFIFLDIXTHHSFHHKVKHTLTNESATLGSKINHHNSFYHYLIKSSISQLNRIKTQHP

SEQ ID NO: 329030 - protein, 128 aa, Zea mays
  Clone ID: MRT4577_63144C.1.pep
SHSGAKGNRGKEKKSPTDGTGAAGTGRDTDTQGGNTQRGMTLHRHTPGLPTNRKQKDYSQHSEPAPTGPGRECGRCDPDPTATPARAWVARNPTPPNPRPLGGDHAKAHRPPPGPPAGPPRGRPRPPG

SEQ ID NO: 329031 - protein, 151 aa, Zea mays
  Clone ID: MRT4577_63145C.1.pep
PQSGVNCPPISFSTPDKSYCIISGGNDQFVQCFNFRVISSEDCLTTPARLNSHDNDTLKILYQHKVASAHSAAVKGIWTDGPWSFSTGLDQKVKCWKMGLAGQFTEYSHAIISVPEPETLDVFHDRAKRKYHIAVAGRGMQMVEFSPPEDD

SEQ ID NO: 329032 - protein, 112 aa, Zea mays
  Clone ID: MRT4577_63146C.1.pep
LPPRSSTWRCRGELVYGATDSWRGALGRCRFDRARSRPSAGHQCNPCEVAMMGCSDGQRGSVPSWRSQALLGWRRKRRGSGRCACPGRVLDLVCPPSVWSKPSILCRPACTM

SEQ ID NO: 329033 - protein, 186 aa, Zea mays
  unsure (1)..(186): unsure at all Xaa locations
  Clone ID: MRT4577_63147C.1.pep
DKSPLIVDQGRRTPNSDSNIKLEPFHLNXWHLLHHXDSWVMRHLVNTYHSMVQLRYLEKTNCMAXYLICTTNNNIMLDTELYLYVYITAHRFVSXAAXPYSFTXIGAIVTEHXGKILYLGEMLITFMYETSRSSGSTHGLTKVXQLFEARSIDSLSPNIDRRIEDWNDRIPRVLEAPCRFLNGAEL

SEQ ID NO: 329034 - protein, 147 aa, Zea mays
  unsure (1)..(147): unsure at all Xaa locations
  Clone ID: MRT4577_63148C.1.pep
LRLIGYWKDQDHFALGYQYLPEGNPAEHLKMKKPCPYKTINWXNPFKIALKAVKGWKSLLGDGNQRLFHKNXKSRTFFLTTALGVKTANFGLTKVLSNSKTHLTTDPVEPWAYWNPKNNRSYRASKKSNGSSFGVWLLNLGTGHSPA

SEQ ID NO: 329035 - protein, 66 aa, Zea mays
  Clone ID: MRT4577_63149C.1.pep
PSTVTTMYSRTTQFPLASAFSFTSPLTHCPRDIYAVLSLLPSHFFLFLIFLFFLLFFSSFFFFFFF

SEQ ID NO: 329036 - protein, 190 aa, Zea mays
  unsure (1)..(190): unsure at all Xaa locations
  Clone ID: MRT4577_6314C.1.pep
ISSLSLCSIDPVGRGATLVHRVVGAVDQEASVCPSATSECLSRVPQSRGGRRGGGWQQPGRRRHQLRSACGSCSGKSTVVSLIERFYEPLSGSVLLDMHDIKGLDSKWLREQIGLVNQEMALFATSIRENILYGKSDATTDEINHAAKLSEAITFINNLPXRYETQVDEHALVFAAGAALSLLSDGFVRT

SEQ ID NO: 329037 - protein, 89 aa, Zea mays
  Clone ID: MRT4577_63150C.1.pep
VKGPAKTGKPGFKGPNNRALLGVGATNLFPPEKMLRVKDQGPPGGGASPRKKNCLFSGRENFAPWEKTPGIFKLIAELHGETKPPGFLN

SEQ ID NO: 329038 - protein, 59 aa, Zea mays
  Clone ID: MRT4577_63151C.1.pep
CFVLGLETPKVCFAIFLGFRLCFVLTPGCFFSGAGRPKEGVPPSDEFFCFNEKNFLALA

SEQ ID NO: 329039 - protein, 76 aa, Zea mays
  Clone ID: MRT4577_63152C.1.pep
QVSRTFSGEDVDTLHEERYIEHLVGISFIEYIDKFISFHYCSMSRCPPPPFIILGLHLHMYLHLHLPNIRPLQLPC

SEQ ID NO: 329040 - protein, 52 aa, Zea mays
  Clone ID: MRT4577_63153C.1.pep
WQTGHTPCERLLRAHDHDSDLVSETAHHCTEPVFRVLVPPPKPYVYPARPAR

SEQ ID NO: 329041 - protein, 63 aa, Zea mays
  unsure (1)..(63): unsure at all Xaa locations
  Clone ID: MRT4577_63154C.1.pep
PTRTERFSGFSNAGSKDAGWQLYKTPQKTAASARCIXSDPDRKRICIGGRNRLLLLWDATTSI

SEQ ID NO: 329042 - protein, 32 aa, Zea mays
  Clone ID: MRT4577_63155C.1.pep
IYEHAVVLSMKFEDQDAFERNFCQLKPYYVDT

SEQ ID NO: 329043 - protein, 92 aa, Zea mays
  Clone ID: MRT4577_63156C.1.pep
KRGKNGVALNGGCYRGTPNPIRAKPKTFNQGCPKHQFPGAKIWGPPLMVSSPQDLELDPPDSLTRGKQKNVGGFPAKKKFCPHVWKVGFLGF

SEQ ID NO: 329044 - protein, 85 aa, Zea mays
  Clone ID: MRT4577_63157C.1.pep
PDTSTKDPEKTTPNPAPRAAPSTSRDSHRAAQAPSGGSSTESPLLTATPCKASGCMTSNPAVAAPAQQGPRSSSNGGRRTAPRQG

SEQ ID NO: 329045 - protein, 53 aa, Zea mays
  Clone ID: MRT4577_63158C.1.pep
DSRLDSTRLELIDLLTYLVSHTTRLLTWGSLLRSESLVHSHTSVTTSGPLSIL

SEQ ID NO: 329046 - protein, 83 aa, Zea mays
  Clone ID: MRT4577_63159C.1.pep
STRTVPTLAFNITFFSSDIACTRSHLTNNACLHLNAHESKATISYGRNLLYIYRLYVIWHVLHFKSYQFRLYTYIHSKYAINS

SEQ ID NO: 329047 - protein, 67 aa, Zea mays
  Clone ID: MRT4577_6315C.1.pep
FGSRCKTDFLFGTLQQQRLLSHPSTPDLSFARCLLTSTVLIALCTMLKHNTRDNKSALYLNRYRIGR

SEQ ID NO: 329048 - protein, 108 aa, Zea mays
  Clone ID: MRT4577_63160C.1.pep
RGPGPLLPGPGPKGWDQGFLGMWVGANGMLRVPSKIGYGPQGSPPTILGGATLIFAPELVAVNGDPPPPFGGVWVPQPNESLPLFTGNSADVILSKKWAFLPCPFYGF

SEQ ID NO: 329049 - protein, 61 aa, Zea mays
  Clone ID: MRT4577_63161C.1.pep
IRLYGFENHLHAGHCHLYSRGFKLLRTTLPQITRSTPFPPVSSRGARSCRELVSLPRSTTE

SEQ ID NO: 329050 - protein, 277 aa, Zea mays
  Clone ID: MRT4577_63162C.1.pep
MAPPLATRGLPLASRGPPSCAASCSSCLPSYLQLGRRPSRRFRCSSPQVDAAAVPPGKGGEYRPSFADDLLLAFFRSKMVKEVGWDSEKPGYAGLMEVANRLMVKGKSALETEQAAVRVLQSLFPPLLLVLYKALLAPIANGQLAAMMLARATAISCQWLMGSCSVNSVTLPDGKTWSSGVFVEKCKYLEESKCLGICINTCKLPTQTFFKDHMGVDLYMEPNFEDYSCQFNFGVPPPPLDTDKALKEPCLDICTNARRRRELGRNSSPDELSCPQV

SEQ ID NO: 329051 - protein, 89 aa, Zea mays
  unsure (1)..(89): unsure at all Xaa locations
  Clone ID: MRT4577_63163C.1.pep
PYSSGLVPLLYLKKKKKKKKKKKKKKKKKKKKKKKKNKKKKKKKLKKXIKKKXKSNKYDNFLKKKKNWEKPKFNPILNTLGKKTHFSSN

SEQ ID NO: 329052 - protein, 53 aa, Zea mays
  Clone ID: MRT4577_63164C.1.pep
DPLQTMSLWVNVLIQVRVGQLTSPCSCLCPPLPFMGMLLSEKKKKKKKRKKTP

SEQ ID NO: 329053 - protein, 76 aa, Zea mays
  Clone ID: MRT4577_63165C.1.pep
GASAGWASTSSPRRGSFRAKLSGLRAFVSPCLSHGCRVGVNHRAGQGARISRPLPATGALAPSLRRWIKRVVVTLE

SEQ ID NO: 329054 - protein, 105 aa, Zea mays
  Clone ID: MRT4577_63166C.1.pep
NLRHMFRLIYLCPSTKQPIQALMLNMPKKKRNGRGYYLMVHWMCGQTKHTSIPWEIHAITTQGLGQIPKSSLTEHPFKLIEHHILLQEGVPDEWPDPNLANHYER

SEQ ID NO: 329055 - protein, 112 aa, Zea mays
  unsure (1)..(112): unsure at all Xaa locations
  Clone ID: MRT4577_63167C.1.pep
RAVFIRPSFNMFIMFLTVMHLHGFIGEFEYVYYHIPGNIVLXLNGRLTKCGVIRPRFDVXLNVIEXWSAXRVFFSRHSPYIVTTTSGGFMYHYEVLFKNVRGNFPSFFYYIF

SEQ ID NO: 329056 - protein, 115 aa, Zea mays
  Clone ID: MRT4577_63168C.1.pep
DEREPCCIKHGRIKVIECSIAISIVRGTCVSVGDDSVVKTLTWFRYLRINPFTMSTRCNKRLEASKYHGEARMLDISQLLPCMIFKIALQKARVDVRAAGVLPVPSGRADLWVGP

SEQ ID NO: 329057 - protein, 59 aa, Zea mays
  Clone ID: MRT4577_63169C.1.pep
PPTTYTQLPTCPGLRLFVVRFAGGEHPSHQVCAPGMSAPAPSFMVCKIEHLNPNLIYLY

SEQ ID NO: 329058 - protein, 111 aa, Zea mays
  Clone ID: MRT4577_6316C.1.pep
KHRDRVLRVFRVELIQIRGPGPILTVRISRFTLGPVFVVRRRITQVRQDLGSPSPAEVCRWLLGFTILFWVPQTRRRWEARLRRSSCLRGQGENDRTDEERQRRGLTRVGN

SEQ ID NO: 329059 - protein, 65 aa, Zea mays
  Clone ID: MRT4577_63170C.1.pep
NKQPHTFICHFMHGPLFRIHSEHSCNSPNVGTVFKAQNGLSKYKIFHQHLPIIRETLSRLQKKQA

SEQ ID NO: 329060 - protein, 205 aa, Zea mays
  Clone ID: MRT4577_63171C.1.pep
MDRYRAPKARPDQADADDSDELGVFAAERYFYGDDDELWPCERSSSSLSSAFRTGTHEPDRSVPTPTAVTSSSEASWNSRSTLLPNPNGQAEKLHAAAAAAIATPIIESRPSGAEGQRPGRRPASSSNLRRWLRGVAACACAGGASEDTASADEIGTSERFPETEVPEVTAARSSLTPASGRWLLGGDNTTLAGMEAFSSPNPIQ

SEQ ID NO: 329061 - protein, 57 aa, Zea mays
  unsure (1)..(57): unsure at all Xaa locations
  Clone ID: MRT4577_63172C.1.pep
PLRCCRXALPLPLVSACDVHVHGARLHLYSTVLIDSSMIVAFSKKPPTLPYCAVTTN

SEQ ID NO: 329062 - protein, 81 aa, Zea mays
  Clone ID: MRT4577_63174C.1.pep
SPPSETSHTMSTTCVRDARRWMPTSRPPYVDCALSASNPSLSHSNIGTPPANIKPGPSTLQNSRRRRHRNAPWLMTSPSSG

SEQ ID NO: 329063 - protein, 78 aa, Zea mays
  Clone ID: MRT4577_63175C.1.pep
ISSFFLGPFYKGLGLLRGVYPPSPYFWGIEKICGGRGFFNLGTQKVLGAPVYTFLADPPTGGKGITLPDQKARVFVFG

SEQ ID NO: 329064 - protein, 113 aa, Zea mays
  unsure (1)..(113): unsure at all Xaa locations
  Clone ID: MRT4577_63176C.1.pep
RDPWGEAGADCRGSTVSSLTRTRLCTLKVVPKVVILPQQNPHFVWVMRQSPPMYIXSMLLHHKRLAPLLSIHDTCIIEADTLSCLTAPKLCGPHQDWRGEAALNIFHTPSPAA

SEQ ID NO: 329065 - protein, 129 aa, Zea mays
  Clone ID: MRT4577_63177C.1.pep
RHPSFAGRRHHSTGDFSVEMPRGRRKQTVESNEEYLSEDHVVQKNSQKTLAHESDSEMEEESFALFFHQRVYVEPQNQEFKMVNEKTYSQREQEAKEYKDLQPTSRNTSTIHKFRSCKICTESEDYYEK

SEQ ID NO: 329066 - protein, 60 aa, Zea mays
  Clone ID: MRT4577_63178C.1.pep
SFLLGFSSKMCHFFFLKGSCFSRFFVHVILNGSETVVSILSCFFRNNTICVIYMLFINII

SEQ ID NO: 329067 - protein, 161 aa, Zea mays
  unsure (1)..(161): unsure at all Xaa locations
  Clone ID: MRT4577_63179C.1.pep
MATAAVPASRTGSGGVVRRRRRRVLMFPLPFQGHLNPMLQLAGALHARGGLDITVFHATFNAPDPARHPPGYRFVPVGDGXVGRPRPVXASTPTSLXLLRINRRLREPFRDCLRQALALPEDDGRAPPACLVVDSNLRGMQLVVEELGVTTLVVRTGAAAC

SEQ ID NO: 329068 - protein, 100 aa, Zea mays
  Clone ID: MRT4577_6317C.1.pep
PFSPVVFAYFQQQQLFPFNQLAALNPPAFFHHQKLLPFSQLVAPNRVSFFTQQQFLPFSHQFWANPPTLFQIQQLLPFVHLFFTNPPASFQQHNIGGAPF

SEQ ID NO: 329069 - protein, 83 aa, Zea mays
  Clone ID: MRT4577_63180C.1.pep
CMAFQGCNEFGLVPLKTYSEQFGHLDRQCLKELGTQIRNVQDQESGFIHSIDTEVLVLLMNKFRKQPLIRGKASEAIKIKRQL

SEQ ID NO: 329070 - protein, 65 aa, Zea mays
  Clone ID: MRT4577_63181C.1.pep
RKYIPTCRCGNVGKSCPSNCKVSKFVKSAPPAYQCLEVFHGYPGPRCTPFGSVKPISSAQLLVSP

SEQ ID NO: 329071 - protein, 114 aa, Zea mays
  Clone ID: MRT4577_63182C.1.pep
TTIRRLHNAGSPPLRLPPFLSLLGEVRCRDLETISDHQGSSNCVIITREDKEDAAAVEEILPHYDTPENTMKEEVLRLAPHLLFYDLQGFLWRTAKHGAHQAHVRRLRGERGHG

SEQ ID NO: 329072 - protein, 59 aa, Zea mays
  Clone ID: MRT4577_63183C.1.pep
SWSSHGPIGWSPLLLGLHKACSSPGVLIMQRHKDPLSEYLNGAIPWCPTSRDWKTSLAY

SEQ ID NO: 329073 - protein, 116 aa, Zea mays
  Clone ID: MRT4577_63184C.1.pep
YSGLRSCSALGVPRLLAPSTWWWCRFLSVSLCAHAITCRGVTMSVEWMPGQCGAAHLDGCSPGDFGLDPLGLVTVPENLERFKESEVCHWRWAMLGVPGVLVPEALGLGIWVKVQE

SEQ ID NO: 329074 - protein, 97 aa, Zea mays
  Clone ID: MRT4577_63186C.1.pep
LSNYRCKLRPMSYRNSGGAHTWTTSPITWQPATPWRPSSSDSTASWTVLAATGTQPAGRLPPRPTSDPILWHLHLLTLECPFHSSLTQLILRHRPLL

SEQ ID NO: 329075 - protein, 153 aa, Zea mays
  unsure (1)..(153): unsure at all Xaa locations
  Clone ID: MRT4577_63187C.1.pep
MFAYHHYGFYHQPACSCLHCYHRELLPXSWGSTGFQPSQGTISYEQPXEGPVVFGAQNYNPRGXWSDATQSSEXDTLSKKPAQTCEPIANGAPFTICYNCYEAPHLPKNSLMLGKDEYKLRCGSCSHAIVVRLDGNRLDVSSTYTSFTLITCQ

SEQ ID NO: 329076 - protein, 72 aa, Zea mays
  Clone ID: MRT4577_63189C.1.pep
RERERDTHTHHNILFGKNMTSNRYISVHIGIFGHEHAALRTFSTPTRIFTAFSLNQSLKIVATHVLTLIIIG

SEQ ID NO: 329077 - protein, 61 aa, Zea mays
  Clone ID: MRT4577_6318C.1.pep
KNTSPTSNATTPLFPTYVRRSQPQPNNPSNGARRRSWPHRSLRRAGACLAGCCTLATVFYA

SEQ ID NO: 329078 - protein, 120 aa, Zea mays
  Clone ID: MRT4577_63190C.1.pep
KKKTTWGPNCKTSFPRGVGFFLIQWPHPFFPLEKAPVGPPQLIWGGPPFSPPAVFPFFFPAFIFLEFLRDSIFSPGNNFSLFFPKFFFSPLKEKLVPLPVPVKNFRVPPRGPRRVGGRGG

SEQ ID NO: 329079 - protein, 112 aa, Zea mays
  unsure (1)..(112): unsure at all Xaa locations
  Clone ID: MRT4577_63191C.1.pep
RWAVAVREISGRLAEMTADNEDPIYLAARMRCSKEHTGKVKCQGSAYRTVNVTTDGAVSHPGGDLTDHVTSGPIRLAQVICGLDKKLPQRKDFPXVNRLSSYLKYFKALEIV

SEQ ID NO: 329080 - protein, 113 aa, Zea mays
  unsure (1)..(113): unsure at all Xaa locations
  Clone ID: MRT4577_63192C.1.pep
HVQSILSIWACQLVLMGAVKGYRIAGGPLGEVVDPLYPGGRFNPLGLTDDPXAFSELKVKQIKNXRLAMFSMFGFFVQAMVTAKGPVETLAYRLAVPVINHAWAYAANFVPGK

SEQ ID NO: 329081 - protein, 113 aa, Zea mays
  Clone ID: MRT4577_63193C.1.pep
MARYQRSWSDIPPELAALVLLRLHAHSDRVRFAAVCRDWRACARQHPLPPPLPWLILPGGTFFTLPHSESFLIPNGVEFHSSCGEWLAFARDDICYLVHTFSKVTLHLPDLHM

SEQ ID NO: 329082 - protein, 287 aa, Zea mays
  unsure (1)..(287): unsure at all Xaa locations
  Clone ID: MRT4577_63194C.1.pep
NLNXSKTDHVTGGPLVISHNGASGDYPDCTDLAYHSAVDDGADVIDCPVQVTSDGVLMCMSSINLLDTTNVQRTPFATPSLVPELQSTPGIFTFNLTWADISSSALKPKISSPVSQYFYVRNPRYTNRGKFLKLSDFLAIVMDRDLSGAMIIIENAAFIAKSLGIDIVDSVTAALSAAGFSNQTTKEALFRSTDSAVLVKLKQQETECKLVYTLPLGIGDASKPSLKDIKAFAEAVVVDRXRVFALSYAFIMGQNRIVRDLQRRGSWDRTRIVRDLQAGLGCVRASV

SEQ ID NO: 329083 - protein, 545 aa, Zea mays
  unsure (1)..(545): unsure at all Xaa locations
  Clone ID: MRT4577_63195C.1.pep
GREHAIWNEQLIHSIRKLVRMDYISSPRVXFLRNISARVRRRTKLVFSFLDKKLLDHSVNQTYGSLARNLTFVRSVASGILVPKDYIWPVTADNYLLPSTSIVTEAHEAGLEIYASGFVNDKAVPFNYSYDPLAEYLNFVGDGGFSVDGVLSDYPITASEAIGCFANLNSSKTDHVTGKPLVISHNGASGDYPDCTDLAYHSAVDDGADVIDCPVQVTSDGVLMCMSSINLLDTTNVQRTPFATPSLVPSILINVILSSLINLSSLPQNAAFIAKSLGIDMVDSVTAALSAAGFSNQTTKEVLIRSTDSAVLVKLKQQKTRCKLVYTLPLGIGDASKPSLKDIKAFAEAVVVDRTSVFALSYDFIMGQNRIVRDLQAAGLAVYAQVFRNEYVAHPFDFLGDPTVEINYYVQTFNLSGMITDFPKTVRRYKENTCTALGKDMPKYMRPVEAGSLADFLRSFQTQPPSVAPMPALNSSSVEEPPLPTAAPRNVPPGGGAPADAAGTAGGAAPSDASSGGAPPSDARHTATGSSGMLLVVLVSAALLI

SEQ ID NO: 329084 - protein, 52 aa, Zea mays
  Clone ID: MRT4577_63196C.1.pep
RSSAQRGGERGASAPSDEADQALPRGHHDPRGTVEVRRPASATQNRPASPYT

SEQ ID NO: 329085 - protein, 68 aa, Zea mays
  Clone ID: MRT4577_63197C.1.pep
FASDLFCIIFAYEFLLGVNEQNTLLHCCEPNLSTSCFVRLPSLETHGSAKNEYFSRVKGDGKCPVSKL

SEQ ID NO: 329086 - protein, 104 aa, Zea mays
  Clone ID: MRT4577_63198C.1.pep
KPWEKKTASDYRAASSAIHRFGVKAHIYREINRGGLGGTGFAFSEGDRWRANKLTRGQTPKKNPKSGPLVHGGPWGSRGRVSLVIWGPFNAQAGFTTGHKFCAL

SEQ ID NO: 329087 - protein, 154 aa, Zea mays
  Clone ID: MRT4577_63199C.1.pep
MAPSCSPVGPDSVGGECRGASYRGPSTAVIVGGASEDVSEGLLGLEQHGVVWVVLLEEVVRLLFHEHARDEGEHEVVIVVVQLLSCRAGLSRRGVGGPRLRKSDGEKESESPTSAGSAAMVGSLDGRRLKKKLDLYAGDCVCTAYHISPSRSLH

SEQ ID NO: 329088 - protein, 79 aa, Zea mays
  Clone ID: MRT4577_6319C.1.pep
GSPKVWPSEKAPFTPGFTRLEQLSLNNFPAPMKTKVLFEYYLLARAKKSKFSPLCVPPKLSPPELMGHLFEFPPSGPVF

SEQ ID NO: 329089 - protein, 91 aa, Zea mays
  Clone ID: MRT4577_631C.1.pep
SWFLSCPLTPLWLQLLLGHRPTAATLDCTTSLCGYIGSQRRDQNGHLHLPPPRHFEREQLQLRLVDMHPHKHQQHQVVHRSTTTTTTAAPT

SEQ ID NO: 329090 - protein, 63 aa, Zea mays
  Clone ID: MRT4577_63200C.1.pep
SKVTYTTQYTAHNALHLGQSLNTALRVRGDTSSGLTLFPAYVLLLLSYHLNSYHTSPYSTYSC

SEQ ID NO: 329091 - protein, 70 aa, Zea mays
  Clone ID: MRT4577_63201C.1.pep
PKKNQLNKNNVTTKSRLILFMSVPSVSESKKKKRLLKITFLSSKKKIHLEAILKVSKNPCKNWVCHSYIC

SEQ ID NO: 329092 - protein, 272 aa, Zea mays
  Clone ID: MRT4577_63202C.1.pep
ALATKKKKKKRLAKFINTPLYVVHVMSIDAMDEIAKAKREGQRVIGEPVVSGLVLDDSWLWDPDFTIASKYVMSPPIREAGHGKALQAALSSGILQLVGTDHCTFNSTQKAFGSDDFRKIPNGVNGLEERMHILWDSMVETGKISVTDYVRVTSTECAKIFNIFPRKGAILEGSDADIIILNPERSFVMGALTHHSRSNTNVYEGRKGKGMVEITISRGRVVWEDGVLNIAPGSGRYVMMPPFGYVFDGIEKSDATYRASLRAPVQRGKAAA

SEQ ID NO: 329093 - protein, 209 aa, Zea mays
  Clone ID: MRT4577_63203C.1.pep
MAFVSFVSAMATAVAAPVSVAPSPAPKANDSRKAVVPVDTSELEKHMLAVDDSSVDRAVIARILCGSRRSIDPEIRVPSKSLLRLPPIPSISPSAPETLGYTMPPGPRDRFLVGELARANGWQGGGSGRGGNGGGALIATITPPDVATHATYSRKRYFMLEDVALHCFKSVPSSKRENRIALQRHRSQFGLFVRQVFSKTLLSKWDNGG

SEQ ID NO: 329094 - protein, 108 aa, Zea mays
  unsure (1)..(108): unsure at all Xaa locations
  Clone ID: MRT4577_63204C.1.pep
ADYYANIASPKGHSAKAKQLAPHLIHRFFLSSPALRTRAMXSHXLDLVNMEDLAIRIHAIRGFTLLGTETESVSKISYVLCQLLTSYENVQRDAVHKALMSLIRKDAQ

SEQ ID NO: 329095 - protein, 261 aa, Zea mays
  Clone ID: MRT4577_63205C.1.pep
MAAYLSMGEAQRRIGDYLSRVTNAISCSDAAALASLLSVSSAPASTPLSDALAAIPDFPRLAGDRYPDLADLLVPLLRAIHFHSIQRFADAYSSFEKASNAFLQEFRNWETPWAMEAMHTVALEIRLIAEKADRELATNGKNPDKLQAAGSFLMKVFGTLAVKGPKRIGALYVTCQLFKIYFRLGTVNLCRSVIRSIETARNFDFEDFPVKDKVTYMYYTGRLEVFNENFLVADQKLTYALMHCNPQSESNLRRILKFPYP

SEQ ID NO: 329096 - protein, 315 aa, Zea mays
  Clone ID: MRT4577_63206C.1.pep
MHPLSSLLLFRSAAPPSALPLRRRRRSHTPVRASWQELAGVLVFSAIPFTAVKALANSPLGARLRRRLEDRKAAAAAEADALRAASRGARNNSFWYGGDRPRWLGPVPYDYPEYLTGEYPGDYGFDIAGLGRDPVAFANYFNFEILHCRWAMLAALGVVVPELLDLFGLVHFVEPVWWKVGYAKLQGDNLDYLGIPGFRIAGGQGVVVIAICQALLMVGPEYARYCGIEALEPLGIYLPGDINYPGGPLFDPLGLSKDPVAFEDLKVKEIKNGRLAMVAWFGFYIQAAVTGKGPVQNLVEHLSDPLNNNILSSFH

SEQ ID NO: 329097 - protein, 68 aa, Zea mays
  Clone ID: MRT4577_63207C.1.pep
IIRKNTELGAEGCSSSAKGAGKRQNVRSLGFQVRHWVMSSEKHRLRRMVTPVHCAKMRLKIHAIRVIL

SEQ ID NO: 329098 - protein, 903 aa, Zea mays
  Clone ID: MRT4577_63208C.1.pep
MASSQHVEMEAAKLLHKLIQESKDEPAKLATKLYVICQHMKLSGKEQSLPYQVISRAMETVVNQHGIDMDALRSSRIPFAGGPQAGDSSGVMSKDKEVIGNQSPMVGSDASQSSGQAGLWQLPSGSTDMIRHGASISGRVPTGPNRGDFSAADIHQGSMSQKSGRSSGIESPASLQMEDTRSMNSHDSLKSDEKTSKKTSSKRKRMDSKGAGDLRSEDNSKSDVISTGQNTRKGKQVGKAGRQGQPSMGIEHEQQPHKLQGGTGQVPPIHGGAPFLRTRSEGPSGRTMDKTKPSNPFSMGQIPNFPEGLASTGAPIELQKSIQGGASLFNPGFGWNQNPQVQTLKNSQGSIHNLVRSGVTVEGKVNVGAQGAFNSASAPQMEFPTVPPYNPSSFGASSQFLDKGKELVSSIISTEPHSSKVASQPGISHGSPMQERQGMIRVPQRGEASFQERRPSSLPSRSTGPSPMSHISSNTPFKEQQLKQLRAQCLVFLAFRNNLQPRKVHLEIALGRGPPAESDSAGQRGSEGRVSDALGKENGSSRENSGVFCRQTDISRLPATSAGSIAEDDSLSKDPENATKKIKLAEQEKSLMEVENVQQASVMQGTSSEMRSQETASQNPYRPQQSYYQGDTRRIASDIHRTDAEILNQNLSWGGQGSTALGGTRQLLNQETKESLAPSKSHHMPVDGYNSNIQGIDRTPEIAGAGNDVENCSHVADIVPEQAADEGDEDLSEHEDLLSSPKHTMTEKWILDYQKRIYNEKQKRTLEQHKVHSRMSATYEELKESVNSSEDLSAKTKSVIELKKLQLLPLQRRVRSEFLLDFFKPNTSDLERIKSLKKHRHGRRVKQLEKIEQKMKEERQKRIRERQKEFFADIEAYREKLEDNFKVKRERLKGFNRYIKEFH

SEQ ID NO: 329099 - protein, 70 aa, Zea mays
  Clone ID: MRT4577_63209C.1.pep
WRENNQSTTVKLTVYQSFKKPPRWGLHKNTILPSDILLPRKGPPGEKPSLLSTMVGATVADITKAHMGRH

SEQ ID NO: 329100 - protein, 89 aa, Zea mays
  Clone ID: MRT4577_6320C.1.pep
RKGSMCLACEEGAYFCSTFLTGHVTCHLRLHNFRYFCLCEKSTKIVSHVFNLNILCAVATHGHIPSYIYNFRYIIRQIISKKKKKKPAA

SEQ ID NO: 329101 - protein, 83 aa, Zea mays
  Clone ID: MRT4577_63210C.1.pep
GRVGGRVGGRVGQALVSWRDPRATGLFVALCVLVAMVLYMVPMKMVAVVAGFYYLRHPMFRNRMPAPVINFFRRLPSMSERIM

SEQ ID NO: 329102 - protein, 177 aa, Zea mays
  Clone ID: MRT4577_63211C.1.pep
MNAHAVAQAFPRTYGQRLVTFLSPDDTAGAVKAVNERQPIRVGVVFSGRQSPGGHNVVWGLHDALKVYNPQSILYGFIGGTEGLFANKTLEITNDVLASYKNQGGFDLLGRSIDQIRSSKQVSAAMTTCQDLNLDGLVIVGGVTSNSDAAQLAETLVQKNCKTKVVGVPVSLNGDLK

SEQ ID NO: 329103 - protein, 34 aa, Zea mays
  Clone ID: MRT4577_63212C.1.pep
CRHLQGTGYRSVFFSILFRTLLPFQHYRRVCLFV

SEQ ID NO: 329104 - protein, 38 aa, Zea mays
  Clone ID: MRT4577_63213C.1.pep
TPTRLCPPMRPRRSHAMDDDGRSETGVFHCSPSVMRDQ

SEQ ID NO: 329105 - protein, 35 aa, Zea mays
  Clone ID: MRT4577_63214C.1.pep
TTRPASARAFALRHLQRRTGPVPIAPGHRLVHSQH

SEQ ID NO: 329106 - protein, 115 aa, Zea mays
  Clone ID: MRT4577_63215C.1.pep
VLQFQGRSLTIVQGISVSSPISREKSQGLDPNMRDKVIYSSPNFDPKVFLSWVHKDTSAADLDAGALTLKTDLKGRTQQKKLLVKENFDCFVSCKTTIDGICVVVIYIHIANKCS

SEQ ID NO: 329107 - protein, 97 aa, Zea mays
  Clone ID: MRT4577_63216C.1.pep
FSQLGGAGLRQFLPFGQRPALTSQGYDQQRHLVPFSQQPGVSPAPLLTQQHLLPFYLPPAPNGGALLQLPQLLPFGQLALANPAGFCPQPIIGGALF

SEQ ID NO: 329108 - protein, 41 aa, Zea mays
  Clone ID: MRT4577_63217C.1.pep
QAFAAPLLLRPSPPKLADRAAEPLDTISERKFRTVSREAHS

SEQ ID NO: 329109 - protein, 68 aa, Zea mays
  Clone ID: MRT4577_63218C.1.pep
GEDRLMILSDPHSMPVGQCIGAICVSSTFNKILFIQLRGYAAKGRIVKVQGLTSSWTAVKNECENTKD

SEQ ID NO: 329110 - protein, 174 aa, Zea mays
  unsure (1)..(174): unsure at all Xaa locations
  Clone ID: MRT4577_63219C.1.pep
LEHADLSRVFLAGCSAGANIGHNTAVRASAAGALPDGVTIRGLAVVHPYFPGSEAVGGEIAFGPEIRPFMDRTWRFVVSDTVGLDDPRVNPFVDXGAQGLXGIPCQRVLVCVAENDFLLKERALWYHREIKASGYAGEVELFESKGVGHAFHFDMLDSEQGVQLQERIVAFINK

SEQ ID NO: 329111 - protein, 104 aa, Zea mays
  Clone ID: MRT4577_6321C.1.pep
PPQDAPHLKRAIGLALSPYPPLGTRGMCAKPLSWDTPGNSQPPSCKKTASALNLGGPIEKNMTAQARDRESGLYRAPPPPPFSPPPLFFFFLLFLFSFLYFFFF

SEQ ID NO: 329112 - protein, 68 aa, Zea mays
  Clone ID: MRT4577_63220C.1.pep
SCSTISPGHQGSTITRMTSSALCLTLACVDELRVCLLRERGVLSYLSAHTVIGFVSTGEQSRPASRYP

SEQ ID NO: 329113 - protein, 281 aa, Zea mays
  Clone ID: MRT4577_63221C.1.pep
MSLTEAPSPSPSSSSGSDDFAAFLASELELTSGADSAFPGDPSSVFPATDDEGEDPEELEVEAIEQNGTKRRRVEEQCQDQGTSVRPDKIPTGASKIVQVEACPHPGHFGGLCIICGKPQDEEDVSGVAFGYIHKGLRLGTSEIDRLRGADLKNLLRERKLVLILDLDHTLINSTKLQDISSAEKDLGIQSAASKDDPNRSIFALDLMPMLTKLRPFVREFLKEASNMFEMYIYTMGDKAYAIEIAKLLDPSNIYFPSKVISNSDCTQRHQSLNTTVRGRV

SEQ ID NO: 329114 - protein, 70 aa, Zea mays
  unsure (1)..(70): unsure at all Xaa locations
  Clone ID: MRT4577_63222C.1.pep
VTILSEPKNHXNLPQVVSIRHKIIPSCHHMKIVINIQLTRCDYETKGNGNVILVIPYSNHRGQQTQLDLS

SEQ ID NO: 329115 - protein, 93 aa, Zea mays
  Clone ID: MRT4577_63223C.1.pep
APESPRRASMAPRDVPASINKPVRTYVCQCFGRTPIPVYVLGRGPPRRPVFLHPGTGKFHGYIRIHSCVTCASRTCIQCPVSSNKLLVGPPKE

SEQ ID NO: 329116 - protein, 138 aa, Zea mays
  Clone ID: MRT4577_63224C.1.pep
CFLTGSSVFEWVYLFFSGLSIMGLKYLYELSSRRAYYIAPLPPGGPQPVKLWTAVPVPGSLRDNAVSNSVSQSRDSRSVYATIVKYATYTQQVISKLTSSGPVCLAFPSSAGFLDSPVRSSVKAIISAHKHINQPNRF

SEQ ID NO: 329117 - protein, 79 aa, Zea mays
  Clone ID: MRT4577_63225C.1.pep
GGTQILEKTLTGKTTTLEVQSSDTIDKVKAKIQDKEGIPPDQQRLIFTGKQLEDGRTLAAYYILKKSTLPLVRRLRGGQ

SEQ ID NO: 329118 - protein, 136 aa, Zea mays
  Clone ID: MRT4577_63226C.1.pep
MQLKATNSGMPMKVAQRIDVSKFMSYIKVSRTQLNHIKRLKQSGDGIQTKHVSRVIGGLDKSHVKPYGALLEDEQRRLREHWLEMSCNDLPAAFEVLRERKVLMEKSIKLLGLELQQKNVSVLRKVRCDLSFNSFS

SEQ ID NO: 329119 - protein, 90 aa, Zea mays
  Clone ID: MRT4577_63227C.1.pep
SLIRPASMPLGYKLTLPRPTQVITVIPLGCTESDGTKQRDEEGEQRGYRHRRFNTSPGEGCPHCSQCSGGELATWRTLRSSRTTTSSSLL

SEQ ID NO: 329120 - protein, 181 aa, Zea mays
  unsure (1)..(181): unsure at all Xaa locations
  Clone ID: MRT4577_63228C.1.pep
GGGASESAAGDAGPASFSCRNGRREGQEESRATVCSEVVAPAVANTTIVRPSSLSTGRRGRPPTGALFVPAGSGNPPGVTYAKDKLGYDITTAACLNTHGPNDRTLAQGLKGDPTYLVVEQDKTLSTYRINAVCTHLXCVVPCNGAENKLICPCHGCQCNNQRKVVRAPAPLSMDMVHADV

SEQ ID NO: 329121 - protein, 150 aa, Zea mays
  Clone ID: MRT4577_63229C.1.pep
IRLSSHHGNHHNSVVDPRPQTIGAALGFSSFRGTNVDRDQLKPPIKAHQAHQIDNALMAKGRFYFVLELTKREIDRMVMKPSRSKYLPKKKKLNIRESSTSGANPFSPPPISGPSRPVAGTNWPSFAFPSHENSASEKRKLCPLVFPVVN

SEQ ID NO: 329122 - protein, 118 aa, Zea mays
  Clone ID: MRT4577_6322C.1.pep
QKCMFMVFVLTLHYIYNDQRMQVVRSSMIIRRIQVDLTLHVRARCAERHCSTDGIVRCHQARLNLDGMDSTCVEGKEVCAWLARRGHISVQLFLRVMLLVISDYTTLGISVFVRKVPK

SEQ ID NO: 329123 - protein, 144 aa, Zea mays
  unsure (1)..(144): unsure at all Xaa locations
  Clone ID: MRT4577_63230C.1.pep
AAKYVKVVNDSLHELYKEYVAQTLPLAHASVDXVGANNVAANASVNQGNPSSTGDGLLDFDMYLSEIQSTQPAKCDLEQYLEESLTPRIQEFDILNWWKLNTLKFPTLSKMARDILAIPMSMVSSGSSIFSAGTGNRMLDDYRS

SEQ ID NO: 329124 - protein, 52 aa, Zea mays
  Clone ID: MRT4577_63231C.1.pep
SHIQDMDTKSNNLLNRNRRVITTQEKGGTHKKGGRSGGAKRTSEPRQGNTYF

SEQ ID NO: 329125 - protein, 108 aa, Zea mays
  Clone ID: MRT4577_63232C.1.pep
PGLYFFFFFFFFFFFLGGGGGFFFFFLWGGLEIKRGNQTPLGTREQTLGKRGTPRTKKGGFKKKYKWGGGGTTRHMASLLTGGTQTKKKKKMFAKSPPGGPGGTPPPP

SEQ ID NO: 329126 - protein, 156 aa, Zea mays
  unsure (1)..(156): unsure at all Xaa locations
  Clone ID: MRT4577_63233C.1.pep
SLEGPQPQPRPLPSPSPSLPPTPXASPNKTQREPATRIHQRTRTVTRGPLPSXAPSGPPPVAVSPVARATRTAPRRRRTMRPGGPPNSRALQPPGTPGRSRRRPDLTLPLPQRDLTSLAVPLPLPPPPSSAPSSGSLSLPAPTMLGAPPRVPTPRQ

SEQ ID NO: 329127 - protein, 445 aa, Zea mays
  Clone ID: MRT4577_63234C.1.pep
MDEEYDVIVLGTGLKECILSGLLSVDGLKVLHMDRNDYYGGDSTSLNLNQLWKRFRGEDKPPAHLGASRDYNVDMVPKFMMANGTLVRTLIHTDVTKYLSFKAVDGSYVFSKRKIHKVPATDMEALKSPLMGLFEKRRARNFFVYVQNYNEADPVTHQGLDLTRITTRELILKHGLSDDTVDFIGHALALHRDDRYLNEPALDTVKRMKLYAESLARFQGGSPYIYPLYGLGELPQAFARLSAVYGGTYMLNKPECKVEFDIEGKVCGVTSEGETAKCKKVVCDPSYLPSKVRKIGKVARAIAIMSHPIPNTNESHSIQIILPQKQLGRKSDMYVFCCSYTHNVAPKGKFIAFVSAEAETDNPQSELKPGIDLLGQVDELFFDMYDRYKPVNEPSLDNCFVSMSYDATTHFETTVTDVLSMYTAITGKTVDLSVDLSAASAAEEY

SEQ ID NO: 329128 - protein, 440 aa, Zea mays
  Clone ID: MRT4577_63235C.1.pep
MMMNTNAMSPTASTDADFSFGPLQPYVGFDVAGMGMPSVVVERSSSLLQHNTSSSSHNNNLGLYDSFDFAAAAGLPFQESGLLPPASLPLAPSPPSMAAMAMPPSSLLLTLPGVPAAADVVYNPFGGGGAGGFLKREDGGPLVDAAGGGGRIGLNLGRRTYFSPADVLAVDRLLTRSRLAGGGVGVGLGMGLGMGVLGLGAAHHQQPPPRCQAEGCKADLSAAKHYHRRHKVCEYHAKASAVAAAGKQQRFCQQCSRFHVLAEFDEAKRSCRKRLTEHNRRRRKPSSAQDEDSSPPPPKKLDTCITNTASYNDDLKSASNTAAAAISPNGSGVSCLDVMDNGQTSSAAAPTALSLAAPPPPPLHEKDGSLDSMLMQRVLQGRREDDDDEQRRHFITSLVMQTTQQQHSGGGGAGNILSCSSVSDQHNGGGCNGFFEVDFI

SEQ ID NO: 329129 - protein, 63 aa, Zea mays
  Clone ID: MRT4577_63236C.1.pep
KGCVYLVFVAKFKVNLFFNTGLHLFPGAQKKKFVNPGFSLGKVGPQKFLGPFKENPAKPKVFF

SEQ ID NO: 329130 - protein, 47 aa, Zea mays
  Clone ID: MRT4577_63237C.1.pep
QAGEVWAQQLSSAFGSGFQPARVYRIFSVTVSIKLSAKGVQITKAPE

SEQ ID NO: 329131 - protein, 387 aa, Zea mays
  Clone ID: MRT4577_63238C.1.pep
MAAKKVLMLCGDYMEDYEVMVPFQALQAYGVSVDAVCPSKKAGDICRTAVHQLTGHQTYSETKGHNFTLNASFDEITASEYDGLVIPGGRAPEYLAMDEKVLDLVRMFSGAKKPIASVCHGQLILAAARVVENRTCTAFPAVKPVLVAAGAKWEEPDTMAKCTVDGNLITAATYNSHPEFISLFVKALGGSVAGSDKRILFLCGDYMEDYEVMVPFQALQALGCHVDAVCPDKGAGETCPTAIHDFEGDQTYSEKPGHDFTLTASFGSVDASSYDALVVPGGRAPEYLALNDKVISLVKAFAESGKPIASICHGQQILSAAGVLKGKKCTAYPAVKLNVLLGGGTWLEPDPIHRCFTDGNLVTGAAWPGHPEFVSQLMALLGVKVSF

SEQ ID NO: 329132 - protein, 59 aa, Zea mays
  Clone ID: MRT4577_63239C.1.pep
YLRAVYYESAMCASSRVTTSMMIMPRSIWARLTLTERVARLGCLDGSSSAVSRTSSPRR

SEQ ID NO: 329133 - protein, 127 aa, Zea mays
  unsure (1)..(127): unsure at all Xaa locations
  Clone ID: MRT4577_6323C.1.pep
WVIFVLHTAGGLTDIAWKMXQFPVXPTLAKMLIMAAHLACLAEALTIAPMLSLPSAFFRPKDRAEERPLLAEXHFPPQSDHLTLLNVSLQCKPNPIXGDRCXPHFLHVKDLRMALQVSSHLLHILTT

SEQ ID NO: 329134 - protein, 56 aa, Zea mays
  Clone ID: MRT4577_63240C.1.pep
TGHSIHRACVHRSFQLYLYAHKNARKLQINPNACCMPEDTRAYYDLTHTGIPRTLP

SEQ ID NO: 329135 - protein, 54 aa, Zea mays
  Clone ID: MRT4577_63241C.1.pep
YRIWLHFNESFWRYSLVHHRLVHVSFGPLILWLMLLNFSLVRAENKVEEGTARV

SEQ ID NO: 329136 - protein, 93 aa, Zea mays
  Clone ID: MRT4577_63242C.1.pep
MDVDTAPPFRYPDLVTGNVSLHRFCQAGSSSSACAAAVSTGRASGSAAPPPGPGAFAVQPGGWRSCRKAASAMAPQPSYARGGGRSGILHGMK

SEQ ID NO: 329137 - protein, 68 aa, Zea mays
  Clone ID: MRT4577_63243C.1.pep
SIFMVCNDNKVSLRTSHASEAAFGKQVLIISFARAGAAAILSCFYIAPARKKVMGDPGGPGSLQTSKE

SEQ ID NO: 329138 - protein, 166 aa, Zea mays
  Clone ID: MRT4577_63244C.1.pep
GARGEKALFNHKVGRGERNGLAQHQLSEWLGTGADGLIGLSNVSGHGSRGKSFVDALQENISRPAATAGPLSRFNSPNALGGPTPIGSFDSPKPQLQPHSAFVGSQVLLALWVKKSRDLPSYVGSKLMCLRKKLLFQEYLSGLMIPMGVRFDVPIFRKISLVDFFP

SEQ ID NO: 329139 - protein, 92 aa, Zea mays
  Clone ID: MRT4577_63245C.1.pep
TWAFIPRLQKSCTKGISRGGLSNGSYKLHGGSRDHLQNLVWSFKHKFDTHKNAAQVKFNFFHHLINLVRLQPQSNTKMRSPTLILLLSLPHG

SEQ ID NO: 329140 - protein, 264 aa, Zea mays
  unsure (1)..(264): unsure at all Xaa locations
  Clone ID: MRT4577_63246C.1.pep
YKTNRLLQGSGGEVLTQKXVPELSSICTLIDLKLGKLFLESPKCKDKLQISLLKNLTHLSAEVDVYGQRYEVQSYGENVNSWFSEAIGRPCTFMRCSSSKYRSCVTNGNRDHLCRDTRSKLSFVNEGQLLLVSEESTSDLNSRLSLSNGNGKQQVFADAMRFRPNIVVSGSTPYNEDNWKRLRIGDAYFTSMGGCNRCQMINLYQSSGQVIKSKEPLATLASYRRKHGKILFGVLLNYEDDMEGEDDAIVERWLKVGQEVYPST

SEQ ID NO: 329141 - protein, 63 aa, Zea mays
  Clone ID: MRT4577_63247C.1.pep
ITCALIWKTTPAANARREFFTPAQKNNKKPWPHALTTTGRKTVKPLAALLEGDSDCADATGGS

SEQ ID NO: 329142 - protein, 92 aa, Zea mays
  unsure (1)..(92): unsure at all Xaa locations
  Clone ID: MRT4577_63248C.1.pep
AHLHSHVQIYGVQRVSLLGTLAPPPIMSLTPFSQPSCGLSLHFSSPCQLHVLPPPSTLGEALKGGDEGHGPSRAAAPVAVAVAVVASXXLXS

SEQ ID NO: 329143 - protein, 73 aa, Zea mays
  Clone ID: MRT4577_63249C.1.pep
VMLSVLIIAIVSDCVMQLSVVERCVVFIPMYCMACMPGIVCLKSYMLHCKLAPPAGQACRTAGGLELHCKLAP

SEQ ID NO: 329144 - protein, 128 aa, Zea mays
  unsure (1)..(128): unsure at all Xaa locations
  Clone ID: MRT4577_6324C.1.pep
CCLRWPDQLNSYLRKMTGNRRPYPRVHSFMVGVTPITYGASQEYRTLTVTELTQQMXEMXNMMXAADPRNGRYLNMSDMYRRMMSTKGVDELMIXNVQNKNYSYFVEWIPNNFKYSVCYIPPVGLAMF

SEQ ID NO: 329145 - protein, 234 aa, Zea mays
  unsure (1)..(234): unsure at all Xaa locations
  Clone ID: MRT4577_63250C.1.pep
MALAFDEYGRPFIILREQEKKSRLQGLDAQKANIAAGKSVARILRTSLGPKGMDKMLQSPDGDVTITNDGATILELMDVDNQIAKLMVELSRSQDYDIGDGTTGVVVLAGSLLEQAEKLLERGIHPIRIAEGYEMASRIAVDHLESISTKYEFSATDIEPLVQTCMTTLSSKIVSRWKRSLAEIAVKAVLAVADLERKDVNLDLIKVEGXVGGKLEDTELVQGIIVDKDMSHPQ

SEQ ID NO: 329146 - protein, 74 aa, Zea mays
  Clone ID: MRT4577_63252C.1.pep
LCSDTDSALALPRQVVPATLLVLGGPKNLTNCRWKSTGEASSLAGPGTGEAMDVNVHNPPPWPRASIFLLHQNF

SEQ ID NO: 329147 - protein, 112 aa, Zea mays
  unsure (1)..(112): unsure at all Xaa locations
  Clone ID: MRT4577_63253C.1.pep
PESISRIKDDFKDATGQTCYTFDAVTAVVLKCRALAMALPDDAEXLLGFGDSTRHLLHGVLPLVDRYYGICTYPEGITRTSRAIRXALLPEVDGXCRXANEALTTRFTGWIA

SEQ ID NO: 329148 - protein, 153 aa, Zea mays
  Clone ID: MRT4577_63254C.1.pep
EVVRTGLNNKQHAVGLRHQHANTIQLNSSVGLGHQHDTTLTVDIECPNNTGSGNPTREHKTAKGHRYQAKMQSIQQLRLSKAANRRTKQKADRQPEAKGLNKSSLPGSGTKQLRLPILTLCPASGFCPTFETFWTTKKGGSPRVIVAEPHPLM

SEQ ID NO: 329149 - protein, 61 aa, Zea mays
  Clone ID: MRT4577_63255C.1.pep
CSPAHPGLGNHLYVTVRDALCRARFKAQRSGIGANPQHQSLRKGWKSGMKLVERKDADQVR

SEQ ID NO: 329150 - protein, 236 aa, Zea mays
  unsure (1)..(236): unsure at all Xaa locations
  Clone ID: MRT4577_63256C.1.pep
AQVSQFSYFVSSFQACSPEQAILFRFIVLRGSSGFYTYXIYEHKEGWPDFGLGETRVAFKLRKDXSHSYCFSSCSLNVXLSKCCCNRRFHYMALADDRQRIMPMPDDRLPPRGQPLAYPEAVLLVDPINPELRGEVSFPDRDKYNTCLLSIVSVXCILNLNCLSXDDKYQYSCEDQYNNVHGWMSFDPPIGFWQITPSDEFRTGGPLKQNLTSHVGPTMLAVSSIVIMFWNAESGI

SEQ ID NO: 329151 - protein, 124 aa, Zea mays
  unsure (1)..(124): unsure at all Xaa locations
  Clone ID: MRT4577_63257C.1.pep
MASAKLLYIVVVDENASSFRYTRSLLHSTLQLMGCKPRHAFXSRRVFDVIRGDHQGHGDTATSARVQRYEVAETTPTASPRQFQFELYKRRTTVXXSRDLFLDLXLDALALYKYVAPNQRADLM

SEQ ID NO: 329152 - protein, 54 aa, Zea mays
  Clone ID: MRT4577_63258C.1.pep
PCLCERGPACGVHRCMCNKSPRMHQACVVCNSRMSCVELLFRSQCASRPSACVV

SEQ ID NO: 329153 - protein, 304 aa, Zea mays
  unsure (1)..(304): unsure at all Xaa locations
  Clone ID: MRT4577_63259C.1.pep
RDEGNGSTXTVNIFGQLSKXVNVGVPNDGQQHQVHIASALSSTSEAEPSNGGNSKVDDNSDQADEESSILKSLFGAQGIHSAINHDAIMDANDDQKVRLEAEASQVAQRAAEALRQSRMLRSHDSFAVPTWTGRSGAAGAPSSVRRKFGSTVNSQLIPSSQPSETSSSRNRSLPVGALSGKALSSAELLAKIRGTREASASDALEHQLNVGSSSNLVSSPSGNGGRASNPSNRSMIVQPEVLIRQLCTFIQHNGGSATSTSITEHFKSRIQSKDMLLFKNLLKEIATLQRGAEGSVWVLKPDYT

SEQ ID NO: 329154 - protein, 119 aa, Zea mays
  Clone ID: MRT4577_6325C.1.pep
LLAGKSLRCAGSSFVEVADRGSGDQLRTSPQDSVISSMAASVISSCCTDNAGDARKLHVAAAAEAGAAGLLLQLMSPPMSSTSRSLLGQVSSSPSSAVACTTVALSVAAAGAATTTAAP

SEQ ID NO: 329155 - protein, 83 aa, Zea mays
  Clone ID: MRT4577_63261C.1.pep
RCKWKFRSGYTSNWRYLKVFEINNDAKMKRTMRRPLPSGRVSSTHAAMWATLWVIGQDHQLKKIDCGSFLSMGAAAIFSPCLT

SEQ ID NO: 329156 - protein, 202 aa, Zea mays
  unsure (1)..(202): unsure at all Xaa locations
  Clone ID: MRT4577_63262C.1.pep
MERGRGGSGGRGGGRTFQRNNAGEEWPNLVGVVLSWSLADVMNENLFKDKVKQIPSTFPNHKSYLECYTSPLLEELRAEMSSSLESLSTVPSVRISRIEEKRDKYEIYLASXARLLSHTIALNXYTPSVGDVILLSDVKPGHISDTTRNGRPYRVAFVTDADGDEYDDSPPAKYGIVPSGKIDAADDKPQDGKSTSLFAACL

SEQ ID NO: 329157 - protein, 161 aa, Zea mays
  unsure (1)..(161): unsure at all Xaa locations
  Clone ID: MRT4577_63264C.1.pep
APPFHKEPKRSAEMSRARSAGXWAAAGANAGTKRGGTQKLSSSDEGAARQPYLHERRPRARRTKTAAATLQNRLKSPIARTARSQPATRPRPSALGSAGAESHRSASTGTRRRAQGISVGSARQRPASSIGSPPIRRRRPNRAARPPGGSGGSGRRRLGGG

SEQ ID NO: 329158 - protein, 38 aa, Zea mays
  unsure (1)..(38): unsure at all Xaa locations
  Clone ID: MRT4577_63265C.1.pep
YANGFILXQNYKMIVDNKVCFFYLIHALLTVQYYDENF

SEQ ID NO: 329159 - protein, 144 aa, Zea mays
  unsure (1)..(144): unsure at all Xaa locations
  Clone ID: MRT4577_63266C.1.pep
IRHEVLENPIEPNHQCTRRPHLLSLYSRSLGVPSPAAHPLYPSPRRXPPPAPPMEHQSPSRALGAGPPPHTSHLPQPPPSISLXPTSPLXPSCTRRRHLPRHPPWPSSSPTARXPRRPPSIPFPPWPTPPSPLANAPPSSSSSS

SEQ ID NO: 329160 - protein, 161 aa, Zea mays
  Clone ID: MRT4577_63268C.1.pep
SVPLPPLTLPPIPIVGGSPSPTKKGHRKACPPPPSPPTRTPTPTPSSDKCPSRSRCSSTAAAPSRQATNALERFHPIPFPFPHSTRAQQNVSFYPPDAKFEKARRRIWVVAARAPPGCSASAFLHLFCYSRCMPVYASGVSSNSTCTLCDFVSKKKKKKAP

SEQ ID NO: 329161 - protein, 94 aa, Zea mays
  Clone ID: MRT4577_63269C.1.pep
KITSSISHSSSTMSFKSRLLYANTYIRYIFYFYFLYIHIYHTLKCIVHILVLLNQVFKVFKWMDNRLEKIYIERIQQRPLNLEDRLENVAGECR

SEQ ID NO: 329162 - protein, 112 aa, Zea mays
  Clone ID: MRT4577_6326C.1.pep
TRLIITLYTRELFLQTKENTRPGQAHRRTNERARMQMQIAILGKLQLSGRNYGATPPQVHLLPGVRGYHPAPEHHRRRMRYQPVRVLIAVTARGPLLLPTGEVLKRGTPGGE

SEQ ID NO: 329163 - protein, 197 aa, Zea mays
  unsure (1)..(197): unsure at all Xaa locations
  Clone ID: MRT4577_63270C.1.pep
MESTKLSALLVLAMLALSSSPLALAWEKAEPECHSCESGSPPSTGGVPLPPVSIPSVPXPCQHTVGPPAPCQHXPSVPLPPVTLPPIPIXGKPRKACPPPPSPPTPTPTPTPSSDKCPIDALKLGACVDVLGNEVHVGXTPTIQCCPLVKGIAGLSAAACLCTAIKAKVLDISVYVPIALEVLVNCGCAVPPGYKCT

SEQ ID NO: 329164 - protein, 172 aa, Zea mays
  unsure (1)..(172): unsure at all Xaa locations
  Clone ID: MRT4577_63271C.1.pep
MESTKLSALLVLAMLALSSSPLALAWEKAEPGCHSCESGSPPSTGGVPLPPVSIPSVPLPPVSIPSVPLPPVSIPSVPLPPVTLPPIPIVGGSPSPTKKGHRKACPPPPSPPTPTPTSXCCPLVKGIAGLSAAACLCTAIKAKVLDISVYVPIALEVLVNCGCAVPPGYKCT

SEQ ID NO: 329165 - protein, 73 aa, Zea mays
  Clone ID: MRT4577_63272C.1.pep
DGTRPADAYDRMPNLTATTLTNTQRVHGHAPPLSTTATATIRRHCRQPCLRGAVPPYLSSAERLEPENRLDQL

SEQ ID NO: 329166 - protein, 375 aa, Zea mays
  Clone ID: MRT4577_63273C.1.pep
MIGVRIVSYKSLIMVLLLVLLVCVVSPATAAAGRAEEAHLVPALYVFGDSTVDVGNNQYLPGNSAPQLPYGIDFPHSRPTGRFSNGYNVADFVAKLLGFKRSPPAYLSLTPRTSRQILRGLRGVNYASGGSGILDTTGNTITLTKQIEYFAATKSKMVANSGTSAVDELLSRSLFLISDGGNDVFAFLRRNGTATEAPSLYADMLSSYTRHVRALHGLGARRFGIVDVPPLGCVPSVRAASPDGASRCVDGANALARGFNDALRAALANLTASGALPGARYSVGSSYSVVSYFTAHPGAAGFRDVASACCGGGRLNAQAPCAPNATYCSNRGEYLFWDGVHGTQATSKKGALAIFSAPPQMGFAAPINFKQLVSS

SEQ ID NO: 329167 - protein, 252 aa, Zea mays
  unsure (1)..(252): unsure at all Xaa locations
  Clone ID: MRT4577_63274C.1.pep
MPQPHAAYKTGELRTSLTSSPALSHSSNRLRPPARGATHTVRTSLSSAMESTKLSALLVLAMLALSSSPLALAWEKAEPECHSCESGSPPSTGGVPLPPVSIPSVPLPPVSIPSVPLPPVSIPSVPLPPVTLPPIPIVGGSPSPTKKGHRKACPPPPSPPTPTPTPTPSSDKCPIDALKLGACVDVLGNEVHVGDANVQCCPLVKGIAGLSAAACXCTAIKAKVLDISVYVPIALEVLVNCGCAVPPGYKCT

SEQ ID NO: 329168 - protein, 49 aa, Zea mays
  Clone ID: MRT4577_63275C.1.pep
YEYDNLKLNCCYTYPFRIQGRHNVLPAGHCGSAGRDDGGNPLWGLPQDS

SEQ ID NO: 329169 - protein, 49 aa, Zea mays
  Clone ID: MRT4577_63276C.1.pep
STRSVASLSSSHLRSSSSQRGQRQWRWPPPMRRVEARGRFAYVDAGSAV

SEQ ID NO: 329170 - protein, 81 aa, Zea mays
  Clone ID: MRT4577_63277C.1.pep
CPPGPQGRAWSPPLWVLVFQAPRPPAAFSFFFQRFWAALAWFLVWLELAAPFASNKNACSFPCLPKKKKKTKKKKKKKKKR

SEQ ID NO: 329171 - protein, 76 aa, Zea mays
  unsure (1)..(76): unsure at all Xaa locations
  Clone ID: MRT4577_63278C.1.pep
PQHGMRTSSILEGFVYQTFATASIKMGRTINLFYVCLTSINAVLVVILVVVAFVIQLMIMLNFMYSRXHXKSXGTP

SEQ ID NO: 329172 - protein, 88 aa, Zea mays
  unsure (1)..(88): unsure at all Xaa locations
  Clone ID: MRT4577_63279C.1.pep
KKVRKVNMLEGVTILCSKKVKNELVLEGNNNEHVSRSXALINQKCHVKKKDXRKFLGGIYLSAKGTIFNEQLTTFCFWVAKAVLACGQ

SEQ ID NO: 329173 - protein, 41 aa, Zea mays
  Clone ID: MRT4577_6327C.1.pep
VRKSFHTVYESEIKLKRVSSRQLVWRRKGANLMFLFRIRYR

SEQ ID NO: 329174 - protein, 170 aa, Zea mays
  Clone ID: MRT4577_63280C.1.pep
SPFSISCTPTPAPPFSIGRPLLPPMGLPLDPSPWHGSAPASHGCRPPLPDGWHLHSLQQGRFPLLPALPPMANPCCGARPGSSPFHSRHPPHLLQIGEEEPQVLRREEIHVACARCLIEWMNQRSLLLLRIPSLFSVGRQSLNTNQRRCSLHGGRWSAARGRTVCDLARG

SEQ ID NO: 329175 - protein, 138 aa, Zea mays
  unsure (1)..(138): unsure at all Xaa locations
  Clone ID: MRT4577_63281C.1.pep
HSSPTCTRAQTIAIELSANYLINCSSSENISLGGRARADVVRATAPVIGPVGIRVHDVIIKGNTRTXDDLIEVEVAELLRAASVSTVRLHNLDIFDAVKTTLNAWSLELPGTTNIVIEVVEAANPLTAVGDRILTPAI

SEQ ID NO: 329176 - protein, 155 aa, Zea mays
  Clone ID: MRT4577_63282C.1.pep
PRGRPGFSFLARRHQPLHFLLADPCSLPWGSPWIPLHDVDQPQLPMDIALLSLMAGVSTPCSKDTFLCSLLFLPWPIHGKLAMPFYSSMVSPHRYISPAHFPWCGRRPLPHLPVVVLALAPAPSTVVTLPICCRLEKRNPRFYVERTSVWRVLGG

SEQ ID NO: 329177 - protein, 65 aa, Zea mays
  Clone ID: MRT4577_63283C.1.pep
SSLPPEVAFMLNFGTSCCPGLLMTPVLIPLVSPFNNLYLVLLSLPLLLLKFFCFKEFNPGRFPCL

SEQ ID NO: 329178 - protein, 56 aa, Zea mays
  unsure (1)..(56): unsure at all Xaa locations
  Clone ID: MRT4577_63284C.1.pep
RTRGXPGGDVERKCAYARARAACVAPGRRRRRPWWKHPLYLFLILRIEAAIFSSTS

SEQ ID NO: 329179 - protein, 122 aa, Zea mays
  unsure (1)..(122): unsure at all Xaa locations
  Clone ID: MRT4577_63285C.1.pep
MAPIAVGAALSDKQEGXSDENDHVHQPSRSPAYDALKKVILFGVAGASPPTCKNQHVTGFITQARSLQAKVGDDILLINVYDPFIMKACPKTYPXNKDVKILADVSAAYTQALDLELDLTDK

SEQ ID NO: 329180 - protein, 65 aa, Zea mays
  Clone ID: MRT4577_63286C.1.pep
HNTGYTHIVVVVYPSHPRHNQAAHERAERINTLVNHISSPRLCDGVMSVHIVRGPRHEHRQPVAR

SEQ ID NO: 329181 - protein, 68 aa, Zea mays
  Clone ID: MRT4577_63287C.1.pep
NSSANKTHLRYLSKGGCLCMLCETILSNAQIQLPSAQRQITELILMIIRHLVNLTPHNICRITHYAKT

SEQ ID NO: 329182 - protein, 258 aa, Zea mays
  Clone ID: MRT4577_63288C.1.pep
MIRTLLPALTHHLASSSLLRRRKAPMGASDHLGLAAVAAAKPRNGRTCMAVLGEPLPALDDPGILVHPSADFAAQALVSSTKQYRDMYQKSIDDPAGFWSEIADEFYWKQKWSPDNVCAENLDVTKGPIMIEWFKGGKTNICYNAVDRNVEAGNGDKIAMYWEGNEPSQDGKLTYSELLEKVCQLSNYLKSVGVRKGDAVVIYLPMLMELPIAMLACARIGAVHSVVFAGFSTDALAQRVIDCKPKVAITCKAVKKGM

SEQ ID NO: 329183 - protein, 183 aa, Zea mays
  Clone ID: MRT4577_63289C.1.pep
MASTRMTMHMCYLTILLLLAFLAPPCTPVSDTDDGSRRARAEATVDDILSAHNEARRKVGVQPLTWSPGIAGYAKDYARSRRADCAPRRSSLFYFGENVAVGKGRRLDAGALVAQWVDEGRSYDYGSSSCTAPAGSSGCARYTQVVWRNTTQLGCGKIVCDSGDTLLVCDYFPPGNYGTGRPY

SEQ ID NO: 329184 - protein, 73 aa, Zea mays
  Clone ID: MRT4577_6328C.1.pep
MRDGMSIHIGQAGIQVGNACWELYCLEHGIQADGQMPGDKTIGGGDDAFNTFFSETGAAKHLPRAVSAVLAST

SEQ ID NO: 329185 - protein, 59 aa, Zea mays
  unsure (1)..(59): unsure at all Xaa locations
  Clone ID: MRT4577_63290C.1.pep
SRNTMGNVKSKIQDKEGIPPDQQRFIFVGNQLENGRPLRDXNIQKESTLPLVLGLCGGQ

SEQ ID NO: 329186 - protein, 57 aa, Zea mays
  Clone ID: MRT4577_63291C.1.pep
AVRNHERYSPGKLRDISRHASSREIGAVLLDLEGGFFGGSSCTLELMTVVHAGAGSA

SEQ ID NO: 329187 - protein, 79 aa, Zea mays
  unsure (1)..(79): unsure at all Xaa locations
  Clone ID: MRT4577_63292C.1.pep
PIDPDLTHEFKVFQNRPCKVSAVPSPELGNLLVXERHYDDDEVIKTTQGCRLRHSLPSTASSTCEPQCAAASPYIAFLI

SEQ ID NO: 329188 - protein, 119 aa, Zea mays
  Clone ID: MRT4577_63293C.1.pep
QFRRRQGQAQLSNRARLSDSNIANNPASTHGWSGAHAYGSGDSAGQSTHGQRQQPPHKVEKETLEQSTYNAHSRLVKVGPTFDKLFSKYASKKAVLRDRSIRKPWSPTRTNDQIKRPKR

SEQ ID NO: 329189 - protein, 36 aa, Zea mays
  Clone ID: MRT4577_63294C.1.pep
RMKSSAYRYQENRPNKRVCYVVISIRIPKIIKAYNT

SEQ ID NO: 329190 - protein, 72 aa, Zea mays
  Clone ID: MRT4577_63295C.1.pep
ISSRGTLNVAQLYKENIQVQPIHHFPNQRNKMPILASSLATGPLHAVGPSILSHLLHDVPPFLFDGPPLLLP

SEQ ID NO: 329191 - protein, 46 aa, Zea mays
  Clone ID: MRT4577_63296C.1.pep
KFSGIKPLLNNYPIINILFLLKPNILITQFLSIIHHHIFNTHKILP

SEQ ID NO: 329192 - protein, 577 aa, Zea mays
  unsure (1)..(577): unsure at all Xaa locations
  Clone ID: MRT4577_63297C.1.pep
FGSSPLLESNPTSMLKSPARSFLASGPIFQRSAGGMSGSLQQAQFRSQPLLGSTQDIKAETNVALNQRAAGADGSLFGVPGSNQAGNNLTLKGWPLTGLEQLRSGFLQHKSYMYPAQPLQHQLQFLTPQQQHALIHVQAQQNATSPGDMDNRRLRMLFSSRNLVPGRDGQSTGFTEIVPSVGQSLQNMCLPMQRTETDMLMKKIAALQQQQPSNNLQQLLQHPLLSQQQQSSTYLEGEQEKMGAGIVTVAFAGNEQVSKNRNGRKRKHPISSSGPANSSGTTNTAGASPSSTPSTLSAHSPGETISTPLQHQNASSCTTVVVYGSEGPVPIGSPTNQLVDMDRXYTEDDSMEDNLEPFLPHNGTNPRAAGSHCISSGKGYILREVSSAQASTSSVLCCHFSSDGKLIATGGHDKKVFLWNADTLKQKSMLEEHSLLITDVRFSPSTPRLATSSFDKTVRVWDADNNGYSIRTFTGHSASVMSLDFHPNKDDLICSCDGDSEIRFWSIKHGNAVRILRGGSTQLRFQPRXGGLLATASDNVVSILDVERQACVRRFESHTKXVESVCLDPXGEYVVSV

SEQ ID NO: 329193 - protein, 28 aa, Zea mays
  Clone ID: MRT4577_63298C.1.pep
AHPSATAGLAYAISERIHYSLPVYRTHI

SEQ ID NO: 329194 - protein, 55 aa, Zea mays
  Clone ID: MRT4577_63299C.1.pep
CNKAYDDKLNLKLNIFCECIAMLTFIRPLQHRIKTLEQHFPFLHPYTIYKPFKTT

SEQ ID NO: 329195 - protein, 50 aa, Zea mays
  Clone ID: MRT4577_6329C.1.pep
RMMASSSNHGSGSGTRLYFSVRLRRRSATKDCLVDSFTSQPQENTQLSLT

SEQ ID NO: 329196 - protein, 239 aa, Zea mays
  unsure (1)..(239): unsure at all Xaa locations
  Clone ID: MRT4577_632C.1.pep
ETAASPRASEAHTTMQGGSSGIVYGGLKYQARCIADVRADASSTTFLAGTLSLKEENEVHLIRLSPAESELVCDGVFYHPNEIWDLKSCPFDHRVFSTVYTSGEGFGASVWKIPELNGQSNSPQLEQLFELSGHTGKIRRVIWWPLGKXMSISDSSLHLWDLRSMEKSSAIEHAHIRDVDYNPKKQHIIATTEDDFGICLWDLRMLKLPLKDLPGHSHWTWAIQHNPEYDELLLSAGTD

SEQ ID NO: 329197 - protein, 244 aa, Zea mays
  Clone ID: MRT4577_63300C.1.pep
SQQGLELGKGSQWVWGSTRGGADSVSWRKVRQDDQGSSTGQHGYSIRTFTGHSASVMSLDFHPNKDDLICSCDGDNEIRFWSIKHGNAVRIFKGGSTQLRFQPRYGGLLATASDNVVSILDVERQACVRRFESHTKGVDSVCWDPTGEYVVSVSEDTVKVWSLNDESFVNELSCGGRKFSSCTFHPTYPSLLIIGCYQSLELWDMSENRSMTVAAHDSLVSALASSSSGLVASSGHDKYVKLWR

SEQ ID NO: 329198 - protein, 48 aa, Zea mays
  Clone ID: MRT4577_63301C.1.pep
EAANPTQRNGLLTCLVNSVKNNSSSSCQFKCLIYHLAGHMLTEIMHVC

SEQ ID NO: 329199 - protein, 66 aa, Zea mays
  Clone ID: MRT4577_63302C.1.pep
RPFIPLGSAFPRPIFSFVIIIGNSHELGVFYRPLSFKGAKILVAASQIFPRFYILYFILNLGGRSP

SEQ ID NO: 329200 - protein, 93 aa, Zea mays
  Clone ID: MRT4577_63303C.1.pep
PGGLIGYDNMLWNGSIVLLDDAPMRKYIRFYRDFVLALNMALAADERAEICQLPRSCGAVYRKKMRREARARRARPWHWASAGRRRSPARRAS

SEQ ID NO: 329201 - protein, 90 aa, Zea mays
  Clone ID: MRT4577_63304C.1.pep
SALQMTREVSMADVVHVHSRPLIGPRLNTSHLEISEPAEAPSLSAQRARIEQQHKARACAAKVKPSAPERYRFRSSGGVEGGRQAKARNE

SEQ ID NO: 329202 - protein, 182 aa, Zea mays
  unsure (1)..(182): unsure at all Xaa locations
  Clone ID: MRT4577_63305C.1.pep
MENGGIEKAGVTHKIDISDGPVLPVXRLESIRLPAQEKNHASFDFIFMDADKDNYPERLLKLVRPGGLIGYDNMLWNGSIVLLDDAPMRKYIRFYRDFVLALNMALAADERAEICQLPRSCGAVYRKKMRHQTSPPSTQAWEMRRGKVWRRGGLRREARARRARPWHWASAGRRRSPARRAS

SEQ ID NO: 329203 - protein, 83 aa, Zea mays
  Clone ID: MRT4577_63306C.1.pep
WGGGGDKAEGGGGCRFRLLGRSIGCSCFLLVDGDDRDVLIFHFHCFCIFTCSFCKLVLWKTGTSSHCFLSSKKKKKVDAAANS

SEQ ID NO: 329204 - protein, 91 aa, Zea mays
  unsure (1)..(91): unsure at all Xaa locations
  Clone ID: MRT4577_63307C.1.pep
SGVCAKRXAADARXHMLCRLXPIIANELLSGXKXVVARCQENCMGGGLERHKMXYLCCLRTQWITQPSLGPIXHLRPPGTILXRTIRGLIP

SEQ ID NO: 329205 - protein, 130 aa, Zea mays
  Clone ID: MRT4577_63308C.1.pep
IAAMLSFVASFASGLGPVAWVYCSEIYPLRLRAQAAAIGTGLNRIMSGATTMSFLSLSNTITIAGSFYLYACIATAGWVFMYFFLPETMGKSLEDTVKLFGKDADDEDVGDDSRRHVPSKKPSTELSAQQ

SEQ ID NO: 329206 - protein, 68 aa, Zea mays
  Clone ID: MRT4577_63309C.1.pep
LNPSDYTKTEYGFGARTLWEAREAFEDAEITHVDDTVDPVRDMETISEELRLKFSVDFVDLQDQLYNT

SEQ ID NO: 329207 - protein, 49 aa, Zea mays
  Clone ID: MRT4577_6330C.1.pep
QGSGAAVCSSSATRILQDNTDDHTGAQSNLASSASAQVSHFYNQYELKS

SEQ ID NO: 329208 - protein, 298 aa, Zea mays
  Clone ID: MRT4577_63310C.1.pep
WQTDITRLLDIKKVVGIPEGVTDADDVAAIVRASSKASSSSSRHDGVWKELLINPSRPVRRMLVAGLGLMFIQQATGVDCVVMYSPRVFERAGIKSKTNSLGASMAVGACKTFFIPISTLLLDRIGRRPLLLASGGGMTIFLFTLATSLHMMDRRPEGEAAALGAVSIAAMLSFVASFASGLGPVAWVYCSEIYPLRLRAQAAAIGTGLNRIMSGATTMSFLSLSNAITIAGSFYLYACIAAAGWVFMYFFLPETMGRSLEDTVKLFGKDADDEDVGDSRRDAPSKKPSTSTELSAQH

SEQ ID NO: 329209 - protein, 99 aa, Zea mays
  unsure (1)..(99): unsure at all Xaa locations
  Clone ID: MRT4577_63311C.1.pep
LIECCIRFSEAFEDAEITHVDDTVDPVRDMETISEELRLKFSLDFVDLQDQLYNTXLFSTLFCFYFLQDIEFMKKKLEDLDKPMKRRNDKLLKIEHELY

SEQ ID NO: 329210 - protein, 510 aa, Zea mays
  unsure (1)..(510): unsure at all Xaa locations
  Clone ID: MRT4577_63312C.1.pep
RAHLLAAAIFFTGALLMGFAPGYGFLMVGRFVAGIGVGFALMIAPVYTAEVAPTSARGFLTSFPEVFNNFGILLGYVSNFAFARLPVHLSWRAMFLVGAVPPVFLGVAVLAMPESPRWLVMRGRIDDARRVLQKTSDSPAEAEERLLDIKKVVGIPEGVSDADDVAAIVRASGKGSSSSRHDGVWKELLINPSRPVRRMLMAGLGLMFIQQATGVDCVVIEGGRHPRGRDXADDVAAIVRASSKASSSSSSSRHDGVWKELLINPSRPVRRMLVAGLGLMFIQQATGVDCVVMYSPRVFERAGIKSKTNSLGASMAVGACKTFFIPISTLLLDRIGRRPLLLASGGGMTIFLFTLATSLHMMDRRPEGEAAALGAVSIAAMLSFVASFASGLGPVAWVYCSEIYPLRLRAQAAAIGTGLNRIMSGATTMSFLSLSNAITIAGSFYLYACIAAAGWVFMYFFLPETMGRSLEDTVKLFGKDADDEDVGDSRRHAPSKKPSTSTELELSAQH

SEQ ID NO: 329211 - protein, 324 aa, Zea mays
  Clone ID: MRT4577_63313C.1.pep
MIPACLRGLCTCFDVDDDKANNHEQEPTMAAAAAATVGSADDDQTASTIIAHRTVELSTGVRLHVAEAGAAAATAAGGAPAVLLLHGFPELWYTWRHQMRALAAAGYRAVAPDLRGLCLFRPDRVRALVALSVAYTPRSAARKPVDGLRALFGDDYYICRIQEPGEIEAEFARLGTELVLKKFFSYRSPGALFFPKSGWGSPDDEVPLPSWVTEEDLKYYTSMFEKTGFTGGLNYYRALNKTWELTSPWTLAKINVPVKFIIGDLDLTYHNPGIQDFIHKGGFKKFVPLLDDDIIVMKDVGHFINEEKPNEVSEHIINFIKKFG

SEQ ID NO: 329212 - protein, 376 aa, Zea mays
  Clone ID: MRT4577_63314C.1.pep
GRFSPDSPGYGTKASLGSDGSPQQINGSVTDSGDGSKTQYPVEFGANIWCPPPPEDEGDDIESRLFGFQDEDDEAGDSSGLLVSGSFSANKIAAIDEVTNTAQEECLKTAVLGHFRALVAQLLKAEGIDMGKDDGSKGWLDIVSSLTWQAASYVRPDTKKGGSMDPTDYVKVKCIASGDPRDSNFVRGVVCSKNVKHKRMVSEHRNAKLLILGGALEYHRVPNKLASIGRILEQEKEHMKMIVGKIESRRPNVVLVEKTVSSSAQELFSKDISLVLNVKRTLLDRVSRCTGAQIASSADSIASVRLGQCEAFKVQKVTEFPSAKQTNRRSSKTLMFFEGCPWRLGCTVLLRGSCREELKRIKRAVQLAVFAAYHLS

SEQ ID NO: 329213 - protein, 200 aa, Zea mays
  unsure (1)..(200): unsure at all Xaa locations
  Clone ID: MRT4577_63315C.1.pep
MIPACLRGLCTCFDVDDDKANNHEQEPTMAAAAAATGSADDDQTGSTITHRTVELSTGVRLHVAEAGGAAATAAGGAPAVLLLHGFPELWYTWRHQMRALAAAGYRAVAPDLRGYGGSDAPXGRRRRRRRPGRXQYTALHVVGDLVALLDALGESQVFVAAHDWGALVAWSLCLFRPDRVRALVALIVAYTPRSAARKPV

SEQ ID NO: 329214 - protein, 98 aa, Zea mays
  Clone ID: MRT4577_63316C.1.pep
ALTILHSQDRNNSNDEAHGRRCDWCLSIMGPNDTGQVIDASEGEIIHRRDERVPVDGHGGVFCSVHAAPRPRRRAVVGVLRRRCMPSVAVGRVVVPTT

SEQ ID NO: 329215 - protein, 40 aa, Zea mays
  Clone ID: MRT4577_63317C.1.pep
SNRSSCLKNQLCHILPWLFKYMTQLIFEPLVLFKKSAVFI

SEQ ID NO: 329216 - protein, 110 aa, Zea mays
  Clone ID: MRT4577_63318C.1.pep
TSKQKAMKGGTQAVTLAVHLAVPWVWLGFWAALLPALVSGIAGAAAAILRADHIELNLNTDLTTPDKNKSLIATVIAGLVSKSVSNSRGIPRLVDEDDHVELELVLNMTL

SEQ ID NO: 329217 - protein, 117 aa, Zea mays
  unsure (1)..(117): unsure at all Xaa locations
  Clone ID: MRT4577_63319C.1.pep
WECMXIHIGQSEIPVGYAWXKLHCLEHVTQADAYMPDGNTIGRGDDAFSTFFSETDYAKHSPRAASADPDRTATDAVMTVTYPHLFHPKXQIISASEDAYNNFAPVQYNIGNDIVDL

SEQ ID NO: 329218 - protein, 47 aa, Zea mays
  Clone ID: MRT4577_6331C.1.pep
QCLVSAATCLPAAVYQDESPGLEVPDQQERALSLTSGRDSEDVLQVR

SEQ ID NO: 329219 - protein, 101 aa, Zea mays
  Clone ID: MRT4577_63320C.1.pep
KSNPNDRIDFLFYLWEKKKFLGAEKISRNKGGKKCFEPSQPKTNELNWTPGGFIFDKIKGMQTWWDFYLGAKLALMGANLPLFIRKAFGRIFEGTGGTGPK

SEQ ID NO: 329220 - protein, 191 aa, Zea mays
  unsure (1)..(191): unsure at all Xaa locations
  Clone ID: MRT4577_63321C.1.pep
PRVRPASAQRAGDWSSGIITRXAGNXRILACAGGPSTFGPASVPNSAKHPIYAYVDKTDMNRMESLXHEAXQKHTAXVDIFXCLTXPVRGPVLHPXGXCYGRVLLAHDDFGEAFGVNGXRALTRADGSHGSYEIRRSDNMYATHDIAPGEEASSGFHETFKHXTYFCFQILSAEETQRSYVAMETKADLKS

SEQ ID NO: 329221 - protein, 210 aa, Zea mays
  unsure (1)..(210): unsure at all Xaa locations
  Clone ID: MRT4577_63322C.1.pep
MAANTKFLREYKLVVVGGGGVGKSCLTIQLIQSHFVDEYDPTIEDSYRKQCVIDEEVALLDVLDTAGQEEYSAMREQYMXTGEGFLLVYSITSRQSFEEITTFQQQILRVKDKDYFPXXVVVGNKCDLEGERDVSRQEGEALARSFGCKFIETSAKSRINVDKAFYDIVREIRRYNREMQGYSTRQRWHLWRQRTPKAMDMDNGEQEAGC

SEQ ID NO: 329222 - protein, 72 aa, Zea mays
  Clone ID: MRT4577_63323C.1.pep
IRSFFRTRSTYQPRGRITHPAGPTKTNGHEGRPCDETGTLRRAFTISGTNMCCGTLDRHVERGRNRTTTTLR

SEQ ID NO: 329223 - protein, 183 aa, Zea mays
  Clone ID: MRT4577_63324C.1.pep
PRVRRQIPTQAKYDRIISCEMIEGVGHEYMDDFFGCCESLLAQDGIFVLQFISIPEERYEEYRRSSDFIKEYIFPGGCLPSLARITSAMSAASRLCIEHLENIGYHYYPTLIQWRDNFMANKDAILALGFDEKFIRIWEYYFIYCAAGFKSRTLGNYQIVFSRPGNDKLGDSGIHSLSKLSGS

SEQ ID NO: 329224 - protein, 95 aa, Zea mays
  Clone ID: MRT4577_63325C.1.pep
STLPSLSFQSPCFKIQPATQQSLWPPRRQSTRKPGLPLKLIRAALGPDANGGLLNADRRGATLPSSPLSDVVQEFYSSLNEKNSKRLDKLMAPDC

SEQ ID NO: 329225 - protein, 75 aa, Zea mays
  Clone ID: MRT4577_63326C.1.pep
NARAFNAFGVSGCVNKDKLGNIRPSTIRMQVDIAVAQALSQCTSVQHKERPFLSLQESASELFSPMSPQEPVLVK

SEQ ID NO: 329226 - protein, 74 aa, Zea mays
  Clone ID: MRT4577_63327C.1.pep
GFSKVFSGFLTSYFKRGLGASPKTLEVSMYWRFFRFFEPLTSSKKKKKKKKKKKKKKKKKKKKKKKGGRRLVSS

SEQ ID NO: 329227 - protein, 67 aa, Zea mays
  Clone ID: MRT4577_63328C.1.pep
KGWGEAVEEVVKVGESPCPDIGFVESVVNGVKVRQGGQQMEWWQKLENKPCVFDGGQYAGPWTPLFF

SEQ ID NO: 329228 - protein, 104 aa, Zea mays
  Clone ID: MRT4577_63329C.1.pep
LDERFPFINSVLDHRVFIIRFKTETMASAPDATANAPALDKEATNMDTAGSATNGGTTHPQMSHEEHEVARAAARFGYGPLAHVNTHEARLPAFGGEFQPGLYR

SEQ ID NO: 329229 - protein, 104 aa, Zea mays
  Clone ID: MRT4577_6332C.1.pep
PTSTTSPPRLIGSPSPAPPAANPSHCPAWAQVGWEGAHSLTPPRRRPRSVEAWRTKRICNSVLDFGLLDQWCCHLADFIVSPGHRELRSLMARMLWDFACVVFQ

SEQ ID NO: 329230 - protein, 50 aa, Zea mays
  Clone ID: MRT4577_63330C.1.pep
MINLTNKNSDLNPQVIFFFYTIIGNYITNTLICVSFNIKFDTLLSNNLNK

SEQ ID NO: 329231 - protein, 73 aa, Zea mays
  Clone ID: MRT4577_63331C.1.pep
KKFIGPFNNRLSALSFHIKKYYWVAMKKINEISRSKIEEYSHEQIPSWLVDWIPKKGGSLIGNFHPAPMDFRF

SEQ ID NO: 329232 - protein, 73 aa, Zea mays
  Clone ID: MRT4577_63332C.1.pep
LVCTWSLPVAELLTMLEFLAPYMQSPAAKHSGTSASKPCSFSRANARQPSARVSGTSRPVSYRSFLTSSYQRH

SEQ ID NO: 329233 - protein, 49 aa, Zea mays
  unsure (1)..(49): unsure at all Xaa locations
  Clone ID: MRT4577_63333C.1.pep
ERAQAVHMSAPREQAAGVLEXQRPHGRRGRRWHPHRLVGAGGDRLAGDA

SEQ ID NO: 329234 - protein, 112 aa, Zea mays
  unsure (1)..(112): unsure at all Xaa locations
  Clone ID: MRT4577_63334C.1.pep
MTIYLAREASKVWRKVCAETTTELPLLREKWPLLLAGIVFQYIHGLAARGVHYLHRPGPLLQDLGFMALPELGQDKNYXSECPFAFHLPPPFFLVNLLLLLFTHKQALPTQS

SEQ ID NO: 329235 - protein, 244 aa, Zea mays
  unsure (1)..(244): unsure at all Xaa locations
  Clone ID: MRT4577_63335C.1.pep
EERKLLGVKAGRRRAALTPNVTVXKDGSGDFTNISAALDAMPEKYSGRYFIYVKEGVHDETVNITGRMANVTXMYGDGSKASIVTGSKNVVDGIRMWRTATFAVDGDSFMAMKLGIRNTAGVEKQQALALRVKGDKAIFFNCRIEGNQDTLFAQAYRQFYRSCVISGTVDFIMGDAAAVFQRCLLVVRQPRRGQPAVVTAQARRDHQQTTGFVIHRSQIVADEQLLASSSGESGSAPVRTYLGR

SEQ ID NO: 329236 - protein, 79 aa, Zea mays
  Clone ID: MRT4577_63336C.1.pep
LTSACSLNIRACQETLLQRLQKKTSILKIHSANDGDVFSSARKNSPGPPPSTTTCCHLHTCFRERTTRESIILISSCFH

SEQ ID NO: 329237 - protein, 353 aa, Zea mays
  Clone ID: MRT4577_63337C.1.pep
PTHQLRNLLQTTTEPDKERRPKRESPFQVQNSKRPKRNRNHHKNQQPTVIAAQAHALLAVSQLPARKPHPVPTPKSRTRAAVAMARCSNGLLGLLNAGVLVLAIVALGGGAWLSHRASTTDCERFLERPVIALGVLLLALSLAGLAGALCRASCLLWLYLLALFLLILLLFAFTVFAFVVTNRGAGWVVSGRGYKEYRLGDYSTWLQRRVENSQNWAKIRSCLQDGKVCQKLASRKETAAQFVNSNLSPIQSGCCKPPTGCNFTYQSETVWTKPAGFNTTTDDPDCTTWSNDQTVLCYDCMACKAGVLANLKNDWKKIATVNIVFLIFLVVVYSVGCCAFRNNRQDNSYPAWK

SEQ ID NO: 329238 - protein, 107 aa, Zea mays
  unsure (1)..(107): unsure at all Xaa locations
  Clone ID: MRT4577_63338C.1.pep
ASSCDRGTKKSIERPSTGDSMALSFSSSHRRLMLAVADLLYVLADASASAVTFCVPGWAIPHNLVPSCRWVVTSRTCWIGPGLPWPGLXRRCFRELAYIPGYCPGTG

SEQ ID NO: 329239 - protein, 79 aa, Zea mays
  Clone ID: MRT4577_63339C.1.pep
FMGHISLAMNTVASMESFVMQANGLRQQTLHKLHLILTTGQAARGLLAIADYFHRLRALSTLWVARPRQQDDVGPGLPQ

SEQ ID NO: 329240 - protein, 128 aa, Zea mays
  unsure (1)..(128): unsure at all Xaa locations
  Clone ID: MRT4577_6333C.1.pep
PRDASFSYSPRQGRIEAEPWGREKSADNLRHKNRMAKLASVFSCPVCNLGSSVECXIVMKDMIDEASCRMCEEKFGSTGNALHXPGDIYSEGIDESESVNIVDPPPDAVSLSSCRLWLLQGSSNVMLW

SEQ ID NO: 329241 - protein, 62 aa, Zea mays
  Clone ID: MRT4577_63340C.1.pep
SRIIRTQGFHTHVVVRHETTAFCCFRSIVVHNAERNQLSCVRDDICLPFCTHETFDHNGVLP

SEQ ID NO: 329242 - protein, 27 aa, Zea mays
  Clone ID: MRT4577_63341C.1.pep
LLHANDLSGFLRTMIQQALESYVSYVS

SEQ ID NO: 329243 - protein, 120 aa, Zea mays
  unsure (1)..(120): unsure at all Xaa locations
  Clone ID: MRT4577_63342C.1.pep
RAKGTEKHPKRNKKGERKKERAGKRRRKGRKRKERNRKERALERRQTNRSSRENPPQKPGERGRTRAPPPPRKGGKXLXRXKGXGIXDMXREEKXXMXXKXFFLIIVPDERSEKCIHLPR

SEQ ID NO: 329244 - protein, 94 aa, Zea mays
  Clone ID: MRT4577_63343C.1.pep
RDSPPYFFRCSFARRCWLLIGISPPRTTDLINTILRIRRRWQVPWRLEAIILLTWCIWKSRNNWVFNKIPPWWMIVGKCSKQNYVYCVTESIQR

SEQ ID NO: 329245 - protein, 31 aa, Zea mays
  Clone ID: MRT4577_63344C.1.pep
EERKTRQASGRRGGSPRASDLVGGCLRQARP

SEQ ID NO: 329246 - protein, 308 aa, Zea mays
  unsure (1)..(308): unsure at all Xaa locations
  Clone ID: MRT4577_63345C.1.pep
IDSSWSVSLEGRRPSPQLSVPACNGPQLRRRRRRPRPIRGVHVPGSVQPSPVRLLHRRRRVRLLHHVVPILQFLLSSSRARAAVPPSGPTSRGVAWGATRKQNKTCGCPSSPPTPAQFGHNGRRRLPLPAPAPRPRPRPAPAPAPGAPXTYTARSRSGTTPPPRXAVTAPPPKPDVQAPPSARLSPALAAXQRHPARPRPPRAPPAAPPRDTRQRWPTRASARAXAPRRAPRARAPPPPARAAPGRGRRRGRGCRDGRXSSWTRGWPRSSGCSSPRAGPGCSPRPWPSSPPSATTCCRRARARATPTS

SEQ ID NO: 329247 - protein, 194 aa, Zea mays
  unsure (1)..(194): unsure at all Xaa locations
  Clone ID: MRT4577_63346C.1.pep
MDAAVSLSLPLHHHAHGPLPLPHPAPHHLHCAVPLRHHATSASAVTAPPPKPDVQAPPAARLSPALAAPAPPRSSSSPAAARSSSRAATGYAAALXRVRPRGHAAPRRAPRARAPPPSPPARAAPGRGRRRGRGCRDGRGAAAGRAGGRARQDARRQGQGRGARRGPGRVRRHLRPPAADAPARAPRLLARHAA

SEQ ID NO: 329248 - protein, 96 aa, Zea mays
  Clone ID: MRT4577_63347C.1.pep
CEGAAVGARAGSRRPSLLSVSRRWSLLLHSGRTGCGTGDGGAPWTRGGRWVPLMMGSRRGRTRTWGPSAPSSSPTPSEGNQELGFGFKERGPELIF

SEQ ID NO: 329249 - protein, 102 aa, Zea mays
  Clone ID: MRT4577_63348C.1.pep
ARAGSRRPSLLSVSRRWSLLLHSGRIGCGTGDGGAPWTRGGRWVPLMMGSRRGRTRTLGPSAPSSSPTPSEGNQGMRRRRQGSAGPNEFGFRLKERGPELIF

SEQ ID NO: 329250 - protein, 161 aa, Zea mays
  unsure (1)..(161): unsure at all Xaa locations
  Clone ID: MRT4577_63349C.1.pep
MALVLHILGTGNKNAFKALIDAKYRGVRXEMTNDFEMGVSNKTPEFLKMNPLGKGPVLETTDGPAFESNAXIARYVXRLKDDNPILGSCRIEQAHVEQXWTVAATARTILGVXRWXMYPTRRVRTYMLTLLEETAIAELQRSIVALNTHVDLITYISGHTD

SEQ ID NO: 329251 - protein, 110 aa, Zea mays
  Clone ID: MRT4577_6334C.1.pep
LSVTASTASCLKLHLLAHVSIIAWVSLAMSSPMESKSSSVISTLAWDLRHRRISAVYGVCKRARARVDRARLCPLMSDRPAPAVGDAVQCRHRTDGLEGRCGHQRLMRKE

SEQ ID NO: 329252 - protein, 139 aa, Zea mays
  Clone ID: MRT4577_63350C.1.pep
MSGMGYGPGPELGRYSYGFRGSPMPVSSPWSGGALAENTDNIASRKRRGGPDGLSEGDWTCPKCDNINFSFRSTCNMKKCGAPRPTPGGNTSSSRKDNSNKEAPEGSWTCPECNNLNYPFRTVCNRKGCSYSKPAPANN

SEQ ID NO: 329253 - protein, 90 aa, Zea mays
  Clone ID: MRT4577_63351C.1.pep
CYSKKAASGVTEMMLIQMMIIPTTLTVRLLQVYTSTVNGLDIIKRECGHPERGILCGESCGFLPCLYGSHELPKLCPHLHDVISDTSSYL

SEQ ID NO: 329254 - protein, 84 aa, Zea mays
  Clone ID: MRT4577_63352C.1.pep
TYKKAEPTGTYHHHQQHKTMTWSNTRLVLLGGDHLVTISCSDLVSSIHLQGSSLASSCGLTRVWGRLGSSSASHDYLSSIINSS

SEQ ID NO: 329255 - protein, 214 aa, Zea mays
  unsure (1)..(214): unsure at all Xaa locations
  Clone ID: MRT4577_63353C.1.pep
MASAKRMMPGPPASGYDRSPLFYGGGGGAPPPIPLGTGSYGAPYPHLGMRYGYGPPVGPPGSYGLFSSYGPPGPMSGMGYGPGPELGRYSYGFRGSPMPVSSPWSGGALAENTDNIASRKRRGGPDGLSEGDWTCPKCDNINFSFRSTCNMKKCGAPRPTPGGNTSSSRKDNSNKEAPEGSWTCPECNNLNYPFRTXCNRKGXCSYSKPAPANN

SEQ ID NO: 329256 - protein, 273 aa, Zea mays
  Clone ID: MRT4577_63354C.1.pep
MAFAKVGAATQLENRGALSKRLRNDVSVREGDWNCPQCGNVNFSFRNVCNRGACGAPRPSPSPSPRMMPAPPAPGYDRLPLFYGGGGGAPSPIPLGSGSYGGPYPHLGMRYGYGPPVGAPGSYGLFSSYGQPGPMSGMGYGPGPELGRYSYGFRGSPMPVSSPWSGGAIAENNDNIASRKRRGGPDGLSEGDWTCPKCDNINFSFRNTCNMKKCGAPRPTPGANTSSSRKDNSNKEAPEGSWTCPECNNLNYPFRTVCNRKGCSYSKPAPANN

SEQ ID NO: 329257 - protein, 404 aa, Zea mays
  Clone ID: MRT4577_63355C.1.pep
WVGSLAGGVRGASTLGCCFVVRRRQARDAAAALAADGEGKRSQAMESISASTTLVKFTYDDIKAATDGFARKSIIGQGGFGNVYKGVLRDGAEVAVKRFKNCSAAGDAAFAHEVEVVASVRHVNLVALRGYCIATTQREGHQRMIVCDLMHNGSLYDHLFAAGECQLAWPVRQRIAIGMARGLAYLHRGAQPAIIHRDIKASNILLDDEFEAKVADFGLAKFAPEGMTHVSTRVAGTLGYVAPEYALYGQLTEKSDVYSFGVVLLELLSGKKAFISLSEGQSFVLTDWAWSLVRRGRTVEVIQEGMVDPGPTKVMEKYVLVGALCTHPQLHARPTMEQALKILEADSVPSPLIIPERPIPVVANLAEIERSASSSGSGQLFSPSGFRSFIHANEDAALVSPNDT

SEQ ID NO: 329258 - protein, 79 aa, Zea mays
  Clone ID: MRT4577_63356C.1.pep
RHQFRNVRPTHACVIKSIIVLMVATHGGNRAVVIPHSMGILYFLHFIKWVATPPSMMGHGAPHWCEKHIKAAMNIVGPF

SEQ ID NO: 329259 - protein, 99 aa, Zea mays
  unsure (1)..(99): unsure at all Xaa locations
  Clone ID: MRT4577_63357C.1.pep
NVRMFYQNCVERLFWTFKRNARSRRSMLVAFAGLNGLMGLYPTVDPTRAAXDPSPPDAIAPNRRRARPGAXIARTQEPPEPNRCGRPPPPSRYAAGPLL

SEQ ID NO: 329260 - protein, 118 aa, Zea mays
  unsure (1)..(118): unsure at all Xaa locations
  Clone ID: MRT4577_63358C.1.pep
GDAEGARGVEGGQRSXQVVQLLRYGHTRGTHRCAYGEVSTYVSQRPRHPILSWALDVGTSVKRCVKKTAISGDSGTASFHLAPTGSGDHHRESNEARAGLYVDESYHDCPXKARRSCP

SEQ ID NO: 329261 - protein, 82 aa, Zea mays
  Clone ID: MRT4577_63359C.1.pep
GGTQVTTTKQLAGHKGREYFFFLKSHLALKTLNRSLVFTPLKVYRGGPQTPQREKDIFLKEPLAFEGGLKQAQPGPWEACIG

SEQ ID NO: 329262 - protein, 70 aa, Zea mays
  Clone ID: MRT4577_6335C.1.pep
GGEGGSYRGLLEQGLVRQEELLVVRRLGFGCVLSPSAIAPRVDRVRASSEMELNGGACQGVSSAGIDIWW

SEQ ID NO: 329263 - protein, 37 aa, Zea mays
  unsure (1)..(37): unsure at all Xaa locations
  Clone ID: MRT4577_63360C.1.pep
IRLEGVCXEMPTLFRTRRSFVYREKNCLHPPRGCGEV

SEQ ID NO: 329264 - protein, 70 aa, Zea mays
  Clone ID: MRT4577_63361C.1.pep
LVHSDMHGNRDLPVLCIFAHLALRICFVFRFFFFFFFFFFFFFFFFFFFWMNGTTARFFDCQRVFFRTHV

SEQ ID NO: 329265 - protein, 116 aa, Zea mays
  Clone ID: MRT4577_63362C.1.pep
GYLEAGRASGGAVHWLNGPAAPSPSLLSATKAGYSSKVASVMVVVVPTGSSSGAAVMETAKVLPPPPPTTQMVVLPTLLAPREGSRDPPLLLLRAQRQRSRGWSRGPPSGLPKAWR

SEQ ID NO: 329266 - protein, 145 aa, Zea mays
  unsure (1)..(145): unsure at all Xaa locations
  Clone ID: MRT4577_63363C.1.pep
GGPPPPLXHXGARGEXGPQAPPPPADKGEGELPPAXKAPEKPPPAGAPGGXPKELPPGPPPPXNEPPGLALEPYGFSGGGSIPXPHGGHVGPPPPPPVVWDRQVNVVIFGPKPPPGFKKKKKKKKKKKKKKKKKKKKKKKKKKHT

SEQ ID NO: 329267 - protein, 65 aa, Zea mays
  Clone ID: MRT4577_63364C.1.pep
LITKGGRERVAQQRMIFANAQSTTNSDVSMLWHTAQAGRCQATSGFFRNQDAGQVTKLATLPEPV

SEQ ID NO: 329268 - protein, 75 aa, Zea mays
  unsure (1)..(75): unsure at all Xaa locations
  Clone ID: MRT4577_63365C.1.pep
PFXVCVACCGEFXRPXLXLVLTGHQPPNSLLPNYFSVCWEPXXFNAXAPDYPHIYLNXMILIHYVCTLYVWVLXV

SEQ ID NO: 329269 - protein, 135 aa, Zea mays
  Clone ID: MRT4577_63366C.1.pep
FGVPSGSGRIFKRCFVHRGHLPLTHDPHTGAAPSSASALRRRSSVRLHPLSYFRRHSAALPPPPTAAENIYSLRFPYLPLEMHPPLTLHRHPMCAEIIEEFQKCHLDHPIKKLFGERTDLKIKLDRCFRQEVSEI

SEQ ID NO: 329270 - protein, 35 aa, Zea mays
  unsure (1)..(35): unsure at all Xaa locations
  Clone ID: MRT4577_63367C.1.pep
LEVXVXGKXAGXVFAEVXXTXXNLSLKHACVGLTS

SEQ ID NO: 329271 - protein, 59 aa, Zea mays
  unsure (1)..(59): unsure at all Xaa locations
  Clone ID: MRT4577_63368C.1.pep
HNXLTXKSLKSSPFSKSKIMNNSSIHLIKNTIPNNSTYTTNASHYFFQIKRIYKTDTTY

SEQ ID NO: 329272 - protein, 60 aa, Zea mays
  Clone ID: MRT4577_63369C.1.pep
KQVSTRPLAGVCGGDAKRIAGRERRMKSSHGLSRSSSSVLPRPPSFVGFSAVGVGQLEFV

SEQ ID NO: 329273 - protein, 84 aa, Zea mays
  Clone ID: MRT4577_6336C.1.pep
LSILSSIQSLHAGHVYFEARCTWFRPVFNMVLVVPDIFCWVILCSWIFLFLAVGTFVSAVGSRHVALSLTSKTHELNFFATRNY

SEQ ID NO: 329274 - protein, 89 aa, Zea mays
  unsure (1)..(89): unsure at all Xaa locations
  Clone ID: MRT4577_63370C.1.pep
GKKFGSKLPAHPKKKIEGPLDGAISWVDPNHLPKGGEFGAKIKEVESLCTPFFPKMFQGGGXKMGGPGGMDKNPPPGRGGPGPKIKEVD

SEQ ID NO: 329275 - protein, 86 aa, Zea mays
  Clone ID: MRT4577_63371C.1.pep
NNSGVIFYNYPSKGVANLARKKKDGNRLKTTTGERTRNAPAFVLVPGAQEEPRKNWGGTKSGEGVSLSQEYPEREGPHFPCLAGGL

SEQ ID NO: 329276 - protein, 326 aa, Zea mays
  unsure (1)..(326): unsure at all Xaa locations
  Clone ID: MRT4577_63372C.1.pep
LTRGRTRGAVSSLSPESIEHNDLLIVGPGVLGRIVAEMWKQEYPGCKVYGQTATTDHHSELTDIGIIPSLKGSVPGPKFPYVIFCAPPYRSEDYAGDXEDSPCVPIGQSTRTDVLLKAENVVLEAGGCVLRLVGLYKSDRGPHVYWLSKGTLDVRPDHILNLIHYEDAASLVISIMKKRXGAASLRCLHCLIPTELNWAKLVRYSLTSITNQIGVLMFTGCQXTLDVRPDHILNLIHYEDAASLVISIMKKRLRSCIFVGCDNEPLSRLEIMDRVNRSRKFDTQFHGFTGTDGPLGKRMDNSKTRAKLGWQPKYPSFTEFLGLSNL

SEQ ID NO: 329277 - protein, 293 aa, Zea mays
  Clone ID: MRT4577_63373C.1.pep
MSAAADSSSSIVVSGDAAVSSLSPESIEHNDLLIVGPGVLGRIVAEMWKQEYPGCKVYGQTATTDHHSELTDIGIIPSLKGSVPGPKFPYVIFCAPPYRSEDYAGDLRVAASNWNGKGSFLFTSSTAVYDCSDNGFCSEDSPCVPIGQSTRTDVLLKAENVVLEAGGCVLRLVGLYKSDRGPHVYWLSKGTLDVRPDHILNLIHYEDAASLVISIMKKRLRSCIFVGCDNEPLSRLEIMDRVNRSRKFDTQFHGFTGTDGSLGKRMDNSKTRAKLGWQPKYPSFTEFLGLSNL

SEQ ID NO: 329278 - protein, 80 aa, Zea mays
  Clone ID: MRT4577_63374C.1.pep
FNFLNYWLQGERLPVVIFSGFCHVGFHLFVLCWRGFVLGLAPPLMQYNSNEIKSKKKKKKKKKKKKKKKKKKRAAARESG

SEQ ID NO: 329279 - protein, 42 aa, Zea mays
  Clone ID: MRT4577_63375C.1.pep
LACMHVQVRHCMHASSSARVNLNACMCLGLAVRHWNQIDLHH

SEQ ID NO: 329280 - protein, 72 aa, Zea mays
  unsure (1)..(72): unsure at all Xaa locations
  Clone ID: MRT4577_63376C.1.pep
YWLGVKESLAXAVNAVISIPGMQPCEGTYVVPNNLRLPPCLLFGVFFGNVKVLVRPSFGISAPKEVALKLAV

SEQ ID NO: 329281 - protein, 96 aa, Zea mays
  Clone ID: MRT4577_63377C.1.pep
SAPRPVVAPPSFWLVAGAPVSLSAPLEPDGHTAAPSVLACFTALAFRHGRPTLLSRACCRGAVVLTLLPVCLGHCIVCSSWIGAVYIHGSFLCSFS

SEQ ID NO: 329282 - protein, 220 aa, Zea mays
  Clone ID: MRT4577_63378C.1.pep
MSGGGLEVQVHVVGGARSCFAALPLHLIHDLERTSATGDLPPVLALELRGPAGARWSLAWSGAASRSSAIEVAQELADCISLPDGTIAQLSVARSLAKADSISIEPYSEDDWEILESRADLAEETILKQVGIVYEGMKFPLWLDGHNIVKFVVLSSFPEKTVVQLVPGTEVVVAPKKRKEKPSQDLQKQSALKETVKIKALLRVQAADRKYAHTFKFEGV

SEQ ID NO: 329283 - protein, 78 aa, Zea mays
  Clone ID: MRT4577_63379C.1.pep
AFNRSRGFSCRSGVLWWPSCHSQRSHLPQMLNVVTYSFTMMCVPPLELIHAEETGTQNEGGEASGLVREAWLESGNPV

SEQ ID NO: 329284 - protein, 34 aa, Zea mays
  unsure (1)..(34): unsure at all Xaa locations
  Clone ID: MRT4577_6337C.1.pep
SGFFKKVESLQPCEVSYLXSGTHIFAVYRDNFFK

SEQ ID NO: 329285 - protein, 80 aa, Zea mays
  unsure (1)..(80): unsure at all Xaa locations
  Clone ID: MRT4577_63380C.1.pep
IKLFVVGGLLDDMEDINCKLGISKRVCIRVNDGLHGRGGMWWDLFADEDXGEGXRRYSTLGGGGVXRNRRLADEYRGGAG

SEQ ID NO: 329286 - protein, 52 aa, Zea mays
  unsure (1)..(52): unsure at all Xaa locations
  Clone ID: MRT4577_63381C.1.pep
HNILKLYGYWNDVDRELRXCLKNEYVDNMTKSREHGIALRKKLFNPPEEFEK

SEQ ID NO: 329287 - protein, 65 aa, Zea mays
  Clone ID: MRT4577_63383C.1.pep
FYEQVNLFPKSKKSLIFFFFGVRFAKKGDDPILSPFPHWERKGNAPRKLGIFALFVQQPYKMWTG

SEQ ID NO: 329288 - protein, 73 aa, Zea mays
  Clone ID: MRT4577_63384C.1.pep
SYTLPAHYMLPQYMLQTYHGCTTEACIVHTDPAFTKTDVERLIWLKLSSTILEGDFCACPSFSSVCFFGTICS

SEQ ID NO: 329289 - protein, 55 aa, Zea mays
  Clone ID: MRT4577_63386C.1.pep
PFFLSVYCAHVEVATLGYANLLRTKSFFCLGLKGFVFFLKWLFLRYFLLVQIACK

SEQ ID NO: 329290 - protein, 176 aa, Zea mays
  Clone ID: MRT4577_63387C.1.pep
MEHRAFDCSGSDDDLPPTYQIRVPRMHFSGNRRPLAGAFSQPRPHNKLDSDIHQIEQQAYTGVLRAFKMQSDALTWEKESLITELRRELKVSDVEHRMLLNMVNEEEAIHTIRQSRQGCGMQSSLPYNSVVDHNLGPIKRQKKSHPIYSLPVDPHSPSMPLKALVGNKTYTLAPET

SEQ ID NO: 329291 - protein, 177 aa, Zea mays
  Clone ID: MRT4577_63388C.1.pep
MEHRAFDCSGSDDDLPPTYQIRVPRMHFSGNRRPLAGAFSQPRPHNKLDSDIHQIEQQAYTGVLRAFKMQSDALTWEKESLITELRRELKVSDVEHRMLLNMVNEEEAIHRIRQSRQGCGMQSSLPYNSVVDHNLGPIKRQKKSHPIYSLPVDPHSPSMPLKALVGNKTYTVGLEYS

SEQ ID NO: 329292 - protein, 63 aa, Zea mays
  Clone ID: MRT4577_63389C.1.pep
VLISQEFPNSTQSKNSFSVWKHLSESDLINHPTGNGNYIQLVHIEHLPRFCNDYHLICKRIVP

SEQ ID NO: 329293 - protein, 65 aa, Zea mays
  Clone ID: MRT4577_6338C.1.pep
TRARKLYSRLLKNEDHDAEPGRDRKRTHLCTHGPGTAKLRTDLLPIHTDLQRRRLRTRLYLLRSF

SEQ ID NO: 329294 - protein, 168 aa, Zea mays
  Clone ID: MRT4577_63390C.1.pep
GRAYEDTTWKYCYSASPLEMPDVPTITLTFAADKSLQAVNPILPFNDKQGALAGFCLAVLPSTEPIGIIAQNFLVGYHVVFDRESMKLGWYRSECRYVEDSTTVPLGPSQHDSPEDPLPSNEQQTSPAVTPATAGTAPLSCATTNLQMLLASSYPLLLLTMSSVFFVS

SEQ ID NO: 329295 - protein, 123 aa, Zea mays
  unsure (1)..(123): unsure at all Xaa locations
  Clone ID: MRT4577_63391C.1.pep
KKKQFFPFNQQRALKFAFYLHKQQXPFRQVPFAYPQKFFPFNQRGAMKFPGYLQKQQILPFTQQNGVSPATFLKKPQLLAFYQQGGPKGGTLLKLQQMVPFNQLVFKKPKGFFQKTINGGAPL

SEQ ID NO: 329296 - protein, 581 aa, Zea mays
  unsure (1)..(581): unsure at all Xaa locations
  Clone ID: MRT4577_63392C.1.pep
MLSGVKLVPRDQIQSDQKRRGDQGSDSDSSDGKKPWKHSKRRRGKKEKKRRSSRRQRRRSKRYSSEDSSGSDTDDSIGEEEEDDVSRSKRRGKDRRRRRNFSDDDDSESGESDRGRASRRGKQRRDDDDEEEETEGDGLRASEVVRREMGLEWMLKPASSSQTEGTGVRKVDNVEKDESAHEEIMRPNPKELNPYLKDNGTGYPEESTPSNAGSQLLASSVVGDGGASWRLKALKRAKEQAAREGRKLEEVVEERWSSLGDLAVSVSASRAAHSHAHLHAIRGRKSGNADNSEERVKRNPEGQLDGSSGRREYLRDVSSQHHAMRKPKPDSVPWKKRRQNISSEDQALISSAVASLNKFSDDGSFMEKISNVESKNTNVSTASASADEQRDNGQKTPKESSNKVQLVSTQKLNANQMAAKILQLRMKGKHQEAEQLSREMEALLENQDTAHEKPGHGKERSSIRPTLKPTAADHRRREDDADLHLANKIMHNKQYNMSKSIEDEYDFGDAPTKKDKKKKKEARDERKSTDRRMLTQKERCMYCFENPSRPKHXGVAIGNFSYLMLPQFEPVVPGHCIILPL

SEQ ID NO: 329297 - protein, 240 aa, Zea mays
  Clone ID: MRT4577_63393C.1.pep
NSCVDPRVRRPVQTGAQQPRKPACARPSRRLRRPCENVTMAEAPRAETFVFLDLEATGLPSVDPEIAEISLFAIHRSSLENPERDESGAPVLPRVLDKLTLCMSPEHPFTAKASEITGLSSEGLARCRKAGFDGAVVRTLQAFLSRQEGPVCLVAHNGFDYDFPLLRTEIWRLGAHLPQDTVCLDTLPALRSLDRAHSHGTRGQGRKGYRLGSLFRRYFQAEPRAAHSREGDGHTLLLAF

SEQ ID NO: 329298 - protein, 136 aa, Zea mays
  unsure (1)..(136): unsure at all Xaa locations
  Clone ID: MRT4577_63394C.1.pep
MFTNIGXYPISGDLTVIIYNAHLTGKVXLVRKTVLGWYVTRTDASLLDGVRKFLELCVTCHVLSSTVANPNNGNRGKLDAEQSLEQCLVNPTPLMRNKNQIRVTFDXEAEKQDMPGTIIGNNNHASELFLETMTVN

SEQ ID NO: 329299 - protein, 331 aa, Zea mays
  Clone ID: MRT4577_63395C.1.pep
MAESFVLNTGARIPSVGLGTWQIEHGAVSDAIYAAVKAGYRHIDSAVAYRNQKEVGLALQKLFEDGVVKREDLFVTSKLWPGNHAPEDVQEDLCSALEDLRLDYVDLYLIHGPIRIQKGTMFIPENLIPTDIPATWGAMEKLYHAGKARAIGVSNFSCKKLQDLLAVARVPPAVNQVECHPVWQQDKLRKLCQSTGVHLSAYSPLGSPGSPGYSGPNVLSNPVVMSVAERLQKTPAQVALRWGIQMGQSVLPKSADRTRIGENFDIFDWSIPHDLMAKFSAIKQVRLLKVEFVVHPNSGYNTLEDLWDGEVEYEDERTENQDHSDFLRCFS

SEQ ID NO: 329300 - protein, 49 aa, Zea mays
  Clone ID: MRT4577_63396C.1.pep
MELVSCLGKKKKKKKKKKKKKKKKKKKKKKKKKKKKKKKKKKKKGGARF

SEQ ID NO: 329301 - protein, 82 aa, Zea mays
  Clone ID: MRT4577_63397C.1.pep
GALPHILKNTKEDFFKRIIGLLAETSEICFSGIKDIKCITCPHKPEGSMFVMVINLLNYMLLLWLSKKKVTFKYRVRATSCT

SEQ ID NO: 329302 - protein, 114 aa, Zea mays
  Clone ID: MRT4577_63398C.1.pep
VLFTGNNLQQWLSQGSSSILEKLIVLHHRRDGRENSHSVRSVIGFYPSINVMIVVPILLIQRLVVSQSRVRTLRLFTSSTHCHHKSHSLVGVPQLSPRCEAFLISLTLRRFHAS

SEQ ID NO: 329303 - protein, 64 aa, Zea mays
  Clone ID: MRT4577_63399C.1.pep
LVVKLFNQYKLLVVWEEKCNLSQVNSLFTTEAFLDLWLPIQKCVHFPPCNDRSRIRDSVPINNS

SEQ ID NO: 329304 - protein, 85 aa, Zea mays
  Clone ID: MRT4577_6339C.1.pep
SFKGILCFPSPPPSDEQKESPGFVPLPNPKVGYTARPRFWISPPGFRPPSQKRFKVLMFCPTPFFFYPGLFFFLPIETQQFWFPF

SEQ ID NO: 329305 - protein, 312 aa, Zea mays
  Clone ID: MRT4577_633C.1.pep
MQGGSSGIVYGGLKYQARCIADVRADASSTTFLAGTLSLKEENEVHLIRLSPAESELVCDGVFYHPNEIWDLKSCPFDHRVFSTVYTSGEGFGASVWKIPELNGQSNSPQLEQLFELSGHTGKIRRVIWWPLGKHDKLISIDDRNIFLWNVDMSNKSAKVISQGSADMLPNLSGGAWDPHNHNSIASISDSSLHLWDLRSMEKSSAIEHAHIRDVDYNPKKQHIIATTEDDFGIRLWDLRMFKLPLKDLPGHSHCPSGSPNRQEEPLLNSYTDYEDSIYGIAWSSHDPSLFASLSYDGRVVLESVKPYLQRK

SEQ ID NO: 329306 - protein, 252 aa, Zea mays
  unsure (1)..(252): unsure at all Xaa locations
  Clone ID: MRT4577_63400C.1.pep
MADGEDIQPLVCDNGTGMVKAGFAGDDAPRAVFPSIVGRPRHTGVMVGMGQKDAYVGDEAQSKRGILTLKYPIEHGIVSNWDDMEKIWHHTFYNELRVAPEEHPVLLTEAPLNPKANREKMTQIMFETFNVPAMYVAIQAVLSLYASGRTTGIVLDSGDGVSHTVPIYEGYALPHAILRLDLAGRDLTDSLMKILTERGYSFTTSAEREIVRDIKEKLAYVALDYEQELETAKNSSSVEKSYEXLPDGQVIT

SEQ ID NO: 329307 - protein, 94 aa, Zea mays
  unsure (1)..(94): unsure at all Xaa locations
  Clone ID: MRT4577_63401C.1.pep
LYTGRPLFSFQIPFFLTFFIIFIFLPTYFLISFITFFLPSLLFLFLLFSTFIXPTREWLIXPSXXFLNNHKPPXYLTIKLKNXIPLYNTNNLXK

SEQ ID NO: 329308 - protein, 55 aa, Zea mays
  Clone ID: MRT4577_63402C.1.pep
KYGFPQIGVDLPDDFSFKNVRDPFPKRVFEINNVKAWTPVLKSVPFYAGGVHFPP

SEQ ID NO: 329309 - protein, 66 aa, Zea mays
  Clone ID: MRT4577_63403C.1.pep
RPGTGTRQEPHFILQTYDKNAPRVTATEDQRVPFPRLSGGSLVLSTEKAVDRRGRSHHHHHYPMVF

SEQ ID NO: 329310 - protein, 93 aa, Zea mays
  Clone ID: MRT4577_63404C.1.pep
IDLDMASTRRRLVRLETTTRGHEFNRARLSAKRHHGASPRPRLGDVLPDDADSKLNMVMIEEILVESPGVPCTQAEETAACADPITYGEKDTR

SEQ ID NO: 329311 - protein, 98 aa, Zea mays
  unsure (1)..(98): unsure at all Xaa locations
  Clone ID: MRT4577_63405C.1.pep
PGSFLPGGPTLFKQRFAAFPQDKFFKAPPPKALKKKIHRLPQVSHHHQVKAPPPGGPXIPXPPSXPXQASQNLLACEGPPFLKRKRGRXRRGSRPCSC

SEQ ID NO: 329312 - protein, 83 aa, Zea mays
  Clone ID: MRT4577_63406C.1.pep
HHGPTTLRAGQTRGIDPECKLPLSIPPYKTKHRKIKSRGRQRRFSDLLGTTSPSVLRPMAARPDNQPEHDRRHDSRKPPRPQL

SEQ ID NO: 329313 - protein, 110 aa, Zea mays
  Clone ID: MRT4577_63407C.1.pep
MSSSEVACTLAALILHDDGIPITSEKIATVVKAAGIKVEAYWPALFAKLLEKRSVDDLILSVGSGGGGAPAAAAAAPAAGGAAAAEEKKEEKKEEAKEESDDDMGFSLFD

SEQ ID NO: 329314 - protein, 73 aa, Zea mays
  Clone ID: MRT4577_63408C.1.pep
HDLVSTAATTAPHALGRRGHHVLVLLICRHRHFSQDTTSSSYLFVGTDTSRAPHLWPAEAENHLIKTPTVSYR

SEQ ID NO: 329315 - protein, 59 aa, Zea mays
  Clone ID: MRT4577_63409C.1.pep
LDVIVIVAFCLESASHIQGVITLVLGACDLKVSACLDTIRIFDASNYLHSTGVGLMQTG

SEQ ID NO: 329316 - protein, 60 aa, Zea mays
  Clone ID: MRT4577_6340C.1.pep
LQAAWKVQSSGSNEATMETTRCSLLKLHARYTCADDPTIITECSQAHIAMVAAPDLPSMI

SEQ ID NO: 329317 - protein, 315 aa, Zea mays
  unsure (1)..(315): unsure at all Xaa locations
  Clone ID: MRT4577_63410C.1.pep
MQMKQKVYELYKGTVERVTGPRTVSAFLEKGVLSVPEFILAGDNLVSKCPTWSWEAGDPSKRKPYLPSDKQFLVTRNVPCLRRAVAVEEEYDAAGAEVVLDDDEDGEGWLATHGLQASESKEEEDIPSMDTLDIGKVEEIKSIPSYFGASEKPDEEEDIPDMDTYEDTGDHSTATPQPSYFVAEEPDDDNILLTRTYDVSITYDKYYQTPRVWLTGYDEARMPLKPELVFXDISQXHARKTVTIEDHPHLLAGKHASVHPCKHAAVMKKIIDVPMSGGVEPEVDKYLFIFLKFIATVIPTIEYDYTMDVDLGSTS

SEQ ID NO: 329318 - protein, 311 aa, Zea mays
  Clone ID: MRT4577_63411C.1.pep
MQVKQKVYEFYKGTVERVTAPRTVSAFLEKGVLSVPEFILAGDNLVAKCPTWSWEAGDPSKRKPYLPANKQFLVTRNVPCLRRAISVEEEYDAAGAEVVLDEDGEGWLATHGVQASKTEEEEDIPSMDTLDIGRSDGIKSIPSYFSGGKDEEEEDIPDMDTYEDTGDNLAAAEPSYFIAEEPEDDNILHTRTYDVSITYDKYYQTPRVWLTGYDESRMPLMPELVFEDISQDHARKTVTIEDHPHLLAGKHASVHPCKHAAVMKKIIDVPMSGGVEPEVDKYLFIFLKFIATVIPTIEYDYTMDVDLGSTS

SEQ ID NO: 329319 - protein, 62 aa, Zea mays
  Clone ID: MRT4577_63412C.1.pep
VLRCRLKHVPQSPTGFHQPRIVSPFQVRLKATGQVRCFLRPEQNSGGRPTRPAAGIKTLLAP

SEQ ID NO: 329320 - protein, 86 aa, Zea mays
  unsure (1)..(86): unsure at all Xaa locations
  Clone ID: MRT4577_63413C.1.pep
YDGLVYAKACLGGLNGVLYIVQXDFLNYQQLHIXLFAAKVVLDKKGVDQVYGMGELTXMPKEGGVKRKGXECKSSIERGIRFAHGN

SEQ ID NO: 329321 - protein, 52 aa, Zea mays
  Clone ID: MRT4577_63414C.1.pep
MAADNSEKAGTLQQAPRRGRGGQQHEQDQTGNTTPPTREPTESIDQCPVKTP

SEQ ID NO: 329322 - protein, 97 aa, Zea mays
  Clone ID: MRT4577_63415C.1.pep
MGGFVKTHKTNAYFKRFQVKFKRRRAGQTDYRARIRLINLDQNTYSSPKYRFAEGLSDTVMTGQRLPVSMRGPRRDQEHVQGRDSQGPGGHVRLFWG

SEQ ID NO: 329323 - protein, 187 aa, Zea mays
  Clone ID: MRT4577_63416C.1.pep
MATERESKTFLARLCEQAERYDEMVTYMKEVAKVAGELTGDERNLLSVAYKNVVGTRRASWRIISSIEQKEESKGTEKHVGTIRDYRQKIETELEQVCQDVLNVLDDSLIPKAESGESKVFYHKMKGDYHRYLAEFASGEKRKVAATAAHEAYKTATDVAQTELTPTHPIRLGLALNFLVFYYEILN

SEQ ID NO: 329324 - protein, 59 aa, Zea mays
  Clone ID: MRT4577_63417C.1.pep
GTFGLIYVHVNRKGEAACVAVLILRGLPTVQWRDYYTHVDRSKIIYHTDCPIDHPANHY

SEQ ID NO: 329325 - protein, 72 aa, Zea mays
  Clone ID: MRT4577_63418C.1.pep
MNGARGKHHQHLHRLPQQQQQALLMQHALQHQQHQHYQSGVLPAAAAAAMTHMEPVFNGNLPPGSDPSTCRS

SEQ ID NO: 329326 - protein, 139 aa, Zea mays
  Clone ID: MRT4577_63419C.1.pep
LKACKGRTRLFRQCQGKEGVRMSAQVGDRGVEQLWCGTGRAKNRPGPVCFVTAGHEPPIHASRPPVGTNSNPIAYLLPWFVAYPSRRPYQSVSEWKGSPWASIIHVYIRRRRGSSSSSWFSLCASLLPGTVSRLHPVGY

SEQ ID NO: 329327 - protein, 99 aa, Zea mays
  Clone ID: MRT4577_6341C.1.pep
CLLGDTRLASIHWLIPPFFRSSTNCILWLAPHHLHDQHLSVLHLATVEEGVTPWKSCQGEGGAWEGSVASSKGGGAAAACRAREREIEKEEGSRESGVG

SEQ ID NO: 329328 - protein, 82 aa, Zea mays
  unsure (1)..(82): unsure at all Xaa locations
  Clone ID: MRT4577_63420C.1.pep
ISARDGVRRLRPLRPLLCSGRGGCTPRVLDLRRQQRLLLPRHDGRAIDRSIDRPKLARARCCCSWYDPGQWCGSDEXGPPAR

SEQ ID NO: 329329 - protein, 74 aa, Zea mays
  Clone ID: MRT4577_63421C.1.pep
KKKVFFLGPSNLLWRSKRTRWRFILRFKRKRTPQKGLEILLEELDSQTLGLYSNLIPSFVKRCSFNPFEVVFGV

SEQ ID NO: 329330 - protein, 94 aa, Zea mays
  Clone ID: MRT4577_63422C.1.pep
FTRPVLDRERSGSADSSYRGLDLITHDNNRHHSRGYSGSVNVWYGYCTRSQRRVTEMDPDALVNGDDMDKGGPMDHNSENWCADVVASEEEHHN

SEQ ID NO: 329331 - protein, 119 aa, Zea mays
  unsure (1)..(119): unsure at all Xaa locations
  Clone ID: MRT4577_63423C.1.pep
TINLIYYRAHNNPIDTNKSGGVAHARGALDTSATSTHTTGGCRCQQTTPAHLSPMSHQPSLGDLPHPVHLPPPDQLPPAVNMLXPCHVPTADHLMTTPCHYPIKAHKTQEHNQSHIFPN

SEQ ID NO: 329332 - protein, 59 aa, Zea mays
  unsure (1)..(59): unsure at all Xaa locations
  Clone ID: MRT4577_63424C.1.pep
DSDGVVTKKYTGIADCLTRVHKEEGIRAIWRGNLANCIRYXPTQALNFACRDAYKQIFC

SEQ ID NO: 329333 - protein, 121 aa, Zea mays
  unsure (1)..(121): unsure at all Xaa locations
  Clone ID: MRT4577_63425C.1.pep
MSPVNVFGHPMLTNVARVLLFLEEXVGAEYELVPVDFVAGEHKRPQHVQLNXQTVIRQWVTVSGSGDDLXRDATXPFAKMPGVQDGDLVLFESRAIAKYILHKYGGTAGLHLLGENSGIEE

SEQ ID NO: 329334 - protein, 229 aa, Zea mays
  unsure (1)..(229): unsure at all Xaa locations
  Clone ID: MRT4577_63426C.1.pep
MSPVKVFGHPMLTNVARVLLFLEEVGAEYELVPVDFVAGEHKRPQHVQLNPFAKMPGFQDGESLHISTHIKSRAIAKYILRKYGGTAGLDLLGENSGIEELAMVDVWTEVEAQQYYPAISPVVFECIIIPFIIPGGGAAPNQTVVDESLERLRGVLGIYEARLEKSRYLAGDSISFADLNHIPFTFYFMTTPYAKVFDEYPKVKAWWEMLMARPXVQRVCKHMPTEXKL

SEQ ID NO: 329335 - protein, 644 aa, Zea mays
  Clone ID: MRT4577_63427C.1.pep
MISARTAAASPASLWKRGGRSEGGGSCDGCRTYRNTLRRAAAAKVRALPSRAVEAVKMGSAAEVEQEEAEVAAAAAGVVVEDHYGEDSATEELPIMPWAFSVASGYTLLRDPHHNKGLAFMEKERDAHHLRGLLPPAVVPQELQIKKIMHNLRQYQVPLQRYMAMMDLQERNERLFYKLLIDNVEELLPVVYTPTVGEACQKYGSIFRQPQGLYVSLRDKGKVLEVLRNWPHRNIQVICVTDGERILGLGDLGSQGMGIPVGKLALYTALGGVRPSACLPITIDVGTNNEKLLNDEFYIGLRQKRATGEEYHELMEEFMAAVKQIYGEKVLIQFEDFANHNAFNLLAKYSKSHLVFNDDIQGTASVVLAGLLAALKVVGGTLAEHTYLFLGAGEAGTGIAELIALEISKQTSAPIEECRKKIWVGGGGGLIVDSRKNSVQSFKKPWAHEHEPLTTLYDAVQSIKPTVLIGTSGVGRTFTKEVVEAMASFNERPIIFSLSNPTSHSECTAEEAYNWTQGRVIFASGSPFGPVEYDGKVFVPGQSNNAYIFPGFGLGLVISGAIRVHEDMLLAASEALAAQATQENFDKGSIFPPFTNIRKISARIAAAVAAKAYELGLATRLPPPRDLVKYAQSCMYTPVYRNYR

SEQ ID NO: 329336 - protein, 52 aa, Zea mays
  Clone ID: MRT4577_63428C.1.pep
LASRGRSSSFGGLLTMASFSFNVILVQKLKSIIDFNLMKINYIKEKRNLLGP

SEQ ID NO: 329337 - protein, 498 aa, Zea mays
  Clone ID: MRT4577_63429C.1.pep
MSTCAADLAPLLGPAAANATDYLCGQFADTASAVDATYLLFSAYLVFAMQLGFAMLCAGSVRAKNTMNIMLTNVLDAAAGALFYYLFGFAFAFGTPSNGFIGKQFFGLKHLPRTGFDYDFFLYQWAFAIAAAGITSGSIAERTQFVAYLIYSAFLTGFVYPVVSHWFWSADGWAGASRTSGPLLFGSGVIDFAGSGVVHMVGGIAGLWGALIEGPRIGRFDHAGRSVALKGHSASLVVLGTFLLWFGWYGFNPGSFTTILKSYGPAGTVHGQWSAVGRTAVTTTLAGSVAALTTLFGKRLQTGHWNVVDVCNGLLGGFAAITAGCSVVEPWAAVICGFVSAWVLIGANALAARFRFDDPLEAAQLHGGCGAWGVLFTGLFARRKYVEEIYGAGRPYGLFMGGGGKLLAAQIIQILVIAGWVSCTMGPLFYALKKLGLLRISADDEMSGMDLTRHGGFAYVYHDEDPGDKAGVGGFMLKSAQNRVEPAAAVAAATSSQV

SEQ ID NO: 329338 - protein, 137 aa, Zea mays
  unsure (1)..(137): unsure at all Xaa locations
  Clone ID: MRT4577_6342C.1.pep
HYLSTLATKILTLLARAALSVCASYASINPQXTLAHSDIIPKFLRPVTTTVFEHRAAQAYRLQHTTSTSILHHPIIPLQHQSLTHLTIQTNYTQYLEPTLPAMTPLDVVNPEYYLQHQVLAFNQQXLSNVTAYHQLH

SEQ ID NO: 329339 - protein, 59 aa, Zea mays
  Clone ID: MRT4577_63430C.1.pep
GIRNCVKILQIVQEHMQFSRYHSTGLGTNLYPNALPLKKDRLYSTYFMAHTKGVWIYQG

SEQ ID NO: 329340 - protein, 117 aa, Zea mays
  Clone ID: MRT4577_63431C.1.pep
PAVPGLLAPKIKRLPPPALLTQGTRSPWPPHRPPPPCCARRPWPGSAWRRLPAGRAQNGKTHFDAGDERAKEFAALLKSNDPVGFNLVDVLAWGSLGHIVAYYILATSSNGYDPNFF

SEQ ID NO: 329341 - protein, 43 aa, Zea mays
  unsure (1)..(43): unsure at all Xaa locations
  Clone ID: MRT4577_63432C.1.pep
XXKGLWGREASHYFCFYYKTRPRSVRYMYQYYIKTNHHFLCCS

SEQ ID NO: 329342 - protein, 61 aa, Zea mays
  Clone ID: MRT4577_63433C.1.pep
HIIKLISPPLMKTKVSCVSFESKCSACISSMNGLKPSGELSSSVIEIEVGMHTKFEDGAFP

SEQ ID NO: 329343 - protein, 145 aa, Zea mays
  Clone ID: MRT4577_63434C.1.pep
MAATSTAAAVLCPPSVAGLRLAPSPGRARVSFRAAPAPARRSVAARAELSSALVISLSTGVSLFLGRFVFFNFQRENVAKQVPAQNGKTHFDAGDERAKEFAALLKSNDPVGFNLVDVLAWGSLGHIVAYYILATSSNGYDPNFF

SEQ ID NO: 329344 - protein, 107 aa, Zea mays
  Clone ID: MRT4577_63435C.1.pep
GIKTIRGGLGTRGSQEDWVPPQSPPILPESQGPKSALKLKRNNRYLWGQTTGLKHKHMGFCIIPGGGIRVSGDPPPGGYEKFFFPGCPWGRGPGGGPSWVARGGGGG

SEQ ID NO: 329345 - protein, 54 aa, Zea mays
  Clone ID: MRT4577_63437C.1.pep
RPGPPLFVVNRIFVARVIPRKRPSQVNPLKVHLYFRPRVFFLNKQACPLKKRVN

SEQ ID NO: 329346 - protein, 38 aa, Zea mays
  Clone ID: MRT4577_63438C.1.pep
MEPRAGTDFSCLSWLLFRVSAYDDDDTHNLLLLAAGAL

SEQ ID NO: 329347 - protein, 75 aa, Zea mays
  Clone ID: MRT4577_63439C.1.pep
MSARPCPCRCGLGAAHHAHAGASPCSSGVPSTSSSTSMEPRAGTDFSCLSWLLFRVSAYDDDDTHNLLLLAAGAL

SEQ ID NO: 329348 - protein, 126 aa, Zea mays
  Clone ID: MRT4577_6343C.1.pep
PAGTAHTHTYALPPSALDRTARALRSTPSSSSSGIANRRTPSTRPQVTAHPLLQVCPRGRGWRFCGHDRAHQDNLRGGAGTLIAGPPGGDMVAEEEARLLQGGIWWTQGGEWKPSCTQHAIEGYRA

SEQ ID NO: 329349 - protein, 70 aa, Zea mays
  Clone ID: MRT4577_63440C.1.pep
LGVNYGCSHVGLLCVQDPHNVRPLRSSMVLLLEYDPGPLLTLHERVYWLVRNFAFAGLYACIHSVSESHE

SEQ ID NO: 329350 - protein, 84 aa, Zea mays
  Clone ID: MRT4577_63441C.1.pep
TSPTLMGPRLSRGEGPWGWGPPTRGGWQEPGCFPRRIHSRWLLRIWTPFISCSIWWPIWWQCCPSWDKRNSIQDEGWGLLTKSE

SEQ ID NO: 329351 - protein, 103 aa, Zea mays
  unsure (1)..(103): unsure at all Xaa locations
  Clone ID: MRT4577_63442C.1.pep
LAQCLQTTNDMVQSSDVEEAAGPSCAHSIRPALPKTHWQTIAHGVRXTGAELAATGICEHYSVMVGIEFCGXYTPXRHNDCGRLYEALMDHIQDNTLIGHLGG

SEQ ID NO: 329352 - protein, 151 aa, Zea mays
  unsure (1)..(151): unsure at all Xaa locations
  Clone ID: MRT4577_63443C.1.pep
NIIRHKNKNPQARDPHGPPGPTGTGGRGGGXGNRGRGGPTYPKGKETGKGFRGPGPKAQNRKNPEKENGEGARGKRAKERRKNTSFHDPSGPRAPGGGGGEQKQDPNQNETGRGGGPGKPGPGPGGEPAXKRGGEKSPGERGEKGVPGGKC

SEQ ID NO: 329353 - protein, 160 aa, Zea mays
  unsure (1)..(160): unsure at all Xaa locations
  Clone ID: MRT4577_63444C.1.pep
ITQVAXAPLSPYSQQQQFFPFTHLFTLXPAAYSTPHLFPFTQXXXAYSQQQHLFPFTQLAALTPAAYSQQQILLPFSELAAASRASFLTQPQLPPFHKQFAANPAPLLQLPQLFPLVPPALPNPAASYQQHIIGGPSFRLIISCNSIIKFFGVMYVPPQK

SEQ ID NO: 329354 - protein, 74 aa, Zea mays
  Clone ID: MRT4577_63445C.1.pep
PADGTRTSLGGRCFYLPRMRTEPTREATHTRLRTACIGSRSAAESHGPPTPRRGRCLTGSLAARAPTRGSRPSA

SEQ ID NO: 329355 - protein, 44 aa, Zea mays
  Clone ID: MRT4577_63446C.1.pep
SNKTLTLYQLPSHSYHEPQQNKLTKLQNYTSYLRILLNCPKKLT

SEQ ID NO: 329356 - protein, 74 aa, Zea mays
  Clone ID: MRT4577_63447C.1.pep
HVQTRARHSFNLHPRCEVVSSALELEAQSGPTALRPLRLMQTSKASLPRYKLLRSFRSLRMRAFTLTRACPGLA

SEQ ID NO: 329357 - protein, 60 aa, Zea mays
  Clone ID: MRT4577_63448C.1.pep
KPANEFNLSYPIKKLLRRMHELVRLVTLKRTPPLLFNLILFFYFFFFFFFFFFFFIFRYF

SEQ ID NO: 329358 - protein, 43 aa, Zea mays
  Clone ID: MRT4577_63449C.1.pep
DIITIKERWYYGRQGVARGAVILISCPGRGEQVEGASDDTSNG

SEQ ID NO: 329359 - protein, 105 aa, Zea mays
  Clone ID: MRT4577_6344C.1.pep
CLLGGTRLASIHWLIPPFFRSSTNCILWLAPHHLHDQHLSVLHLATVEEGVTPWKSCQGEGGAWEGSVASSKGGGAAAAWGAREREIEREGGSRESGVGEGGRGN

SEQ ID NO: 329360 - protein, 254 aa, Zea mays
  unsure (1)..(254): unsure at all Xaa locations
  Clone ID: MRT4577_63450C.1.pep
XPRRAAIDKRKGVXGGRETPCPRGRKGAGAAPPVPAAVGETGCRGGGATAARVGESERRGLRKTEDDSRSRSSQARRQSGHSVSRAGSQAPHHCRTRRVTNLTTASRPLGQAASRAGLQAAPHQPPGSTAAEDGQTQRAAPHNTAHSTARSRQHRTTPHSTGTTAPGRRRRPQQSHSRWPGAHTAAASRCRRALPACRVGDLGLRGAGRREPGTIHQDGGRRTVSQEDATRLGFLWDLGLGVGRPDGCLSPQSI

SEQ ID NO: 329361 - protein, 91 aa, Zea mays
  Clone ID: MRT4577_63451C.1.pep
CAFRFASGLLGSPLPAPPSVSSLGCRGSGGPSAGRFRALLRAAPLVGVGSLGSPPSVLGRGDLLLRCVVVVLSARFFYLFRPASLSPPVCT

SEQ ID NO: 329362 - protein, 120 aa, Zea mays
  unsure (1)..(120): unsure at all Xaa locations
  Clone ID: MRT4577_63452C.1.pep
MEMATIPGDLIWHIVRKNNILLVKQFGNSNANVQFTNEPNNLYNMHSFKHYELANKKTVTIHSAAXRTXTVDLCTNKTNKQNAPAKLMHKSEMLKEHRKMAKAVKNQVGDNYYRPDLTKP

SEQ ID NO: 329363 - protein, 192 aa, Zea mays
  unsure (1)..(192): unsure at all Xaa locations
  Clone ID: MRT4577_63453C.1.pep
HAGGPAEKGGRNFMIDFMMGGVSXAVSKTAAAPIERVKLLIQNQDEMINSGGGSEPYXGIVDCFKRTIKDEGVSSLWRGNTANVIRYFPTQALNFAFKDYFKRGCNFKXDRDXYWKWVAGNLGSGGAAGASSLCFVCSLGYARTRWGNDAXAAQGXGERXFNGLVXVYRETLKADGIAXLYRGFNISCVGII

SEQ ID NO: 329364 - protein, 61 aa, Zea mays
  unsure (1)..(61): unsure at all Xaa locations
  Clone ID: MRT4577_63454C.1.pep
FRKKKXXXKKKFSKKKKKKKKKKKKKKKKKKKKKKKKKKKKKKKKKKKKKKGPLGRGRFKN

SEQ ID NO: 329365 - protein, 183 aa, Zea mays
  Clone ID: MRT4577_63455C.1.pep
MVTAGALHAGSRVLLPIRRSFSTPWSHVRSHLHSTKPPSAPLPPPPPPPPSSHAASTRFTPAFTPTTRRSGSIGSGVVAWYLGSIEARPLLTKSITAATIYTVADLTSQMITLPAEESLDLTRTLRMASYGMLFSGPSLHYWFNFISKVVPKKDVVSTFKKMFLGQAAYGPTINCIFFSYNAG

SEQ ID NO: 329366 - protein, 29 aa, Zea mays
  Clone ID: MRT4577_63456C.1.pep
STLIYYPSSNTTKLTIQNSFHMMNLHHST

SEQ ID NO: 329367 - protein, 59 aa, Zea mays
  Clone ID: MRT4577_63457C.1.pep
FNWYYRLTLCKIDWQGMTLNIGWLALYQSQALRMWLLVWSLCDIVAPQHKPIRVSACPE

SEQ ID NO: 329368 - protein, 60 aa, Zea mays
  Clone ID: MRT4577_63458C.1.pep
YCIVFRGFKGVGPKLGTPFIYILYEFTWCTFKATTIQARTAISAQSIKPATISYKSWLIL

SEQ ID NO: 329369 - protein, 40 aa, Zea mays
  Clone ID: MRT4577_63459C.1.pep
YIPSNIYIYIRHNQKYSGIKEFYKVMLGMNNFINNIYMKH

SEQ ID NO: 329370 - protein, 129 aa, Zea mays
  unsure (1)..(129): unsure at all Xaa locations
  Clone ID: MRT4577_6345C.1.pep
RLSSTXHNANRGCFXGLRLPLSDLQFSPSHHYCTSTSHDKTARIRSIDKIHPLRIMAGHHSHIDCVHCHLNSNYIATDSSDKTLKLWDVQTGECIQMSIGHRSIDLSLPMSPDGQSITYGDEHRTIMIW

SEQ ID NO: 329371 - protein, 87 aa, Zea mays
  Clone ID: MRT4577_63460C.1.pep
ECCKKRRKSSIRLLVGLSTRFRRTFFWDNSFRQYLAVAVIAQWLLVVFFTLPGSFPPAASFSIKGRSRVRAVRLFECSSVFGFGNTS

SEQ ID NO: 329372 - protein, 69 aa, Zea mays
  Clone ID: MRT4577_63461C.1.pep
NPLPPTWLYYICSVSSAFQLTMFFASSARAEVLLFSRPNPGLLSSLTLRNPEILFYRNIILFLLYFLFI

SEQ ID NO: 329373 - protein, 365 aa, Zea mays
  Clone ID: MRT4577_63462C.1.pep
MISAADLYHVMTAVVPLYVAMILAYGSVRWWRIFSPDQCSGINRFVALFAVPLLSFHFISTNNPYTMNLRFIAADTLQKLMVLAMLTAWGHLSRRGRGSLDLDWTITLFSLSTLPNTLVMGIPLLRGMYGDFSGSLMVQIVVLQCIIWYTLMLFMFEYRAARLLIAEQFPGNAAGAIASIAVDPDVVSLVDHGRGDAIETEAEVREDGRIHVTVRRSSASRSDVVYSRRSVGGFSGATPRPSNLTNAEIYSLQSSRNPTPRGSSFNHTDFYSMVGRSSNFGAADAFGAVRTPRPSNYEDDASRPKYPLPGVAGHYPAPWSARKAATNGHAKGEDLHMFVWSSSASPVSDVFGGGAPDYNDHAGAV

SEQ ID NO: 329374 - protein, 101 aa, Zea mays
  Clone ID: MRT4577_63463C.1.pep
GGLSGGGQSPLRGPVPGKGGPPPKRGPGPRSGPWPPLLGPYKKPHPWPTWKPPGQKRAQCQFGKPVAQKRPKAPCHRGGGKTLPWAFGKRQPWGRGPWGGG

SEQ ID NO: 329375 - protein, 372 aa, Zea mays
  Clone ID: MRT4577_63464C.1.pep
MITGTDFYHVMTAVVPLYVAMILAYGSVRWWRIFSPDQCSGINRFVALFAVPLLSFHFISTNNPYTMNLRFIAADTLQKLMVLAMLTAWSHLSRRGSLEWTITLFSLSTLPNTLVMGIPLLKGMYGDFSGSLMVQIVVLQCIIWYTLMLFMFEYRGARMLITEQFPDNAGAIASIVVDPDVVSLDGRRDAIETEAEVKEDGRIHVTVRRSNASRSDIYSRRSMGFSSTTPRPSNLTNAEIYSLQSSRNPTPRGSSFNHNDFYSMVGRSSNFGAADAFGIRTGATPRPSNYEDDASKPKYPLPVVNATSGAGAAAAAAHYPAPNPAVAAAPKGARKAATNGQAKGEDLHMFVWSSSASPVSDVFGGGAPDYND

SEQ ID NO: 329376 - protein, 83 aa, Zea mays
  unsure (1)..(83): unsure at all Xaa locations
  Clone ID: MRT4577_63465C.1.pep
TQPAGAQTQHRHPTPTKATKDRPPQNXEERPGTERNTPPGGHRRTAASPATETERTHQPRQTARPRQGSGPPPHPQGRPTXPR

SEQ ID NO: 329377 - protein, 466 aa, Zea mays
  Clone ID: MRT4577_63466C.1.pep
SHLTPTSPSTPGLPHRVRADTQGPPGKRKRASVTHAPMADVSPLLPPGKPPATTARFARCASSANDELRSFRACLAWLCVDHSSSPRVAAVGSWAVFLLLAVAAPAAVRLLGTAPPRPCAGEVQVSLTLAASLAYVCLRALLHRAGGLRRLLHLDSLRRDSEDVQAGYAAQLARSFRVLACFVLPCALAEAAYKAYWYRAAAACAVEVASWVYRVALFFMVCVLFRVICYLQILRMVGFAREFGRFADVATVLQHHRRIREQLRKISHRYRKFIVCSLVLVSASQFAALLATTRPHAIVNLATAGELALCSVSLVAGLLMCLYSAAKITHKTQAMTSVAAAWHADATVHAFDNDQENPDPDLPPTAGYLAPANAYRVAAGDESGSGGDDDDDSRSECSSLDDPKYVPFQANNISFQKRQALVTYLENNRAGITVYGFVVDRAWLHALFMIEFSLVMWLLGKTVGIS

SEQ ID NO: 329378 - protein, 91 aa, Zea mays
  Clone ID: MRT4577_63467C.1.pep
FPSTSFFSYQLRPAISPGDALSHKVRTFHCASFIADQPSPYLPNISPSEMQYNADDNIAQIVPNILMDPLNMICCDFGPFFPHISTKEPIW

SEQ ID NO: 329379 - protein, 123 aa, Zea mays
  Clone ID: MRT4577_63468C.1.pep
GDNAAAMRYTEVRMTKLAHELLADLHKETVDWVPNYDGTEMIPAVMPTRIPNLLVNGSSGIAVGMATNIPPHNLGEVIDGCLALIDNPELTVDELMQYIPGPDFPTAAIINGRAGIIEAYRTG

SEQ ID NO: 329380 - protein, 80 aa, Zea mays
  Clone ID: MRT4577_63469C.1.pep
LSSRCYSASFFDLEIPVSMCSNQTSTLFNLTPRPECLLPTRSICGTGRKKLFIKHQKPPLESGVNIYPNQCEPWTCQMSH

SEQ ID NO: 329381 - protein, 76 aa, Zea mays
  Clone ID: MRT4577_6346C.1.pep
HQRTSKYMAHAPVYLICPLNVKAHRTGMELTTKLSEQTHSTSGTIPHYKHMSDDSMATCKLRTGAMFFFTNPKELP

SEQ ID NO: 329382 - protein, 95 aa, Zea mays
  Clone ID: MRT4577_63470C.1.pep
KAIGNSPSFFTMPPPYHHNIGEQQEGGGHESHPFWATPYFKPHEPPPPLCFMPTTFGNYYYTYLRLKGKVLFFPPFCPKKVKGKNKLEKKKKYFL

SEQ ID NO: 329383 - protein, 76 aa, Zea mays
  Clone ID: MRT4577_63471C.1.pep
QIDHQLITHRQCNAMPLPYIHHAIISRSATCFPILSQMNNSDVRCMIYYRLNTSAPVTRLPKPTPVTTRNLPAWPV

SEQ ID NO: 329384 - protein, 440 aa, Zea mays
  Clone ID: MRT4577_63472C.1.pep
MGSFGMNWNQKDPMVWDWEHLVPSVSNAVTRHGSANSSGGTLTSNSELGHGSSKSSISASIDSPSGVGNSLEFNFAAVERHVKNTGTNGRVDDSGNSPSSMIAFNQGEPLISLKLGKRAYFENACGGQDAKVSAASDVTSAATVVKKTKVSQQNAKNWYCQVEGCKVDLSSAKDYNRKHKVCVVHSKATKVVVAGLERRFCQQCSRFHGLAEFDQNKRSCRRRLMHHNARRRKPQADTISFNSSTMFYDTRQRTNLFFSQPLYGQVRSNAGSSWDNLGGLKFMETKHPPVHPTKTASPDELHFSALQITSAAAHTGHHHDLDGFMAFKGTSTKVLNQGVEAWAAASSSNNGGPEGGRALSLLSDGSWGSSSAVIQQPTSHADAGALLPPFATVAVSNAAAAAAGHPLDPSPGRFWPQDDHPPLVDGPATQIPELAHLRIW

SEQ ID NO: 329385 - protein, 70 aa, Zea mays
  Clone ID: MRT4577_63473C.1.pep
CQVAVFVSEFTVFCFCKKKKKKNKKKKKKKKKKKKKKKKKKKKKKKIKKKKKKKKKINSSLARNHPKGKF

SEQ ID NO: 329386 - protein, 153 aa, Zea mays
  unsure (1)..(153): unsure at all Xaa locations
  Clone ID: MRT4577_63474C.1.pep
PLPGSXRPPQMGGNPKFVVCSFPVPILLYMLFPGFPPLLNLVFGGKNHLGPETGNLSGNFGWPVFIKKPKVFFKNLDSLRPFMIVLSPSFWGICFFGPPLPVGFFSPGPVNFGFGPFFCKSPPQTGKCFFSPPPCLVVFPLFLDCPPCSVVVP

SEQ ID NO: 329387 - protein, 142 aa, Zea mays
  Clone ID: MRT4577_63475C.1.pep
SIACSRIGLELSISSEDFGSVLRAFKLLLKNWKFKTALMPSAPREKDPQVTTSPATGPPRVHTLMPVNATGSPAMDLKLAQPSCPGHLVLLHPCAPWPLHLLVPLSLPHQNVVHSLTEFQILSINGEQCLLSLFYLLMGRML

SEQ ID NO: 329388 - protein, 70 aa, Zea mays
  Clone ID: MRT4577_63476C.1.pep
CQVAVFVSEFTVFCFCKKKKKKNKKKKKKKKKKKKKKKKKKKKKKKIKKKKKKKKKNFFFLGRNNPKGKF

SEQ ID NO: 329389 - protein, 91 aa, Zea mays
  Clone ID: MRT4577_63477C.1.pep
VKLSVLGSTEGYGMQNQRPQKRVKVRFARQGRWMVTTSASVISRGSRPGWRSSRRCTKRSGSYGGYASCQGLHATSPSPPPGGPPIWVGDW

SEQ ID NO: 329390 - protein, 96 aa, Zea mays
  Clone ID: MRT4577_63478C.1.pep
KGSRAAAVGYGYAYVWDSTRLASSSDAGPLDDAPYGGEPCAPRHTRARDRHSGLRDLPRWRGRLQPALPPLRGQPPLNRQQDTRLGKELAATITKQ

SEQ ID NO: 329391 - protein, 60 aa, Zea mays
  Clone ID: MRT4577_63479C.1.pep
LQHKKKKKKKKKKKKKKKKKKKKKKKKKKKKKEGWYLARTAEWKGKFLQISTKLAGRQKG

SEQ ID NO: 329392 - protein, 109 aa, Zea mays
  unsure (1)..(109): unsure at all Xaa locations
  Clone ID: MRT4577_6347C.1.pep
SSSXGSERLLVVPFPRIAPRKRERTPLPYSASGGRQPSLRTRGLTGRRSTIDIDENVTWSFILCWHTKHRGTLPLNSGPDRDDVITELRPRSLPCKSATRTQYLPQSSC

SEQ ID NO: 329393 - protein, 242 aa, Zea mays
  unsure (1)..(242): unsure at all Xaa locations
  Clone ID: MRT4577_63480C.1.pep
MVRGSLGRLASRTLSVAGKWQHQQLRRLNIHEYQGAELMGKFGINVPKGAVVGSVQEVKEVLKNVFPSEKEIVVKSQILAGGRGLGTFKSGLKGGVHIVKAEEAESLAAKMLNQVLVTKQTGPQGKVVGKVYLCEKMSLVNEMYFAITLDRKTAGPLIIACAEGGTSIEDLAEKFPDKIVKVPVDVFKGITDEDAAKVVDGLAPKTADRQSSIEQIKKLYELFCKTDCTMLXEINPLAETAE

SEQ ID NO: 329394 - protein, 74 aa, Zea mays
  Clone ID: MRT4577_63481C.1.pep
CRRSCLFFRCRNYLSFNAQSSRSYRISAHQLQISVSVVCAAERAQYTAACHSTPRGIALLSMGPRAQDKKGPVL

SEQ ID NO: 329395 - protein, 59 aa, Zea mays
  Clone ID: MRT4577_63482C.1.pep
GKGLSIPIPVPHRRREVRIRAPPTLPPDMADTCTYQILVRLLHGRTTCLRLSTPTDSGA

SEQ ID NO: 329396 - protein, 55 aa, Zea mays
  Clone ID: MRT4577_63483C.1.pep
INMYQFISVLIVANFFLRYWVGLYMWCSFICNYCVKIFCIAVATHGHLTSNCLIF

SEQ ID NO: 329397 - protein, 291 aa, Zea mays
  unsure (1)..(291): unsure at all Xaa locations
  Clone ID: MRT4577_63484C.1.pep
KDEHAFLIRQLFQLKQTETVSDYIDQFAHLIDQLNAYQTVNVPLYYTMKFLEGLWHDIKSVVMIQRLRDLDTAFVLAQLQEEVADASKNHDARRWEGGVSSRPYSKGPMPLPPPPVXRLTSTSSASGRQXKSFDIPKPATADRIANLYAYRKAQGLCYKCGLQYSRGHKCAETVQLHLVEEMWQLMDLSDSDDSHDVPPAQXELYPLVIXAVDGSLAPKTIKFLGSVQGIEVLILLDSSSSHTFISASVAAQLHGCTTVPHRLSVQVADGSRLTCTSELVNAVWFLNDYQF

SEQ ID NO: 329398 - protein, 57 aa, Zea mays
  Clone ID: MRT4577_63485C.1.pep
SARAHTEPMIISNRTMKQGGGNMRHWGQNPTGATIKRPPTPCTYIQSCTELGTNYNL

SEQ ID NO: 329399 - protein, 89 aa, Zea mays
  Clone ID: MRT4577_63486C.1.pep
KRPSTLGKFKAGLAKHRKQHPPPGGPCLMPPKRRKTPQKSLQLLSLSTAFFVSVFRGARGNTLKGAVFYPKTGKPPGGKLGPMSGGFVF

SEQ ID NO: 329400 - protein, 57 aa, Zea mays
  Clone ID: MRT4577_63487C.1.pep
SARGGLPDFFINHRPDPAGGPAVPLASSIRPWRHNGAGCIPWEIVIRLQRHSTYQPE

SEQ ID NO: 329401 - protein, 53 aa, Zea mays
  Clone ID: MRT4577_63488C.1.pep
LINMANSGGSSPWMVVFLAALLIIAPKFCCVFSKIMWCRSQSACIPCNLVHAF

SEQ ID NO: 329402 - protein, 462 aa, Zea mays
  Clone ID: MRT4577_63489C.1.pep
MARFLKGIRPKLKTILASQDFLSFLHLSNKAIQVERAREEENGHLKRKFQVLRAQQQDRHQRIRSFGFPPKGPSFNKPAGPTPSCFSQQGQSSLQAPSVASNQPPANAYWHCGDPSHYKNNCPQLKTFVPTYSNSVNGPKSAPAPASKAPSSNSQLSKTQSTLKRLSKPREIDVILGMDRLTKHNGVISCTDKIVLLTEHQGKSVSCQAQPPTQDPMVFNLAAESISVVEEFMDVFPEELPGMPPEREVEFYIDLIPGTAPIAKRPYRMAPTELAELKLQIAELQQKGYIHPSSSPWGAAVLFVTKKDGSMRMCIDYRSFNEVTIKNKYPLPRIDDLFDQLQGAKYFSKIDLRSGYHQLRIKEADVQKTTFVTRYGQYEFTVMPFGLTNAPAFFMNLMNKVFMEELDKFVVVFIDDNLIYSKSRKDHEHHLWIVLGRLRAHKLYAKLFGNGRILLSFYQRVL

SEQ ID NO: 329403 - protein, 49 aa, Zea mays
  Clone ID: MRT4577_6348C.1.pep
QFTKEQQAHQLMSNIRTPHQTDTIWYYFESVTSTILTEDTCSQNVCYHT

SEQ ID NO: 329404 - protein, 123 aa, Zea mays
  Clone ID: MRT4577_63490C.1.pep
MSLPYKQDLPPSGGFNPIKYKRNLPTKGPSGAIIFGAVFAVCTFGFWRVGLGNLEKRELQRERVWSRIHLTPLLLAESDRDVYRREQAALAREKEIMKDVPDWEAGKSSYHTKRYTPNTIVVI

SEQ ID NO: 329405 - protein, 174 aa, Zea mays
  Clone ID: MRT4577_63491C.1.pep
SASASPAAVAAMGRGKFKGKPTGRRNFSTPEEIAAGTSGRPRTFKKKEEEEDEEEVEREESEEESEEDSDEKTKHKGTEGIIQIENPNLVKAKNIKAKEVDFGKTTELSRREREELEKQKAHERYMKLQEQGKTEQARKDLERLALIRQQRADAAKKREEEKAAKEQRKSEARK

SEQ ID NO: 329406 - protein, 57 aa, Zea mays
  Clone ID: MRT4577_63492C.1.pep
GRGETVPWLRTFRCVGMFFDSTHLLSGLALFPLSQKFSELIHSAYVLPLTDGLTLVS

SEQ ID NO: 329407 - protein, 202 aa, Zea mays
  unsure (1)..(202): unsure at all Xaa locations
  Clone ID: MRT4577_63493C.1.pep
TRVAGDNKESASKRKRGGPGGLNKICAISPELQTIVGETAMSRTQIVKQLWAYIRQNNLQDPDDKRKIICNDELRVVFETDTTDMFKMNKLLAKHITPLDPKKISXEVKRMKAPTVAPQPPPINQPSVVISDALAKFIGTDGTFPQDDALKYLWDYIKANQLEDVINGSILCDSKLQELFGCESIPMSGLSEMLGHHFIKKT

SEQ ID NO: 329408 - protein, 103 aa, Zea mays
  Clone ID: MRT4577_63494C.1.pep
VISSSSSKRKRGGPGGLNKVCAISPELQTIVGETAMSRTQIVKQLWAYIRQNNLQDPDDKRKIICNDELRVVFETDNTDMFKMNKLLAKHITPLDPSTDFYFF

SEQ ID NO: 329409 - protein, 34 aa, Zea mays
  Clone ID: MRT4577_63495C.1.pep
PAGEPCPAALPSALPGFLPWFSGSFGRLGSRPGK

SEQ ID NO: 329410 - protein, 111 aa, Zea mays
  Clone ID: MRT4577_63496C.1.pep
KKKLNPKNAFKNNPSNIRTPLKAEKFPSNFPLKKKKKIKNPFEGPISWLKKNNLFKLKNFKNKIKNFKGISNPIIGKIYKAKGGEMALFFEIKKNPPFVGNVLVPKIKKVN

SEQ ID NO: 329411 - protein, 135 aa, Zea mays
  unsure (1)..(135): unsure at all Xaa locations
  Clone ID: MRT4577_63497C.1.pep
GSKWVALALLNIAASATFTXHTNGGCGXQPPSPDDVPPTMHMPSSVHLGPXEHVPPPVHLTTSVHLPPTPHVPASGHVXPYYAHYHTQQSLPYPHPQQHPCLCQQPHPIQYQLQENCGDGMTPILXQRVQYLMHH

SEQ ID NO: 329412 - protein, 104 aa, Zea mays
  unsure (1)..(104): unsure at all Xaa locations
  Clone ID: MRT4577_63498C.1.pep
LVAVLLPSCWLSSLGLPGSRGLALVGPSARRSGFPAAPSGWVWWLPLLLSXSLSSWASWSSPGXFPSLGLLAVLCRRFAVLGVLYGICCPSCPPCFGCVVVFNP

SEQ ID NO: 329413 - protein, 45 aa, Zea mays
  Clone ID: MRT4577_63499C.1.pep
FISLVIKLPILVLPRYDPETFRAPAKIRARPTGSSRIPSLRRRAC

SEQ ID NO: 329414 - protein, 65 aa, Zea mays
  Clone ID: MRT4577_6349C.1.pep
PTKGSFYQNTSFPDITAFRRPGQEVTFANQVGFRPKRPGVGKLLPSTLRNILGANEGKPAQGNHA

SEQ ID NO: 329415 - protein, 123 aa, Zea mays
  unsure (1)..(123): unsure at all Xaa locations
  Clone ID: MRT4577_634C.1.pep
MTMRGLLRCVSTGTCRVVLGVVAXAGASVAGGXPVGNVPVEVGAEGEDTQRFVVPVELLGRPPIAEMLXRRAAHEYGYARRGPPLHIPCLVAAFHRLLFVLVGTTTVVGPDGGLTLACFAVVV

SEQ ID NO: 329416 - protein, 88 aa, Zea mays
  Clone ID: MRT4577_63500C.1.pep
MAAPAKASWMVVMSVGTVEALKDQAGLCRWNYTLRSIHRAAKANVRSGVSQGNKQLPASVSAVAERRPAEKAEEGLRTVMYLSCWGLN

SEQ ID NO: 329417 - protein, 100 aa, Zea mays
  unsure (1)..(100): unsure at all Xaa locations
  Clone ID: MRT4577_63501C.1.pep
RVAKCSFSTYRLPGRVICPVSLGCHXWHRDHQSRHWSLRYRHIMFIRVLYDPHPYPFYCYLAISSHAYDIHLPLWTITILTQEPDAGVRLPMLLMLELLR

SEQ ID NO: 329418 - protein, 85 aa, Zea mays
  Clone ID: MRT4577_63502C.1.pep
QGRSSKSTKVGDIMNWKKTRLMTVNSDTKGLQAMQLMTENRVRHIPVIDRTGILWIGSIGDVVRAVVGEHREELNRLNDYIQGGF

SEQ ID NO: 329419 - protein, 133 aa, Zea mays
  unsure (1)..(133): unsure at all Xaa locations
  Clone ID: MRT4577_63503C.1.pep
MDDLVTMFPHLSHSRSVTLLFLFLTTAFLLVGCSRKSGAVMLAVLRWLAAPVLTLPWHRASGGRGTRRGLSVQVTDRAXARXALVQHXAAFLDRPTGAVPSTILTRNRDYNILSGPDGAYWRAARRNVSTGVL

SEQ ID NO: 329420 - protein, 56 aa, Zea mays
  Clone ID: MRT4577_63504C.1.pep
LQNTYVCIIHQVFSSALFLQIFVFKFKFKLLCILCLSRLCRGLEHDPILGQSQGRP

SEQ ID NO: 329421 - protein, 59 aa, Zea mays
  Clone ID: MRT4577_63505C.1.pep
GMVNTQNAIAKCTTRFQPWPTPKLKVYLPSMITLLTPPFKKLSSIFTSINAFTIYIAPP

SEQ ID NO: 329422 - protein, 92 aa, Zea mays
  Clone ID: MRT4577_63506C.1.pep
MAAVPSRFLLVTGPPGVGKTTLVMRVFETLRGSHPNLNIRGFYTREVREGGERIGFEVVTLDGRTGPLSSCKVSSCEVAESSWSSCFHLRHW

SEQ ID NO: 329423 - protein, 223 aa, Zea mays
  unsure (1)..(223): unsure at all Xaa locations
  Clone ID: MRT4577_63507C.1.pep
MGNQCQNGTYGYGSNYNSYNHFQKEPLASRHCDGDDTEGCYTGPSRPSIADLMRQGLRQTLTSISVLGRETPNVTEHYTLGRQLGEGLTGTTYLCTETSTGCQFACKSILKTRFRNMQDVEDVRREVQIMRYLSGQKDVVAIKDAYEDEEAVHIVMELCEGGELYDRIKKGNYSEQKAAHLIXLXVGVIENFHSLGVMXHRDLKPENFLFTDKDDDLSIEVID

SEQ ID NO: 329424 - protein, 192 aa, Zea mays
  Clone ID: MRT4577_63508C.1.pep
MAAVPSGFLLITGPPGVGKTTLVMRVFETLRGSHPNLNIRGFYTREVREGGERIGFEVVTLDGRTGPLSSCKVSSPESVRWPTVGKYKVDVASLESLAVPELQVKEETDLFIIDEVGKMELFSSAFFPAVMRVIESNIPVLATIPIPRQGRDIPGVARLRNHPGAAVFTLDTGNRDTMRDTICSQLRSLLQR

SEQ ID NO: 329425 - protein, 42 aa, Zea mays
  Clone ID: MRT4577_63509C.1.pep
KKFHKKKKKKKKKKKKKKKKKKKKKKKKKKKKKIKKKKGGPF

SEQ ID NO: 329426 - protein, 141 aa, Zea mays
  unsure (1)..(141): unsure at all Xaa locations
  Clone ID: MRT4577_6350C.1.pep
VPAALPPLSAGIKGGRFYPGQGTQGPGPPAHPPAPQLTWKPQPSGPQPGRVRGHLCQSTSRAHTLPAMPWIMGREGSGGRNTTPWSPSHPTLAHSSQRVPGEEGAGRRAWPLHGEGNQHAXILQEVSKKCLKWFAQTRWLG

SEQ ID NO: 329427 - protein, 75 aa, Zea mays
  unsure (1)..(75): unsure at all Xaa locations
  Clone ID: MRT4577_63510C.1.pep
PAAYXRQQILXPFSQLGAASCVSFLTQQQLVPFYQQFGANPATLLQLHQLLPFVPLALANPAASFQQPIIGGALF

SEQ ID NO: 329428 - protein, 88 aa, Zea mays
  Clone ID: MRT4577_63511C.1.pep
SRLPSQKGGHHRGFPRLIPARWGTLLVITLMLMISTREGSLSRSSTALGVGGRLIDSLMLQFGLDAPSFSFVAPSIPERLSVVFPDAR

SEQ ID NO: 329429 - protein, 62 aa, Zea mays
  unsure (1)..(62): unsure at all Xaa locations
  Clone ID: MRT4577_63512C.1.pep
PPLKNKAKLDFTKIWGAIKAIFPPNFYXVKKKWGGGIMGSKSQGKTKAREKLLSKETPHRKT

SEQ ID NO: 329430 - protein, 61 aa, Zea mays
  Clone ID: MRT4577_63513C.1.pep
HARMFCSPMCQAPQPSRFLVTPPSRRRLYLKATFRFSSPPPYVSVSPHILLALLYLVVSEL

SEQ ID NO: 329431 - protein, 68 aa, Zea mays
  Clone ID: MRT4577_63514C.1.pep
KTQVYGLTYHITKKYTTSRVIHSLINTPTALKTLLLLDPCSLQNNVKDHNATNYASHMAIWDHSNHVT

SEQ ID NO: 329432 - protein, 54 aa, Zea mays
  unsure (1)..(54): unsure at all Xaa locations
  Clone ID: MRT4577_63515C.1.pep
FGFVKLAAFNLISLLLELKKSRDDSVXDHFSICRDYPTYPACGVGNCPSTTLAS

SEQ ID NO: 329433 - protein, 44 aa, Zea mays
  unsure (1)..(44): unsure at all Xaa locations
  Clone ID: MRT4577_63516C.1.pep
TNGTNQSLAFPNWTARQEQMGEGWXWIMIKYRDRSRWEKVGXGS

SEQ ID NO: 329434 - protein, 134 aa, Zea mays
  Clone ID: MRT4577_63517C.1.pep
KTFLWGRRPFCCPIFSFFGPWGFCPANFPEASSLSSLAFFFLMAPIGQFMVCASFPIPCGPCLPWAPFSLGPAFRAFGPAPPPAMDLRAFGARAPMDPEVGRANDSFLVLSTPERKGKKKKKKQKKKKKKKKTK

SEQ ID NO: 329435 - protein, 91 aa, Zea mays
  Clone ID: MRT4577_63518C.1.pep
MRPLGYGLQFRFRSLWFKARPHHTAFNSDLKMSSFASLIGIAVVIGIPEQIGAAFPWAPALAPLDDRTSPSPPYPFSRPYFKKMWHGARAE

SEQ ID NO: 329436 - protein, 98 aa, Zea mays
  Clone ID: MRT4577_63519C.1.pep
SALPGSLQILLFFSRALSSSSSCPDLGLLRPSWVAKLLQTLGATTESLKVKGPPSSSWRTCTKANSRRFKSTSSFLTPTRTGSSTPSRHTQGFQLSGV

SEQ ID NO: 329437 - protein, 122 aa, Zea mays
  Clone ID: MRT4577_6351C.1.pep
EIRRLMCGSVAAAVKHRHQEPDLGVDHRGRGGLLDGVKKYPGKSSLGTLLIARRMLAPPWTARLREVEVVATYPRNLRTWNEAVHNMESMIGTKVESILKLCARKLRLSSRKRNRPKKEKAI

SEQ ID NO: 329438 - protein, 86 aa, Zea mays
  unsure (1)..(86): unsure at all Xaa locations
  Clone ID: MRT4577_63520C.1.pep
DGGREHGAAARWTPKARPTRRAGQRATTSTGSCRPTPGTTATTRCAGTNVPCSQARRSPYYKLPATAAEAQAXCTGVNGDCTPRXP

SEQ ID NO: 329439 - protein, 93 aa, Zea mays
  Clone ID: MRT4577_63521C.1.pep
LSSEVVDRFPPHLCIRVCSRRASSNIFLFSPWMSLCCHESSPCVLALGCVAGWSASIVVSLCDLRGHQCAPGSGRQITYKKHFLPLTCSTKNN

SEQ ID NO: 329440 - protein, 90 aa, Zea mays
  unsure (1)..(90): unsure at all Xaa locations
  Clone ID: MRT4577_63522C.1.pep
YVCKPTGEFILFSGSEHRPADRKRWMADLGADKLRVHQVVWPGTHDSGTNKIGVPLXTRPFAQCQSMSGYQQLAMGTRVVHVRVQEERRV

SEQ ID NO: 329441 - protein, 133 aa, Zea mays
  unsure (1)..(133): unsure at all Xaa locations
  Clone ID: MRT4577_63523C.1.pep
DYAIETPLEILPNSEGQPLYEMQIKFDKDIPIAAVNFVLKEEETGAWFQHKGRDFRIPLNGSFNDGGKQDIDIWPGXVKNFINNYIYLDHSDVLATKWVXFVSGKHISGFYEEYPILKSEYVQNLVTVTVRRD

SEQ ID NO: 329442 - protein, 46 aa, Zea mays
  Clone ID: MRT4577_63524C.1.pep
ALMSQARQAPGGAPLHRGARAYAHGRPPTYRRLIKLEVSEGFRIFF

SEQ ID NO: 329443 - protein, 252 aa, Zea mays
  unsure (1)..(252): unsure at all Xaa locations
  Clone ID: MRT4577_63525C.1.pep
PSPGSSVSLLRLLSQAKTSLASSSQTWHETLGRPPPLRNLPLRSAMQASARLSYSVASRKVIAGVSIAPPRSCYRTSRGKAHAAPLPAQEPPPKGLKRITKQERRVRIVEFVENYRASNEVEVTEHPMPKDEARVVESQGILEVSEHSMPKDDAEVAQPQGTAEVFEHFLSKDEGKVAQCQGTFHFPEHSRPKDDSGKTARHDMDTSETCKTADAPALSDLTENEGILSDQTESEDKPDPGNQQREIEANKX

SEQ ID NO: 329444 - protein, 52 aa, Zea mays
  Clone ID: MRT4577_63526C.1.pep
VCYSSRRPPALLGVRMLATNMIPTAPGFFSVLERERNISVLSVRVGRPVPFF

SEQ ID NO: 329445 - protein, 56 aa, Zea mays
  Clone ID: MRT4577_63527C.1.pep
SLILYPPLFSTPRLLSSVAFQRGVRTLYTLSHRETHLILTLHTTTQPVTPPTCPQH

SEQ ID NO: 329446 - protein, 87 aa, Zea mays
  Clone ID: MRT4577_63528C.1.pep
CTDLTDKPDPGNQQREIEANKFDLKNFEKNLNANDLNASDQSGSDMVNEAKTHARGDNPKLEESANTGLLGSLRSFAYGIRNFWKNM

SEQ ID NO: 329447 - protein, 77 aa, Zea mays
  Clone ID: MRT4577_63529C.1.pep
TMLLDTSRLPGGRHMQNTIDVSVLSSAHWLLNGAIYYNGTRMVGAHGYPELNVSDVELRVAAAQWRTGRQKNRLRTN

SEQ ID NO: 329448 - protein, 87 aa, Zea mays
  unsure (1)..(87): unsure at all Xaa locations
  Clone ID: MRT4577_6352C.1.pep
ESLCAQVLRAKYFPMKNIPGAKPKGGISCSYTWRXILNGLQLLRNGLIWRVGNCNSINIWKDPWTPRGETRKIITPSKGSIRHPKSL

SEQ ID NO: 329449 - protein, 59 aa, Zea mays
  Clone ID: MRT4577_63530C.1.pep
ASSRSRRCLRNCRCFRALYRAICIQSLFHLVIRRLGVVGLRRLRRRPEILRRRCEGESL

SEQ ID NO: 329450 - protein, 62 aa, Zea mays
  unsure (1)..(62): unsure at all Xaa locations
  Clone ID: MRT4577_63531C.1.pep
RIPKGHGILSYXRGNLANVIRYFPTQDHRIAFKDKYKXLFLGGVHLHKQFWRYFAGNLASGG

SEQ ID NO: 329451 - protein, 71 aa, Zea mays
  Clone ID: MRT4577_63532C.1.pep
PFCTHSSSTYFIDSLIFLSPLSPQPLRWFSTSDRPASTSQTSNSLQSIFYSSPSSTLTLTFIILTPSLTPP

SEQ ID NO: 329452 - protein, 60 aa, Zea mays
  Clone ID: MRT4577_63533C.1.pep
KQVLVNLVVLRKGKRLASRPLFVREFTLQLHVGGQLRTQTLDLGLVGGNIRSEVMDQLVF

SEQ ID NO: 329453 - protein, 48 aa, Zea mays
  Clone ID: MRT4577_63534C.1.pep
RGIQYIFGQYNGSHGLRLGPMAFQWNDFKRNVSNIFHRKITEDFNENA

SEQ ID NO: 329454 - protein, 73 aa, Zea mays
  Clone ID: MRT4577_63535C.1.pep
VYSIIPFESEHVEGASIVEMRAREVAARPCQPGAGIGRRPGSHHHRRLNRGFLEMRRVWRCDAVGADGLRRDG

SEQ ID NO: 329455 - protein, 95 aa, Zea mays
  Clone ID: MRT4577_63536C.1.pep
PCAPDAAPFSWPTSTCPISSTASFSPPPSESPGCSSSCAFMSHQILSQTVNQSSMTNSHHLFLSISNFQVIIFLFLKLYSLQPLLNLNSSKKSLN

SEQ ID NO: 329456 - protein, 172 aa, Zea mays
  unsure (1)..(172): unsure at all Xaa locations
  Clone ID: MRT4577_63537C.1.pep
MLRGDSSVLGIINFITLLISIPILGGGIWXLRARANSTDCIRFXQWAIIIAGLDVMDISLMGFLGAXYRQTCLLQLYLFACSSTSSARISSCIAFAFAGTDRGDGQAVMNRRVAXTNSHDYGGWLRDRDDDPQYWNTISACLRDSQFCDEKMRLTREPNTDMIAPETSTMYY

SEQ ID NO: 329457 - protein, 122 aa, Zea mays
  Clone ID: MRT4577_63538C.1.pep
IAHAARRQTYGTATASGSSTVTGWRSAALTSASLALRAPQITASHTGPCSVAHRWPQVQGTVEQCSAASTPRSTTHDHTELTSRTNDTDCTAKDATADIATSMQDHDMPDYDISTDTQTLDT

SEQ ID NO: 329458 - protein, 52 aa, Zea mays
  Clone ID: MRT4577_63539C.1.pep
PARHGEPGRCTYGRLLLGPRTAGPTRQPLVGPRRGGTAVRATSDASGGAAIG

SEQ ID NO: 329459 - protein, 71 aa, Zea mays
  Clone ID: MRT4577_6353C.1.pep
GISRNHFRKLSTKNSKFQLRCHSRSKKTQFHWVRRSFLLWPDSAGLLLGITKGGAFFLHWGRASGWGLGTK

SEQ ID NO: 329460 - protein, 58 aa, Zea mays
  Clone ID: MRT4577_63540C.1.pep
MHSIDRPEGIQNIQLPYAARAYCRCLISETLSHNVHTIIWIEFCSHTSHKTSIICAKS

SEQ ID NO: 329461 - protein, 143 aa, Zea mays
  Clone ID: MRT4577_63541C.1.pep
MVHGTLEVLLVGAKGLENTDYLCNMDPYAILKCRSQEQKSSIATGKGTTPEWNENFIFTVSDRTTDLVIKLMDSDTGTADDFVGEATIPLEAVYTERSIPPTLYNVVKGEKYCGEIKVGLTFTPEDTRQRGLPEDFGGWKQSS

SEQ ID NO: 329462 - protein, 810 aa, Zea mays
  Clone ID: MRT4577_63542C.1.pep
MRRKLPGDAPLSAAGPGHALSASAPSEVDLAQLSAAIAAGEDLGPFVRRAFACGRPEPLLASLRGAARDREAEIEELCRAHFHDFIRAVDDLRSLLADADALKGSLSASHSALLSSAAPLLASLESFLAARSLAGNLSSALASSRRCVRLLALAARANAHLQAGNHGLYLALRAVDAIDRDLASGPEPLPLPTLRRMLLSVVPAVRAHAEREISREFSDWMVSIRAASRHLGQVAISRSAAARQRQEELRSKHRPLEECITLDDDGVGDLDDFAAAAATAEAADGAAAASFDLTPLYRAMHIHQTLALGERFKKYYLENRKLQLTSDFDVIAATPFLESHQVFFSQIAGFFIVEDRVFRTGGGLTSRPDVDALWDAAVGKMVSVMEDNFSRMQTANHLLLITDYAALLSATMRRYGYPVGMLLDVLAKHRDKYHDLLLADCRRQVAEALTADKFDQMLMRKEYEYSMNVLAFGIQSSDITPAFPYVAPFSCTVPDICRIVRSFIEDSVSFMAHGGGGDTYAAVKKYLGRILSEVVDASIQKLVDSGSGLSVSQAMQVAANMSVMERACEFFTRHAAQLCGVPLRAVDRGRRDFPLRRSRDAAEALLLRLLCAKVDEFMRQSDGINWMADDSPPGGNEYANEVIIYLETLTSTAQQILPLPVLHRVLVAVLAHISERIIELFLNDSVKRFNANAVTGIDTDLKMFETFAEGMSSLFVDSGQESAKNEMKAALVEARQLVNLLMSNSPENFLNPVIREKSYNKLDYRKVAIISEKFRDTSESYFSTFGTRGARQNPKKKSLDTLIKRLREAS

SEQ ID NO: 329463 - protein, 79 aa, Zea mays
  Clone ID: MRT4577_63543C.1.pep
GSLFVLCVVDMHRHDASCTLEMRAGTTALLIRRHFASPLCTKTVGKLGNATRVRFALSLPFIYLPQKYYMVDYAEGGFV

SEQ ID NO: 329464 - protein, 154 aa, Zea mays
  Clone ID: MRT4577_63544C.1.pep
ALPFFLKRGSPLAWDSPPGATFLMDPRGCKGVSPRGGETPPGFVVSGFLFPQKGVGPLFGGGGENPRGGPPQEGPFSRLLTPPFLGFGLLTGKLWVVKMAQKGWPPFCPPCLLKPPVLVFGSGRGQKSFPRYPQLGPRFFPRPQGLLNCGGSFF

SEQ ID NO: 329465 - protein, 73 aa, Zea mays
  Clone ID: MRT4577_63545C.1.pep
NTVDTGHIATTMTDIINAVHHPARATDVATVLTDLAQNTLPHDVVERDTTAADVGKCETDERCEPRNYASTKT

SEQ ID NO: 329466 - protein, 75 aa, Zea mays
  Clone ID: MRT4577_63546C.1.pep
QLVNLLMSNSPETFLNPVIREKSYTKLDYRKVAIISEKFRDTSESYFSTFGTRGARQNPKKKSLDTLIKRLREAS

SEQ ID NO: 329467 - protein, 89 aa, Zea mays
  Clone ID: MRT4577_63547C.1.pep
FRHVSQFHGEILKKKKMLFVVGLICHYDYLLFFIILPPPQKSPLWAPPGPLMLHFCAKPRFPMVYEAKKKKKKKKKKTQKKKKKKTNNP

SEQ ID NO: 329468 - protein, 49 aa, Zea mays
  Clone ID: MRT4577_63548C.1.pep
YPQPYTGMKHAYLKTRHQIDNKIKIHLPCLRRAYNIWWEWSKKGPQYPK

SEQ ID NO: 329469 - protein, 40 aa, Zea mays
  Clone ID: MRT4577_63549C.1.pep
ISLCWDPMLKRVLTKLLCLKTWFKCYPVMLIRTKSVGFSP

SEQ ID NO: 329470 - protein, 232 aa, Zea mays
  Clone ID: MRT4577_6354C.1.pep
MGTLSQADEAQLKAQLQDAVISCTERCLYHSAKWAAELLDSLPSPDDDDGSDTDVDSPMSDAHPPPTPAPVPKDATEARLEAREAHKFLLAKTYFDCREYDRCAAVFLPGPLPKGASNPSSTPTSKSKSAKGKATMFTPTKGKLSNDTVKGISQKSLFLALYAKYIAGEKRMNEDSEMILGPQDGGVTMNKELPVVSAVLDEWFRDLPNSGPAPQGWLENLYGMVLAKGKNE

SEQ ID NO: 329471 - protein, 93 aa, Zea mays
  Clone ID: MRT4577_63550C.1.pep
VYYHGWISLRKEASLPFKRAGRSFLAPGGWLVVFTFLLGFRGFWLTFFRSPVFTASGFVAVLNKFGPRFLAWAGNSVGLGALKENHGGVEAIN

SEQ ID NO: 329472 - protein, 38 aa, Zea mays
  unsure (1)..(38): unsure at all Xaa locations
  Clone ID: MRT4577_63551C.1.pep
RVEDKERVAXNRGNTVRELQRRSIEFSSIIQSHRSMRS

SEQ ID NO: 329473 - protein, 64 aa, Zea mays
  Clone ID: MRT4577_63552C.1.pep
EPTARVWSCAFAAAVFDEARAPPPLPFPFVVPRILFATTYRLHVISLHFLKWSREYQRLCLKKK

SEQ ID NO: 329474 - protein, 75 aa, Zea mays
  Clone ID: MRT4577_63553C.1.pep
KSAQHAPKAPTFPADTSTDNMLSLCGLYKLCLWVADVNTDRSDVYLTKRTRPRAHAWNAEDSKYNDDAMNDYITK

SEQ ID NO: 329475 - protein, 45 aa, Zea mays
  unsure (1)..(45): unsure at all Xaa locations
  Clone ID: MRT4577_63554C.1.pep
FENXKGICLVCTXIVPLNIGKYQGINVTYRQEIKKYIRPGWVSTN

SEQ ID NO: 329476 - protein, 46 aa, Zea mays
  unsure (1)..(46): unsure at all Xaa locations
  Clone ID: MRT4577_63555C.1.pep
SLRFHVSMSPTHDDKLEFGMTSACVEISKPNKLSLQASFVXDSKVY

SEQ ID NO: 329477 - protein, 117 aa, Zea mays
  Clone ID: MRT4577_63556C.1.pep
GPSEVTRWERRGARGSTAEQSFRSLHACGPRPVSLHSRLLPVPAMEEVEVANRAAVESCHRVLALLSQQLDPALLKSVASETAEACAKFRKVAALLGSGGGHARGRFSRRVRPLGLV

SEQ ID NO: 329478 - protein, 101 aa, Zea mays
  Clone ID: MRT4577_63557C.1.pep
INCQIIVISKSQLPDTRLLPEGRASKRCPEVERRRRRRRRRLAGHRKGARYRNQAQPSASEFSICSRCLTSSVPQYLVRWYFLLPGRVGGRWGNQLGRAGI

SEQ ID NO: 329479 - protein, 132 aa, Zea mays
  Clone ID: MRT4577_63558C.1.pep
CGHGRGWLGRGRFVRGWLGPWRLALRCPVRRRGRQRREISLDHTTYALLVAPYDADRQVGSLLSHTSFMSILNTCVNQPSRLCMMPFSCPVDAVSVIVKRVTALLSPLLVASVALTAVVAAVVTSQTPASSS

SEQ ID NO: 329480 - protein, 109 aa, Zea mays
  Clone ID: MRT4577_63559C.1.pep
QTLWWTEETDLNIMLQQNDLGDADDVHRMLGSILQHLDGAITLTQITLDSNIGSCGHWMDQQPLSLVHDRAQRQQDPQILCAGGYHAHRLYRLHHTYRGPRQLLGEARS

SEQ ID NO: 329481 - protein, 114 aa, Zea mays
  Clone ID: MRT4577_6355C.1.pep
RAASIGPRLWSARGSSRCISYTLWCLKCIVVVNYNMVRRLSYAVSSCFSRSVNLWQSFVVPYIEFFNNSKMESDHSHCMVGRHDGLILTAYVVSVMYAVLLRWKNSEASMSICP

SEQ ID NO: 329482 - protein, 176 aa, Zea mays
  unsure (1)..(176): unsure at all Xaa locations
  Clone ID: MRT4577_63560C.1.pep
RDTLRLTCSQAPIAFLLPPYLPXMIAAKCENPTLTPYRLQQAIAACIIXMXPLIKQSPYLSLXQSLIQTIKAQKLKXIALPCXITQVVLTNLSPYYXHQHYLPFNQLSTLNPAAYXQQQLLPFTQIATVYSHQQQLLTFNQMDELNPAAYLHQXILLPFMQLADNSRASFLTQKQL

SEQ ID NO: 329483 - protein, 87 aa, Zea mays
  Clone ID: MRT4577_63561C.1.pep
QRRVRGYNRLYETDQKTMRPARPPSPAPSRRHMALRGNLGPLTGTSGQIRLTCWRLISSYYLRTDVRWTILRNRVGRAWCACVGVLL

SEQ ID NO: 329484 - protein, 108 aa, Zea mays
  Clone ID: MRT4577_63562C.1.pep
ERDREGSDAVRARERQEERKAEELRRQLVYRVALSSIDGLGGSYRRPNGVMTLPHRTWAVVRNFLDDVEEPPDFRPAPWSVLMLAWLTRGYELTEHHPGYWDLKCQAR

SEQ ID NO: 329485 - protein, 157 aa, Zea mays
  Clone ID: MRT4577_63563C.1.pep
TTPRPSPAPPTRTTNSAPWSSRPPCSSPARLASPTCLPGPPAPASPRSLSSSPPTAASSFSPWPYASRNGRSPNTTSTIPAEITAVMAVRSSIRSSNQQHALGQRMLCGGPRFSWRRLPRRCTSHGGEWRVPALHLQLRDASLDHQETSLVNGRWSH

SEQ ID NO: 329486 - protein, 501 aa, Zea mays
  Clone ID: MRT4577_63564C.1.pep
MKSSRFLFLCAMFCLMARLGAANVVLMGNNLTLSFDDIEASFSPGVKGSGVSGVVYASEPLNACSPLTIKTVNGPPSPFALIIRGGCTFDEKVKNAQDAGFKAAIVYDNKNSGVLVSMAGSSSGIHIYAVFVSKASGEVLKKFSGNMDVEVWILPTFENSAWSIMAISFVSLLAMCAVLGTCFFVRRHRIRREHPRIAEDREFHGMSSQLVKAIPSLIFTKVQEDNCTSSMCAICLADYNVGEKLRVLPCRHKFHAACVDLWLTSWRTFCPICKRDARSGASEVVATEATPLLSSAARLPSFRSSVAASPPRPISRHPSSHSVSRAYSVSSTPNSPNPFISSHISSPGIRASRSITDLGNISSLHPRISHLSSTHSLVGSHLSPPISIRYWSSHVAHSGYGSPSPHVSSSYISNSGYGSSSYCYLGLGGSSHSQHGTYLRRCGESGPSLCTMVPQQLQWETNVAAGASSAKSLRQSSYLRHCGDSDASLSDMTSAQSLPRC

SEQ ID NO: 329487 - protein, 87 aa, Zea mays
  unsure (1)..(87): unsure at all Xaa locations
  Clone ID: MRT4577_63565C.1.pep
MQGNTNGPSIGIDLSTSDSCAAGWKRDRFKLIANDQRSRTTTSNVSIAGXERLDGDAVKSXRPMNRTITVYDXRRLIAXRLNDEGVQ

SEQ ID NO: 329488 - protein, 86 aa, Zea mays
  Clone ID: MRT4577_63566C.1.pep
IIYEGNKLNRRKEIITPPPPPEADEACQKRKLSKKVVNYMLRRCGMMRSATLPTAVAVVILCSDTRPAGIRRQAMVPLSKTDRRAR

SEQ ID NO: 329489 - protein, 46 aa, Zea mays
  Clone ID: MRT4577_63567C.1.pep
HTRLSARRACPCVASTLSARRSASRSRTAANGSVAPARWVFRRART

SEQ ID NO: 329490 - protein, 98 aa, Zea mays
  unsure (1)..(98): unsure at all Xaa locations
  Clone ID: MRT4577_63568C.1.pep
HIDGKLRYGLNGFSNRDPKTPVKLVDYSNAPXRGVKFHPVGHVAPGVDRPLHMIPNVITGEFRTLIEIAFENPQKSIYSLHRDGYTLFCVGMGPRKWS

SEQ ID NO: 329491 - protein, 100 aa, Zea mays
  Clone ID: MRT4577_63569C.1.pep
WYATTTMSSTPVTTSHYNVEFPVRRRTISYYAKCSMLDRLRRNLKKGVSPVTMLTCCGRADSRHDTARLRRVGDTPVMNSLNTDTSFPLPRPHIRYTWPI

SEQ ID NO: 329492 - protein, 76 aa, Zea mays
  Clone ID: MRT4577_6356C.1.pep
SVRAGAASFLQSERAGFFLFYFGQGPHSYAFMLRLYEVGEHLLNILVVLSSLRLCAEEHITVGSGSLMEVQALAIP

SEQ ID NO: 329493 - protein, 154 aa, Zea mays
  Clone ID: MRT4577_63570C.1.pep
MAATAAAATLAAATSSLLRRSPLLRPHALRVSRDFAPRRFARHIASSTNEEAAAKTAAATADTGGPTIFDKIIAKEIPSSIVYEDEKVLAFRDINPQAPVHVLVIPKLRDGLTGLDKAEPRHAEILGQLLYAAKVVAEKEGVADGFRVVINNGA

SEQ ID NO: 329494 - protein, 79 aa, Zea mays
  Clone ID: MRT4577_63571C.1.pep
LIINNKTSFLLLSFKKKKKKKKKKKKKKKKKKKKKKKKKKKKKKKKKEKKKKKKKKQTRGPELWGTKAKNQTLANLLAQ

SEQ ID NO: 329495 - protein, 76 aa, Zea mays
  unsure (1)..(76): unsure at all Xaa locations
  Clone ID: MRT4577_63572C.1.pep
AFSWLLLPVFLRPXPCLLLRSXXCFVLCCPCWXXAPLFCFWVSCACLCARFSPLXLALSSVSXARLVFALXPVGRL

SEQ ID NO: 329496 - protein, 112 aa, Zea mays
  Clone ID: MRT4577_63573C.1.pep
ILVALRPPPSLLRPLSFFVPPTFFFLAGVTNFLGGEPSPSHFNLLAVLPFLLARLIPFSPAPFFLTIPCPVCLSNGTPPLPAYLPLRVCWFYPSGLFFFPPSLRPLFLLFSL

SEQ ID NO: 329497 - protein, 72 aa, Zea mays
  Clone ID: MRT4577_63574C.1.pep
HLLFVFVFLFVLFFFFFFFFFFFLKKRSPGPRFWGKKKLQMQAPNSVKGLFFGKRIYAQGRQETVWCANIPP

SEQ ID NO: 329498 - protein, 171 aa, Zea mays
  Clone ID: MRT4577_63575C.1.pep
MYPYTFRAAASSSSSSTALGFALGRIGGTTRSGGVAAPGLVVPAAGVARGRSVSSTPAGSAPVPGDQGVGMDQPKQQQQPKVPPRDAAGGENKRDDMHKHTRDVMTHSFGEGYSTRSDEEGFGGVYGGNDPVEHPGAEIHPSHSEYDTSQGSEVKEKEKARHLKDEKHATA

SEQ ID NO: 329499 - protein, 178 aa, Zea mays
  Clone ID: MRT4577_63576C.1.pep
MAAPAPHQGQGQQGDHHQPKLQKVMVAVDESECSGHALEWVLRNLAPTLAPPLLVLTVQPHFPLGYVSAAAFGAPLGTVPPVAPELIKSMQEQQRQLTQALLDKVVAICAEHGVAVETIVEVGDAKEMICEAAEMKNVDLLVLGSHSRGPIQRLFLGSVSNYCVHHSKRPVLVVKNQG

SEQ ID NO: 329500 - protein, 75 aa, Zea mays
  unsure (1)..(75): unsure at all Xaa locations
  Clone ID: MRT4577_63577C.1.pep
MPRPFCFGSSIVGSGRRGAFSXVSATEGSDRCSSGGFGSKSLYNLGVNTSIFMSVAGSRQGACYGGAEGLSTDGF

SEQ ID NO: 329501 - protein, 46 aa, Zea mays
  Clone ID: MRT4577_63578C.1.pep
SPSLWIGIYVKYDTRTSVRGHILELSDLCRNNGHVLIQCADRHHYV

SEQ ID NO: 329502 - protein, 79 aa, Zea mays
  Clone ID: MRT4577_63579C.1.pep
SSVHGHLHSSNLSQHDPKNHHTASQEAFLLALQLLFYEPCFHVGCSFANCPRKTWTHALERRVQRGHPVVPTIETEKDR

SEQ ID NO: 329503 - protein, 70 aa, Zea mays
  Clone ID: MRT4577_6357C.1.pep
GLVVIHDVVCSRLYSPKRLDSSAGFLGEIGGQRIEGSRVHMASRLPGNGIAPLELLSALPGRPRVATQDR

SEQ ID NO: 329504 - protein, 157 aa, Zea mays
  Clone ID: MRT4577_63580C.1.pep
SPCWSYSVVSPPQPKTRERCPLSKTGVLLHVSQPRARGIGLSQHLGAIVFSESSPVFYPASRFTPSPRCDCRIYHPVGSHGLLLKAYRVLCLRWDFGDIRLCVYVPLRHCSAVDPLGLRSFESIYCTPSPMPNKQQLQIPAKKKKKKKKKKKKKFAA

SEQ ID NO: 329505 - protein, 87 aa, Zea mays
  Clone ID: MRT4577_63581C.1.pep
IVDTPPMIVVGLVGYIETPRGLRSLTTVWAEHLGDELKRRFYKNWYKSKKKAFTKYAKKHSENSGASITRELERIKKYCTVVRVLAH

SEQ ID NO: 329506 - protein, 103 aa, Zea mays
  Clone ID: MRT4577_63583C.1.pep
PLSPWGPPCPDFLPYFCQGRVFFNTPHSPFGVFPFFRKRKSFYFFLVKKSGLPNFFSWLKLPIAPPPLFAPFLGLFFCSTKTPFFFLWPPFSFLNYPPVSLGA

SEQ ID NO: 329507 - protein, 45 aa, Zea mays
  Clone ID: MRT4577_63584C.1.pep
GRKLYTLAKITRFNSPTQRLLKIQRGVLDSIMIFRKYYMSAKSWS

SEQ ID NO: 329508 - protein, 152 aa, Zea mays
  unsure (1)..(152): unsure at all Xaa locations
  Clone ID: MRT4577_63585C.1.pep
MAPQTCISALRLRLCVTGFQPSFCHQVGNDAPKLKVRPTVYERERRCSSAGSPTSSGTRKRVXLEMSAGSGSGDEDDDEGDLKNLGLSKDHAAVLEECFKTHHTFTSXQNAGLASRLGLRARKVXVWLQNRRARTKLKQTVVDCEYLRRWCE

SEQ ID NO: 329509 - protein, 48 aa, Zea mays
  Clone ID: MRT4577_63586C.1.pep
FRGSQFFDQFCYIRTAKKAKVYVMSLCVQLNHSPEYHLTVYLLTALDM

SEQ ID NO: 329510 - protein, 70 aa, Zea mays
  Clone ID: MRT4577_63587C.1.pep
MAQFNITLKKDAPKEELEAAKKHVTDQGGKIVNEFTLIKGFTAEIPDDAVSTLESNEHVTVEKDAEVRTQ

SEQ ID NO: 329511 - protein, 148 aa, Zea mays
  unsure (1)..(148): unsure at all Xaa locations
  Clone ID: MRT4577_63588C.1.pep
PAASGARSRRRRPRTTSIPHKKKKLPPTHVHRRIHICVREGDIYRKVTSRSPPTCEPTAIVNTTTNIRTVXASAHGHHGSTTLTHSLAGTAAIIASEVTADVRMTDTPSDKAYLAMTIMSTALSLYNNTTGETPKNYNSEIKAKTYLI

SEQ ID NO: 329512 - protein, 72 aa, Zea mays
  Clone ID: MRT4577_63589C.1.pep
QDSNYDISTTIVTLNNHALALEERSKAEIVHSAEIGQFAAGILPQKSELSNCETDRGRGSEPEAYESLIGEP

SEQ ID NO: 329513 - protein, 48 aa, Zea mays
  Clone ID: MRT4577_6358C.1.pep
LVPRNFNPVVMCIMWFQKVKFFFTGKNSPLFSCFGFENTKSPPELSCN

SEQ ID NO: 329514 - protein, 101 aa, Zea mays
  Clone ID: MRT4577_63590C.1.pep
LFFFTLGDPAQALPSSVEHARQCVHRRWRCSEPQPSMRTSYTQRPTAKAMEGTANARRTDVRVVPEDLPSTGPARITKALDRSSALRALVRGGRPGRPRVP

SEQ ID NO: 329515 - protein, 43 aa, Zea mays
  unsure (1)..(43): unsure at all Xaa locations
  Clone ID: MRT4577_63591C.1.pep
NHQIXCSVSRFXMSSKDQFAARCRGTNNLVIFTRAYXNNNXNN

SEQ ID NO: 329516 - protein, 124 aa, Zea mays
  Clone ID: MRT4577_63592C.1.pep
HTGRGPRRIIISKRLHFAPRGYPRLVGSNKELCTVSGTASNRRPRGNVFPPRGPRNPHSRWKNVGNRAPLCIIACTYYRLLIAIWVWSFYFFFSCYFSFFLFFSTLLLWCIKTPGRPSIVSPKS

SEQ ID NO: 329517 - protein, 144 aa, Zea mays
  unsure (1)..(144): unsure at all Xaa locations
  Clone ID: MRT4577_63593C.1.pep
PPPGRHARSPPTQSRPRGLSLAYAGIKMVHRDLVGKGPGSVKLVPREEDNLGNAYNLIAIGDSLKAVTVRKVLKEGVFGGRDAERVKFKLKIVVEFVNYDKGGFVLRXAGKNITGKDHVKMGQFHTLELGLKKLFVLRREIWDG

SEQ ID NO: 329518 - protein, 116 aa, Zea mays
  unsure (1)..(116): unsure at all Xaa locations
  Clone ID: MRT4577_63594C.1.pep
MWGERARGTCKGHYTTIALSDVNPTNLSKVIEYCNKHVHEAAAAAASXRPVPGGGDAXPTFFMPPXEDLKNWDADFVKVDQATLFDLILAADYLNIKGXLVDLTCQTVGDMIKGKT

SEQ ID NO: 329519 - protein, 65 aa, Zea mays
  Clone ID: MRT4577_63595C.1.pep
MEAVQTALSERTNPLLNRSSGPSVVTRLQPDAGNGAGFYDGAYSFLDTTKACATRVSSGTGTSDD

SEQ ID NO: 329520 - protein, 120 aa, Zea mays
  Clone ID: MRT4577_63596C.1.pep
GTTKDPRSMEINKMLQQHKTSITVEDRRTCPIQCCKVRKSTELHRPGRKIEVDKQASNAYFPSAQKKKIPSFMSRWRPHWIFCDGGVNRRQGTEAYCIRWTASTGGGDRSPSATAGSLAL

SEQ ID NO: 329521 - protein, 56 aa, Zea mays
  Clone ID: MRT4577_63597C.1.pep
KKKKKKKKKKIKIKKKKGHTLDRGKILRTLACDDISLILCPTYKILWTDFQNDDSE

SEQ ID NO: 329522 - protein, 145 aa, Zea mays
  Clone ID: MRT4577_63598C.1.pep
EAHRCWEDIFDAISGAKHLMYITGWSVYTEITLLKDGARPPRPGSGVTLGELLKKKAGEGVRVLMLVWDDRTCVGALKKDGLMATHDEETMNYFEGTDVHCVLCPRNPDDFGSIVHDLQISTMFTHHQKIVVVDHDMPVQRSHRQ

SEQ ID NO: 329523 - protein, 102 aa, Zea mays
  unsure (1)..(102): unsure at all Xaa locations
  Clone ID: MRT4577_63599C.1.pep
GQDPAKGGHQGERPPGAAPPQRPRLRKGEGRDPKTFGEPKGLPGRPGGEHGPGRGKTGPQXKKAPQKGGGRAPPGGGXGKHGPVERPPPPGKGQSGPFRMHA

SEQ ID NO: 329524 - protein, 68 aa, Zea mays
  Clone ID: MRT4577_6359C.1.pep
KGEQKKFGKPQGRGGISKNFRPPLMLHQLAPGSGHKSPNKGCRRYLDWGPLGLSIQFYFLHLFMGPIQ

SEQ ID NO: 329525 - protein, 51 aa, Zea mays
  Clone ID: MRT4577_635C.1.pep
LAGDCLRLLTRLILRLLGHDLPARSRSAGAFCYVYLVLLRLASSTLSRTCT

SEQ ID NO: 329526 - protein, 127 aa, Zea mays
  unsure (1)..(127): unsure at all Xaa locations
  Clone ID: MRT4577_63600C.1.pep
LLCRCXARGAVVAAXAVRXVALGXLAAALRXGAPACLGRLAASLGXAVRRGGAVGLXPGGSXCCRXLLAAVPVAVVXPAVCXLCXVPPPPPPGXCXRGRCSFPVRPRXGXXSSPAPXXGWASGXXPG

SEQ ID NO: 329527 - protein, 68 aa, Zea mays
  unsure (1)..(68): unsure at all Xaa locations
  Clone ID: MRT4577_63601C.1.pep
AGXRWVTRGGAGNFPPELAPGFWLTPAPPRGCGTSAQGISSFFQVSATRLQYGGQSRRNHHGNDKHRS

SEQ ID NO: 329528 - protein, 110 aa, Zea mays
  unsure (1)..(110): unsure at all Xaa locations
  Clone ID: MRT4577_63602C.1.pep
MRRLRVQAIRTQREKQRTEVPVXSPPPPGTPSRPWTETEPXDGYLVPSSDDSWVIKLEHSFNIFDTDSVIMVLKGVYGDRYYARFFALETIARVPYFAFISVLHLYATFG

SEQ ID NO: 329529 - protein, 54 aa, Zea mays
  Clone ID: MRT4577_63603C.1.pep
GARNISSIRCEGTHPSVFGSNARPSALFTCDPRDMVYLLRSRMGGPPIISGRAA

SEQ ID NO: 329530 - protein, 104 aa, Zea mays
  Clone ID: MRT4577_63604C.1.pep
CSRRFKVTSSSLKLRDSRIPFLARTVKKGNLRRRWRKKLLRSMLSAKTTRWFLAPFFRPQRRIKVAFFCFCSRAGPSNLVVMCCLSKAMVKGPSHEIKISVCFV

SEQ ID NO: 329531 - protein, 148 aa, Zea mays
  Clone ID: MRT4577_63605C.1.pep
MAASLCSPPPLPSAFRRSRAVVRASSSSSSSSSWGGASSFSSPKARFVARRSESVPVQQLVRPLAEYMSLPASQYSVLDAERIERVDDSTFRCYVYRFRFFALEVCPVLLVRVDEEPNGCCIHLLSCKLEGSPLVEAQNDKFSGKVRS

SEQ ID NO: 329532 - protein, 165 aa, Zea mays
  Clone ID: MRT4577_63606C.1.pep
GRVGGRVGNPLSVGVVVEGGVRLGGPGGGGGLTGGSGVFEGVYGQVKLNQIVFPFKIFYTFYLRGMPHLLRELLWHPERPDREQHHFGPAGPDEHARAGLPGRAPHGRVLRRDLVLHLDLAQDARLPRPLHWLPAGPALLPAAMTMILLLRFLFGPACLLTVFFF

SEQ ID NO: 329533 - protein, 87 aa, Zea mays
  Clone ID: MRT4577_63607C.1.pep
KLSLNFTACGPPKHPSKDNIISLPPISPTPRYIKYFLLTQIKHINQPSQITYTSTHNDQTHIKDPLLLFIFINVIKFKLNYPSRIKQ

SEQ ID NO: 329534 - protein, 39 aa, Zea mays
  Clone ID: MRT4577_63608C.1.pep
MCSPSQTPHLTMSCAQIGPHRPVLAVKTRGGAQLRTHGI

SEQ ID NO: 329535 - protein, 181 aa, Zea mays
  unsure (1)..(181): unsure at all Xaa locations
  Clone ID: MRT4577_63609C.1.pep
MGIAFGKLFSRIFAKNEMRILMDSLDADVKTTILYXLKLDEIVTTIPTIGFNGESDDYNNIIFTAWNVLGQDKIRPLCRNYFHNTQRLIFDVDSNDRDRAVEATDELHRMVNEDELRDAVLIXVANKQDLPNAMNAAEITDKLGLHSLRQRHXYIHSTCATTGEGLNEVLDWMSSNIASKA

SEQ ID NO: 329536 - protein, 201 aa, Zea mays
  Clone ID: MRT4577_6360C.1.pep
FSQHPLPSPLCLEWRWLLLSRVWPQVGILHSIVLFHLCRYTIKSHTHVPVLVISAYQDGSKVFQDIKRKWRERRSLHSQAASAADLDFSLQRSREDILTQWNGHVGRLGHRFEVGDEIAQATMKDILIGLQLALLTHLRENGVHLDIFALHKDSDLSRARTISALHELYQRLAQQAPIPWHMTSPVAPGLPFIEPGSGIAR

SEQ ID NO: 329537 - protein, 68 aa, Zea mays
  Clone ID: MRT4577_63610C.1.pep
TNLQTTHDNYLFINNASDPSTHRQPPQSKNTQILSTQFSITYINTFYNIISTHIGLLITYANSNSPQN

SEQ ID NO: 329538 - protein, 61 aa, Zea mays
  Clone ID: MRT4577_63611C.1.pep
GVLGNSHCPIIPHQNNKRACPWVHFQNFAICGLGPFNVKSPLWSLCHQLFAIRLDYQTMNG

SEQ ID NO: 329539 - protein, 53 aa, Zea mays
  Clone ID: MRT4577_63612C.1.pep
KIKKLHIPKKKKKKKKKKKKKKKKKKKKKKKKKKKKKKKKYPSPGGASKRHKF

SEQ ID NO: 329540 - protein, 125 aa, Zea mays
  unsure (1)..(125): unsure at all Xaa locations
  Clone ID: MRT4577_63613C.1.pep
ETNNMTLSLLSTNLXIAMGFFLIIXSDLXWHRSIVKPFMXCQVLHFMYHAPVVSSICHSNRGSMCRIVIPYIHRFVPFSQTTVSTIRTWWLRYTRRSSGRQSTVESRRCYVILEPVPRILEAPHS

SEQ ID NO: 329541 - protein, 220 aa, Zea mays
  unsure (1)..(220): unsure at all Xaa locations
  Clone ID: MRT4577_63614C.1.pep
MLDINLFRKEKGGDPELVRESQRRRSADAKPETLEENVALVDEVIVLDEAWRQRQFELDKIRQELNKTSKEIGKLKAKKQDATELIQSTEEIKRRLAAKEKDVEEAKTTLDAKLVTIGNLVHESVPISGDEANNAIVRTWGERRLEENLKNHVDLCLMLDIASLDKGADVAXXGRGFFLKXNGVLLNQALINFGLTFLRIRGFTPMQTPFFXMRKEIMAK

SEQ ID NO: 329542 - protein, 150 aa, Zea mays
  Clone ID: MRT4577_63615C.1.pep
MLRRAATTATLNGRAAAWFRHLTRRPMTLPPAHLGRHHLQAQLRPPRVVWVPPLPHLCGARGYSYTRMARRIPIARPDGYSSSDGEAEDPDAGEAGEITEPVGEGAEGDNSEGSETEVEGFMLDLSSDNLFGDSDGDGDGDEEGTEEGGK

SEQ ID NO: 329543 - protein, 86 aa, Zea mays
  Clone ID: MRT4577_63616C.1.pep
PLYTVPALSSLRGRLLELGTTHSFSPLAVASCSCRRTPGHARLISFLPIHSGHELLPVNPSATAFLAGGGCHGARPGLPAALNAQR

SEQ ID NO: 329544 - protein, 85 aa, Zea mays
  unsure (1)..(85): unsure at all Xaa locations
  Clone ID: MRT4577_63617C.1.pep
GTKFESQNYQDHQTRLFLARGRNNEFTKNXRDVVPFLLLRIGRIRENALSSFTSLRNVSQLNILRRRGPSAPNPAVTSRKADVVP

SEQ ID NO: 329545 - protein, 85 aa, Zea mays
  Clone ID: MRT4577_63618C.1.pep
TNTFCLRHVLTSIRYTCHHIYPRIFSELCSALDCPDQDIFNYCSSCPVSASPGGIPIQECRSMLLIMFILRHWICLIGPRSSRDK

SEQ ID NO: 329546 - protein, 59 aa, Zea mays
  unsure (1)..(59): unsure at all Xaa locations
  Clone ID: MRT4577_63619C.1.pep
MTARTKKAXIADIYPTMDRASLRKQIKKMDVSHHCTYSSEVXRKFARKKQAEXIWACTD

SEQ ID NO: 329547 - protein, 70 aa, Zea mays
  unsure (1)..(70): unsure at all Xaa locations
  Clone ID: MRT4577_6361C.1.pep
RGFPQTIIFLFLLVTRWIMLPPFQSAISKSSAPSTCCSVFPVFIKPSVVLHVAVYGLFSVSAIAHGWXCF

SEQ ID NO: 329548 - protein, 95 aa, Zea mays
  Clone ID: MRT4577_63620C.1.pep
AIRKQTLGMHGNPHRILLLQKETQERSLHPDFGPCTKAVFLHILTCGMLTTTAHRKCHSKEDAKMICPPLSTPPRSLYLGYLKKMDFSCLDDTGL

SEQ ID NO: 329549 - protein, 139 aa, Zea mays
  Clone ID: MRT4577_63621C.1.pep
PATSMTVTIHHHLFSDTAKLEIGVTLTLEHLTAAPKTHCHMRERLLSVSNHTTISAWMVYHMKESVPLLFCDSCAIIPFFIANHNRCLAGGSCYLTMLTRPMTSSSTMRLPHFLLTGRRGGVALALIEQRRALEPAAAI

SEQ ID NO: 329550 - protein, 345 aa, Zea mays
  Clone ID: MRT4577_63622C.1.pep
MPLRRFTYFFPREGARVVWGYVDRILGQPSLIRESSRGKYPWSGFLSRATSTLTSKLKNGSNLGKDRNGFGDVILNPSLQKRVKQLANATANTKLHQAPFRNMLFYGPPGTGKTMAARELARNSGLDYALMTGGDVAPLGSQAVTKIHQLFDWAKKSNRGLLLFIDEADAFLCERNKTYMSEAQRSALNALLFRTGDQSKDIVLALATNRPGDLDSAVADRIDEVLEFPLPGEDERFKLLKLYLDKYIIKAGDKHEKSWLQFFRRQPQKIEVKGITDDLIREAASRTQGFSGREIAKMMASVQAAVYGSKDCELTPGLFREVVDYKVAEHKQRRRLAGEEPKQDA

SEQ ID NO: 329551 - protein, 83 aa, Zea mays
  Clone ID: MRT4577_63623C.1.pep
RRWVIHVERITREKVNGSTVNVGIHPSKVIVTKLKLDKDRKALLDRKARGRNADKAKGKFTADDVAAAAGGAAATGASLQEID

SEQ ID NO: 329552 - protein, 56 aa, Zea mays
  Clone ID: MRT4577_63624C.1.pep
MAQCSALTILFGKPYTSRELPPLASSCTLFPTTCSAMNVKNRYRRMRRKKDVAMSS

SEQ ID NO: 329553 - protein, 152 aa, Zea mays
  unsure (1)..(152): unsure at all Xaa locations
  Clone ID: MRT4577_63625C.1.pep
XYLTPVGPTPLHVSPIFEIGPVEPRFSEWLVFEGISVDESGKQHFLDASVAYKRAVLNAIEYLSKFGYSKEQVYLLLSCCPCEGRISGIVDSPNAVTTLAIPTAIFDQDIKPKRMNGRPLGGPQLRRLPDLLSCSNDGHLPATQDKSGTSAP

SEQ ID NO: 329554 - protein, 78 aa, Zea mays
  unsure (1)..(78): unsure at all Xaa locations
  Clone ID: MRT4577_63626C.1.pep
YEKINDLYGIHSVNERXNCMDMAGLFDDEEAAFLTGGKVSWLSTIQVSEFTCPSRELFKXCSYNXSPASNDGYAQPDR

SEQ ID NO: 329555 - protein, 244 aa, Zea mays
  Clone ID: MRT4577_63627C.1.pep
MGTKDAAALHTILCSLLLLSLSCGCLAAESEGAQTALLEVDTSWKAARKIPQTLFGLFFEEINHAGAGGLWAELVSNRGFEAGGPYTPSNIDPWSIIGDESSIYVKTERASCFSRNMVALRMEILCAKCPAGGVGIYNPGFWGMNIEEGKSYNLVMYIRSLESVELTASLTCSDGLQNIAAAVIVDTNVSDWRKIQMQLLAKVTCRTSRLELTTSKRGVIWIDQVSLIPSDTYKGHGFRRNSYT

SEQ ID NO: 329556 - protein, 44 aa, Zea mays
  Clone ID: MRT4577_63628C.1.pep
SLIVLHLHGCTSPVLYLCSRHRVDVHCVMRVCYSSPPCLADVVP

SEQ ID NO: 329557 - protein, 154 aa, Zea mays
  Clone ID: MRT4577_63629C.1.pep
FGTRDVYSFGVVLLELVTGRKPVGEFGDGVDIVQWAKLTTGSNKEQVMRILDPRLSTVPLHEVTHAFYVALLCTEEQSVQRPTMREVVQILSEFPRPSSKQGEEAPDSGDGSASSPLHPAPVGSNEAPTAEAREQQQQQQTSCRSSPTPDLISI

SEQ ID NO: 329558 - protein, 68 aa, Zea mays
  unsure (1)..(68): unsure at all Xaa locations
  Clone ID: MRT4577_6362C.1.pep
LTLHXTPVFLKLARHPTNTNHSSSIINLLISPCHFLSPYPTFILPIISIIYTPSPPTILPIIFPHLLL

SEQ ID NO: 329559 - protein, 158 aa, Zea mays
  unsure (1)..(158): unsure at all Xaa locations
  Clone ID: MRT4577_63630C.1.pep
PPPGGPTGGGPRGAXPPRGPGNPGKXTGRPRPPGPPGGKKPGPKSPRPXXAGPNPGLKKPTPGGAPGGGKPGPARKNPGKPKKNPPXVGPFGPXKPGKKGPRFCGFGPPPGKPPPRWGGPKPPPPPGXTPGGNTPGGQKKPTRGPPGGPXPKGPPPKA

SEQ ID NO: 329560 - protein, 99 aa, Zea mays
  Clone ID: MRT4577_63631C.1.pep
GNHKDDSSARSSGTGDQGALERSMQALGYGHMGSSRHFFFPLVFVWLMNSQSSRVFFRSANSRNRCLWMTLELRAGLVSCFISGYPRRRPSERLSCSNV

SEQ ID NO: 329561 - protein, 89 aa, Zea mays
  Clone ID: MRT4577_63632C.1.pep
HATQIILRFIFMCCLYSYSALTFYRIICAPLPLPPSSPATSRSSIFAGRCAIPAPAPTRTLSTARRRQQGPCDHAPPLHCRPMEIIFPP

SEQ ID NO: 329562 - protein, 133 aa, Zea mays
  Clone ID: MRT4577_63633C.1.pep
SGLSATALSRSLGGNQVFAASFTSLTYTLLCLSSTSIWNVFAESSFIFKSAEGNLRLEGGEETHQAAGCVNISSLANARRRWEESATGRRRSVSSLPVPSRPCEWQLSCAIGYDDSGRWPCEIRSAQIVVFEK

SEQ ID NO: 329563 - protein, 39 aa, Zea mays
  Clone ID: MRT4577_63634C.1.pep
RQSKQLPQMVPTQLPSSLQTLSDMYYDTDLPGSQLQPSD

SEQ ID NO: 329564 - protein, 198 aa, Zea mays
  Clone ID: MRT4577_63635C.1.pep
SCNSTILLWLHYHDLTCVYFQSQMHTVGFVDAEDMNLRKHKYRSWLGYSNSKLAQVKFSSMLHKKIPAEAGIGVVCASPGIVDTNVARDLPKIVVAAYHLIPYFIFDAQEGSRSALFAASDPQVPEYCETLKSEDWPVCACINYDCSPMNASEEAHNLETSQLVWEKTLEMVGLPPDALEKLIAGESVQCRYGQQDTT

SEQ ID NO: 329565 - protein, 64 aa, Zea mays
  Clone ID: MRT4577_63636C.1.pep
LRALKLGPLPNVEMQAHARPQLYTVSVIPAFEGDGFRIVTYLAVSNGLVFSCTCIYPISECSVP

SEQ ID NO: 329566 - protein, 312 aa, Zea mays
  Clone ID: MRT4577_63637C.1.pep
PNASRQRLRIYAIFTSEGINADDPSKPKVAQDLIQRWQNQNSETGRPLNAEVMELDLLSLDSVANFADAWNARMAPLHVLINNAGIFAIGEPQRFSKDGHEEHMQVNHLAPALLAMLLIPSLLRGSPTRTVNVNSIMHTVGFVDAEDMNLRKHKYRSWLGYSNSKLAQVKFSSMLHKKIPAEAGIGVVCASPGIVDTNVARDLPKIVVAAYHLIPYFIFDAQEGSRSALFAASDPQVPEYCETLKSEDWPVCACINYDCSPMNASEEAHNLETSQLVWEKTLEMVGLPPDALEKLIAGESVQCRYGQQDTTF

SEQ ID NO: 329567 - protein, 41 aa, Zea mays
  Clone ID: MRT4577_63638C.1.pep
FETCCHIVSNECFKYYVFVKSFDKIIPAEQKFLYYTRRLDL

SEQ ID NO: 329568 - protein, 54 aa, Zea mays
  unsure (1)..(54): unsure at all Xaa locations
  Clone ID: MRT4577_63639C.1.pep
QNIRXLVNDGFIIKKPQKMQGRSRARRAHEAKHKGRHSGYGILVHHSFTLSVAM

SEQ ID NO: 329569 - protein, 174 aa, Zea mays
  unsure (1)..(174): unsure at all Xaa locations
  Clone ID: MRT4577_6363C.1.pep
MEAAADEERPLIQYLAPEDDEASSRYTSDGTLDINKQRALKKSTGNWRACFMILGTEFAECLAFYATAKNLVTYLTAELGESNIDAATNVSTWIGSCYLTPLIGAFLADTYWGRYKTMIVFLLLYIVGMLXLKASACLPWPMRTTSPNTADXRRATAYLGLYLVSLGTGGIKPC

SEQ ID NO: 329570 - protein, 96 aa, Zea mays
  Clone ID: MRT4577_63640C.1.pep
LEVGTCCALIIQSIRFILHFCLELESNIEISPLLWRYVGKYAQHLLITQISSGTKFYFPLLLTQRLKTDKLLQVLKVQFGLNIIQKQSKIHDHLQH

SEQ ID NO: 329571 - protein, 43 aa, Zea mays
  Clone ID: MRT4577_63641C.1.pep
GRRECQGRILSKVSHYESSLYLAWARACRRYVVVALSVRTLTS

SEQ ID NO: 329572 - protein, 49 aa, Zea mays
  unsure (1)..(49): unsure at all Xaa locations
  Clone ID: MRT4577_63642C.1.pep
GCVCXAPSQLIFAHESRGHGSHVPPTGREDTSIHHDNTLARTSRLGCGS

SEQ ID NO: 329573 - protein, 165 aa, Zea mays
  Clone ID: MRT4577_63643C.1.pep
AFCSTPVYSSPVFTSEHIESHRQKKSTLGLPFDKLIPCRGFEGVSAPYNMMVEVPTIRRDSGRMKEAARICSRLTKELHLCSLADAIVQFASLVSIHRFYWIRYSRLILYWLEAIDLRRMSNKEKIAFRVNIHNALLIPFLPKFPTPLSSNFIILVPVVTYRHIP

SEQ ID NO: 329574 - protein, 81 aa, Zea mays
  Clone ID: MRT4577_63644C.1.pep
KKIKNLYSIKTNIYLIFLIHAFKTTLFVHLLASTHAPLRPLVFETLSSPCLPVLSSHYEKNKHFPYVATRRSARLAHLQPV

SEQ ID NO: 329575 - protein, 154 aa, Zea mays
  unsure (1)..(154): unsure at all Xaa locations
  Clone ID: MRT4577_63645C.1.pep
MARWSSPKDPALEAALRRNRRWVVNNQIKRLLLRFPSRTAPVRFLQSRFKTLDLMGRAANWLSKYPSCFEVFSADDGGGEQEPHFGFTKRMAALVHAEEAAVAASEPAMADRLARVLMLARGRRLQVSKLAALRGPLGLPDDYLXRLVPANTDL

SEQ ID NO: 329576 - protein, 90 aa, Zea mays
  Clone ID: MRT4577_63646C.1.pep
KKRPNTVGPQVTHLKACRRRHPPIYLNYSTGTQNYVLHSRICTLPGKFSCREQCTLGILLCGPFLKKKKMLTVKEKCKRVFFNKEATSSC

SEQ ID NO: 329577 - protein, 65 aa, Zea mays
  Clone ID: MRT4577_63647C.1.pep
PLSVRSSDDIRLLCLCPFLVSSVCWCSSRSVCAALIISDTDLSWYECIPSHVFSRPIIYILSPHV

SEQ ID NO: 329578 - protein, 296 aa, Zea mays
  unsure (1)..(296): unsure at all Xaa locations
  Clone ID: MRT4577_63648C.1.pep
MVKAATWLLDRLLYLLKQDKGNDANAARDRRRRRRAPAGGAANAVGNDDGEEQHLNTFLDTANASFASSRVQFRNMASRARWVEEAGAAEVVENRGKLWLTTGVTRGGKLYYNVEETGFLAEMGALILLNDKDETIGIEDIYGKLAGGNYGCSWDTFQAYKHLKSLGYIVGRFGVPWTMKHXVLITPLXQINILETDQSLNRVDGASNDITKLLKEIQIDGICPSFEVYLPNSKFKKSSPGCPSFLLCLLRGKPPSRVELEAVENNFRGIPLKYAHVDNGRVSFLSFDEVTLPSLP

SEQ ID NO: 329579 - protein, 102 aa, Zea mays
  unsure (1)..(102): unsure at all Xaa locations
  Clone ID: MRT4577_63649C.1.pep
DPLKVCMGTCRPLGFLMIFYHSEKHSDGIHPRELTLRNLGDERYSLGQTNMVCRNKRGTDRRLCTVSRLSRPLDNCRYETHSPHDVTRDDVGRDDVESXPGI

SEQ ID NO: 329580 - protein, 87 aa, Zea mays
  unsure (1)..(87): unsure at all Xaa locations
  Clone ID: MRT4577_6364C.1.pep
NPGRPHASGQFKRHLWPFTRFADKCQIXANFSKVLRRNIKNHLCLDLVRQVPFFQHMYYLXLYNIFYRVKSLIFPKVETILREVYFL

SEQ ID NO: 329581 - protein, 221 aa, Zea mays
  unsure (1)..(221): unsure at all Xaa locations
  Clone ID: MRT4577_63650C.1.pep
MASRARWVEEAGAAEVVENRGKLWLTTGVTRGGKLYYNVEETGFLAEMGALILLNDKDETIGIEDIYGKLAGGNYGCSWDTFQAYKHLKSLGYIVGRFGVPWTMKHXVLITPLXQMNILETDQSLNRVDGASNDITKLLKEIQIDGICPSFEVYLPNSKFKKSSPGCPSFLLCLLRGKPPSRVELEAVENNFRGIPLKYAHVDNGRVSFLSFDEVTLPSLP

SEQ ID NO: 329582 - protein, 176 aa, Zea mays
  unsure (1)..(176): unsure at all Xaa locations
  Clone ID: MRT4577_63651C.1.pep
MASRARWVEEAGAAEVVENRGKLWLTTGVTRGGKLYYNVEETGFLAEMGALILLNDKDETIGIEDIYGKLAGGNYGCSWDTFQAYKHLKSLGYIVGRFGVPWTMKHXVLITPLXQMNILETDQSLNRVDGASNDITKLLKEIQIDGICPSFEVYLPNSKFKKSSPGCPSFLLCLLR

SEQ ID NO: 329583 - protein, 157 aa, Zea mays
  Clone ID: MRT4577_63652C.1.pep
TSSSMASTSMGEFRAPGIGACGPRRLPTPRELASTITTSLSPDPSCDCLLGARFVPLTVFMLSLCLYTHLSFTMNLNTFLDAANASSASSRVQFRCVLRFSCRCFAFFLSVLARPGGIVTTLGSADLGTGIWRRARGGWRKPALRRWWRTGASLVPN

SEQ ID NO: 329584 - protein, 99 aa, Zea mays
  Clone ID: MRT4577_63653C.1.pep
TRQVMVLSLVNSQFFDHVSSMLLSSWPRMQEISGSRSSSRQKYRQSWQSSVNRMPDDPPNSHVRSACGDEREIASQVLVSSISHASQADQRQRCGAEHR

SEQ ID NO: 329585 - protein, 186 aa, Zea mays
  unsure (1)..(186): unsure at all Xaa locations
  Clone ID: MRT4577_63654C.1.pep
EKEITSKYDVFSLGVIIIRIIAGHEGYSNXAHTPLQEFLEHVHENWGKRLQTTMPPHTSDQIQTCIEIALRCVEVDREKRPTIAEIVGELNKVSDFQSKPALNQNTLSECRGGTPLLPFHAWSTEDEVHVTVGVLSPLEPQTRHGHPLRRRWLSSSWRRDLARLALALAVIVGVLAGVRAWISVIV

SEQ ID NO: 329586 - protein, 36 aa, Zea mays
  Clone ID: MRT4577_63655C.1.pep
EQQQGHFNFSSMGGNRKNYILLGAFFYPRELHVLAS

SEQ ID NO: 329587 - protein, 118 aa, Zea mays
  Clone ID: MRT4577_63656C.1.pep
ELSVCGRASRAGSPSARMTTTPTPTSTRLPRRLRRRGRSRSRSRSHRTGTCSTSPPATASCPHSDDACRVSVAARVACPMFSRIGPARVRAMLHARLRVCWSGELLVGDHMPFWASHG

SEQ ID NO: 329588 - protein, 72 aa, Zea mays
  Clone ID: MRT4577_63657C.1.pep
TTSIFTRHTNTTNFKFFSQIYYNTILFSNQTTKHLHLSHKIMNKTTTYFHYQPSNQSIFITSKLNLLHSLSN

SEQ ID NO: 329589 - protein, 62 aa, Zea mays
  Clone ID: MRT4577_63658C.1.pep
ALEIVLQDLLLRLGPPLSRAFWDLTGPAHMCVRSCSERATACARNMGARVCVRLGLRSSPAR

SEQ ID NO: 329590 - protein, 68 aa, Zea mays
  Clone ID: MRT4577_63659C.1.pep
DPNCIGENSSQTKEVCTLTPYCLPKIRTKSFALSLSKKERLPPFIRKRPPLPPKYFFPRPFFILAKYP

SEQ ID NO: 329591 - protein, 574 aa, Zea mays
  Clone ID: MRT4577_6365C.1.pep
MEAAADEERPLIQYLAPEDDEASSRYTSDGTLDINKQRALKKSTGNWRACFMILGTEFAECLAFYATAKNLVTYLTAELGETNIDAATNVSTWIGSCYLTPLIGAFLADTYWGRYKTMIVFLLLYIVGMLTLTASAWLPLAMEDDSPDNSGLRRATAYLGLYLVSLGTGGIKPCTAALGADQFDGGDAAERVTKASFFNWYYFCTNIGSLLSGTVLVWVQENIGWGVGFTVQTVFMLFGLAVFVAGRKVYRYKKLGGSPLTRVAQVVVAAVRNCHLVLPDDTSALYHDKLLPTEPNFRIESARQFRFFDKAAIITGEKGAAAPTSPWRLCTVSQVEELKMLLRLLPVWASMVLFFAVSAQTVTTFIEQARVMDNRIGPFTIPPASIATFDVISVMVCVPVYDAVLVPLARRATGNDRGLSQLHRLSIGIALSVVVMVYAALLEGRRLALARANMPAMNIAWQAPMFAVHGAAAVFATVGVLEFFYDQSPDGMKSLGNALALLSMAAGSYFNSLALSAVGSITARGGERGWLPDDLNKGHMDYFFWMMAALGTLNLLHFLHYCNRRYRGNNNNTS

SEQ ID NO: 329592 - protein, 59 aa, Zea mays
  Clone ID: MRT4577_63660C.1.pep
MGLRFPLHPFRGNLLPVILPFLSRFLLLRGFLGDHRLPRVNLVEKARRLAREAPARPSR

SEQ ID NO: 329593 - protein, 172 aa, Zea mays
  unsure (1)..(172): unsure at all Xaa locations
  Clone ID: MRT4577_63661C.1.pep
MDAAATAVSSSGDAPVLLLALAVSLLLLAAAVWSSRRSGQGHGNGNGAPSPPSRPLLGHLHLLGKPLHRSLAALAATHGAGGQLAPLLSLRLGARRALVVSERGAAEECFTAHDAALAGRPRVLAGDRLGYGYTMLVWAXSHGDHWRALRRLLAAEIFSAARVAARAADRRF

SEQ ID NO: 329594 - protein, 88 aa, Zea mays
  Clone ID: MRT4577_63662C.1.pep
RGLTALNSPAYLQQQQLLPFSQLAGVSPDTFFTHTSICLRSTMHGSTVPHGSITYHQQSKTMSTSMLWQMQQRSHCRHMVEGNLLYVL

SEQ ID NO: 329595 - protein, 253 aa, Zea mays
  Clone ID: MRT4577_63663C.1.pep
IGSLEAGRVRSLASDDLAETRTQLANASQNLITSLVPVHPFAHLPCLLEIRPGAGGSEAAIFAGDLFRMYQAYCNRNGFRTNILKYENVNGTTEAGIPLSEAIIEVEDENAYGVFRCEAGVHRVQRVPATETKGRTHTSAASVHVLPSLQENSAEEQDFDDPESDYYIDPKEVKVEVMRASGAGGQHVNKTESAVRLTHTPTNTVVAMQDSRSQHKNKEKAWTLLRSRIAQIRREKREEEMANMRRSVIGVAK

SEQ ID NO: 329596 - protein, 67 aa, Zea mays
  Clone ID: MRT4577_63664C.1.pep
DEHMTLKIIPTFRMDVMAPLYIYFSYYMYPELNKFEAAHDGLTEKRTFLKSKPHLHKHATWVKHRQR

SEQ ID NO: 329597 - protein, 156 aa, Zea mays
  Clone ID: MRT4577_63665C.1.pep
VARRTARPTAHDCYLWDFLADALMDMAADGLVDEEQVHAFNVPFYGPCLDDLAKVIAREGSFTVRTMQLFDISRRCLLLQSASDDDDDLPQWLAMETTSTVRAVVEPMLRAHFGLEAMDGLFCRYSLRLEEYYRSNTSRNKDDLTNVFLVLEKKLH

SEQ ID NO: 329598 - protein, 69 aa, Zea mays
  Clone ID: MRT4577_63666C.1.pep
CSMVRVHNPSRHASCVPLKDLFLRFEFLCCMDPHVASCVQLLWLCWQTYGWAFVSCWCSTIFGMFCILC

SEQ ID NO: 329599 - protein, 201 aa, Zea mays
  unsure (1)..(201): unsure at all Xaa locations
  Clone ID: MRT4577_63667C.1.pep
MEREEGGEEGXGDEGRESETGRKKREEDDGXATXEREEGGEKGXGDEGRESETGQKKREEDDGGXLDGTGRRRRRRQQGDEGRESETGQKKREEDDGXLLDXREEGGEEGSXDEGRESETGQKKREEDDXDATRWNGKKEEKXQQGDEXESQRLGRRNEKRMTVDATRWNGKKEEKKAAGRRKQRVRDWAEEREEDDGGCY

SEQ ID NO: 329600 - protein, 104 aa, Zea mays
  Clone ID: MRT4577_63668C.1.pep
SLCRVVLAPPGPPVFGCSVVIRPVSVHLIFWVRSVWPWILIFSYVVGRVGRDAGVLVVSGVLCAVCLCLSRRVGEETGFVSETPPPPWRPPGGKQSRGTTRLFR

SEQ ID NO: 329601 - protein, 94 aa, Zea mays
  unsure (1)..(94): unsure at all Xaa locations
  Clone ID: MRT4577_63669C.1.pep
VSLPDQFIQHLITSRLPFGRILLAHNIRAQQLQQLVLASPATFLTQPQLLPFYHHAAPNAGTLLQLQQXLPFNQLAVTNLAAFYQQPIIGGALF

SEQ ID NO: 329602 - protein, 69 aa, Zea mays
  Clone ID: MRT4577_6366C.1.pep
HCHLLPTNDQLHISHHPCYKSQLNNALLHTAELRTQSIYYTHHTALNVATASSTLNTLVQLYNLKHAAQ

SEQ ID NO: 329603 - protein, 99 aa, Zea mays
  Clone ID: MRT4577_63670C.1.pep
QIQLPLIDRGSPPLRSTVPCISSPIPPRRPPLPWRPTSAAQPPPCPGTASPPAASLPIPLPPPASHAYPSPPPPPASTRPRPIPSLFEHPFIQYDGEDI

SEQ ID NO: 329604 - protein, 52 aa, Zea mays
  unsure (1)..(52): unsure at all Xaa locations
  Clone ID: MRT4577_63671C.1.pep
GDGPPPAGRTSHLLLLPHPGSGYLVADAHGLHFSVSRWQVPAXXXXXLIRLT

SEQ ID NO: 329605 - protein, 179 aa, Zea mays
  Clone ID: MRT4577_63672C.1.pep
MASGGASSLALAALLLVSCASAAVATKYTVGDASGWTTTGDYATWASGKKFKVGDSLEFKYAGGAHTVDEVSAADYAACSSSNALSTDSAGATTVTLKTAGKHYFICGVAGHCSSGMKLVVDVAKAVAAPAPAPAAAPAPAADTAPDAPDTTPSTPTSPSSSGGRTPKSPDTTPLAAGQ

SEQ ID NO: 329606 - protein, 119 aa, Zea mays
  Clone ID: MRT4577_63673C.1.pep
VRQGEDQRRECLRACIDACQLIPKQPHAQDRHGDYSTQPTIVTIAARRAYQTFISNMFLPQTQTESSEVESAVHVCNCNKGLRASSGEPRCFKATDGQTETRPDLGNKDPDKCRKKKKK

SEQ ID NO: 329607 - protein, 63 aa, Zea mays
  Clone ID: MRT4577_63674C.1.pep
FIYPSGSVPSWHMIFFSHLALAMGHLLALALTNMGYPARTALLYPMIDAESLISGLYMHHPLP

SEQ ID NO: 329608 - protein, 192 aa, Zea mays
  unsure (1)..(192): unsure at all Xaa locations
  Clone ID: MRT4577_63675C.1.pep
KEKSFTNKKATRGTKKFPPLRPLAFSTGVANATIFPQGSKAPKVSLFPPNLPXVIVSEGENPVLQPYRFQQEIAERNIPLSPLWFKKSPALFWGQSWEKTIGEQQGQKLGLPLINQEVWENFSPYSQKKKFFPFNQLFTLNPAVYWQKQLLPFSRLVTAYSQKKQFFPLNQLAALNPVVNLRQQILLPFSQL

SEQ ID NO: 329609 - protein, 57 aa, Zea mays
  Clone ID: MRT4577_63676C.1.pep
LTIKVCKFLLFSGEKRGEENSISKGEHAFSLKYSQPTTFFFIGYQRNKLLQNCNTMF

SEQ ID NO: 329610 - protein, 69 aa, Zea mays
  Clone ID: MRT4577_63677C.1.pep
KRTERLRGQNATKAPKADKAPKSYCRCLSVYWALDWKRTCVSERMGCCPVLWWNNVSVFVIAVRILHYA

SEQ ID NO: 329611 - protein, 53 aa, Zea mays
  unsure (1)..(53): unsure at all Xaa locations
  Clone ID: MRT4577_63678C.1.pep
GSREHVREQQAQVEKEDFSDMVAXHAAKQKQKKRKAQPQDSRGGSKKYKEFKF

SEQ ID NO: 329612 - protein, 98 aa, Zea mays
  Clone ID: MRT4577_63679C.1.pep
MDDRGGGGEAKRWPWWAAASAAQAAAGIALFRRGRSGAAVAMPFKAFGIASLFVGSGATAVAAGVLAAGVGSVEEMKGVGASIRRWMGAPPRRAGGSD

SEQ ID NO: 329613 - protein, 313 aa, Zea mays
  unsure (1)..(313): unsure at all Xaa locations
  Clone ID: MRT4577_6367C.1.pep
GRVGDDEDLLYCVPVFDPMLAEFYNPVADEGEQKPACLMLPLVETSPEFASGGLAEADGLSGFDVPDMDLASLXADMESLLMGVDDGFDDLGFLDEQNPQVNADVDLEAMAAPEPEREDKKRKRDGFDYLGFLDEEKPQVNADVDLEAMVAPEPEREDKKRKRTDMILKLNYEGVIASWVRDGGSPWYHGERPHLDDPYELWLEFPATGSRGLFGGTMTAVTGGEREARVSRYREKRRRRLFAKKIRYEVRKLNAEKRPRMKGRFVKRTTLPPLPRPPPPSQQQQKKKQLPRALPHVGMVLAPPPGADGRFRF

SEQ ID NO: 329614 - protein, 83 aa, Zea mays
  Clone ID: MRT4577_63680C.1.pep
HYHLSTIGDLVAFSASSSQCAVHKPNIRGEGIHVYLVRRVILSRSMFRLYNFNCWRRFRPLFFCILVNCARFFCIKGNFQLSL

SEQ ID NO: 329615 - protein, 62 aa, Zea mays
  Clone ID: MRT4577_63681C.1.pep
RPLLPCRSGAPPMTVSGCLSTDGSTCSTAPESRDRSPSSCSERCRYSSPHIVLVILWAATFP

SEQ ID NO: 329616 - protein, 87 aa, Zea mays
  Clone ID: MRT4577_63682C.1.pep
EGYLKVIAGVDKNINVTSKGGDDEFSELYTFKWTTLLIPPTTSLLLNFIGVVVGILGDCITSRGTEVVLNLFGSVDLILGGNPWTGL

SEQ ID NO: 329617 - protein, 182 aa, Zea mays
  Clone ID: MRT4577_63683C.1.pep
LLSPLLSVKSAALEVWKAENNSDAVIVAAEKAASAVVEAAVSTSVSRSTNQVGEERAAEEAVQTSEDQDLENFVISDKSQLLQLREKYSIQCLQILGEYVEALGPVLHEKGVDVCLTLLQMSMKDQEGCDHFAQLPDVLKLICALAAHRKFAALFVDRGGIQKILSIPRITQTYMGLSACLF

SEQ ID NO: 329618 - protein, 75 aa, Zea mays
  unsure (1)..(75): unsure at all Xaa locations
  Clone ID: MRT4577_63684C.1.pep
MSLQLLKWCEREDGAAAGCSLLALXAVSLAVEIQAAAGYGYGCGYTPTPTPDTPTPKPEKPPTKGPNPDKPTKEH

SEQ ID NO: 329619 - protein, 57 aa, Zea mays
  Clone ID: MRT4577_63685C.1.pep
CRKPHAATEIPVHIFAPLDNGMLASTASRCDGEHIMANDSSEVDGDMMIKGIRWLLN

SEQ ID NO: 329620 - protein, 67 aa, Zea mays
  Clone ID: MRT4577_63686C.1.pep
QGQFCHKSMDAFSPFTEKDTWEQATSRKRSAMALVESWLSRCPKQLTGPPNSKRRAPAVGLAMPWGS

SEQ ID NO: 329621 - protein, 112 aa, Zea mays
  Clone ID: MRT4577_63687C.1.pep
VGGSFKIFLGNIFGPHRVWLRITIGKFVQQTFLEFSSFEGNNKLRSGTMVVPLYPPPKACSFVLWVCLVMECPSAGISPPQGGHGGPRDCVVKLCNELKVFFVRASPWFYFL

SEQ ID NO: 329622 - protein, 62 aa, Zea mays
  Clone ID: MRT4577_63688C.1.pep
CLRCKSDLLVPAIFMPTRPYLLCGQGSYRSWMPKGGLFAANKAEGTPVFVGGFPVGCRAQAG

SEQ ID NO: 329623 - protein, 43 aa, Zea mays
  Clone ID: MRT4577_63689C.1.pep
HHHIILLVLHSGLHTRRWLTNSRHLHRADCAIQHNRFHNSTPT

SEQ ID NO: 329624 - protein, 331 aa, Zea mays
  Clone ID: MRT4577_6368C.1.pep
MVCMVGNFKMSSVLKLVMMENHATPDDVIHEMTAAQVLQKQLFDAHEPNLLDENDMHIFGSKPMADPLDLVCCSTCKKPVKASQYAIHTGQCSSGKVNTNGSVGVDHANPTKPLKKGRKIKLISNGNQKVHIKVKAKSQTESKNIANSFELDNGHVTKVQPIDSTGLGLSVDSSATINVPKNHPRDAPVPLATKMYHSQGNYRLRFELGQLYRESCVQHLSGHTTPNVSHENGLMASSRFSSCGNSALPTQKSLVPQTKPLADPQQLAASRPNQSQGTKTDRASAQASAIKNEGSRSRCNKATIPHSRNKGSKKTQQQPNGRVHAIKFPVE

SEQ ID NO: 329625 - protein, 71 aa, Zea mays
  Clone ID: MRT4577_63690C.1.pep
KYCPYKIQIVHYLDPKFPYHFPNLSLFLPKRGAVFFFHTNKAKPPTLNSLIQKQNVTLFNSCSGSYPPQST

SEQ ID NO: 329626 - protein, 32 aa, Zea mays
  Clone ID: MRT4577_63691C.1.pep
HCRLLEVQVHVSLVSLSTHQTRCDNISECYSE

SEQ ID NO: 329627 - protein, 103 aa, Zea mays
  Clone ID: MRT4577_63692C.1.pep
TNMSALALQPIKMMFDGKLKIELFSYNFFHHGLLPKSYQHQNHWLNKAWVPKIRGADAESVEPLVEPMPNLSQSGGMRNRQNRAPSASVSALDNGTINWTRTN

SEQ ID NO: 329628 - protein, 69 aa, Zea mays
  Clone ID: MRT4577_63693C.1.pep
LILNFIYKGVSARVAISGLNHIAPAGISMHLFPWFLYMYSKPAFFMSHCRESDRYVQHHIQACDSCTSS

SEQ ID NO: 329629 - protein, 47 aa, Zea mays
  Clone ID: MRT4577_63694C.1.pep
RAYAKPICTGCYLELHTSVTTDRLDGICDGDYTVSITCVRYNKTRRP

SEQ ID NO: 329630 - protein, 227 aa, Zea mays
  unsure (1)..(227): unsure at all Xaa locations
  Clone ID: MRT4577_63695C.1.pep
MGDHEARGDDTERKADKKLSGWGLFGSKYEDAADLYDKAANFFKLSKNWNRAASVYIKIANCHLKGDSKHEAASAYVEAANCYKKFSPQEAAQALDQAVNLFLEIGRLSMAARYCKDIGEIYQQEQDLEKASDYLERAADLFDSEGQTSQSNTIKQKVAEIAAQLEQYPKATEIFEEIARQSINNNLLKYSVRGILLNAGICQLXRADAVAIQNSLERYQEIDPTFS

SEQ ID NO: 329631 - protein, 122 aa, Zea mays
  Clone ID: MRT4577_63696C.1.pep
RARGFFRLDFPFTRDQKALAGFNMFTFRCILQPKKGAVGNGLYLPPPRKICKRFKGMFGGIPPVMLGVVDKGGSFWLFSNQQPNQIRAMPRPVSPHNPLALCWSAQPIWWFLGCLALFAVLR

SEQ ID NO: 329632 - protein, 128 aa, Zea mays
  unsure (1)..(128): unsure at all Xaa locations
  Clone ID: MRT4577_63697C.1.pep
MAGATDTAQPNGCGPXDNNXSQCGFNDNIQYPFMSMGSCGNQPLCKDEKGWGSXYNSQVKEGTCLLRAXETWIIIDMNYYPAPKHHFYLSNTVCARLPNPGLNDXLLHSRIIDIESQHXPREIPDLKI

SEQ ID NO: 329633 - protein, 65 aa, Zea mays
  Clone ID: MRT4577_63698C.1.pep
TGRFGKRRHKTHTLCVRCGRRSFHLQKSRCAACAFPAARTRKYNWSVKAIRRKTTGTGRMRYLRN

SEQ ID NO: 329634 - protein, 80 aa, Zea mays
  Clone ID: MRT4577_63699C.1.pep
SIHRRCNGLTRDRFDTRHEGIHVSLALSQIINLLFDIHPAISVGIRDSLVTIGSMLFATHVFPSEQVRDLFNTVFFSSMV

SEQ ID NO: 329635 - protein, 35 aa, Zea mays
  Clone ID: MRT4577_6369C.1.pep
EAASKMRVAWGRLVDNLSAMRSSYTARKSSRALLC

SEQ ID NO: 329636 - protein, 256 aa, Zea mays
  Clone ID: MRT4577_636C.1.pep
TSLTCSIFLKAASDVYHLYWFLTPLSCVFCSVIWWPLGKHDKLISIDDRNIFLWNVDMSKKIAKVISQGSTDMLPNLRGGAWDPHNHNLVAAISDSSLQLWDLRSMEKSTAIEHAHIRDVDYNPKKQNIVATAEEEFGIRLWDLRMLKYPLKDLPGHSHWTWAVRHNPAYDELLLSAGTDSTVNLWLAKVSSDDSESDSPSGLPNRQEVPLLNSYTDYEDSIYGIAWSSHDPSLFASLSYDGRVVLESVKPYLQRK

SEQ ID NO: 329637 - protein, 58 aa, Zea mays
  Clone ID: MRT4577_63700C.1.pep
NYNLMFSYGDSLTHTLNLLVSSPLFNHIEGRYLYGMTYLHPPTGRFFDRRLIVKFLTQ

SEQ ID NO: 329638 - protein, 45 aa, Zea mays
  Clone ID: MRT4577_63701C.1.pep
GGQHELKRSHYSGEARLPKMTTQWVQVPGVTQLYRAYQDRTFNVD

SEQ ID NO: 329639 - protein, 43 aa, Zea mays
  Clone ID: MRT4577_63702C.1.pep
CTQSKGEHRVSEASFCLSWRSDGYKTQIVCPGQYLHNVSRVGV

SEQ ID NO: 329640 - protein, 426 aa, Zea mays
  Clone ID: MRT4577_63703C.1.pep
MASAPAPAPSPSVPACSDLPAAVSAFADAFVDFAVSGIFFPTFPSSSSPPPRPKTPTTFLPSPSRLVAIGDLHGDLPKSLSALRLAGLVPPSCTPDSPSASSSWAAGPTLAVQLGDILDRGGDELRLLYLLRRLSLSAESRGGAFLPILGNHEVMNVSGDFRFATPQGFQEFSAWAGWYRAGLAIKRRCGEHLDPQPRNPFLGVPKSFPGVKPEFWDGMRSRLAALRPDGPIARRFLADLPTVLVVGDSVFVHGGLLEANVEYGLERINAEVSEWIRGEGGDNARAPEYVRGRDAVVWLRRFSDGFDCDCKRLEGVLGMIPGAKRMVMGHTIQTVGINAVCSAQAVRVDVGLSRGCGNGLPEVLEINAGGTDVRVITTPPSEAWMYRKQEVEKAAAAVTEKSVEVKDGLALLVRESHGLKEVGVKA

SEQ ID NO: 329641 - protein, 65 aa, Zea mays
  Clone ID: MRT4577_63704C.1.pep
FSEQKVLVLVKEPQQGPPPPPPESGKELEEEVNLEFCSRIDPHRRFLVWGGKELAPVVAPPPPTI

SEQ ID NO: 329642 - protein, 97 aa, Zea mays
  Clone ID: MRT4577_63705C.1.pep
TSKDDARTRTLARNSARGAHRSKAGQAGWSQELRGGPKNSVLRPLGRVLRLSRQLHQLAQQAQAIRHPVSCVHAGRLLQECHGEERGANSVYTVCAV

SEQ ID NO: 329643 - protein, 92 aa, Zea mays
  Clone ID: MRT4577_63706C.1.pep
MHPRSAATVRLCLVCLALLLLTRDVRSRNLVGAVVQKERHKQSHGGHGGATPEPPVEEGSDAGAKRGQLQRDLTRWEEIHTDYIYTQDVKHP

SEQ ID NO: 329644 - protein, 27 aa, Zea mays
  Clone ID: MRT4577_63707C.1.pep
PNNLNIHYLALHNRISQYSYIHPHSSI

SEQ ID NO: 329645 - protein, 61 aa, Zea mays
  Clone ID: MRT4577_63708C.1.pep
TKRASRTATTQNAEERAGARHPHERGGQARKNGPGLGAVTRNGTGSRKSRSNCLWTMDLHK

SEQ ID NO: 329646 - protein, 74 aa, Zea mays
  Clone ID: MRT4577_63709C.1.pep
MPLQNDIDLLNPPADLDKVKHKTQRLAQSPHSYFLDAKRHPRSTITTDFPHSHTVAARPDSQTDLCHATGGKAR

SEQ ID NO: 329647 - protein, 65 aa, Zea mays
  Clone ID: MRT4577_6370C.1.pep
KSGHDFLSIRHAKTGESSNKERIKQFTTYVIKTNFVIKTPGCPQPILLVPIKKMYQVCQCRDDSL

SEQ ID NO: 329648 - protein, 88 aa, Zea mays
  Clone ID: MRT4577_63710C.1.pep
HKHFPRERRNRLNKDLKIHSGPCTHHINQRSSALEQTVYSLSRPKVVLTDTDEDDSFVYKLLVTSKQNVCCIYTNWTRRIRAHQTLKV

SEQ ID NO: 329649 - protein, 82 aa, Zea mays
  Clone ID: MRT4577_63711C.1.pep
EHNVGTWCYHNFTLHADTLGPPHAPRLVLPSLFQLLHCGPQRQCSQLLRLLSTRPHPRSYHIVKKNAERALESTPPASEIWG

SEQ ID NO: 329650 - protein, 65 aa, Zea mays
  unsure (1)..(65): unsure at all Xaa locations
  Clone ID: MRT4577_63712C.1.pep
APSGVCNINYLTPKTMKLVLVVLAFIALXSSAYLYTDRRLQMRTTSFVFSHIIFSHLFFSLYHIH

SEQ ID NO: 329651 - protein, 99 aa, Zea mays
  Clone ID: MRT4577_63713C.1.pep
EKSTLNPNAKEFKLNPNAKSFTPSASLRPPHPTSSDASYYYPNNMPAVPLGPGLPVGMGFPPAYGAQPVMYNTQPGASPHGYMHPAGPQEMQQYRGRNF

SEQ ID NO: 329652 - protein, 602 aa, Zea mays
  unsure (1)..(602): unsure at all Xaa locations
  Clone ID: MRT4577_63714C.1.pep
MMSHEQQIVPPSKGSVNGFPHRKLDKEGSGTQSRINLVRSSSGGFTNSENGIKLGHGSHSRDRLIYVLTQLIGHHVDVHVNNGSIISGIFHATNPDKDFGVVLKMAQVIKDGSARGQRYPAVLVKKPETMIIPARELVQVFAKDIELGGELPKVPGNDKRKDLLIDSAITRYHYLEERELERWAPDGGDSECIELEKYDRKGNRSWDQFETNAALFGVKTTFNEEIYTTKLERGPHMRELEKHASRIAREIEGEDTRDIHLAEERGLFLGDDLDHDEEIKYSAVRRDTDNSKYKPPFTKVPSSTCHVDSFNRTVNIDPNDSLACSSTMDKESSSHIFDDTDASATIHTNSVSQPTSDYLSDRPLSNDENRLDRKLNKESNENMDNRKLQHEDNLPDGARPLISEALDGRSSSSHAXTVFFWSRIQISRNTRFDSACQASXAMEPVTSSQRPGSSTSSTSERIGANSATGAPGLSPSSSIGSLTAEKSTLNPNAKEFKLNPNAKSFTPSASLRPPHPTSSDASYYYPNNMPAMPLGPGLPVGMGFPPAYGAQPVMYNTQPGASPHGYMHPAGPQYGQQMTIGGQTRPVYYYAPEMQQYRGRNF

SEQ ID NO: 329653 - protein, 129 aa, Zea mays
  Clone ID: MRT4577_63715C.1.pep
DALCYLHTSSVPPIVHCDVKPSNVLLGEDMRAVVGDLGLAKLLHESGSHDTCNDTSTVGLRGTVGYIPPEYGTTGKVSTHGDVYSFGITLLEIFTGRSPTDDAFKDGLTLMEFVAASFPDKIEQVLDRA

SEQ ID NO: 329654 - protein, 72 aa, Zea mays
  Clone ID: MRT4577_63716C.1.pep
HDDGMAITDKKRCTVAEIAVYKDRSHSHLRQCARFRYSTTQVAFSDLVSCSCFIRSPFTSSPSCSLLLRSYS

SEQ ID NO: 329655 - protein, 65 aa, Zea mays
  Clone ID: MRT4577_63717C.1.pep
PTRPPTRPPTRPGSQFFICTVATSWLDGNHVIFGQVVKGMDVVKAIEKVDTRNGFTYKVVKVADC

SEQ ID NO: 329656 - protein, 635 aa, Zea mays
  Clone ID: MRT4577_63718C.1.pep
MPSRAAIRMKPPSFSVSLTTASQLHDAIDRLLSLLRADASHAPAARAIAAAVASLRPPSTLLSNRILHLLSSHPATLPDALALLSSLPSTDVCSYNTLVAALGRSPRGLASARALFDRMPRRDHFSWSAIVSAHVRHGQPRAALAIYRRMLREPGGSGADNEFTASSALAAATAARCARAGRELHCHVVRRGIDADAVVWSALADMYAKFGRLDDARSVFDRMPVRDVVSWTAMLDRYFDAGRDGEGFRLFVRMMRSGILPNEFTYAGVLRACAEFTSEKLGKQVHGRMAKSRTGDSCFAGSALVHMYSKYGDMGTAMRVFRGMPKPDLVSWTAMISGYAQNGQPDEALHCFDMLLSSGFRPDHVTFVGVLSACAHAGLVDKGLGIFHSIKDKYGIEHTADHYACVIDLLSRSGLFERAEDMINTMPVKPNKFLWASLLGGCRIHKNVRLAWWAAEALFEIEPENPATYVTLANIYASVGLFDEVENMRRTMELRGITKMPASSWIEVGTRVHVFLVGDKSHPQAEEIYALLKKLYVKMREEGYVADTGFVLHDVEDEQKQQDIGYHSERLAVAFGIIATPKGSPIKVFKNLRICGDCHTTIKLISKIVQREIIVRDSNRFHHFKNGSCSCRDYW

SEQ ID NO: 329657 - protein, 88 aa, Zea mays
  Clone ID: MRT4577_63719C.1.pep
LEEICRIVPGGALVFFPSYKLMDKLQVRWSQTGQWARLNAQKHVFVEPKGSSEELDPVLKGYYDAILGKAPVKKGRCGSKQIAKIRVT

SEQ ID NO: 329658 - protein, 58 aa, Zea mays
  Clone ID: MRT4577_6371C.1.pep
YGYRSFLADTTGGRSIIANANPHGGEGRRLLHRLPAIGRTRLQRAPSPGEPPKATSPG

SEQ ID NO: 329659 - protein, 76 aa, Zea mays
  unsure (1)..(76): unsure at all Xaa locations
  Clone ID: MRT4577_63720C.1.pep
MIPCSMEYWPDPLRGIKEAYRVLRLVGLASLXIGPMYPAFWLSRFFADMWALFPKEEEYIESFKKAGFKDVKLKRI

SEQ ID NO: 329660 - protein, 87 aa, Zea mays
  Clone ID: MRT4577_63721C.1.pep
RGSVVCHYLVCEDPGDGLGPRSQCNLLAAIAMLWGRGSLCRHLFSCVHMVCYLQKGDITRLHVTEVSKTSGEVVCEERSRPASRYPM

SEQ ID NO: 329661 - protein, 63 aa, Zea mays
  Clone ID: MRT4577_63722C.1.pep
LPPLVPSTDTTKKWKRYVHMVLLFYEMYVHSTYDSQKLKVFFFTTCRVHGCFHLLPAVFSTTI

SEQ ID NO: 329662 - protein, 141 aa, Zea mays
  unsure (1)..(141): unsure at all Xaa locations
  Clone ID: MRT4577_63723C.1.pep
AKPVGRLLRVXPGELPGMSSRVPTVKGPLVGLSVRLLRRASWAPSRVSFEPACGGPFPGILAFVAGDLFSTPSPGFPRSTIFSAXSGGAPTGRFTKPVSWSCSAWGSSPGGVVLKHHLSPPRWVGPKVLLCPPILGGRQWP

SEQ ID NO: 329663 - protein, 526 aa, Zea mays
  Clone ID: MRT4577_63724C.1.pep
MSKPWGGVGAWALDAERAEEEEREQVLAFPAPEPPAAAGGAASFPSLREAASAGGKGKSKKKNKGTTLSLSEFTTFGAAAAQRRAAPVEPKGLTHEEMMLLPTGPRERSAEELDRSRGFRSYGGGGGFGAGAGGERRGGFDDEGRRGPGRSSDLDMTSRADEADDWGATKKFTPAPADSGRRDRFGGPSPLGRADDIDDWSRDKKPLPARYPSLGSAGGFRDSPGFRDSSASSDADRWVRGATPMPHNGQGAGERPRIVLNPPKRDPSAASTPPAEVARNRPSPFGAARPREDVLAEKGVDWKKFENEIEQKTSRPTSSHSSRPNSAHSSRPGSPGSQVSAVGSEGAPRARPKVNPFGDAKPREVVLQEKGKDWRKIDVELEHRAINRPESDEERNLKEEINLLKVDLKEIEGKMSNGSEQTSVDAKDLSEKISMLESQLEQLSRELDDKIRFGQRPRSGAGRVTALAPTSLGEEPQATVVDRPRSRGGMEPPPRQEERWGFQGSRERGSFGGSRNSDRPMARQRW

SEQ ID NO: 329664 - protein, 177 aa, Zea mays
  Clone ID: MRT4577_63725C.1.pep
GTSKVNPFGDAKPREVVLQEKGKDWRKIDVELEHRAINRPESDEERNLKEEINLLKVDLKEIEGKMSNGSEQTSVDAKDLSEKISMLESQLEQLSRELDDKIRFGQRPRSGAGRVTTLAPTSLGEEPQATVVDRPRSRGGMEPPPRQEERWGFQGSRERGSFGGSRNSDRPMARQRW

SEQ ID NO: 329665 - protein, 190 aa, Zea mays
  Clone ID: MRT4577_63726C.1.pep
PLPRLVFPPGGGVFSPPFTGKILKRAPPLGLKGPWEVLLGGFVKGGPLFVLFWAPPPGVPTPRPFFKSARLPNKRGVVFPNRGLGVFLERLAFNQGLGGFFNLFPPVFPIGPLLKTRGFFFGPLFFIPLRASQVGSRSQGNRPWETLNPLFWAQGGPPKARWVFFSVKGPQGGKKKTPQVFFFLVGKGRD

SEQ ID NO: 329666 - protein, 55 aa, Zea mays
  Clone ID: MRT4577_63727C.1.pep
MNTCFYVIRATPDILHILARDNDFHELKFDLYVRPLLHHLHSGYEGNRYCEATAR

SEQ ID NO: 329667 - protein, 74 aa, Zea mays
  Clone ID: MRT4577_63728C.1.pep
NSAALAHGPVVLRSCDTSYTPRNPTTPRANWTLPCATRPRSQLPLYPEERLPGPLAHWSENLPTQTGPTGYDLP

SEQ ID NO: 329668 - protein, 72 aa, Zea mays
  Clone ID: MRT4577_63729C.1.pep
AVAPTLRASVLAALPPSDRWVVFVGPYEHHSNLLTWRESLAEVVEVGLPAPDCIGCPGLVKTQFFNPIVFNM

SEQ ID NO: 329669 - protein, 173 aa, Zea mays
  unsure (1)..(173): unsure at all Xaa locations
  Clone ID: MRT4577_6372C.1.pep
MEEKRNERLACFRKTKNGVIKQIGGASTSSKKVQGELQGKRVENLSYAPRYSRAAAHNDVNQTVNERSGDSVMNFNLQQPYYQSMAYGPSIPPIGNMIPQGFVPNDYRIGEQKSLLSASGVTHTACEGERSEGVREQLARTLKEFGFEPKGHTRSYRKPYPEFFDTXPYPRGF

SEQ ID NO: 329670 - protein, 125 aa, Zea mays
  Clone ID: MRT4577_63730C.1.pep
MEEPLPKPAPSAAAEEVAERFRSLVDPDDVASIRQTQHLIMGRLQDSNAVLTHFNEYSERCFVEVSGDFASKTRLLKSMKADLDHIFTKLREMKARLAATYPDAFPNGAMSKTMDQRPDLESPLD

SEQ ID NO: 329671 - protein, 78 aa, Zea mays
  Clone ID: MRT4577_63731C.1.pep
HCQGSLYRHTLQSSIPLILLLQELRIACLSPWVRSASSVPMCFCTVSEFSCSWDLRQNPPAGACSISAPSSIVGLLSI

SEQ ID NO: 329672 - protein, 47 aa, Zea mays
  Clone ID: MRT4577_63732C.1.pep
GARLHVHVDFLIMKLSQDEALKTVGGPLSVDMWLVGATLTNEPIAIG

SEQ ID NO: 329673 - protein, 74 aa, Zea mays
  Clone ID: MRT4577_63733C.1.pep
HVGRSVRMRGRAIEKEWLVATKTLLSLGAPDCPVVHRTASGAPTCKRLPSYSTDFLPILRITFTLLSVRSPHFP

SEQ ID NO: 329674 - protein, 61 aa, Zea mays
  Clone ID: MRT4577_63734C.1.pep
VIVCMDYLEYEWSTDIMWYCVCQIATLLSSMLRKHPPWLCVAKQYWLTCCRLSTRGSAGFP

SEQ ID NO: 329675 - protein, 123 aa, Zea mays
  Clone ID: MRT4577_63735C.1.pep
MLCLVIQMTDLWTLFHISKRFFFFVFVLVQVNEYSALKDSALYSWAELSPGSFFLRLGGLCLVTFTVLAAPIAAASFNPGKVRRNSDPQPSLHTYVPVILAWPFLPWSLKFCPKPRRIHSSSC

SEQ ID NO: 329676 - protein, 40 aa, Zea mays
  Clone ID: MRT4577_63736C.1.pep
LQSWSSNFEDMDDRAITVLGLMHTVDQRNDRDTHPGRPSR

SEQ ID NO: 329677 - protein, 63 aa, Zea mays
  Clone ID: MRT4577_63737C.1.pep
QCFMHHHNPFEICLFFYQANLFYYYLTIPVRMLFQEFTENYLTGPSPSFLLPWRIDCFATDVR

SEQ ID NO: 329678 - protein, 47 aa, Zea mays
  Clone ID: MRT4577_63738C.1.pep
VTEVIRSCAAKVNKNLSITSPPPGPAKKPRVKQSFVLTTDQIIHQFG

SEQ ID NO: 329679 - protein, 172 aa, Zea mays
  unsure (1)..(172): unsure at all Xaa locations
  Clone ID: MRT4577_63739C.1.pep
KSVEQNQSVTTPRALEQGNTDSRSPPRRAFPIRXSNPAAAAMAAEKPAPAKVLYCGVCGLPAEYCEFGPDFERCKPWLRAHAPRVYPDELVASSSGGDDKDVGKVGERLQGVSISTADGSTSAGGASASKTEEVKRLPGGKLKKKDKQEVIIEKIVRNKRKCXTVVKGLDLF

SEQ ID NO: 329680 - protein, 106 aa, Zea mays
  Clone ID: MRT4577_6373C.1.pep
FGSSLILLDSILSTPKRLLVEPLHLRAPSEALVWQCPIFKVVLLRMVTHPLLNMVYLSVRLPTRSVHLPDAGLLLMLQETWAAMGVRASNSVPHAYSLAAFAARLS

SEQ ID NO: 329681 - protein, 133 aa, Zea mays
  unsure (1)..(133): unsure at all Xaa locations
  Clone ID: MRT4577_63740C.1.pep
DNDLSINDYLNDYVAKNATFLANFVARYSKKYFKKAQRTVHXRITNCLMMYVLINGHNVMDKVMIKHIMKIIQLITDVNTIHEVMHAIINSRLHEDATQVATAVVARRHARNISPDIWVNQTMYLVINVVSES

SEQ ID NO: 329682 - protein, 99 aa, Zea mays
  unsure (1)..(99): unsure at all Xaa locations
  Clone ID: MRT4577_63741C.1.pep
RVGETYSGHMMPNVDLTFWLNWASAGEKRDDTPEYTIFVGDXDADDTDYLLHETFRDHYPYVKGAEAVIDQLTLLTQGDGFVIYGDPTEKACARTVMNG

SEQ ID NO: 329683 - protein, 79 aa, Zea mays
  unsure (1)..(79): unsure at all Xaa locations
  Clone ID: MRT4577_63742C.1.pep
TRRFTCTAIPWPMVLPSTPFQLRKSKPSTPTTRSPGLTTATEHSQPGACCLQQPLQSPXAFACTPLAGAGLPAPAASSG

SEQ ID NO: 329684 - protein, 59 aa, Zea mays
  Clone ID: MRT4577_63743C.1.pep
MPGYTDKIRSAAAGTTEYGKQLASTVYEKVASVRTAVAGKVQQATQSARTATPGVRAHR

SEQ ID NO: 329685 - protein, 129 aa, Zea mays
  Clone ID: MRT4577_63744C.1.pep
SMINVSNVIPESELQNPTDHPAMERELNTNPSGEKHDSLGVTASQFTPLIFSRIQPLKCPPLARSNSTCTHEPHHSRQQEEQLCGRTKPSCPQQQHMDTDQSRPHCSSPYCEYHATLRRADTRRPRALA

SEQ ID NO: 329686 - protein, 150 aa, Zea mays
  Clone ID: MRT4577_63745C.1.pep
MMLLAKLGAPSVPGCVMDRRKLLLVPAISMAIASFQYTFVKGIAKAEFADMPALRGKDYGKTKMRYPDYTETESGLQYKDLRVGDGPSPKKGETVVVDWDGYTIGYYGRIFEARNKTKGGSFEGGDKDFFKFKVGSGQVIPAFEEAISGM

SEQ ID NO: 329687 - protein, 232 aa, Zea mays
  Clone ID: MRT4577_63746C.1.pep
MMLLAKLGAPSVPGKRRVEEDAISCRIETYHGCVMDRRKLLLVPAISMAIASFQYTFVKGIAKAEFADMPALRGKDYGKTKMRYPDYTETESGLQYKDLRVGDGPSPKKGETVVVDWDGYTIGYYGRIFEARNKTKGGSFEGGDKDFFKFKVGSGQVIPAFEEAISGMAPGGVRRIIVPPDLGYPDNDYNKLGPKPTTFSGQRALDFVLRNQGLIDKTLLFDIELLKIIPNQ

SEQ ID NO: 329688 - protein, 51 aa, Zea mays
  Clone ID: MRT4577_63747C.1.pep
VRLIVQTGDAGKTISPWILEALERNSIQKPEYFFNETANQPWQFLIYKLIN

SEQ ID NO: 329689 - protein, 73 aa, Zea mays
  Clone ID: MRT4577_63748C.1.pep
FFLPACFPRLCFFQTQLRSSFLGFFNNVRGVFFIFGHFPLLGKRTNKVLPPRSLSECTVNFASRLFFHSRIIL

SEQ ID NO: 329690 - protein, 89 aa, Zea mays
  Clone ID: MRT4577_63749C.1.pep
FPKALFPSFFLGSLPGAAPPPCWFLFLGGGLLYLIFGHFWGGPPPIRLPGPPSSRFPLNPPPSRGFVLNMCLSIFLVPIRVFHLFKCPP

SEQ ID NO: 329691 - protein, 207 aa, Zea mays
  Clone ID: MRT4577_6374C.1.pep
MASSKLFAVGLTVLLSIIGLCNAIRVVNHATADGQGGGGGGGGGSGTSYGSGSGSGYGDAEAYDGSAQSPTSGHAYGSGSGDGGGVWQGDDECASGYGAGGASGEGHGDSGNSNTDGAANASGAGGGGGSGGSNGNGSGSGGGSGVGEGEGDNYGPYGSSYANSGGAGRGSGGGRNGGFGGGSGGGAGSSGGAASGYDDGSYNGSTP

SEQ ID NO: 329692 - protein, 36 aa, Zea mays
  Clone ID: MRT4577_63750C.1.pep
TQAWLEEPGNLSTWTLEVIEVLVVTQGLDEALRSLP

SEQ ID NO: 329693 - protein, 74 aa, Zea mays
  Clone ID: MRT4577_63751C.1.pep
ITHLPTTEVSNLKDWTAYKQLSLQLILHEPSVPIQSIPTNFRLFTLLLSFTRTRQQNYLSNLIQNELHYSFSLN

SEQ ID NO: 329694 - protein, 74 aa, Zea mays
  Clone ID: MRT4577_63752C.1.pep
CCLPIKNVIDLKNLAVGDKDFVKRVFVCAPDKTTYLINGTQHLMPQSRSAHPRNGTPENLVNPNLNRRGRKSQP

SEQ ID NO: 329695 - protein, 55 aa, Zea mays
  Clone ID: MRT4577_63753C.1.pep
RHGRSIKLWALSSTHDQRTLNNIAYSSTFTLSAGKRQSGRFSMKYPSQGYACFFT

SEQ ID NO: 329696 - protein, 143 aa, Zea mays
  unsure (1)..(143): unsure at all Xaa locations
  Clone ID: MRT4577_63754C.1.pep
IRSIGYSCRPVEGLRLFIDLTTAPTPMPSFTSSPANAGKSLFQGCHKFLGKAGKMLGPGASTQYRTTIPCRASMHRYSARPAGLTTETRASRPHPNXYTVYHIXHLTRNHSRXRWPVHLTLLRPPDLHRYMATKTLDLPEDFL

SEQ ID NO: 329697 - protein, 80 aa, Zea mays
  Clone ID: MRT4577_63755C.1.pep
SSLWVSDVYLYRRVAGLLLVSILWFTQLDDTFLADYPNWELHRHLWYLVGLAPRCVMSLSAPPSTFPWSCFSLHPVRDHG

SEQ ID NO: 329698 - protein, 295 aa, Zea mays
  Clone ID: MRT4577_63756C.1.pep
MAAAASTTSRTNSRVNYSNEIHDLSTVQSGSAVPTLFYPDKSIADIFPPHLGKKVISEVVATFLLVFVTCGAASIYGEDNRRISQLGQSVAGGLIVTVMIYATGHISGAHMNPAVTLSFACFRHFPWIQVPFYWAAQFTGAMCAAFVLKAVLHPIAVIGTTTPSGPQWHALLIEIVVTFNMMFVTCAVATDSRAVGELAGLAVGSAVCITSIFAGPVSGGSMNPARTLAPAVASNVFTGLWIYFLGPVIGTLSGAWVYTYIRFEEAPAAKDTQRLSSFKLRRMQSQLAADEFDTV

SEQ ID NO: 329699 - protein, 293 aa, Zea mays
  unsure (1)..(293): unsure at all Xaa locations
  Clone ID: MRT4577_63757C.1.pep
MAAASTTSRTNSRVNYSNEIHDLSTVQSGSAVPTLFYPDKSIADIFPPHLGKKVISEVVATFLLVFVTCGAASIYGEDNKRISQLGQSAPLGLIVPPLILSPXAITGPALXPARPAWTAWCARPPCTXVPFYWAAQFTGAMCAAFVLKAVLHPIAVIGTTTPSGPHWHALLIEIVVTFNMMFVTCAVATDSRAVGELAGLAVGSAVCITSIFAGPVSGGSMNPARTLAPAVASNVFTGLWIYFLGPVIGTLSGAWVYTYIRFEEAPAAKDTQRLSSFKLRXMQSQLAADEFDV

SEQ ID NO: 329700 - protein, 93 aa, Zea mays
  Clone ID: MRT4577_63758C.1.pep
GPLKGRPRGRQFYGEFQKLPLGWVRARDKTFFFFFFFFKGVFFFFFFFSQVGFFFFFPFFWSKFLLPFFFGRAYFIGHPSHDNVCRLTALLHI

SEQ ID NO: 329701 - protein, 312 aa, Zea mays
  Clone ID: MRT4577_63759C.1.pep
MSVSSPAMASPPLAAPGTHRGPCFSTLCRLPSPSCYPPLSASSSPAISTVSAFAVLKHKPRVRNYVSGLGLRCQAAEEAPPPARGKTSLKVMISGAPASGKGTQCRMIVEKYGLVHISTGDLLRAEVSSGTEIGKKAKEYMDNGKLVPDQVVTDMVVSRLSQPDIQERGWLLDGYPRSFSQAQHLENLKIFGSIFIVLEVPDDVLIDRCVGRRLDPVTGKIYHLKNYPPENEEISARLITRSDDTFEKVKSRLDTYKQNSEAILPTYSDLLNKIDGNCPAEVVFQAIDFLLQKICENTSASKLTKTNGKRPD

SEQ ID NO: 329702 - protein, 48 aa, Zea mays
  Clone ID: MRT4577_6375C.1.pep
ESLARLLEFRSCIAGSTPRVRVLYFCSQYSYFLRQNSFLIIANRKQPV

SEQ ID NO: 329703 - protein, 225 aa, Zea mays
  unsure (1)..(225): unsure at all Xaa locations
  Clone ID: MRT4577_63760C.1.pep
MAAASTTSRTNSRVNYSNEIHDLSTVQSGSAVPTLFYPDKSIADIFPPHLGKKVISEVVATFLLVFVTCGAASIYGEDNKRISQLGQSVAGGLIVTVMIYATGHISGAHMNPAVTLSFACFRHFPWIQVPFYWAAQFTGAMCAAFVLKAVLHPIAVIGTTTPSGPHWHALLIEIVVTFNMMFVTCAVATDSQGXVGELAGLAVGSAVCITSIFAGXPCRGGSMNP

SEQ ID NO: 329704 - protein, 77 aa, Zea mays
  Clone ID: MRT4577_63761C.1.pep
SPRFCLLFLYQAFFVFCTPRLLPLWSYRCCCGKDSCDCPLVLQLRAAHFWARFLEQRGIHGRASARALDPHAWADAW

SEQ ID NO: 329705 - protein, 82 aa, Zea mays
  Clone ID: MRT4577_63762C.1.pep
GGSERAMKSTLANSVSTLSRPLSVCGLVRMVCDIVRNIYHTDSTHQPTIMPASAPMRPHWPSTTGFRGWSSFFFFFFFFCFF

SEQ ID NO: 329706 - protein, 296 aa, Zea mays
  unsure (1)..(296): unsure at all Xaa locations
  Clone ID: MRT4577_63763C.1.pep
MAAASTTSRTNSRVNYSNEIHDLSTVQSGSVVPTLFYPDKSIADIFPPHLGKKVISEVVATFLLVFVTCGAASIYGEDNRRISQLGQSVAGGLIVTVMIYATGHISGAHMNPAVTLSFACFRHFPWIQVPFYWAAQFTGXAMCAAFVLKAVLHPIAVIGTTTPSGPHWHALLIEIVVTFNMMFVTCAVATDSRAVGELAGLAVGSXAVCITSIFAGPVSGGSMNPARTLAPAVASNVFTGLWIYFLGPVIGTLSGAWVYTYIRFEEAPAAKDTQRLSSFKLRRMQSQLAADEFDTV

SEQ ID NO: 329707 - protein, 273 aa, Zea mays
  unsure (1)..(273): unsure at all Xaa locations
  Clone ID: MRT4577_63764C.1.pep
MAAASTTSRTNSRVNYSNEIHDLSTVQSGSAVPTLFYDPDKSIADIFPPHLGKKVISEVVATFLLVFVTCGAASIYGEDNKRISQLGQSVAGGLIVTVMIYATGHISGAHMNPAVTLSFACFRHFPWIQVPFYWAAQFTGAMCAAFVLKAVLHPIAVIGTTTPSGPHWHALLIEIVVTFNMMFVTCAVATDSRAVGELAGLAVGSAVCITSIFAGPVSGGSMNPARTLAPAVASNVFTGLWIYFLGPVIGTLSXGAWVYTYXXRFEEXPAXAS

SEQ ID NO: 329708 - protein, 36 aa, Zea mays
  Clone ID: MRT4577_63765C.1.pep
MSRRKTREPKEENVNLGPTVREGEYVFGVAHIYASF

SEQ ID NO: 329709 - protein, 60 aa, Zea mays
  Clone ID: MRT4577_63766C.1.pep
RIEFSGFQNPDAQMFRGTREAIEVCELVSNMVTVSAYQHMQKSPRAQDVLIACVRTLVRF

SEQ ID NO: 329710 - protein, 69 aa, Zea mays
  unsure (1)..(69): unsure at all Xaa locations
  Clone ID: MRT4577_63767C.1.pep
SVKVLVMLLFKSLLLPSGFSLDAPPTFGTRILRMIKRGLSIDEDQSVGAXPEMPPLEDAPVKSKTQEVV

SEQ ID NO: 329711 - protein, 256 aa, Zea mays
  Clone ID: MRT4577_63768C.1.pep
SPLLPGDRRRAAVLENRRRSMRRVVRWLRQLLAGRKDERGGGLEVSHVGSGWSDGPEKEKKRWSFAKQRKSGGGGARSSGPDAVAPAAAVERSQLVGRPGEDARAREHRAAIAIQKTFRGYLARRALRALRSLVKIQALVRGYLVRKQATMTLHRLQTLMRLQADSIAVKNASYRRSMEQEVTHMERVYARDVQVKPLATAPVHRRMLSDSSDSIYERSPRIVEMDTCHLRSRSSRITSRYNKYKYNPDGLPEYHH

SEQ ID NO: 329712 - protein, 71 aa, Zea mays
  Clone ID: MRT4577_63769C.1.pep
SCQVAKVHGLTLYQRLTYALLHFLPQNHVDLWAVPHYAVTSLDRMAMLYHIVFRFRCNDSVQRGSVRLRPQ

SEQ ID NO: 329713 - protein, 301 aa, Zea mays
  unsure (1)..(301): unsure at all Xaa locations
  Clone ID: MRT4577_6376C.1.pep
TPGPGFPLSERGRLLVLSLYFSFRRISLRAGAAMAAAPAPLPAPVADWWERVNGSPAWQDGIFWALAVLYGAIATASFIQVARIQCRVPEYGWTTQKVFQFLNFVVNGARCSIFAFRRQVQQVNPXFGRLNFXIFQHVILDLPGLAFFTTYALLALFWAEILYQARGIMTDRLRSGFYIINCVVYALQVFLXFTALGFLIYGGRLFIMLKYFPIESKGRQQKLREVGRVATICFCCFSARCIMMCFNAFDEEADLDVLDHPVLNLFYYLLVEILPSSLVLYILRRIPAKLRLSQYHPVSSS

SEQ ID NO: 329714 - protein, 49 aa, Zea mays
  unsure (1)..(49): unsure at all Xaa locations
  Clone ID: MRT4577_63770C.1.pep
VFLXQKKKNSSIDXQFSXQNSNVSHXXXLFAINSHLKRASNXXXFYEQT

SEQ ID NO: 329715 - protein, 166 aa, Zea mays
  Clone ID: MRT4577_63771C.1.pep
MRTYSHLWSTTKRSAMAFVIGVSISDRWANFTWVTGESMYPTFTAANSFWGGDFVLAEKRCLEQCKFSHGDVILFKCPSNHKEMLVKRLIGLPGEKIQLPGSLNPTKIPEGHCWVEGDNSTRSWDSRAFGPIPLGLVQGRVTHIIWPPSRIGRLERKMHEGRISPD

SEQ ID NO: 329716 - protein, 179 aa, Zea mays
  Clone ID: MRT4577_63772C.1.pep
MGIIQFLNLYKEFKDTVQENPLWGDEIEMHLINIDPQTKIPRVQPNTEYLFESLKSDDFVIHPEFGAWMLETVPLQPYDLSGNPNIPLNNFRARRSTINSLCRNGDVLYAGTAFPLMGVEDYFIPREGEDADTSQRNPLQIDLMNRHPRFPTMAANARERRGEDLCMLAPIFVDEKTSM

SEQ ID NO: 329717 - protein, 76 aa, Zea mays
  Clone ID: MRT4577_63773C.1.pep
VIGPGTIQCFPLNVGFGLGFEESFFFPQFFNFLNEKNWALFVFFFTIIFVVGGKGHKTGPLPFPLGLFGTKKARFR

SEQ ID NO: 329718 - protein, 179 aa, Zea mays
  unsure (1)..(179): unsure at all Xaa locations
  Clone ID: MRT4577_63774C.1.pep
FLWVVRAPLGDNPEREFGDKADPDLQALLPEGFLERTRGRGLVVKLWAPQVAVLRHKATGAFVTHCGWNSVLEGVMAGVPMLCWPLYAEQKMNKVLMVEELRIGVELAGWHQHGLVKAEELEAKVRLVIKAEEGEQLRAREXAHKKAPDMVWKDGGSSRVSFCQFLSDVVNVSPDRTLG

SEQ ID NO: 329719 - protein, 164 aa, Zea mays
  unsure (1)..(164): unsure at all Xaa locations
  Clone ID: MRT4577_63775C.1.pep
SIXIFSFFLDLISSLLICKQIFSYSGNVYLFVVGCGLVGDNMSKGSRIAPCRTDRGRSWCWWRTSAIRRSRICCVRWRSRASWQPRTPSRSPATRTASSPSTMCPPQPWRGGDVAVEEAAPALCRRASAATRRRGRATSGARGRWSCALLREEVRHGRSESYFF

SEQ ID NO: 329720 - protein, 197 aa, Zea mays
  Clone ID: MRT4577_63776C.1.pep
YVNKFSATLGTCTLEQQGSKRRSMSSSLYYICSPQGNTSVPRKRRHLFVVGCGLVGDNMSKGSRIAPCRTDRGRSWCWWRTSAIRRSRICCVRWRSRASWQPRTPSRSPATRTASSPSTMCPPQPWRGGDVAVEEAAPALCRRASAATRRRGRATSGARGRWSCALLREEVRHGRSESERREVGSLCLGPNWTPRAE

SEQ ID NO: 329721 - protein, 47 aa, Zea mays
  unsure (1)..(47): unsure at all Xaa locations
  Clone ID: MRT4577_63777C.1.pep
VXKIRQHYXQRCTTHXTXLYTXKFFSXTHXXXXQNSWGLLFNQGXGL

SEQ ID NO: 329722 - protein, 62 aa, Zea mays
  Clone ID: MRT4577_63778C.1.pep
TLRTAAAIFAPRIIKIGDFATVAAGSRRTLPGRVRPRHASSIHDEQRLIFRGSAVLSNLGEA

SEQ ID NO: 329723 - protein, 112 aa, Zea mays
  Clone ID: MRT4577_63779C.1.pep
DKVGNSPRSPLKRNTLSPQGGKGPNKSMPWFFKPRKNGRIGGSTRPFCRFKFFLKEQKAPPFCRTLGLPRNFRPGPGRGPTFPIRRRIKTWGKQGQKWFPGENGIPSQFHTK

SEQ ID NO: 329724 - protein, 97 aa, Zea mays
  unsure (1)..(97): unsure at all Xaa locations
  Clone ID: MRT4577_6377C.1.pep
KKPPKKGGPQPPPKNLSPGPPPGGGGPPPPPVFNKGPPPXXPQRAPGISPPPPRGGGGFKKPXXPPPLFPPSFAFFPLGAPLSVPPPPMPRSFTFLP

SEQ ID NO: 329725 - protein, 80 aa, Zea mays
  Clone ID: MRT4577_63780C.1.pep
KNQLDFFKKTFQPITPIAFYLCLLGIFVTSCKILLTVFCNLVKVCRVIGLLIAIILGRQSKTVFGPNKNLWGKNNCTSRP

SEQ ID NO: 329726 - protein, 85 aa, Zea mays
  Clone ID: MRT4577_63781C.1.pep
GGNVRFLGQQVRPLKQGIEMGEFLELQNRVLGHAAGTVNHFYHTLVFFKGISVIDSQGISLGEKKRFLNKCSGRKKKKKGRPLAI

SEQ ID NO: 329727 - protein, 38 aa, Zea mays
  Clone ID: MRT4577_63782C.1.pep
LKGPIGARVHLTGDQEMRVKAAGYGRGVRNRGPLRHML

SEQ ID NO: 329728 - protein, 88 aa, Zea mays
  Clone ID: MRT4577_63783C.1.pep
FKLPDRRHSRAFIYRIPKIRSSAPTNCAKGTDSSCCSVGPQDFGAHPFVRALPQCQHIFPVRGIDNWFLGHASCPLCGAGVHIAHSRR

SEQ ID NO: 329729 - protein, 123 aa, Zea mays
  unsure (1)..(123): unsure at all Xaa locations
  Clone ID: MRT4577_63784C.1.pep
TPFKGILAADEXTGTIGKXQHTITVENVDENQAALREHMKRCPGTLQYISGEMLSKVTLHQKTKDGKTTVAVLKEADVLPGIKENRCTIEVVAPXKETTTHCHYDLTXRGTKYYEAGARSAKQ

SEQ ID NO: 329730 - protein, 68 aa, Zea mays
  unsure (1)..(68): unsure at all Xaa locations
  Clone ID: MRT4577_63785C.1.pep
FPRGGTXSSHSFHSPLPSLYHTSTYQERGAYMRRGGFPLSTLLTTIMVPSHPLLNPSSIPLVHLLMLE

SEQ ID NO: 329731 - protein, 55 aa, Zea mays
  Clone ID: MRT4577_63786C.1.pep
AAPRSPTPRAPSCTTESPRHHGRPAGAARPGRGAASAPAAAGRDSFRGFARRTGR

SEQ ID NO: 329732 - protein, 77 aa, Zea mays
  Clone ID: MRT4577_63787C.1.pep
NLSPHHLTKNGIMYMLTKTNKHPSPLVAIISTLSSYLTQSHRFVPPPWQTKKPLLHTARNDIIKLPTQKKKMPTRKE

SEQ ID NO: 329733 - protein, 100 aa, Zea mays
  unsure (1)..(100): unsure at all Xaa locations
  Clone ID: MRT4577_63788C.1.pep
VPKRLLAPTFLVARGNPSQRVLNVMPYCMLKSTCTCLYKVQRVVRSSVEGQAISFVSWESKGYVLIKVRSRFXVYRKVSPDQIDTWTFRGHYKCKVPLHI

SEQ ID NO: 329734 - protein, 68 aa, Zea mays
  Clone ID: MRT4577_63789C.1.pep
WMVFGGSFFFIFFSFWVLGHQNIFHYKKKNTLAQTTGYRIRLNHHKAKRSHGMGLTERMHNGVFRSLS

SEQ ID NO: 329735 - protein, 54 aa, Zea mays
  Clone ID: MRT4577_6378C.1.pep
MQIQVARIQCRVPEYGWTTQKVFQFLNFVVNGARCSIFAFRRQVQQVNPPVWTP

SEQ ID NO: 329736 - protein, 45 aa, Zea mays
  unsure (1)..(45): unsure at all Xaa locations
  Clone ID: MRT4577_63790C.1.pep
GTSSRRXGSRSHRGPYPSISHGDRXARPAPFLASPVLFGRSLSLL

SEQ ID NO: 329737 - protein, 96 aa, Zea mays
  unsure (1)..(96): unsure at all Xaa locations
  Clone ID: MRT4577_63791C.1.pep
RGRVGSRQAYLDEHLMCEIEGQNVSAAAIXGHDGSVRAHHESFPELKPEEGGGLIKDSDEPGTLAPTGLFVGGTKYXVIQGEPGFCLXGKKGTWGA

SEQ ID NO: 329738 - protein, 102 aa, Zea mays
  Clone ID: MRT4577_63792C.1.pep
RLVDGNNTWLSIVSGTEGIETDGDRKEQTITAPTGYIKVEKPESMRVEINTPQAPKLMAKTLDADGSVVRTGRNQQALGPRLLMHQRSRVVRRMYMCAISNT

SEQ ID NO: 329739 - protein, 103 aa, Zea mays
  unsure (1)..(103): unsure at all Xaa locations
  Clone ID: MRT4577_63793C.1.pep
AFCQLDKSEDRSPSSEELPEVMXDLGAGGAVAPELMHLRDASSAGSLSSPGFASFPSRFAVMRSRSTXGTRSRRIPKETWSPIPSAGVTRVXRKEFTDLVHAG

SEQ ID NO: 329740 - protein, 139 aa, Zea mays
  Clone ID: MRT4577_63794C.1.pep
TPGVVLTKWGTLKKIPGYLFPNPGPLKALKINKNNWPRGPGAGPKTQKLPPPRPIFGAKKGPGPWLQGFKIPPTPSPIRGFIKGGWTKANQGVTQGPGSKNLFSPNREALETPFLGGAGGPKKQKKGLGGLGFHTWGAG

SEQ ID NO: 329741 - protein, 429 aa, Zea mays
  Clone ID: MRT4577_63795C.1.pep
MAGAVSALFLLDMKGRVLVWRDYRGDVSALQAERFFTKLLDKEGDSEVHSPVVYDDAGVTYMFIQHNNVFLLTAARQNCNAASILLFLHRVIDVFKHYFEELEEESLRDNFVVVYELLDEMMDFGYPQYTEAKILSEFIKTDAYRMEVTQRPPMAVTNAVSWRSEGIRYKKNEVFLDVVESVNILVNSNGQIVRSDVVGALKMRTYLSGMPECKLGLNDRVLLEAQGRATKGKAIDLDDIKFHQCVRLARFENDRTISFIPPDGSFDLMTYRLSTQVKPLIWVEAQIEKHSRSRIELMVKARSQFKERSTATNVEIEVPVPSDATNPNIRTSMGSAAYAPERDAMVWKVKSFPGGKEYMCRAEFSLPSITAEEGAPEKKAPIRVKFEIPYFTVSGIQVRYLKIIEKSGYQALPWVRYITMAGEYELRLI

SEQ ID NO: 329742 - protein, 102 aa, Zea mays
  Clone ID: MRT4577_63796C.1.pep
GVHFKPFIISLGLEVCFVRKKSPAKPVKKNRGRGQKMWGAQKHPNQRGAKKVWGKKIGGALKPTHGPEKNPAGGVDKTTPPPKILKERGPPFKKVVAGKKGI

SEQ ID NO: 329743 - protein, 117 aa, Zea mays
  unsure (1)..(117): unsure at all Xaa locations
  Clone ID: MRT4577_63797C.1.pep
FRRPRRIPHPTPPPPPPRPAVAGXHAPPTAPRPLSSPXPPLPILPPPYSSLSSASSPPPHPPXSPNPSXPSRSTSSPPAASPVPRHSRPPPSSPTSSAPPTPTPCSPSSPXPRPLRR

SEQ ID NO: 329744 - protein, 429 aa, Zea mays
  Clone ID: MRT4577_63798C.1.pep
MAGAVSALFLLDMKGRVLVWRDYRGDVSALQAERFFTKLLDKEGDSEVHSPVVYDDAGVTYMFIQHNNVFLLTAARQNCNAASILLFLHRVIDVFKHYFEELEEESLRDNFVVVYELLDEMMDFGYPQYTEAKILSEFIKTDAYRMEVTQRPPMAVTNAVSWRSEGIRYKKNEVFLDVVESVNILVNSNGQIVRSDVVGALKMRTYLSGMPECKLGLNDRVLLEAQGRATKGKAIDLDDIKFHQCVRLARFENDRTISFIPPDGSFDLMTYRLSTQVKPLIWVEAQIEKHSRSRIELMVKARSQFKERSTATNVEIEVPVPSDATNPNIRTSMGSAAYAPERDAMVWKIKSFPGGKEYMCRAEFSLPSITAEEGAPEKKAPIRVKFEIPYFTVSGIQVRYLKIIEKSGYQALPWVRYITMAGEYELRLI

SEQ ID NO: 329745 - protein, 60 aa, Zea mays
  Clone ID: MRT4577_63799C.1.pep
LEEPRVRKKTMQLTFIFLHLNSKQNLKKPKHNSHINTFSPHFQTTRLNYTYLQRFPFFIS

SEQ ID NO: 329746 - protein, 57 aa, Zea mays
  Clone ID: MRT4577_6379C.1.pep
NYYLCSIWGKETIQRLFNCCSLGMFNLVTRNYKFLLNCYWSVVTILISFPPFLVIGN

SEQ ID NO: 329747 - protein, 57 aa, Zea mays
  unsure (1)..(57): unsure at all Xaa locations
  Clone ID: MRT4577_637C.1.pep
KRYFRKDSSSGHLPPAKFKWPLHGPSVTHSMSGGRTYGLSVMDYAATAGLLQFSIPX

SEQ ID NO: 329748 - protein, 131 aa, Zea mays
  unsure (1)..(131): unsure at all Xaa locations
  Clone ID: MRT4577_63800C.1.pep
HHRAPSYFAAKQLEHSPTLADYNLHMSYTLHLVHGLXGMMDIFAKTLSDSSISLGAHSSDAVDNDEANTHDYDGFAPYYQLVLFAAXRLDDNAXTVPDYNVHSDSTLHLVLLLRXGMQIFVNILNGNIINL

SEQ ID NO: 329749 - protein, 152 aa, Zea mays
  Clone ID: MRT4577_63801C.1.pep
SFISFFFLYPSTFNLLEVAAVDKPKLHMWETGIMRITRHPQMVGQVIWCLAHTLWIGNSVAVAASVGLISHHLFGAWNGDRRLLSRYGEAFEVLKKRTSVMPFAAIIDGRQKLPKDYHKEFFRLPYVAITMLTLGAYFAHPLMQASSYQLPW

SEQ ID NO: 329750 - protein, 223 aa, Zea mays
  unsure (1)..(223): unsure at all Xaa locations
  Clone ID: MRT4577_63802C.1.pep
GPSWSLLDFTVRGANGKMGTGFGVQPDGVVPRTGGGDTGADAAEFEASPNPNQVCGIVAKLPSKTVDIASFISEAVNSGLPSVFSNGSIPLTVFQVNRIGGGPMTCEYSADATGHSWQPMDMTLNMLGNFGIQSQQNTKMTVVTTLRAGSRFTGGPNQDMALVRCRAGTNGICGGCFAVQMSGQVVDATQGGSSRAAASAPLQLTSQQMSSXCGEGNGPCQKK

SEQ ID NO: 329751 - protein, 52 aa, Zea mays
  Clone ID: MRT4577_63803C.1.pep
VLKHPIIFFLFGTPFPPGSKKFKEKKKGHLLHFCQWPSLKKPPPFCARPLFL

SEQ ID NO: 329752 - protein, 108 aa, Zea mays
  Clone ID: MRT4577_63804C.1.pep
SLVFYGSDYFSCFLHLFMGEKKKHFWCWGKKGKNTRGGEGGHPAKRITGRGGDALGPGVNKPEKIRPVGTWKKREKGGTERETKKDKPLDKRQAPGVKRKNWGAQGEN

SEQ ID NO: 329753 - protein, 100 aa, Zea mays
  Clone ID: MRT4577_63805C.1.pep
ESSHACRPRVRNPRGAPRDRQRREAVIIGATSGRICDQAAPWRTGESEEDEDSTRKSREGKVSDTSKPGETVTMSVPGSKRQDLHRTGGRHQGGRDRPRA

SEQ ID NO: 329754 - protein, 74 aa, Zea mays
  unsure (1)..(74): unsure at all Xaa locations
  Clone ID: MRT4577_63806C.1.pep
DLXAQILFLFLKPPRAFSGSLLGYEGLTTSPDDFGLXDYLNMPHDFYSFRQPHMHHGMKVVLRMFIGPICSSFY

SEQ ID NO: 329755 - protein, 77 aa, Zea mays
  Clone ID: MRT4577_63807C.1.pep
QEFAQDVGRTFKQFNKLTEDKADVQSIIGLQRFFETRMNEAFGDTKFSAVLVAPPPMSLPGAGLSSQELSDCPGDGP

SEQ ID NO: 329756 - protein, 58 aa, Zea mays
  unsure (1)..(58): unsure at all Xaa locations
  Clone ID: MRT4577_63808C.1.pep
LQAPWKIFPPFLQALYAGQFKAPPFXPGPRGPQETPQFGPKVCFVQTPGFIWGPPPPS

SEQ ID NO: 329757 - protein, 58 aa, Zea mays
  Clone ID: MRT4577_63809C.1.pep
PVFSCSARYDELASKSNVEYIAGGATQNSIRVAQWMLQIPGASSYIGCIGKDKFGEEM

SEQ ID NO: 329758 - protein, 232 aa, Zea mays
  unsure (1)..(232): unsure at all Xaa locations
  Clone ID: MRT4577_6380C.1.pep
MAAAPAPLPAPVADWWERVNGSPAWQDGIFWTLAVLYGAIATASFIQVARIQCRVPEYGWTTQKVFQFLNFVVNGARCSIFAFRRQVQQVNPPIFQQVILDLPGLAFFTTYALLALFWAEILYQARGIMTDRLRSGFYIINCVXYALQGFLWLWLWWNPNHSMLVTSKXFIAGLSFFXALGFLIYGRRLFIMXEYFPIESKGRQXRLREVGRVATICFCXFLARCIMMCFNA

SEQ ID NO: 329759 - protein, 54 aa, Zea mays
  Clone ID: MRT4577_63810C.1.pep
KNKRGYERLCMAGHTTVNNDGATRTRMNLHLIGFLYDHTQFNSKDKGSGVTNFG

SEQ ID NO: 329760 - protein, 301 aa, Zea mays
  Clone ID: MRT4577_63811C.1.pep
MLSPLSALSSAAAAAHAVVAGDGEMRVADGGGGGGAGETGAGLRGGVGGGAVVEDGHGEASGGCSASRGSSARGSSGGDSPLTRFVRRGGRLGTMDPERDEMLTSSSSYASAGSTEPQEEEEEGAGALEAAKDNKRVHGARPQGQTKNAAPCFTRERQDQRHHRLGAVLFQGPTRTPTRPPSRGFGCPGVARSSTHSPGFPATGVAVVNKGMGVSYPSHSPDVLSSPGTPSCNRRGMAGVGYQQGPRSERVIPPWTGHTSHSGSGMVLPYSTGTGRTLPSKWEDAERWIFSPNPTPTMHSG

SEQ ID NO: 329761 - protein, 88 aa, Zea mays
  Clone ID: MRT4577_63812C.1.pep
AKKQLPFNCIIIDLVLDKIHWSPNYLKGETKKGGLQHTIKSLHPKNFVPSVTGHTEVLFSVLRRQQQQQRGTQEIAPTSIMTPFIQKS

SEQ ID NO: 329762 - protein, 45 aa, Zea mays
  Clone ID: MRT4577_63813C.1.pep
NTKTEGIIFDSANIDYSFNVIIVRRTLNAFQNIIIPNIPLYKNNI

SEQ ID NO: 329763 - protein, 116 aa, Zea mays
  unsure (1)..(116): unsure at all Xaa locations
  Clone ID: MRT4577_63814C.1.pep
ADMIAELIADPQKRNGSRYACITKYVQVKHGDKVCTILGKDLTVQLKKVADDDKLTRVNNSFKLPATDAKPKXAKPHAPKVAXRPSXSPKGKDKTAAKPKAASTQPKAKAKVKSVA

SEQ ID NO: 329764 - protein, 102 aa, Zea mays
  Clone ID: MRT4577_63815C.1.pep
PFQEIFLLAPVMGPKITSPQWPPGGIGFSKDRGPNKKFKVAKVPQSLGPTLGQFVVEKPVNPRLVEPSGGPHVDVKFFAPQAPGGGGPRGKSSWLPRPGISQ

SEQ ID NO: 329765 - protein, 78 aa, Zea mays
  Clone ID: MRT4577_63816C.1.pep
KKTTPGAPFFFFGTPPRFLKPPPFEFRKDPHFPPGKRPFPPFKGVFNPKYPKQTPQLWGAPLFFHKTIVPLSFKKPPG

SEQ ID NO: 329766 - protein, 41 aa, Zea mays
  Clone ID: MRT4577_63817C.1.pep
IILTDELIAAKLKHVQLQQELNALYCREEIVDIRDEDNEET

SEQ ID NO: 329767 - protein, 51 aa, Zea mays
  Clone ID: MRT4577_63818C.1.pep
HLAFNVWGPTQTISAFQYPLTPLFLSVGLLKQDFCLRECKSTKCYLCCKNG

SEQ ID NO: 329768 - protein, 196 aa, Zea mays
  unsure (1)..(196): unsure at all Xaa locations
  Clone ID: MRT4577_63819C.1.pep
MDDNDGIILEDDDNSRALVVYGQKQEMCLTVLPVVPSGSHHKQSRDHDIDARSKVRKLLQLFQATYRKLTQVEEQGKRKVGRIDIEAAKALKNDPIYKKLGAVVGNFPGVEVGDEFHFRVELSIIGLHGPLQAGIATSKVNGINVAISIVASGGYPDXISSSDELIYTGSGGKAGGNKEEMIKSLSRGNLALKNAL

SEQ ID NO: 329769 - protein, 86 aa, Zea mays; identical to SEQ ID NO: 255746
  Clone ID: MRT4577_6381C.1.pep

SEQ ID NO: 329770 - protein, 70 aa, Zea mays
  Clone ID: MRT4577_63820C.1.pep
MAPKPAQKKPMENVVAAEATKPAKENAAVAEASKSAEKKASSGETPSTGTSSRPALRNSFVNDVFERVAS

SEQ ID NO: 329771 - protein, 126 aa, Zea mays
  Clone ID: MRT4577_63821C.1.pep
MCSVNNHDLLPEMSTPSADLHLLPETGVENMRTPKSSFHAELKRELSKLNTVLKLPDNVLFLANQSLEYLLNNHLVVREPRSILHAFNIALCWRAASFLKYTELDHRESLALASDGLNYECNEAPS

SEQ ID NO: 329772 - protein, 122 aa, Zea mays
  Clone ID: MRT4577_63822C.1.pep
YNDLLYTDLAPPRARACRGRSSFMATVPRIGGALPSAAPVDWTMTSSRGGGGCNNSCDLRSTRQRQRPRGRLYIGGTCCWRSLRVRWGSRRPVALGAAAQGLECPCLRMYWCCLIAAQSSAS

SEQ ID NO: 329773 - protein, 56 aa, Zea mays
  Clone ID: MRT4577_63823C.1.pep
QTPQGCLTPNGVPPYSFKLGKLRGFFRGPYKHSVNVCQKALFFPQKFFWNRIQLPF

SEQ ID NO: 329774 - protein, 617 aa, Zea mays
  Clone ID: MRT4577_63824C.1.pep
MAPGTDAGYGQWAAACPPLRRNLQLLSPDEVELAKMLLNEGQIHLFEHWPEPGVDDDNKRGFFDQVRRLNSSYPGGLVSYIQNAKKLLADSKEGKNPYDGFTPSVPSGEVLTFGNDNFVSLETAGIKEACNAAFVLVAGGLGERLGYKGIKVALPRETTTGKCFLQHYIESILAFQEASCKMVDEGCQTKIPFVIMTSDDTNALTIKLLESNSYFGMEPSQVKILKQEKVACLADNDARLALDPSDKYKIQTKPHGHGDVHSLLYSSGLLEQWKTEGRKWVLFFQDTNGLLFNAIPSALGVSATKGYNVNSLAVPRKAKEAIGGITKLTHVDGRTMVINVEYNQLDPLLRATGHPDGDSNCETGYSPYPGNINQLILELGPYIEELKKTHGAISEFVNPKYTDSTKTAFKSSTRLECMMQDYPKTLPPSAKVGFTVMDTWLAYAPVKNNPEDAAKVPKGNPYHSATSGEMAIYRANSLILRKAGAQIADPVVHTFNGQEVEVWPRVTWSPRWGLTFKSVKEKVHGNSSVSQRSALVINGQNVFLEGLSLDGTLVVNAADEAEVKLTGHIQNKGWTIQHVDYKDASEKEEIRIRGFKLEKIEQLEVNYTEPGNHSLSA

SEQ ID NO: 329775 - protein, 164 aa, Zea mays
  Clone ID: MRT4577_63825C.1.pep
ARSFGADESHQATTPAPPSQTTQLTVTDATRVASSALLFSPPLRRNLQLLSPDEVELAKMLLNEGQIHLFEHWPEPGVDDDNKRGFFDQVRRLNSSYPGGLVSYIQNAKKLLADSKAGKNPYEGFSPSVPSGEVLTFGNDNFVSLEAAGIKEACNAAFVLVAGG

SEQ ID NO: 329776 - protein, 794 aa, Zea mays
  Clone ID: MRT4577_63826C.1.pep
MASPPRYPFPVLLLGLALVALMAPALLRADGGAEEEEEARKTYIFRVDHSAKPSVFPTHAHWYASAAFASAAPGATPLRPLHVYGTVFHGFSASVPASRAEELRRHPAVLAAFEDRARPLHTTRSPQFMGLRARLGLWSLADYGSDVIVGVLDTGVWPERRSLSDRNLPPVPARWRGGCDAGPGFPASSCNRKLVGARFFSQGHAARFGASAAASNGSVEFMSPRDADGHGTHTATTAAGSVAYGASMEGYAPGVAKGVAPKARVAAYKVCWKGAGCMDSDILAGFDRAVADGVDVISVSIGGGSGVTAPFYLDPIAIGAYGAVSRGVFVATSAGNEGPASMSVTNLAPWLATVGAGTIDRNFPAEIVLGDGRRLSGVSLYSGKPLTNSSLPLYYPGRTGGLSASLCMENSIDPSLVKGKIVVCDRGSSPRVAKGMVVKEAGGAAMVLTNGEANGEGLVGDAHVLPACAVGEKEGDAVKAYAANASSPMATISFGGTVVGVKPAPVVASFSARGPNGLVPEILKPDFIAPGVNILAAWTGATGPTGLEGDTRRTEFNILSGTSMACPHASGAAALLRSAHPGWSPAAIRSALMTTAIVTDNRGGPVGDEAEPGRGATPFDYGAGHITLGKALDPGLVYDAGEDDYVAFMCSIGYEPNAIEVVTHKPVACPATASGAKASGSPSGSDLNYPSISVVLRGGNQSRTVTRTVTNVGAQASATYTARVQMASSGGVTVSVKPQQLVFSPGAKKQSFAVTVTAPSAQDAAAPVYGFLVWSDGGGHDVRSPIVVTWLQPM

SEQ ID NO: 329777 - protein, 617 aa, Zea mays
  unsure (1)..(617): unsure at all Xaa locations
  Clone ID: MRT4577_63827C.1.pep
MAPGADAGYGQWAAACPPLRRNLQLLSPDEVELAKMLLNEGQIHLFEHWPEPGVDDDNKRGFFDQVRRLNSSYPGGLVSYIQNAKKLLADSKEGKNPYDGFTPSVPSGEVLTFGNDNFVSLETAGIKEACNAAFVLVAGGLGERLGYKGIKVALPRETTTGKCFLQHYIESILALQEASCKTVDDGCQKKIPFVIMTSDDTNALTIKLLESNSYFGMEPSQVKLLKQEKVACLADNDARLALDPSDKYKIQTKPHGHGDVHSLLYSSGLLEQWKSEGRKWVLFFQDTNGLLFNAIPSALGVSATKGYNVNSLAVPRKAKEAIGGITKLTHVDGRTMVINVEYNQLDPLLRATGHPDGDSNCETGYSPYPGNINQLILELGPYIEELKKTHGAISEFVNPKYTDSTKTAFKSSTRLECMMQDYPKTLPPSAKVGFTVMDTWLAYAPVKNNPEDAAKVPKGNPYHSATSGEMAIYRANSLILRKAGAQIADPVVHTFNGQEVEVWPRVTWSPRWGLTFESVKEXCTGTXSVSQKSSLSINGQIVFLEGLSLDGTLVVNAVDEAEVKLTGHIQNKGWTIQHVDYKDTAEKEEIRIRGFKLEKIEQLEVNYTEPGNHSLSA

SEQ ID NO: 329778 - protein, 97 aa, Zea mays
  Clone ID: MRT4577_63828C.1.pep
MGGEVYEDDRYRTWGGSFALTVRDPGDSWITALSNHLGWLSATYAVVMFQSLHVGKGALDRDDTWVGRIDRAPEHDCGCVLMRAVSGEAFRYTRCVV

SEQ ID NO: 329779 - protein, 63 aa, Zea mays
  Clone ID: MRT4577_63829C.1.pep
VNAIDEAEVKLTGHIQNKGWTIQHVDYKDTSEKEEIRIRGFKLEKIEQLEVNYTEPGNHSLSA

SEQ ID NO: 329780 - protein, 69 aa, Zea mays
  Clone ID: MRT4577_6382C.1.pep
ACMDATTYQPITWYITVEKEDSQGCCRRTVVYTAGIKHNIILVHYVVCVPFCRVGHVWFLIVLCGVTVH

SEQ ID NO: 329781 - protein, 71 aa, Zea mays
  Clone ID: MRT4577_63830C.1.pep
CGRLQGHCEALLSVSQELCLRGEGERLSLHVYPTRTVSVALYHTDRFHVDTTGNGYYTPHMDAFRMLLDLE

SEQ ID NO: 329782 - protein, 139 aa, Zea mays
  unsure (1)..(139): unsure at all Xaa locations
  Clone ID: MRT4577_63831C.1.pep
AIYRATVLILRKAGAQIADPVVHXFNGQEVEVWPRVTWSPRWGLTFKSVKEKVHGNSSVSQRSALVINGQNVFLEGLSLDGTLVVNAVDEAENKGWTIQHVDYKDTSEKEEIRIRGFKLEKIEQLEVNYTEPGNHSLSA

SEQ ID NO: 329783 - protein, 623 aa, Zea mays
  unsure (1)..(623): unsure at all Xaa locations
  Clone ID: MRT4577_63832C.1.pep
MASGADAAALVTSGADEWAAACPPLRRNLQLLAPDEVELAKMLLNEGQIHLFEHWPEPGIDDDKKRGFFDQVRRLNSSYPGGLVSYIKNAKXLLADSKAGKNPYDGFTPSVPSGEILNFGDDNFVSLEAAGIKEAHNAAFVLVAGGLGERLGYKGIKVALPRETTTGKCFIQHYIESILVLQEASCKTVDDGCQKXIPFVIMTSDDTNALTIKLLESNSYFGMEPSQVKLLKQEKVACLADNDARLALDPSDKYKIQTKPHGHGDVHSLLYSSGLLEQWKSEGRKWVLFFQDTNGLLFNAIPSALGVSATKGYNVNSLAVPRKAKEAIGGITKLTHVDGRTMVINVEYNQLDPLLRATGYPDGDTNSETGYSPYPGNINQLILELGPYIEELKKTHGAISEFVNPKYTDSTKTSFKSSTRLECMMQDYPKTLPPSTKVGFTVMDTWLAYAPVKNNPEDAAKVPKGNPYHSATSGEMAIYRANSLILRKAGAQIADPVVDTFNGQEVEVWPRVTWSPRWGLTFQSVKEKVHGSCSVSQRSALVIDGRSVFLDGLSLDGTLIVNAVDGAEVKVTGHVENKGWTIRHVDYKDTSEKEEVRIRGFKFNKSEQLEVNYTEPGKHSLSA

SEQ ID NO: 329784 - protein, 44 aa, Zea mays
  unsure (1)..(44): unsure at all Xaa locations
  Clone ID: MRT4577_63833C.1.pep
SVXKKKKKKKKKKKKKKKKKKKKKKKKKKKKKKKKKKKKKGGPF

SEQ ID NO: 329785 - protein, 131 aa, Zea mays
  Clone ID: MRT4577_63834C.1.pep
WLSQHLIGAKAGVPDGGPGVGRPPPHVREREQRAPRAAQPPHNHRSPDVGTCRLFWVLLANGHSRVFWWEAIGRPGLTAWLPLPPPLFPSTRAEARSVPDFAGSRERHEAAAPVPGSVAAAPGAGRAARGR

SEQ ID NO: 329786 - protein, 50 aa, Zea mays
  Clone ID: MRT4577_63835C.1.pep
NAILQPSPEHFPKYQEQPPAIPDCFSPHCVDHLHRSFNGPQLSAIHWAAT

SEQ ID NO: 329787 - protein, 78 aa, Zea mays
  Clone ID: MRT4577_63836C.1.pep
FFFQQVKRRPSPIVKPFFAFCPQQGELFPFDSLLGLFLDSLGVQPAPGRSDASRSHRKGNPPGGIPPPMCLHCRDWVP

SEQ ID NO: 329788 - protein, 171 aa, Zea mays
  unsure (1)..(171): unsure at all Xaa locations
  Clone ID: MRT4577_63837C.1.pep
PRGRPGPXSVARIRPAPPAVDPPPHTAGSLRPNSPPHXPAGGSAASFHPPPSFHPRGSRAPSLAPHLPSCEXNPSPVNAPAIPVSHRAPSTGVATTKHPSPRPPSSQRSTIGAPSLARWTASAPCPSEIPFHLRGRERSGRQSIPTAPSIPYAIHSIPKSAAPLTHRSCFR

SEQ ID NO: 329789 - protein, 65 aa, Zea mays
  unsure (1)..(65): unsure at all Xaa locations
  Clone ID: MRT4577_63838C.1.pep
PDARLESELXCPASYSGLVALVEEKDNQMQKIEKEIKELKVWRDFVGRVPHGHRQQRRDGAHRHR

SEQ ID NO: 329790 - protein, 45 aa, Zea mays
  Clone ID: MRT4577_63839C.1.pep
PGEELLQSLSAQTKFCCDVKSAQKAQLCFILLWHKQPIDAEAFVY

SEQ ID NO: 329791 - protein, 125 aa, Zea mays
  Clone ID: MRT4577_6383C.1.pep
GEAVLFRPFGRAPFPVCWRFFYPSRPGRFPFWNPPSGPPAFDVCSPPHWAPGVFFCNLRPRWGVELGPVTPFARAPGLPLPPPRGAPSPPPRGPPPGGLEPPPWPRRRGWFFYFFIQPVGCFLAW

SEQ ID NO: 329792 - protein, 147 aa, Zea mays
  Clone ID: MRT4577_63840C.1.pep
LFTIRDITALYHPLALRFFLRRTHYRSDVNHSDQALEIASDRVYYIYQILNTSFVKAFTCLKEDVGLLLLHHHRYHATCWNATAGQEHGDEQAQDDSKWRRIPTFDDWNLRDDMPVTQYLQAGTSSSLCRRQRRTTTRICSRCPCVP

SEQ ID NO: 329793 - protein, 66 aa, Zea mays
  Clone ID: MRT4577_63841C.1.pep
LQKQRQSCNSNYLLPGMTSRASRPFNLCLPSLIKNLILLLVITMARSLKLSPCSVTKLILSMYRGL

SEQ ID NO: 329794 - protein, 88 aa, Zea mays
  unsure (1)..(88): unsure at all Xaa locations
  Clone ID: MRT4577_63842C.1.pep
IDRKNRNQPTQDTTSCIRGRHFLSRHWCXXPPPLPPYKHFIXPXSLPXXTXQXHXTXTSXYLXXYLPHTHTXXXPXNPXXLNXKIXXH

SEQ ID NO: 329795 - protein, 63 aa, Zea mays
  Clone ID: MRT4577_63843C.1.pep
GTKWLFDCKQQQQQQGGLLTPHKNVFGQAFKMYPTKPLPWMRFQFLQPQLGALQTFEDPLHTC

SEQ ID NO: 329796 - protein, 42 aa, Zea mays
  Clone ID: MRT4577_63844C.1.pep
SYTCPDTCSYFPHQIPLLVKRWLYHLLCTFNLLPLLFKLPTL

SEQ ID NO: 329797 - protein, 279 aa, Zea mays
  Clone ID: MRT4577_63845C.1.pep
MNMFDGMESAGYGGGAGPMGGVVLSRDPKPRLRWTPDLHERFVEAVTKLGGADKATPKSVLRLMGMKGLTLYHLKSHLQKYRLGKQTKKDTGLDAGRVAFAAQGINFSTPVPPPSIPSTASDNTGETPLADALKYQIEVQRKLHEQLEVQKKLQMRIEAQGKYLQTILEKAQSNLSYHATGAANLEATRSQLTDFNLALSGFMDNVTQACEQNNGELVKAMSEDGLRANNLDFQPYHGVHDGDDVKCATDEGLLLLDLNIRGGYGHRISTDLKMNQHMR

SEQ ID NO: 329798 - protein, 96 aa, Zea mays
  Clone ID: MRT4577_63846C.1.pep
MAKADARSRGRAASHVPTPTWAQRTEALTHVLTHPSHAPSLHSQLFLASRVPCPPRGLGSTTSYPPFLCPGASLLRWALASVFLPAGAEGPADGAA

SEQ ID NO: 329799 - protein, 103 aa, Zea mays
  unsure (1)..(103): unsure at all Xaa locations
  Clone ID: MRT4577_63847C.1.pep
LPDPKDGSFXRKLPKSSAVRLIDFGSAAYHHQDRSFIVCTTHYXAPLKIXLGHGWSYTCDIWSAGCILVELCSGETLHHTHDNLAHLAMMDRGLGPLALYMLE

SEQ ID NO: 329800 - protein, 114 aa, Zea mays
  unsure (1)..(114): unsure at all Xaa locations
  Clone ID: MRT4577_63848C.1.pep
TFDARGEPDAEGRNYNHKTCHTTQEHQNSHKDGRPDQGCPKRRWRARGSEQPSTEPKQIPQDARGKSQAQEGDTLAXNHKQDGNWPQDHEGEWERTWRASPTDQNQGGPLTGGT

SEQ ID NO: 329801 - protein, 55 aa, Zea mays
  unsure (1)..(55): unsure at all Xaa locations
  Clone ID: MRT4577_63849C.1.pep
PYNRGLSTHYXLSHTDFVVLLYNLTFHHMRLLSLVILLLTYTNLNKLLYPCHLIS

SEQ ID NO: 329802 - protein, 110 aa, Zea mays
  Clone ID: MRT4577_6384C.1.pep
RLLNRPHHQALGSRQHRRPPATSHRAVSSEQRRLSSTSRGTRPMRPSTAGALAAVALVATLLMSVGATPETMRAAAADHDRLVNYSFCVPGLRHHHNTSRRLHLMPGHRT

SEQ ID NO: 329803 - protein, 48 aa, Zea mays
  Clone ID: MRT4577_63850C.1.pep
WLSPYHSQNPCVRAPVLYTWRALILTTPRRHGVEMCCGTLIHTRTCIR

SEQ ID NO: 329804 - protein, 99 aa, Zea mays
  Clone ID: MRT4577_63851C.1.pep
VLSCDSITNIVLARCPPYPERIRQQHHRCFSVRQKMHISSIYSKRPSQACDPPDCARQQSKSLMRWGLFPVGVTRSRRPAESLCINVTPPSRIPSSARV

SEQ ID NO: 329805 - protein, 47 aa, Zea mays
  Clone ID: MRT4577_63853C.1.pep
LGSCIFSCSKPYIPLATEVNPMFRGYNRLQLHACQVTFFWDGAHICR

SEQ ID NO: 329806 - protein, 39 aa, Zea mays
  unsure (1)..(39): unsure at all Xaa locations
  Clone ID: MRT4577_63855C.1.pep
XFFTTQPLEIGQFNSLISEIPQTNSLVSDRTPHCTPQST

SEQ ID NO: 329807 - protein, 83 aa, Zea mays
  Clone ID: MRT4577_63856C.1.pep
TRAMKSNFCELEFQMLPWSCFFSSSNPYIPCACEVNPMFRGYNRLQLHACQVVPTSSCCARKTSPDFFLGWSSYLQVIDSSWG

SEQ ID NO: 329808 - protein, 101 aa, Zea mays
  unsure (1)..(101): unsure at all Xaa locations
  Clone ID: MRT4577_63858C.1.pep
NIGYKTTRGAPVWTYQDNKRAFTRTXVXINGGTKDETCDSAXTNRTMIEPWNYLHYANKYQXPKRGISNIPNKISPCFLANEGEHVMIGESRPVSKTETLN

SEQ ID NO: 329809 - protein, 166 aa, Zea mays
  unsure (1)..(166): unsure at all Xaa locations
  Clone ID: MRT4577_63859C.1.pep
TPLLLRHRSRLRQDSPSASRSLPNILAQHLQXTXLSKLAVYCQQQQILPFNQLAALNSASYLQQQQLPFSQLSAAYPQQFLPFNQLTALNSPAYLQQQQLLPFSQLAGVSPATFLTQPQLLPFYQHAAPNAGTLLQLQQLLPFNQLALTNPTAFYQQPIIXGGALF

SEQ ID NO: 329810 - protein, 60 aa, Zea mays
  Clone ID: MRT4577_6385C.1.pep
FTPEFIICPNVNAIKVGSEGQNNLCVSAYSCYHMSWIPVAETPKKLKPVLAQWPNKQPQP

SEQ ID NO: 329811 - protein, 37 aa, Zea mays
  Clone ID: MRT4577_63861C.1.pep
FNNFFFFFFFFCFFLKEGEPLLKTHLLVFYIRRKKNK

SEQ ID NO: 329812 - protein, 85 aa, Zea mays
  unsure (1)..(85): unsure at all Xaa locations
  Clone ID: MRT4577_63863C.1.pep
KELTINLSLELSSAFFSKKALLSAIYREAVFTYSEDAVSASLSLIQKLHAVLLDHPLSSMDXGAGALRVLQDHHVRVKAPXRGAA

SEQ ID NO: 329813 - protein, 115 aa, Zea mays
  Clone ID: MRT4577_63864C.1.pep
SEQQQLVTCNQLSGVNSDAYAQHQLPFSQLAAAYTQQYLPYNQLAPLNSDADLQQQQLPPFSQLADVSPIAYLTQQHLLPVYLHAAPNAGTILQLLQLLPFNQLAMTNPTAFYQQ

SEQ ID NO: 329814 - protein, 82 aa, Zea mays
  Clone ID: MRT4577_63867C.1.pep
TCAGICLSVLEIGACPFGWNSVENEASHQSDYHTAISLPAFCAATETYAVATSGHWHWGHKMTGRCAASQANRRKKKSLRLC

SEQ ID NO: 329815 - protein, 277 aa, Zea mays
  unsure (1)..(277): unsure at all Xaa locations
  Clone ID: MRT4577_63869C.1.pep
ILPPPDFGARSLRIRELFPWMDEDYLRSCFTRSPELVTAVITRNKETKQSEGFGYLTFSDHATAGQILQSYNGQKMPNADRDFSLSWSTXGPDDDCAIYVGGLGFDVTDFMLHHVFKNRYPSVKRAKVIWDFFARRSKGYGFVVFGDVNERTQAMTEMNGAYCSSRPMRIGPATFKSDFRTQGTYSDSNQSNSRLFVGQLDSCVTDEDLDKAFSPYGELTVKVIEGKNCGFVTYSSRASAVEAMTILNGSQLXDNIITVNWARPAXEQDQWNGVDYG

SEQ ID NO: 329816 - protein, 83 aa, Zea mays
  Clone ID: MRT4577_6386C.1.pep
RGTGDEEPTPSPRTTATPRYMAFTRPDGGSVCILNLMQGRKLWAIHHTVGITDYAQYQIGELAGRAPTRRWHQGIPGNYLSFW

SEQ ID NO: 329817 - protein, 197 aa, Zea mays
  Clone ID: MRT4577_63870C.1.pep
RGKKKKKKKKKKKKKKKKKKKKKKKKKKKKNKKKKNNIYFGMTTFLGPFGGPRSFPPLGPPSFCGSPFGVSPGPFPFARPLRGSPLGGPLVFPPPCPPPFLPPFFPRRGVPGQMGPPPLFVPFLSRRLVGFFGPAPSPAPFHPAFSPFVTLPFPPSLCRAPGALFSVFFGCFPGLSRGVPLWGFPLGAPFRVLVDLF

SEQ ID NO: 329818 - protein, 231 aa, Zea mays
  Clone ID: MRT4577_63871C.1.pep
MNLGWRCSDRAAGTLPHAVAPPQPVCLTGAEWRADPSGLTILGASRMRSWANRPHSSLLASFLAASWLLVAASPQELHEASGSRILHHTKSHTHEVHCSRERSRAAWKAVDEYLMPFVEKEKYELPSKCRLRPENDMFREQEQHKIHFDVNEWRCGFCKKSFRAEKFIDQHFANRHSNLLDNSQGRCLADLCGALHCDLTMEFKKPKSKCNAAAAARNRHLCESLADSCFP

SEQ ID NO: 329819 - protein, 52 aa, Zea mays
  Clone ID: MRT4577_63872C.1.pep
MELQKSAKRSLQQALPEVKNKYPLPIIDELLDELHGVVWFTSLDLCAGYHQI

SEQ ID NO: 329820 - protein, 77 aa, Zea mays
  Clone ID: MRT4577_63873C.1.pep
MELTGLKVDGNYISNLVLSVFHDPSVMDQEHGLHIKDVIDRLKLPDDVVSAAIQGHVDVGNIYNTIDDFHYKSVRNG

SEQ ID NO: 329821 - protein, 272 aa, Zea mays
  Clone ID: MRT4577_63874C.1.pep
MYGGGGGGGHYDGGSGGAGNANALFGGGGFMPSQSTVVPENSGLSKGRSAQTLLPLTVKQTMDAAQTSGDRSNFAINGVEVSTIRLVGRMLGKVERVTDVVFTLDDGTGKIDVNRWENEASDAKEMADANNENYVIVIGGLKGFQGKRHVVAYAVRRVTNFNEITCHFLHCIQVHMELTGLKIYSSAATYGGVAHAPSQPNPVDGNYISNLVLSVFHDPSVMDQEHGLHIKDVIDRLKLPDDVVSAAIQGHVDVGNIYNTIDDFHYKSVRNG

SEQ ID NO: 329822 - protein, 96 aa, Zea mays
  unsure (1)..(96): unsure at all Xaa locations
  Clone ID: MRT4577_63875C.1.pep
MSATTAAVPFWRPAGMTYIGYSXICAALVPNLPQEALKSEGASPEKXVHFPISKGTGWASREKPTGPPKKREEKRGWGPRGKKNPFPHKKIFKSPF

SEQ ID NO: 329823 - protein, 128 aa, Zea mays
  Clone ID: MRT4577_63876C.1.pep
VLSHAACPGTPPLSDATSAGPSETSLCSGCMSPRQIHAPRHVRSPRVRSEGAGKGSGGASPGSGPEEGGAVRASEGAEARRHGCRRQGLGRARGGGRRGGEPVRVFRVCNLAPDYCSFCSRPASRYPM

SEQ ID NO: 329824 - protein, 86 aa, Zea mays
  Clone ID: MRT4577_63877C.1.pep
WVYRLDRMGAVSNCNLTQSVMIIATGHEPASRVEDSKRNMPSSSSSWFSSIVSMTDTFINMFAVYAFLNKRHFLGYQAVHILGDLR

SEQ ID NO: 329825 - protein, 57 aa, Zea mays
  Clone ID: MRT4577_63878C.1.pep
RNNPLLSLLALCLVHSSHLLCWALTDEGGGQGKERALNSRTIATFFLFLTGNPVWPV

SEQ ID NO: 329826 - protein, 50 aa, Zea mays
  Clone ID: MRT4577_63879C.1.pep
CNAACKRVFPSNKVLTAKGYSPALVKYPIFLLTASYVRCAVSLHYVMHLV

SEQ ID NO: 329827 - protein, 79 aa, Zea mays
  Clone ID: MRT4577_6387C.1.pep
DAGSHHASPPRVRGDIVPGRACLRTCKFCEHTDVAWDQWQRKVVDSMLGWTLRWTGRPAPSSSPRASTCSARSACRSSW

SEQ ID NO: 329828 - protein, 50 aa, Zea mays
  Clone ID: MRT4577_63880C.1.pep
KKQKKKISKTNSKLLSQQWSTAVKYLSGPRWLGLIHLGSMVVTPVREGRG

SEQ ID NO: 329829 - protein, 48 aa, Zea mays
  Clone ID: MRT4577_63881C.1.pep
TYSQLKHKRTKKLVREISRPNILIMKSQLLYKRAKRSVLAAASNRLHY

SEQ ID NO: 329830 - protein, 166 aa, Zea mays
  unsure (1)..(166): unsure at all Xaa locations
  Clone ID: MRT4577_63882C.1.pep
MRERISIHICHPGIQVRNSRWEMDCLEHGIQADCQMPGDKTIGGGDDAFNTFFXETGAGKHAPRGALDDLEPTDIHDERTGNYRQLFHPEQVINGKEDAANNFARGHYGIGXEIDDLCLDRITKLADNCTGLQGFLVFNAVAGGTRSGLGYVLVEGLYDEYKKKAK

SEQ ID NO: 329831 - protein, 69 aa, Zea mays
  Clone ID: MRT4577_63883C.1.pep
QRSHDIGRAHNIFQGSRQLWGKVEPKTRSTVFSRLSVTPKVPLQIIFYQLGTRTKHHSLKKEGTAWDIM

SEQ ID NO: 329832 - protein, 74 aa, Zea mays
  Clone ID: MRT4577_63884C.1.pep
RPTLVREIEVLFHPPLWHPHSFHGGGRMFLQKTTSQRCERHFVGFNSNRKGRSDCYQNHLLNCYLVRLIKNVKP

SEQ ID NO: 329833 - protein, 464 aa, Zea mays
  Clone ID: MRT4577_63885C.1.pep
RLARAGPRSRLRELHPSQSLRVQAARLCLLNGEHRAPRAQLRGWCPLRRLCPPLRHPSSGPSPPTAAATTPSESLRLQAVPLPLFRATPMHPKLPRAARRLLCCGGAAASPEEDLSDEGRRSLRWVFSLRELRSATNSFNYDNKIGEGPLGSVYWGQVWDGSQIAVKRLNNAKNGTEAEFASEVEILGRIRHKNLLSFRGYCADGPERVLVYDFMANSSLYAHLHGPHSAECLLDWRRRASIAMGTARALLYLHRHATPKIIHGSVKATNVLLDSDFRAHAGDFGLARLIPDDGTDHAKIASSESQRGYLAPEYAAMFGKPTAGCDVYSFGIILLELASGRRPVEKSGSGKACGIRSWVLPLARQGRYDEIADSKLGDKFSGPELRRMVLVGLACTRSEPEKRPTMLQVVPLLKGESKETLVKLEREELLFSPDSTTVSSQGTPTPDGSTDSAPPKKDQELVGA

SEQ ID NO: 329834 - protein, 277 aa, Zea mays
  Clone ID: MRT4577_63886C.1.pep
MVVNVVVVTPCNQPPSPAPAGFAPHGKQRRGLPNPQPNLRRRVGMARKRRRTGHSRTPKAQLRGWSPLLRLCPPLPHPSSGPSPPTAAATTPSESLRLQAVPLPLFRATPMHPKLPRAARRLLCCGGAAASPEEDLSDEGRRSLRWVFSLRELRSATNSFNYDNKIGEGPLGSVYWGQVWDGSQIAVKRLNNAKNGTEAEFASEVEILGRIRHKNLLSFRGYCADGPERVLVYDFMANSSLYAHLHGPHSAECLLDWRRRASIAMGTARALLSVNNN

SEQ ID NO: 329835 - protein, 87 aa, Zea mays
  Clone ID: MRT4577_63887C.1.pep
GRPFFFFFFFFFNFFFFPPSVFINGSPHPPWEKREIIHKSNQMFRNIKKIVPTISTVATYNHICLPKVNLPPKSYFFFPKNLTYYIL

SEQ ID NO: 329836 - protein, 279 aa, Zea mays
  Clone ID: MRT4577_63889C.1.pep
MACHICPLFNLRLLLLLGAVLGNGGLGRGGGAEASDRADPDPYSILMWHDYSPPSPPLPPPDPPSPTATCEGDLHGKGDFHTRCEVSEEVELDGDVYITGNGSLVLLSGASLTCEKYGCVISANFSGEVRLSRGVRVTAGRVSLVATNITVADTVVVNTTALAGDPPDRTSGVPTGTHGDGGGHGGRGASCFVKEGQTQEDSWGGDAYAWSDLEHPWSYGSKGGSTSVEKDYGGDGGGIVWLFAEDLVMNGTVLANGGDSNEKGGGGSGGSIFIRAASM

SEQ ID NO: 329837 - protein, 34 aa, Zea mays
  Clone ID: MRT4577_63890C.1.pep
VNLDSLRRQPGIFFFFFYFFFFLDRKIYIVFKVS

SEQ ID NO: 329838 - protein, 208 aa, Zea mays
  unsure (1)..(208): unsure at all Xaa locations
  Clone ID: MRT4577_63891C.1.pep
AVTETIXPHSSHAPMAYLFSPCLSXTVYWVCEXNPILQPYRIQQAIAAGMLPLXSPLFLQQSSALLQQVPLVHLLAQNIRAQQLQQLVLANLAAYSQQQQFLPFNQXLAALNSASYLQQQQLPFSQLSAAYPQQFLPFNQLQPLTSPXAYLQQQQLLPFSQLAGXVSPATFLTQPQFCXFYQHAGPXNAGHPSLQHANQLLPISQPCL

SEQ ID NO: 329839 - protein, 246 aa, Zea mays
  unsure (1)..(246): unsure at all Xaa locations
  Clone ID: MRT4577_63893C.1.pep
QHVDPKTCRCLMLLXLDASVAYTQRILPQCXQTSIASILPPYLXSGVLRARKPKCLHPYXRCQQAIRSSASSTHVSTLRLXRQPTALLQEVPLVHLVAQNIRAQQLQQLELANLAAYSQQHRILPFNQLAALNSAAYLQQQLPFSQLAAAYPQQFLPFNQLAVLNSAAYLQQQQLLPFSQLADESPAAFLTQQQLLPFYLHAMPNAGTLLQLEQLLPFNQLALTNPRRVYPQPIIGGGPFSKGYEV

SEQ ID NO: 329840 - protein, 229 aa, Zea mays
  unsure (1)..(229): unsure at all Xaa locations
  Clone ID: MRT4577_63897C.1.pep
QLMLRAITERTATATLSPQXASEATILLVLPKHVXPMAAIVXENTRLQPYGNQHAITAAIVPVSPLYXLQQXKYLLQQVPLVHVLXQNIRAQQLQQLVLANLAAYSQQQQFLPLNQLGSLNSAYYLQQQQLPFXQLPAAYPQQFLPFNQLAALNSPAYLQQQQLLPFSQLAGVSPATFLTQPQLLPFYQHVAPNAGTLLQLQQLQPFNQLALTKPAVFYQQPIIGGALF

SEQ ID NO: 329841 - protein, 71 aa, Zea mays
  unsure (1)..(71): unsure at all Xaa locations
  Clone ID: MRT4577_63898C.1.pep
KKESGKSSVVMDVXSWMYETDIYKLEESVPSVHMEGFTWEALKLVPVGYGNRNMXIMLQIVADSCVRVLSN

SEQ ID NO: 329842 - protein, 50 aa, Zea mays
  unsure (1)..(50): unsure at all Xaa locations
  Clone ID: MRT4577_63899C.1.pep
MKSGLLPVTSLAGNXPXRRVLVSQDLKPPRNQPFSXLXEQKSHSHPXLRT

SEQ ID NO: 329843 - protein, 36 aa, Zea mays
  Clone ID: MRT4577_6389C.1.pep
PTICRCGSQALVFKRFEASSGFRPAPLDPLVKNAKQ

SEQ ID NO: 329844 - protein, 388 aa, Zea mays
  Clone ID: MRT4577_638C.1.pep
MGPLGKHDKLISIGLFRLGGGRERSAASPGGSKAREKMQGGSSGIVYGGLKYQARCIADIRADAGSTTFLAGTLSLKEENEVHLIRFSPAESELVCDGLFYHPNEIWDLKSCPFDHRVFSTVYTSGEGYGASVWKIPELNGQSNSPQLEQLFELSGHTGKIRRVIWWPLGKHDKLISIDDRNIFLWNIDTSKKIAKVISQGSTDMLPNLRGGAWDPHNHNLVAAISDSSLQLWDLRSMEKSTAIEHAHIRDVDYNPKKQNIVATAEEEFGIRLWDLRMLKYPLKDLPGHSHWTWAVRHNPAYDELLLSAGTDSTVNLWLAKVSSDDPESDSPSALSNRQEVPLLNSYTDYEDSIYGIAWSSHDPSLFASLSYDGRVVLESVKPYLQRK

SEQ ID NO: 329845 - protein, 156 aa, Zea mays
  Clone ID: MRT4577_63900C.1.pep
CLLHELPLVHLLAHNIRAQQLQQLVLANLTAYSQQQQFLPFNQLAALNSAYYLQQQQLPFSQLPAAYPQQFLPFNQLAALNSPAYLQQQQLLPFSQLAGVSPATFLIQPQLLPFYQHAAPNAGTLLQLQQLLPFNQLALTNPAAFYQQPIIGGALF

SEQ ID NO: 329846 - protein, 77 aa, Zea mays
  Clone ID: MRT4577_63902C.1.pep
IALDARAGTAWPPLRGAGSSKTRMCARTSRPTSAAQSHKAAVMSLPNSSKNRRHSPLLQMPRAKKSLPGSTGLQRSP

SEQ ID NO: 329847 - protein, 317 aa, Zea mays
  Clone ID: MRT4577_63903C.1.pep
MADVEAGKFKCECKQWEHTGLFCVHLIQTFMHIQLERIPKKYILHRYTYSARQDVVFSRDDREMSGKDGETKSYRQKMMLKKAMKVVNHASMSKAGSDKALDTMDKLLEMLGRLEPDIGCDDAGGASTREGNHGEEDAVGNDEGEHVSQCDNEEHVTVHSLQQDGSRNIDAHHQSELQMTLVGNDDCEGTQYGDVRKRLEYDVDGISLVRPNNARPKGRTIKTSEQRVVKLDAKGEKKKTRKCQKCGIADGHNSRTCLSVEENRVKLASLADRKRGRPPGSRNKNSTMAPQWNETFTSKKHKLVDSREHGSDDDNLT

SEQ ID NO: 329848 - protein, 66 aa, Zea mays
  Clone ID: MRT4577_63904C.1.pep
MAARRISLLEALWNRDGSSGLALGGAGVCTAAAVSRDDRLNEQLVAGASDAANAEASDGRFSRKRG

SEQ ID NO: 329849 - protein, 95 aa, Zea mays
  Clone ID: MRT4577_63905C.1.pep
GRLNAACSIGRTRLVARSSRRVARASLAARSCAPRTSAARLTGACTNGYESFKHLSRTIDTLEWSSRRHPAVAPRHACVLVIIQSAWPSILLAKV

SEQ ID NO: 329850 - protein, 97 aa, Zea mays
  Clone ID: MRT4577_63906C.1.pep
RSSSRSWRDGTSRTLRWIAISWAVKKKEVDVISIKDFTLFGSTSFVPQVAYRPRASSSPLFNSMSSRAVLGGLPTSKTIIGSYPSRGQESCSQKKKK

SEQ ID NO: 329851 - protein, 137 aa, Zea mays
  unsure (1)..(137): unsure at all Xaa locations
  Clone ID: MRT4577_63907C.1.pep
MEPSPSSRRRSRAAAADKGKDPDPACCDHPSPPAPDDDADVTFPQPFTSASTALQGLLRRLGAGLDDLXLPSSSSAPSSATSGHLKRILAGLQAHXDESRQLQSLMQLCEMLSIGTEDSLXGFPVDAFXPILVGMLG

SEQ ID NO: 329852 - protein, 105 aa, Zea mays
  Clone ID: MRT4577_63908C.1.pep
SSLTGRTWRTPQSGSAVTSASCGSRAGGFCQHPGTRNTFWMMPRERCAGTYKNDTFQIWGSSTIIQAEPIGLGVSVKAVSGGCFMFQPKSPLSEGSTHVAVHSAE

SEQ ID NO: 329853 - protein, 388 aa, Zea mays
  Clone ID: MRT4577_63909C.1.pep
MEAGYCNRKKTDGICDGVCDSELGSKSVLSMSRLKCALRTFDLRVLLILLIGVPILLFAIYVHGQKVTYFLRPIWEKPPKPFKVLPHYYHENVSMANLCKLHGWRVRETPRRVFDAVLFSNELDILDIRWHELSPYVSEFVLLESNSTFTGIRKDLHFRENRQRFGFAESRLTYGTIGGRFVKGENPFVEESYQRVALDQLIKIAGIADDDLLIMSDVDEIPSGHTVNLLRWCDDVPEVLHLQLRNYLYSFEFLLDDRSWRASVHRYRAGRTRYAHFRQTDDLLADSGWHCSFCFRRIDDFVFKMKAYSHVDRIRFGYFLNPRRIQHVICEGADLFDMLPEEYTFQEIIAKLGPIPSTFSAVHLPAYLLEHNERYRYLLPGNCVRESG

SEQ ID NO: 329854 - protein, 51 aa, Zea mays
  Clone ID: MRT4577_6390C.1.pep
ADAWAADPPVIPLLVPRCNHAGPKLLGPSADMIASHAIKSRLHLLPRGRGR

SEQ ID NO: 329855 - protein, 67 aa, Zea mays
  Clone ID: MRT4577_63910C.1.pep
PAGDNGTEFKNSQIEGFLEEEGIKHEFSSPYTPQQNGVVERKNRTLLDMARTMRFVLHPLSRTCLYF

SEQ ID NO: 329856 - protein, 233 aa, Zea mays
  unsure (1)..(233): unsure at all Xaa locations
  Clone ID: MRT4577_63911C.1.pep
MKQLHRQSSLSKQHRPHHRSSLSRSLASYLLREHRLLFVLLGFLLASSFFLLYPALAPHPISLSSSAYAATTTSAIRNPRVFSFSTANASPRRLPVGVRKKPLRVVVTGGAGFVGSHLVDKLLARGDSVIVIDNFFTGRKENVAHHLANPRFELIRHDVVEPILLEVDQIYHLACPASPVHYKFNPIKTIKTNVMGTLNMLXLAKRVGARFLLTSTSEVYGDPLEHPQKESYW

SEQ ID NO: 329857 - protein, 41 aa, Zea mays
  Clone ID: MRT4577_63912C.1.pep
IIAKLGPIPSTFSAVHLPAYLLEHNERYRYLLPGNCVRESG

SEQ ID NO: 329858 - protein, 193 aa, Zea mays
  Clone ID: MRT4577_63913C.1.pep
MEAGYCNRKKTDGICDGVCDSELGSKSVLSMSRLKCALRTFDLRVLLILLIGVPILLFAIYVHGQKVTYFLRPIWEKPPKPFKVLPHYYHENVSMANLCKLHGWRVRETPRRVFDAVLFSNELDILDIRWHELSPYVSEFVLLESNSTFTGIRKDLHFRENRQRFGFAESRLTYGTICGRFVKGENPFVEESY

SEQ ID NO: 329859 - protein, 61 aa, Zea mays
  Clone ID: MRT4577_63914C.1.pep
MSTVVMGVDLECHKCYKKIRKVLCKVQDKVSIRTISYDEKNNTVTVSGPFDAEEVADRLTA

SEQ ID NO: 329860 - protein, 104 aa, Zea mays
  Clone ID: MRT4577_63915C.1.pep
AFTGIWLGYLVGGSFRLASAMFRIFLSPPLGSVFLVGVSFSCLDPLAVPWAFVLCPLPFFVVFSVLFVSRCFPFPVCSPVAACFPFFNLVPLSIIHNKKMTNNT

SEQ ID NO: 329861 - protein, 89 aa, Zea mays
  Clone ID: MRT4577_63916C.1.pep
RHTTRPIPWLHDVLEQDLVDVVFNRSSLAMSDLIQATNHMEKPVTGHWVHTDVGSENAPRHILHFQIHTGAIWCELHTRRGMVVSICSA

SEQ ID NO: 329862 - protein, 52 aa, Zea mays
  Clone ID: MRT4577_63917C.1.pep
GAALPSPLCRYQPRSVWVRQALAGCRTFNVFPSAWATAATVLLPPAPGSMTV

SEQ ID NO: 329863 - protein, 369 aa, Zea mays
  Clone ID: MRT4577_63918C.1.pep
MVMGGASVGTLLVALAVLAPAVMAQSCDDELPAQLAGNFSGLACAPVWNNFVLRYAQDKDNVLRVVLSTMYSTGWVGMGFSKNGLMVDSSAMVGWIGKTGLPHIKPFSLRGKTPSQVVADQGFLVSSDNHKPTVLVQQAKIYLAFQLSFTEPLRRQNVLLAVGSAIPVNDRLAEHQDKTSIVFDFTTGSSSGSSSFPEGLKRTHGALNLFAWGVLLPIGAIVARYCRRWDPLWFYLHAGIQFVGFILGLAGVVAGVSLYSKIQADVPAHRGLGIFVLVLAILQILAIFLRPNKDSKYRKFWNWYHHWVGRLALFFAAINIVLGIKVGGAGNSWKIGYGFNLAVLLITIVTLEVLLWTRWKNSTGSTGAY

SEQ ID NO: 329864 - protein, 212 aa, Zea mays
  unsure (1)..(212): unsure at all Xaa locations
  Clone ID: MRT4577_63919C.1.pep
MVMGGASVGTLLVVLAVLAPAVMAQSCDDELPAQLAGNFSGLACAPVWNNFVLRVCSTSRHCYDSRDPCRRALDPWRPALPLALAETPLLFPGLDXYAQDKDNVLRVVLSTMYSTGWVGXMGFSKNGLMVDSSAMVGWIGKTGLPHIKPFSLRGKTPSQVVADQGFLVSSDNHKPTVLVQQAKIYLAFQLSFTEPLRRQNVLLAVGSAIPVN

SEQ ID NO: 329865 - protein, 105 aa, Zea mays
  Clone ID: MRT4577_6391C.1.pep
AQSGPPCHRAPRTEEVATRDVGGIPGALLQVGADPRPLASPRLLRAPSLTVRGGAHVCGRRQHSRLAVGVRASPPVRRVRKSLPGPGAARRAQIAVRINPSRLRE

SEQ ID NO: 329866 - protein, 142 aa, Zea mays
  unsure (1)..(142): unsure at all Xaa locations
  Clone ID: MRT4577_63920C.1.pep
KKQTHRTCFAGSSSGSSSFPEGLKRTHGALNLFAWGVLLPIGAIVARYCRRWDPLWFYLHAGIQFVGFILGLAGVVAGVSLYSKIQADVPAHRGLGIFVLVLAILQILAIXLRPNKDSKYRKFWNWYHHWVGRLALFFAAIN

SEQ ID NO: 329867 - protein, 75 aa, Zea mays
  Clone ID: MRT4577_63921C.1.pep
APCARSIPGYAFVHDLPSVSGKRAARSIRTTIRTAVAVGMLAARTWPPFLAGSRPDKYPPNTAQSVRTSGSARVS

SEQ ID NO: 329868 - protein, 964 aa, Zea mays
  Clone ID: MRT4577_63922C.1.pep
AGSDVIVLGTSRGWLVRHDFSFEDAHDLDLGSGRSGDHSVHRVFLDPGGKHCVATVVHPGGAETYYHHARWPRPKLLPRLRGLLVNAVAWKIRHEAEASTKEVILGTESGQIFEMAVDEADKREKYVKPLFELTEQREGIKDLQMETAVVGNSTRYYVMAVTPTRLYSFTGIGSLETVFASYSDRAIHFMELPGEIPNSELHFFIKQRRAKHFGWLSGSGIYHGELNFGAQHSSTSGDENFVENKGFFDYSKLGDSGIKPRSFALSEFHFLLLIGDKIKVVNRISQQMVEELVVDDTPETSRGIIGLCSDPSTGLFYAYDESSIFQVSTSDEGCDMWQVYLDMNHYAAALSHCRNPFQRDQVYLVQADAAFAAKEYYIAASFYAKINYILSFEEISLKFISIGEQDALRTFLLRRLDNLTKEDKMQITMISTWATELYLDKINRLLLEDTTVTIINSVAEPNSSEYRSIVNEFRAFLSDSKDVLDEATTMKLLESYGRVDELVYFAGLKEQYEIVVHHYIQQGEARKALEVLQRRNVPVDLVYKFAPDLIMLDAYETVESWMMARNRLNPGKLIPAMMRYVSEPHAKNETHEVIKYLEFCVKDLNNVDPGVHNLLLSLYAKKEDESQLLQFLDTKFGKGQTNGPDFFYDPKYALRLCLQEKRMRACVRIYSMMSMHAEAVALALKVDLELAKAEADKVEDDEELRKKLWLKVAKHVIEQEKGVKRENIKKAIEFLSETNNLLKIEDILPFFPDFVLIDDFKEEICKSLKDYNSQIEQLKQEMDDATRGADNIRSDIGALAQRYTVIDREQDCGVCRRKILTVGGLHQVGRSYTSVGHMAPFYVFPCGHAFHANCLIGHVTRCSNQVQAERILDLQKRLSLMDRKAAKDNGASVNGEPITSTTPVDKLRSQLDDAVASECPFCGDLMIKEISQPFILPQESDEKASWEIKPQPTPQKILPMTMSI

SEQ ID NO: 329869 - protein, 171 aa, Zea mays
  Clone ID: MRT4577_63924C.1.pep
MAAKIFCLLMLLGLSASAATATIFPQCSQAPIASLLPPYLSPAVSSVCENPILQPYRIQQAIAAGILPLSPLFLQQSSALLHQLPLVHLLAQNIRAQQLQQLVLANLAAYSQQQQFLPFNQLAALNSASYLQQQQLPFSQLPAGTSFRIIRPRQLVLSSSFPSFGKFILIF

SEQ ID NO: 329870 - protein, 126 aa, Zea mays
  Clone ID: MRT4577_63925C.1.pep
SARQDTEHAKVVPEGGGCGFVRRTVREGRHHLRCQFRRGHRLGVPGHCKRGDLVADASRRGAQRNCGRGCLTDENEKLRRSLQVAQEMTTQAQLAAAAAVAGAARSRTLLDFVPAVLFRPFGFVPE

SEQ ID NO: 329871 - protein, 63 aa, Zea mays
  unsure (1)..(63): unsure at all Xaa locations
  Clone ID: MRT4577_63928C.1.pep
FGLFVYILALANAELGFFXKLPFLESSGFPKYGPGAFLVNFPALGVGLFGAPVVGAAIAPVPL

SEQ ID NO: 329872 - protein, 94 aa, Zea mays
  Clone ID: MRT4577_6392C.1.pep
SFRFRGAYVTCVMEFSSKDFVSLILLNTAATQVCMKLLPAHVNLSLYPYMSMLIFQHVIAILYNYKLLSYISEEQIPSTVQKSVSMPNLKLDFL

SEQ ID NO: 329873 - protein, 84 aa, Zea mays
  Clone ID: MRT4577_63930C.1.pep
LEDLWESFKEWSAYGPGVPLVLNGSDSVIQLFANTSRPTSRNKCVLFFVTNNHGVKKVSIALNLKKANLCTKMGSICLFLLCFG

SEQ ID NO: 329874 - protein, 56 aa, Zea mays
  Clone ID: MRT4577_63931C.1.pep
TDSMPGTKKDPDHRTLGNNPSTLAPQGTPLEEGPSAFLGVKGLAAYNPQVASDKEK

SEQ ID NO: 329875 - protein, 216 aa, Zea mays
  unsure (1)..(216): unsure at all Xaa locations
  Clone ID: MRT4577_63932C.1.pep
MSVPSFGSTKYSCLLMLLGLSARAATVTIFPKCXKAPIASLLPPYLSPTVSSVXENPILQPYRIQQAITAGILPLSPLLLQQSSALLQKLPLVHLLXAQNIRAQQLQQLALANLAAYSQQQQFLPFNQLAALNSASYLQQQQLPFSQLRAAYPQQFVPFIQLTALNSIDYLQQQQLXTFNEVDGVIPPSVLRSLQMCRLYQNFASMVRGYIACLFP

SEQ ID NO: 329876 - protein, 98 aa, Zea mays
  Clone ID: MRT4577_63933C.1.pep
PCSLSLRWGADHPGSSFPHRCSLPCRSHRLGALRLGKTTAPARALPTRPCVPAPSPPGACARLSTRRTTLVLGPCAEPCSASLVPAAAPSPLLADAMD

SEQ ID NO: 329877 - protein, 60 aa, Zea mays
  Clone ID: MRT4577_63934C.1.pep
LDDDAILDRCYTILEALSLPLIFILVRRYCNTLLSYVLYTVITMQQSRLYQTNTYNAGQL

SEQ ID NO: 329878 - protein, 269 aa, Zea mays
  unsure (1)..(269): unsure at all Xaa locations
  Clone ID: MRT4577_63937C.1.pep
PTSNIKRPNIVPPLPVKKFGLLILLGLSASPVTATIFQQCXQAPIASLLPPYLSPTVSSXCEXPILNLRPQASTASTLSPLFLQQSSALLQQLPLAHLWARNSRAQQLQQLVLASLAAYSQQQQFLPFNQLAALTSASYLQQQQLPFSQLPVAYPQQFLPFNQLAALNSPAYLQQQQLPPFSQLAGVSPATFLARPQLLPFYQPAAPSAGPLLQLLQLLPFNQRALADPSAFSQXPIIVGASFGKHMRKKTKKNSKKKKKKKKKKACAL

SEQ ID NO: 329879 - protein, 216 aa, Zea mays
  unsure (1)..(216): unsure at all Xaa locations
  Clone ID: MRT4577_63938C.1.pep
SNYSTYKRPLILPTIASQNIEGAVMLLXLSASAATATIFXPQRSQAPISYLLPPYLLPAASTVCENPIFQPYMIQQAIATCILPLSPLFLQQSSALLQQFPLVHLLAQNIRAQQLQQLVLANLVAYFQQQQFFPFNQLVVANPAAYLQQLFPFNQLIVSNFAGDLQQRHQLLNPPAVANPLGVAFLQQHQLLPSTQFSLMTPPLLWQPPPVGGALF

SEQ ID NO: 329880 - protein, 143 aa, Zea mays
  unsure (1)..(143): unsure at all Xaa locations
  Clone ID: MRT4577_63939C.1.pep
KAVGVEFCFFGKFWGNFPLKGGETKVGEKFLAKFFKGPPFKNPPHFLKKFFFFWGGLGLAPPYNFFFLGKGDLNITWAWERFLXEKTNLXKFFLKKKNFYPKIISQKNCFFLWEKKKKGFFFEPLPFETRGLNFGNFFGKGPI

SEQ ID NO: 329881 - protein, 50 aa, Zea mays
  unsure (1)..(50): unsure at all Xaa locations
  Clone ID: MRT4577_6393C.1.pep
TLGLLRSCFAPWVLPLGKNPVIVQPRVGLLLFATLRIVLFWANPENSXRV

SEQ ID NO: 329882 - protein, 71 aa, Zea mays
  Clone ID: MRT4577_63940C.1.pep
PRLIPIFPDQVENLFTRAGNTLFSKEMFFGAPLQNQEGYSSQFPPGVSRLKRIFCSGSNKGILEKLALKFF

SEQ ID NO: 329883 - protein, 93 aa, Zea mays
  Clone ID: MRT4577_63941C.1.pep
QFVKVEGIEESRSEPIKDVVESPAKGVKFVNKRGSKPNKKPGSPSSIEDQIKRPKNKNKETGVGYRNTANNMSVAVDTRKSQRVRKPKNYSSK

SEQ ID NO: 329884 - protein, 142 aa, Zea mays
  Clone ID: MRT4577_63942C.1.pep
VMAIVEEFMSLQNSDSGKEKFQDDEEIVETENVASVSSTSKLAVAKLIDGYLAEVAKDPNLPLPKLTALAEMVSSLPRPTHDGLYRAIDMYLKEHPSLSKSEKKKLCGLMDCKQLSQDACMHAVQNERLPLRVVVQVLFFEQ

SEQ ID NO: 329885 - protein, 127 aa, Zea mays
  Clone ID: MRT4577_63943C.1.pep
ASASDRMLSAEAEFDARLEHGTWWPTPRACPGNKEWQQRRDGTGLRRTALPSLGSLGGGPRFGSQIRCLRIASVAVEESRPHARATRGPAWRRRDGISVYTKATSRAAAKGSPVAQRKNRNKQDRSR

SEQ ID NO: 329886 - protein, 49 aa, Zea mays
  Clone ID: MRT4577_63944C.1.pep
MNNSILLGFGWVRVKLKGFKGDSIPFYLILIRRDFNPQKPILNPGFGWF

SEQ ID NO: 329887 - protein, 93 aa, Zea mays
  unsure (1)..(93): unsure at all Xaa locations
  Clone ID: MRT4577_63945C.1.pep
GRRGGGGGVXRGSHYFTGVNKAKKKREGALHWGKRKKEQNIHKENRPGTRQSQTSCKTAEGRARSLPDITSSLREEKLRLLSPPGGAAEGPNN

SEQ ID NO: 329888 - protein, 71 aa, Zea mays
  Clone ID: MRT4577_63946C.1.pep
STTRHDRGKPPSATAPHQGKGETKELLPMGGAREATTTGTGGGGIPTTGQTGTDGGEKKSVRTQPACRGIP

SEQ ID NO: 329889 - protein, 73 aa, Zea mays
  Clone ID: MRT4577_63947C.1.pep
PRGFFQGPPLQKPGLVIRPLFFSHSNPHAFEFLVFSYICIISRPSCLLLGYGLVNGGGFLFPPRGGFLWYCLS

SEQ ID NO: 329890 - protein, 75 aa, Zea mays
  Clone ID: MRT4577_63948C.1.pep
FAPAAGRFFSQFLAYFLTHQMAVALFRLLGAILKTMVVANTFGMFAMLLIFLFAGILLPRQDIKHWWIWAYWSSP

SEQ ID NO: 329891 - protein, 61 aa, Zea mays
  Clone ID: MRT4577_63949C.1.pep
MGSPKAAKSMVKQRIWRHRLVAPFAAVLITAVVVFSGLFAQDPSEFIGTRSHLGVHCRECG

SEQ ID NO: 329892 - protein, 70 aa, Zea mays
  Clone ID: MRT4577_6394C.1.pep
VRLASLNGFRLSCWHKDTCLKYLYGCSKDASHRRHTLKLYLIEEIFRVFGVALEARTNICYMNFGSKLGL

SEQ ID NO: 329893 - protein, 58 aa, Zea mays
  Clone ID: MRT4577_63950C.1.pep
GTSRCSDWNATEEPTMSRTTCSLSAVCVTKVTAYGCTRVVSERAPSAMVLMFLKRTRG

SEQ ID NO: 329894 - protein, 133 aa, Zea mays
  unsure (1)..(133): unsure at all Xaa locations
  Clone ID: MRT4577_63952C.1.pep
QNVLANLGAYSQRHRFLPFXXLGALSSAAYLQQQXPFSQLVAAYPQQFLPFNQLAALGSAAYLQQQQXXPFSQLADVSPAAFLTQQQLLPFYLHAMPNAGTLLQLQQLLPFNQLALANSTVFYQQPIIGGNLF

SEQ ID NO: 329895 - protein, 203 aa, Zea mays
  unsure (1)..(203): unsure at all Xaa locations
  Clone ID: MRT4577_63953C.1.pep
MGDKILGVLMRLGLSGSAGTGTIFPKCAQAPIASLLPRVTLTPAGSSVCENPILQPYRIQQAITAGILPLSALVLQQSSALLHQXPLVHLLAQNIRAQQLQQLVLANLAAYSQQQQFLPFNQLGSLNSASYLQQQQLPFSQLPAAYPQQFLPFNQLAALNSPAYLQQATXLLPFKPXLAGCEPMTXFLTQXSVLPFLPSTVAR

SEQ ID NO: 329896 - protein, 136 aa, Zea mays
  unsure (1)..(136): unsure at all Xaa locations
  Clone ID: MRT4577_63954C.1.pep
KQELIYKLLLAKKKKKKKKKKKEKKKKKKKKKKKRGGRFVDEEVTGLDKAVIQPGKGFRGALGLREGGPLFGFTKSNELFVGRMAXLGVAFSIIGEIITGKGALAHLNMETGVPINEIEPFVIFNVLFFFIAAINP

SEQ ID NO: 329897 - protein, 89 aa, Zea mays
  Clone ID: MRT4577_63955C.1.pep
GKGDACDHDDDNDGIPDDKDNCRLVPNPDQKDSDGDGRGDSCKDDFDHDSVPDIDDICPENVDISETDFRRFQMIPLDPKGTSQNDPNW

SEQ ID NO: 329898 - protein, 99 aa, Zea mays
  Clone ID: MRT4577_63956C.1.pep
METPKSKKEEINLVKEGEKSKSIFKGITTRQGVLFHRQSASGERRGGARALIPRDYILDFKGFPRRGEIIAAEPLDVNAEKLRYAIGGDQGLAEFAGVC

SEQ ID NO: 329899 - protein, 174 aa, Zea mays
  Clone ID: MRT4577_63958C.1.pep
PLRPARASEKKKKKKKKKKKKKRASLAQLNLETGIPIYEAEPLLLFFILFTLLGAIGALGDRGRFVDEEVTGLDKAVIQPGKGFRGALGLSEGGPLFGFTKSNELFVGRMAQLGVAFSIIGEIITGKGALAQLNIETGVPINEIEPLVIFNVLFFFIAAINPGNGRFIIGEEEE

SEQ ID NO: 329900 - protein, 101 aa, Zea mays
  Clone ID: MRT4577_6395C.1.pep
ERLGVAPGNPPETPKRDPGAERGRAERRGKKKGENRPQGKRGREEKSQNQGNPKTKRKNKGGKTEGGNRKKGKNEKAAGKREKTVRQREKPKGKNTGRKGH

SEQ ID NO: 329901 - protein, 233 aa, Zea mays
  unsure (1)..(233): unsure at all Xaa locations
  Clone ID: MRT4577_63960C.1.pep
AAGTYGSAVHCGGHPRLPLPSSSSSSAGYRHSKSVSVKTLALFGKSKVKTAPSKKAAAPKPKPKVEDGIFGTSGGIGFTKENELFVGRVAMLGFAASLLGEAITGKGILAQLNLETGIPIYEAEPLLLFFILFTLLGAIVALGDPGRFVDEEVTGLDKAVIQPGKGFRGALGLSEGPLFGFTSNELXLGVASIGAPRWRTHEIEPLVIFNVLFFFVAAINPGNGRFIIGEDEE

SEQ ID NO: 329902 - protein, 272 aa, Zea mays
  Clone ID: MRT4577_63962C.1.pep
MAAQSMLMSTSVNGGRALPSLQAVRPAPYPRLPLPSSSSSSAGYRHSKSVSVKTLALFGKSKVKTAPAKKAAAPKPKPKVEDGIFGTSGGIGFTKENELFVGRVAMLGFAASLLGEAITGKGILAQLNLETGIPIYEAEPLLLFFILFTLLGAIGALGDRGRFVDEEVTGLDKAVIQPGKGFRGALGLSEGGPLFGFTKSNELFVGRMAQLGVAFSIIGEIITGKGALAQLNIETGVPINEIEPLVIFNVLFFFIAAINPGNGRFIIGEEEE

SEQ ID NO: 329903 - protein, 243 aa, Zea mays
  Clone ID: MRT4577_63963C.1.pep
MRVAPATRTAAAAHPPSAFLLLLGCASLAIGGAAMAGHVLGGVKENPAAANSAESDGLGRFAVDEHNRRENALLEFVRVVEAKEQVVAGTLHHLTLEAVEAGRKKLYEAKVWVKPWLDFKELQEFSHKGDATAFTNADLGAKEGGHEPGWREVPVDDPVVKDAAHHAVKSIQERSNSLFPYELLEILRAHAQVAEDFAKFDILMKLKRGSKEEKIKAEVHKSLEGAFVLNQHQPAEHDESSSQ

SEQ ID NO: 329904 - protein, 244 aa, Zea mays
  Clone ID: MRT4577_63964C.1.pep
MAAQSMLMSSSSSSGYRHSKSVSVKTLALFGKSKVKTAPAKKAAAPKPKPKVEDGIFGTSGGIGFTKENELFVGRVAMLGFAASLLGEAITGKGILAQLNLETGIPIYEAEPLLLFFILFTLLGAIGALGDRGRFVDEEVTGLDKAVIQPGKGFRGALGLSEGGPPFGFTKSNELFVGRMAQLGVAFSIIGEIITGKGALAQLNIETGVPINEIEPLVIFNVLFFFIAAINPGNGRFIIGEEEE

SEQ ID NO: 329905 - protein, 140 aa, Zea mays
  unsure (1)..(140): unsure at all Xaa locations
  Clone ID: MRT4577_63965C.1.pep
QLCLNKQGSKSHHHQLVPWKQLAALKITRRVHNXQVPFSQQLAADRQQFLPFNQVAALNYQDHSQQQQLGPINQLAGVNRSPXMIQPQVCRCCRPVASXAGTPLHKWQQCHPVNQRGMTNAAAVXSQPIIGGASLGLNKG

SEQ ID NO: 329906 - protein, 139 aa, Zea mays
  unsure (1)..(139): unsure at all Xaa locations
  Clone ID: MRT4577_63966C.1.pep
TYCACSLFPAESLPVIRLIRPLHSCHISTFNNLKCCALSLQAPIAXLLPPYLSPVLSSVCENPILQPYRIQHAIASGILPLSPLFLQQSSALLQQLPLVHLLAQNIRAQQLVLANLAAYSQQHQLPLVHLLAQNIMAQQ

SEQ ID NO: 329907 - protein, 39 aa, Zea mays
  Clone ID: MRT4577_63968C.1.pep
THIYVALVMQVHYMRSNQPMLRHSSVAKSVTCCIKSRIY

SEQ ID NO: 329908 - protein, 49 aa, Zea mays
  Clone ID: MRT4577_63969C.1.pep
VKAYMYFVRYRRRDCLITIAEDQGLSLSIKVSARMVMIIGLRLLRMDMP

SEQ ID NO: 329909 - protein, 111 aa, Zea mays
  Clone ID: MRT4577_6396C.1.pep
FFCRGRCWSVYCLMVRWLASRWRLSFRRCVCWRWFLALWIGPPPGCFGSSCWRRACWWGGMSSRVVVRCMYCFCVVGLQTPWGFIWPPLCVRWLWGRKICCERCSSRIPSL

SEQ ID NO: 329910 - protein, 135 aa, Zea mays
  Clone ID: MRT4577_63971C.1.pep
TGATGLTLSQLDQGGARPPPEKRTKANIFGPPMTICLPQPKAKRGPRGGGSLPKRARVYTQGLGAPGLGEDNPRNIPGHQKRPGGFLKTPTTPRRRNTQGGRPLEKPAQYLKSGERGGGQEATAKPKTWPSSDPG

SEQ ID NO: 329911 - protein, 55 aa, Zea mays
  Clone ID: MRT4577_63972C.1.pep
KHISMVRLQLINRRVMYKFHGSTLCIFVRLANRKNSVMHASAPMQETRLASTRRG

SEQ ID NO: 329912 - protein, 86 aa, Zea mays
  Clone ID: MRT4577_63973C.1.pep
ILTSGLVWLFLSHVLKAIDYVHELSMRCLAKASVLLYPKTLGSCVVFSGSVPLSKSFAQKVSSEARKVITQRYMCLCLELDLLTLI

SEQ ID NO: 329913 - protein, 187 aa, Zea mays
  unsure (1)..(187): unsure at all Xaa locations
  Clone ID: MRT4577_63974C.1.pep
SLGALVLPDTPNSLIARGFNDDAKAVLVKIRGTDDVQDEYDDMVAASEEANAIEHPWRNIPVLFLTIGFGDDASLMAAVITGLVNMFATVVSIVCVDRLGRRALFLQGGTQMFVSQIVVGTLIALQFGTAGVGEMSRSNAWLLVLFICLYVAGFAWSWGPLGWLVPXEVFALEVRSAEQSIVVCVNM

SEQ ID NO: 329914 - protein, 548 aa, Zea mays
  Clone ID: MRT4577_63976C.1.pep
MVGFGSMAGYGIQSMLKEGHRHLSGLEEAVLKNIDACRELSAITRTSLGPNGMNKMVINHLDKLFVTNDAATIVNELEVQHPAAKILVLAGRAQQEEIGDGANLTISFAGELLEKAEELIRMGLHPSEIIIGYTKAINKTIEILEDLVEKGSENMDVRNKEDVVLRMRSAVASKQFGQEDIMCPLVADACIQVCPKNPANFNVDNVRVAKLLGGGLHNSSVVRGMVLKNDAVGSIKRVEKAKIAVFAGGVDTSATETKGTVLIHSAEQLENYAKTEEAKVEELIKAVADSGAKVIVSGAAVGDMALHFCERYKLMVLKISSKFELRRFCRTTGAVAILKLSQPNADELGYADSVSVEEIGGTRVIVIKNEEGGNSVATVVLRGSTDSILDDLERAVDDGVNTYKSMCRDSRIIPGAAATEIELAKRLKEFSLKETGLDQYAVAKFAESFEMVPRTLAENAGLSAMDVISSLYAEHASGNVKVGIDLEEGACKDITTLKIWDLYVTKFFALKYSADAACTVLRVDQIIMAKPAGGPRRDAQPGGGMDED

SEQ ID NO: 329915 - protein, 207 aa, Zea mays
  Clone ID: MRT4577_63977C.1.pep
MVGLGSMAGYGIQSMLKEGHRHLSGLEEAVLKNIDACRELSAITRTSLGPNGMNKMVINHLDKLFVTNDAATIVNELEVQHPAAKILVLAAKAQQEEIGDGANLTISFAGELLEKAEELIRMGLHPSEIIIGYTKAINKTIEILEDLVEKGSENMDVRNKEDVVLRMRSAVASKQFGQEDMLCPLVADACISVCPKNPANFNVDNVR

SEQ ID NO: 329916 - protein, 115 aa, Zea mays
  Clone ID: MRT4577_63978C.1.pep
HRRGGRCHSRWLHCPSSLCPARMPHLVPVDAEHRPYFYNFFKRPWPTLVSPRWATSWFGRWCSRSARGAKAVQRVREDMDWILHGGLQRPSPVHQALHPDPVDDDGLVRQLAPTS

SEQ ID NO: 329917 - protein, 47 aa, Zea mays
  Clone ID: MRT4577_63979C.1.pep
PAPTLKNFSLLCTPVHPVKLLSPTIEPQFPRHLNKPKKKKKRAATDM

SEQ ID NO: 329918 - protein, 58 aa, Zea mays
  Clone ID: MRT4577_6397C.1.pep
HVTSTFAPVISVVPGIQTKQVMQGLLSYLCCVIPERGLRYRLHIVQIIRDRAHRNNMR

SEQ ID NO: 329919 - protein, 96 aa, Zea mays
  Clone ID: MRT4577_63980C.1.pep
SFQMKNDNNVVGRHSYEPDQECLECKALGVSCSLLIVVGCLSMVRYLSGHVEADAVLSELQQGVEGRFGCAHDGAPPHRSPRVLLARLEWIGRWRG

SEQ ID NO: 329920 - protein, 53 aa, Zea mays
  Clone ID: MRT4577_63981C.1.pep
DGELISLHIMGACVSPPENTRRDCLAEIRPSSTDRSPQTTGLCASVTNECSYV

SEQ ID NO: 329921 - protein, 193 aa, Zea mays
  Clone ID: MRT4577_63982C.1.pep
RPGLEYSKKKKKKKKKKKKKKKKKKKKEKKKKKKKKKKKKKKKKKKTSGLGGAAKHFIVGPPSPGGGGVTREVGKNKGFPREKKGGKKKTANPFSKKDGNDIRAPSGFRGPNMGKTPGPRTQGTRIASEGLNHKVFEVGQADLQGDEDRVYRKIRLRAKNGQGRNVLTNFGGMNFTPDKLKSLEKKGKTLFEP

SEQ ID NO: 329922 - protein, 67 aa, Zea mays
  unsure (1)..(67): unsure at all Xaa locations
  Clone ID: MRT4577_63983C.1.pep
ARGWEQPWRVQSDTAGDSHGSIVPGTGRDARFSALIAAAFGAAGHAXIPLTTVLFVSGSQSCDDELV

SEQ ID NO: 329923 - protein, 163 aa, Zea mays
  Clone ID: MRT4577_63984C.1.pep
MGRGRRGHGWPHCGDNKRKRTPSPPSEDFGDLEYSEEVSSESGHSPALASPPASPDDSDDSMGLSTVSRAYWRSIERGGLGGSDESGVSSDEADSFDSSKEWSGDDGDDEGDDSGEGSGEGDDGDEGGSEGDDGDGGGKDDGGDGGGKGDGGDGKASGISPLV

SEQ ID NO: 329924 - protein, 133 aa, Zea mays
  unsure (1)..(133): unsure at all Xaa locations
  Clone ID: MRT4577_63985C.1.pep
LFILSEEXGWDKDLAKKIWCFGPETTGPNMVVDMCKGVQYLNEIKDSVVAVFQWASKEGALAEENMRGICFEVCDVVLHTDAIHRGGGQVIPTARRVIYASQLTAKPRLLEPVYLVEIQAPENALGGIYGVLN

SEQ ID NO: 329925 - protein, 74 aa, Zea mays
  Clone ID: MRT4577_63986C.1.pep
LGVPVCHSGCPTGRSPVGFGPLCFDAPLLEGGFLSSVSVGCRRGFFRVCFSMQKCAFLFLGSREHQSEGFMIDL

SEQ ID NO: 329926 - protein, 76 aa, Zea mays
  unsure (1)..(76): unsure at all Xaa locations
  Clone ID: MRT4577_63987C.1.pep
KQLDLNGHKGNQXTSLGXLMLSLLHDSNLINGVGYCPYGDQRLLVNEYMALGSLADTLLARGNFLNGLTHSDGSAT

SEQ ID NO: 329927 - protein, 57 aa, Zea mays
  Clone ID: MRT4577_63988C.1.pep
YLCRCMHAVLKLGSVRSAAHSYSMDIVASVHLYYSDRKSSVQVGRVESTRESETGTA

SEQ ID NO: 329928 - protein, 208 aa, Zea mays
  Clone ID: MRT4577_63989C.1.pep
ARELIVSDEINLMLVASTPETTNPVTTTCENEEVPCISTVAPWQPWFIGQQANPGDPASWKPFDSSFHFFWGLEDVIAVFTNMWAQVETNKSVGGLFPNDGDGNAWGDPNVGFPPVLTQQGYKLADPGRYQNLTDDFSAQINAFKQANAEIITGVMIPPDFTTFWNQAKQQGFVPKVASIGKAILFPHAVEALGTAGHNLSSEVWWSP

SEQ ID NO: 329929 - protein, 68 aa, Zea mays
  Clone ID: MRT4577_6398C.1.pep
VKDFPVQHVLPSLGMAFQALDVLFETFELGDRRGPSIENVADVETRLPVLPPQPPRVVFFFEQFVVYF

SEQ ID NO: 329930 - protein, 111 aa, Zea mays
  Clone ID: MRT4577_63990C.1.pep
RSHIPGSHASAHASAPTTEVSTFLHACEGEAVTKLTNEKVAYFNAPIYLQNKTQIGKVEEIFGPINESCTTAARKTSSNLNHRRCQHDGPLRPRHHYLLPRRPHLLGGVRS

SEQ ID NO: 329931 - protein, 47 aa, Zea mays
  Clone ID: MRT4577_63991C.1.pep
CVGFFIFAPRSFPISRSNNAVKTTLHNEVLINPTANRGGHKQKDLQH

SEQ ID NO: 329932 - protein, 113 aa, Zea mays
  Clone ID: MRT4577_63992C.1.pep
LPVTVLDSRIHPVVLQAVCSPGFLGTSMSGGLCGPADASVRQYLGRYLDVHGASVSVPPTKPAGWSCTIQVLRSPAASLFHLTDNRITRRVARAFIKLYKHSNLSLEHNSLHG

SEQ ID NO: 329933 - protein, 48 aa, Zea mays
  Clone ID: MRT4577_63993C.1.pep
ASFMTVSLCELSPRAHTLSASDVIRKKLDVWCPQQTISGARETTLSFY

SEQ ID NO: 329934 - protein, 103 aa, Zea mays
  Clone ID: MRT4577_63995C.1.pep
LPCFDGPGKLDYVAEKHRTWPLGVTMPPVKVCNHLACMRINCMSWGWYIINVRATALLSLVLVRALYACLPSGRLNAFWRPRICKNIKCPAKLHPLETVLILS

SEQ ID NO: 329935 - protein, 237 aa, Zea mays
  Clone ID: MRT4577_63996C.1.pep
MAAKIFCLLMLLGLSASAATATIFPQCSQAPIASLLPPYLSPAVSSVCENPILQPYRIQQAITAGILPLSPLFLQQSSALLHQLPLVHLLAQNIRAQQLQQLVLANLAASFVFGIIPPYSDLSGHGIVFFVGRDSFATALPSQYLGFLNSSNNGNFTNHVFGVELDTIRSTEFDDPNDNHVGIDVNSLTSANASTAGYYDDSTGAFHNLTLISAKPMQVWVDYDGETAQVNVFLAPL

SEQ ID NO: 329936 - protein, 271 aa, Zea mays
  Clone ID: MRT4577_63997C.1.pep
MVPTMAAKIFCLLMLLGLSASAATATIFPQCSQAPIASLLPPYLSPAMSSVCENPILLPYRIQQAIAAGILPLSPLFLQQSSALLQQLPLVHLLAQNIRAQQLQQLVLANLAAYSQQQQLPLVHLLAQNIRAQQLQQLVLANLAAYSQQQQFLPFNQLAALNSAAYLQQQQLLPFSQLAAAYPRQFLPFNQLAALNSHAYVQQQQLLPFSQLAAVSPAAFLTQQHLLPFYLHTAPNVGTLLQLQQLLPFDQLALTNPAVFYQQPIIGGALF

SEQ ID NO: 329937 - protein, 92 aa, Zea mays
  Clone ID: MRT4577_6399C.1.pep
GSTVITPMTSVHGDGVQDNIPLPLDTKGFMFQRTTSPLMDDNIFVMNINETSFNTFRAFLYYLYTGFISFSPLTSSFQFPDQLDTWSPGQTS

SEQ ID NO: 329938 - protein, 40 aa, Zea mays
  Clone ID: MRT4577_639C.1.pep
DYEDSIYGIAWSSHDPSLFASLSYDGRVVLESVKPSLQRK

SEQ ID NO: 329939 - protein, 126 aa, Zea mays
  Clone ID: MRT4577_63C.1.pep
MKAKAGSRAGDSRLAVKKSKAEKDPNKPKRPPSAFLVFMDTFRKEYKEKHPDVKQVSVIGKAGGEKWKSLSDAEKAPYAAKAEKLKAEYAKKIDAYNNPQAGEASGDSDKSKSEVNDEDDGSEGDE

SEQ ID NO: 329940 - protein, 250 aa, Zea mays
  Clone ID: MRT4577_64000C.1.pep
MVDLRSLLAAGVVLLAGLAVLVHGAGDEQFVYSGFTGAPLALDGTAAITPSGLLELTNGTAQLKGHAVHPAPMRFQRTPGGPVRSFSASFVFGIIPPYSDLSGHGIVFFVGRDSFATALPSQYLGFLNSSNNGNFTNHVFGVELDTIRSTEFNDPNDNHVGIDVNSLTSANASNAGYYDDGTGAFHDLTLIRAPSPARAARAARRRERRLRQRQLPAREDLAVDRRRGGAHQEPGRDGRAVRCPRHGCHR

SEQ ID NO: 329941 - protein, 229 aa, Zea mays
  unsure (1)..(229): unsure at all Xaa locations
  Clone ID: MRT4577_64001C.1.pep
MIMPAYSVLGLLCERDWYGGSTFGRECLDRRPISLTSVPAVACSHSASPSVMLKSPNSSTPTEIQPGTHRVASLPFITASSLQHSYSADYISYTLVHLLAQNIRAQQLQQLVLANLAAYSQQQQFLPFNQLAALNSASYLQQQQLPFSQLPAAYPQQFLPFNQXLAALNSPAYLQQQQLLTINPLTCGNPGNFLIQPPVVAVXQHPWPNACTLLQLEQLVAFNQLALTN

SEQ ID NO: 329942 - protein, 256 aa, Zea mays
  unsure (1)..(256): unsure at all Xaa locations
  Clone ID: MRT4577_64002C.1.pep
LFENHSQQTKGQYTSNNLRPKIVKIYAILALLTLXTGVASATMITQCYQQXLLSPIPATRFEYPTIQSYRLQVANATSILRTLALSVQQPYALLQQPILMNLYLQRIAAQQLQQQLLPIINQEVAANLAAYSQQQQFLPFNQLGSLNSASYLQQQQLPFSQLPAAYPQQFLPFNQLAALNSPAYLQQQQLLPFSQLAGVSPATFLTQPQLLPFYQHVAPNAGTLLQLQQLLPFNQLALTNPAVFYQQPIIXGGALF

SEQ ID NO: 329943 - protein, 55 aa, Zea mays
  Clone ID: MRT4577_64003C.1.pep
GAGSAPWISPKHSIPRSAARACFLPIIPTKYVRMSPEMYQIVNQRWVIVFVTFVS

SEQ ID NO: 329944 - protein, 46 aa, Zea mays
  Clone ID: MRT4577_64004C.1.pep
NIHGGDCRLKCNSFIAGSCGELTASCMQLESFINDGIEGYVVLLST

SEQ ID NO: 329945 - protein, 277 aa, Zea mays
  unsure (1)..(277): unsure at all Xaa locations
  Clone ID: MRT4577_64006C.1.pep
HHTKPDIVPIRASQISCXIMLLALSASAATVSIYPHCSQAPIASLLPPYLSPATSLVXENPILVPYRIQQAVAAGILPLSPLLLQQSSGLLQQLPLAHXLAQNIRAHQLQQLVLAYLAAYSQQQHLPLLHSLAQNIRAQQLQQLXLANLADYSQQQQVLPFNQLAALNSAAYLQQQQLLPFSQLAAAYPRQFLAFNQLAALNSHAYVQQQQLLPFSQLAAVSPAAFLTQQHLLPFYLHTAPNVGTLLQLQQLLPFDQLALTNPAVFYQQPIIGGALF

SEQ ID NO: 329946 - protein, 151 aa, Zea mays
  unsure (1)..(151): unsure at all Xaa locations
  Clone ID: MRT4577_64007C.1.pep
PWPPPTPRAWACPPPRSRTTTHPSPAPSASSTPPRIRSPCRSXPPPXPSCRRPSGCPPAASPPSAAAPKPRRRPRSRPFHGRTFPRRLRRRAAPSRRSTSPGRWSRRTTSPLAPSSRPGGGRRPPRRCLRLRLLWSGANGPSTQAARGLLS

SEQ ID NO: 329947 - protein, 70 aa, Zea mays
  unsure (1)..(70): unsure at all Xaa locations
  Clone ID: MRT4577_64008C.1.pep
MLWHGVLDRLTGKNKEARNEVMIRGTVRLDKKDVLDVVDLYAXLLDGVHRILGWDQGXAFQFVRATVARP

SEQ ID NO: 329948 - protein, 190 aa, Zea mays
  unsure (1)..(190): unsure at all Xaa locations
  Clone ID: MRT4577_64009C.1.pep
VRLRYGPXPGPRSLQAGVRQLGEASARSLRGCVCVSVGTMKWSRHPRPRATLETPRRLAAGEWDVGRAYGFSCYRKLPRRERHRARRPPSTASPATALDLGSASPPGPGPMELAAPSPTAAVAIPPVGSDMHLGSERMKFAHDGSEPPAKIQMHYSRMNPRIMRMGHRRSEQERTARFTSGRGQTSAESC

SEQ ID NO: 329949 - protein, 167 aa, Zea mays
  unsure (1)..(167): unsure at all Xaa locations
  Clone ID: MRT4577_6400C.1.pep
FQPYSWGYCFXQERGATSDYCTPSSQWPCAPGKKYFGRGPIQISYNYNYGPAGQAIGTDLLNNPDLVASDATVSFKTALWFWMTPQSPKPSSHDVITGRWSPSGADQAAGRVPGYGVITNIINGGLECGRGQDGRVADRIGFYKRYCDLLGVSYGDNLDCYNQRPFA

SEQ ID NO: 329950 - protein, 114 aa, Zea mays
  Clone ID: MRT4577_64010C.1.pep
FEVQLKCLKKKKKDYLLSVADLMVLTGRPLFAVSRTYIVSDVSHAGFKSVDFGWGEAVYGGPAKGGEGPLLGVTNYFSRAKNGKGEEGTVVPICLPKDAMEKFQLEVEGLTAEL

SEQ ID NO: 329951 - protein, 95 aa, Zea mays
  Clone ID: MRT4577_64011C.1.pep
SNMLVFFLSFMSGSNRTKGVTLLCLHTMAIGTIITTTWGELGQGTFVGKTGYGAYYNRLRAATWVFVLARDMRFHLQEIAVVDKAAHLEGEVAPL

SEQ ID NO: 329952 - protein, 83 aa, Zea mays
  Clone ID: MRT4577_64012C.1.pep
RFMVIPMIMAFPLTCGGSFALARCAGAENSLVWSRVHRMYCHQFAGSVSSRLICGHGFSVVHCQTRCIFRTVPAHLHVFQAIL

SEQ ID NO: 329953 - protein, 685 aa, Zea mays
  unsure (1)..(685): unsure at all Xaa locations
  Clone ID: MRT4577_64013C.1.pep
MAAALAPGVSRKLKKVLETRTDNPDLLASLGALSTFYVQNTPQARRNLKSSIEQRALAINRHFLDASLPAHKALDRVEGEVHALNDSWKKIEEALNSCSASTGDIISTTERLQQELEVITQRQEIVSCFLRDYQLSNEEINALREEEIDDKFFKALLHVQEIHSNCKVLLRTHHQRAGLELMDMMSVYQEGAYERLCRWVQAECKKLGDTDNPEVSELLKMAVCCLKERPVLFKYCAEEVANMRHHALFRRFISALTRGGPGGFPRPIEVHAHDPLRYVGEMLGWLHQALASERELIVVLLDPDAMTDSGPTFRRQSGRDGDSSKGEPDVTSVLDRIFEGACRPFKVRVEQVLQSQPSLIVSFKLSNTLEFYCYTISELLGEDTALCNTIWSLRDAAQQTFFNILKSRGEKLLRYPPLVAVDLSPPPAVREGISLLLELIDTYNSMMVPASGKRPNFDPVISALLDPIIQVCEQAAEAQKSKGSLARRGRTSSDPSGNSRDSISVDAILSKNLSTSILSAESSSKVYLINCLSAIQEPLMGQEVATSYVNNLRSMIEAHICVLVXNXVDIYSMNCGTLKKFPAIKQYVHKXFNAFDRWYLGTAXMLVEFLQAFYGIVTGTVGFLPEFEQLQLPSLRSEACXGLARALAEXYELIYSAVMDPNNSYPDPRSLVKHSPEQIRTILEA

SEQ ID NO: 329954 - protein, 122 aa, Zea mays
  unsure (1)..(122): unsure at all Xaa locations
  Clone ID: MRT4577_64014C.1.pep
LFNANVTPCLWVRGTITVSGDREPIYYIVGLITGRENYLEEGPDGGKVXAGEAYRIGGIDHGIFELXPKEGLVMVNRTDVGYGLDFTVLWEDNNLVEMAEVTSVVLCEVMTGKPEFTDHLTH

SEQ ID NO: 329955 - protein, 47 aa, Zea mays
  Clone ID: MRT4577_64015C.1.pep
RRICFRLEVHVATSEGFRMQQMDTYIGPLRMKQLDSKSGRTRGRTRA

SEQ ID NO: 329956 - protein, 123 aa, Zea mays
  unsure (1)..(123): unsure at all Xaa locations
  Clone ID: MRT4577_64016C.1.pep
GRVVGDGYNLGIAEQSGISGGGFCFGMLPATLVGYEVNADILLDVYWNQLDGGCKPVVGAQDVDAGPTEVVEDEDVTXHRYSHATMWHLLLRHAQSQQVPIGYYYAWNEDLVKPPNGVPHTRK

SEQ ID NO: 329957 - protein, 76 aa, Zea mays
  Clone ID: MRT4577_64017C.1.pep
QASVANTMYFFFRTSKRSSFSASSIFVIISFGGHHEVNLVSLLQYCHFLTRINITIYLYFLDCISNNSKVMKFGNP

SEQ ID NO: 329958 - protein, 73 aa, Zea mays
  Clone ID: MRT4577_64018C.1.pep
SIVPNPEVTTAKKCVLLLSDKEDRGWKSNLLGARRIAPNIPERKMQIKTQKAFLFQQCAFYQSIGQQMIVFVL

SEQ ID NO: 329959 - protein, 181 aa, Zea mays
  unsure (1)..(181): unsure at all Xaa locations
  Clone ID: MRT4577_64019C.1.pep
MLLPGGVPSLLLSPSRVXPPSARAAPWIPLSPSRLPPPAMAPLSVVLSHGAPRAPPSHGARRPCSLPSPAAPSSAPPCLXRSSSPGRQTPRTYAARLPMPTSYSXPHSTPAPPLPWLPLPPSLGPCRAPSAXPNTTLCQPCLGSPASLAPAVPNRARPASVLVQPAGDPATRHRLPCPMRR

SEQ ID NO: 329960 - protein, 57 aa, Zea mays
  Clone ID: MRT4577_6401C.1.pep
LVIIACVALRAHVHGLRVAEEATVINAENGSFGGLEPSVVVVDGSVHRHDAALVAVP

SEQ ID NO: 329961 - protein, 80 aa, Zea mays
  Clone ID: MRT4577_64020C.1.pep
CSPASPIITAGEQGQSHKLLNSGKTNPRDLGLPQVWVTATGGIGAPLWVPSWVGVTHLVAADLGSEAQELGFLAQARVAA

SEQ ID NO: 329962 - protein, 147 aa, Zea mays
  unsure (1)..(147): unsure at all Xaa locations
  Clone ID: MRT4577_64021C.1.pep
PPPPPRGCRGPPPPGGGPPTPPQFPAGKAGAGGPPPPEHFXRGPPPPGGPHEGVSPTKAPPEGGTPRGISPPKXXPPPGAPLKXPXPPPIRGPXGPPPQRPPPPPPLXPFXRPPPEGPPPXXKIKCXPPPPPXXIKTKNRVPXXPXR

SEQ ID NO: 329963 - protein, 776 aa, Zea mays
  unsure (1)..(776): unsure at all Xaa locations
  Clone ID: MRT4577_64022C.1.pep
MWKDGVVDPMHVWALSLAQTGHMVVQCTNAFNRLCQFVGYHADTDEKKRDRIRRGLSTKLRDRLNTVRANNYNELVNVAISQEDCITARQTEKKTPRNSNQPQQQYRQGNDNSASHSFISAKFSAKCQLPFHHTNGGIMIATPGGRVATYQINRHVPIRLGSFIFKTTLLIMGLENVDIILGTNLLSRHHAVIDVATRVIEIHSPMDGEITLYLPDQGCTRSFAFALIESPVERIPVVCEYPDVFPDELPGMPPYRDLEFAIELQPETAPISKRPYRMPPAEASDIPKMAFSTKYGVYEYLVMSFGLTNVLAYFMYLMNSVFMPELDKFVVVFIDDILVYSNNEDKHDGISVDPEKVQEVMDWKLPTTVRQIQSTELIKDYDLEVHYHPGKANVVADALSRKAQCNCVTMDSKIATMCDELRKLNMEVVSSELSMDFIVCLPNTSRHHDSIWVIADRLTKIAHFLPVHTTHRAEKYAEIYIDQIVRLHGIPRTIVSDRGAPFVARFWEQLQESLGTHVIRSSAYHPQTDGQTKRVNGILEDMLRACVLHYGKEWDKCLSLAEFSYNNSYQSSLKMAPFEALYGRRCRTLLNWSQAREREIFGPNLVLEAEDKVRVIKKNLEASQARQKSYHDKRRKPLQFEVGDHVYLKVSPTKGVQRFGITGKLAPRYIGPYEVKETCGPVAYQLKLPLHMSAIHDVFHVSQLRKCVRLPMEVLPEXLSYQEHPVKILDQKERSTRARSIRMYKIQWSNHSEETWETXDFLRSSFPDFLPKGIGA

SEQ ID NO: 329964 - protein, 187 aa, Zea mays
  unsure (1)..(187): unsure at all Xaa locations
  Clone ID: MRT4577_64023C.1.pep
CYEPILQLYRXQQAIAAGILPLSPLFLQQSSALLQQLPLVHLLAQNIRAQQLQQLVLANLAAYSQQQQFLPFYQLPIFDCALYXIHHQLSFSHLSAGYPQEVLPFNQMTXIGXRAYGQHXQILPYMQVAGASLYSFLTHYSXVPYYQLAAPNAGTLLQLHQLPPLNQLALNNPLAFYQQPIIGGALF

SEQ ID NO: 329965 - protein, 94 aa, Zea mays
  Clone ID: MRT4577_64026C.1.pep
QYLILCAWLLYLLARLVVVVLSCLGRNGRAGASAVAVHHDSVQLVQRLRLVIGDRVVSVATLNVPAVAFVVGQQKQLVVPLLVRAVSWTGSRWY

SEQ ID NO: 329966 - protein, 46 aa, Zea mays
  Clone ID: MRT4577_64027C.1.pep
ILSASIPCLIACHGCAVNVQIRTQFESSSTSVLLLLTDPGQVVSSS

SEQ ID NO: 329967 - protein, 61 aa, Zea mays
  Clone ID: MRT4577_64029C.1.pep
AHFVGGRPFFFFFFFFFFIFFSFFFFFIFFFFFPKGKTLFGFLIYLNRGITSVAMISVTNM

SEQ ID NO: 329968 - protein, 226 aa, Zea mays
  unsure (1)..(226): unsure at all Xaa locations
  Clone ID: MRT4577_6402C.1.pep
GPAGTLPSNFGHXLPNLKLLYLGGNLFEGQIPDSLGYVSGLVHLDMSYNKLTGKIHSIFGKLLGLSFLNLEENMFEASDSASWDFFVDLIACSSLTVLSLASNNLXGAIPNSIANLSTNLRNLLMSDNHLSGVXPPXIGKXNXLIELELDGNNFTGTIEDWMPKLTSLQNLYLNDNNFDGIIPXNSISNLTQLALLDVSNNKFTGSIPPSMGTFNXLFNLTLSNNN

SEQ ID NO: 329969 - protein, 145 aa, Zea mays
  unsure (1)..(145): unsure at all Xaa locations
  Clone ID: MRT4577_64030C.1.pep
PSEIPKNRALRKYVYRRRDVQALLDMHRHHLVQLFPARPRRRIQRCLNKKPMLLLKNVRKAXKIAPAXDTTEPVKTDLXRNLFIVPEXMIATIDGVYNXQSFNQREIKPEMIRHYLAEICFSYKTCKNRSPSIGATHSSRFIPLK

SEQ ID NO: 329970 - protein, 320 aa, Zea mays
  Clone ID: MRT4577_64031C.1.pep
MATQALGPSLRLLLLLPLLAAAAAAAAALSHPAHEFCAVGGDASGCGGGGDGTRILIKGGTVVNAHLAEEADVYIEDGVVVAVRPNIPVDVDNVRVIDATGKYVMPGGIDPHTHLEMEFMGTVTIDDFFSGHAAALAGGTTMHIDFVIPVNGNLTAGLESYKHKAAKAAMDYGFHMAITKWNDEVAREMEVMVKEHGINSFKFFMAYKGSLMVTDDLLLQGLRKCKSLGALAMVHAENHGKRAATATFSSAPALLLHSAPLAAQAMANRRWRPPSASSCCYRCSPPPPPPPRCLTQRTSSARSGVTGDAVAEAADGLTLG

SEQ ID NO: 329971 - protein, 267 aa, Zea mays
  Clone ID: MRT4577_64033C.1.pep
GKPSLTRGRSRGFEDSNINGSESSRSIPCSNERIALRSDAIESVTRSLSWEEDMSSPSPLLDSTNLTPISSVDDDELECVAFVQKIVSSAGLGDLRLDMVFTGWYLPDCPIDPALCDKLLDRKEEAAKSRERRSNQKLLFDYVNMAVVEIGHDTLLCAYPWRQQCSMAWEETLSQALAEEVPRHMRDWLHGSGKFAGNENDDAGTLLERIMRQEVEGRGWVKSMRWELDEITEQIAGKVLDEIVVEAVDGLGICSPWPEMAMAIPNL

SEQ ID NO: 329972 - protein, 197 aa, Zea mays
  unsure (1)..(197): unsure at all Xaa locations
  Clone ID: MRT4577_64034C.1.pep
KKIKKKKERNKDNNKKKNKIKNPXQKKKQKKYNQXKHKNKKGNTINKKXEKQKYIRKQKDKKNKRXKNKMKKNKIKIKKKNKRKPQKKKXKTNKQTKLIKKXKKKYKRKKKLNKRKKKNKARXKKKXKKKEKKNKNKXKEKKSKIKKDKNKRRKNKLKXKKLTKKKKXKKKKRKQRQLSKGKKHKRKQQKEKNKHAI

SEQ ID NO: 329973 - protein, 123 aa, Zea mays
  Clone ID: MRT4577_64036C.1.pep
ISLGGDLFFIYFWLFCSLVVLFLNTVYLDFIAPLFDKYVPLPDSNLKSCIEKLTSSLKYPLSQIYIVEGSKRSSHSNAYLYGLFNRKKIVLYDTLIDRSVLDVSELFSNKKSTKSNDTAANDN

SEQ ID NO: 329974 - protein, 60 aa, Zea mays
  Clone ID: MRT4577_64037C.1.pep
SSFCFCFGVLTPSATSIRFGFMSTSVFALASCACFTLSSLVRFTKLTLNFLLFSLPCVFT

SEQ ID NO: 329975 - protein, 89 aa, Zea mays
  unsure (1)..(89): unsure at all Xaa locations
  Clone ID: MRT4577_64038C.1.pep
LSRGLPLIKLLXLTTIPLLLNKTRYHCVAKATFMLLSTLDCAIFLSXPIFTRLGKWATIDNFLRWXFIPDNALISAVISCTLVVIEFLM

SEQ ID NO: 329976 - protein, 284 aa, Zea mays
  unsure (1)..(284): unsure at all Xaa locations
  Clone ID: MRT4577_64039C.1.pep
CFVKRTAGRGWDLSPKRPGEGVSMYADDVALFLHPSAADIAITLDILHLFGEASGLXTTXTEGNVYPIQCGGVELEMVQDLLPCGISTFPCKYLGLPLSLKNLTKDQVQPIVDRIADQLPGWKADLMTRAGRKVQVQHVLTGMLIYLAMAVNIPSWAIKAIDKIRRSFLWRGRKEARGGHCLVAWGRVCRPLQLGGLGISSLKELIWALRMRWLWLQKTEPNRPWCSLPXXVPDKARAFFSMVLTSKVGNGANTLFWTDKWIHGQKIADLVPXLFDIIPKKPPQ

SEQ ID NO: 329977 - protein, 70 aa, Zea mays
  Clone ID: MRT4577_6403C.1.pep
GPSGSPWNWARTRLLYLGSHCAVHLLPTRPDNSPESTGGTPASCLRTRTHWTRTDSFMLTNCSWSLLLAL

SEQ ID NO: 329978 - protein, 142 aa, Zea mays
  unsure (1)..(142): unsure at all Xaa locations
  Clone ID: MRT4577_64040C.1.pep
DVRSDSLVYPRFLRLLQILFAGGTVLVSTTAHEHHGEAPTCARSSEHMLAEIHRCEVTEDRHNEDWESLVASHDELLTALDPHDDKAYYRGKIAVKAEHDGYKHNALXQVDAAYAYTKAEKTKCPPADMMLHGGEKASSYNM

SEQ ID NO: 329979 - protein, 119 aa, Zea mays
  Clone ID: MRT4577_64041C.1.pep
TPEKALKKRTGLKKKTVPNWGRQNTGKPKKTLFLKPGLGRVNPGKTGGGPKGARTGIRGPKHLAQKRGNLGFSGKLKFGPKQKKNFGGGERTNKKNPKTVSYFLAKAFGWDKKGGPPSP

SEQ ID NO: 329980 - protein, 115 aa, Zea mays
  unsure (1)..(115): unsure at all Xaa locations
  Clone ID: MRT4577_64042C.1.pep
FLLQQQLLSYCPLTVSYAPTFLHLELLQQIVPALTQLSVANPVAYLRQLLPFSHLTMSYSVAFLHHRHXLLVPLTVAYPLVAAFLQQQQLLPYDRFSLLDPFLSSQQPFIXGAIF

SEQ ID NO: 329981 - protein, 756 aa, Zea mays
  Clone ID: MRT4577_64043C.1.pep
NQDQNMYCAESDKPARARTSNLNEELGQVHTILSDKTGTLTCNSMEFLKCSIAGVAYGSRPTEVETCYGEIVETNGSFGRKDTTEFKRSVKGFNFTDSHLMNGRWAKECSRDAIEMFFRVLAVCHTAIPVADGNSAGMPYEAESPDEAALVTAAREFGFEFYHRTQTTISVHEYDPVVGGKVDRTYKLLNILEFSSARKRMSVIVRTEEGRLFLFCKGADSVIFERLSKDNGTAHLTKTKCHIDEYSEAGLRTLALAYCELTEEQYVVWNQDYSSAKNSVHTDHVAAVEKVSEDIEKDLVLLGATAVEDRLQNGVPECIYKLAQAGIKIWILTGDKLETAVNIGYACNLLRKEMEEIFITLENSSTSASEGSSGEGNKIATFEEIDRKLKDARGKISQKGTSTSFALIIDGNALTHALTGSLKNSFLDLAVNCASILCCRVSPKQKALVTRLVKIRTSKTTLAIGDGANDVGMLQEADIGVGISGAEGMQAVMASDFAIAQFRFLERLLLVHGHWCYRRIAAMICYFFFKNITFGFTLFWFEAHAMFSAQPAYNDWFISFYNVAFTSLPVIALGVFDKDVSSHVCLEVPSLHQDGVNNVFFSWSRILSWMLNGMCCSIIIYFGSLNAILVQAVRQDGRVAGFDILGVTMYTCVVWTVNCQLALYISYFTWIQHFVIWGSILIWYTFLVIYGLFSPAISTTAYHVFVEACAPSPLYWLSTLMIVVTALIPFFVYKISRTLYYPQYHDQVQRANSKNW

SEQ ID NO: 329982 - protein, 135 aa, Zea mays
  Clone ID: MRT4577_64044C.1.pep
PDHSSTLSTASSAKSLRSRRQFKKKPMAVVSSRWTQAEPLGRALRSFRSTVPWSADYGSYALSRRLRLYTQVIAPGCRLHRLPQPLAAPVPDPMSIRHRGLTLRPRTHLSTLLLNLTHLPLPQVRSARHPLQECS

SEQ ID NO: 329983 - protein, 67 aa, Zea mays
  Clone ID: MRT4577_64045C.1.pep
AGRDLVLILWWRAWRRHALRTTGHSAGGRPVRVLRAKELRVAAHARMPPRHLCPPSPQDPRGSHERR

SEQ ID NO: 329984 - protein, 43 aa, Zea mays
  Clone ID: MRT4577_64046C.1.pep
PYSLPCRLLLTHANEKIISIVRARNSTYIIVQAPENKILLCSE

SEQ ID NO: 329985 - protein, 128 aa, Zea mays
  Clone ID: MRT4577_64047C.1.pep
RPVRGPSGTKFRLPMFIADRLVRYCRYASRSPRGFHGLARRVHIPPNRSEVSSQITTRRIRTVLSTARKAHTTHECRRCLPTNERYCNIGRQNSETAANCTEFSPKVARVKRRHMICARQKKKKKRPL

SEQ ID NO: 329986 - protein, 73 aa, Zea mays
  Clone ID: MRT4577_64048C.1.pep
NECLDFTEPNLRRNWHGRMEQTFSYTKTSYNSSCHQKSTLYRAQKKQLFPVSKTNRNLKGKRCMLPTYGRLLT

SEQ ID NO: 329987 - protein, 283 aa, Zea mays
  Clone ID: MRT4577_64049C.1.pep
MTPPSSGRLSALIRRCAASGALSPGAQLHAQALVGGRLPDTTLDTDLVLLYSRCGALHRAREVFDGMPSPSMHAYNVLLAASPPEAAVKLVSRLVASGLRPDRYSVPAVLRACAESRDALLGSVLHGFAVRLGLLANVVVSGALLDMYAKTGTLGDAGRVFDEMPERDAVAWNCMVTGYARAGRSEETLELFRKAQIESAGMARDLRAVPSVLNVCADEGQLMKGREIHGRMARCLASSSDTVVGNALIDMYGKCGQVDGAQAVFASMEGENVVSWSTLISCY

SEQ ID NO: 329988 - protein, 120 aa, Zea mays
  Clone ID: MRT4577_6404C.1.pep
GKNRPRPPRVSTQTSGGQRGQGGGGGSPKGKKNPKKPPPVFLIGGGLIKKKTRQRQKFENGGGPSHNKKFKPTTPKTLHIPRDIPPENGGPTTNLKKGEPPTPPLKLFIGGRIKVLARGY

SEQ ID NO: 329989 - protein, 43 aa, Zea mays
  Clone ID: MRT4577_64050C.1.pep
RSQRLRPKRRRRRRKSPRQAAAAIPARGGTAGALAQSKAPKLY

SEQ ID NO: 329990 - protein, 68 aa, Zea mays
  unsure (1)..(68): unsure at all Xaa locations
  Clone ID: MRT4577_64051C.1.pep
TADYNRVHRLIQLKKHAIEHVIYGVIQMLYQKMGDEKEDTGXRNWIMQKEIMQKKDLMIIKGAIKDAP

SEQ ID NO: 329991 - protein, 173 aa, Zea mays
  Clone ID: MRT4577_64052C.1.pep
SDPNKLSDIFENLGRSNRNVFGYSGNTRDDMLPLSSTSEESRFMKMENNNSRKTGSSVAALKELCTVEGYNLVFQACPSSADGLVGKESYAQVQVGGQILGKGVGLTWEEAKLQAAAEALGTLRSMLGQLGHKRSGSPRSLAPNFNKRFKPDFPRTVQRVPYGTYSRIEGHVP

SEQ ID NO: 329992 - protein, 57 aa, Zea mays
  Clone ID: MRT4577_64053C.1.pep
ERFGVWYPHSAPVVYQWTVIGAASKVASQDAREATSFMFVDRVPYLDDSTTEDGLER

SEQ ID NO: 329993 - protein, 77 aa, Zea mays
  Clone ID: MRT4577_64054C.1.pep
FLSVDPGVGFSPLGFLLCCWGFVSPLRTPFCLVSFGLCWFLAPLHWPAFAVRFQGPPPRVVLWPKAFVKPPPGERKK

SEQ ID NO: 329994 - protein, 116 aa, Zea mays
  unsure (1)..(116): unsure at all Xaa locations
  Clone ID: MRT4577_64055C.1.pep
PKPGSTQRFFNSPLHNHPVRSPVWRCPHSPFLLWTYICPWFQSAPGLTGHAFGLLSSSLMFPLWRRSLLGVARWLPPFFVXFFFVFLNPRACRLLPSSFFCSTFSFFSFPFFLGFF

SEQ ID NO: 329995 - protein, 173 aa, Zea mays
  unsure (1)..(173): unsure at all Xaa locations
  Clone ID: MRT4577_64056C.1.pep
MMLRAAGRRLLGVGXRRASARGXAAAVAASRSRGYHERVVDHYNNPRNVGSLDKDDADVGTGIVGAPACGDVMKLQIRVDEGSGRIVDARFKTFGCGSAIASSSVASEWVKGKQVEEVVAIKNTEIAKHLSLPPVKLHCSMLAEDAIKAAVKDYEAKKGKKMAKAEEQDTPSP

SEQ ID NO: 329996 - protein, 127 aa, Zea mays
  unsure (1)..(127): unsure at all Xaa locations
  Clone ID: MRT4577_64057C.1.pep
MMLRAAGRRLLGVGXRRSSARGXAAAVAASRSRGYHERVVDHYNNPRNVGSLDKDDTDVGTGIVGAPACGDVMKLQIRVDEGSGRIVDARFKTFGCGSAIASSSVGEQSQILVASRSRRAGVGCHAN

SEQ ID NO: 329997 - protein, 112 aa, Zea mays
  unsure (1)..(112): unsure at all Xaa locations
  Clone ID: MRT4577_64058C.1.pep
MMLRATGRRLLGVGXRRSSARGXAAAVAASRSRGYHERVVDHYNNPRNVGSLDKDDADVGTGIVGAPACGDVMKLQIRVDEGSGRIVDARFKTFGCGSAIASSSVGAQWSSH

SEQ ID NO: 329998 - protein, 83 aa, Zea mays
  unsure (1)..(83): unsure at all Xaa locations
  Clone ID: MRT4577_64059C.1.pep
SKRTRGAAKGDGEXKXAGKRKXNTKEEEPEQXXQTAGEREGENPXXTPXPXXXXXGRATPXDNRANAXAKGXNKXXXRRPRQP

SEQ ID NO: 329999 - protein, 78 aa, Zea mays
  Clone ID: MRT4577_6405C.1.pep
NQGIANVPWPSLISSWFAQSCHEKKKRKKKKKKKKKKKKKKKKKWGHEPRCSKIRTTSCQFKAYLTEHLESILHAQDK

SEQ ID NO: 330000 - protein, 102 aa, Zea mays
  Clone ID: MRT4577_64060C.1.pep
KTKRFFLSNPNILIFSFPKIVYPAQSLKFFKNIVFLQKQNGNFFLQIKKPFRRFFKSPCKNLYIGPLKWRGSFLKIWSLAFKKEIAKEQFPRFLKNKGFCFA

SEQ ID NO: 330001 - protein, 154 aa, Zea mays
  Clone ID: MRT4577_64061C.1.pep
MGKRSGSSRKDKNKVILPPELPPEIHDDEVDVSEEDIEFYATDSSNVTPFRHFDKKSIDRYVGRVAGRDEGEVERLYEERQKRKATESSGRPREDDDYLEVDPVDALPTKTLQGELVYNRAKKARSEDNSGSVKTKAQENGANAKTNTKKDEPY

SEQ ID NO: 330002 - protein, 140 aa, Zea mays
  Clone ID: MRT4577_64062C.1.pep
HESYAVTHDEPPTTLHTRAPTYKMNYRLMRKEHYKTHYLRHGHPCYNSWDGHCHPHQQPDQQLYRLQQHLQHYTQHYACPQTFYEPTCETTNEMVYDADHEVDMKRIMAEIYADNYCDTFYERYRMRYLGYFIGYHYCNN

SEQ ID NO: 330003 - protein, 145 aa, Zea mays
  unsure (1)..(145): unsure at all Xaa locations
  Clone ID: MRT4577_64063C.1.pep
MAEQKKIRWGELEEDDGGDLDFLLPPRGVVGPYENGLKKXIEYRFDYDGEKVRVSTTTRVRKLARARLSRSAIEGRQWTKFGYALKEDAGSRINMASTEEMLLERPRVPGMTAEETTASGDPLAMMSKGCAVLVICITCGKKDDP

SEQ ID NO: 330004 - protein, 60 aa, Zea mays
  Clone ID: MRT4577_64064C.1.pep
FPSKSCKMFYLCISAFLFISKGARMIQFAFCDPVVPLYKYPQKVEDRIYKDQTCNNFICF

SEQ ID NO: 330005 - protein, 55 aa, Zea mays
  Clone ID: MRT4577_64065C.1.pep
HTILSTGGMVFVMLLGIIYLVDTRLPGNTQRRMHHMMGILKDKLTRSYLIDLDQM

SEQ ID NO: 330006 - protein, 445 aa, Zea mays
  Clone ID: MRT4577_64066C.1.pep
MMMMNTSAAMSPASTDVVVVDDFSLGVGVGAMHQPYVVGFDADAGMGIIMPSVVVDRPLLQQNTNLLEEYDSFDFAAAAGLLLPFQELPAGLLPPANYLPPPTPISMAMAMSPPSLLLTTLPGVPVPTAAAADVVYGGLGGGGAGGLSFVLKREAGGGGGMIGGLNLGRRTYFSPAAVDRLLGGGGLGVGLGMSVLGLGVGAAAHQQQQQPPPRCQAEGCKADLSAAKHYHRRHKVCEFHTKASAVAAAGKQQRFCQQCSRFHVLAEFDEAKRSCRKRLTEHNRRRRRKPISEQGNDHSSLPPPPPKTADTCMTTSYNDDPNSASNTAAAKSAAISQNGGVSCLDVLDNEQRGGSGADGAISGRAAPAAASREGREPGLRAMMQRRVHWSMAGGWTTTNRRFITSLVVMQTQQQSSTAATSCRARRSVSDQQNGGCNGFFEVDFI

SEQ ID NO: 330007 - protein, 62 aa, Zea mays
  Clone ID: MRT4577_64067C.1.pep
NALLMHPTCYKFIIIQNHRHVDTTSMQPFGPINQAGADEIQLRDASSLPPKEGTHNILIISN

SEQ ID NO: 330008 - protein, 308 aa, Zea mays
  unsure (1)..(308): unsure at all Xaa locations
  Clone ID: MRT4577_64068C.1.pep
MLPVVLLVYVAMKYTKLRRLAVTVFLRCGVPSADHHPLLLISASSTTAPPPSRGSPTTFSSSSLETEAKAAAVAEFCRAAGQPLAEVRGKMHSVAGAARGSYAADGTLVDLDDGEFAEMMLLDGCFLLQFMASVCRRRDDDPLISRGEVRRSINAIVRDVMLLENQIPWLVLGSLMQLMPPPAGPVVNDFLLLMASAFHIVGDISNANSQTDLQAAGELDQPPPPHLLGLFHRRQMDMGAVRTQQHQGSLLRVPFQLASLSSTAVELAEMGVKLAPSKTKTFGDMAMSKRXRGWPPRLFRELFLRPLS

SEQ ID NO: 330009 - protein, 65 aa, Zea mays
  Clone ID: MRT4577_64069C.1.pep
AGNMCFSSAGYVLERCTRFKELNHVGRELSRLHLHHQLESLRLGRWPWPIGRQCMMPGIGTLLCR

SEQ ID NO: 330010 - protein, 126 aa, Zea mays
  unsure (1)..(126): unsure at all Xaa locations
  Clone ID: MRT4577_6406C.1.pep
AFKFFASLLRLGLFAXAGIATIFPHCXQARIARFLAPYLSPAVSSACENPLLQPYRXIQHAFAARISPLSPLFLQQPSALLQQFPLVHLLAQNINALQLQQLALGNLAAYSQQQQFLPFNQLAALN

SEQ ID NO: 330011 - protein, 223 aa, Zea mays
  unsure (1)..(223): unsure at all Xaa locations
  Clone ID: MRT4577_64070C.1.pep
MTGNENLVDGVENESQQDAHVAEHAAGGTASIRRHEVHEAPPPRRYRLPKVRRAFGGPPPPPPHISFQYNSAATIERIPYNLQFIVPRNRNVIAPTAVAIGPYHRALPQLSGMQEAKAAAVAEFCRAAGQPLAAVRGKMHSVAGAARGSYAADGTLVDLDDGEFAEMMLLDGCFLLQFMASVCRRRDDDPLISRGEVRRNINAIVRDVMLLENXIPWLVLSSL

SEQ ID NO: 330012 - protein, 58 aa, Zea mays
  Clone ID: MRT4577_64071C.1.pep
MGKEKSHINIVVIGHVDSGKSITTGLLIYMLGCIVKLLIEMFCVGLFSNTHTPLFKFS

SEQ ID NO: 330013 - protein, 290 aa, Zea mays
  unsure (1)..(290): unsure at all Xaa locations
  Clone ID: MRT4577_64072C.1.pep
MARRKLVTCRQGAFEEGNAARDKAVPIPDKVLRHCKYANGRALDLEPIEKNFANESMQISFEEESDDMVCEISESVVRDVEKAAIELLAARAFTVSELRKKLRSKKYPFDTIDAVIANFKSRGLLNDGFNAESFSRSRWLTSTWGPRRIKQALHQKGVPEAEVDQATRRVFQDGDDXEXEATFGMSEASMDHLFAQASKQWQRAQSLTLESRRARMVRWLQYRGFNWAVTNAVIRKLEASAPSTLTLLTRLGVCPCVATGVRWDEYRHISNRILYFLGGSVESLLESQIC

SEQ ID NO: 330014 - protein, 73 aa, Zea mays
  Clone ID: MRT4577_64073C.1.pep
QKDQQLLTSCHRDVLIHTRTKDGGSNTTIWGSNPMNWGAAAAELAGSHLDEVKRMVEQDRQPVVKIEGFTFRV

SEQ ID NO: 330015 - protein, 290 aa, Zea mays
  Clone ID: MRT4577_64074C.1.pep
MPLGMSMAASRRLLHLLPRLELCLRSRALSIPSSSRAQGMARCRREPPRRKLVTCRQGAFEEGNAARDKAVPIPDKVLRHCKYANGRALDLEPIEKNFANESMQFSFEEESDDMVCEISESVVRDVEKAAIELLAARAFTVSELRKKLRSKKYPFDTIDAVIADFKSRGLLNDGFYAESFSRSRWLTSTWGPRRIKQALHQKGVPEAEVDQATRRVFQDGDDYGKEATFGMSEASMDRLFAQASKQWQRGQSLTLESRRARMVRWLQYRGFNWAVTNAVIRKLEAQHPPP

SEQ ID NO: 330016 - protein, 130 aa, Zea mays
  Clone ID: MRT4577_64075C.1.pep
GATAGRAWAEHRSREPACRPGPLVLVGWPTKSNASFKGQNKSPGHIAGSTLGVLSTDSFTHMSGGQAQLNHIGPGRSILTRPKINQTWGKKKGCITRRRKSPLDGKAFILESQGQSLLQLLKRAGSGVSS

SEQ ID NO: 330017 - protein, 262 aa, Zea mays
  Clone ID: MRT4577_64076C.1.pep
HASAEGAFIYPMYGHAELPQAFCRCAAVKGALYVLRMPVVALLMDEEKKHFLGARLASGQDILCQQLIIDASYKIPTLDVPFDGSDSWKVVRGVCIISKSVKQGSSNVLVIFPPKSLEEQQVAAVRLLQLSSNLAVCPPGMFISYLSTPCTDVSAGKQSIKKAIDTLFSPQASDGSEGHFETTNESTEDVKPTLIWSCLYVQEITQGTSGSLLSCPMPDEYLDYRNVLGSTKKLFASIYPDEEFLPKKSAPVYADDASDSAE

SEQ ID NO: 330018 - protein, 67 aa, Zea mays
  unsure (1)..(67): unsure at all Xaa locations
  Clone ID: MRT4577_64077C.1.pep
ADGFLLPTTLQTSVVSSXGATTTCLLSPPLRHLLXSSLVDCFPSLIDLQPSQHIHEYISPSVPDHSL

SEQ ID NO: 330019 - protein, 78 aa, Zea mays
  Clone ID: MRT4577_64078C.1.pep
RHQPTTKRWRTRPIKQHKVKARLPSLSARATENLKAREMVATRSPACWAAGSFSKSSRPKASRPPATFYGRSFRWNTV

SEQ ID NO: 330020 - protein, 264 aa, Zea mays
  Clone ID: MRT4577_64079C.1.pep
MAFAVSDELLGTFVPIAVYWLYSGLYVVLDGLGMDDYRLHPKGEEEAKNIVSRSTVVRGVLVQQAFQIAVSLLLFTVLGDENEAARKQPPALVLALQFIVAMFVMDTWQYFMHRYMHINKFLYKHVHSKHHTLVVPYAFGALYNHPLEGLILDTIGGALSFLISGMTPRTGIFFFSFATIKTVDDHCGLWLPGNILHVFFSNNSAYHDIHHQLYGNKYNFSQPFFVMWDKILGTYMPYTLETRKGGGLEARPVKLNQAQQTKAD

SEQ ID NO: 330021 - protein, 81 aa, Zea mays
  Clone ID: MRT4577_6407C.1.pep
PKDSRQGCLVYKKVLLMTQHQASVLPLSRDLPRVAPAIVLCVSVLKYCVVYTRPCCNSVSLRSIATGLLRISTPAPDVASI

SEQ ID NO: 330022 - protein, 44 aa, Zea mays
  unsure (1)..(44): unsure at all Xaa locations
  Clone ID: MRT4577_64080C.1.pep
KATXXRLIRLSSRHHKVGFXSLLAHSISHLISYXQTSLCERCGL

SEQ ID NO: 330023 - protein, 66 aa, Zea mays
  unsure (1)..(66): unsure at all Xaa locations
  Clone ID: MRT4577_64081C.1.pep
MGRVIRAQRKGAGSVFKSHTHHRRGPARFRSLDLGGGGGYLKGXCTDLFHNPVRVALFEKVTFVHN

SEQ ID NO: 330024 - protein, 154 aa, Zea mays
  Clone ID: MRT4577_64082C.1.pep
MTAVRTIDPYPYLAERPLRRMVTGQSSHLERLHHRLHEELERRHQEQEQQGSSPLPPQEVESRRQPSPAPQPEMPPAPPQGISAAGGDPDGDGDGDDDCGSLSHITELSEEQETEGWIARPITCDAARGCHFHDALDTCVGSLTDTLGPLSTVV

SEQ ID NO: 330025 - protein, 61 aa, Zea mays
  Clone ID: MRT4577_64083C.1.pep
RADPRDREPSKDTIPGNEKPTKTAGAPANETGLPRADDEREKRARTIYCTNKDKKATQAEL

SEQ ID NO: 330026 - protein, 79 aa, Zea mays
  Clone ID: MRT4577_64084C.1.pep
MTTSSMVGRSKPGYGLCPALSFKDLHHPCWGGGRDEPELYLPHGSVGHLLLQHSGERALTGLAEGADFDNAGLVGRERR

SEQ ID NO: 330027 - protein, 52 aa, Zea mays
  Clone ID: MRT4577_64085C.1.pep
IETPLLTTPDEESTYSASLDASYRNFLYYRPASSSFIWNSRTIPLYTNMATP

SEQ ID NO: 330028 - protein, 56 aa, Zea mays
  Clone ID: MRT4577_64086C.1.pep
PNHNTSTKNSIYFYTTKNARQVWQIHLNACPPSHDAPSTSSSNAQTKTLRPTTPTL

SEQ ID NO: 330029 - protein, 105 aa, Zea mays
  Clone ID: MRT4577_64088C.1.pep
PGNDDLSIPFASGCMSVSSVDCFGKSELLDALHRCLTMMTLSSFACSRVELPLSVLFGHYVGGECGAVLISHSNQRVELYGVDALMSQSNRLLFSPVRTATSLLI

SEQ ID NO: 330030 - protein, 57 aa, Zea mays
  Clone ID: MRT4577_64089C.1.pep
PKIITVGPPFKKATTFLWPFNLKAPLGGLKKKRTPFLEGGNPGTPENSPNELLKRMI

SEQ ID NO: 330031 - protein, 71 aa, Zea mays
  Clone ID: MRT4577_6408C.1.pep
PLAQGFSFWKWGSGFPPLPLKDNPFWFIKNLWGENWGENGFSKICRGSHVSHKWGVVSMVFPVSPVPPSKE

SEQ ID NO: 330032 - protein, 65 aa, Zea mays
  unsure (1)..(65): unsure at all Xaa locations
  Clone ID: MRT4577_64090C.1.pep
MAMDPDAXVDKDFVEHYYRTFDTNRAALVGLYQETSMLTFEGQKFQGPSAIAGKLGSLPFQAWEH

SEQ ID NO: 330033 - protein, 322 aa, Zea mays
  Clone ID: MRT4577_64091C.1.pep
MQWYLVAALLTILTSSQGILTTLSQSNGKYNYDYATIPFLAELFKLSVSGFFLWKECHSSSPPRMTKEWRSVRLYVVPSVIYLIHNNVQFATLTYVDPSTYQIMGNLKIVTTGILFRLVLKRKLSNIQWMAIVLLAVGTTTSQVKGCGDSPCDSLFSAPLEGYLLGILSACLSALAGVYTEYLMKKNNDSLYWQNVQLYTFGVIFNMGWLIYGDFKAGFELGPWWQRLFNGYSITTWMVVFNLGSTGLLVSWLMKYSDNIVKVYSTSMAMLLTMVLSIYLFSVKATIQLFLGIIICIISLQMYFMPVHMLIELPQTLPVTSK

SEQ ID NO: 330034 - protein, 367 aa, Zea mays
  unsure (1)..(367): unsure at all Xaa locations
  Clone ID: MRT4577_64092C.1.pep
RVESVEGGGVDKREKIRQKNEKKHQRQKERRAQELHERCKGYLMSRKLEALAQKLVAMGFSADQATMALIQNEGCVEESVTWLCNFDGSEEAKQQXQLINSPXNLKIDIADELSKIVSLEVKYKCTKQEVERAVVSCEGDLERADEALKTHKQESTAVPPKPEGSSDSSALPNKQQVVLAQNPARAQTNGFSSVGSQQTRREEEISYKLLMNGSGPKEPAIKGFQPLATPIKPDLVRQQFVQPEKRRLNPNSNPSVPSVASSPLPVAVPQVKPDMRHVAGTNEVKSLMPNGSLRESVIVMQRPQSAGTKQSLPSTSHSMFVSEPSARDWYLNGVSGVDMMLNGGLHGLRNMSLDSASSARSFGHANH

SEQ ID NO: 330035 - protein, 89 aa, Zea mays
  Clone ID: MRT4577_64093C.1.pep
GQKKCPTKCPPGLRFETTLPLKKGLYHPYPPPRLRKRPSAQGKHRTHQPLEAPFPRARSFPLKPMPHVFTPPPLKKPTVGTPKKNPNTP

SEQ ID NO: 330036 - protein, 235 aa, Zea mays
  Clone ID: MRT4577_64094C.1.pep
MRHVAGTNEVKSSMPNGSLRESVIVMQRPQSAGTKQSLPSTSHSMFASEPSARDWYLNGASGVNMMLNGGLGHGLRNMSLDSVSSGRSFGHANHQQSFVSNPIELAANGWGGTWSSGGTSSSRPVVSSFGAFRGWSSSESSPALPHSDWRANGAAPYDYTSVDWSLDTTLLNPAAKSERLSDTWSTMFMGGRSTRTPGNLSGAGIAGLHDSNHPMDPAPSPRPYEWPTFCRGGSS

SEQ ID NO: 330037 - protein, 286 aa, Zea mays
  Clone ID: MRT4577_64095C.1.pep
MVRLTADLIWKSPHFFNAVKERELDLRGNKIAVIENVGATEDQFDTIDLSDNEIVKLENFPYLNRLGTLLVNNNRITRINPNLGEFLPKLHTLVLTNNRLTNLAEIDPLASLPKLQFLSLLDNTVTKQPDYRLYVIHKLKHLRLLDFKKVKQQERVAAAKKFHSKEAEEEAKKVPAKTFTPGLPDAQDITMEPQGPKVVAPTPEQITAIKAAIANAHTLEEAARLEQVLSTGQVPAEFAVPKPDANMAEASDGAEKMDTDGENQEGGEADGQKQGEGSTSTPIQED

SEQ ID NO: 330038 - protein, 85 aa, Zea mays
  Clone ID: MRT4577_64096C.1.pep
YFKAEHRRTTMGCSRRIPMPAAGGCDMAYLLQRRTMSWYDADGIKHNATLRGPTVVRASGVPMPQVGGGQVTSWHLECLKGMHRT

SEQ ID NO: 330039 - protein, 179 aa, Zea mays
  Clone ID: MRT4577_64097C.1.pep
MTYRDHNLHAYPPTRPRPLIEQIPDYREDLDVSDEEDGFYQREDDFFLPPKVQAAILRTTDRIPRRIKRHCAAYIFVFFLAIASWWTYFGPRRAAFVQELHLMDHAPTMSYGSQVRPEFKGMIQVTDMDEQHLPKENKRLIFIGDVHGCRAELEHLLNNVAFDQSRDHIVMTGDMIAKG

SEQ ID NO: 330040 - protein, 203 aa, Zea mays
  Clone ID: MRT4577_64098C.1.pep
MVRLTADLIWKSPHFFNAVKERELDLRGNKIAVIENVGATEDQFDTIDLSDNEIVKLENFPYLNRLGTLLVNNNRITRINPNLGEFLPKLHTLVLTNNRLTNLAEIDPLASLPKLQFLSLLDNTVTKQPDYRLYVIHKLKHLRLLDFKKVKQQVCSFPLEWLQNMFWDGPQKWGCWQQKRQTSNSFDFGFSRIRCINTMECFG

SEQ ID NO: 330041 - protein, 195 aa, Zea mays
  unsure (1)..(195): unsure at all Xaa locations
  Clone ID: MRT4577_64099C.1.pep
IDLSDNEIVKLENXPYLNRLGTLLVNNNRITRINPNLGEIDPLASLPKLQFLSLLDNTVTKQPDYRLYVIHKLKHLRLLDFKKVKQQVCSFPLEWLQNMFWDGPQKCWAAGSKRDKQATLLTLDFHELDALTPWNALSGMFSIIQSANVAFISDFLGRFFFCFVGESCGSEKVPLKGSRGRGKEGACQNVYSWSA

SEQ ID NO: 330042 - protein, 29 aa, Zea mays
  Clone ID: MRT4577_6409C.1.pep
RPVDRMLRTNPILLAIEGPSEGYDGGYRR

SEQ ID NO: 330043 - protein, 985 aa, Zea mays
  Clone ID: MRT4577_640C.1.pep
FGTRPSLLPLLPDPDPRLPPADPAASSRRRSAVAAMEKPCSLLVHFDKGSAAMANEIKADLEGSDGPAKADAMRRAISLLLNGETLPQLFITIVRYVLPSEDHTVQKLLLLYLEIIDRRDPAGRALPEMILICQNLRNNLQSPNEYIRGVTLRFLCRLSEPEVLEPLVPSVLANLEHRHHFIRRHAVSSVSAIYRLPHGDQLIPDAPELVERFLASEQDASARRNAFLMLCACAQDRAVAYLLSNADRVAEWPDLLQMAVVDLIRKVCRSQNRANKGRYITIITSLLSTPSTAVVYECAGALVSLSSAPTAVRAAANTYCQLLSSQSDNNVKLILLDRLNELRTLHRDVMVGVVMDVLRALASPNLDVKRKVLDLVLDLLTPRNVEEVVLYLKKEVVKTQAGDLEKGGEYRQMLVQAIHACAVEYSEVAGSVVHLLMDFLGDTNVAAAVDVVLFVREIIETNPKLRVSMIQRLIDTFYQIRASRVCSCALWILGEYSLSLSEVESAIATIKQCLGDLPFYTVSDEGEATDSAKPAKAVVNSVTVSSRRPVVLADGTYATQSAATETILTPSVAPGSLASTLNLRSLILSGDFFLAAVVACTLAKLVLRLEEVQPSKDESNKACTGALLIMTSILQLGQSSYLPHPIDNDSYDRIVLCVRLLCNTGDDVRKIWLQSCRQSFAKMLAEKQFRETEEMKAKAQISHAQPDDLIDFYHLKSRKGMSQLELEDEVHDDLKAATGGFTKDADDANKLNRILQLTGFSDPVYAEAFVTVHHYDIVLDVTVINRTKETLQNLCLELATMGDLKLVDRPQNYTLAPESSKQIRANIKVSSTETGVIFGNIVYETSNVMERSVVVLNDIHIDIMDYISPATCADVTFRNMWAEFEWENKVAVNTVIQDEKEFLNHIIKSTNMKCLTPPSALDGECGFLAANLYAKSVFGEDALVNISIEKQHDGKLSGYIRIRSKTQGIALSLGDKITLKQKGGS

SEQ ID NO: 330044 - protein, 725 aa, Zea mays
  unsure (1)..(725): unsure at all Xaa locations
  Clone ID: MRT4577_64100C.1.pep
MDVDDPSPRAGGGSGVDPPRIRRLEESVVNRIAAGEVIQRPSSAVKELVENSLDAGASTVSVTVKDGGLKLIQVSDDGYGIRFEDLPILCERHTTSKLSAYEDLQTIKSMGFRGEALASMTYVGHVTVTTITEGQLHGYRVCYKDGVMENEPKPCAAVKGTQIMVENLFYNMVARRKTLQNSNDDYPKIVDFISRFAVHHINVNFSCRKHGANRADVHSSSTSSRLDTIRNVYGASVVRDLIEIEVSDEDAGDAVFKMDGYISNANYVAKKIMMILFINDRLVECTALKRAIEFVYSATLPQASKPFIYMSINLPSEHVDVNIHPTKKXEVSLLNQDRIIETIKNTIEEKLRNCNTTRIFQTQAVNSALTQVYTQKDKGTEVKMAPGVKSQKAPVSQMVRTDPRNPSGSLHAYWHGQSSKLENKYDLVSVRNVVRSRRNPKDAGDLSSRHELLMEIDSHCHPGLLEVIKNCTYVGLADEVSALIQYNTHLYLVNVVNVSKELMYQQALCRFGNFNAIQLSEPAPLQELLLMALKDDESIGDENDEEKLEIAEANSKILKENAEMINEYFSIHVDHDGNLTRLPVVLDQYTPDMDRLPNFVLTMGNDVTWDDEKECFRTAAAAIGNFYALHPPILPNPSGSGVQVYKKNKACMASGEHVDSTDEDDIDHELLAEAETAWSQREWTIQHVLFPSMRLFLKPPKSMATDGTFVQIASLEKLYRIFERC

SEQ ID NO: 330045 - protein, 65 aa, Zea mays
  Clone ID: MRT4577_64101C.1.pep
THCATFRAQVLACVRVCADLSLVCVALPSLLLCFFVIFTVRARGSKLWRFLANGRKTIRKQVVVF

SEQ ID NO: 330046 - protein, 71 aa, Zea mays
  Clone ID: MRT4577_64102C.1.pep
TAALGGVPMGIRKEKIRVHVQTFESLAPRMEPVSPVRGVEFINDSKATNVNSTWFALESMERPTIPILGGV

SEQ ID NO: 330047 - protein, 64 aa, Zea mays
  Clone ID: MRT4577_64103C.1.pep
VAACLMWTMHESAGAVYEDMLQLLEKALDDNCYHGLRASIESVRNELKSMHQDHRHIGDLKHTV

SEQ ID NO: 330048 - protein, 141 aa, Zea mays
  unsure (1)..(141): unsure at all Xaa locations
  Clone ID: MRT4577_64104C.1.pep
FKQAVRQVAPNKLMELWILKMPPLHDFQFFNTSRLNLLYXRXVRSLMLSNLKKDPFDGQNXYQLDPLLGKPGVKDLSVIIICFCIMYKXNFNTSFSACQXYGQHCILTVXCKMEGQTGQGVELLMVKVCKQIYKKMXSDYD

SEQ ID NO: 330049 - protein, 201 aa, Zea mays
  unsure (1)..(201): unsure at all Xaa locations
  Clone ID: MRT4577_64105C.1.pep
MDSTKLSALLALAMLALSSSPLALAWEKAEPECHSCESGSPPSTGVPLPPISIPSVPLPPVSIPSVPIPPVTQLPPVVGLPPVTLPPIPIIGGSPPKKGHRKACPPPPSPXRPRPRRSSDKCPIDALKLGACVDILGNEVHIGDANVKCCPLVKGIAGLSAAACLCTAIKAKVLDISVYVPIALEVLVNCGCEVPPGYKCT

SEQ ID NO: 330050 - protein, 229 aa, Zea mays
  Clone ID: MRT4577_64106C.1.pep
VDPASEEEGKSPPPAFVLRRVEGMKNEQAISEVLCWSRDPSELRRLALRKDEIHSSLRGGSYHQMRNGSREFMSTLANYKIPIAVVTTRPRKVIEEAIEAVGVRSFFDAVVTAEDVYRGKPDPEMFLYAAQLLSFIPERCIVFGNSNSAVEAAHDARMKCVAVASKHKIYELSAADLVVKQLDELSVVDLKNLADIESPEFGMEPEPEMEEEEEVPPPSTSVGIDDLFW

SEQ ID NO: 330051 - protein, 213 aa, Zea mays
  Clone ID: MRT4577_64107C.1.pep
MDSTKLSALLALAMLALSSSPLALAWEKAEPECNSCESGSPPSTGVPLPPISIPSVPLPPISIPSVPLPPVSIPSVPIPPVTELPPVVGLPPVTLPPIPIIGGSPPKKGHRKACPPPPSPPTPTPTPTPSSDKCPIDALKLGACVDILGDEVHIGDANVKCCPLVKGIAGLSAAACLCTAIKAKVLDISVYVPIALEVLVNCGCEVPPGYKCT

SEQ ID NO: 330052 - protein, 203 aa, Zea mays
  Clone ID: MRT4577_64108C.1.pep
MDSTKLSALLALAMLALSSSPLALAWEKAEPECHSCESGSPPSTGVPLPPISIPSVPLPPVSIPSVPIPPVTQLPPVVGLPPVTLPPIPIIGGSPPKKGHRKACPPPPSPPTPTPTPTPSSDKCPIDALKLGACVDILGNEVHIGDANVKCCPLVKGIAGLSAAACLCTAIKAKVLDISVYVPIALEVLVNCGCEVPPGYKCT

SEQ ID NO: 330053 - protein, 192 aa, Zea mays
  unsure (1)..(192): unsure at all Xaa locations
  Clone ID: MRT4577_64109C.1.pep
MKRQMRYRLKQKYFNGISANQVRTTSPISSMSDNEWRKLVEKLSAPNHKKQEKHKDVEPSAIDLFKEMHCSKKKGXDMKEMVAAPVQDGQQPKSPVEVVSNVLPSSSVFLRNVRLXSTSKKSSTMTVYANVQKLRDELETEKQEKDGLREEVETLKAQRTASQETIDSMKRSMDEITPSSSLLATSRASASI

SEQ ID NO: 330054 - protein, 95 aa, Zea mays
  Clone ID: MRT4577_6410C.1.pep
YTRTVGECIYDTTACGSSITPGVTGGGAYESARTPATKLSCTPALRGAGQDYTTEPARGIEWWCIALGVSTTTSEMRSRTATVHCQHSIVASAFN

SEQ ID NO: 330055 - protein, 93 aa, Zea mays
  unsure (1)..(93): unsure at all Xaa locations
  Clone ID: MRT4577_64110C.1.pep
VTLTIRLLMHGKEVGSIIGKKGESVKRIREESGARINISEGNCPERIIXLTGPTKSLFKAFAMIIDKLEEDINSSMTNSTAASRPPVTLRLVV

SEQ ID NO: 330056 - protein, 97 aa, Zea mays
  Clone ID: MRT4577_64112C.1.pep
STLTSLFLFLYTKAQFNMEEMVAAPFQDGQQPKSPTEVVSNVLLGSSVFLHNVGLQSAFKKSSTTTVSAMAQQLQDELEIEKQEKDGLQEEVETLKA

SEQ ID NO: 330057 - protein, 138 aa, Zea mays
  Clone ID: MRT4577_64113C.1.pep
TWLCSPCPWSPMCSPPCCWCPQPWAVFPLLPLVLHECHAGLAHVGSGPAGCAWRSWGVRPSVRLRPCRRVPGPSCCPRYSARLSVWPSGACWCSTRQQPFSCCPASLFSEVRTGEVILRRARAGGWRPERARTLVDPG

SEQ ID NO: 330058 - protein, 70 aa, Zea mays
  Clone ID: MRT4577_64114C.1.pep
MKRQMRYRLKQKYFNGISANQVRTTSPISSMSDNEWRKLVEKLSAPNHKVLAIDHSINYTGFFDLLDISY

SEQ ID NO: 330059 - protein, 186 aa, Zea mays
  unsure (1)..(186): unsure at all Xaa locations
  Clone ID: MRT4577_64115C.1.pep
KAYHSISDPLYYTMRFIDGLRDDVKSVVMVQRPKDLDTAXVLAQLQEEVADKRRDYRRFDVPASKNMAKSPLAPATSAKCCRSQXWIKQQEESXTTTTEDKLTSLYAYRRARGLCYKCGLQYSRGHRCADFVQLHVMEELWQLLPVPDQDESANSDDSAELNNMVLSQAAVTGNTAPQTIQMVGHI

SEQ ID NO: 330060 - protein, 268 aa, Zea mays
  unsure (1)..(268): unsure at all Xaa locations
  Clone ID: MRT4577_64116C.1.pep
MPPGKRSTEFTRKSEDMKRQMRYRLIQKYFNAIYANQVRTTLPISSMSDNEWRKLVEKLSAPNHKESCVKNKLNREKVQYQQCTGSQSNIAQAFILKQEKYKDVEPSVIDLFKEMHCSKKKGFSENVQKAIVIACFDFMFVFTTCNLWYTILMNNLXFKLXDMEEMVAAPVQDGQQPKSPVEVVSNVLSSSSVFLRNVHLQSTSKKSSTMKVYANVQQLRDKLETEKQEKDGLREEVETLKAQEQASQETIDSMKRSMDEITTSFVNY

SEQ ID NO: 330061 - protein, 107 aa, Zea mays
  Clone ID: MRT4577_64117C.1.pep
MDNNQNLLQKLFLMCYWAPVCSYTMLVFSPPPRKAPQRLFSAKVQQLQDELETEKQEKDGLREEVETLKAQAQASQETIDSMKRSMEENNNLLRQLLSFNRGQVPPS

SEQ ID NO: 330062 - protein, 67 aa, Zea mays
  Clone ID: MRT4577_64118C.1.pep
LNWVFIVFAINLDKWKFKKEIIFTNVEINNHKKVKILREYRKKRRNILFSLYHIKINNETATKADHY

SEQ ID NO: 330063 - protein, 43 aa, Zea mays
  Clone ID: MRT4577_64119C.1.pep
MVSLKLQKRHDASVLKCGKGQVWLDANEVTEISMANARQNIRK

SEQ ID NO: 330064 - protein, 246 aa, Zea mays
  unsure (1)..(246): unsure at all Xaa locations
  Clone ID: MRT4577_6411C.1.pep
IRHEGKKRRKREGPPACPLLPPESRTPVAAAAAARPARPAAMSICGYHSPRFSEDITWLPQWLQPYSTPVVGEHRNNSTAVSSLSCQNCAFVGHPSQEHQDCQNATDGYSGFILHLSGDEDTVVSSPVSSNVLPFSLRVSSESAAQPSLAEGSGNPQIPNSGTCNGLSESLCADGEEQEVNAVSQNQFEANDPQVDMPTKVARKEISIQPDTIRHRRHGFNGGKVDVRKLRXGDVNDAIELSIAAS

SEQ ID NO: 330065 - protein, 39 aa, Zea mays
  Clone ID: MRT4577_64120C.1.pep
LFYMETYLPEGDYNLLFGTLEHGHTILNSQMLYLQRVSL

SEQ ID NO: 330066 - protein, 90 aa, Zea mays
  Clone ID: MRT4577_64121C.1.pep
GHGPTWDPNKGKFPQKQGPGALGTKTIINTGPQGPPPGEFNRKRTPAGQPNRVTLKHYPSKGQKFKKAPWTGPKNTFTYRGGNTTKRAGS

SEQ ID NO: 330067 - protein, 54 aa, Zea mays
  Clone ID: MRT4577_64122C.1.pep
IQYYGWGRMAMVRIPYWGYALPQFHFPCKISKCAKGEGNHGLNYINFFWCFFSV

SEQ ID NO: 330068 - protein, 87 aa, Zea mays
  Clone ID: MRT4577_64123C.1.pep
RNNCLLRNTLSTVNNICHLYTATDQQPFRMLSFVNYTPRPHPEHKTKEHCRVHSNPSNVPLDISNNTPATDPKSAIPRSAAPPAPAA

SEQ ID NO: 330069 - protein, 63 aa, Zea mays
  Clone ID: MRT4577_64124C.1.pep
ALLHTPFLGLHQPLRERTILMFLHVGLSHVFHRGPALLGTRFLFPDGLFFYQKIIDTTSDFPG

SEQ ID NO: 330070 - protein, 60 aa, Zea mays
  Clone ID: MRT4577_64125C.1.pep
MDTTQELRPVTFTIKMRPPSESALLMLDERMTWTKITESIFFCKNGLMGMQEAHENAKRI

SEQ ID NO: 330071 - protein, 127 aa, Zea mays
  unsure (1)..(127): unsure at all Xaa locations
  Clone ID: MRT4577_64126C.1.pep
GLKGKRRDQTPGNPRGPPXEKXSGDKPLNGKGEKPPPPLKXLTRPPRLGGRPPFTKKGAPKXSPPRRGEGLPGPIMKNLPPGGKPXRGHPPTLVSPKPGVSPXEAPGASRGGPPGPPLFKAPRKNTP

SEQ ID NO: 330072 - protein, 47 aa, Zea mays
  Clone ID: MRT4577_64127C.1.pep
FLGSRDLTASRSNTNKHVIYKINITPNIRINCIIIIYMSLRAREIEN

SEQ ID NO: 330073 - protein, 82 aa, Zea mays
  Clone ID: MRT4577_64128C.1.pep
KIYDGRSTTCSGALKPEDGKSVSGAISRHSISSTPIIMITRACVRQAIVSQSTCPGRASYLPFRSSAGGRSLSIKLSWRWQK

SEQ ID NO: 330074 - protein, 46 aa, Zea mays
  Clone ID: MRT4577_64129C.1.pep
NLVTVSSGPWAWEPESPMIEAHKVGRSSAVMSASGLSSDSWSLLCA

SEQ ID NO: 330075 - protein, 35 aa, Zea mays
  Clone ID: MRT4577_6412C.1.pep
MATGDASAAGAPLVASARFVVATLLCGLHLRRLLL

SEQ ID NO: 330076 - protein, 84 aa, Zea mays
  Clone ID: MRT4577_64130C.1.pep
SATAQKKRGAPTEPPQRGARERRKRPVGNRDARKHPEPRQRHRDRRHHIALARTSRTVLFLAPAGLLRSCTFACEVLTQTSPVP

SEQ ID NO: 330077 - protein, 86 aa, Zea mays
  Clone ID: MRT4577_64131C.1.pep
LCVRFICVTNGLPCSLIQRNAKALRGYLYGTSWCIRPEELTRGNPRRLTQTTSDVLMAYALGLVHRQQEHEAEHLALDVGHARLGS

SEQ ID NO: 330078 - protein, 74 aa, Zea mays
  Clone ID: MRT4577_64132C.1.pep
TRVRKRCLFWPSIWTSNCSVVCVRLPIPIYTMVQLGVVLGSIFIRYTVIFATIQVTRRLFSSLALIIVSHMTLH

SEQ ID NO: 330079 - protein, 71 aa, Zea mays
  unsure (1)..(71): unsure at all Xaa locations
  Clone ID: MRT4577_64133C.1.pep
QAIHSSILRTASAPHHPLSDLRELGKQDDAVGXSRSGSKRWRQCLPLTDLGSRLANSLPVLDAPAGYYALS

SEQ ID NO: 330080 - protein, 149 aa, Zea mays
  Clone ID: MRT4577_64134C.1.pep
MPPPLPMGRQPRWWWSGGSGSARTLAVGVAVVVALVVSLCFAFIGGRRLAGLLVGGGTPASDSGGRTMAAAAAHPGGQVATTDEEMVYTGRRRLLSGGPGSHPPRCASKCGSCNPCYPVHVSVPPGVLVTTEYYPEAWRCKCRNQLYMP

SEQ ID NO: 330081 - protein, 70 aa, Zea mays
  unsure (1)..(70): unsure at all Xaa locations
  Clone ID: MRT4577_64135C.1.pep
RDRGLYSSLVNAHSAVQRDADRGFPAGLSEMLVQSPGTDLYLLSALPRHTXAQRYVNGPIAQGGVTVHIS

SEQ ID NO: 330082 - protein, 45 aa, Zea mays
  Clone ID: MRT4577_64136C.1.pep
LFCDIGIKKTAVSTKRMRSKMMIIISFLLFIYNTLLQRNHPSNVQ

SEQ ID NO: 330083 - protein, 53 aa, Zea mays
  Clone ID: MRT4577_64137C.1.pep
NHPRWSLRTAPASAASYSARPGASRRRLWQRGLGPGPGGRHHRLCIRAASCRL

SEQ ID NO: 330084 - protein, 86 aa, Zea mays
  Clone ID: MRT4577_64138C.1.pep
RVANACLQSLVAPLCLMLIVDPEAVPRRGQVAQVPGHQACGPVCSPLLSLGWCWPPCVGTIAACQPPSPLFSSCWWSRQSARRQRS

SEQ ID NO: 330085 - protein, 258 aa, Zea mays
  Clone ID: MRT4577_64139C.1.pep
MKVQCDVCTAEAASVFCCADEAALCDACDRRVHRANKLAGKHRRFSLLHPCSSSSSSAAHKPPLCDICQERRGFLFCKEDRAILCRECDAPVHSASDMTRRHSRFLLTGVRLSSAPVDSAGPSEEEEQENSRGPCNDESCSSGSGAGGATTATASDGSSISEYLTKTLPGWHVEDFLIDDASAGDVGACSDGLYQGQNGQISGVLQEAYLPWTEREQVQTDVADERASWERWVPQMHAEFGGGGKRPRASPSPPCSYW

SEQ ID NO: 330086 - protein, 84 aa, Zea mays
  Clone ID: MRT4577_6413C.1.pep
KKVPSPHGLEVWGGPPTHHRKAVVFWDRQGFQATLPAQGGGMGVGFSPGGPGRGLWGPLSFWGQGQLSGLGAPPGCKMDVLAPN

SEQ ID NO: 330087 - protein, 46 aa, Zea mays
  Clone ID: MRT4577_64140C.1.pep
PGVYSCQTGKTQAPPNLNMSHHIYLSPDDVIATRPEPTELPNISPG

SEQ ID NO: 330088 - protein, 210 aa, Zea mays
  Clone ID: MRT4577_64141C.1.pep
MKVQCDVCAAEAASVFCCADEAALCDACDDRVHRANKLAGKHRRFSLLHPCSSSAHKPPLCDICQERRGFLFCKEDRAILCRECDAPVHSANDMTRRHSRFLLTGVRLSSAPVDSADPSEGEEEEEQENSSRPGNGESCSGGAGATTATASDGSSISEYLTKTLPGWHVEDFLVDDAYASDVGACSSDGLYQVSSVLPCEWNCKLSLRRS

SEQ ID NO: 330089 - protein, 88 aa, Zea mays
  unsure (1)..(88): unsure at all Xaa locations
  Clone ID: MRT4577_64142C.1.pep
MARGPKKHLKRLAAPKHWMLDKLGGTWAXRPSQGPHKLRECLPLIVLLRNRLKYALTRREVVQICAQRLVKVDGKVRTDINFPAGFQD

SEQ ID NO: 330090 - protein, 216 aa, Zea mays
  Clone ID: MRT4577_64143C.1.pep
HVRPGAHRAQPNSSVRASAASARSLLRARRRCPYFHGWSRPCSSSSCAPAPHGWLPALVPPSDCASAPPMAPGGPHLCSSAPPFSRPGLKLPRHPLSSSLPHPQPPAVELPRRSLAPSIRSQPRSSCAREFLWWTRAGRDPPHPIAALQLAARPAPLCRSAYLPELTPVLGFSVSSMVLSSAATCRVPPFSALPARLGWMGIHLVAFVAAGASCRR

SEQ ID NO: 330091 - protein, 309 aa, Zea mays
  Clone ID: MRT4577_64144C.1.pep
MASGGSAARDAYDEEAAVRRPLELDSRDAAASSSDHWPGGNAMPRYQVGLTKDDSSSRHSEWRQPSTDDVRKSKLGPRYFTAFGVDLSPDNMAVAIVYFVQGVLGLARLAVSFYLKDDLHLDPAETAVVSGFSSLPWLIKPLYGFISDSIPLFGYRRRSYLFLSGLLGALSWSLMATVVSSKYSAASSILLGSLSVAFSDVLLEIIEVMVVDSMVVERARGESQSTSGSLQSLCWGSSAFGGIVSAYFSGSLVDTYGVRFVFGVTAFLPLMTSAVAVLVNEHRISSGEHATFHYELNWPNGSMQVAWPG

SEQ ID NO: 330092 - protein, 73 aa, Zea mays
  Clone ID: MRT4577_64145C.1.pep
TTPFYQILGNLTELKDQLKLGLNLRSYELSFTLEVMVASTVSHASSGKSSQKTRSQFCFKHNHELQSWAMMQR

SEQ ID NO: 330093 - protein, 234 aa, Zea mays
  Clone ID: MRT4577_64146C.1.pep
MASVGWAARDAYDEEAAVRRPLELEGRGVAASSSDHRPGGNVMPRYQVGSTKGDSSSRRHSEEWRQPSTDDVRMSKPGSRYFTAFGVDLSPDNMAVAIVYFVQGVLGLARLAVSFYLKDDLHLDPAETAVVSGFSSLPWLIKPLYGFISDSIPLFGYRRRSYLFLSGLLGALSWSLMATVVSSKYSAAFSILLGSLSVAFSDVVVDSMVVERARGESHSTSGSLQSLCWGSSAF

SEQ ID NO: 330094 - protein, 331 aa, Zea mays
  unsure (1)..(331): unsure at all Xaa locations
  Clone ID: MRT4577_64147C.1.pep
MGKPFDVELGGGAGGLEIAGAGGGGPWGGRVFGAIGRAVSFRCVFVLLLAAGVLIPVLFLLVPSHQQGYLSDDHDVLAAEIKVGFTLEKPVSFLTSHIDKLGNDIFEDIGVPNSKVSIVSMHPLTSKYFTHIVFGVLPYPKDASISLPALSVLRSSLIEMMLQQVNLSLTPSLFGHPSSFELLRFPGGITVIPAQSGFTWVNTDPLFNFMLNNSIYQILGNLTELKDQLKLGLNLRSYEKIYFQFRNEIGSSVEAPATIVASVLDGSSNLLPDRLRQLAKLIREPDAMNLGLNHSVFGKVKGVQLSSYLQHKXLVSPSPSPAHRHHNHLLA

SEQ ID NO: 330095 - protein, 33 aa, Zea mays
  Clone ID: MRT4577_64148C.1.pep
MACMGACASLLKDSTVLLVLLRQPAAERGPPKG

SEQ ID NO: 330096 - protein, 61 aa, Zea mays
  Clone ID: MRT4577_64149C.1.pep
QITVFIFCKPFLHHFGFLSVTINSWFKNPFFRHTIYCTLHLLGFKQNSKAYNILNFFFYFY

SEQ ID NO: 330097 - protein, 207 aa, Zea mays
  unsure (1)..(207): unsure at all Xaa locations
  Clone ID: MRT4577_6414C.1.pep
GTLQACRGWGGSVQEMLTFASXNTLGVPFVDPSLIRDEQRTAESNLWLLPTPSVFGNTTLVLSRAHNRSYSAKNMTQFLRDIGFEEGVEPYRARIRPLVEALPEPGVPLTCLVGTGVDTVESLVYGDRGFDEAPEKVVYGDGDGTVNLASLIGPIKAWSDSPAQVVEVVELPKVSHSGMLSDKSALEQIIRIIDSINLNATSYHHSS

SEQ ID NO: 330098 - protein, 143 aa, Zea mays
  unsure (1)..(143): unsure at all Xaa locations
  Clone ID: MRT4577_64150C.1.pep
PAGLRKSQTPRHPYTYKHTHARARASRCSAKQRKRRRGGHGAENVRENHGTGGAKAKTNFPYPSCVPLSAAGCRSSNSSTVESFSSDAQAPMQAMPLPPSLELDLFHRAAAAATGTGAAAXRFPFGSIPVTHPYYFFGQVAAA

SEQ ID NO: 330099 - protein, 61 aa, Zea mays
  Clone ID: MRT4577_64151C.1.pep
DSGEADGGEADPNDDCGREQLPVPVDHFRLPQVPLQSLASKFAKSVLDHPAGVMEDGCGRR

SEQ ID NO: 330100 - protein, 182 aa, Zea mays
  unsure (1)..(182): unsure at all Xaa locations
  Clone ID: MRT4577_64152C.1.pep
QRPSGRYAAEIRDPAKKSRVWLGTYDTAEDAARAYDAAAREYRGAKAKTNFPYPSCVPLSAAGCRSSNSSTVESFSSDAQAPMQAMPLPPSLELDLFRRXRFPFGSIPVTHPYYFFGQAAAAAAEAGCRVLKLAPAVTVAQSDSDCSSVVDLSPSPPAAVSARKPAAFDLDLNCSPPTEAEA

SEQ ID NO: 330101 - protein, 262 aa, Zea mays
  Clone ID: MRT4577_64153C.1.pep
MALARAAALPLLLLPFLAVTTCLDVPSHGCYWTGCQSKWFGVCAARHFLDSQSDDCDGLCVESKSPPCLPLHTHFYCCKPGTPKVTNKCGHCKSKLDFGKEFICCSDCSDPTIMDKNSKLGYCKSGADLTMQLKLQETFRWVAGPWMTCSSPCDGGIRYRDVACYGNLDDDTIKHYPVDDASCSADKMPARQEACNQQSCSDPEMTQSVNPKESGMSGWLVVLVVILGLSAAAGIAFTSYTYYVRRTSGTSGFVYVMMEAYS

SEQ ID NO: 330102 - protein, 130 aa, Zea mays
  unsure (1)..(130): unsure at all Xaa locations
  Clone ID: MRT4577_64154C.1.pep
WLPQRGLPERGGNILRXWLFEHLLHRDPSDPDKHLLARQTGLPRNQDYNWLSNARVRLWEAMIEERYHQECRQLGGSSAGGGGPESGNDPSGGDDXDCPTTTGAAQVPQQQHHLGTVPGEMPHKADPGAD

SEQ ID NO: 330103 - protein, 233 aa, Zea mays
  Clone ID: MRT4577_64155C.1.pep
MAPRTSEKTMAPAAAAATGLALSVGGGGGAGGPHYRGVRKRPWGRYAAEIRDPAKKSRVWLGTYDTAEDAARAYDAAAREYRGAKAKTNFPYPSCVPLSAAGCRSSNSSTVESFSSDAQAPMQAMPLPPSLELDLFHRAAAAATGTGAAAVRFPFGSIPVTHPYYFFGQAAAAAAEAGCRVLKLAPAVTVAQSDSDCSSVVDLSPSPPAAVSARKPAAFDLDLNCSPPTEAEA

SEQ ID NO: 330104 - protein, 510 aa, Zea mays
  Clone ID: MRT4577_64156C.1.pep
MGTRGVALLLLAAVLLLQALLPASSEGLVRVALKKLPVDQNGRVAARLSAEERQRLLLRGSNALGSGGDDDSDVIALKNYMNAQYFGEIGVGSPQQKFTVIFDTGSSNLWVPSSKCYFSIACYFHSRYKSGQSSTYKKNGKPAAIRYGTGSIAGFFSEDSVTLGDLVVKDQEFIEATKEPGLTFMVAKFDGILGLGFQEISVGNATPVWYNMVKQGLISDPVFSFWFNRHADEGEGGEIVFGGMDSSHYKGDHTFVPVTRKGYWQFNMGDVLVDGKSTGFCAGGCAAIADSGTSLLAGPTAIITEINEKIGAAGVVSQECKTVVSQYGQQILDLLLAETQPAKICSQVGLCTFDGTHGVSAGIRSVVDDEAGKSNGGLKSDPMCNACEMAVVWMQNQLAQNKTQELILNYINQLCERLPSPMGESAVDCGSLASMPDIAFTIGGKKFKLKPEQYILKVGEGQAAQCISGFTAMDIPPPRGPLWILGDVFMGVYHTVFDYGKLRVGFAESA

SEQ ID NO: 330105 - protein, 53 aa, Zea mays
  Clone ID: MRT4577_64157C.1.pep
RMRMSTTVSQPGPSLYGRKLKEIPKGTQPWIKPLAKRLSDELVACRTDQIGRT

SEQ ID NO: 330106 - protein, 189 aa, Zea mays
  unsure (1)..(189): unsure at all Xaa locations
  Clone ID: MRT4577_64158C.1.pep
AYPVYKEIMEKEVNRFVEQHGIGLVTVSSAISVGFASATTARSSVRNGLFLLXGRRSRVPXLHAIESAAGILPLVRVYFVCRTRLFIAKKGSAAGRYICCVHNPAVSELARFLAPXVPSVRHLSSTCCLASGVSSXPVCLSSXQLVNEGFQFRYSPLDXIRVYDDMIESGKDPGASTRPCPSACLCVFP

SEQ ID NO: 330107 - protein, 51 aa, Zea mays
  Clone ID: MRT4577_64159C.1.pep
INQYFESISQSQIRIVLARPIKTLGGVLKFKRGPPFVSARRKWASYGKEQP

SEQ ID NO: 330108 - protein, 79 aa, Zea mays
  Clone ID: MRT4577_6415C.1.pep
MPREEYQVPTTSGGASAGAMTRGATGGERHDSRAVMTYICGDCGGNVTLSKDALVACPHCAGRVLYKERTKRMVQFEAR

SEQ ID NO: 330109 - protein, 75 aa, Zea mays
  Clone ID: MRT4577_64160C.1.pep
RQLMLFGLLASADAATFLPQGSQAPIAPVLTQLVSPNPAAYWEHLILYHYLTLQAFAADILHLSPLLIPQSLALL

SEQ ID NO: 330110 - protein, 50 aa, Zea mays
  Clone ID: MRT4577_64161C.1.pep
FFFFFFFFFFFFFFFFFFFFFFFFFFFFFWGPKKIQKFRGGICKNEPFFQ

SEQ ID NO: 330111 - protein, 62 aa, Zea mays
  unsure (1)..(62): unsure at all Xaa locations
  Clone ID: MRT4577_64162C.1.pep
VVAPPQDLVGLGSFNWSGINTIRPLTRTSTWFMFYIPRDRCWCXLVYYTACCCAHCRLWVCP

SEQ ID NO: 330112 - protein, 78 aa, Zea mays
  unsure (1)..(78): unsure at all Xaa locations
  Clone ID: MRT4577_64163C.1.pep
YRTKALLRAAAAGIYEQYXSAKASPRATVDDYLVAQLADTLNHEAPTPAIFDDLQRKVYESKLRDERSYTSFRQNALY

SEQ ID NO: 330113 - protein, 60 aa, Zea mays
  Clone ID: MRT4577_64164C.1.pep
AKNRGNKNCRPAETGEFKFLAPTLDVQAMFFAGMRCDHYNTSKLEGDCFKDPGPSDLYAY

SEQ ID NO: 330114 - protein, 286 aa, Zea mays
  Clone ID: MRT4577_64165C.1.pep
MDQVRLSLEDSPKPPDRRRSSSDDPHYLSGVRLIGAATVQTAGYNAKQTSPRGLAAAPRTCPEGSNSFTNSKVQVPTKSGTQYRGVKGAMCKRRPCQIIVGLRLNLITIRAHLPAFAPAAFQGLNYLDERSPLALQPQASPWPQNYREGTYIKYNGSTDPTQYIMTTRQQEKENIRHYYKKFLLLKSQLPLVDDQIAIPNAISGLCAGVLYSHCTRDLHPTSRSCISFSKNMLDQKSSTAEKSSHSGSPKRLYKPAGHGPILRIQTTPIKTSTNNSKSTTSQSRHN

SEQ ID NO: 330115 - protein, 83 aa, Zea mays
  Clone ID: MRT4577_64166C.1.pep
TPRGARAGYIICVGGKGQKGVGPVPRVRGDQQDLLWCCPLVCGPGEICSGSRNLLLETLWAGALRLISMFYARQTLPHSSWGS

SEQ ID NO: 330116 - protein, 72 aa, Zea mays
  Clone ID: MRT4577_64167C.1.pep
VGLSVVNAKRLVFMNEWAAYMVVLPFGSVVTPVYRPNGGGLWVDMVVQPPPIGGLYFSNPRFPFFAPGLVMI

SEQ ID NO: 330117 - protein, 65 aa, Zea mays
  Clone ID: MRT4577_64168C.1.pep
MRSPASGELVPKRCGMAPVPGTITTAKVTKPLFLKRPMQFGISGPLPPSIDLHRFVKLPIVLRCQ

SEQ ID NO: 330118 - protein, 110 aa, Zea mays
  Clone ID: MRT4577_64169C.1.pep
ERGQWAPPNYCGLAPSLGPPGFPFFASGFFFVWNFEGITFSPGKQFCPFFPQVLIRLPIGKIGTPPGPGPDFRGGPPGPGVARAFPLSKGGGSFCPLKGGPGIHRFFPGG

SEQ ID NO: 330119 - protein, 138 aa, Zea mays
  Clone ID: MRT4577_6416C.1.pep
YKLFFFFFFFFLPFFFFFLQGQAHHTRGANSSALGAGTKGGELRAKVGASVNIVSARKNTQHPTPEPKKEKPGAQKEKPGAPKEGGTQHQLCRPKTPLSSWKNESANSLKEAANARGEAALAWGPTPFPRSMTCWERY

SEQ ID NO: 330120 - protein, 67 aa, Zea mays
  Clone ID: MRT4577_64170C.1.pep
PAGKTSLSTSSTQTKPTFKQPLPFQKQPSSCLAVDALLLALAAAALAAPAPAALTNKLFLQRPRWEP

SEQ ID NO: 330121 - protein, 156 aa, Zea mays
  unsure (1)..(156): unsure at all Xaa locations
  Clone ID: MRT4577_64171C.1.pep
RARRGLGPADLQHASDNPREAEAPQPAAAPKRLSRPAAAIKQLNRVQPMPAPLRNRGRRRLRQYILIAAAVLSGLALFVAGNYIPRXXXXXXXXXXXXXXXXXXXXXXXXXXLFRLFSXXXXXXXXXXXXXGCERXXCIVLKVVLQDGGEIFVRTW

SEQ ID NO: 330122 - protein, 129 aa, Zea mays
  unsure (1)..(129): unsure at all Xaa locations
  Clone ID: MRT4577_64172C.1.pep
ASEGDRSTPPWSSSATSGSVSQPSLRDIQQMQQKRHHGGVSHSPKTQTSGFSIPPHSGAPEAAVGXIEKPHSGAPEAAGGRGVKDNVPNRWFRPETDAPSSIRSIQIEEQAMKDFRRFYSSVRIVKPQV

SEQ ID NO: 330123 - protein, 206 aa, Zea mays
  unsure (1)..(206): unsure at all Xaa locations
  Clone ID: MRT4577_64173C.1.pep
GQGRLGFGVSSRVPLRNSDRPPFLFFFFDGVGWEGFFSGGEAVSFELAELGIPSEIYSTSSACPAEGRTNRKSEVSKKQKRKNKQSTQTPSVKNEPGQQIPITELQVLPVNASAEKQEAYAADPIKPMEAAAFSNTKDTASPPEKKPSQPTPSKKKNRKGGLSLFLSGALDDTPKPSLPAPAVPXRPKPELPGWGVVKITKGPALL

SEQ ID NO: 330124 - protein, 77 aa, Zea mays
  Clone ID: MRT4577_64174C.1.pep
DQGSSVPSSLCRSIALAWVHQLGGQEGQMEGLRLGRWGMENSEVGADWDYLAGHRGWVVRQGRRDRHKMTTSPPRAE

SEQ ID NO: 330125 - protein, 1081 aa, Zea mays
  unsure (1)..(1081): unsure at all Xaa locations
  Clone ID: MRT4577_64175C.1.pep
METSISPPGTSKQSAVRKPSPGGSLKDLCLVSKQGSIAEVESALALLKKSGGNIDGRNAFGLSALHLATWRNHLPIVRRLLDAGADPDARDGESGWSSLHRALHFGHLCIAGVLLQFGASLALEDTKGRTPVDLISCPVSQANGDFPDAVATEVFSWGSGTNYQLGTGNAHIQKLPCKVEALHGSYIKTVAASKFHSVAVSSNGELYTWGFGRGGRLGHPDIHSGQTTAVITPRQVTVGLGRKRVNAVAAAKHHTVIATELGELFTWGSNREGQLGYPSVDTQPTPRRVGSLKQRIISVAAANKHSAAVADTGEVFTWGCNKEGQLGYGTSNSASNCIPRMVEYLKGKVLRGVSAAKYHTIVLGADGEVFTWGHRLVTPRRVVVARCLKKGGNTNLKFHRMERLQVISVAAGTTHNTALTADGALFYWVSSDPDLKCQQIFSMCGRNIVNISAGKYWTAVATSTGDVFMWDAKKRKDETPIFTRVHGVKRATFVCVGETHMLVLSSIYHPEYPPKPKSQGLKSMLEWNGGTPPLGEDILFDEVXSNSGLSGSSGEMSKGVPSLKSLCEKVAVEYLLEPKNAIQLLEIADSLEAKELKKHCEDLAIRNLDYIFTVGAPSIMNASSEILVNLEKLLDEKSSEPWSQRRLPTMTATYPAVIDSDVEEDEAREFPKTRKCGKSASRPSAMSSDDSFLQKDCTAEQAVSKQVRALRKKLQQIEILEAKQLAGHQLDSQQVAKLESRAALEGELAELGIPSEIYSTSSACPAEGRTNRKPEVSKKQKRKNKQSTQTPSVKNELGQQIPITELQVLQVNASAEKXEAYAADPIKPMEAAAFSNTKDTASPPEKKPSQPTPSKKKNRKGGLSLFLSGALDDTPKPSLPAPAVPATPKPEGPAWGGVKITKGPASLRDIQTEQSRTNEPASAKAKDRHENSPDSAGRATRLSSFIPDARSSPVAVVAPARAAAAPPSSEGDRSTPPWSSSATSPNVSQPSLRDIQQMQQKRHHGGVSHSPKTQTSGFSIPPHSGAPEAAGGGGVKDNVPNRWFRPETDAPSSIRSIQIEEQAMKDFRRFYSSVRIVKPQV

SEQ ID NO: 330126 - protein, 115 aa, Zea mays
  unsure (1)..(115): unsure at all Xaa locations
  Clone ID: MRT4577_64176C.1.pep
MGTNILALLALVALLLSATDALFIPQSSFVSRAIVPQXYVTPFTSMGXEHPAVQAYMLQLALAGSALQQPIAQLQQQSLXHLTLQXTIATQQQQLQXYLPSLIHLSVVNHVTYLQ

SEQ ID NO: 330127 - protein, 75 aa, Zea mays
  Clone ID: MRT4577_64177C.1.pep
SAKGKVTFPFKAIFGINHLVNQANHYQAIKVRSKHSPFRVFPAEYISPYLVPVFFRFWPHTAKGPVLRPVSIRIT

SEQ ID NO: 330128 - protein, 60 aa, Zea mays
  Clone ID: MRT4577_64178C.1.pep
MFQILSLTLEHASFDAGKEKKKKKKKKKKKKKKKKKKKKKKKKKKKKKKKGRPFKRIKVY

SEQ ID NO: 330129 - protein, 57 aa, Zea mays
  Clone ID: MRT4577_64179C.1.pep
KTTRGGTQKSRLVFNVMSYTGIIGSRKNRNTAMTRAPIDLLRWGILEIKDYEVHGRT

SEQ ID NO: 330130 - protein, 76 aa, Zea mays
  unsure (1)..(76): unsure at all Xaa locations
  Clone ID: MRT4577_6417C.1.pep
PAKVLERVKATGKNAEMWPYVPYALTTYPXVGGAYDKKAPAVFVRSAPQAMADPGAPELKYMNMFNDDNVDACTVM

SEQ ID NO: 330131 - protein, 153 aa, Zea mays
  unsure (1)..(153): unsure at all Xaa locations
  Clone ID: MRT4577_64180C.1.pep
PVNSVAVAITEDGWVVCRVFKKKSIQRGFDQLGTASAGDDDELHSFHSPGGVXDHSGGXQKHGLHQLTHGGVVVPAFDPCMNLPHLTSAEGPLGATAAFTSGTSAVAMNLLDMGRCSRHNHNMLKMTTTPCGSASDMPLNSGERFGAAADRQQ

SEQ ID NO: 330132 - protein, 43 aa, Zea mays
  Clone ID: MRT4577_64181C.1.pep
SSHWDKLPHISMMIWCKSYNRGLSLYSSVFECYLSTYLYEISC

SEQ ID NO: 330133 - protein, 86 aa, Zea mays
  unsure (1)..(86): unsure at all Xaa locations
  Clone ID: MRT4577_64182C.1.pep
FGASMNPSVPXGPALISWEVYYQWLWWVPPFFVVGLPGVTSGPLFISPHLPTVPPQCLLKPPAEVHTGVQSMSTTFQRSVTAVPRW

SEQ ID NO: 330134 - protein, 97 aa, Zea mays
  Clone ID: MRT4577_64183C.1.pep
KENTKKGGSNDYFLGLWNTQRLTPQKVIQKGGSLIAGNMSFLTARATIEGTTPVPGYKKPSFVMPTSPAIFQHKLMNNTTHVLTKDTTSSVKLTDIT

SEQ ID NO: 330135 - protein, 66 aa, Zea mays
  Clone ID: MRT4577_64184C.1.pep
MSRALALAILLLAAAAAVAPLASAGTEEFTSVGSSGGKMFDRAVGADPDPSPAGGLPADPAPDARP

SEQ ID NO: 330136 - protein, 81 aa, Zea mays
  Clone ID: MRT4577_64185C.1.pep
IFILKIRQTMVLFHEASFAGAVLLSSLITMYCFKPPNDVPRDGWKQDSLGTYASPAAARPRRILAVSVGIFHALISMGYGD

SEQ ID NO: 330137 - protein, 101 aa, Zea mays
  Clone ID: MRT4577_64186C.1.pep
SGGAKNRVKKNIQGGKKKGGPFLFGGGIGENRTKRGLGGGGGNLGPIGEFGGGHFCGKALFMGKFIKKGFKHGGGGLGCKRDIRADSRGETNFKYRGESKG

SEQ ID NO: 330138 - protein, 65 aa, Zea mays
  Clone ID: MRT4577_64187C.1.pep
KKYTCSDAAILERNARIESKTAATITYSCQAVQNSIISWSYISAWSSAMGPHTHAPTLPPRLQWT

SEQ ID NO: 330139 - protein, 106 aa, Zea mays
  unsure (1)..(106): unsure at all Xaa locations
  Clone ID: MRT4577_64188C.1.pep
NPLSPATAAAPSLPCNKPPASDAAAGEIPPPRLPLQDPPPLPPAPAASPLASPAPPPGALPPPXPLKPXPGPAPPPALVAASTGEPSGLALLRLTSPRGTTRRPLG

SEQ ID NO: 330140 - protein, 136 aa, Zea mays
  Clone ID: MRT4577_64189C.1.pep
MGGKDCGNHGEDDLRRSCRRLLAILLVLALIVGVIALIIYLVVRPTHPRFYLQDASLQQLDLSNATTTTTTSASSSLLSTTLQVTLASRNPNERVGVYYDRLDVYASYKYQQVTVAAALPPVYQGHGDADVRSPVI

SEQ ID NO: 330141 - protein, 37 aa, Zea mays
  Clone ID: MRT4577_6418C.1.pep
IKQVLVFIFKLEIHFLITFLDFSNSQGRAPIKQRHRG

SEQ ID NO: 330142 - protein, 90 aa, Zea mays
  Clone ID: MRT4577_64190C.1.pep
PWRRRSIGSGSSWRTSSPPPPTPPRSLSLRSQGMQPRNVPSTKVHPLSYTKKVKLEPDRRPASRCSRRECVPGKGPRPPTFFFFPPPPPP

SEQ ID NO: 330143 - protein, 214 aa, Zea mays
  unsure (1)..(214): unsure at all Xaa locations
  Clone ID: MRT4577_64191C.1.pep
RRSLCISAGLRNLQSINLSFTLVTDIGVKKISVLNSLKSVNLDNRQITDVGLAALISLTRLTHLDLFGACITDNGTNCFRYFKNLVSLEVCGGFVTDAGVKNIKDLKALTLLNLSQNANLTDKTLELISGIVLPCWNKCTSFLQLKSHGHLVYXLTALINLNVSNSRVSNAGLKHLNDLHNLRSLSLDSTRVTANEMRKLRATVLHNLISMRPE

SEQ ID NO: 330144 - protein, 128 aa, Zea mays
  unsure (1)..(128): unsure at all Xaa locations
  Clone ID: MRT4577_64192C.1.pep
QETVXLREARSQKRKAVSPTPPXEDEIDQQIRDMEMLHQQVQRKKEKMTRLAELQKQIDEASEEVRHLTQDEQHRRPQHQDAFLLTQSIMSKSSELEAHLRDVILRAHSQGECNKTIRRLIFCSTSSK

SEQ ID NO: 330145 - protein, 157 aa, Zea mays
  Clone ID: MRT4577_64193C.1.pep
QFSLVVSSLPVRLLGTHLHSHACLSRSARPRRLLLPCSATASRRPRSRPPCSSATRKTSPCAKFLRWLSQTLAEIPSCVGHHLLHQAPSSTCSSPSRAPSPMAPEPPTAMRPAPARRASGVVPCSPGQQPPSPREELAARQPLHRVLQQTSDLGDFW

SEQ ID NO: 330146 - protein, 591 aa, Zea mays
  Clone ID: MRT4577_64194C.1.pep
LLFSTFTSIMGGVCSRKRSQLVDEGDALQTSPRFSKTSSLKWLLLTLPRSSSDVSGKGQGNEPGRCPSLMELCVARVCQDIDRYSTFAMLPRDLSQQIFNELVNSNRLTEASLQVFRDCALQDIGLGEYPGVKDAWMEVVASQKQSLLSVDISCSEVADSGIDLLRDCSSMQSLACNYCDQISESGLGVLSGLSNLSSLSFKRSNAVTAEGMRAFANLVNLLNLDLEGCLKIHGGLIHLKDLTKLESLNMRYCNYIADSDIKYLTDLTNLKDLQLSCCKITDLGVSYIRGLQKLTHLNLEGCPVTAACLEAISGLSSLVLLNLNRCGIYDDGCENFEGLKRLKVLNLGFNYITDACLVHLKELISLESLNLDSCKIGDDGLSHLKGLVLLQSLELSDTEVGNNGLQHLSGLRNLQSINLSFTLVTDIGVKKISVLNSLKSVNLDNRQITDVGLAALISLTRLTHLDLFGACITDNGTNCFRYFKNLVSLEVCGGFVTDAGVKNIKDLKALTLLNLSQNANLTDKTLELISGLTALINLNVSNSRVSNAGLKHLNDLHNLRSLSLDSTRVTANEMRKLRATVLPNLISMRPE

SEQ ID NO: 330147 - protein, 113 aa, Zea mays
  Clone ID: MRT4577_64195C.1.pep
LRFFFFFFFFFFFFLHNTVTFINMFTIHLCLCRACLYPHHGLYVSRSWGGGQALLQLSQKCMHGWLLFPAGPEKNPAGNKYPEGKGGNGNGNHLPVPFDRFHKALRPLGARQP

SEQ ID NO: 330148 - protein, 47 aa, Zea mays
  Clone ID: MRT4577_64196C.1.pep
QKPETERGNLTAEAPRRHTNQEEKRQTQPRLQRHEGTSPNREGADKE

SEQ ID NO: 330149 - protein, 124 aa, Zea mays
  unsure (1)..(124): unsure at all Xaa locations
  Clone ID: MRT4577_64197C.1.pep
TSFFFFFFFFFFFFFFFFFFCCELTRGLRRPXCVGSAGPVLALLVCVGGGPXSGPFVLAGVNWRSDPVWNRSDPPIRRKRTGAPCDCEPVTHFPRGLLRLGGGLIPACPQDRCLTLCTQGGPRV

SEQ ID NO: 330150 - protein, 70 aa, Zea mays
  unsure (1)..(70): unsure at all Xaa locations
  Clone ID: MRT4577_64198C.1.pep
LTTKLPXLAANASISGNNLPSMQWSLWSKYYNLTVQLFISQPSIKLIILFISMSSELYVIISFIIITFKY

SEQ ID NO: 330151 - protein, 120 aa, Zea mays
  unsure (1)..(120): unsure at all Xaa locations
  Clone ID: MRT4577_64199C.1.pep
MQMDTDLSSPRAPAFCFYLRAEPASTTVVMTRGGGASIRMRAQATYNEKLITPYGEVELQEPNDVYILDSAEEEGIDLPYSCRAGSCSSCAXGKYAYGSVDQTDQSYLDDGQIAVGWGLT

SEQ ID NO: 330152 - protein, 123 aa, Zea mays
  Clone ID: MRT4577_6419C.1.pep
APAFAPLCLRTDDKAAAARVGVPDLSSLLSSPATMPPADAGAEESRRQVVGFAQAAARAAAMAPSAPALGLQSQQQQQQARKARRCWSTELHRKFVAALDQLGGPQVATPKQIRELMKVDGLT

SEQ ID NO: 330153 - protein, 54 aa, Zea mays
  Clone ID: MRT4577_641C.1.pep
TLSGFLNCKLSSFALPFCSLLTSIYVMIRFTVVAMAEKWITRLLQKSIFRMLYI

SEQ ID NO: 330154 - protein, 75 aa, Zea mays
  unsure (1)..(75): unsure at all Xaa locations
  Clone ID: MRT4577_64200C.1.pep
QHPDSSSATKKKERAAERKDSNSYGSXRRGKDEIMARGTSANIRPPNRFLKGDAVPKTIHVPCGDMLLFCDAGTK

SEQ ID NO: 330155 - protein, 97 aa, Zea mays
  unsure (1)..(97): unsure at all Xaa locations
  Clone ID: MRT4577_64201C.1.pep
KYLSPPSVLVAGAQANNPRVHPNPHRKETRFLPFNFXQDPPKENDFWKNPVGVNGLFTNFPGPLPGAQKLTPPPRKDEAAKTPLVKITPMIPANKGL

SEQ ID NO: 330156 - protein, 181 aa, Zea mays
  unsure (1)..(181): unsure at all Xaa locations
  Clone ID: MRT4577_64202C.1.pep
MSKYSQKPDKPTTSVDDMIRDLRVHFNNTTHTDFXCRQMPLSNATRYLDXVIAHKHAIPFSXYCVGDGRTAXQPKTRHXSNGQRRWPGTTAMIMIXSLNTAETTADGTGSNVHHLYVSQLQKNXQARYDMRRTYRXHGPINXYMTSPCHMEXMILSDNEXPCRKRLICIVASRKLSMMFTC

SEQ ID NO: 330157 - protein, 98 aa, Zea mays
  Clone ID: MRT4577_64203C.1.pep
QGRACYACTKLRMRFSQSLTCGTLAYAEQEKVAAWVALRARGERLRRARRHKRRTCAGTLASPQRVPSPPEIWCPEPGGGIRDTPPMTSPGPWGPHAS

SEQ ID NO: 330158 - protein, 58 aa, Zea mays
  Clone ID: MRT4577_64204C.1.pep
GCSHVARRPRKPPQLDELLRDLTMLSNAFRTSTKSTTQSTINQKGVCRVLLQCACWGF

SEQ ID NO: 330159 - protein, 252 aa, Zea mays
  Clone ID: MRT4577_64205C.1.pep
PPPPRRSSSPPACLISPHSPANSSPLRPQWLAEVCRGVSSSVQLPSLWSTSTVACALAALGAPSPFCRAARSSSTEGENCQSLFPLFSPPPVLPSPLGRRRYAPGAVSRQGGEFPERSPPTDPPLTLAARRFRSWRFASCACERRTKVVTPRTLGPASPALLLSLSPLSLWRVDPTSQVAPAPHPSPLTRGAPWPTCQYRVLRTQHRNRHSSASPVPLGPFCQFALCPSHPPDLWLVAQCVGDSPRPGSACQ

SEQ ID NO: 330160 - protein, 70 aa, Zea mays
  Clone ID: MRT4577_64206C.1.pep
SCPRLKAHTFRLLLYRGPALMSGKAPRLSRTLSTARLCRRAILTRSSPRVRAPLSTVSICRAQCTRRSPF

SEQ ID NO: 330161 - protein, 68 aa, Zea mays
  Clone ID: MRT4577_64207C.1.pep
RIRAQVVISRYVLGFFMQHRPHHIFSPSSSFRGAPALILAAYLIGIRARGVLGRTVKGLLRQRGRVHV

SEQ ID NO: 330162 - protein, 71 aa, Zea mays
  Clone ID: MRT4577_64208C.1.pep
FGSRDSHGAKIFLRPHLQVYSRGLARFEVRPTQLRSAIRKFIAPYCRMKGPSMSSHTELPPPQCQESVPMI

SEQ ID NO: 330163 - protein, 146 aa, Zea mays
  unsure (1)..(146): unsure at all Xaa locations
  Clone ID: MRT4577_64209C.1.pep
SLVMVIYGSPSSHYLLLLLQINLYNTFQINSLPWQPKSWSRSFNNIPRVLFGWWSMAEGLVPFLHGEGFNTLVILVAWWIWKHRNVCIFDGVSPNTNTVLQQIQEDARLWEMARAKAKLGSWLSFSFPLFFFFFXPXFXGFPXGRW

SEQ ID NO: 330164 - protein, 169 aa, Zea mays
  Clone ID: MRT4577_6420C.1.pep
PAGSGETGGARGKKDAATALYALCSGARENRQRAVEAGAVRPLLDLMADPESGMVDKAAYVLHSLLGSGDGRAAAVEEGGIPVLVEMVEVGTSRQKEIATLCLLQICEDNAVYRTMVAREGAIPPLVALSQSSSARTKLKTKAESLVEMLRQPRSPSLRARPTAVVAAE

SEQ ID NO: 330165 - protein, 372 aa, Zea mays
  unsure (1)..(372): unsure at all Xaa locations
  Clone ID: MRT4577_64210C.1.pep
MASPTVASPTRASPADIPTAAPSSAPRPRRLASAPPAVYASASSSPASAYSGDQLSAPDASSPLLASRSEEYRLLFRLPPDEVLVQDFNCALQENILLQGHMYLFLHHICFYSNIFGYETKKTIPLQEVTDVRKAKTAAIFSNAIEIVAGSRRHFFGSFLSRDEAYQIIVDGWEQHVSDARLLLERQETKSASSSEENGYVLLEGAKEPKQDEDSSPLDRSVNSTAVSSXVLMVVIRTSTFPEGFQMLRRMDLXNIVTLNPFNLEPVDATPSVPESYTSISESKFQVPVEVLFNLLLSDGAFGFLDDFHKNCGDKEFSCSKWRTDEQGGLVRDVSFLHPIKIYLGAKFGTCQEVQKLRLYKNRASGMLNKIA

SEQ ID NO: 330166 - protein, 632 aa, Zea mays
  unsure (1)..(632): unsure at all Xaa locations
  Clone ID: MRT4577_64211C.1.pep
SSPATSLPPIRHPASAPFHSQGNQPPNPARHAGSRRLRQLAPGTGAGGASGLVAATPWRAVVPVSVRLLARRDSEALALSRGLCHRRRRLARYPDLGCFLLQYDADQENILLQVGHMYLFLHHICFYSNIFGYETKKTIPLQELTRVPKARTAAILPLACGWVAGSCWHFLGSCWARRVAXSWLETRCRFITAGHVLAYEQNGFTLVLHFXSTSVLFNWNKQGKLNKLEINHRRTGLSTVRLSQVGVLMATFPKGIQKLRRPDLXNILELNPFTLEPFDLEPVDATXSLPESYTSDTESKFRVPVEVLVFLLLSDGAFGFLDDFHKNCGDKEFSCSSWRTDEQGGXKGCLIFAPNKNLSWCKVGQKLRLYKNRRLVIQTSQSIGDAPYGDHFTVEGIWDVEQDSLDENCCDLRIYINVAFSKKTIFRGKIEQSTKDECREVFSLWIKLGHDLLKQEYDRSKGASSTPDSGVQPGAITNEESAVEVAVPVVSSSHDESGARSLIPPTQDHQQRTGRDPSITSTSQELWGSLSSYMRSRQLGPVLAMSLVALIILMQVTIIVLLTRPPQVQMDPHGIWTGSSGYSKESIEWVQKRLSLLSEEMQLAEAHMETMRREFAWLRSYLERLQRTRGST

SEQ ID NO: 330167 - protein, 437 aa, Zea mays
  Clone ID: MRT4577_64212C.1.pep
VVMESLKSLVFSSSSDDSDDEIDTLLLAQHVEHLVVGDTSTRRRRSSLPRRVIHRDHAAGENLIKHHYFGPNPVYPSHVFRRRFRMHRPLFLRILRAVQREDEYFTIRSDATGLAGLGPLQKVCAALRILAYGLPTDAVDEYIQIGQTTARDCLIRFCRAIISCFSERYLRIPNHDDIARILRVNADRGFPGMLGSIDCMHWEWRNCPTAWRGQFCGRNSRPTMILEAVAGYDLWIWHAFFGMPGTNNDLNVLHRSPVFDPLRNGTMPPVHFTINGTTYNFGYYLADGIYPNWPTFVKAIRHAFEEKKVHFTTKQESCRKDIERAFGVSQARWAVLRGPAYGWDRNHLADMMTACIIMHNMIVEDEGDGAANVDFIGPSGPPEPCNNTAEGRNEWLNNHIRSELPNDPDQDITCQATYLSLQHNLIEHMWARRGSMG

SEQ ID NO: 330168 - protein, 354 aa, Zea mays
  Clone ID: MRT4577_64213C.1.pep
DTPSVPESYTTVTESKFQVPVEVLFNLLLSDGAFGFLDDFHKNCGDKEFSCSKWRTDEQGGLVRDVSFLHPIKIYLGAKFGTCQEVQKLRLYKNRRLVIQTSQSIGDAPYGDHFTVEGIWDVEQDSLDENCCYLRIYINVAFSKKTIFRGKIEQSTKDECREVFSLWIKLGHDLLKQECDRSKGTSSTTDSGAQSGAITNEENTGEVAVPMVSISQDVSGARSLIPPFQDPQQRTGRDSSIGSTSQELWGSLTSHMRSSQLGPVLSVALVAIIVLLQVTIIVLLTRSPQVQMAPHGISTGSFGYSKESMEWAQKRLSLLREEMQVAEAHMERMRHEFAWLRSYLEGLERLRRRT

SEQ ID NO: 330169 - protein, 60 aa, Zea mays
  Clone ID: MRT4577_64214C.1.pep
LMILRQTQTHRLVRDHRRHLLSSDRHFHRHVHRNLRIRHRHSRPPSLPLPPTESKEPQPQ

SEQ ID NO: 330170 - protein, 92 aa, Zea mays
  unsure (1)..(92): unsure at all Xaa locations
  Clone ID: MRT4577_64215C.1.pep
LVALIYDYYLQQQQXPFSQVXAAYPQQFLPFTXLVALNSXDYLQQQQLLPLSQLAGVSPAAFFTQPQLLSFYPHDAPMAPPLLTPATPPPLR

SEQ ID NO: 330171 - protein, 186 aa, Zea mays
  unsure (1)..(186): unsure at all Xaa locations
  Clone ID: MRT4577_64216C.1.pep
MAAPAVASPSRATPTDIPTAAPSPASPPRRLASAPPAVDASGSSSPASAHSGDQLSAPDASSPLLASRSEEYRLLFRLPPDEVLVQDFNCAVQENILLQGHMYLFLHHICFYSNIFGYETKKTIPLQEVTDVRKAKTAAIFHNAIEIVAGSRRHFFGSFLXRDEAYRIIVDGWEHHGXDARLLLER

SEQ ID NO: 330172 - protein, 150 aa, Zea mays
  Clone ID: MRT4577_64217C.1.pep
STGKHYREEIALQDIQHRRNPTRIRKREGDAHQTSLNLSLAHAVSSISKCTERAPLFPRILEARTRTRAPTSARNNIQAFSSWDSASPTLPGKRKAMTLLILGRQERVRHGGHTESRPGCRKTPPPACGTPGGHQSDIHLLDRVQIERQH

SEQ ID NO: 330173 - protein, 142 aa, Zea mays
  Clone ID: MRT4577_64218C.1.pep
RTNGRPACVRPPGAVDDLQAQPTTGAARARGWEDLPAGRDCLPPSTAHSEERSLCPPSSVIFRRDEPRRVKAGPAARVGAELLILSTARFDYYFAPALPASVSFARTRSELNSMRNELGRPAIHVLHFSTYVNVTISFHLKL

SEQ ID NO: 330174 - protein, 109 aa, Zea mays
  unsure (1)..(109): unsure at all Xaa locations
  Clone ID: MRT4577_64219C.1.pep
FLVAYPVVPALWSEADXRLARSYSGPEHRESVTEGRRRAAKSVSPPSLGFGSVLPVTARRVLGFALCVGSAQGPRVLLGPLWNPVLALPPRWVGGPPALGFCFPSNFPG

SEQ ID NO: 330175 - protein, 47 aa, Zea mays
  Clone ID: MRT4577_6421C.1.pep
SVPLQNNTLTIIDAIIHTCIHMTSKYSTKVEGALVSYYDGVVVVNCS

SEQ ID NO: 330176 - protein, 495 aa, Zea mays
  Clone ID: MRT4577_64220C.1.pep
MRSSGEVPQDHSATEENPKTIDSIVERRPSLSSQISITLRSSGEVLQDHSATEENPKTSESIVERRPSLSSQISITLRSSGEVLQDHSATEENSKTSESIVERRPSLSSQISMNEAYRLAIGNKGSLTSPTLTDVILGKDSTSSINEELRLLLSQISASRGLEAPWADPGPSPRAYGRGDELVVQNITNRLSLERNASGLESLDGSIVSEMEGESTIDRLRRQIDLDRKSIHLLCRELEEERNASAIAASQALAMITKLQDEKAAMQMEASHYQRMMEEQAEYDSEAVAKANELLTEREQLIEELEVELENYRRQYGGGSTQRRGNRVAFKQENRDTTMLDGGGLEDPLINTQQGINSLVGLEEERAYIATGLRKLEQKLQFYSNNSVSVELPSPDVKDDLSDKVYVTEDFSLHCQESSMESKEAGSSTTSGEVDLVAVQEEIAKLNRRLKTLEGDRSFLEHSINSLRNGDEGLMFIQEIACNLRELRAIAIGKK

SEQ ID NO: 330177 - protein, 93 aa, Zea mays
  Clone ID: MRT4577_64221C.1.pep
SRRCPPRSVSPTGWKPYCLGSLPPSYERAWSHANLRYLRPLCLAGRDGAALAVEGPFPHLELGSLAVPRVPSSSGPERRAWPPMDPPLLVVLR

SEQ ID NO: 330178 - protein, 52 aa, Zea mays
  Clone ID: MRT4577_64222C.1.pep
LLRSCRETVLAVVRAPTVVSFCVAITALGNCGFYPPVSKKIPPKRRKKKKKY

SEQ ID NO: 330179 - protein, 114 aa, Zea mays
  Clone ID: MRT4577_64223C.1.pep
IFLLPPGARSFLLHVPLFSRLHCHDIFLAGLKQENPFPLFFFNNDLTPFFLLSREAFSPLWALCLKISLFPGSLLPNFFFPVASKILFFTSLPPNIWLFSFSPPPPNILKFLII

SEQ ID NO: 330180 - protein, 74 aa, Zea mays
  Clone ID: MRT4577_64224C.1.pep
KLWDDVVAGPQPERGLGKLRKLTTLKTIDEGESSKLQKTLSMPSTPTTPMTPTTPTTPGSARIADNVWRSVFHP

SEQ ID NO: 330181 - protein, 58 aa, Zea mays
  Clone ID: MRT4577_64225C.1.pep
GEHYPKNKLFSSSLETDAQFTIGKTKTLLYSLSRLTRLPVPSSMTDKAATEKPLNETS

SEQ ID NO: 330182 - protein, 231 aa, Zea mays
  unsure (1)..(231): unsure at all Xaa locations
  Clone ID: MRT4577_64226C.1.pep
MTSRFWGQGDGESEEEEEVKPEQSSNSDDDGGRDGAGRNAQNRYLKNQEDDSDESDTGHSVIRSLKDKHNEMDQMRNAMKINDWVSLKESFEKLSKHLEKVVHVNESTEVPKMYIKALVLLEDFLAGALANKEARKKMSSSGXEALNVMMQKLKKNNKQYKEQIQKCREHPEGFEDEAVDDKDTHDDDSDDVDESDAEIEDPDKIAMSESEEERDEDDGHKDGWEQKRSKK

SEQ ID NO: 330183 - protein, 31 aa, Zea mays
  Clone ID: MRT4577_64227C.1.pep
FYSQQYKYQILLKLTLPPMVMRHTLLINQRR

SEQ ID NO: 330184 - protein, 299 aa, Zea mays
  Clone ID: MRT4577_64228C.1.pep
MPRSSSRRHVLDGWLAHEPRARQYKATFIPAEPGTQFLAPSEVSWGDEEMSSSDQNPAATPASSGPAEPSPPGRPTAVSSRVLDMGAQLAQALKPVRQMKQHACSFALYAHDLHRQVEVHHFVARLNQDVLQCAVYDSDKPSARLIGVEYIVSDTIFEGLAPDEQRLWHSHAYEVKAGLWTDVGVPEALQSSEMASLARTYGKFWCTWQADRGDALPLGAPALMVSPQAAEPGRVRGELVRGRDERYGIDSSAGGLKAARVEMDEPEWINPNADYWRLHGKGFAVDVVPAEMKRHAPFP

SEQ ID NO: 330185 - protein, 96 aa, Zea mays
  unsure (1)..(96): unsure at all Xaa locations
  Clone ID: MRT4577_64229C.1.pep
SSKEFVIYINASLNGLGCVLMQEGKVVAYASQQLKLHEKNYSAHDLELAAIVFSXKIWGHHLYREKCHIFTDHKSFNSFNHLFIFTFKQMFKEFFR

SEQ ID NO: 330186 - protein, 181 aa, Zea mays
  Clone ID: MRT4577_6422C.1.pep
FFFYLFPQVTFGYTVEALEMLLLPMAKDGVEALGSMGNDTPLAVMSNREKLTFEYFKQMFAHATYPPIDPIREKIVTSMECMIGPGGAWAAPPTTATTPTVGLGLLFSVYIALSMGSALCVLSRSLLVSLIGLLTSERFFKNMLHCILRAPMSFFDSTPTGRILNRASNDQSVLDLEIANS

SEQ ID NO: 330187 - protein, 190 aa, Zea mays
  unsure (1)..(190): unsure at all Xaa locations
  Clone ID: MRT4577_64230C.1.pep
MSSSDQNPAATPASSGPAEPSPPGRPTAASSRVLDMGAQLAQALKPVRQMKQHACSFARYAHDLHRQVEVHHFVARLNQDVLQCAVYDSDKPSARLIGXPPPRARYYSCVTAFRPLTYAGVEYIVSDTIFEGLAPDEQRLWHSHAYEVKAGLWTDVGVPEALQSSEMASLAKTYGKXWATXWQADRGDAL

SEQ ID NO: 330188 - protein, 35 aa, Zea mays
  Clone ID: MRT4577_64231C.1.pep
ESQKKREHHLLEAIDHLTEQLQPLEQVKAGLDAHS

SEQ ID NO: 330189 - protein, 109 aa, Zea mays
  Clone ID: MRT4577_64232C.1.pep
KQSKQNKAQHSTTPTVHHDGKLQESLNGFSASPAETKTVLLSQSLLQLQLQLLTRFQILQRNRQVRTMQYLVGKHFSLRAVTGLDCHRFLLLRRCSCFRCRLRIELQVG

SEQ ID NO: 330190 - protein, 80 aa, Zea mays
  Clone ID: MRT4577_64233C.1.pep
SHYPMCFGPWFFGCNACNTRFIIICRENLGAPQIKCCGEKPRHPPPGLRGGTLKPGPVGLETPLNGCGWHFNLFIPVQGS

SEQ ID NO: 330191 - protein, 541 aa, Zea mays
  Clone ID: MRT4577_64234C.1.pep
METLRAYDELFPWALLVLVTTITILYLKQLLVAAFKRRATSSPSLPCPRGLPLIGNLHQLGTVPHDALAALAAKHAAPVMLLRLGSVRTLVVSTADALRAVFQPNDRAMSGRPALCAATRITYGLQDIVFSPPDGGFWRTARRASLSELLSAPRVRSFRDVREQEAAALVAAVTDMSRSGSPVNLSEELMATSNKILRRVAFGDGGGEEESIRASAVLEETQKLLGGFFVADYMPWLGWLDALRGLRRRLERNFHELDAFYEKVIDDHLSKRGDDDDASKSKGEDLVDVLLRLHGDPAYQSTFNSRDQIKGILTDMFIAGTDTAAATVEWTMTELVRHPDTLAKAQKEVRGAVVGRDDDIVRESDLPRLKYLKQVIREAMRVHPPVPLLVPRETIEPCTVYGCEIPARTRVLVNAKAIGQDPDAWGADAARFVPERHEEIADLSDHKPWHDSFSLVPFGVGRRSCPGVHFATSVVELLLANLLFCFDWRAPHGGVVDLEQETGLTVHRKHPLVLVARRVRVQAPSDDELDGRFSAMHSVPS

SEQ ID NO: 330192 - protein, 148 aa, Zea mays
  Clone ID: MRT4577_64235C.1.pep
CQSHQKSAISHSAKVKTPTFFLAGAQDHRVPDPNGQQYARAFKETGIETKTIIFPQDIHGTHKPQSDLDSFHNKEVWFNKHMAKETQVLPNTFINTVGNGTKSQELGQSTPSQGAPVQSWRQPRWNNSSRHKKKSLPHREFGNTSRSK

SEQ ID NO: 330193 - protein, 142 aa, Zea mays
  Clone ID: MRT4577_64236C.1.pep
WVPRGRPEKKIKMVNAKAIGQDPDAWGADAARFVPERHEEIADLSDHKPWHDSFSLVPFGVGRRSCPGVHFATSVVELLLANLLFCFDWRAPHGGVVDLEQETGLTVHRKHPLVLVARRVRVQAPSDDELDGRFSAMHSVPS

SEQ ID NO: 330194 - protein, 92 aa, Zea mays
  Clone ID: MRT4577_64237C.1.pep
LWPLAHYGWVNTNSEALQVQKHLPLIHLASQAILRSGTSVTRRDPYHHCITRHSASATACRRSGTTIATKRYSRCSKKMLPIRMMVTKCSCV

SEQ ID NO: 330195 - protein, 184 aa, Zea mays
  unsure (1)..(184): unsure at all Xaa locations
  Clone ID: MRT4577_64238C.1.pep
GHILLLSAIPVYLLIAINIPKWVIXAIDKIRRGFIWKGRKEVNGVSCLVSCDVVTRPINLGGLGIPNLQFKSWALQSKWLWLEKTDPNWPSRGLKLPIQKHVRELFLASVVTRIGNGANTLFWSDNWLNGTGIRDIAPEVVAKVGKSLIHSRTVAQALENXQWVSDIRSPLLLAGLQQYLLLWD

SEQ ID NO: 330196 - protein, 243 aa, Zea mays
  unsure (1)..(243): unsure at all Xaa locations
  Clone ID: MRT4577_64239C.1.pep
YGLQDIVFSPPDGGFWRTARRASLSELLSAPRVRSFRDVREQEAAALVAAVTDMSRSGSPVNLSEELMATSNKILRRVAFGDGGGEEESIRASAVLEETQKLLGGFFVADYMPWLGWLDALRGLRRRLERNFHELDAFYEKVIDDHLSKRGDDDDASKSKGEDLVDVLLRLHGDPAYQSTFNSRDQIKGILTXASLHATCVFTSFLIDNNRPCAYXDMFIAGTDTAAATVEWTMXELVRHPDT

SEQ ID NO: 330197 - protein, 83 aa, Zea mays
  Clone ID: MRT4577_6423C.1.pep
TFSMFSKKKSSNSVRNMCFSFSSYLQRCVRIETFDKDFIRLEMFQISDCYTPAFWFQGPIRMLSVCFLYIDASYLGVLLQVTL

SEQ ID NO: 330198 - protein, 68 aa, Zea mays
  Clone ID: MRT4577_64240C.1.pep
TITSRALQPYLRIQLEPSLFLNKQLQLGSLLNFLVSNIKSHYKFNNSLKQFIPSSLTPTSYFMPLEHN

SEQ ID NO: 330199 - protein, 107 aa, Zea mays
  Clone ID: MRT4577_64241C.1.pep
AVSTLMVDSLMLSFHGRGKAKRSAAAVTHHNHGGQYHDSPPVHGHGHGHLDMSEGETDVEAGVAQQLCRNRVIVQVLEMGIVVHSVVIGLSMGASQNVCTIRPLVAA

SEQ ID NO: 330200 - protein, 66 aa, Zea mays
  Clone ID: MRT4577_64242C.1.pep
LSPRAGWDPHSSVTCASVFGGFAAKFAEACQDPIRFLETRHGDPPCVMRILRNKKTWCDPACVMRY

SEQ ID NO: 330201 - protein, 208 aa, Zea mays
  unsure (1)..(208): unsure at all Xaa locations
  Clone ID: MRT4577_64243C.1.pep
MPKEEPATAPPRLLTLPTVLTIGRVAAVPLLISTFYMEGPWAATATTGIFLAAAVTDWLDGYIARKMQLGTPFGAFLDPVADKLMVAATLVLLCTKPLETSLLNDGPWLLTVPSIAIIGREITMSAVREWAASQNXEVLEAVAVNNLGKWKTATQMTALTLLLASRDPSLPAQGALVAPGVALLYISTGLAVWSLVVYMRKIWRTLLK

SEQ ID NO: 330202 - protein, 196 aa, Zea mays
  Clone ID: MRT4577_64244C.1.pep
CTRLPTVLTIGRVAAVPLLISTFYMEGPWAAMGTTGIFLAAAVTDWLDGYIARKMQLGTPFGAFLDPVADKLMVAATLVLLCTKPLGSSLLNDGPWVLTVPSIAIIGREITMSAVREWAASQNNKVLEAVAVNNLRKWKTATQMTALTLLLASRDPSLPAQGALVAPGVALLYVPTGLAVWSLVVYMRKIWRILLK

SEQ ID NO: 330203 - protein, 75 aa, Zea mays
  Clone ID: MRT4577_64245C.1.pep
RDQTLSAVHVSSLAWRGFGPRNPHACSNGRDWDVTFLWPSARSPAPMKSPAPLHCLEGKNRPTPIINPTKKKEGG

SEQ ID NO: 330204 - protein, 55 aa, Zea mays
  unsure (1)..(55): unsure at all Xaa locations
  Clone ID: MRT4577_64246C.1.pep
PPPTSPTTPTKLRRPNLXPNSAPPRLHLPSTITPSMTSPSYFPPSQIYSPNTLAD

SEQ ID NO: 330205 - protein, 252 aa, Zea mays
  unsure (1)..(252): unsure at all Xaa locations
  Clone ID: MRT4577_64247C.1.pep
MLFALASTLKIGQDTNTRLTEYNTTLQQYNRNLQADASNSGETISKLQKEXSAMMEXMVTLRQCNRSMGNQLESSTVSPQEAITVKEELTKEEERLTSQLXQVKHDRDHSGMSTEQPSNICISCDTYXQQIAKTSKQCQTFRTIHASGTLXETCRTXAQIQIPTLCKTTLAVATEKMKLADSNCDIXMTGYXEEQNEKIKYLEERVTQXESQIAERYELLKRLHNTILELIGNITRLCRCRPLLRFEGDSNG

SEQ ID NO: 330206 - protein, 134 aa, Zea mays
  Clone ID: MRT4577_64248C.1.pep
RPGRPETHGIDGGRVERVLELVGVAANKNTVPGDRSALVPGGLRMGTPAMTTRGFNEDDFVRVADVVDRAVTIASRIDKAARKAAEEKGDKSPGKIKVFLEHLGDGETQSEIVQLRSEVEDWVGTYPVPWNTSQ

SEQ ID NO: 330207 - protein, 456 aa, Zea mays
  Clone ID: MRT4577_64249C.1.pep
MRTTRCMLMVAQALVVVVSALLAATATTTTTAAEYVRPPPGRIILTEHTEPAAHPQQVHVSAVGENHVRVSWVTDDMRAQSVVDYGKASRNYTASATGEHTSYRYFLYSSGKIHHVSIGPLEPSTVYYYRCGKAGKEFSLRTPPAALPIELALVGDLGQTEWTASTLAHASKTGHDMLLVPGDLSYADTQQALWDSFGRFVQRHASRRPWMVTQGNHEVEAPPLPVPAGSPPPFAAYGARWRMPHEESGSPSNLYYSFGAAGGAVHVVMLGSYAPFNASSDQYRWLARDLAAVDRRATPWLVVLLHAPWYNTNAAHQGEGEAMRKAMERLLFQARVDVVFAGHVHAYERFARVYDNEANPCGPVYITIGDGGNREGLAFNFDKNHRLAPLSMTREASFGHGRLRVVNTTSAHWAWHRNDDADSVVRDELWLESLATKASCRQHAGPAVVDSWDDEL

SEQ ID NO: 330208 - protein, 98 aa, Zea mays
  Clone ID: MRT4577_6424C.1.pep
KGQMRLGSPQGPPFSPKPPLWGGVFFPFPVGLGGGDPVPCGGLFETRKSFLPAFPFWKNFGFWFWFALEWLGPSFLGKPPLSFFCCLLTPGGGGGFSC

SEQ ID NO: 330209 - protein, 119 aa, Zea mays
  Clone ID: MRT4577_64250C.1.pep
FLNGSRSALEGGKKKKNILGPPTREIKQSAPNLGGVGPSQNTPNFYPGTVWFEKETVIAKTTINCLLPEIFLGGGLCFCLKNKTTRRIFLRETKNAGGGVPLCNGQTPKLKPLPLGIWG

SEQ ID NO: 330210 - protein, 51 aa, Zea mays
  Clone ID: MRT4577_64251C.1.pep
YSSQSAVSAAAPVLVSLIGSTMDENGRLNFAVGRVNHGGSGNPRAEFRAYV

SEQ ID NO: 330211 - protein, 48 aa, Zea mays
  Clone ID: MRT4577_64252C.1.pep
LYRRDLHLGQPVRSSPQIPKMAGVYTPLSDLRRLPHVCRRVVEETIYD

SEQ ID NO: 330212 - protein, 37 aa, Zea mays
  Clone ID: MRT4577_64253C.1.pep
KVLVAWYVTPNFLSAARISHEVALRWSVVITRNVSDS

SEQ ID NO: 330213 - protein, 148 aa, Zea mays
  Clone ID: MRT4577_64254C.1.pep
MAVSIELTKEYGYVVLVLVAYVFLNLWMGFQVGKARRNYKVFYPTMYAIESENKDAKLFNCVQRGHQNSLEWMPVFFVILLLGGLQHPTIAAGLGGIYIVARFFYFKGYATGVPDNRLKIGGLNYLALLGLIICTASFGINLLIREML

SEQ ID NO: 330214 - protein, 122 aa, Zea mays
  Clone ID: MRT4577_64255C.1.pep
RPGRHAGPAVRFLLSSLASFRKALRHTRRSIESFRISERPNWRSHQSPPPFRAELLIKADEDIQPIVWDNGTGMVKGGFAGDDTPRAVVPSNGGRPRHTEFMAGIRQKDVYVGEEAQAKKGK

SEQ ID NO: 330215 - protein, 84 aa, Zea mays
  Clone ID: MRT4577_64256C.1.pep
IRLPPRAIEAAKRAGKAADVFYCLKLLEATGISTVPGSGFGQKEGVFHLRTTILPAEEDFPAIMSSFKKFNDSFMEQYEGYSRM

SEQ ID NO: 330216 - protein, 135 aa, Zea mays
  unsure (1)..(135): unsure at all Xaa locations
  Clone ID: MRT4577_64257C.1.pep
XLHARLLLQPPRRFLTRAPSVHGAPCSSAPSFFLARTALRSASSPSGAVGRITHGEFPQIGIPAESMTELPHGVFPIHGGPYAHALMAALSLLLVVELAPAQVRXTLFPSLSVGGWRPISPXLXGXRWXXXLLXL

SEQ ID NO: 330217 - protein, 38 aa, Zea mays
  Clone ID: MRT4577_64258C.1.pep
EQHTKSDESEIHCNNLQLIFDWFYDPNMVIQVQIKAED

SEQ ID NO: 330218 - protein, 85 aa, Zea mays
  Clone ID: MRT4577_64259C.1.pep
RAPTPPPTLSPTTTTPTPTPSPTTTTPTPKTPTTSPPPPQRSRSTPRSRTTPPKTELQPKMAARAPENNEEEERRITRWCEGSGR

SEQ ID NO: 330219 - protein, 104 aa, Zea mays
  Clone ID: MRT4577_6425C.1.pep
EGESLLQSHRGVPGSLFRKLPYVLGDLFFQLGQKKNKRWKTSKKPQNKRAFAFLSGGVINHTFFLVGGTKVKPESGLIFKVFLCCKALEKQARLLKFGKSAEQA

SEQ ID NO: 330220 - protein, 48 aa, Zea mays
  Clone ID: MRT4577_64260C.1.pep
KWYGRLKKKLNKKKIKKNKIEMIQLHNITKTINLINSTIIQLPLQSLI

SEQ ID NO: 330221 - protein, 106 aa, Zea mays
  Clone ID: MRT4577_64261C.1.pep
LSRTAKITGVSSVQSRTKLCSATVLAAARAKVYPVASKDGNIATGNCFFEIIKGLRPANTAGCRSSAEAPNNPHDGTSCTELVPDSMNQLGTKNENHLVQDLFLGE

SEQ ID NO: 330222 - protein, 174 aa, Zea mays
  unsure (1)..(174): unsure at all Xaa locations
  Clone ID: MRT4577_64262C.1.pep
TRVAGDWXVAECQHLNFSRLDICHRCNETHKPADPAAGGGGRYYANFMGRAGSSFSAVFATAGSDIRTADWDCSCSAYKFTSRSTXLQCSDYNEEAAVQHGHLCAFDGDMSRSQGYCFRSDAAAAVAEAARTNNRPAXKSGDWICTISECNEHYFTSRMXSFQCNAPRDSGTDV

SEQ ID NO: 330223 - protein, 120 aa, Zea mays
  unsure (1)..(120): unsure at all Xaa locations
  Clone ID: MRT4577_64263C.1.pep
PFARNAHNGRSRSPSPSSIQRFKISVQTLIGRTITFQVESSDTIDNVKAKIQDKEGXPPDQQRLIFAGKQLEDGRTLADYNIQKESXLHLVLRLSGGMQIFVKTXTGKTITSSGVSDTST

SEQ ID NO: 330224 - protein, 44 aa, Zea mays
  Clone ID: MRT4577_64264C.1.pep
IHISQNMLALDISQLLLPENQIITLSKLQSYHKLNISLSLRLSI

SEQ ID NO: 330225 - protein, 53 aa, Zea mays
  Clone ID: MRT4577_64265C.1.pep
MVCSYFNSSWDTQCEDQTLHVRTGARPSISRCRAGSSRIPSKRTRASDDIALL

SEQ ID NO: 330226 - protein, 199 aa, Zea mays
  Clone ID: MRT4577_64266C.1.pep
MEASSSALALVAAVLLLSSPLAASDFCVCRSDQPTAVLQKAIDFACGPQGGADCTPILQGGGCYSPDTAAAHCSWAANTYYQNNKARGATCDFGGAATVSTTDPSTNDSSTTDTSFSGCTFASSATSAGAGTGTGTAGSSTFSPSAGTGFNGTGNGMGGSTTTGLGPTGNAFDAAAAAAPGLLPSAASLAPLAVLSFLT

SEQ ID NO: 330227 - protein, 57 aa, Zea mays
  Clone ID: MRT4577_64267C.1.pep
GGDPQANGPSARRLGAQLGLKNSRVRGILQLTPGIAFGYVFHRCGGRDIRCRAHPSG

SEQ ID NO: 330228 - protein, 291 aa, Zea mays
  unsure (1)..(291): unsure at all Xaa locations
  Clone ID: MRT4577_64268C.1.pep
ACYECLRGGLDFTKDDENVNSQPFMRWRDRFVFCAEAIYKAXQAETGEIKGHYLNATAGTCEEMIKRAVFARELGVPIVMHDYLTGGFTANTTLSHYCRDNGLLLHIHRAMHAVIDRQKNHGMHFRVLAKALRMSGGDHIHSGPVVGKLEGEREITLGFVDLLRDDFIEKDRSRGIFFTQDWVSMPGVIPVASGGIHVWHMPALTEIFGDDSVLQFGGGTLGHPXWGNAPGAAANRVALEACVQARNEGRDLAREGNEIIKAACKWSAELAAACEIWKEIKFDGFKAMDTI

SEQ ID NO: 330229 - protein, 33 aa, Zea mays
  unsure (1)..(33): unsure at all Xaa locations
  Clone ID: MRT4577_64269C.1.pep
MEFWGLEVKPGSTVXCEPGHGFFLHVFHSVLVE

SEQ ID NO: 330230 - protein, 76 aa, Zea mays
  Clone ID: MRT4577_6426C.1.pep
CVHPSRMAFKCVLFCKDSPIKMACYIKLKSQFRDYCYHTRAETKEKPPYICYSGYCGIQRSITTQHKADWSASWPL

SEQ ID NO: 330231 - protein, 237 aa, Zea mays
  unsure (1)..(237): unsure at all Xaa locations
  Clone ID: MRT4577_64270C.1.pep
MATCATTLAPLLGPAANATEYLCNQFADTTSAVDSTYLLFSAYLVFAMQLGFAMLCAGSVRAKNTMNIMLTNVLDAAAGALFYYLFGFAFAYGTPSNGFIGKHFFGLKRLPQVGFDYDFFLFQWAFAIAAAGITSGSIAERTQFVAYLIYSAFLTGFVYPVVSHWVWSADGWASPTRTSGKLLFGSGIIDFAGSSVVHMVGRHRXPLGRPHRGPPHWXRFDTPGRSXALRGHSASLV

SEQ ID NO: 330232 - protein, 79 aa, Zea mays
  Clone ID: MRT4577_64271C.1.pep
QALMKSDVYYQEQPVITIAAVDHASDEALNYHQATERDFVTSALALLMNNETDILKNFISKTLHLQSSDKMRDRFMLES

SEQ ID NO: 330233 - protein, 256 aa, Zea mays
  unsure (1)..(256): unsure at all Xaa locations
  Clone ID: MRT4577_64272C.1.pep
MHAGVSSEFGSSRPGLVEPKIEKGKKKGKEGGRHRLVGPARKRNPADRREPRKIPRNLVAAATGRRGRRRTERRWRAAHLPSAPCSSPTRYTASRPRXTCLESVPRWPPSAPPLXCSGGGGGEPGQPPQEAVLEAISKIARSKGRVALTTNMVMGGTVTDDASDEWLVLDQKVNSYPTDRGFTAIGTGGDDFVQSMVVAVESVLQESIPKGRVSQKLSSRGKYVSVNIGPIRVVSSEQVQAVYRAMRRDNRMKYFL

SEQ ID NO: 330234 - protein, 49 aa, Zea mays
  Clone ID: MRT4577_64273C.1.pep
LIKQKQFQLENLKKNSIFVLVKLFFNNNNNTFTSITFISILTSTSTIIN

SEQ ID NO: 330235 - protein, 65 aa, Zea mays
  Clone ID: MRT4577_64274C.1.pep
SRIIYRYQVLGSAGATVRVYIEQFEPDVSKHDVDAQIALKPLIDLAISMSKLKDFTGREKPTVIT

SEQ ID NO: 330236 - protein, 184 aa, Zea mays
  Clone ID: MRT4577_64275C.1.pep
MACRALALRFLLLPDPLHRLPATPPSVGRASGSRGGRRPHLRCSSGGGGGEPGQPPQEAVLEAISKIARSKGRVALTTNVVMGGTVMDDASDEWLALDQKVNSYPTDRGFTAIGIGGDDFVQSMVVAVESVLQESIPKGRVSQKLSSGGKYVSVKIGPIRVVSSEQVQAVYRAMRRDNRMKYFL

SEQ ID NO: 330237 - protein, 145 aa, Zea mays
  unsure (1)..(145): unsure at all Xaa locations
  Clone ID: MRT4577_64276C.1.pep
PPPHPPPXGPPPPPPGNPPPXPPESAPPRGGCPTRPQKPPPQKGVPRGPPPPPPPGGFVPPPRGPGQFQPPGPPLGVPRDQRSRGQGPGFQGFRGRAVRPLPPPGTREGPFGPAGRGVPPRNRPWPRVPPPXGPDQEXPLGPWKL

SEQ ID NO: 330238 - protein, 135 aa, Zea mays
  Clone ID: MRT4577_64277C.1.pep
NLHFCVCQVAKINLKRAYGSSFCFMACDPSNGAFTRLKLSKASSFAFVHRLPELNWRGAPACEIQFDRRISKVGAAAELVSFHRELMLYVKDVSSQVEERVVYLERALIFLLLRLRRRTRFFLHLALILNDAFVL

SEQ ID NO: 330239 - protein, 75 aa, Zea mays
  Clone ID: MRT4577_64278C.1.pep
TLEGEYTPQTVIQLHALISSTQKLKMAGKGGNSLNTSTPSCGGSPMPQMWIRSKEQIFYYIALARIRACDLAVCS

SEQ ID NO: 330240 - protein, 603 aa, Zea mays
  Clone ID: MRT4577_64279C.1.pep
MKYVLVTGGVVSGLGKGVTASSIGVVLKACGLRVTTIKIDPYLNTDAGTMSPFEHGEVFVLDDGGEVDLDLGNYERFLDIKLTRDNNITTGKIFQAVINKERRGDYLGKTVQVVPHITDEIQDWIERVAVVPVDGKEGPPDVCVIELGGTIGDIESMPFIEALGQFSYRVGPGNFCLVHVSLVPVLNVVGEQKTKPTQHSVRGLRGLGLAPDVLACRSTEPLEEHVKIKLSQFCHVPISNIVNLHDVTNIWHIPLLLRDQKAHEAILKVLDLQYDGKVPREPELGMWTKRATKFDKLKTPVKIAMVGKYTGLSDSYLSVIKALLHASVAMERKLVVEWVPSCDLEDSSAKETPEAHKKAWKLLKGADGVLVPGGFGDRGVQGKILAAKYARENNVPYLGICLGMQIAVIEFARSVMKLRGANSTEFDPATTSPCVIFMPEGSKTQMGATMRLGSRRTYFHVSGCKSAKLYGNASSVDERHRHRYEVNPDMVPDFEKAGLQFVGKDESGKRMGIVELPSHKFFIGAQFHPEFKSRPGKPSPLFLGLIAAASGQLEPLLQRSNPTTKACSISKVPKLKLYPTGPVNNPLNSLVNGYYPNGTGIHT

SEQ ID NO: 330241 - protein, 436 aa, Zea mays
  Clone ID: MRT4577_6427C.1.pep
MDQGHLKDSLLVPSSRAAATNGPHHRRATLAPGTGAGGPCGGAGGVSIDVNGLKRRGGGRRSWVRVDAATGAAEAVEVAKPALMRRLDLPARDLRLLDPLFVYPSAILGRERAVVCNLEHLRCIITADEALVLREPDPAGGAAAEEAVRRYVDELQRRLVDRADDLPFEFIALEVALEAACSFLDSQAIELEAEAYPLLDELTAKISTLNLERVRRLKSKLVALTRRVQKVRDEIEQLMDDDGDMAEMYLTEKKIRMEASMLDDEDLQGIGNSHNGFGSSLSAPVSPVSTTPATRRLEKEFSFARSRHSSFKSSDSSQYNIEELEMLLEAYFVVIDYTLSKLTSLKEYIDDTEDFINIQLDNVRNQLIQFELLLTTATFVVAIFGVVSGVFGMNFEVPLFSVPHAFEWTLAITGVCGAVVFCCFIWYFKKRRFFPL

SEQ ID NO: 330242 - protein, 298 aa, Zea mays
  unsure (1)..(298): unsure at all Xaa locations
  Clone ID: MRT4577_64280C.1.pep
PTRPVCFVWNPEAHKKAWKLLKGADGVLVPGGFGDRGVQGKILAAKYARENNVPYLGICLGMQIAVIEFARSVMKLRGANSTEFDPATTSPCVIFMPEGSKTQMGATMRLGSRRTYFHVSGCKSAKLYGNASSVDERHRHRYEVXDLIDLLAISNNNNNACHCXLFCSVKKISLCSSFLSXNPDMVPDFEKAGLQFVGKDESGKRMGIIELPSHKFFIGAQFHPEFKSRPGKPSPLFLGLIAAASGQLEPLLQRSNPTTKACPMSKVPKLKLYPTGPVNNPLNSLVNGYYPNGTGIHT

SEQ ID NO: 330243 - protein, 77 aa, Zea mays
  Clone ID: MRT4577_64281C.1.pep
ARAPLPLRQDPSQDQLVSNLAPYIFLCSWRLEIADLTLGLKQPARSILVALVNSCVFFHLLVFRKLCNLGTFLPSIH

SEQ ID NO: 330244 - protein, 215 aa, Zea mays
  unsure (1)..(215): unsure at all Xaa locations
  Clone ID: MRT4577_64282C.1.pep
MKYVLVTGGVVSGLGKGVTASSIGVVLKACGLRVTTIKIDPYLNTDAGTMSPFEHGEVFVLDDGGEVDLDLGNYERFLDIKLTRDNNITTGKIFQAVINKEGRGDYLGKTVQVVPHITDEIQDWIERVAVVPVDGKEGPPDVCVIELGGTIGDKIFSPHNDSGILDAGDIESMPFIEALGQFSYRVGPGNFCLVHVSLGPVXNVVGEQKTKPTQH

SEQ ID NO: 330245 - protein, 88 aa, Zea mays
  Clone ID: MRT4577_64283C.1.pep
LPLRSRFLSSASFHLVSQTSYGPHVSVNMFHRAQLGNPSVPSSEPSTPPIIPVSLGIATIESRCSCPMYHLPIQICVLPSFPVHVSCS

SEQ ID NO: 330246 - protein, 81 aa, Zea mays
  Clone ID: MRT4577_64284C.1.pep
RTRGVELPSHKFFIGAQFHPEFKSRPGKPSPLFLGLIAAASGQLEPLLQRSNPTTKACSISKVPKLKLYPTGPVNNPLKKW

SEQ ID NO: 330247 - protein, 98 aa, Zea mays
  unsure (1)..(98): unsure at all Xaa locations
  Clone ID: MRT4577_64285C.1.pep
GAWAELNENFGADGVDSQECKTDGAQCGQQNLNLLLAATQPYKIXSDVGMSTSVCTHGVSCXIHNAAYDEAVTLTGAVTRDPMGTACHMDVGCMLTPL

SEQ ID NO: 330248 - protein, 135 aa, Zea mays
  unsure (1)..(135): unsure at all Xaa locations
  Clone ID: MRT4577_64286C.1.pep
PERRRTKRARERSAPRGRRTGDAGRAPPARDNHRGSPSCPGLKQGEPRPRAGRERXRHQAPRGGGREDHGRPAQQSGEAARPKRRQGAGRSXRDQESGGEDEGRTNTGGDPGNPDRTPRAGTRRRRRAAGARGTR

SEQ ID NO: 330249 - protein, 80 aa, Zea mays
  Clone ID: MRT4577_64287C.1.pep
NCKGHRMHGVGLFVSVIPGVMVSFYAATVCMLWVFSTETLGRWGPFQFARASVRSLDKSTNSGRPPPSISVAPGLLFRAA

SEQ ID NO: 330250 - protein, 181 aa, Zea mays
  Clone ID: MRT4577_64288C.1.pep
MARAFGVGAAMLVVVSAFFAPAVTAQTGSCNDPLPTELVGNYSGMACSPVWNNFVLRYAQGGDNVLRVVLSAMYSSGWVGMAFSKDGLMVGSSAMVGWVGKKGQAHVKQFALNGKAPSMVVADRGFLVSNGHDHTVLVKQAKIYLAFQLNFDSQLKKQQVLFAFGSAIPVKDRLAEHQARR

SEQ ID NO: 330251 - protein, 76 aa, Zea mays
  Clone ID: MRT4577_64289C.1.pep
LLIPSHLQMFPCKPTTYSCTGVAAFVEICICDVKPVYTWLASLGVPVSAFSHPGVICSPSDASLRQLCVVHTKGAA

SEQ ID NO: 330252 - protein, 412 aa, Zea mays
  unsure (1)..(412): unsure at all Xaa locations
  Clone ID: MRT4577_6428C.1.pep
MAEICCEEAKSTPATAVAAASVSATAAAAAAVAVASSALERRRRRLEMRRFRVAGDPEAPVAEDVRAAKRQRLARTLSXAPAPTRAQARARTPTGLXPERLPRYGVTSVCGRRREMEDTVSVRPDFVPGTSKHHFFGVFDGHGCSHVATMCQDMMHEVVADEHRKADGSGEETAWKGVMERSFARLDEQAASWATSRSRDEPACRCEQQMPLRCDHVGSTAVVAVVSPSHVVVANAGDSRAVLSRGGVPVPLSVDHKPDRPDELARIEAAGGRVIYWDGARVLGVLAMSRAIGDRYLKPFVSSEPEVTVTERTDDDECLILASDGLWDVVTNEMACEVVRACFRSNGPPAPAARPNGVALPAAGAGAEDGSAVVKGGAPTMLAWSSWISAGACDSRSGAEQSRAKSYAPCLN

SEQ ID NO: 330253 - protein, 53 aa, Zea mays
  unsure (1)..(53): unsure at all Xaa locations
  Clone ID: MRT4577_64290C.1.pep
KPRGFFLLRLCTSSHPHCMYVVXWSSSKLPPGLTGWMKRTLVRTPYNRTAEPS

SEQ ID NO: 330254 - protein, 109 aa, Zea mays
  Clone ID: MRT4577_64291C.1.pep
ARDWSPGSQATEAMCGLSGPTTGLLWPFLDRHAARSSGRSSTTSSSPLTRSLAPCMATPLCPPSSPNFFPANAACDKSSSTASQDKPDISPPNSYPISSLLFFSCPGRK

SEQ ID NO: 330255 - protein, 71 aa, Zea mays
  Clone ID: MRT4577_64292C.1.pep
EHGAGLLRPRPERAQAEHHLPDLEGTLSLMGQLVRHATSGADLNSRIESHRAFVSHRNGRLWGPFRVISLF

SEQ ID NO: 330256 - protein, 76 aa, Zea mays
  Clone ID: MRT4577_64293C.1.pep
GVAHGGRVERRAVRGGGLCTSGRCADVRSEAPREEGCCRRQSLDQPPRLLTLSRNAKPSARRGDWLRLHACGAPRS

SEQ ID NO: 330257 - protein, 80 aa, Zea mays
  unsure (1)..(80): unsure at all Xaa locations
  Clone ID: MRT4577_64294C.1.pep
FNQLGSLNGRIYLPQQQLRFRQLPSAYPQQLLSFNQLAALNSTAYXQQQQLLPFSHLARVSPTTYLTQTPCECRLLAHCD

SEQ ID NO: 330258 - protein, 103 aa, Zea mays
  Clone ID: MRT4577_64295C.1.pep
KKGLKSPLGQTKILTCSPGGGAKKGLKFWPKGGKTRKKFENPFKGFWFLNSPFGLCPLKLNLKKGVGFLTPPVPGGNPPPFWGQKFGGPRANCQWFKKAPFPV

SEQ ID NO: 330259 - protein, 119 aa, Zea mays
  Clone ID: MRT4577_64296C.1.pep
DVAARWPACSARERRGGVDVFRLLWRTAFVALITLCAVLLPFFNSILGILGSIGFWPLTVFFPVEMYIRQQQIPRFSATWLALQALSIFCFVITVAAGAASVQGVRDSLKTYVPFQTRS

SEQ ID NO: 330260 - protein, 148 aa, Zea mays
  Clone ID: MRT4577_64297C.1.pep
MEPRVGNKYRLGRKLGSGSFGEIYLGTNVQTNEEVAIKLENVKTKHPQLLYESKLYRVLQGGTGISNVKWFGVEGDYNVLVMDVLGPSLEDLFSFCNRKLSLKTVLMLADQMINRAEFIPSTSFLHRDIKPDHFLMGLAKRVYHGIFA

SEQ ID NO: 330261 - protein, 44 aa, Zea mays
  unsure (1)..(44): unsure at all Xaa locations
  Clone ID: MRT4577_64298C.1.pep
TTKDHPGHGAHGHPRRGVTLRTSSPRNEXTSELGASQRLXTVNN

SEQ ID NO: 330262 - protein, 94 aa, Zea mays
  unsure (1)..(94): unsure at all Xaa locations
  Clone ID: MRT4577_64299C.1.pep
WXXRDFFGFFTPAAGTLDKATYPVVSINAPILRGTHPRDGLIKFGPDFWGPPFGGAYLKHNPRGPRDCLKPTLVVDLRGLSRCTRTSYLWANGE

SEQ ID NO: 330263 - protein, 61 aa, Zea mays
  Clone ID: MRT4577_6429C.1.pep
TGTSASVPIYVSLRYQYCDSYYFNSTMVYKLLRFSDINFPSGFIIIFIKCSKKCWITSSIA

SEQ ID NO: 330264 - protein, 97 aa, Zea mays
  Clone ID: MRT4577_642C.1.pep
AQRRSLAVLEEEELGEFVPFEDAPVYATSGFWDFEPDAGFLYAEPSSPEASWNAAAAVAEPASSDDAPSWAASPVQENDYFQDLRDLFPLNRLPAIF

SEQ ID NO: 330265 - protein, 159 aa, Zea mays
  unsure (1)..(159): unsure at all Xaa locations
  Clone ID: MRT4577_64300C.1.pep
PPPGKKKGRKKEGQKGNKKGAPKGXPKKKGQKNGPRSPQKESPKKGRKGAKNGNPKKGPPKSPPXKKKKSPHPPNTIPNKTPPHLXPSPPXXNYPPPPXXXETETNNEPNPPPNYMRKYARTKAPTHRDIKKERTHKCTRRFTPTDNMHGTTHTELETA

SEQ ID NO: 330266 - protein, 57 aa, Zea mays
  unsure (1)..(57): unsure at all Xaa locations
  Clone ID: MRT4577_64301C.1.pep
GPSFGNLNPLRVSWGLRGKLSYFPQSPGIPGGXXXHTRAXXGSAPPGXGGXXXPXPA

SEQ ID NO: 330267 - protein, 164 aa, Zea mays
  Clone ID: MRT4577_64302C.1.pep
MKPVSVAEHNNHQPRLHSPTPASATKISIPISSSEAALFGKGRYKVWALAAIALLALWSMFAASVTLRLSSVDLATTFGDASDPLIDELDPLEMEQREKLVRRMWDVYTRTDNHVRLPRFWQEAFEAAYEELAGDDTLTTDAAISEIARMSIHRPEVEQSSNKD

SEQ ID NO: 330268 - protein, 128 aa, Zea mays
  Clone ID: MRT4577_64303C.1.pep
KRTPPLKTVKAGASFPTPCFSPTPPTRAKTPGSPPRASPTAFPFYSIKSWPGFPPKKKNNGCFPYVTRFIFYKNKKGGNKKVFIWGPPVYSLGYWGWREPLFSRGPWNFSCWFPKKNVKILVPRRGFP

SEQ ID NO: 330269 - protein, 107 aa, Zea mays
  Clone ID: MRT4577_64304C.1.pep
RYRVALPDTSASLEGCSTAAPKSQLPSPIPTACMPMPPYKVGFSLTRPPRRTLRSRSRHTEGIQTELVGTCTCRPSYPSSCHAHVYYFASTHARTHACMHANGGGSR

SEQ ID NO: 330270 - protein, 55 aa, Zea mays
  Clone ID: MRT4577_64305C.1.pep
AVRLRGVNRPGSSQSAYAGRLRHPRISSALFCLLEPPSPGSRGVRYSRLSPLEPN

SEQ ID NO: 330271 - protein, 54 aa, Zea mays
  Clone ID: MRT4577_64306C.1.pep
KFIFKKKKKKKKKKKKKKKKKKKKKKKKKKKKKKKKKKKKKKKKRGGPFKKNKF

SEQ ID NO: 330272 - protein, 70 aa, Zea mays
  Clone ID: MRT4577_64307C.1.pep
SSQCLSLRQIYKISPSDSHVIRTHTTPCCRIARQDMSSLSIRFLGRGLAADYLIPMLQLHVFVESAKKID

SEQ ID NO: 330273 - protein, 79 aa, Zea mays
  Clone ID: MRT4577_64308C.1.pep
WGPDGWKNVPNPDPGGILVCLSVMLAGSHTAKKLVKMLCECFFSCLPRSTPWENLPAKAHMRMHQSKSRPLLIHFNSLY

SEQ ID NO: 330274 - protein, 95 aa, Zea mays
  Clone ID: MRT4577_64309C.1.pep
MWKQLLSKLPRKSPACGDSGQCSNGTGIQRTSSCGSIPPGRPASAIRRMSSAVFPSSVVAGIEPLVSFKDVPNSEKQNLFVSKLSLCCVVFDFSD

SEQ ID NO: 330275 - protein, 169 aa, Zea mays
  Clone ID: MRT4577_6430C.1.pep
PVPLSVDHKPDRPDELARIEAAGGRVIYWDGARVLGVLAMSRAIGDRYLKPFVSSEPEVTVTERTDDDECLILASDGLWDVVTNEMACEVVRACFRSNGPPAPAARPNGVALPAAGAGAEDGSAVVKGVGKEDSDKACSDAAMLLAKLALARRSADNVSVVVVDLRRGM

SEQ ID NO: 330276 - protein, 167 aa, Zea mays
  unsure (1)..(167): unsure at all Xaa locations
  Clone ID: MRT4577_64310C.1.pep
ETTTFHHLEAANPSRAPLPSCFGGSENPPRRRCGAASLATQAVQSPVFHISWRIVTIQRLGTTIVTSMDSPHLRYRIHXTXRHMTLLLQDRSEQLRRCSXKTSSSIAIAXTQKIAEVNVAMDLPSTTNIIHLKLQQSPLRREKVXAPCITDTALPQSDNSRGTNTGA

SEQ ID NO: 330277 - protein, 113 aa, Zea mays
  Clone ID: MRT4577_64311C.1.pep
MWKQLLSKLPRKSPACGDSGQCSNGTGIQRTSSCGSIPPGHPASAIRRMSSAVFPSSVVAGIEPLVSFKDVPNSEKQNLFVSKLSLCCVVFDFSDPNKSSVEKDIKRQGLLDL

SEQ ID NO: 330278 - protein, 151 aa, Zea mays
  Clone ID: MRT4577_64312C.1.pep
IGWLEAPKKKNRHSPPSSTPRPLSLSLVPSREADKARRCRFRSGSQCLPCSPSPRASSLSRLRFLHLPRQRQRQRHAAWIRRARGREPQIRAKPSLPVVTAFALAPDWLAGAIPPPPLLARGFKAGPFSSGGFSGLLILFLRLVCFSVVQI

SEQ ID NO: 330279 - protein, 130 aa, Zea mays
  Clone ID: MRT4577_64313C.1.pep
PLLHAVRVVASCQLSFADQFLLVCHGEQATVKYPSRIIMISIPKFLSSSIETYKLRMPSAPLLSYVSNPSPASSYRAPSRPNFAFPPIHFSAHPCVLALWTAVSKFGLILVVHVSTPLFTGEARRFNPLS

SEQ ID NO: 330280 - protein, 183 aa, Zea mays
  Clone ID: MRT4577_64314C.1.pep
LGTSRPAGKHSPQETANRHSPPSSTPRPLSLSLSLSLVPSREADKARRCRFRSGSQCLPCSPSPRASSSPVSASSPPAAPAPAPRRLDPASAWPGASDPSETRPSRGDGLRSSSRLAGGCHSSSSSSRSRFQGGSVQLWWVFGFAHTFLRLVCFSGGPDLAAFFSGCVFLCQKSTGGVLLAPL

SEQ ID NO: 330281 - protein, 89 aa, Zea mays
  Clone ID: MRT4577_64315C.1.pep
SNHSSNSHFERLFAPTDENSVHDWSTRYAIIKGICEGLKYLHEELNPPIYHLDLKPANILLDDNMMPKLADFGLSKIFDRNEHESHKVV

SEQ ID NO: 330282 - protein, 54 aa, Zea mays
  Clone ID: MRT4577_64316C.1.pep
YIGHITCDLQLALPMFLYCGVENEASVVMPYVIMSYVRIISSLMGAQNLARVRS

SEQ ID NO: 330283 - protein, 444 aa, Zea mays
  Clone ID: MRT4577_64317C.1.pep
MAFWGVEVKPGKPYTHIHHADHGRLRICQATLGNCDAAARTVLQCNVGNKIPIKLCSLNPKLAETCHLEVEFEEVDDVIFSVIGHSSIHLSGYYVCASNRSNVGDDESESYGEDIGHSSTDEEHDTSEDSYESDFIDDREVPLSEKYGSGSIDDSDDECTQRCHRQKAEKTTQNAERRRRLKKHQVGSTDYDDDDTPVMKHVAKRCAPKISDSGDDDTPVTKPVVKRRASIFDSDSDEDDNVPISLALGKKDNAKVAEETEHQNGQANGITKKRIIDVKKRKQSSISEDPASSMDMTDANAPSVSKQVDEIKKKSKKKMRNQSGENNEKQSNIRTLDDGLVVEYLSMGNNDAKVASDGCKVYIKYVGMLKDGKIVESNVSEKPYKFKLGAGKVIRGWDVGIHGMRVGEKRKLTVPPSMLSGGKSVGEVPENSSVIYEIELVKVK

SEQ ID NO: 330284 - protein, 502 aa, Zea mays
  Clone ID: MRT4577_64318C.1.pep
MWKQFLSKLPRRSSASGDSGHCSSGAGIQRTSSCGSIPPGRPPASAIRRMSSAVFPSSVVAGIEPLVSFKDVPSSEKQSLFVSKLSLCCVVFDFSDPDRSSVEKDIKRQALLDLIEFVESTNARFSEAAIAACSRMCAINLFRAFPPSCRSGSSGGGEGDEEEPMFDPAWCHLQLVYELLLKFIGSSSLDAKVGKKHFDHSFIVKLLNLLDSEDPRERDCLKTILHRVYGKFMVHRPFIRKAVSNIFYQFVFETDRHNGIAELLEVFGSVISGFALPLKEEHKIFLWRVLIPLHKPKSVGVYLQQLTYCVTQFLEKDPKLASSVIIGLLRYWPITNCQKEVMFLSEIEEILESTSQAEFQKCMVPLFRRIAHCITSSHFQVAERALFVWNNDHIISLIAQNRQVIMPLVVPALEQNIQNHWNQAVLNLTVNVKKMLSEMDDDLFSSCLAKYKDEEEKRASLEAKRRLTWEKLESAAAFQPVTGHTAVLVGHRPSANLIATMI

SEQ ID NO: 330285 - protein, 129 aa, Zea mays
  Clone ID: MRT4577_64319C.1.pep
PSTNFLGTKRLCCFCFCFCCCYGNTLVLMLVSFAFADTRQRTNLFFSQPLYGQVRSNAGSSWDNLGGLKFMETKHPPVHPTKTASPDELHFSALQITSAAAHTGHHHDLDGFMAFKGTSTKVLNQGVEA

SEQ ID NO: 330286 - protein, 76 aa, Zea mays
  Clone ID: MRT4577_6431C.1.pep
HWNTQLPIGCPGWLDSDNFLGDDGLWVPTRHALPGGGAQSDKNLGILLSCDTTRWDPSLTKMPPYLPQKYPDKFLV

SEQ ID NO: 330287 - protein, 502 aa, Zea mays
  unsure (1)..(502): unsure at all Xaa locations
  Clone ID: MRT4577_64320C.1.pep
MWKQLLSKLPXRKSPACGDSGQCSNGTGIQRTSSCGSIPPGRPASAIRRMSSAVFPSSVVAGIEPLVSFKDVPNSEKQNLFVSKLSLCCVVFDFSDPNKSSVEKDIKRQALLDLIEFVESTNARFSEAAIAACSRMCAINLFRAFPPSCRSGSSGGGEGDEEEPMFDPAWCHLQLVYELLLKFIGSSSLDAKVGKKHFDHSFIVKLLNLLDSEDPRERDCLKTILHRVYGKFMVHRPFIRKAVSNIFYQFVFETDRHNGIAELLEVFGSVISGFALPLKEEHKIFLWRVLIPLHKPKSVGVYLQQLTYCVTQFLEKDPKLASSVIIGLLRYWPITNCQKEVMFLSEIEEILESTSQAEFQKCMVPLFRRIAHCITSSHFQVAERALFVWNNDHIISLIAQNRQVIMPLVVPALEQNIQNHWNQAVLNLTVNVKKMLSEMDDDLFSSCLAKYKDEEEKRVSLEAKRRLTWEKLESAAAFQPVTGHTAVLVGHRPSANLIATMI

SEQ ID NO: 330288 - protein, 63 aa, Zea mays
  Clone ID: MRT4577_64321C.1.pep
PKKKKKKKKKKKKKILYITKQKKIPRGRSHTYNTINLPSLYLISIHCPPLYTTKTFKTLPFPT

SEQ ID NO: 330289 - protein, 162 aa, Zea mays
  Clone ID: MRT4577_64322C.1.pep
MQTLPVSYRADVPLLRLADSLLSKTEKDVNPHEFVKAYSAHLKRSGKMELPEWVDIVKTARFKELPPYDPDWYYIRAASIARKIYLRQGIGVGGFQKIYGGRQRNGSRPPHFCKSSGAVARNILQQLQIMGIIDVDPKGGRLITNQGRRDLDQVAGRVAVEA

SEQ ID NO: 330290 - protein, 63 aa, Zea mays
  Clone ID: MRT4577_64323C.1.pep
GQAVLPWNCTLMGCGSWVGSVHGIHSNWGCLSGVFALDVELLTSPRARRDHVFGLQWNIIAER

SEQ ID NO: 330291 - protein, 569 aa, Zea mays
  Clone ID: MRT4577_64324C.1.pep
MAPVGDHIVDISSDEEDLFIGTSLNILLEPLDPVKWVDEVCGVADYVAGEDIDDLMIMSEISAPPVLQKIAKPDELVVMGELSSPPAPQQKASANGGCHEDDDDCVVLDGDPDKAITVAEEGSLGDGSSDELQIVAEKGPVACRDFPHSRHSCSNLPFSTTSHVKHCSMCHCFVCDAPAPCKYWGNSTSADDHCHATDKDSKWTCMRQIFKQKLLPASFLEKHQNGVYSTMTPPRQQHMQCHVSVPQSPSVSHGSHPSLTIQSPLLNEGSQNQQRHPSVRVSLSVGATVSSPRAGRGTGNAHIAQSTHSHAIFKRAGAVAPVFATRNASQFCPSAPDDLLLQQALSHASQPVQVAPTTNAFTGASQNNHFQRSFSAPIAPQVQQGQPAARYQVAINGMHAVGPQLARSTSLTTQRTQCLPEPAIIDVSTTSWQDILATVASNLGVADYNTSTPESQHVTVDSLAMHPTANHGLDLQHEPIAESENLTYSLLHDSSNGAAGGSVQADGPMQTPENLDHLIGQSNPVPNEAHLDDFAGAPANQLPIEEEEAHQPEMSRLEPTNILFEFDWV

SEQ ID NO: 330292 - protein, 146 aa, Zea mays
  unsure (1)..(146): unsure at all Xaa locations
  Clone ID: MRT4577_64325C.1.pep
MAESTARTVKDVNPHEFVKAYSAHLKRSGKMELPEWVDIVKTARFKELPPYDPDWYYIRAASIARKIYLRQGIGVGGFQKIYGGRQRNGSRPPHFCKSSGAXLARNILQQLQIMGIIDVDPKGGRLITNQGRRDLDQVAGRVAVEA

SEQ ID NO: 330293 - protein, 73 aa, Zea mays
  unsure (1)..(73): unsure at all Xaa locations
  Clone ID: MRT4577_64326C.1.pep
RSRXRGXKKKKKRKKKKKKKKKKKKKKKKKKKKKKKKKKRENGLRGSKINERFFENVCKLFYIVYFGGEGHCS

SEQ ID NO: 330294 - protein, 95 aa, Zea mays
  Clone ID: MRT4577_64327C.1.pep
SIEPGQISGSSAGSLSNGFTSWPFGIVEVLCSCNQYIRRIWGPHCAKCFLPLYVEAAVFVVLSAAALTLCLSARAGLDTTWQIVLAITVFNECVL

SEQ ID NO: 330295 - protein, 186 aa, Zea mays
  unsure (1)..(186): unsure at all Xaa locations
  Clone ID: MRT4577_64328C.1.pep
KPREKNQPRPRAPAKKTGQQGGNPPPPGPERELKGGGQCPWKGDKFGKGEPGGPPXKNPTGKKGEFSKRHKGGKPRGIPXPRGKNRPRXGKTPPKGXERGPPKRRPKGPPGEGKKQKIPPGGARAKKKTLFFIFSTILPPIRKPSPLDKKGGNCLKKKFYIFFFLFFIFNFFFFFFFFVFFFFFFF

SEQ ID NO: 330296 - protein, 35 aa, Zea mays
  Clone ID: MRT4577_64329C.1.pep
NPDSAAISNHNICQRRSMIPSTQRTECNFVSTQWT

SEQ ID NO: 330297 - protein, 441 aa, Zea mays
  unsure (1)..(441): unsure at all Xaa locations
  Clone ID: MRT4577_6432C.1.pep
MAEICCEEAKSTPATAVAAASVSATAAAAAAVAVASSALERRRRRLEMRRFRVASDPEELVAEDVRAAKRQRLARTLSGSCPDAGSDSDSPALPRYGVTSVCGRRREMEDTVSIRPDFVPGTSKQHFFGVFDGHGCSHVATMCQNMMHEVVADEHRKADCSGEETAWKAVMERSFARLDEQAASWATSRSRDEPSCRCEQQKPLRCDHVGSTAVVAVVSPTHVVVANAGDSRAVLSRAGVPVPLSVDHKVCILVHHGAEGAAPPPLPAYSSPVREPDVLNFLIRXPDRPDELARIKAAGXRVIYWDGARVLGVLAMSRAIGDGYLKPFVSSEPEVTVTERTDDDECLILASDGLWDVVTNEMACEVVRACFHSNGPPAPAARANGAALRAAENGSAAAKGVSVEDSDKACSDAAMLLAKLALARRSADNVSVVVVDLRRGI

SEQ ID NO: 330298 - protein, 84 aa, Zea mays
  unsure (1)..(84): unsure at all Xaa locations
  Clone ID: MRT4577_64330C.1.pep
SDKEKKVFGIVIPMQVLAIVAYIIIESRVEGAXDYVLWKEILFLVDLICCGAILFPVVWSIRHLQDASGTDGKVAVNLAKLKLF

SEQ ID NO: 330299 - protein, 32 aa, Zea mays
  unsure (1)..(32): unsure at all Xaa locations
  Clone ID: MRT4577_64331C.1.pep
VWNPIYGILKHTGLNVLQLIXAKINVFSIGGA

SEQ ID NO: 330300 - protein, 88 aa, Zea mays
  Clone ID: MRT4577_64332C.1.pep
CRADLKAPIRFTKPTSRTWRSAVRSPTFSDRGELVRQRRAAQQSAASAPPSQLTTSKSVTASLTHAPKQVEHCTGGQQPKKIADACVD

SEQ ID NO: 330301 - protein, 103 aa, Zea mays
  Clone ID: MRT4577_64333C.1.pep
FVDYSSVLDVSENLGYGGESSSNSSNWNCAPEVHNNALDGDAPLHWASESKATPFAGYGGEEQSLLGHRFSVPCHGQQEQSPPRFDFDIGRGAVVGEFSLEFF

SEQ ID NO: 330302 - protein, 60 aa, Zea mays
  Clone ID: MRT4577_64334C.1.pep
DNAPTTTTAARAFYSHTDACYDAGRHAASGRGCSCTDVYYDNVDYRMRTPAYGAYYCGYG

SEQ ID NO: 330303 - protein, 68 aa, Zea mays
  unsure (1)..(68): unsure at all Xaa locations
  Clone ID: MRT4577_64335C.1.pep
MNQWEQNWGNIIRTLMSSSTFESGEVLVXRRIHXIDFVVGAVSNSASYVRLWALSQAHSELSSVIYEK

SEQ ID NO: 330304 - protein, 76 aa, Zea mays
  Clone ID: MRT4577_64336C.1.pep
LHCRLQQPMRVPSTSLVRKKRQEPHSRQVSLKRDVARSRTWNTPLPTTTMLMANFHYVNNDKTLETIKTRHRMTSS

SEQ ID NO: 330305 - protein, 215 aa, Zea mays
  Clone ID: MRT4577_64337C.1.pep
FANDGSGASKKMKRDISAMPLNVSSAGSVDDSFKQTFSVDTPDLQSTATSRAKRRKIEVNHALLEEIEEINQGLIDTALRVCEDDDESPAATSEGTVIKCTYTAVAVSPSLKSMLASAQTSPIMPLRLLVPAGYPKCSPVLLDKFLDEQRNSDDLSSKTKSKFGVLLRGLEEPMSLREIARTWDACARGAIAEYAQKSGGGSFSSSYGRWETCVV

SEQ ID NO: 330306 - protein, 89 aa, Zea mays
  unsure (1)..(89): unsure at all Xaa locations
  Clone ID: MRT4577_64338C.1.pep
GVCQVVERVCVVGKAQLGVFLASFKIGGLLMWVQPLKTVWFGTEGFFFFFLPRGVFWRHFFQRRGFLRVVPFQFGLVLLAFLXVLGVVV

SEQ ID NO: 330307 - protein, 35 aa, Zea mays
  Clone ID: MRT4577_64339C.1.pep
TDSQCNIAFTSSELTVTLILTYTLISALSPIGLNL

SEQ ID NO: 330308 - protein, 46 aa, Zea mays
  Clone ID: MRT4577_6433C.1.pep
GPLSSFFFFFFFFFFFFFFFFFFFFFFFFFFWQKNPRLKWFIKKKT

SEQ ID NO: 330309 - protein, 175 aa, Zea mays
  unsure (1)..(175): unsure at all Xaa locations
  Clone ID: MRT4577_64340C.1.pep
MALHAPVPVMAGEMLHVAQAFIDKNYHPTVICRAYTKALDDAIAVLDKIAMPVDVNDRGAVLGLVKSSIGTKFTGQFGDLIADLAIDATTTAGVDLGQGMREVDIKKYIKVEKVPGGQLEDSRVLKGVMINKDVVTXGXMRRKIVNPRIILLDCPVEYKKGENQTNAELMKEEDW

SEQ ID NO: 330310 - protein, 213 aa, Zea mays
  unsure (1)..(213): unsure at all Xaa locations
  Clone ID: MRT4577_64341C.1.pep
MARHAKTDSDVTSLAASTPPRSPRGRPAYYVLSPAASHPDVHLGASGGVAGTTPAESPLHYHFHHHRHHSSXAPVSAWAARTTPGSPRRGGCSSXQLRSGGDVAAVVSVPWRRLGNGSGAGSVGDEDXRRRVPARXSFAESPWRCYALGAVAFVAVFAFFLIVLWGASRSYKPHVVVKSVVFESYHIQGGTDRTGVPTKMMSVNATVRLRFRN

SEQ ID NO: 330311 - protein, 558 aa, Zea mays
  Clone ID: MRT4577_64342C.1.pep
MALHAPVHVMKDSLKRESGAKVHQANIQAAKAVADIIRTTLGPRSMLKMLLDAGGGIVVTNDGNSILREIDIAHPAAKSMIELSRTQDEEVGDGTTSVIVLAGEMLHVAQAFIDKNYHPTVICRAYTKALDDAIAVLDKIAMPVDVNDRGAMLGLVKSSIGTKFTGQFGDLIADLAIDATTTAGVDLGQGMREVDIKKYIKVEKVPGGQLEDSRVLKGVMINKDVVAPGKMRRKIVNPRIILLDCPVEYKKGENQTNAELMKEEDWQVLLEMEEEYIKNLCGQILKFKPDLVITEKGLSDLAIHYLSKAGVTAIRRLRKTDNNRIAKACGAVIVNRPEELQESDVGTGAGLFEVKKIGDEFFAFIVDCKDPKACTVLLRGASKDVLNEVERNLQDAMSVARNILKNPKLLPGGGATELTVSATLKQKSSSVEGVEKWPYEAAALAFEAIPRTLAQNCGLNVIRIMTQLQGKHANGENAWVGIDGRSGDIVDMKERKIWDSYSVKAQTFKTAIEAACMLLRIDDIVSGIKKKQAPGASAPKQPQIETEGDADNEQMIPE

SEQ ID NO: 330312 - protein, 599 aa, Zea mays
  unsure (1)..(599): unsure at all Xaa locations
  Clone ID: MRT4577_64343C.1.pep
MALHAPVLVLKDSLKRESGAKVHQANIQAAKAVADIIRTTLGPRSMLKMLLDASGGIVVTNDGNAILREIDIAHPAAKSMIELSRTQDEEGECFWMLXRYCGDGNAILREIDIAHPAAKSMIELSRTQDEEVGDGTTFVIVLAGEMLHVAQAFIDKNYHPTVICRAYTKALDDAIAVLDKIAMAVDVNDRGAMLGLVKSSIGTKFTGQFGDLIADLAIDATTTAGVDLGQGMREVDIKKYIKVEKVPGGQLEDSRVLKGVMINKDVVAPGKMRRKIVNPRIILLDCPVEYKKGENQTNAELMKEEDWQVLLEMEEEYIKNLCGQILKFKPDLVITEKGLSDLAIHYLSKAGVSAIRRLRKTDNNRIAKACGAVIVNRPEELQESDVGTRAGLFEVKKIGDEFFAFIVDCKDPKACTVLLRGASKDVLNEVERNLQDAMSVARNILKNPKLLPGGGATELTVSATLKQKSSSVEGVEKWPYEAAALAFEAIPRTLAQNCGLNVIRIMTQLQGKHANGENAWVGIDGRTGDIVDMKERKIWDSYSVKAQTFKTAIEAACMLLRIDDIVSGIKKKQAPGASAPKQPQIETEGDADNEQMIPE

SEQ ID NO: 330313 - protein, 121 aa, Zea mays
  unsure (1)..(121): unsure at all Xaa locations
  Clone ID: MRT4577_64344C.1.pep
RAGKEHRQSFSSRTPSTRLSRIIMSGETSSRKGTRISIWTDQDLLPTTTGYGCGRTSSHIHELDFLNPALTVXMTQEEGHTAQPTEYXDADGHDEYDKRVNTDMIPVHDPIASKKPSVVIP

SEQ ID NO: 330314 - protein, 69 aa, Zea mays
  Clone ID: MRT4577_64345C.1.pep
PVCSFLGSSHVCYSCDHESERSSRSPVLAFITPTFLFVKVVFVLPARKKSEQEACHGGTQKLRPSLGGF

SEQ ID NO: 330315 - protein, 77 aa, Zea mays
  Clone ID: MRT4577_64346C.1.pep
PCIGQPLTRPQHKVIRAHVSHCHSVACHGRMNSDPMRSYRKLYVPLRLPNDSTHQIRQGGEDPKITSTHARTGRRVA

SEQ ID NO: 330316 - protein, 76 aa, Zea mays
  Clone ID: MRT4577_64347C.1.pep
TTGAATGSRSHRVELIINQLHRGADQEHLGLTTRASATLGYLHEPTSTSVPDTTTRGRQHIHHSRLQLGPAQPRRA

SEQ ID NO: 330317 - protein, 106 aa, Zea mays
  Clone ID: MRT4577_64348C.1.pep
SRPAGFLSGARAGQYDLLADLPGYPDNVRRDGKGGYWVALNQEKQRLDATPATAPVKHLVGVRLNADGEEVEELTAAKGVTLSDVAEMKGKLWLGSVELEYVGLVA

SEQ ID NO: 330318 - protein, 66 aa, Zea mays
  Clone ID: MRT4577_6434C.1.pep
TLMLRSHLGLMSHNCGARAALHCKSHLVCFVYKPGKLGSQLPHPPPGQDPGIPPPPSCVGRYIEWI

SEQ ID NO: 330319 - protein, 62 aa, Zea mays
  Clone ID: MRT4577_64350C.1.pep
SLLTTRMKNRRYLVIAFHWKSSSMIHTTNYYSRQKDGSTGRCFACHLQQTKNIFYFLDTTKR

SEQ ID NO: 330320 - protein, 146 aa, Zea mays
  unsure (1)..(146): unsure at all Xaa locations
  Clone ID: MRT4577_64351C.1.pep
TYNPPTPPPIPSHLLPPTPEPPDPPXPTVASPGRRPPTATPPSSPAPPRHLHPSAPPHHLEPPTLPAPPAPAQVSHRIRPSQSSTAAPPPLDTTRADEKCPIPRSREGLGLLPYSSPVLSSLLPPLPTPSYSFLPGDARFDQVRGM

SEQ ID NO: 330321 - protein, 120 aa, Zea mays
  unsure (1)..(120): unsure at all Xaa locations
  Clone ID: MRT4577_64352C.1.pep
MDNMPKNRKPNAQWDLSAARIFNEICVEXVLTNNRPQGCLNNKGYANLVAKFNEWSGRNYTRVQMKTRWDALKSDFTTWKTLLLSVSGLGRDPRIGSITASDEWWEEKIEVCNLGFVSIV

SEQ ID NO: 330322 - protein, 64 aa, Zea mays
  Clone ID: MRT4577_64353C.1.pep
FQPLRFFRKAALQAHGGGATTHSGSAPHQPNARVVHHCQINSPLYARVLASLRGYELHPFPASL

SEQ ID NO: 330323 - protein, 119 aa, Zea mays
  Clone ID: MRT4577_64354C.1.pep
NSARGMSTVLHSNLATISRHGATARQSVHFHTTLAEPASAEAHALPLYGRRCPHEWSLPLPGVSPRSRERDKLSQLPSQDEATNRGPARRVPSNPTLRAANIGSAYRKLLPSVAAVVNC

SEQ ID NO: 330324 - protein, 219 aa, Zea mays
  unsure (1)..(219): unsure at all Xaa locations
  Clone ID: MRT4577_64355C.1.pep
AGRAGTGATESKGSTLSYPAKEIARGRSHGHRQRRRGDHHRCPRRDRQDQCSRYAGRVPRRFTFTLAYACICAHSIAVRRAACVEGEEREGAVQLRQGCQERGPSQHQGRRRVAARRSGRGDRVGGARAGARGRAHVHGGHRAEPRAQQQPAGVDPPGGLRPHLVPLHHLHLXPRRGRGVRWPLALDPPSPVNXECKHGGGHRCKFRHGYLHLRSILSC

SEQ ID NO: 330325 - protein, 70 aa, Zea mays
  Clone ID: MRT4577_64356C.1.pep
HFFFTIYRHRGHKVFDIQGRQIFSTFLFFFSTPVQVLTNKHGRKPLGIFFNPSLGLLFWPKFPFFLGGFG

SEQ ID NO: 330326 - protein, 193 aa, Zea mays
  unsure (1)..(193): unsure at all Xaa locations
  Clone ID: MRT4577_64357C.1.pep
MATVSAAVVTTIVARAAIARPNALGTYAGRVPRRFTFTLAYARICAHSIAVRRAACVEGEEREGAVQLRQGCQERGPSQHQGRRRVAARRSGRGDRVGGARAGARGRAHVHGGHRAEPRAQQQPAGVDPPGGLRPHLVPLHHLHLXPRRGRGVRWPLALDPPPLLLMXECKHGGGHRCKFRHGYLHLRSILSC

SEQ ID NO: 330327 - protein, 164 aa, Zea mays
  unsure (1)..(164): unsure at all Xaa locations
  Clone ID: MRT4577_64358C.1.pep
MATVSAAVVTTIVARAAIAXGPMXRAACVEGEEREGAVQLRQGCQERGPSQHQGRRRVAARRSGRGDRVSGARAGARGRAHVHGGHRAEPRAQQQPAGVDPPGGLRPHLVPLHHLHLXPRRGRGVRWPLALDPPSPVNXECKHGGGHRCKFRHGYLHLRSILSC

SEQ ID NO: 330328 - protein, 164 aa, Zea mays
  unsure (1)..(164): unsure at all Xaa locations
  Clone ID: MRT4577_64359C.1.pep
MATVSAAVVTTIVARAAIARPNALGXCVEGEEREGAVQLRQGCQERGPSQHQGRRRVAARRSGRGDRVGGARAGARGRAHVHGGHRAEPRAQQQPAGVDPPGGLRPHLVPLHHLHLXPRRGRGVRWPLALDPPPLLLMXECKHGGGHRCKFRHGYLHLRSILSC

SEQ ID NO: 330329 - protein, 129 aa, Zea mays
  Clone ID: MRT4577_6435C.1.pep
ANPRGYSLTSNWVVGISLHLDCIRFIFCSADEGRGYSINNASGRPGIANGRLGSVERQQGEVDGGARITTPGRVSRARRASALAPSWPSTSNHFAPSCALVIDCVYKTNIFVFMTFNKLAFQPNSPPRH

SEQ ID NO: 330330 - protein, 175 aa, Zea mays
  unsure (1)..(175): unsure at all Xaa locations
  Clone ID: MRT4577_64360C.1.pep
RLAVSLLSPEYPHDAARNLAMRVHPAPRXHHRRAALRHGGGGGGRAHXGKKLRRLPHIFAKVLELPFAADADVSVEEDAAALRFVAAAVDGVSPDGARAHAVEIHPGVTKVVVRGLSPADGGGGVDDDDGAAAFELDRWRFRLPPCTRPAMATATYSQGELVVTVPKGAGPDDAA

SEQ ID NO: 330331 - protein, 147 aa, Zea mays
  unsure (1)..(147): unsure at all Xaa locations
  Clone ID: MRT4577_64361C.1.pep
IRHETASPAPVPASRRARPSPPRPPTRASSTSRRSTPPTTSGPATATTTRPPRAAXFLDFEPTTRPPAAQTMTPQQSRXRRRPRAPPLTTRRGSRRPCSGRGRRTPPNGAPPPTDPSSASSSAPPRTSPRSTPTSTTTPPGSPGYPP

SEQ ID NO: 330332 - protein, 165 aa, Zea mays
  unsure (1)..(165): unsure at all Xaa locations
  Clone ID: MRT4577_64362C.1.pep
MATVSAAVVTTIVARAAIARPNALGTXRAACAEGEEREGAVQLRQGRGPSQHQGRRRVAARRSGRGDRVGGARAGARGRAHVHGGHRAEPRAQQQPAGVDPPGGLRPHLVPLHHLHLXPRRGRGVRWPLALDPPPLLLMXECKHGGGHRCKFRHGYLHLRSILSC

SEQ ID NO: 330333 - protein, 75 aa, Zea mays
  Clone ID: MRT4577_64363C.1.pep
RPVRAVVIEALRCCKYKFPGQQKIIISKRWGFTPLDRADYVEARSKGLVKPDGCYVKFVPQKGSLANYFKEAVKA

SEQ ID NO: 330334 - protein, 37 aa, Zea mays
  Clone ID: MRT4577_64364C.1.pep
PANTSEATRTNATHLDTARRSSDGWKNQHDLCLAFSL

SEQ ID NO: 330335 - protein, 73 aa, Zea mays
  Clone ID: MRT4577_64365C.1.pep
LRVGLCRCARFGRARARGLCRVGRLGGVACLPSCRLLVGGLAWGACLLLLLPLRPPCGSSSAPAGPWLVRGCL

SEQ ID NO: 330336 - protein, 77 aa, Zea mays
  Clone ID: MRT4577_64366C.1.pep
PSGVCFGGVQWECVPTPVQEGVKGPFEQNGGAQGVPRGPPPLAQEAVQAFQVLVWWAPPPGIFHGGGLFKNFPAPPE

SEQ ID NO: 330337 - protein, 59 aa, Zea mays
  Clone ID: MRT4577_64367C.1.pep
NKSWHALPISCFSSLVAQDLTTCPNKKRHTQTQCATFFIQRKKNQNMSLLLGWKSYWFT

SEQ ID NO: 330338 - protein, 61 aa, Zea mays
  Clone ID: MRT4577_64368C.1.pep
KKKKKQKKKKKKKKKKKKKKKKKKKKKKNKKKKKKKKKNFFTLTKKTFWGIFPKSPKPGGR

SEQ ID NO: 330339 - protein, 73 aa, Zea mays
  Clone ID: MRT4577_64369C.1.pep
IRKVAVLLLTSTHPPTLGDSPSSESRQHVRASSLTLRVAEAYPHPSSSRHRLSLFPQGYLLPHSPCTCTELCT

SEQ ID NO: 330340 - protein, 118 aa, Zea mays
  unsure (1)..(118): unsure at all Xaa locations
  Clone ID: MRT4577_6436C.1.pep
QKHLSXTXRAGDXSSRRRXKXXXXGGSXTKGGRESPXPXXEPXPXXXXXXEXQXGHRKXGGGRXXEGXXXXXXEXXXXGXXXRTXXRKEXNXKGXGGPXRQPQXRRXHXGXKXTXAAA

SEQ ID NO: 330341 - protein, 44 aa, Zea mays
  Clone ID: MRT4577_64370C.1.pep
VHRLSTVADLGFLYRMYRNKFFICNCIYSFIVDLIKSLINRYNV

SEQ ID NO: 330342 - protein, 36 aa, Zea mays
  Clone ID: MRT4577_64371C.1.pep
TFVRFVSTPEVLELTSIYDLEMSQLERARQIYAQGG

SEQ ID NO: 330343 - protein, 74 aa, Zea mays
  Clone ID: MRT4577_64372C.1.pep
WSSHLSLSLETSSTSNGQRAVSDSNLWKCIELDDIRFEVAMVTADGGPLLDVPPPEGVVRIGVAFQQFKSNTSV

SEQ ID NO: 330344 - protein, 85 aa, Zea mays
  unsure (1)..(85): unsure at all Xaa locations
  Clone ID: MRT4577_64373C.1.pep
LYSDQVEIIWCPEMTTRSSMLVLTMISFLLTLPPAYSQHQVFRATMTRHEPTINFTRAAHRXRERLSILATRLGAALQGARRPAA

SEQ ID NO: 330345 - protein, 63 aa, Zea mays
  Clone ID: MRT4577_64374C.1.pep
DDDLYRIQLETLLPKKARVAHENSDYAQHNRFLREIGEYHQLTLQEHICVDGGFEQVTKVYHK

SEQ ID NO: 330346 - protein, 94 aa, Zea mays
  Clone ID: MRT4577_64375C.1.pep
NKKMEIQQETIPGNRQEFARNMGLGPENPRGPNETGEISGPPKHGGHAGACLITHPNGYKRGTGRGLPTHVALGHPLATIVDEGIELGRDIENH

SEQ ID NO: 330347 - protein, 81 aa, Zea mays
  Clone ID: MRT4577_64376C.1.pep
FLVDKLPLLSYRAGISCFSCTAPPPLRIAPRDSLPYPAMVLTHVPHCMSTGRCYLLYTGGTCPAMHPRTCVYGDSSVWLTL

SEQ ID NO: 330348 - protein, 49 aa, Zea mays
  Clone ID: MRT4577_64377C.1.pep
IRLQEERKTVLLLPTLTETLRLLVGCLSLHLPSFLPSFPPSSNLQGPAS

SEQ ID NO: 330349 - protein, 92 aa, Zea mays
  Clone ID: MRT4577_64378C.1.pep
TTSTMRDVMNNETSLALYACLGAIHACARYPWNVTSYYLESAALLPAIVYLYRLNYSVWVVYRYLLFQEKRKELARAIDDIHTMIVAPSMNN

SEQ ID NO: 330350 - protein, 94 aa, Zea mays
  Clone ID: MRT4577_64379C.1.pep
PCGVIHQGTATPPRVLPAPIRCLLATRRWRPLPACSVSSDGELSRRRAIPGDSRRRPRAELQVTAAADLGEQLLPRHDGPCRGWFSLRRRACGS

SEQ ID NO: 330351 - protein, 144 aa, Zea mays
  unsure (1)..(144): unsure at all Xaa locations
  Clone ID: MRT4577_6437C.1.pep
GQQTCLPCSRCPTPGTSQGLLRKNTAVRVDYTKSVRGLXIKENDVPIDFILXSMLRLQXSRPXLLEDRSRFKDIYMRIREQGXGGQTXQIYAIRQAVHKGRRSYYQNYVDDADHKDRQCLFPRYDRTLLPGDPRSCTTDKIGGC

SEQ ID NO: 330352 - protein, 286 aa, Zea mays
  unsure (1)..(286): unsure at all Xaa locations
  Clone ID: MRT4577_64380C.1.pep
DVNPSLLGHMPVNVWKKCVNNMLLVLDILQQYPNIVVDTSFEPDENETQKGADYNGTIHVVGDLVAFLERLDSEFLKTLQCTDPYTKDYVQRLREEPLFLVVAQNVQDYLERVGNFKAAAKVALRRVELVYYKPQEXYDAMRKLAEQPEDCVDDDDAEAGDEHKAVDDNRGPSPFVVIPEAVHRKPTFPESGRTLMDGLMFLIYKYGDERTKARAMLCDIYHHAISDEFSVARDLLLMSHLQDGIQLMDISSQILFNRVMGPVRLCAFRAGLINEAHGCLTELYST

SEQ ID NO: 330353 - protein, 109 aa, Zea mays
  Clone ID: MRT4577_64381C.1.pep
KLGIRLLVFKPQVVTRGTSTDQGPFKRDVARNRSTLHINRVCALTEGGEFSSSPCRLAGPGHRPTAPCSSRCRTRSSLFRPHKDSSILAAPMERGRGRARARALDDTVL

SEQ ID NO: 330354 - protein, 134 aa, Zea mays
  unsure (1)..(134): unsure at all Xaa locations
  Clone ID: MRT4577_64382C.1.pep
DPCWFLQQPLFFPFCRVGFGLXRERQFFPYTLLAALTPFGYFPPRFFFPFGRVGTGGPVFFLAPPHLVPFSPRFVVTPAPFFPWPPFLPFVPLVLCNPGAFFPYPLFGGALFWVGFLWVSPPPVFWVWGGAPQE

SEQ ID NO: 330355 - protein, 855 aa, Zea mays
  unsure (1)..(855): unsure at all Xaa locations
  Clone ID: MRT4577_64383C.1.pep
RPGRVAKTPAQKLEILFHVISAQFDVNPSLLGHMPVNVWKKCVNNMLLVLDILQQYPNIVVDTSFEPDENETQKGADYNGTIHVVGDLVAFLERLDSEFLKTLQCTDPYTKDYVQRLREEPLFLVVAQNVQDYLERVGNFKAAAKVALRRVELVYYKPQEVYDAMRKLAEQPEDCVDDDDAEAGDEHSESTASRGKKGTGRIERVEQLTFLTRVANPPAQNREALFNLTSGLISATSNRRGYSTEXGAGRAVGYLAPVHKVRPVSQDGSIQASGGTLPGCRKNVGDGKGKREFIGVKNWWYSXGPPHRRRGEAQEXQAAGELCRVTGAAGWWQPFWKGRLRCSLWSAWWTPDGQGHECFPRRIRSQNMIPASKCTHGEPEEGXRVSSRREVRRFLRQEPLPXTSFLFXPGAVHKKSIFLVSVRSLLDGLMSLIYKYGDERTKARAMLCDIYHHAISDEFSVARDLLLMSHLQDGIQLMDISSQILFNRVMAQLGLCAFRAGLINEAHGCLTELYSTGRVKELLAQGVQQSRYHEKTPEQERLERRRQMPYHMHINLELLEATHLICAMLIEVPNMAASTYDKRRPMSKTFRRLLEVSERQTFVGPPENVRDHVMAATRALNKGDHQKAFSVINSLEIWKLLRNREHVLEMLELKIKEEALRTYLFSYSSSYESLSLNQLTTMFDLSEQHAHSIVSKMMMHEELHASWDQPTKCIVFHSVDQTRLQGLLFQMADKLSVLVEINERAYEARTGGTLEGVPPRRRGEGQDNMGKWQDNFVSSQGRQGGGNRFGYSGRGAISGQSGGGHQRDRGNQGYRGGYGGVSRFQDARGRNQSIPSGRGGDGGARMVNLNRIGRV

SEQ ID NO: 330356 - protein, 103 aa, Zea mays
  Clone ID: MRT4577_64384C.1.pep
GRDFRDGFIRNIRSRRLRPPSELRRGAPCAARSAAATLRPARPPRRCSPMGTTTVRSTPAVAVRPCVWDPQGENIVRILSLTRGPFRFSLFDFFNFFLFSPSQ

SEQ ID NO: 330357 - protein, 141 aa, Zea mays
  Clone ID: MRT4577_64385C.1.pep
KNNSWEGFVGNPPPDKWEVLKIPLGRFFPPWRGNVVPAKLGINPARVGGMSLSVNPKGGVSGAQTGAGDFWVDVAWVKTFRALLTPPGIVFFSLGPFLFFPPAPVGPLDSSPGPHPRGYPSPGCPPPFGLKKGFCFAFEGF

SEQ ID NO: 330358 - protein, 115 aa, Zea mays
  unsure (1)..(115): unsure at all Xaa locations
  Clone ID: MRT4577_64386C.1.pep
SLRGKNRAQQMANNNSSYGENVSRKSHTPSAIVIGGGFAGIAAANALRNASFEVVLLESRDRIGGRVHTDYSFGFPVDLXASWLHGVCEENPLAXIIGRLGLPLYRTSGDDSGLF

SEQ ID NO: 330359 - protein, 55 aa, Zea mays
  Clone ID: MRT4577_64387C.1.pep
RAIYQKLKLWPNKFRIFPSTALALALALALNQHSKDAESLKPCFSRSSGPCIRTG

SEQ ID NO: 330360 - protein, 65 aa, Zea mays
  Clone ID: MRT4577_64388C.1.pep
RWHQWLYFLTFDYSFVYLQFLQLDNVLMTMLTCFVLTLTPTIAQSSSLPEVLVGRPTISNPFITG

SEQ ID NO: 330361 - protein, 47 aa, Zea mays
  Clone ID: MRT4577_64389C.1.pep
VPVEWPGSLCGGEFLLCDRVALGVSHLVASRLCGLYDILRFLCPPQA

SEQ ID NO: 330362 - protein, 77 aa, Zea mays
  Clone ID: MRT4577_6438C.1.pep
PRLQICSLLTYPNPFFPLVPDIAKVCFINRHEVHNTSRTLTHSYAMYYLLYLSFGVSISIFCPNLYIPQCILSILPV

SEQ ID NO: 330363 - protein, 70 aa, Zea mays
  Clone ID: MRT4577_64390C.1.pep
GHVITIVRAHHDSRLRSPKLHKRKRVGHVIKRTFYKESYLSVFQTCVVTFHIISILVPCSIILLNEVNCL

SEQ ID NO: 330364 - protein, 251 aa, Zea mays
  Clone ID: MRT4577_64391C.1.pep
MHACFHGGGGGNSRITKSVGFIVKSMKALSLLKVKTAGDGHPHAPRRRRRRHRRRSPEADELQDKDVAAASSSASSSAKIAPAQPHEAADGDLRRDRLPQDEELRRQGGAKHGHCDKCCSPLEDDDEEAAAGTADAAGDGEWAAEPEPGVLMTLWPRGDGSNYLRRIRFSEEYFGDAWAAQTWWADNCDRIVELYSVVVQPEHPSQDGDDDDDDDDPAAPVTPCQSEDDEHQRQVHDHPRSSDSPAGVEVP

SEQ ID NO: 330365 - protein, 75 aa, Zea mays
  Clone ID: MRT4577_64392C.1.pep
PFFPKPNPPTQAMLLPTFLIPTQAPYFIITLLSFSNNLQFLSPISFFISDSIIFTPILFTLQPYFFLYTKSFSFI

SEQ ID NO: 330366 - protein, 128 aa, Zea mays
  unsure (1)..(128): unsure at all Xaa locations
  Clone ID: MRT4577_64393C.1.pep
ASFFDPNRKQPMTSPVVTLCGLPPXLVLFTTDYWVDVDLXTAAYILAYLLAGRPIMPRRTQVEQLHKIFXICIAPQQXYWKKSNLPHATIFNPQQPYRKRITYTFNDFPQSTLTLIXTLLAIDPSYRL

SEQ ID NO: 330367 - protein, 130 aa, Zea mays
  unsure (1)..(130): unsure at all Xaa locations
  Clone ID: MRT4577_64394C.1.pep
PNGRTQPTQPFLFVRPLPASVLLLGKHTNSPFFSSDARPYAGAPPLVFRQEGKIENLVRSVYSEVDEKDVNLDAAFSVHAGIAHTRWATHGVPAPRNSHPQSSGAGDEFLVVHNGIITNYXVLKETLTRH

SEQ ID NO: 330368 - protein, 37 aa, Zea mays
  Clone ID: MRT4577_64395C.1.pep
YIYVHGFIFITKSYTSHMQIDIVAIELGYIHFSFRPG

SEQ ID NO: 330369 - protein, 680 aa, Zea mays
  Clone ID: MRT4577_64396C.1.pep
MCGIFAYLNYNVSRERRYILEVLFNGLRRLEYRGYDSAGIALDADRQVPSPAPASSSDARPYAGAPPLVFRQEGKIENLVRSVYSEVDEKDVNLDAAFSVHAGIAHTRWATHGVPAPRNSHPQSSGAGDEFLVVHNGIITNYEVLKETLTRHGFTFESDTDTEVIPKLAKFVFDKSHDEQGDVTFSQVVMEVMRQLEGAYALIFKSPHYPNELIACKRGSQLILGVNELSGQQNGKSFHDVKTLTTNGKPKELFFSSDLCAIVEHTKNYLALEDNEIVHIKDGSVSILKFDPHKEKPASVQRALSVLEMEVEQIKKGSYDHFMQKEIHEQPHSLKTTMRGRLKDGGVVLGGLKEYLKTIRRCRRVVFIGCGTSYNAALAARPFVEELTGIPVTMEVASDLLDRQGPIYREDTAVFVSQSGETADTLLALDYALENGALCVGITNTVGSTLSRKTHCGVHINAGCEIGVASTKAYTSQIVAMAMMALAIGSDQISTQARRESIISGLNNLSSNVSEVLKLDAGMKELASSLIDSESLLVFGRGYNYATALEGALKVKEVALMHSEGMLAGEMKHGPLALVDENLPIIVIATRDACFSKQQSVIQQLLSRRGRLIVMCSRGDAAAVCPSGGSCRVIEVPQVADCLQPVINIIPLQLLAYHLTVLRGFDVDQPRNLAKSVTTQ

SEQ ID NO: 330370 - protein, 680 aa, Zea mays
  Clone ID: MRT4577_64397C.1.pep
MCGIFAYLNYNVSRERRYILEVLFNGLRRLEYRGYDSAGIALDADRQVPSPAPASSSDARPYAGAPPLVFRQEGKIENLVRSVYSEVDEKDVNLDAAFSVHAGIAHTRWATHGVPAPRNSHPQSSGAGDEFLVVHNGIITNYEVLKETLTRHGFTFESDTDTEVIPKLAKFVFDKSHDEQGDVTFSQVVMEVMRQLEGAYALIFKSPHYPNELIACKRGSQLILGVNELSGQQNGKSFHDVKTLTTNGKPKELFFSSDLCAIVEHTKNYLALEDNEIVHIKDGSVSILKFDPHKEKPASVQRALSVLEMEVEQIKKGSYDHFMQKEIHEQPHSLKTTMRGRLKDGGVVLGGLKEYLKTIRRCRRVVFIGCGTSYNAALAARPFVEELTGIPVTMEVASDLLDRQGPIYREDTAVFVSQSGETADTLLALDYALENGALCVGITNTVGSTLSRKTHCGVHINAGCEIGVASTKAYTSQIVAMAMMALAIGSDQISTQARRDSIISGLNNLSSNVSEVLKLDAGMKELASSLIDSESLLVFGRGYNYATALEGALKVKEVALMHSEGMLAGEMKHGPLALVDENLPIIVIATRDACFSKQQSVIQQLLSRRGRLIVMCSRGDAAAVCPSGGSCRVIEVPQVADCLQPVINIIPLQLLAYHLTVLRGFDVDQPRNLAKSVTTQ

SEQ ID NO: 330371 - protein, 43 aa, Zea mays
  Clone ID: MRT4577_64398C.1.pep
RACHCLKILLAMLVTRYLSGKGRHGGPSVAGLAATGTRCVPFN

SEQ ID NO: 330372 - protein, 376 aa, Zea mays
  unsure (1)..(376): unsure at all Xaa locations
  Clone ID: MRT4577_64399C.1.pep
MPPPSANGATAAAAAARDDMSPAEARLAMMELANMVSVPMALAAVIRLGVPAAVWAGGANAPMSAADLLPPGHPDPSVLERLLRLLASRGVFSESTESTPTTRRRLFALTAVGRTLVPGPASGASYADYVLQHHQDALXLAAWPRLHEAVLDPAGPEPFARANAGVTAYAYYGKDQDANXVMLRAMAGVSEPFMGALLDGYGAAGGFRGVATLVDVGGSSGACLEMIMRRVPNTITEGINFDLPDVVAAAPPIAGVRHVGGDMFKSIPSGDAIFMKWVLTTWTDDECTAILRNCHAALPDGGKLVACEPVVPEETDSSTRTRALLENDIFVMTTYRTQGRERSEEEFRHLGVDAAGFTAFRAIYLDPFYAVLEYTK

SEQ ID NO: 330373 - protein, 112 aa, Zea mays
  Clone ID: MRT4577_6439C.1.pep
SRAEGIFVILLSWQNGPHKIFMGKRLRQSFLGFCCGAPWVVPARASCGRIVRAPPPMCGCLWISGPPGRQGFCGFNRGGLLELACTKEFIILGLGPKKKKKKKNPPQKKPQH

SEQ ID NO: 330374 - protein, 98 aa, Zea mays
  Clone ID: MRT4577_643C.1.pep
SMVSEFHVSIAPVNMWHYIVLAPPPARTAVHPLGWHKYAPRDACQLVLVPLWLQESWDRLVKAAVSTLSRCREIFFLDGHPPPHWDAYFAIDLGFSPG

SEQ ID NO: 330375 - protein, 76 aa, Zea mays
  unsure (1)..(76): unsure at all Xaa locations
  Clone ID: MRT4577_64400C.1.pep
HGVCAAALGVLIEQRAHPLPLLLILAQHVRPADQRGRPHRRPGAARRAGEWWAREPRDVLDQGRHLFCLCWDIVXP

SEQ ID NO: 330376 - protein, 196 aa, Zea mays
  Clone ID: MRT4577_64401C.1.pep
NHSSWLGVTCDSSSRVVALEVLSPSRRFGPSQELAGELPAAVGLLTELKVVSFPLHGLRGKIPGEIWRLEDLEVVNLAGNSLRGALPASFPPRLRVLSLASNLLHGEIPSSLSTCKDLERLDLSGNRFTGSVPRALGSLPNLKWLDLSGNLLVGGIPSGLGNCRLLRSLRLFSNSLHGSIPAGIGKLRKLQVLDVS

SEQ ID NO: 330377 - protein, 323 aa, Zea mays
  Clone ID: MRT4577_64402C.1.pep
MALVLGREEELLAQLRALLTFLPPPASPPAPAAPVKVESIMGTSGGGRRLGSKRDRDDDSEAEAEQHGDEPAAAQPHYCPHPPPPCKRTRRRKNKKKRQQSKCLVTTVPDFDGYQWRKYGQKQIEGAMYPRSYYRCIQSAKQGCQAKRTVQRNDDDGAAAPPEYTVVYVAEHTCTANDDALEAPPVILETTTSVVVVPAPAAHTDPVVVVVPATTSAAAAAASACSTTVTTGTESPAISGDDDVACWSSSGSSSSGYSYADDSCCCCCCDGLLAAVVHGGCGSSWAPGPADSVSVPSFQLQEMEDLTGPIRSPVHVPRAWLDR

SEQ ID NO: 330378 - protein, 92 aa, Zea mays
  unsure (1)..(92): unsure at all Xaa locations
  Clone ID: MRT4577_64403C.1.pep
GPPVAPSGGGARCVFSPSPVRPSCPLSFRASXPVARPRAPSSSEWFRAVLGVPCPAVRCGCGSGARVGRRACLAAAVCVWAAAPGGGRRGPV

SEQ ID NO: 330379 - protein, 36 aa, Zea mays
  Clone ID: MRT4577_64404C.1.pep
HRTHTINREIFIYGLLYIKTINPRRYHDYPTYTHTN

SEQ ID NO: 330380 - protein, 77 aa, Zea mays
  Clone ID: MRT4577_64405C.1.pep
QTKGDLYDHKGFGGPVSPPNRLVPRVWGSKPPSHKQIVGRILPLQELLIFSMRKAKTLPDPYWKGPGTHTGFRSSSN

SEQ ID NO: 330381 - protein, 179 aa, Zea mays
  Clone ID: MRT4577_64406C.1.pep
ALRPFWDIIRQNFVGGCVSKGSELQIEMDEFLWKDVELDGSFIILADNVMGSTKNSKNGEQILHYGSRCGRCRLQSVKIVNEGINWTSPNNVYWKHDVERSESVKIILHGNAEFEAKDVVLKGNHVFEVPDGHRMCIIQDRAGFVVKLDLIRDELMDSGTWHWKYAVDGVHVKLNMVEL

SEQ ID NO: 330382 - protein, 53 aa, Zea mays
  Clone ID: MRT4577_64407C.1.pep
DQGGFITAIFRNSVRKGGHKGDWNVLLFKPIYNPTLQSYYKKVNTPFRANPYQ

SEQ ID NO: 330383 - protein, 86 aa, Zea mays
  Clone ID: MRT4577_64408C.1.pep
MLLFILTLSPMGMRDTFLFIQRKKMTYQAKLAQKDIQKGPPHWRGGQKPQQGMEKEAGEGGPTSPSEKGAPAPPTGPGKNQKTGWC

SEQ ID NO: 330384 - protein, 60 aa, Zea mays
  Clone ID: MRT4577_6440C.1.pep
LIFYFFFFFFFFFFFSFYTRSSGKKKKLAPHGSIFIYHHNCSKIIISCSAYIHHALLSKS

SEQ ID NO: 330385 - protein, 74 aa, Zea mays
  Clone ID: MRT4577_64411C.1.pep
ETQATCATWARDRSGCYRLFPICALLLEPRGLLLMVDCQIVCLTHRARTCSVAVFKDLPDPQLSLSGPCLSLLL

SEQ ID NO: 330386 - protein, 45 aa, Zea mays
  Clone ID: MRT4577_64412C.1.pep
HSVQRSIQLLRRMLFQWLRPNDTCYASVFSSVDSSELGRQLIHWS

SEQ ID NO: 330387 - protein, 47 aa, Zea mays
  Clone ID: MRT4577_64413C.1.pep
IRLELMLPVLFHTEATFNRGGHINPIGALLSESTNPWAQPSWISATC

SEQ ID NO: 330388 - protein, 139 aa, Zea mays
  unsure (1)..(139): unsure at all Xaa locations
  Clone ID: MRT4577_64414C.1.pep
XRSLRRRMARSIATGRPAGGLPRHNTQGVYAVSDTEPSLGHLMTRSLLRTRLLLKPNRPTPLSAIESWCLYVKTVRKLLPSTSMHRATNYIADSHEVLIAGCVRQGIHCVHIFIVRINQACQVTGENLLVLYLQNMENQ

SEQ ID NO: 330389 - protein, 269 aa, Zea mays
  Clone ID: MRT4577_64415C.1.pep
GMAATLAGVCKVPLTSVLLLFELTQDYRIVLPLLGAVGLSSWIASPQRFSKRIRSKLDSWEDKSSIPQQANDMLTENKEATSMDAADLSLELYKIESSLCVYDANDSNMFKNLTVGEAMKTNYFSVSMTTPLIEALDLMLAEKQPFVMITENNTSARGLLALKNIQDFCKAAKTTRSQAEVKELLISHVCQAGKCKSWSVTPQMPLTTAEKIMDSHDVDHLPVVSEDANLQDRGLLIGFVDRECIAIARRAMATKEIFSSMYGIRKEER

SEQ ID NO: 330390 - protein, 65 aa, Zea mays
  unsure (1)..(65): unsure at all Xaa locations
  Clone ID: MRT4577_64416C.1.pep
XXXXXXXXXXXXNNGIHRFETTKFDLLPFLKSWGLLNTPLASCFDILFTLTNKIAPFFTSLYPGF

SEQ ID NO: 330391 - protein, 68 aa, Zea mays
  unsure (1)..(68): unsure at all Xaa locations
  Clone ID: MRT4577_64417C.1.pep
MEAHRTEGACPLLVCEKIAVLLLTKKIVKKRVKQIKRPXLDRYKCLKPSWLMPNGIDFRFWKKFKGCT

SEQ ID NO: 330392 - protein, 123 aa, Zea mays
  unsure (1)..(123): unsure at all Xaa locations
  Clone ID: MRT4577_64418C.1.pep
KGPPRSPSKPGRENPPRGGQAQHPGGGPQPAGKAPXYKGPTPRAGPXVGWPPSPPLPRRLPLLMRPPPPPLXFVDFPPGQDNPGPFTPSLLGISLGGGGTQFSLGGPRDQIFFWAPPFPRGFL

SEQ ID NO: 330393 - protein, 81 aa, Zea mays
  Clone ID: MRT4577_64419C.1.pep
GDALKPILKESSAYAPLLLFSSSGVLFWDSARALYKQCLSICHQRRFSVLSKAEGLQNLSPPEKKKKKKKKTKYSALLPLL

SEQ ID NO: 330394 - protein, 115 aa, Zea mays
  Clone ID: MRT4577_6441C.1.pep
ATHHPIGPETEHLVVTCSALKRQYRDMLREGSDKAGDMRVHFLHLDAPEEVLTKRAAERKGHFAGPALVHSQFEVLERPTEDEKDVLIVSVDQSVEDVQREALERVKELLDDDPE

SEQ ID NO: 330395 - protein, 77 aa, Zea mays
  Clone ID: MRT4577_64420C.1.pep
LLFYTPHDRLIPTASNSFSHISSSYILQLHPPHQYLPPRYIHLSYYLNKSLFHYSTFIHNFIIPPQLHSHNHFTLHT

SEQ ID NO: 330396 - protein, 39 aa, Zea mays
  unsure (1)..(39): unsure at all Xaa locations
  Clone ID: MRT4577_64421C.1.pep
FXFFLFNYLTKGTLLTYQLVVQITNNVDPLLGETNTNIN

SEQ ID NO: 330397 - protein, 92 aa, Zea mays
  unsure (1)..(92): unsure at all Xaa locations
  Clone ID: MRT4577_64422C.1.pep
TKSPKADKPPKEHKPPKEHGPKPEKPPKEHKPTPLTYTPSPKPTPPTYTPTPTPXPXPTAPTYTPAPTPLKPTPQXTRSSATHTATPVLSET

SEQ ID NO: 330398 - protein, 47 aa, Zea mays
  Clone ID: MRT4577_64423C.1.pep
VHWTGFKQLLNKISQHNVSRAYYVQYNPNNHKASTRIWFRFHNSGQG

SEQ ID NO: 330399 - protein, 43 aa, Zea mays
  Clone ID: MRT4577_64424C.1.pep
TKRMVYACQIELTMSKFTNYTRHMCEHLLLLVRQTNNVGYTDI

SEQ ID NO: 330400 - protein, 99 aa, Zea mays
  Clone ID: MRT4577_64425C.1.pep
KIFNRVQLYLLFKKVNSLVPKKNQFEHPGSPMDPARGKKTWEKKVNPPREGSMIPPPPGMEKKLPTGGCLSIGKCMAPEKKKKKKKKKKRKKKKKKHPP

SEQ ID NO: 330401 - protein, 169 aa, Zea mays
  unsure (1)..(169): unsure at all Xaa locations
  Clone ID: MRT4577_64426C.1.pep
FGTRERTSLEFFFFFFFFFFFFFFFFFFFFFPSRPPLNPKIPKENIFGQKAKPRPPPKNRDHGFPMGGGPTPPVGNPRPFNXKTPGNRKTPPKPLGGLAPLGGGGGTLPPDPSSPLRGXKPTFGPGGGFGGKKKAKXGGGVPPPGGGLQGVKGPPPPLGPVVPFTRGLG

SEQ ID NO: 330402 - protein, 87 aa, Zea mays
  Clone ID: MRT4577_64427C.1.pep
DESRILIHIHSLRSHCPCFLVYYLLLIPFHYLIFLFFIFFIYILFFYTTFFFFFFNFIFIDDIIFLVYFLIFCPPFTSFFLTFFFSF

SEQ ID NO: 330403 - protein, 152 aa, Zea mays
  unsure (1)..(152): unsure at all Xaa locations
  Clone ID: MRT4577_64428C.1.pep
SSAGRCPPAAWCARXPSPRGCPWACGXXRVLPPGAGWCPLARRSXWXRRLLGGRFSVRRRVWAVASPCPSWRAPVLVXGCWXSGAVLAPPCVRVRCFQGRSAXAAVPVPSRFCPARXGLLPLPPCCRCVFPAXFCXAARRPPXXXXXXKRPS

SEQ ID NO: 330404 - protein, 52 aa, Zea mays
  Clone ID: MRT4577_64429C.1.pep
TRFLLNASGGPWNQLTVCWRSRRLLLLTIEMGLGVLHRDLMVLSLYARRVLL

SEQ ID NO: 330405 - protein, 502 aa, Zea mays
  Clone ID: MRT4577_6442C.1.pep
MDPFVLSILLCSSIFVVVYWRRLNSMRLRLPPGPPTWPIFGNLLQLSPLPHKDFAQFCTKYGPLVYLRLGTIDAITTDDPEVIREILIRQDEVFASRPRTLAAVHLAYGCGDVALAPLGPNWKRMRRVCMEHLLTTRRLESFAAHRAQEAEHLCQFVWAKSQSGKPVNLREVLGAFSMNNVTRMLLGKQYFGIQSAGPGEAMEFMHITHELFFLLGLIYLGDYLPAWRWVDPYGCEKRMREVEKKVDDFHQKIIDEHRRAREARKSRSSVEEDGGNGKDEMDFVDVLLSLPGENGKEHMDDMEIKALMQDMIAAATDTSSVTNEWVMAEVIKNPRVLRCVVRESFRMHPAGPFLIPHESLKATTIMGYHVPARTRVFINTHALGRNPRVWDSVGEFRPERHLPAEEGARVEISHLPDFKILPFSAGKRKCPGAPLGVALVLMALARLFHCFDWSPPDGLRPEDVDTREVYGMTMPKATPLVAVATPRLPPHLYGGGGGSSAP

SEQ ID NO: 330406 - protein, 46 aa, Zea mays
  Clone ID: MRT4577_64430C.1.pep
CMRLHQVHRVLVHPAGADHRSQLVFSAVLAQQFGAWAGHLHSIVFG

SEQ ID NO: 330407 - protein, 169 aa, Zea mays
  Clone ID: MRT4577_64431C.1.pep
MGSVDVASHVSLTVDDMAHVWIRMCKGKKMVCCLGKDVSVAFRVRGLKQSRVASSGKEWVVTRVSSIMFFSFSLALLVMAMITASGIAALEKRPIVRSFSYFGCLILGYWLGRVPFFVLMMTPNVTWPVSMLARLALWGLLPQYGGLIIGDGTIFYSSLKKEDIREERA

SEQ ID NO: 330408 - protein, 43 aa, Zea mays
  Clone ID: MRT4577_64432C.1.pep
FPLTGTGVMMHVLRLLAHCPCNSKCRLICFPEIPKGLLLDHRR

SEQ ID NO: 330409 - protein, 47 aa, Zea mays
  unsure (1)..(47): unsure at all Xaa locations
  Clone ID: MRT4577_64433C.1.pep
LNPLGQGKLSPFCPLALVEWSPVHWPLLISRPAFSCFSDXSLSPRTS

SEQ ID NO: 330410 - protein, 42 aa, Zea mays
  Clone ID: MRT4577_64434C.1.pep
MWSLCMIHFHSFERNMLIRTMFQYILGGGVTESSIKRTSISG

SEQ ID NO: 330411 - protein, 51 aa, Zea mays
  Clone ID: MRT4577_64435C.1.pep
AYLIQKGLCMKDAIDHAKSGSYFSFCIEFHMFNQPDGCSMEHQPSPQKWLP

SEQ ID NO: 330412 - protein, 102 aa, Zea mays
  Clone ID: MRT4577_64436C.1.pep
MAATWEYISTRPPSTPLPLRFSELLQGNLRLLRNVAHIARTHMMPPWLAQVHPRTGTPVNATVVMLVDTVIIAFFTDLGILSNLLSISTLFIFMLVAVALLV

SEQ ID NO: 330413 - protein, 73 aa, Zea mays
  unsure (1)..(73): unsure at all Xaa locations
  Clone ID: MRT4577_64437C.1.pep
AGRXRKGERWXTKKWGPSTGRRAKNAKKRXNYSHPLPAIRRYLTDSSRLFVSAVKAGTFVRRMGVGGKQASAT

SEQ ID NO: 330414 - protein, 257 aa, Zea mays
  Clone ID: MRT4577_64438C.1.pep
MADRGTSRGGGFASRGGDRGRGRGRGRGRGRGKNEEKEWQPVTKLGRLVKAGKINSMEEIYLHSLPIKEYQIVDNFLPKLKDEVMKIKPVQKQTRAGQRTRFKAIVIIGDSEGHVGLGIKTSKEVATAIRAAIIIAKLSVIPVRRGYWGTNLGAVHSLPTKESGKCGSVTVRLIPAPRGTGLVASPAVKRFLQLAGVEDAYTSSAGSTKTLENTLKATFVAVSNTYGFLTPNLWKETKLIRSPLDEFADTLREGKRY

SEQ ID NO: 330415 - protein, 55 aa, Zea mays
  Clone ID: MRT4577_64439C.1.pep
GNNAIFSALLTLSHYIYGIGPFHTGGSGSGLSVRVPCRARVLGRPPTNQQIPIPS

SEQ ID NO: 330416 - protein, 47 aa, Zea mays
  Clone ID: MRT4577_6443C.1.pep
SIHYPTIHNVLDCKNPFVTHLNPHSNHPPFAIYPNTEHAHTKRPSYH

SEQ ID NO: 330417 - protein, 69 aa, Zea mays
  unsure (1)..(69): unsure at all Xaa locations
  Clone ID: MRT4577_64440C.1.pep
GVFDGHGCSDAARFFXDHLVLNLREASSGRXGVTADAIREAFLATEEGFLALVSSLWEAQPDIATVGTC

SEQ ID NO: 330418 - protein, 102 aa, Zea mays
  unsure (1)..(102): unsure at all Xaa locations
  Clone ID: MRT4577_64441C.1.pep
MEITRPQKGQQKSHASLPLVSMLLAQAEGSLGSKTKWERNLHLKWFSWPLELRHVEVYVXMHMLXGTISAATVCQQNQLVETIQSPELWLLXAIHLNPTYPM

SEQ ID NO: 330419 - protein, 57 aa, Zea mays
  Clone ID: MRT4577_64442C.1.pep
MVGSGGALMGTGGGPEDHRHQQPYTLEMLSGGGGGYGGGYAAKDEPRDDLFVDSLLC

SEQ ID NO: 330420 - protein, 76 aa, Zea mays
  Clone ID: MRT4577_64443C.1.pep
QLPSAAQAVVPEDRGRSQTCGNFAVYLQGCCYQQDPKLEKEEEETDPISARSHCIQRRISKKEKKEGREVDRYKMK

SEQ ID NO: 330421 - protein, 90 aa, Zea mays
  Clone ID: MRT4577_64444C.1.pep
TPPPPPPLLDEWFEIIGTRGGSSFFHARVGTPPLCSPGPIFFLLGKDESVFYFRPRFSGCRRSPGLSWNSQFRSQWGVDGVLQLEGVQEN

SEQ ID NO: 330422 - protein, 44 aa, Zea mays
  Clone ID: MRT4577_64445C.1.pep
GPASIQVALSRLSPYLGSAHRVSGLMMANHTSISSLFDRTCRQY

SEQ ID NO: 330423 - protein, 95 aa, Zea mays
  Clone ID: MRT4577_64446C.1.pep
PMGAFPFFSQRPGLGPPRGAPMKFAGVFSIKPPLTAPWVFLRKGVILKGSLGGGFLGFLGTPQGFFSQTACSRFFFGARGPPSQQGLFARGVFKF

SEQ ID NO: 330424 - protein, 169 aa, Zea mays
  Clone ID: MRT4577_64447C.1.pep
RATLLLAYKNKQLTARIAAMLKSYTLLIVTLVGMTLLGTPIACSLKLAKTNKTESTHNSASRSTTGSDHTSIPGTSAAYASGGWLTADTTHILSPKQILQRLRCEREPERRRTASLLVYDRRQAARLCSRSGKGCSACYKLNATANLHAPYSRTPGASPTNVPLWCASI

SEQ ID NO: 330425 - protein, 108 aa, Zea mays
  Clone ID: MRT4577_64448C.1.pep
AKLFWFPPFSEAPTRSFIWALYTPPQEPHIRLTPLFFVEVFFFFHGKNSRQEGESFGGTNCGFERSLFEHPVFFKRAFFKGITQCNHPGPLGRPSCENLQVFLLGSPP

SEQ ID NO: 330426 - protein, 66 aa, Zea mays
  unsure (1)..(66): unsure at all Xaa locations
  Clone ID: MRT4577_64449C.1.pep
GLGGHLAKVQRTVXMISNSXSVVKVFSSIDYKFGLMYAKGAFVLWYVGEGMEQGXFSEARQDLSAL

SEQ ID NO: 330427 - protein, 211 aa, Zea mays
  Clone ID: MRT4577_6444C.1.pep
MDRTRHRSSVSSERFLGSFARSAAAGEQSASTAFELDEDDLFSAGSGSPEPPQPLRRPLILSSVRPANPSPVPRLRRPPEGILDALPERRRSPPQSSSSTSSSPASPAAAPPRMIPAVPRPAPAPAPYVPQSLPVNVPAARLRKPPVVMVMGEAEDEYEEMLPPHEMLARARARESPMTTFSMLEGAGRTLKGRDLRQVRNAVWRKTGFLD

SEQ ID NO: 330428 - protein, 81 aa, Zea mays
  Clone ID: MRT4577_64450C.1.pep
TPALCPAPNTCSYFQVVGLSTGVSVCWHVRRVGHSCALRCARRTCSGWDHPVGVVLKDLGRGHGIVRFYTEGGVMVAVGSA

SEQ ID NO: 330429 - protein, 88 aa, Zea mays
  Clone ID: MRT4577_64451C.1.pep
QPASADGIKQPACPTRITTTSLTTTRRTRSIPPTSTVTPIPRWSPSPTTAISRGTLNRKHNLSTSMTLAQADSIHRLQFAYLINNTIF

SEQ ID NO: 330430 - protein, 58 aa, Zea mays
  Clone ID: MRT4577_64452C.1.pep
RLLGEVAQGPGGRTVCALRESGVKSAAASKVVTALFTPAATSLHQSQENSVRCSHLNP

SEQ ID NO: 330431 - protein, 42 aa, Zea mays
  unsure (1)..(42): unsure at all Xaa locations
  Clone ID: MRT4577_64453C.1.pep
KKXXXTHQCTTITISKLRLHGPVKRSVLGMNCGSWLLPLHVT

SEQ ID NO: 330432 - protein, 45 aa, Zea mays
  Clone ID: MRT4577_64454C.1.pep
FKLPKGAYTGHRRKARLARYAPKDAVRLVTPAGACVRDGQPLSSR

SEQ ID NO: 330433 - protein, 86 aa, Zea mays
  Clone ID: MRT4577_64455C.1.pep
SSDCCPRFLSKQSICSSPCLLSSSSMPFRISGTQHISLCRASSRTYQVTTPGFCYSDVGPQSGVSSLHLWFGIALSTALRVEGPVP

SEQ ID NO: 330434 - protein, 167 aa, Zea mays
  unsure (1)..(167): unsure at all Xaa locations
  Clone ID: MRT4577_64456C.1.pep
PLVELKPKLNPITSFSSSLLASSSPNSSATATTSCVTTTASTXSXSQSTSVGTATLSLPATSAPPAGASSVVSSLLSGIASCTAGTASTSTNPKHNPSVSVPLTCSSTVFMSSKLGLLNSSSTSSDSSFKLLHLASSLTASNSTILLFMASTASDSFKPLLLASSSR

SEQ ID NO: 330435 - protein, 153 aa, Zea mays
  unsure (1)..(153): unsure at all Xaa locations
  Clone ID: MRT4577_64457C.1.pep
VXCXXXPXXLVXFLCPXXXXXXXXXFPSXXVXXXSXXSGXSXXPPRPGXXSSSPFSXWXCFFFAPCFFLPAXASFXALLFSXAXAVPXXXXFFGVRPFXRCPAPSPALLXXXXXVXLFSXGRXLFAXXSAFPXXSLSXFXXGVLXXFCXLPSL

SEQ ID NO: 330436 - protein, 163 aa, Zea mays
  unsure (1)..(163): unsure at all Xaa locations
  Clone ID: MRT4577_64458C.1.pep
FFFFFFIFFFFFFFFFFFFLFTPPGGRPEGGPPEQGGARPKGPPPXPQGRNQGXPNPGEKRATPKNPHKKKAAKKKSKNPGAEKKKEQTRKPRGKXPPPKGRKPXGPEPKEKPAPTEEKKNXKRRAEKXTRKEPLGPLPPRGGEAPPPTKTGKPRRPQKGGNP

SEQ ID NO: 330437 - protein, 48 aa, Zea mays
  Clone ID: MRT4577_64459C.1.pep
KGLAFPWGVPPLPQKKKKKKKKKKKKKKKKKKKKKKKKKKKKKKKRTR

SEQ ID NO: 330438 - protein, 51 aa, Zea mays
  Clone ID: MRT4577_6445C.1.pep
TYGGYDVRRRASGVRMIGVEICWRLVRGSVRVVYITVTMIEFAPGIRYVAI

SEQ ID NO: 330439 - protein, 78 aa, Zea mays
  Clone ID: MRT4577_64460C.1.pep
ARGSGHNGGGGLYRSAWSHTRAPGCGSARTLTSPRPASASSTRMVLAPYRGRLAVALLDHSTLSQLPRTNHFCSYKKM

SEQ ID NO: 330440 - protein, 620 aa, Zea mays
  unsure (1)..(620): unsure at all Xaa locations
  Clone ID: MRT4577_64461C.1.pep
MFAWPRPRPHQPPAPISSSITPPNQNPNSTSPPIADVAGGFAGRSSADGCFAPPSSGPAAQASMPSIAPPSSSVAALTRQPVQFFKGCSVSKETKGPVRSFFTANSKSTTVKSAGLKVASSFKNDGGYPAGGVSWKDDTLLPKSTTIRGQDHPVADPVLPMDSMITPEILSANVERVIDMFADDDTDTELDLDSPTEDFTSIAEAIEDIQQGKLVIVVDDESRENEGDLIMAASLVTPEAMAFIVRHETGIVCVSMKEDDLERLSLPLMVTTKENEKLCTAFTVTVDAKEGTTTGVSAKDRAKTVLKRAGHTEASVDLAMLAGLPPVAVLCEIVDDADGSMARLPKLHVFAEKENLKIISIADLIRXLNYQNFSFWYRRKRDRLIERASVARLPLKWGNVHAYCYKSVIDGIEHIGMMKGDIGDSQDILVRVHSECLTGDIFGSARCDCGDQLAMAMEMIEKAGRGVLVYLRGHEGRGIGXGHKLRAYNLQDDGRDTVEANEELGLPVDSQEYGIGAQILRDLGVRSMKLMTNNPAKYSGIKGYGLSIAGRVPLITPITSENRKYLETKRTKMGHVYGLANAQANQANKWQPEHRRESLGPQACFHYYSSNPASWHKRVI

SEQ ID NO: 330441 - protein, 60 aa, Zea mays
  Clone ID: MRT4577_64462C.1.pep
FWPGSWASTICLRLASFSDIAFAYLVLISGEIHRKRTRAINEGKKKKKKKKKSTLRCYHC

SEQ ID NO: 330442 - protein, 399 aa, Zea mays
  Clone ID: MRT4577_64463C.1.pep
MPSIAPPSSSVAALTRQPVQFFKGCSVSKETKGPVRSFFTANSKSTKVKSAGLKVASSFKNDGGYPAGGVSWKDDTLLPKSTTIRGQDHPVADPVLPMDSMITPEILSANVERVIDMFADDDTDTELDLDSPTEGFASIAEAIEDIQQGKLVIVVDDESRENEGDLIMAASLVTPEAMAFIVRHGTGIVCVSMKEDDLERLSLPLMVTTKENEEKLCTAFTVTVDAKEGTTTGVSAKDRAKTVMTLASPDSKPEDLNRPGHIFPLKYREGGVLKRAGHTEASVDLAMLAGLPPVAVLCEIVDDADGSMARLPKLRVFAEKENLKIISIADLIRYRRKRDRLIERASVARLPLKWGNVHAYCYKSVIDGIEHIAMVKGDIGDGQDILVRVHSECLTGDIF

SEQ ID NO: 330443 - protein, 105 aa, Zea mays
  Clone ID: MRT4577_64464C.1.pep
KGRDASKAVGSSDVSSSEIGLAMSPSLFVAKTGHIIATSETWLCQAGRCRDDDGAGVEAPGRVGVGQRCVKRRRQSKRASRQTGLGGIENIRVEVIDARTGLERI

SEQ ID NO: 330444 - protein, 263 aa, Zea mays
  Clone ID: MRT4577_64465C.1.pep
MPSIAPPSSSVAALTRQPVQFFKGCSVSKETKGPVRSFFTANSKSTKVKSAGLKVASSFKNDGGYPAGGVSWKDDTLLPKSTTIRGQDHSVADPVLPMDSMITPEILSANVERVIDMFADDDTDTELDLDSPTEGFTSIAEAIEDIQQGKLVIVVDDESRENEGDLIMAASLVTPEAMAFIVRHGTGIVCVSMKEDDLERLSLPLMVTTKENEEKLCTAFTVTVDAKEGTTTGVSAKDRAKTVMTLASPDSKPEDLNRPGHIF

SEQ ID NO: 330445 - protein, 161 aa, Zea mays
  Clone ID: MRT4577_64466C.1.pep
LSKKVIDLDELRMLAAQGVPDAAGVRATVWKLLLGYLPNDRSLWEQELAKKRGQYAAFKDEFLTNPVERAQQVPTEGHHNVSAEHVDNGFLHRSEVTREEHPLSLGKTSAWNQFFEYSEIMEQIDRDVKRTHPDMQFFCEDSPFMPSNQESLKYLFQSCIR

SEQ ID NO: 330446 - protein, 68 aa, Zea mays
  Clone ID: MRT4577_64467C.1.pep
LPLLHNPPLAPSNNRNCLFDTPSILAPNRFSGNHPNPAPVAEHRTANQKLHAVPKLRIRDSMHSNDHL

SEQ ID NO: 330447 - protein, 44 aa, Zea mays
  Clone ID: MRT4577_64468C.1.pep
VCKKKKKKKKKKKKKKKKKKKKKKKKKKKKKKKTKKNMKITTKC

SEQ ID NO: 330448 - protein, 59 aa, Zea mays
  unsure (1)..(59): unsure at all Xaa locations
  Clone ID: MRT4577_64469C.1.pep
MAQTIDEKKDDDLDEEEYXSXFLGIEKGAVLQEDEVXHDPQLDSRGSCQVMTKLMYLVN

SEQ ID NO: 330449 - protein, 106 aa, Zea mays
  unsure (1)..(106): unsure at all Xaa locations
  Clone ID: MRT4577_6446C.1.pep
GTPXRAGQYTATLRGSQRSTNYVGALLLSLYLLPLSLSASFKVSLFFLCAGHGRGRLMVVGGVDQVLVVGSKMEHGDEPYLARKVVSSLRPGPLRAMPADKLASRL

SEQ ID NO: 330450 - protein, 149 aa, Zea mays
  Clone ID: MRT4577_64470C.1.pep
YAIIFQQKQPHKSYSPSEQRRCTYHSCRNKDCAAVSVPASASASASNPVSNPAEEPASQDDRRDEHDVGSAHAEAWKLPNPKRPAIATCWERRLANRRCVALHTCIAWRKRNRQEVHRGVVGLGQDAGVSPGAAMPSTRGTRGPVRAGV

SEQ ID NO: 330451 - protein, 199 aa, Zea mays
  Clone ID: MRT4577_64471C.1.pep
RSPRLRSPPPRLRSPPFDDASTPAHPLRTCTATSSSSSPRRHPPRSLPPAATPFANENRTPSSPTGTVARWATLQSVAPPHLLPPCAVAALFFFEMQPLALPSSQLPFMAACRDYVPVLVFGTSLQVFHFYIQSGDGVVVRRQRSAFGLDGRRPPMEKKTSWERGAASRSCTRRRSLHLPEGEEACSTVRCCSRANTRI

SEQ ID NO: 330452 - protein, 68 aa, Zea mays
  Clone ID: MRT4577_64473C.1.pep
RWPCRPPMPPARTALIGSYVHAGFSSVRCYAHAQVCAGSIELASPRFGSRLEGRTPALLRAHAQAGLG

SEQ ID NO: 330453 - protein, 123 aa, Zea mays
  unsure (1)..(123): unsure at all Xaa locations
  Clone ID: MRT4577_64474C.1.pep
ILSTYNELNSWMEDMSAYVKLICKKHLLTVGTEGLYGPTSSEENLDVNRRTWXTSTTRWDFILNAKIPDMDLAFIHLYPDTWLLEQHATVDEKLNLTKRRVAFHIEDRDKELGKPVLCTEFWL

SEQ ID NO: 330454 - protein, 61 aa, Zea mays
  Clone ID: MRT4577_64475C.1.pep
TSVSSATNLLKAGDELHVLHKVEKDGTSELPVCCVKVPEDVPNKSEGPLRNKVEGVTHSPF

SEQ ID NO: 330455 - protein, 175 aa, Zea mays
  unsure (1)..(175): unsure at all Xaa locations
  Clone ID: MRT4577_64476C.1.pep
MARTKQTARKSTGGKAPRKQLATKAARKSAPTTGGVKKPHRYRPGTVALREIRKYQKSTELLIRKLPFQRLVREIAQDFKVGESTETSHAGIMGYPWNXTDLRFQSHAVLALQEAAEAYLVGLFEDTNLCAIHAKRVTIMPKDIQLXARRIRGEGVSLSTGGRLCARFVCRSLTL

SEQ ID NO: 330456 - protein, 85 aa, Zea mays
  unsure (1)..(85): unsure at all Xaa locations
  Clone ID: MRT4577_64477C.1.pep
MDAGAAAQEQLPKKDIIKFLQDHGSDSFLAEHKLLGNIKNVATSXNKDHLVTAYNHLFESKRFKGTETISRVSEHVNNVKLNDDK

SEQ ID NO: 330457 - protein, 136 aa, Zea mays; identical to SEQ ID NO: 199630
  Clone ID: MRT4577_64478C.1.pep

SEQ ID NO: 330458 - protein, 136 aa, Zea mays; identical to SEQ ID NO: 199630
  Clone ID: MRT4577_64479C.1.pep

SEQ ID NO: 330459 - protein, 35 aa, Zea mays
  Clone ID: MRT4577_6447C.1.pep
MDPNDAFSAAHPFRWDLGPPAHAAPAPAPPPPPLA

SEQ ID NO: 330460 - protein, 137 aa, Zea mays
  unsure (1)..(137): unsure at all Xaa locations
  Clone ID: MRT4577_64480C.1.pep
MARTKQTARKSTGGKAPRKQLATKAARKSAPTTGGVKKPHRYRPGTVALREIRKYQKSTELLIRKLPFQRLVREIAQDFKTDLRFQSHAVLALQEAAEAYLVGLFEDXXNLCAIHAKRVTIMPKDIQLARRIRGERA

SEQ ID NO: 330461 - protein, 132 aa, Zea mays
  unsure (1)..(132): unsure at all Xaa locations
  Clone ID: MRT4577_64481C.1.pep
PPPPVFSSFYERVQPPPXFLSPFPTRGGSPPPPRPHLGLPGPPNPFFLTPPEKKGPLPPFPFVRPQLEKPHLPPNWSSFFPQRPIGAPRGPASPPPPFALFCPLMFIPPPARFKGPRPFPLLLWAKGNSPFP

SEQ ID NO: 330462 - protein, 66 aa, Zea mays
  unsure (1)..(66): unsure at all Xaa locations
  Clone ID: MRT4577_64482C.1.pep
VLTERYSKMCLLXVMDRYSAVVRNMEQVVMIPRLLRDLDLSGYGGSVXDGSPDLYTYFIMLKSICV

SEQ ID NO: 330463 - protein, 136 aa, Zea mays; identical to SEQ ID NO: 199630
  Clone ID: MRT4577_64483C.1.pep

SEQ ID NO: 330464 - protein, 136 aa, Zea mays; identical to SEQ ID NO: 199630
  Clone ID: MRT4577_64484C.1.pep

SEQ ID NO: 330465 - protein, 76 aa, Zea mays
  Clone ID: MRT4577_64485C.1.pep
HEVGGNPKASTTGGGSTPWVGLVHAHMTAWPHIYRSLIQYSNSTGSDKTAHRHHPVSQQQRLHLQYCCLAPACQQL

SEQ ID NO: 330466 - protein, 60 aa, Zea mays
  unsure (1)..(60): unsure at all Xaa locations
  Clone ID: MRT4577_64486C.1.pep
KSLVAKIDRPMGVVSFRATQDSNGPLNSWAPSLEKLLALVXKSCPEIHKEPMIPKGGLKV

SEQ ID NO: 330467 - protein, 433 aa, Zea mays
  Clone ID: MRT4577_64487C.1.pep
MMFFYIIWGLLLGSLATAVPQHESKRAAPALPLFTKGRDILDANGNVFHFMSTNWPGHQEIMIPEGLQHSSIEKIVSWFPKLGLNSVRMPFAIEMIDDYLANSPNQTLERSVLRSIPGANGTTVLNSILKNNPQFTKNTTRLQVWDAVAKELARQGIVLHLDNHVSKAFWCCGENDGNGWFGERYFDVEKWKRGLAFMAKHAKENWPTFSSIGLRNELRSATGAEPVDWYTWYIHMTSAANAVHQADPDALLFFSGLSYDTYIDPIPLGKTLSGTAGTSTANKKATFVPSDFAWKNKIVLEIHKYDFEGTKDDCQTFKRKWYQSGFQAVNASDPATKYVFPMVISEWGFINNGVYWNQTTYAKCLVEMVKEYKVGWQHWELCGSFYLQTRPNRQPNTLVGADEAWGILDYDWTAIRSPVTLENSLFKMIAALK

SEQ ID NO: 330468 - protein, 72 aa, Zea mays
  unsure (1)..(72): unsure at all Xaa locations
  Clone ID: MRT4577_64488C.1.pep
VDLAGEGVNVLFDTGLEEKEAVATVVKMVVVVVGEGAPNREENLALILGDVMIKKSRSGGRRRAGRVGRPRX

SEQ ID NO: 330469 - protein, 108 aa, Zea mays
  Clone ID: MRT4577_64489C.1.pep
IASKLPADNKKKMEDAIDAAISWVDANQLAEADEFDDKMKELKTLCTPIIPKMHQGAGPNMGGPGGMNEAPPPETGAPAPKKKKVPQPVCARSGVSSSSGGRPQSLLN

SEQ ID NO: 330470 - protein, 350 aa, Zea mays
  unsure (1)..(350): unsure at all Xaa locations
  Clone ID: MRT4577_6448C.1.pep
MANAGGGAAGEGEWLKVAQLRALVQEDHRAKEVDNLTLRRFLRARGHNVDKAAAMLLKFLRWRAEAAPGGGTVREEQVRGELEQDKIYMGGVDRTGRPIIVGLLAKHYSANRDMAEFKSXDDVASSFFINQNACVRTCGGFLSFLAVERARVCAVCPLSCSCAGFVVYFFDKICARXVNIKRSGRPVYLLLCLAMEIYCCSSSTCKIERKKEDRERERDDXLTEPHACMXIPRGQEKFLAIMDLKGWGFANCDVRAYIAAIEIMQNYYPERLGKALMINVPYIFLKVWKTMIYPFIDANTRDKFVFVDDKSLRETLRREIDESQLPEFLGGKMPLVSLKDYAQQPQPVCE

SEQ ID NO: 330471 - protein, 87 aa, Zea mays
  Clone ID: MRT4577_64490C.1.pep
GYVVKIRVGGPPPGVMPGRGPVPPKLGGENPSLLGVRPPEKKWGGSLGAPPGETLAFRGMGRVPPSYISAPPGRPVGCRTDLTHFPA

SEQ ID NO: 330472 - protein, 48 aa, Zea mays
  Clone ID: MRT4577_64491C.1.pep
LITLYTATGHHYLHYHPKVLIAAQETPVPWPLSRRSTDVTKATTQAAS

SEQ ID NO: 330473 - protein, 393 aa, Zea mays
  Clone ID: MRT4577_64492C.1.pep
MAAAVRHIVRRRLSTAAAITAPVPTPASILNPSSPSTPLTSRHKTRLAISLLKSSPPPPPDQILSICRAAALTPETHIDRIALSLAASKLSSAPDTLRDLASTVLTPRHAPHAIALFGQAHLLPDAISTFQSSPSTRSLNALIFACIVSGNHTEAARVFQTFPDAHGVKPNTETFNAIIKSFAESGTIRSFYSVFDEMCKKGLKPNSITFTTALAGFYKEERFDDIKKVLELMKKNGCGESLPVYNVRVQSLCKLGRSGEARALVDEMMKKGTKPNWVTYNHLIYGFCKEGDLEEAKRLYKEMGRKGLVGDSDFYFMLIYYLCKGDDLDTALGLYNEIAAKNWVPCFSTMKMLVNGLAGSSRIDEAKGIIEKMKEKFPDKTEGWKEVEEAFPH

SEQ ID NO: 330474 - protein, 46 aa, Zea mays
  Clone ID: MRT4577_64493C.1.pep
WVVTRKLVALSNYVSIIATIDAVVTGFHRYTHLASKTGTTVLFLIT

SEQ ID NO: 330475 - protein, 66 aa, Zea mays
  Clone ID: MRT4577_64494C.1.pep
GREAFPVETSAIAEIYRRPYYIIKHGPAQLITPSCRTTSTRRPLLRSTPLSQRSRSHQPGLRSKRR

SEQ ID NO: 330476 - protein, 47 aa, Zea mays
  Clone ID: MRT4577_64495C.1.pep
AIWIVNWMNAFWICPCATTAKLHYISGKSQVFRPVEITCLCECFTTR

SEQ ID NO: 330477 - protein, 58 aa, Zea mays
  Clone ID: MRT4577_64496C.1.pep
VYKSAAALLRVVHVLVFRRQDHEQLSVEYNDLRRQLPSGDLHLNVYNTRRTMCSFTGA

SEQ ID NO: 330478 - protein, 63 aa, Zea mays
  Clone ID: MRT4577_64497C.1.pep
KTRGRQGKSIKTAVSGGFKKDGGSTWDPTYKTFILRHTGFTKLKYKKSPNYSNTRNHQTPVTT

SEQ ID NO: 330479 - protein, 113 aa, Zea mays
  Clone ID: MRT4577_64498C.1.pep
RKRKQTKRPRTEGHWKQANAERGEKGKKNGQPSPCHTTQKKPTRPTKGLGGLLVTQGERGGWGPFKPKTNQKSLQSIPIYPKPQGKEKTQQGPKGDRGPLNKKPNGLEGSEGG

SEQ ID NO: 330480 - protein, 139 aa, Zea mays
  Clone ID: MRT4577_64499C.1.pep
KKKKKKKFLFLPGLPFFKGYFLQIFFTLGGVRACVFLAHLPLLGGRFQSFCRGFTASFLGCLCLTRPYLLSPASGFARLGPLLRGPRRSPFPTFVLSGWGLAPLCSAPFTPPGGGFPPPLNRFFCLVVGARSLLFFPFL

SEQ ID NO: 330481 - protein, 83 aa, Zea mays
  unsure (1)..(83): unsure at all Xaa locations
  Clone ID: MRT4577_6449C.1.pep
XKKKKKKKKKKKKKRKKKKKRKKNKKKKAYKKKKKLYRGRPILNAPGLSFYSVPVLGKIPVRCPSLMRLAGTVPFSACLAVLT

SEQ ID NO: 330482 - protein, 45 aa, Zea mays
  Clone ID: MRT4577_644C.1.pep
SSLAHVIAMWYYSIMIQACCISTSVKVLFMVYFLIRASMCYVVSS

SEQ ID NO: 330483 - protein, 69 aa, Zea mays
  unsure (1)..(69): unsure at all Xaa locations
  Clone ID: MRT4577_64500C.1.pep
GAFFFFFFRPNTSKGIGGVKSNNRRRSATSWNERQPLFFLTNAVKENRIRKDISFRSRVTYAXXPRASA

SEQ ID NO: 330484 - protein, 32 aa, Zea mays
  Clone ID: MRT4577_64501C.1.pep
IDFKLALTYRLGLGLQKKTATRPFVAGDGKQW

SEQ ID NO: 330485 - protein, 331 aa, Zea mays
  unsure (1)..(331): unsure at all Xaa locations
  Clone ID: MRT4577_64502C.1.pep
MAALPFSTRRPFSSPCFILCFLLGFVAGLFPFVHRHLHLDLXPPPPPARGPSSRCADPAGPSPAATDDXTLIVVTPTRARPLQAYYLHRLAHTLRLVPQPLLWLVVDRGAATRETAALLRGCGLMYRHLPSQSHRDAPGARRTRPEHPAARGLRQRNAALDHIEHHRIHGLVYFADEDNVYSLDLFDQLRGIRSFGTWPVAMLGVGKSKTLVEGPVCDNSQVVGWHTNERTKRQRRFHVNTSGFAFNSSMLWDADKRARQAWNYIRLLDTVRDGFQATTFIEQLVEDETHMEGIPTGCSKIMNVNLRLEDKHLVYPKEWQMTENLDVLIPL

SEQ ID NO: 330486 - protein, 136 aa, Zea mays
  unsure (1)..(136): unsure at all Xaa locations
  Clone ID: MRT4577_64504C.1.pep
WLLPLEGVXHVSLHANIYANPLMXKDHSRARTAIAKKGLHKTIHWIITQLKINXHIFYYGXTMHQLSXVIYTRLXKLIXRSNNVHYEPDTXDEYMNPNXDVYEQIFITHSTKLAMAYGLIQTGHHTTIHIENILLV

SEQ ID NO: 330487 - protein, 350 aa, Zea mays
  unsure (1)..(350): unsure at all Xaa locations
  Clone ID: MRT4577_64505C.1.pep
LEAGRRSPSTAYSPDSEEETDQVPAAARYFDALEGPELDTLRATEVPVLPKDEKWPFLLRFPISAFGMCLGVSSQAILWKTLASAPPTAFLRVSPAVSHALWYVALALTVLVSAIYLLKVVFYLEAVRREFYHPMRANFFFAPWIACLFLALGAPRLVVAEMHRGVWYALMAPIFCLELKIYGQWMSGGQRRLSKVANPSNHLSIAGNFVGALLGAKMGLREGPVFFFAVGLAHYMVLFVTLYQRLPTNMTLPKELHPVFFLFVAAPSVASMAWAKINGQFDAGARIAYFIVLFLYMSLAVRINFFRGFRFSLAWWAYTFPMTGASVAAITYAMEVDNVLTRALCXGLSG

SEQ ID NO: 330488 - protein, 661 aa, Zea mays
  Clone ID: MRT4577_64506C.1.pep
MAPASETELQAPPPPPASAKEIKSPEVLPEPGSLSALQRKKLGAHFMESDERRVSRARTPLGAAYEPPSAAAGGGGTTPVNIRGEPIQDLSRTGGWVAAFFIFGNEMAERMAYFGLSVNMVIFMFKVMHRPFASSANAVNNFLGISQASSVLGGFLADAYLGRYWTIAIFTTMYLLGLIALTVSASVPALVPPQEGCDKLAMLLGACAPAAPWQMAYLQTALYVTALGAAGIRPCVSSFGADQFDERSPGYKRRLDRFFNLFYLAVTLGAIAAFTAVVYIQMQHGWAAAFGTLALAMGTSNALFFVGTPLYRHRLPGGSPLTRVAQVLVAAFRKRDAAFDSGDFVGLYEVAGAKSAIRGSAKIDHTDDFRWLDKAALQLEGDLAGGEDEEAVNPWRLCTVTQVEEVKILLRLLPVPACTVMLSVVLTEFLTLSVQQAYTLNTRVAALHLPVTCMPVFPCLAIFLILALYYQTFAPLARRLTGHPHGASQLQRVGLGLFFSILSVAWAGLFERYRRGYAVRHGYLGLFLTPMPDLSAYWLLIQYCLIGVAEVFCLVALLEFLYQEAPDAMRSVGSAYAAVAGGLGCFVASAINTAVDAATRDDEEGRPSWLAQNINVGRFDYLYWLLAVLSTVNLLVFVFFAKRYKYRVRVDVPTTVAVDKQ

SEQ ID NO: 330489 - protein, 91 aa, Zea mays
  Clone ID: MRT4577_64507C.1.pep
WIRFLAWDPPPQRRRRSCAQYNHSRSAGERILISIVKTTTTTKKKNKIRRVHKEGCFQEEAGVIVSIRTSGLGAPSPKRRARKIAQYNHSR

SEQ ID NO: 330490 - protein, 53 aa, Zea mays
  Clone ID: MRT4577_64508C.1.pep
RIFSSGIEFGLHELKHRRRWCVSRFAVSCSRSCSQARSRTSVRPLAVSTPPCS

SEQ ID NO: 330491 - protein, 118 aa, Zea mays
  Clone ID: MRT4577_64509C.1.pep
TLSKLKNINSFTSGDMLMGYRNAAHLLVLAAAAACCPCQVRSNISQPTTSCALRLPFRARSATRSFGVNRQRLDPVKPAQPMASGTVPPQLVSPAGARRPIRRLIHAPVPPRLVPSAP

SEQ ID NO: 330492 - protein, 188 aa, Zea mays
  unsure (1)..(188): unsure at all Xaa locations
  Clone ID: MRT4577_6450C.1.pep
PRVFFFFFFFFFFFFFFFFFFFFFFFFFFWVFFFFFFFFFLKKTPPKNQTGGGKPPPPGPPRXPGVNRAPGAPKSPFNLGTGGVFRGKPMXPPPPPRGPRFNPCXTPGKPLXGPKPXGPKPGPGGFGPGDPPRGQRDPRGWAPGPGAKWPGNPXKGKXAPPGPKKGKGKPPPFFKIPGKNPGGENPLG

SEQ ID NO: 330493 - protein, 56 aa, Zea mays
  Clone ID: MRT4577_64510C.1.pep
GITLAKKPGGGGISRFPGKAEPGQETMVCSSNAACAQKSLVGLRYERFEEGCHALF

SEQ ID NO: 330494 - protein, 286 aa, Zea mays
  Clone ID: MRT4577_64511C.1.pep
PAGRFLEENLTAACSSRELGFQMKSSVLSPAALLRFLPLPLFFLYARSSPALSPAPLWLAKILAAGAYLLKPPPLDSYKSRRSSSAAHLLPSARFSGVQSPSSHGASYSSASLTALPCLPVPRPASSPPRAASSHGCLRSCASLLPGLSQRARLLFQRVQPAPARRSFLSCALLAELGFSLAGACPAVLPCFPAGAHFLGREQAPAHAWLVHALAPARPLAAVHAPSRSLFGAQLPCAQLALMPRHRLLAARAQAPLCRAFRPASGLSSCARPAPARGVPSRRSSP

SEQ ID NO: 330495 - protein, 70 aa, Zea mays
  Clone ID: MRT4577_64512C.1.pep
GVSKFSFKGGAYMCFFIQGISKRLGFLFVFSRIFILLENLRRGWEFFGDVYLRGHVFFSSFLPGPIFFWS

SEQ ID NO: 330496 - protein, 86 aa, Zea mays
  Clone ID: MRT4577_64513C.1.pep
AISFLKAKEGMGFSFYVPLGRFADGNIRLTAVVAVSKRGRRSFRPVPRRSFGKPKSNQTHACGFYRLLVCLCSGIVCDRSRNRVVC

SEQ ID NO: 330497 - protein, 75 aa, Zea mays
  unsure (1)..(75): unsure at all Xaa locations
  Clone ID: MRT4577_64514C.1.pep
VHRDLKSPNLLVDNNWNVKVCDFGLSRLKHSTFLSSKSTAGTXCDVYSFGVILWELATLRMPWSGMNPMQVVGAV

SEQ ID NO: 330498 - protein, 78 aa, Zea mays
  Clone ID: MRT4577_64515C.1.pep
FSALKELPYSALAPSLEPCFSRPERPANRRPPSRWAPHSPTASQPQSPGDPTSLEEHGGEEPPEEQPHRDASLHGLSQ

SEQ ID NO: 330499 - protein, 188 aa, Zea mays
  Clone ID: MRT4577_64516C.1.pep
DEKRRIKMALDVAKGMNCLHTSVPTIVHRDLKSPNLLVDNNWNVKVCDFGLSRLKHSTFLSSKSTAGTPEWMAPEVLRNEQSNEKCDVYSFGVILWELATLRMPWSGMNPMQVVGAVGFQDRRLDIPKEVDPLVARIIFECWQKDPNLRPSFAQLTSALKTVQRLVTPSHQETQSPHVHQEISVNLTP

SEQ ID NO: 330500 - protein, 271 aa, Zea mays
  Clone ID: MRT4577_64517C.1.pep
MLPRLLNGPHRLLLGGPHASGAAPLHRRRVLAGRRAMSASASPASGPRRPLRGVVFDMDGTLTVPVIDFPAMYREVLGGDAAYAAARGSGGGSVDILHCIEDWAPDKQRHAYEVIARFEREGLDRLQIMPGASELCGFLDAKQIRRGLITRNVKDTVDLFHQRFGMTFTPALSREFRPYKPNPAPLLHICSAWNIPPHEVIMVGDSLKDDVVCGKRAGAFTCLLDETGRYGPHDSLPEEVKPDFKVSSLTEVFAVLEEHFDLAPVPAESRI

SEQ ID NO: 330501 - protein, 156 aa, Zea mays
  unsure (1)..(156): unsure at all Xaa locations
  Clone ID: MRT4577_64518C.1.pep
YKQQQFFPFNQLFTLNPVVYLQQQLFPFSQVGLAYFYQQKFFPFNQWAALNPAVYLQQQIFFPFSQLVAATRVSFLTQQQLVPFYQXFGGNPATLLQIQQLLPFVQLVLTNPAASSQQHIMGGALLLDGLLGGIQKKSFLDEGGGHPEKRSYISRF

SEQ ID NO: 330502 - protein, 106 aa, Zea mays
  Clone ID: MRT4577_64519C.1.pep
MAPSISVGAAAPSRAAGASTKKSADEVELLRRRNAELEREVAALRLELGAARRRAETAEEAEERLCVQLGDAEVEALELARAYQAHVHELARELAAARAAPARPAR

SEQ ID NO: 330503 - protein, 298 aa, Zea mays
  unsure (1)..(298): unsure at all Xaa locations
  Clone ID: MRT4577_6451C.1.pep
MANAGGGAAGEGEWLKVAQLRALVQEDHRAKEVDNLTLRRFLRARGHNVDKAAAMLLKFLRWRAEAAPGGGTVREEQVRGELEQDKIYMGGVDRTGRPIIVGLLAKHYSANRDMAEFKSFVVYFFDKICARIPRGQEKFLAIMDLKGWGYANCDVRAYIAAIEIMQXSVPPLIASAFTQRRHAAALCSDXDDGDDPASQXPDGRSSASIVRTXNYYPERLGKALMINVPYIFLKVWKTMIYPFIDANTRDKFVFVDDKSLRETLRREIDESQLPEFLGGKMPLVSLKDYAQQPQPVCE

SEQ ID NO: 330504 - protein, 142 aa, Zea mays
  Clone ID: MRT4577_64520C.1.pep
APPPPSTATPIRSHDTTRRATRRGRTTSRTRASPPWLHGGPTTTERSRAHPRHQPVAAMEQCMQQRSPGLLNGLRVLLTNAELAEAERAMAMPMVQCIVCCGSKVVTVQCVVSSNQNKKERKKEHVNLCKPRLKNVKDQRSV

SEQ ID NO: 330505 - protein, 173 aa, Zea mays
  unsure (1)..(173): unsure at all Xaa locations
  Clone ID: MRT4577_64521C.1.pep
YVSSEFGSRRPLPMACTNSELGQHGWEVNAMNTDNLTXKLALMWDVDPGSCIRRALSKDCSSMKQIIMTLMDDDISKHLQIIESSLEEGGEKVWIKXNIMKPWLYCHEQRLSFTYGRAMEMPLVIPPGLXSPSVCSCSITNEAIAVCLGGPTSLRNGESXYNMELTTLAHTIS

SEQ ID NO: 330506 - protein, 88 aa, Zea mays
  Clone ID: MRT4577_64522C.1.pep
APTERAHQCIPSLHPFDTGVDQPSRVCRQPPQYPPRHQVLDNPPSHIDIHMSHSDRMEGVIDLCQVTCREQYVVRTVIEHHHLDHLFL

SEQ ID NO: 330507 - protein, 73 aa, Zea mays
  Clone ID: MRT4577_64523C.1.pep
FSFLLFPFLLFLLILFTIYLCDPPMPSAISPLLTPSAVVSLRFSFRGGDARKGPQPREHLLVFFLSQVFRSVL

SEQ ID NO: 330508 - protein, 67 aa, Zea mays
  Clone ID: MRT4577_64524C.1.pep
QVTPDFNSALYYIVLHLKTYHMISLPPEQHPPVIELHNILSAPKYKQLTANTAKMLVENLSHHIIAS

SEQ ID NO: 330509 - protein, 84 aa, Zea mays
  Clone ID: MRT4577_64525C.1.pep
LTFKLVLSQFGDLSPRYLLTVSFLTYWLGSRPSKTSASLEGTILPVEFHSNSRALTFSFLFSPAWQASCPRVRHASPTVRGRVS

SEQ ID NO: 330510 - protein, 700 aa, Zea mays
  unsure (1)..(700): unsure at all Xaa locations
  Clone ID: MRT4577_64526C.1.pep
MAVETASDAQVAQDNEISPSNEAIQGDELAHGEELFQGDDLVQGNELVVSEVTTPPTTGIRRRRKKSLVWEHFTIEAVAGGATRACCNLCKQTFAYSSGSKIAGTSHLKRHITLGSCPEIKDQDQRLALPSAGGTDNDGEATAERPTKRRYSTGYANAAFDHQRSXCSYLAKMIILHDYPLHIAQQSSFTNFIESLQPRFRVVDVETMEGEVYAVFQKAKENLLQAFNTMPGRISLTIGLWTTSQTLGYVSLAGQFIDSDWKVHRRMLNFMMVSSPHSENALSEAISSSLSEWNMKDRLFTITLXDNDSSHDIYSARXHLSGCYNPVEHHLSHXLKKKKKNVYSCIKFINASSARQEKXAEIALQLEIPSTRTLCLDVTTQWNTTYLMLLAALDYKQAFTTLETCDDNYNEAPSSEDWRKVEAACNYLKLLYDSAHSIMAAANPTANIFFHEAWKLQLELANGTGHEDPTFRSIAKDMHERFDKYWKDCSLVLAIAVVMDPRFKMKLVEFSYSKIYGAGAAKYVKVVDDAVHELYKEYVAQPLPLTPAYVDQAKGIMGAANANSSQGAPASTGXGLLDFDMYLSEIQSSQPSKSELEQYLDESLTPRIQEFDILNWWKLNTVKFPTLSKMARDILAIPMSMVSSGSSIFSAGTGNRMLDDYRSSLRPETVEALVCAKDWLQYSPPATEAPGSEMIKAEAL

SEQ ID NO: 330511 - protein, 58 aa, Zea mays
  Clone ID: MRT4577_64527C.1.pep
TAAGVGVPPLGTLNLARPHRPPPLVFSLSLYPPLPVFPKTLNGAPFGVPIKAYRPFPQ

SEQ ID NO: 330512 - protein, 90 aa, Zea mays
  unsure (1)..(90): unsure at all Xaa locations
  Clone ID: MRT4577_64528C.1.pep
ASGRGPFGEVXSPXYPGGSFDPLGLAFHPEAFPQLKAKETKNRPLAMFFKIGFFVQAIVTGKGPLENLADHIXDPFNNNSWAYPTNFVPH

SEQ ID NO: 330513 - protein, 107 aa, Zea mays
  Clone ID: MRT4577_64529C.1.pep
LEAGRAGFLIKTLQLAATPRKRPRFELHRACERAPQPQHDPQHRGPFRREKKQAGNKIDDQKMPAFYKRRMFQEVRRRWSGRGSPGLCLEQPEVNVANKTSQRSEET

SEQ ID NO: 330514 - protein, 67 aa, Zea mays
  Clone ID: MRT4577_6452C.1.pep
LTKIYGHTGTNLAVGSLRFMRQGTLLLASESCQERILRLRSLTFQSMSTAIMIFGPRRRSCWTHKRP

SEQ ID NO: 330515 - protein, 63 aa, Zea mays
  Clone ID: MRT4577_64530C.1.pep
IMILHMQSSISQELISGAGASVCSQSSNGLVMINAAHHIISAVVLCRLDLYLTNLLLGNGIFQ

SEQ ID NO: 330516 - protein, 63 aa, Zea mays
  Clone ID: MRT4577_64531C.1.pep
YKKKASINHSRLVWEPHFLIVFSFEISKKNYFFFPWKNENLLKKLFSQACLTRVIVQPQSTKF

SEQ ID NO: 330517 - protein, 51 aa, Zea mays
  Clone ID: MRT4577_64532C.1.pep
SRHLAPDKAYRLELHMSQKGPAYSGALEPDLVLNSLHLCDTLDDLDLWGYI

SEQ ID NO: 330518 - protein, 81 aa, Zea mays
  unsure (1)..(81): unsure at all Xaa locations
  Clone ID: MRT4577_64533C.1.pep
GLFSGNVNCRVVNIISGVVPLLKIICLKVIGVIIVHSKNQLVLRAKFRILRKGVFXLXLPCLIFSKFKKRNIVDYIVRWWF

SEQ ID NO: 330519 - protein, 78 aa, Zea mays
  Clone ID: MRT4577_64534C.1.pep
IIFFFFFFFFFFFFFFFFFFFFFYTPQPKKILGVPQEVGHTYSILPKQKRGHSLSPLNKLIGCIIFIIPPPNFWQIND

SEQ ID NO: 330520 - protein, 274 aa, Zea mays
  Clone ID: MRT4577_64535C.1.pep
MSRFGRSGPPPPIRDTYSLLVLNITFRTTADDLFPLFDKYGEIVDIYIPRDRRTGDSRGFAFVRYKYEDEAQKAVDRLDGRLVDGREIMVQFAKYGPNAERINKGRIMEPVPRPRGRSRSRSPRRRYRDDYRDDYQDRDYRKRSRSQSRDGYARDRYRDRDYRHRSLSRSLSPARRSPSHSRSRSYTPDDYKRRGKDSASPASRSPSRSPPRKTPPSPKRSPVRHNDDRSPRSRSPSHKHNSLAKHLQQLRMNGLALILCVCGYACAQWWALFS

SEQ ID NO: 330521 - protein, 224 aa, Zea mays
  Clone ID: MRT4577_64536C.1.pep
MSRFGRSGPPPPIRDTYSLLVLNITFRTTADDLFPLFDKYGEIVDIYIPRDRRTGDSRGFAFVRYKYEDEAQKAVDRLDGRLVDGREIMVQFAKYGPNAERINKGRIMEPVPRPRGRSRSRSPRRRYRDDYRDDYQDRDYRKRSRSQSRDGYARDSLSPARRSPSHSRSRSYTPDDYKRRHKDSASPASRSPSRSPPRKTPPSPKRSPVRHNDDRSPRSRSPST

SEQ ID NO: 330522 - protein, 76 aa, Zea mays
  Clone ID: MRT4577_64537C.1.pep
IILVYCICCLEVCFVLDSPNEINWLSCMSPDIVPQPIVEKHDAWMLNFTHLLLTSHCDNYSGKHFNLAVIATMPTS

SEQ ID NO: 330523 - protein, 78 aa, Zea mays
  Clone ID: MRT4577_64538C.1.pep
TGCSGPSHRACRQGYEVLARSRSGCCGRGAWRQARQVSGPAGVLVINLRVRKGRLPMSPSTPPSRTRLGRVGRSHQPG

SEQ ID NO: 330524 - protein, 80 aa, Zea mays
  Clone ID: MRT4577_64539C.1.pep
IQLNHWNLTCQHNRCRQQMVQSAAVPSSHQSSHQPSSSTTQTAQIISTSTVSYVHVDRISASISSLHVTRKVQVTMNSKY

SEQ ID NO: 330525 - protein, 56 aa, Zea mays
  Clone ID: MRT4577_6453C.1.pep
RERETINLTEPHACRIPRGQEKFLAIMDLKGWGYANCDVRAYIAAIEIMQVRPCPR

SEQ ID NO: 330526 - protein, 252 aa, Zea mays
  Clone ID: MRT4577_64540C.1.pep
MSRFGRSGPPPPIRDTYSLLVLNITFRTTADDLFPLFDKYGEIVDIYIPRDRRTGDSRGFAFVRYKYEDEAQKAVDRLDGRLVDGREIMVQFAKYGPNAERINKGRIVEPVPRPRGRSRSRSPRRRYRDDYRDDYQDRDYRRRSHSQSRDRYTRDSYRDRDYRHLSLSRSYSPDDYKKRGRDSLSPARISPSHSRSRSYTPDDYKRRGKDSITSPASRSPSRSPPRKTSPSPKRSPVRRNDDRSPRSRSPST

SEQ ID NO: 330527 - protein, 208 aa, Zea mays
  unsure (1)..(208): unsure at all Xaa locations
  Clone ID: MRT4577_64541C.1.pep
MEWLNEYEKLVIRMDTPKVVIDNAVCPTATLVQVDSARKRGVLLEAVQVLADLDLSINKAYISSDGRWFMDVFHVTDRLGRKLTDDSVITYIQQSIGTWNGPSKPAALDGLTVLELTGADRTGLISEVFAVLADMSCSVVDARAWSHRGRLACLVYLRHEDVCAASVERIEVRLAPLLRGDSEASGGAXAAVSAGSIAHAERGLHHLM

SEQ ID NO: 330528 - protein, 70 aa, Zea mays
  Clone ID: MRT4577_64542C.1.pep
LVMKRLCLWCSVLWLSVLCVCVVWDAVVVFQSLFVVSVPLAELVGFLLIFASLVFRVGVLEHCVFLFPIN

SEQ ID NO: 330529 - protein, 54 aa, Zea mays
  Clone ID: MRT4577_64543C.1.pep
YLPKTIFIGVSGGGPPSHKKKAPFGIFLVLKLSRHKTFYKTNICLLVLGTTHFQ

SEQ ID NO: 330530 - protein, 54 aa, Zea mays
  Clone ID: MRT4577_64544C.1.pep
KAPFNLPSQDPGKTCLVNHLPFLLSPKKDLFEVSIIGCKTSAPPMLSVCCTRNA

SEQ ID NO: 330531 - protein, 36 aa, Zea mays
  Clone ID: MRT4577_64545C.1.pep
ATSIVFNSMNSTSMTLNSLRFHPVTLPVVGLARTTT

SEQ ID NO: 330532 - protein, 174 aa, Zea mays
  Clone ID: MRT4577_64546C.1.pep
MGNQQSGLLDNIASGSNFDREEVDRLRKRFMKLDKDNSGTIERDEFLALPQISSNPLATRMIAIFDEDGGGDVDFQEFVSGLSAFSSKGNKEEKLRFAFRVYDIDRDGFISNGELFIVLKMMVGSNLKDQQLQQIVDKTIMEADLDRDGKISFEEFTKMVENTDVSMSMTLDQF

SEQ ID NO: 330533 - protein, 74 aa, Zea mays
  unsure (1)..(74): unsure at all Xaa locations
  Clone ID: MRT4577_64547C.1.pep
CPLLLISDDTTVXASCAHRFPRCFRLPSRPFAVAKCHSSKEISVPSFYKHHRTRRRNRNMTNERASKKSLLRKD

SEQ ID NO: 330534 - protein, 85 aa, Zea mays
  Clone ID: MRT4577_64548C.1.pep
KKKKKKKKKKKGKKKKKEKKKTQKKKERKKTSKEKPKKKKKERSITTKKLREGGASPKEKGRKQRPRKEEGFKGKRMAPLALPKD

SEQ ID NO: 330535 - protein, 275 aa, Zea mays
  Clone ID: MRT4577_64549C.1.pep
MALALPLARLVPACQCQPWPHLRFRKRHVSFAAHASSRAAFAACAAAPALQVQAPEAEAEAETVEQVGPKTRLVAQNIPWDCTADEMRALFESHGSVVGVELSMYSANKNRGLAFVTMGSEEEALAALTHLNSTILNDRKIKVDFARPRKKQPKQPAVVSDATEKYVVFVGNLTWRVRNRHLRELFASAPGVVSAEVIFHTTTPRRSAGYAFVSFSSKESAGAAISAFNGKILMGRPINVMFKDENGEKNEPSSVPKKAEVEPSDDQSDKLSMNC

SEQ ID NO: 330536 - protein, 307 aa, Zea mays
  unsure (1)..(307): unsure at all Xaa locations
  Clone ID: MRT4577_6454C.1.pep
MANAGGGAAGEGEWLKVAQLRALVQEDHRAKEVDNLTLRRFLRARGHNVDKAAAMLLKFLRWRAEAAPGGGTVREEQVRGELEQDKIYMGGVDRTGRPIIVGLLAKHYSANRDMAEFKSTSTTWPSFCXSIKKMRVYVRAEVFFLISWPLSACVCVPSLSCSCAGFVVYFFDKICARIPRGQEKFLAIMDLKGWGYANFDVRAYIAAIEIMQNYYPERLGKALMINVPYIFLKVWKTMIYPFIDANTRDKVMSMSCHAAXFVFVDDKSLRETLRREIDESQLPEFLGGKMPLVSLKDYAQQPQPVCE

SEQ ID NO: 330537 - protein, 165 aa, Zea mays
  Clone ID: MRT4577_64550C.1.pep
MDALTRLHRSLVGGDDEDQPEDSILADTEDLCSLSPLQRIYAFAACLVAGLTLMILSFIVFARPIKFAVMFTFGNILAVGSTAFVMGPQKQLRMMFDPVRLYATAVYVGCVVLALIFALWIHDKLLTLIAVICEICALFWYSLSYIPLARRMVSDLMVKFCDTEL

SEQ ID NO: 330538 - protein, 74 aa, Zea mays
  Clone ID: MRT4577_64551C.1.pep
RAHLQEQNLPPTFLLKRQLLQTSFPGHATSLLTCSGECFKTPYRKETPTTNTGMRCCLTVLPSYSSSIIYFILD

SEQ ID NO: 330539 - protein, 76 aa, Zea mays
  Clone ID: MRT4577_64552C.1.pep
SAVQAIVSHVLGGAESILRGRDSVVVNGPFVGRIKTKGFELAVGQRSNQSERCGHPIGPPWFATGRRREKSSTRQY

SEQ ID NO: 330540 - protein, 64 aa, Zea mays
  Clone ID: MRT4577_64553C.1.pep
LHVCNTAIHRTHNVNSVSVPFQPNLIVYPSLTRPNKMYWLQFLCCDKPSKQKKTPKNKKRRPPM

SEQ ID NO: 330541 - protein, 84 aa, Zea mays
  unsure (1)..(84): unsure at all Xaa locations
  Clone ID: MRT4577_64554C.1.pep
LILNHKTKEIFKTFFPSPYXPXPLYYILSPSHYYLSIFFHQIHLKFHFLYPTLNTFQPFKTPLLSPILTNFTSNHPSFPTILPP

SEQ ID NO: 330542 - protein, 86 aa, Zea mays
  unsure (1)..(86): unsure at all Xaa locations
  Clone ID: MRT4577_64555C.1.pep
SHGLICEPQVYCRKLSEKDEFLVLATDGIWDVLPNMEVVKSMISAPDXSKAARQLIYRSVXAWRLMLSTCMEDDCSAMCLHLNRWA

SEQ ID NO: 330543 - protein, 47 aa, Zea mays
  Clone ID: MRT4577_64556C.1.pep
TGAGIDLPEKKSAAHHALGGDYLRQWPASNAHQLHRRLHRPGARRHP

SEQ ID NO: 330544 - protein, 88 aa, Zea mays
  Clone ID: MRT4577_64557C.1.pep
AILIHSLQCREIVLGPQQCRSPDPSGAALSARLSTHAPGWSCPRRCRHSTGTGAHIRGPYRSPCQRASKSRLIMQANEQMLRDRRVQV

SEQ ID NO: 330545 - protein, 75 aa, Zea mays
  Clone ID: MRT4577_64558C.1.pep
SLDDVLDPDNAADLLTGFIRHIKHNARLQAEAEPTREHRQDQLDATTPGPSEPAGSVALGYQHRGRGDPRERHVA

SEQ ID NO: 330546 - protein, 90 aa, Zea mays
  unsure (1)..(90): unsure at all Xaa locations
  Clone ID: MRT4577_64559C.1.pep
GQEXIXLRHYXXAXXGXXXXSYPGTDRXPHHKXXSVXGFXFWWPNXFAWFVSALXTLXXDSFILRREXXQWXXSRXRAXXRVXXCIKXXD

SEQ ID NO: 330547 - protein, 248 aa, Zea mays
  unsure (1)..(248): unsure at all Xaa locations
  Clone ID: MRT4577_6455C.1.pep
AAMLLKFLRWRAEAAPAGATVREEQVRGELEQDKIYMGGVDRTGRPXIIVGLLAKHYSANRDMAEFKSTSTTWPFFLHQSKCVCTVRTCGGFLSYFLAVERVRVCVXSLSCSCCAGFVVYFFDKICARIPRGQEKFLAIMDLKGWGYANCDVRAYIAAIEIMQNYYPERLGKALMINVPYIFLKVWKTMIYPFIDANTRDKFVFVDDKSLRETLRREIDESQLPEFLGGKMPLVSLKDYAQQPQPVCE

SEQ ID NO: 330548 - protein, 245 aa, Zea mays
  Clone ID: MRT4577_64560C.1.pep
MASVQLSGPRVVAAAKPAALGGLLLTPSLAVPKGRRARGLVVRAATVVSPKYTSIKPLGDRVLVKIKTSEAKSDGGILLPVSVQTRPQGGEIVAVGEGRSFGSNRIEISVPVGAQVVYSKYAGTELKFNDADHLILKEDDIIGILDSDDVKDMKPLNDRILIKVAEAEEQTAGGLLLTQATKEKPSVGSVVAVGPGPLAEDGSRNPLSITPGSNVMYSKYAGSEFKGEDGEYIVLRASDVMAVLS

SEQ ID NO: 330549 - protein, 245 aa, Zea mays
  Clone ID: MRT4577_64561C.1.pep
MASVQLSGPRVVAAAKPAALGGLLLTPSLAVPKGRRARGLVVRAATVVSPKYTSIKPLGDRVLVKIKTSEAKSDGGILLPVSVQTRPQGGEIVAVGEGRSFGSNRIEISVPVGAQVVYSKYAGTELKFNDADHLILKEDDIIGILDSDDVKDMKPLNDRILIKVAEAEERTAGGLLLTQATKEKPSVGSVVAVGPGPLGEDGSRNPLSITPGSNVMYSKYAGSEFKGEDGEYIVLRASDVMAVLS

SEQ ID NO: 330550 - protein, 82 aa, Zea mays
  Clone ID: MRT4577_64562C.1.pep
PPRGPAPEYIPGSTRSLFGRRPFFFFFSATTNTPLALNLPLNFLRNRSYATPSLPYYTTERMATFLTFPTLRTLSDNYRLTG

SEQ ID NO: 330551 - protein, 52 aa, Zea mays
  Clone ID: MRT4577_64563C.1.pep
QISWLSGREIIRSLGTVASVEYVGRGDLRRLPSPIYNHLHKDGEDANSTIRS

SEQ ID NO: 330552 - protein, 80 aa, Zea mays
  Clone ID: MRT4577_64564C.1.pep
KVFEFATCVCNSRPALSRRPPTPPGTVDSRLELNLEDLAACGGTNCFGTLTCERSSFFYRRLPEPRLRLTIQKLDDSFLN

SEQ ID NO: 330553 - protein, 104 aa, Zea mays
  Clone ID: MRT4577_64565C.1.pep
AWKPRSTTFSRSIYVKKWSQPSCSTSPMSLCSGRRPLIILAMVKGCPFLFKTGRIFRLLTGQKISPVLKIYVEPPTLAKMTMGLRPQHFAMELVAQLFRLPSLT

SEQ ID NO: 330554 - protein, 81 aa, Zea mays
  Clone ID: MRT4577_64566C.1.pep
CSFPSTGATATVIVPWRSALAVHRGPNPNAARNQCWRHRSNSSALDNGGQDISEKGWLGFIRLLGSKSRGAGPQAISTVGE

SEQ ID NO: 330555 - protein, 80 aa, Zea mays
  Clone ID: MRT4577_64567C.1.pep
MFSLGLLIGTFRYGSPPHVDERHRHRYEVNPSFVPMLESAGLHFVGCDESRNRMEIVELQDHPFYEGAFFCLSPPPPPGR

SEQ ID NO: 330556 - protein, 96 aa, Zea mays
  unsure (1)..(96): unsure at all Xaa locations
  Clone ID: MRT4577_64569C.1.pep
PDWIEMFDDLLLQTEKKATDLLELMRNEAFKNSQVTQTKGPSGPRPLXRKPTKKDVVDLRTILIHCAQAVAADDRMTANELLKHIMHHSKPNGVGT

SEQ ID NO: 330557 - protein, 60 aa, Zea mays
  Clone ID: MRT4577_6456C.1.pep
DPTHACGPTPHHTASLRPTQNPTPPGGSLISHCVTTPLHHSIPLTPDQALYPHANHSVHR

SEQ ID NO: 330558 - protein, 68 aa, Zea mays
  Clone ID: MRT4577_64570C.1.pep
GNLKFRFLFPRVLPFPGFRSLKRAPSLDPFFFFFFFPQNLSPNFFKFLNKAPFFFYTCVGFQGAIFLE

SEQ ID NO: 330559 - protein, 130 aa, Zea mays
  Clone ID: MRT4577_64571C.1.pep
PAPPPQLFPFPLCSRPPFLPPPPFFSIVLPFNVSPLSGNKGFGPVPLVPSGHKVPFFRLSLKVAEICCSLVFVLGPVTFFFPVCLRQPLMEWSSWLLFCPSHGPVFLPEFFLGQFFTLLFWRPQIVHKKT

SEQ ID NO: 330560 - protein, 104 aa, Zea mays
  Clone ID: MRT4577_64572C.1.pep
MDDEDVVRRTRFSHSVVRSNSGREQFGAFVEQFNRGAALRQKGSASGFKLHGLNMEPGTRLSTSSLSTTGLFCAQLKPKPKDMSSRVPAVQSVEVESPGALSRA

SEQ ID NO: 330561 - protein, 79 aa, Zea mays
  unsure (1)..(79): unsure at all Xaa locations
  Clone ID: MRT4577_64573C.1.pep
RPRKLEKEVPNFLKKXGNAGMANMVPTKPXVVKTYXKIPLIGRLHVPDMRQTVASGVIKSVEKKHPTAPKVTKAAAKKK

SEQ ID NO: 330562 - protein, 78 aa, Zea mays
  unsure (1)..(78): unsure at all Xaa locations
  Clone ID: MRT4577_64574C.1.pep
MFLLIRLPVFAKLTLNGVLLESCAHKKKKKKKKKKKKKKKKKKTQXKKKKKKHKRKKKITSIISKNSNSNATQIKQLV

SEQ ID NO: 330563 - protein, 176 aa, Zea mays
  Clone ID: MRT4577_64575C.1.pep
AGTRQLVINTETLRRIKYIDFITHAHHKPYNRNKKFSHSVVRSNSGREQFGAFVEQFNRGAALWQKGSASGFKLYGLNMEPGTRLSTSSLPTTGSFCAQLKPKPKDMSSRVPAVQSVEVESLGALEFSFHPDEQSLKLQRACSSPAPSPLPRLDLERRRTADEGGEREIPAGLEVP

SEQ ID NO: 330564 - protein, 290 aa, Zea mays
  unsure (1)..(290): unsure at all Xaa locations
  Clone ID: MRT4577_64576C.1.pep
MDDEDYSWVRRTRFSHSVVRSNSGREQFGAFVEQFNRGAALRQKGSASGFKLHGLNMEPGTRLSTSSLPTTSSFCAQPKPKPKDMSSSDAKPGQHAKAVSDRPSSQEASARKEDDAKXKRKERNWQTQRGRTSGTRGSEXAEVESPGALEFSFHPDEQSLKLQRACSSPAPFPRKKTPGDDALTRSSSLSVLGEAPKTKQRARSPLPSRHVAEVFQELQSATKRPSTPPLPRRSASSLAMNECPPAPLLQRAPGKLMNRKEXHANXGRMKVAATALEVLEKWSVDRSQLL

SEQ ID NO: 330565 - protein, 236 aa, Zea mays
  unsure (1)..(236): unsure at all Xaa locations
  Clone ID: MRT4577_64577C.1.pep
RGPPGSFFFFFFLSGTRQLVINTETLRRIKYIDFITHAHHKPYNRNKKFSHSVVRSNSGREQFGAFVEQFNRGAALWQKGSASGFKLYGLNMEPGTRLSTSSLPTTGSFCAQLKPKPKDMSSSDAKPGQHERQSAXPSSQEASARQEDDAKXKRKERNRQNQRGRTSGTSGSERXEVESLGALEFSFHPDEQSLKLQRACSSPAPSPLPRLDLERRRTADEGGEREIREVGTRERK

SEQ ID NO: 330566 - protein, 51 aa, Zea mays
  Clone ID: MRT4577_64578C.1.pep
SPEERFANVLTPFFLYFFFVNIVGSSVFCWVLFGGPPCPLLKNYLSNITLH

SEQ ID NO: 330567 - protein, 52 aa, Zea mays
  Clone ID: MRT4577_64579C.1.pep
AAVASVYNEITDRHDVRLNQLVLGRLYRIHSGVCTRDRITMHRSLCTNMSVF

SEQ ID NO: 330568 - protein, 117 aa, Zea mays
  unsure (1)..(117): unsure at all Xaa locations
  Clone ID: MRT4577_6457C.1.pep
SARDLLHQILYHRPTNASPRACLTHSRHQNPASARLLNAHRQMAQDRXLQHARTTVHLIRTKRLXTNSKKAALEHASGHGELTNEAIVKSTRNEHEKEHHYLEKKLETFANTLAYLE

SEQ ID NO: 330569 - protein, 139 aa, Zea mays
  unsure (1)..(139): unsure at all Xaa locations
  Clone ID: MRT4577_64580C.1.pep
MVVKGGKGLFAANTTECKSAEKDEGKKXPISHSSRDGLQFPVGRIHRQLKKRTQENGPDVATVPVYSAAILEYLTAEVLEXMDGNASKDLKVNRITPXRHLQLGIPADNDMNTLIKSTIEXGGAIPNIHKLLIDKTSKE

SEQ ID NO: 330570 - protein, 128 aa, Zea mays
  unsure (1)..(128): unsure at all Xaa locations
  Clone ID: MRT4577_64581C.1.pep
HYXXTXTSHGRVLKRLSSTSSGLGLCLFFFVFGFGGFCGKGNNFPSYIISNRVDECMGVHPPKYHINRIKKWDTCKIYIFHRGGAHQTETIKHNLRGGLSHWTFFKGTFSKKHILSGVYQMGTNTSNV

SEQ ID NO: 330571 - protein, 104 aa, Zea mays
  Clone ID: MRT4577_64582C.1.pep
FSTNAIKRGNRGHCLAIQRTVPTHAQTQKKGGTLIWFGLHGGNKPLEQFSPGSQPLTPHGKPLNGWSPRGFYLPTAGSGILRSMVKEIGPIQNRTGVADAWVRP

SEQ ID NO: 330572 - protein, 31 aa, Zea mays
  Clone ID: MRT4577_64583C.1.pep
MAPKAGKAKPKARGDRKKKEEKGAALNLLVL

SEQ ID NO: 330573 - protein, 122 aa, Zea mays
  Clone ID: MRT4577_64584C.1.pep
MGNCCLERPRRGGSGSAGSVHYARTNPVWVEDRREEACKGEGAGHAPAAATEMKIRITRKQLEELLRRVEDGKHGGGCGVPVQDVISELLCVASTSSNFRHREEGQWRPVAADHTRVRRTVV

SEQ ID NO: 330574 - protein, 177 aa, Zea mays
  Clone ID: MRT4577_64585C.1.pep
MVAGMEAEEGVMATDFFWSYTDEPHASRRREILAKYPQIKELFGPDPWAFLKIGLVVSLQLWTATFLRDASWLKLLTVSYFFGSFLNHNLFLAIHELSHNLAFATPSLNRWLGIFANLPIGVPMSITFQKYHLEHHRFQGVDGVDMDIPSQAEARAVRSAAGKSAWVVLQLFFYALR

SEQ ID NO: 330575 - protein, 743 aa, Zea mays
  unsure (1)..(743): unsure at all Xaa locations
  Clone ID: MRT4577_64586C.1.pep
MSVLNSLGILLLLTAPAFAAALSADGLSLLAFKSAVTDDPSMALSSWSDADADPCRWLGVTCVNSSSSDGLRVVGVAVAGKNLSGYIPAELGSLAFLRRLNLHGNRLSGTVPAALANATALHSLFLYDNRLTGPFPAALCGIPKLQNLDLSQNALTGALPLELGRCKQLERLLLAENALSGNIPAAVWQDMVGLQMLDLSSNNLTGAIPAELGKLAALAGTLNLSHNHLSGGVPLELGRLPATVTLDLRFNNLSGEIPQSGSLASQGPTAFLNNPGICGFPLQVPCRVAPPSSSSLPPPPPSSSATTNGGAGGARLPIKTSLIVLISVADAVAVALVGVIVVCVYWKVCDRRRAAXTKATTASTRKGAACSLARAACAPTXGDSSSECSEVDGKCNGGGGTGEGGYLVAIDKGFRMELDELLRSSAYVLGKGGKGIVYKVVVGNGTTPVAVRRLGGGTAAPERYREFAAEAGAIGRVRHPNIVRLRAYYWSADEKLVITDFVNNGNLATALRGRSGQPSLSWTLRLRIAKGAARGLAHLHECSPRRFVHGEVKPSNILLDADYNALVADFGLARLLTIVGCTDVYSVAGSGGIMGSGLPYARPAALTDRSCSAYRAPEARAPGGAQPPSQKSDVYSFGVLLLELLTGKPPEHASPSASSSSMPGHNGQRELEQQAPELVRWVRQGFEGSRPLSELADAALLRDAAARKEVVAAFHLSLRCVEADPERRPRMKAVSDSLDKIGA

SEQ ID NO: 330576 - protein, 75 aa, Zea mays
  unsure (1)..(75): unsure at all Xaa locations
  Clone ID: MRT4577_64587C.1.pep
KLNGERALAELSREENVYMAKLAXQAERYEEMAEFMEKVAKTVDSEELTVEERNLLSAAYKNVIGARRALWRIIF

SEQ ID NO: 330577 - protein, 73 aa, Zea mays
  Clone ID: MRT4577_64588C.1.pep
QPLCQILEKFVSQCWESPVATPLPDFKKICFPTRVFGFRKNPARFAPVYPVFVELGWGPITPFVWLLAKTCSN

SEQ ID NO: 330578 - protein, 58 aa, Zea mays
  Clone ID: MRT4577_64589C.1.pep
VFVFVLGNNPNKSFFSPSGGPLPVRNIVGGFFLRYWPPSRINDPFFGPVVSPPRGRSF

SEQ ID NO: 330579 - protein, 164 aa, Zea mays
  unsure (1)..(164): unsure at all Xaa locations
  Clone ID: MRT4577_6458C.1.pep
MADGEDIHPIVXYNGTGLVKAGFAGDDAPRASIPIIDGRPNHTGVIVEIGHKDSYVADDAQTTRGIITLKYPIDHGIGSNCDDMPKIRHHTFYNELRVAPDEHPVLLTEAPLNPXGQQXKMTQTIXETFNVPAMYVAIQAALSLYARGRTTGIEPHSRDGASHT

SEQ ID NO: 330580 - protein, 99 aa, Zea mays
  Clone ID: MRT4577_64590C.1.pep
KKHRRRNWTTSMVKGAPSKRLHKKHSCSYIERQHFFKKANGLPNHLRAKVGAKKSGLIFLLWGDGLNQKFGPKHPLFFLGAGNPPRTTPVQAGEPLVAK

SEQ ID NO: 330581 - protein, 141 aa, Zea mays
  unsure (1)..(141): unsure at all Xaa locations
  Clone ID: MRT4577_64591C.1.pep
SFYFIRLIKFNIVIFLYPXAFSLCCSILKMWSIYYASMKVLPLKVKXKSYXVYYGSDXNIMEYYISSMPLLSLRGTSTDVEQQFINNTVYFQKMWSNVPEIQSRCKLVVKQIRDDVKVFINXRPLCPNEYVSIGDIAXHVG

SEQ ID NO: 330582 - protein, 379 aa, Zea mays
  Clone ID: MRT4577_64592C.1.pep
MRFFKGSKVEVLQEAEVPFGSWRPGEIISGNGHTYLVRYDESPVDSSVAVERMPRRLIRPSPPTDDPVRWSLGSILEAFDSYSWKVAEVVRVLKKNQYLVRLLGSSLELSAHASDLRLRKLWLDDRWIVTQKYSARCLDGAFRGQSEDGNLDCNLRKDSHIQLENRNAFEGDTSRGMKRKSSAISTHPHCSVISKRLQCSDATKRFWTLNRDGRHTKLVDRGFFPLAEKVDAVDSPCLMLRGKYMHASHKGHTRTTEEFSDTESTSSSVGSSSPNSTPHRSQYYNLVNQSGDICSRTDGDEAFTSERETSEHGNNGSRGETHLLELHAYRATMLALYACGSISWEQEALLTNLRLTLNISTDEHLAELRSLVTHAVTSR

SEQ ID NO: 330583 - protein, 103 aa, Zea mays
  Clone ID: MRT4577_64593C.1.pep
MCYDHRSSMEPEPDRCRRTDGKKWRCSRGVMPGHKYCERHVHRGRGRARKPVEAAPATSAIPIRAMHAADAQGATSAHAAPPQRLGFSSPAGVYLAHGTARGT

SEQ ID NO: 330584 - protein, 63 aa, Zea mays
  unsure (1)..(63): unsure at all Xaa locations
  Clone ID: MRT4577_64594C.1.pep
RPPFNXFFXSLFFSGWLHEYQGGFNKHPNLVLCPIPLTTQAGSKNITQKLLRMTLQNRTIPNF

SEQ ID NO: 330585 - protein, 60 aa, Zea mays
  Clone ID: MRT4577_64595C.1.pep
CAVLCTYYEVTSIHRFKNLVLRMWKTLSSPLWRTSTSSSTQTYTSLRSMSMITRRDTSTT

SEQ ID NO: 330586 - protein, 124 aa, Zea mays
  unsure (1)..(124): unsure at all Xaa locations
  Clone ID: MRT4577_64596C.1.pep
PPPFKKAPKTLFVQSLLGLKKPPVVFPCRKGGLPPVDLVLEFPRNGFANKPKVFPPXIGVDRQIFLPFAPRHFQAPGPSCSGGVVLPSPNGKIVFETPLGVKLRGVFKKKLPNFCQTPFGQGGG

SEQ ID NO: 330587 - protein, 849 aa, Zea mays
  Clone ID: MRT4577_64597C.1.pep
FLRPEVAGRTLADCRGLRTLNLSGNHLVGPFPPDVAALTSLAALNLSNNNFSSDLPADAFTELQQLKVVALSFNHFNGSIPDSLAALPELDVLDLSSNTFSGTIPSSICQGPNSSLRMLYLQNNYLSGAIPESISNCTRLESLDLSLNNINGTLPASLGKLRELRDLILWQNLLEGEIPASLENLVRLEHLILDYNGLTGGIPRELSKCKELNWISLASNQLSGPIPAWLGQLSNLAILKLSNNSFSGPIPAELGNCQSLVWLDLNSNQLNGSIPAELAKQSGKMNIGLVIGRPYVYLRNDELSSECHGKGSLLEFTSIRPEELSRMPSKELCNFTRVYMGSTEYTFNKNGSMIFLDLSFNQLDSEIPKELGNMYYLMILNLGHNLLSGVIPPELAGAKKLAVLDLSHNQLEGPIPNSFSTLSLSEINPSNNQLNGSIPELGSLFTFPKISYENNSGLCGFPLLPCGHNAGSSSSDGHRSHRNQASLAGSVAMGLLFSLFCIVGIVIIAVECKKRKQINEEASTSRDIYIDSRSHSGTMNSNWRLSGGFGDVYKAQLKDGKVVAIKKLIHVSGQGDREFTAEMETIGRIKHRNLVPLLGYCKCGEERLLVYDYMRFGSLEDVLHDRKKIGIKLNWAARKKIAIGAARGLAYLHHNCIPHIIHRDMKSSNVLIDEQLEARVSDFGMARMMSVVDTHLSVSTLAGTPGYVPPEYYQSFRCTTKGDVYSYGVVLLELLTGKPPTDSTDFGEDNNLVGWVKQHSKSRLTDLFDPELLVEDPALELELLEHLKIACACLDDRPSKRPTMLKVMAMFKEMQASSTVDSKTSACTDDACFADVEMTTLKEDKEEKD

SEQ ID NO: 330588 - protein, 629 aa, Zea mays
  Clone ID: MRT4577_64598C.1.pep
LDLNSNQLKGSIPAELAKQSGKMNVGLVLGRPYVYLRNDELSSECHGKGSLLEFTSIRPEELSRMPSKKLCNFTRVYMGSTEYTFNKNGSMIFLDLSFNQLDSEIPKELGNMYYLMIMNLGHNLLSGVIPPELAGAKKLAVLDLSHNQLQGPIPNSFSTLSLSEINLSNNQLNGSIPELGSLFTFPRISYENNSGLCGFPLLPCGHNAGSSSSGDHRSHRTQASLAGSVAMGLLFSLFCIVGIVIIAVECKKRKQINEEASTSRDIYIDSRSHSGTMNSNWRLSGTNALSVNLAAFEKRLQKLTFNDLIVATNGFHNDSLVGSGGFGDVYKAQLKDGKVVAIKKLIHVSGQGDREFTAEMETIGRIKHRNLVPLLGYCKCGEERLLVYDYMRFGSLEDVLHDRKKIGIKLNWAARKKIAIGAARGLAYLHHNCIPHIIHRDMKSSNVLIDEQLEARVSDFGMARMMSVVDTHLSVSTLAGTPGYVPPEYYQSFRCTTKGDVYSYGVVLLELLTGKPPTDSTDFGEDNNLVGWVKQHSKSKLADLFDPVLLVEDPALELELLEHLKIACACLDDRPSKRPTMLKVMAMFKEMQASSAVDSKTSACTVAVDDACFGDVEMTTLKEDKEEKD

SEQ ID NO: 330589 - protein, 242 aa, Zea mays
  unsure (1)..(242): unsure at all Xaa locations
  Clone ID: MRT4577_64599C.1.pep
RPSGIGQTVVTGNRSVVDGWTTFQSATFAMVGQGFVAVNMTFRNTAGPAKHQAVAFRSGADLSAYYGCSFEAYQDTLYTHSLRQFYRGCDIYGTVDYVFGNAAVVFQGCTFYSRLPMQGQCNTVTAQGRSDPNQNTGTSIQGCSLVAAPELAANTAFTTLSYLGRPWKNFSRTVVMESYVGALVDPSGWMPWSXDFALSTLYYAEYNNTXPGADTSRRVAWPGFHVLGDGTDARNFTVSSMV

SEQ ID NO: 330590 - protein, 37 aa, Zea mays
  Clone ID: MRT4577_6459C.1.pep
VIAVLYTFNVHWLSECLLRSGHLAQGTLSSCFPIKTP

SEQ ID NO: 330591 - protein, 301 aa, Zea mays
  Clone ID: MRT4577_645C.1.pep
MSRSRTVRIFWDDPDLTDSSGDDEGCGARRVGRMVRELAPAPAPAPAALPVPDQCNAGDGDRGRKAGVAGPGVCSGARRRVAKGAGGPASTKFRGVRRRPWGKFAAEIRDPWRGVRVWLGTFDTAEEAARVYDTAAVQLRGANATTNFAASAATNSGSGAGAGQDPATTPAAGYESGAESSPTSVLRKVPSLSSLAEDDSDAPAAERRSLAVLEEEELGEFVPFEDAPVYATSGFWDFEPDAGFLYAEPSSPEASWNAAAAVAEPASSDDAPSWAASPVQENDYFQDLRDLFPLNRLPAIF

SEQ ID NO: 330592 - protein, 82 aa, Zea mays
  Clone ID: MRT4577_64600C.1.pep
GALVAPVARNKATCSTVAAFPVDELHALVLSDSCGAHLSNSNIDLSALWEHSVRQHALLLSQSTTSSAKGAHGVEAAVVLTP

SEQ ID NO: 330593 - protein, 40 aa, Zea mays
  Clone ID: MRT4577_64601C.1.pep
QVRSITYDSIHSHLGFKSTQTRLHLQFVIAHSIDRTKGSP

SEQ ID NO: 330594 - protein, 60 aa, Zea mays
  Clone ID: MRT4577_64602C.1.pep
GYQRGEHKHQLTTPPGTGGRGDPTSHTAPTVPITCELPDAIQILCLTGSIEFRQAVRHIR

SEQ ID NO: 330595 - protein, 106 aa, Zea mays
  Clone ID: MRT4577_64603C.1.pep
VWHAACCVVQGQDDAGFSSNRLESVFLYAIYYLVIVSSTVQNKCWSSILNKGQGYLLLSFSLRYSSLVFVASLYMVLSRHFVCKQKRVGLLLQYYELLYLDHLSWI

SEQ ID NO: 330596 - protein, 72 aa, Zea mays
  unsure (1)..(72): unsure at all Xaa locations
  Clone ID: MRT4577_64604C.1.pep
RTRGPPFFFFFFFXXXFFFFWVGFFFWGWGFFFFFWEKYIFCLIACLLHWILAPGWVVTLLKNIPYSFFCRP

SEQ ID NO: 330597 - protein, 68 aa, Zea mays
  Clone ID: MRT4577_64605C.1.pep
MAAEAQPTRAAESDKAAQAKNIQDDFCSTLSEGKKRMNLVVSNDPCDIYRNATWCCTEGSSARASAPS

SEQ ID NO: 330598 - protein, 339 aa, Zea mays
  unsure (1)..(339): unsure at all Xaa locations
  Clone ID: MRT4577_64606C.1.pep
MCGGAILAELIPPTRRVASKPVTEGHLWSASSKKAGSGRDKRHQHEYADDDFEAAFEDFDDDFDVHEDDEDGHFVFSSKSALSPALHDGRAASQKKQRGRQFRGIRQRPWGKWAAEIRDPHKGTRVWLGTFSTAEDAARAYDVEARRLRGSKAKVNFPAASGRARGRARPRRGDDGNPRTAPETQHPAQPALLPRGERXRRGRKGSPPXPEATESFDVGGGLFFDMAFPTFPASPPPQAVDTSFAGSTATSETGSPAKRPRCDEDSSEGGSGSALELADELAFDPFVLLQMPYSGGYDDDSLDGLFAADEAVQQDVGNGMDGVRLWSFDEFPAVDGSVF

SEQ ID NO: 330599 - protein, 310 aa, Zea mays
  unsure (1)..(310): unsure at all Xaa locations
  Clone ID: MRT4577_64607C.1.pep
MCGGAILAELIPPTRRVASKPVTEGHLWSASSKKAGSGRDKRHQHEYADDDFEAAFEDFDDDFDVHEDDEDGHFVFSSKSALSPGNPFVRGCKCNNLHGQNVIXTRVHGFGFGSGHDDVGKNCMLDCXVISRERARXCIALHDGRAASQKKQRGRQFRGIRQRPWGKWAAEIRDPHKGTRVWLGTFSTAEDAARAYDVEARRLRGSKAKVNFPAASGRARARPRRGDXQPTNRAGTVAPXAAAAAAAQPALLPRGGRVRETQRKEGNAAVKPEATQSFDVGALFFNMAFPTFPASSPPQDVEASFLGSTA

SEQ ID NO: 330600 - protein, 96 aa, Zea mays
  Clone ID: MRT4577_64608C.1.pep
VTTTGWASPRLPASSSQGVRAPHRNRGESQSRRPLAQRPLPHTRSYTHAHCPGRPGSRRPKPDLLFCSVVFPSLGSPMLPACLSLHLFGGLQSTDL

SEQ ID NO: 330601 - protein, 136 aa, Zea mays
  Clone ID: MRT4577_64609C.1.pep
RFHPTETAGTADGPDLQCSVALCRRGQLRPSPFIDAAIALRCLVRRRRYFLGPCGADSLVPASKRVHAQHATRRGAGLRDAAEPSSSRQQCAVRLCWGSDRHGRHSAVLWGCTFFPVNIRFPSAWSPRALFSPYIY

SEQ ID NO: 330602 - protein, 67 aa, Zea mays
  Clone ID: MRT4577_6460C.1.pep
QYNICLHHIYSVEENEQYANFLGLPAQEVLSNLFHATTQGSQILTISIITFAFTINLTLSHVMEDVV

SEQ ID NO: 330603 - protein, 73 aa, Zea mays
  Clone ID: MRT4577_64610C.1.pep
SRTLARRLQQRQQGLIPLIEANPSVDAFLQHQQLLAYNQFSLMNPVLLRQQPIAGGAIFKITVFMYLPKSALY

SEQ ID NO: 330604 - protein, 511 aa, Zea mays
  Clone ID: MRT4577_64611C.1.pep
MAVKVWVFAVALMMCAGVGLGADDDDGSRLISRCRLSSPNYRGALAKAILFFEGQRSGRLPANQRVRWRGDSALTDGQPENVNLTGGYYDAGDNVKFGFPMAFSVTLLSWSAVEYRDEVAAAGQLRHLRSAIQWGADFLLRAHTTPTTLYTQVGDGNADHQCWERPEDMDTPRTLYKITRSSPGSEAAGEAAAALAAAYLVFRDDRDKTLATQLLAASRSLFDFANDYRGSYQMSCPFYCSYSGYQDELQWASAWLYRATKDSKYLDFLQNNQGGSATEFSWDNKYPGAQLLATQEYLAGRTELEGYKRGLDSFVCAVMPNSRNTQIRTTPGGLLFTRDSVNLQYTTTATLLLSIYAKALLASAAGAVQCSAATFSPDQISSFATSQVDYILGDNPRSASYMVGFSSKFPRRIHHRGSSIPSIKVLPRKVTCSEGFSSWFPTANPNPNVHVGAIVGGPDGNDQFGDNREDSTHSEPATYINAAFVGACAAALGRSQQVPVDDTASAHSDVM

SEQ ID NO: 330605 - protein, 522 aa, Zea mays
  Clone ID: MRT4577_64612C.1.pep
MAVKVWVFAVALMMCAGVGLGADDDDGSSSAGSMDAAGSRLISRCRLSSPNYRGALAKAILFFEGQRSGRLPANQRVRWRGDSALTDGQPENVNLTGGYYDAGDNVKFGFPMAFSVTLLSWSAVEYRDEVAAAGQLRHLRSAIQWGADFLLRAHTTPTTLYTQVGDGNADHQCWERPEDMDTPRTLYKITRSSPGSEAAGEAAAALAAAYLVFRDDRDKTLATQLLAASRSLFDFANDYRGSYQLSCPFYCSYSGYQDELQWASAWLYRATKDSKYLDFLQNNQGGRATEFSWDNKYPGAQLLATQEYLAGRTELEGYKRGLDSFVCAVMPNSGNTQIRTTPGGLLFTRDSVNLQYTTTATLLLSIYAKALLASAAGAVQCSAASFSPDQISSFATSQVDYILGDNPRSASYMVGFSSKFPRRIHHRGSSIPSIKVLPRKVTCSEGFSSWFPTANPNPNFHVGAIVGGPDGNDQFGDNREDSTHSEPATYINAAFVGACAAALGRSQQVPVDETASAHSDVM

SEQ ID NO: 330606 - protein, 94 aa, Zea mays
  Clone ID: MRT4577_64613C.1.pep
MDRKRRKGRPTATDGHGITLCPVRPAQLVRHLYQQTMASNGSDVVMMYGTRRWLEPSKQPKPATLSVKVSLAQMLRGMIDHGQGHPGASRIANS

SEQ ID NO: 330607 - protein, 149 aa, Zea mays
  unsure (1)..(149): unsure at all Xaa locations
  Clone ID: MRT4577_64614C.1.pep
RPVRKRVHAKKSITWLQLLILLIATRRILEDFNYHQXLKNGNRIDISGQGGWGGLTNGYSFQYKSLEEEIEQAFKNVEHVLSTVGASWKDVYSVTSYHVNFAETSERVCTIFPALFRQYIGERAPLWTCVGVTPLAIKEMNVEIVVSAI

SEQ ID NO: 330608 - protein, 91 aa, Zea mays
  Clone ID: MRT4577_64615C.1.pep
KMVDPGFYPKAGPPKVLLSGWFHKGQVEQVPAIFRSMQKKAKTLFSFLNPGRVNSDPGGGLQKNLCKSPPGWKFVKKLQGPVWLKKKKINF

SEQ ID NO: 330609 - protein, 129 aa, Zea mays
  Clone ID: MRT4577_64616C.1.pep
PSSSTYHNPTNPHSLLHWGGYLAGSSHRPKQLARGGQGAVTRARTRLLPSHPFYTGRDNGRDCMHAGSTYGRCCRVPTTAGPYLDSTNLLLIDIDSTLCYTLTNLSLPGNGHVGLDRQMFRRRPGSRDP

SEQ ID NO: 330610 - protein, 129 aa, Zea mays
  unsure (1)..(129): unsure at all Xaa locations
  Clone ID: MRT4577_64617C.1.pep
PRKQLSTKPARKSAPTTVGVXKPHRNRPVPVALREIRKYHKSTEVLIRKLPFQQVVREIAXQDFKTDLRFQSHTVLALQEAAEAYLVGLFEDASLCAIPPKRVTIMPKDIQFVQXIRHERGYPSSPRIL

SEQ ID NO: 330611 - protein, 150 aa, Zea mays
  Clone ID: MRT4577_64618C.1.pep
PGATPAPPPGPPPPGPPRGAPPPKKPLGRAAFLGPFFCPPGGKKGPPLFFPPKEKAPNLIPQKFQGGPQVKAHFHPVLLHIFSALGFPKIFWPILFFPPLLGVLWVGKFARVGKKAPLFQKNAPSSFFFKKKIALFFPPPGTLAPPFFFP

SEQ ID NO: 330612 - protein, 66 aa, Zea mays
  Clone ID: MRT4577_64619C.1.pep
IPFSMTCFHQGLCMSRKTTTTEITGRSHYQMSVRRVDTTETVVPYHLILKKPSRRTYLSLIFKHHN

SEQ ID NO: 330613 - protein, 71 aa, Zea mays
  Clone ID: MRT4577_6461C.1.pep
SKDRFFFWGVSDYDSLENIILGLPARGFHTSRTPQFFRQGGLPRRLRRPRGGFFPLPAWGGWSKFPPNHCK

SEQ ID NO: 330614 - protein, 66 aa, Zea mays
  Clone ID: MRT4577_64620C.1.pep
LPFFEFSHKVSRNCCRISRSRRCSQLLWVWDTFFGLVRLHLPLAPAVAAPQIRLPPIVAAWAFLRH

SEQ ID NO: 330615 - protein, 82 aa, Zea mays
  Clone ID: MRT4577_64621C.1.pep
LCGSYPNLTAVRLGRAARLLQERLSLNSSRFTAAAERRWPPLRAWTLPPKPLPPVFGPSRDAAMIVHSVGWVLKVTLLPQTN

SEQ ID NO: 330616 - protein, 37 aa, Zea mays
  Clone ID: MRT4577_64623C.1.pep
GSQLNILCNFSMRTVNPQPVPDGEPENLSGFLVAAPP

SEQ ID NO: 330617 - protein, 160 aa, Zea mays
  unsure (1)..(160): unsure at all Xaa locations
  Clone ID: MRT4577_64624C.1.pep
LTWQKTSRHRRPRRPSSRPRTTRDPCRTDVRSIRRGTSSPSASLDRACIVEIIATVLFLYITVGTVVGDKHHTDAAEYGPTXAECGGVIMLGINCVFAAMIFIIVYCTAVMSGDDVXPSVTFGLFLXRXVNLVCMLVYMSTKCRCGICVACLRTEYHSTK

SEQ ID NO: 330618 - protein, 145 aa, Zea mays
  Clone ID: MRT4577_64625C.1.pep
ASPQLPPPLPCAHYLTAPPNSKLNLSAPPSPYPDSPWILQKRKSRVLWRSESIGPPGWLRSCSYTNHSRYGPYVPAYFSLEPELDPLGFLCPRWKGYSSFPYLAGVSAVPQWGNYAPTNPLLSLPCLRLRPEPHYPWFVSNPLQM

SEQ ID NO: 330619 - protein, 127 aa, Zea mays
  Clone ID: MRT4577_64626C.1.pep
MSKNTRDTRFILRFGHTTKAPYFLIEAPTKSRVSFNPNPPFADHKGCFRFTGGLSRRLDRSQIRLSRTKIRLSRAKIRLNRLLIQLSRAKIRLNRFPKNLHTTFSDWQTGRSDSDKGEKCRNRLNRF

SEQ ID NO: 330620 - protein, 38 aa, Zea mays
  Clone ID: MRT4577_64627C.1.pep
FGSRASPPSFRTSEPRPTGGAVLPRLRNHKLRGLTNVL

SEQ ID NO: 330621 - protein, 92 aa, Zea mays
  Clone ID: MRT4577_64628C.1.pep
VNKVLELEPSNVFASPLEEVMNRSLFWHKSQLENNLLGHVWFDTFQAAHWPGSPKSEAWERCLSEAASVMSQPNSPLIRKWKQVGFSNQFGS

SEQ ID NO: 330622 - protein, 47 aa, Zea mays
  Clone ID: MRT4577_64629C.1.pep
LIFRGGVKVDNPNSLRKKMTQVKSLENKSQKLQDNFRWTSQLRRLSS

SEQ ID NO: 330623 - protein, 166 aa, Zea mays
  Clone ID: MRT4577_6462C.1.pep
MVISSSFSAASALSAAAAAFGAALVDFLCGPSCRRPQPPRRPSPASVSPVVHSSGTPERASHTAPRPRAACALEAWASPPPQQSPGSRPRSSQLPHAYSTGGGVSSGVAGTAAAGRVESTRTPEPTAAARVSSAPAPRLIASASAAASLQPHQLELGSDGTAEEAD

SEQ ID NO: 330624 - protein, 70 aa, Zea mays
  Clone ID: MRT4577_64630C.1.pep
GETTFFFCIHWCLEHLKERAKVHFFRRGLIAGKKKKILGRFFKIKFLSRGIKKFLKPVNINNTGTKSCLT

SEQ ID NO: 330625 - protein, 101 aa, Zea mays
  Clone ID: MRT4577_64631C.1.pep
FILVLFIILRSNELRRNVIAIYYQSPPIPAPLPLIFSPFAQAPTRATRRRHQVRGRNNPVRPYAQARPSYNHLVPSARALGCRAPSAGRRAMGSASPAPIR

SEQ ID NO: 330626 - protein, 178 aa, Zea mays
  unsure (1)..(178): unsure at all Xaa locations
  Clone ID: MRT4577_64632C.1.pep
MSSWSSPSSAAAASGARFGPFPSRTQRLVPYPSLARGTPASTLVLRPQPHPDGRGHGLLAHTGSSSSRCRAVAAEVEGLNIANHVSQLIGKTPMVYLNNVVKGSVANVAAKLEIMEPCCSVKDRIGYSMINDAEQKGLITPGKSVLVEATSGNTGIGLSFYAASXGYKVILTMPSSMS

SEQ ID NO: 330627 - protein, 397 aa, Zea mays
  Clone ID: MRT4577_64633C.1.pep
MASWSSPSAAAAASGARFGPFPSGGQRLAPCPSLVRGTPAPTLVLRPHPDGRGHGLLAHTGSSPSSRCRAVAAEVGGLNIANDVTQLIGNTPMVYLNNVVKGSVANVAAKLEIMEPCCSVKDRIGYSMINDAEQKGLITPGKSVLVEATSGNTGIGLAFIAASKGYKLILTMPSSMSMERRVLLRAFGAELVLTDAAKGMKGALDKATEILNKTPNSYMLQQFDNPANPKVHYETTGPEIWEDSKGKVDIFIGGIGTGGTISGAGRFLKEKNPGIKVIGIEPSESNILSGGKPGPHKIQGIGAGFVPRNLDSDILDEVIEISSDEAVETAKQLAVQEGLLVGISSGAAAAAAIKVAKRPENAGKLIVVVFPSFGERYLSSVLYQSIREECENMQPEP

SEQ ID NO: 330628 - protein, 32 aa, Zea mays
  Clone ID: MRT4577_64634C.1.pep
VTGELRDDLTCWDALRAALPVGTVSGAPKVTC

SEQ ID NO: 330629 - protein, 140 aa, Zea mays
  Clone ID: MRT4577_64635C.1.pep
DTKTRQKRKSPRVAGKAHNRAWVKITPTQVPHKITTQQVTNQQVTIPSTPGSESTAMFSDRLIVPDRQRGDLETGDRTCRPAAGAAAPGMEEGPMPPYPPSPVARRRHRHSVPLGFLRPQLVAWFVSCVPALLCWLFPGR

SEQ ID NO: 330630 - protein, 71 aa, Zea mays
  Clone ID: MRT4577_64636C.1.pep
MGIGEHFEGVALKYSKAPHGVLLATGFGAITGAVLGSEVADHWYQLYEMDKQGANLRFIYWWEDKVSGQKS

SEQ ID NO: 330631 - protein, 78 aa, Zea mays
  Clone ID: MRT4577_64637C.1.pep
NNKDGGPGCKKASQGTGISLVGCGGKHCYGDGISLGHPSAQPRMGYPFEDTGLSHPTTRAEKIRQRLDVETGTRPEQG

SEQ ID NO: 330632 - protein, 189 aa, Zea mays
  unsure (1)..(189): unsure at all Xaa locations
  Clone ID: MRT4577_64638C.1.pep
MDMGAVPPRRRRPRKASDPRTAAAAAYPHPKRMRLGEEHSSCCEDKISSLPDEMLILIIDKLDARTAISTTILSRRWRDLPTYPRTCYXDLAVDDLLPPRYHRLKQIMMEAKAGYKAEKNALKSDDSYASRDQLYSFKDWEXXVRLLTPILQRYERLGMRRYGKRGNGFLLPPNXQQRPIQKLRLQAWG

SEQ ID NO: 330633 - protein, 141 aa, Zea mays
  Clone ID: MRT4577_64639C.1.pep
MGIGEHFEGVKQHWASNFAFLDYFKKVYGRAEPLPKWSDADVDEFIASDPVYGPQLKALRESRKFALAGALVGAAHLGGVALKYSKAPHGVLLATGFGAITGAVLGSEVADHWYQLYEMDKQGANLRFIYWWEDKVSGQKS

SEQ ID NO: 330634 - protein, 73 aa, Zea mays
  Clone ID: MRT4577_6463C.1.pep
PLVLTGFWFLFYPPQALTTRGLPWTSGGAFRRLLYEDCQHVRPSAGGCFGCASSLAPLARRHFLLVQHHHLLL

SEQ ID NO: 330635 - protein, 225 aa, Zea mays
  unsure (1)..(225): unsure at all Xaa locations
  Clone ID: MRT4577_64640C.1.pep
MSESHGIDAMVQAPLAIILKSGRIGGNIQQYGPGKSACRSRDRSSPGQQANRRRHRTEWRLPPPFVTFQTRPQQPGATSEPAAAMGIGEHFEGVKQHWASNFAFLDYFKKVYGRAEPLPKWSDADVDEFIASDPVYGPQLKALRESRKFALAGALVGAAHLGGVALKYSKAPHGVLLATGFGAITGXVLGSEVADHWYQLYEMDKQGANLRFIYWWEDKVSGQKS

SEQ ID NO: 330636 - protein, 255 aa, Zea mays
  Clone ID: MRT4577_64641C.1.pep
MLVRYKKCTLKYRKDVPGKTEGLMSKSHGIDAMVQAPLAIILKSGRTRGNIQQYGRGKCPCSNSSFGCPVHGRHPFVHGLEHSPCLEGPAGVGGTLTFQTRPQQPGATSEPTAAMGIGEHFEGVKQHWASNFAFLDYFKKVYGRAEPLPKWSDADVDEFIASDPVYGPQLKALRESRKFALAGALVGAAHLGGVALKYSKAPHGVLLATGFGAITGAVLGSEVADHWYQLYEMDKQGANLRFIYWWEDKVSGQKS

SEQ ID NO: 330637 - protein, 70 aa, Zea mays
  Clone ID: MRT4577_64642C.1.pep
NGSNHRYIRLPSSKKNQCTTHDLQYTPLGFPQHKSARAWGSNISIDPLFLLQIHTCSLLLLDTLLRGGRS

SEQ ID NO: 330638 - protein, 84 aa, Zea mays
  Clone ID: MRT4577_64643C.1.pep
PRLPMQLSVAFGDSTQSTYARLFPLWEGTVRPGFPMTEPKLLLLTRQMCNAHYPLKEMGGGGISRSGGPRLAMGAMCIVLLSVP

SEQ ID NO: 330639 - protein, 88 aa, Zea mays
  Clone ID: MRT4577_64644C.1.pep
MATTKMAVVAILAALLLMAAVEPASATPPSMLAARKLQMPRLMDVVLAESKLACLPAGGFCMFRPMDCCGNCGCLYPAGVCYGTRCEE

SEQ ID NO: 330640 - protein, 61 aa, Zea mays
  Clone ID: MRT4577_64645C.1.pep
HTTSTQHHIFTLSSGSCCPSSHYTQYSNTPSRTHPTLDDIDGVSGERRSSSQETNLDIRIS

SEQ ID NO: 330641 - protein, 56 aa, Zea mays
  Clone ID: MRT4577_64646C.1.pep
AAPFFFFFFFFFFFFFNRNPRADGAQRGDFLTKPKNSLPRGIEPRTWRCYSEVLNH

SEQ ID NO: 330642 - protein, 65 aa, Zea mays
  Clone ID: MRT4577_64647C.1.pep
SISIATLGMFYICATTPNGRSHPGVCVYDTHVAYAPGTWSAAGPFAVYGCYVGRVLRTQFSLDYQ

SEQ ID NO: 330643 - protein, 114 aa, Zea mays
  Clone ID: MRT4577_64648C.1.pep
LGSANSWIQRFYLPRGWFAGQRSPESTGPKTGPNKIGWVTTKIWVGRHQKLQGVLGKRAIKQPRVTPKKTTDGLMQEQLKPGPLELPTQHGLSGPRWTIFSAIWMVPLPEGWGH

SEQ ID NO: 330644 - protein, 55 aa, Zea mays
  Clone ID: MRT4577_64649C.1.pep
FFVCSLPLPDRGATRRRAIRPIPTPTTPFCLLRPCRTATASSSSRTPSRIASTFI

SEQ ID NO: 330645 - protein, 122 aa, Zea mays
  unsure (1)..(122): unsure at all Xaa locations
  Clone ID: MRT4577_6464C.1.pep
GPRADLLGGHLTGKQFPPGTTXPGGPQALNPPPKGKVGPPAGPGPKSPGPPPRPXPGPYCGPPNGPPKTKSPGPKPGGFSKPETPPPYICMSKILALKRAPSLPNYKSGPFFYSLPLCSPPP

SEQ ID NO: 330646 - protein, 124 aa, Zea mays
  Clone ID: MRT4577_64650C.1.pep
MATSTAAATALLRPRPAVPAKLAQRRCLHAVAGWTTMRRRGAAGVVRAFFNPLGDERILREAIKEPVAFMGGVFAGLLRLDLNEDPLKEWISRTVEASGIAEENSSEESSEADQNDAPQQIEIE

SEQ ID NO: 330647 - protein, 69 aa, Zea mays
  unsure (1)..(69): unsure at all Xaa locations
  Clone ID: MRT4577_64651C.1.pep
LTAKXPNQLASIXFSRRRXXRREXPRQVXAASSNLXFNMXITSELVKXGLTLSLDYXXXFIXHLXSXXK

SEQ ID NO: 330648 - protein, 79 aa, Zea mays
  Clone ID: MRT4577_64652C.1.pep
HKELVSNEHSKVMAGAKSSSSLTHNQASNITINQVMVVATCRDTSVTYLSLSDSMCNEHDKNVSVMFLVSVPMQTKGVV

SEQ ID NO: 330649 - protein, 112 aa, Zea mays
  Clone ID: MRT4577_64653C.1.pep
MAKLFIGGLAWHTTDETLRSGFEKFGTIEEAIVIKDRDTNRSRGFGFVRFSTDAEADAAIEGMNNQDFDGRVIRVDRASNNASSRGNDGGLHGRGGYNRFEGGNNRGGYSGG

SEQ ID NO: 330650 - protein, 58 aa, Zea mays
  Clone ID: MRT4577_64654C.1.pep
TLPARAMLPKNVGLGGHVVECSTRYHRTRISRGKSLCCHADVTDSRSTDHSWLASLPI

SEQ ID NO: 330651 - protein, 78 aa, Zea mays
  Clone ID: MRT4577_64655C.1.pep
QNALLRAGFLWYVLPLLLQYDSTAEENEICEAHGVGARVQIAKNLHAVHATQALSKLSGLSNDDILYPDNKPAYNTLK

SEQ ID NO: 330652 - protein, 101 aa, Zea mays
  Clone ID: MRT4577_64656C.1.pep
RQAAPRICCSDARFWVSSGGVSTSPDELPVLSRGLVRSVGVSGLKKCGRVVMSRASPSGAVPHACRGCSLLCLVLVGSCSFCLSILTHGSLGMVLAWVFFG

SEQ ID NO: 330653 - protein, 92 aa, Zea mays
  unsure (1)..(92): unsure at all Xaa locations
  Clone ID: MRT4577_64657C.1.pep
MVKICCIAAVYAGTPTXMAVIALKCPDIEVGHADNNKPRIERCNRDTLPIYEPVLQHDDRQTKARNLWLSTDVEKHVGYAHNIFVSVNNPTR

SEQ ID NO: 330654 - protein, 79 aa, Zea mays
  Clone ID: MRT4577_64658C.1.pep
NVDTSIMNISPVWANYGTANWSHAMEDDWDLSTSDADGLSLDACINLVPGYTMLTKWSLINNTNLLSFQVAILICCGSC

SEQ ID NO: 330655 - protein, 51 aa, Zea mays
  Clone ID: MRT4577_64659C.1.pep
FSPLRRDICAYHAAHILSTNSVYSLSTTIILSVEKRYLYIFMLLKLTCHHS

SEQ ID NO: 330656 - protein, 470 aa, Zea mays
  unsure (1)..(470): unsure at all Xaa locations
  Clone ID: MRT4577_6465C.1.pep
MAKPEGPTIGVKLFVDKEKKKVLFAESDKEFVDVLFSFLTMPLGTIVRLLDKQSQMGCLDQLYKSVEDLNLEYFQTSACKAMLLKPLNAASGHCCRLKINVDGSFPRVVYVCKXVVQRTQXDNAFSSFPGTVCKCGKVMEFVGRCPKYDGDTETAAAACSEDGVFVIGCLKFIVTDDLQVAPASTSLMMSFFEKFGVLDPAVLEQQVLQFSSEKIKCLLKRLLTSKQPLTDHYFEALVPQDDASLEALVQNLHPKQENEDQEMPGNQKIRVLQTKDNSALLYDEVGVDFVDSLFGLLSIPLGSAIKLYCQCSAKGCLGNAYRSIDGSVKEFVREECQSLLLDPKVPPFFGCCASKILQVDELAPRELTMEACFVCFKSLWFSGCNRSHEFAYSLRCNEVFCANKVKSIKLCEANPKRQNGGSGQTNFVVKEIKLKVMELQRAVLVLSRNILSSVLLHPKKTKKLHHYRRM

SEQ ID NO: 330657 - protein, 68 aa, Zea mays
  Clone ID: MRT4577_64660C.1.pep
PSFTIQQIDNVFALFLHHALYSAVSAQELSHASSPAPSPEAGAADSVPCSAIMIGASLVLSLMAVFKF

SEQ ID NO: 330658 - protein, 100 aa, Zea mays
  Clone ID: MRT4577_64661C.1.pep
CFFRVRSSYFFCPVPAETCGSVLGRSLFVGRGPGLYHLSLFVRAASPFGDSPFSLQWGCLGVVVFGLPPFTFVLFFTYCSRVSWSWGFAYVCGSFFSGGV

SEQ ID NO: 330659 - protein, 83 aa, Zea mays
  unsure (1)..(83): unsure at all Xaa locations
  Clone ID: MRT4577_64662C.1.pep
ENPELASRTVDPHIIHACKGMGRWDSAMHDSXIMNSSRKTLIAEGSSIHLLHSSRGTFYRWENRRCLQSMSSDMSIQGTRTFL

SEQ ID NO: 330660 - protein, 141 aa, Zea mays
  Clone ID: MRT4577_64663C.1.pep
HLFCLPRPALLSPLAGAKVEHIYAPCLHCPRRTGEGQSIVPSPGVRIMAGRLGPAFPSYGVDVAAPTMALKGWLSSSYPSDQSLSNWVLLSNGTALVEKETLQTFTTLAGQEDTASGRSVELLTLMRRLASGCGSCMLGET

SEQ ID NO: 330661 - protein, 51 aa, Zea mays
  Clone ID: MRT4577_64664C.1.pep
KPIVSLISSKHITTTSEKLTFYINLTTISNIKLHHCHKSKEESGRAWVRPG

SEQ ID NO: 330662 - protein, 63 aa, Zea mays
  unsure (1)..(63): unsure at all Xaa locations
  Clone ID: MRT4577_64665C.1.pep
STTQAKRLLRQSXPLFNILSLXXXGGAAGGFXLIKXYINXKNNTIKNXSNPPIXHKLTXPNSS

SEQ ID NO: 330663 - protein, 143 aa, Zea mays
  unsure (1)..(143): unsure at all Xaa locations
  Clone ID: MRT4577_64666C.1.pep
LTNRSTGTGIICMSHGPTPMFFSLPPLIAASQPELACTRSAASPQSSSPAACCCCSHPSPQPPELLALSALSGLQFVRAELEGNNSLRSIPSTPSIHPAVLLPVPVPEMGKNGLVSIFSRLVDSAAPTFTSAAAAXTPWQWSA

SEQ ID NO: 330664 - protein, 45 aa, Zea mays
  Clone ID: MRT4577_64667C.1.pep
IVCAHWAGDAYSFLLLNPNTVCHMGDSIFMHYAVETLTMLEQHSI

SEQ ID NO: 330665 - protein, 468 aa, Zea mays
  Clone ID: MRT4577_64668C.1.pep
MDSDLLEGDAAAAAAARRSLVQWSGASTELSQRSRSKSKILEADGKGSRRGHARWLSADMTSNGSGMEVGKFSQDDVSRCPEKTVNLQDLQNSLIASKELVKVLAHIWGPGELNPSSVSLISALRSELDVARSHVRKLIKEKKSNPYEIEDLKKQLAEEMESWKVKQKEKVANALQFIVSELDTEKKSRKRAEKTNKKLSVALANTEASLQAVTKELERERKSKGRVEKICNELIRGIDEDKAEVEALKRETEKAQEELQKEREMLQLADEWREQRVQMKLLEARLQFEEKNAAVNQLRDELQAYLDTKKEQEPMNDPMQLSHASENGATAADDVVPDRNGGNFSEDDSSEGSDIHSIELNVDGVNRTYTWSYTPSSKGRQRSASRHESFSDRGMDGVNSWRLEQSFRGMDEELEGDWAEGCSNGILTMDHDEERYLAIKNLREQMLAGSGFILSQGRENAERECCGL

SEQ ID NO: 330666 - protein, 54 aa, Zea mays
  Clone ID: MRT4577_64669C.1.pep
RKNSGTTSPAGKLNFSGFQFSPVNPPKKKKKKKKKKKKKKKKKKKKKKKKKKKK

SEQ ID NO: 330667 - protein, 99 aa, Zea mays
  Clone ID: MRT4577_6466C.1.pep
GLKFKLLLYLVIYSLMGRGLTGTVSDLFFFTSHPYCQERERFCRCLPRRAGARTRALFAPAPFAPSTTPWPLSTARSRGPRGVPRFRRPPGGPFFGCRS

SEQ ID NO: 330668 - protein, 147 aa, Zea mays
  Clone ID: MRT4577_64670C.1.pep
LMEKILVWAQPIVACVNKELEKGRHRRTLPRPLDQTSWSSKDAGAAHALCALHRRRRPRLAQLPERPVSPVAATTAHRRRHRVWGALSLVRFGSAVSACPPALGALSFFGPRGAPSLVACHGGHRRSPQKSLPLARQSEMSPPLPGG

SEQ ID NO: 330669 - protein, 106 aa, Zea mays
  Clone ID: MRT4577_64671C.1.pep
TRVRQAAVGSDIDLARLRVQPSVLRSPSSRALASPSAPRDQPFSPQRPFAHVSRSGRRAWRRAKGAQRARASRSAAPRKSRARPVGPLAVPAHRVAVFCFFSFLGG

SEQ ID NO: 330670 - protein, 128 aa, Zea mays
  unsure (1)..(128): unsure at all Xaa locations
  Clone ID: MRT4577_64672C.1.pep
RTRGRTRGRALSSGTAGNITTGTTKLHTELEELVARFVGKPAAVVFGMGYVTNSATIPCLIGKVCNAHIYNTIARCLNYQLFFLSPFLRRLXGGLIISDSLNHNSXIVNGAGGSDAXVRVFRHNCKLL

SEQ ID NO: 330671 - protein, 365 aa, Zea mays
  Clone ID: MRT4577_64673C.1.pep
MMAACLEAKKPYLIALAIQIIGTGMFVISKAAFDDGMSTFVFIFYRMAAASLILVPTAIVHQRKNMRSMSWKLLLKLFLLALIGNTFSLNTYNLTLKLTSATVGSALANSVPVFTFCLVLVLRMETVNLRTAAGVAKAAGVALCVAGVLVLAFYAGPAMSPVNHHRAFAAPRQHAASTGGPPSRSRWITGTLLMVLANVTWALWIVLQSALLKEYPNRMLVTATQCVFSMMQSFVVAVVAERGDMSKWKLRCDITLVAVLYVGFVVTGLSHYLQAWCMELKGPVFLAMTNPLCFVFTIFSSSFFLGEIVHLGSILGGALLVAGLYSVHWGKLKEDRRSEAAEQEKTKPQEEPAAVAGVPSVLDQA

SEQ ID NO: 330672 - protein, 97 aa, Zea mays
  unsure (1)..(97): unsure at all Xaa locations
  Clone ID: MRT4577_64674C.1.pep
FXXVPLLRCSGFSXLLSXXXXXXVGRVPPVFLXPWFSXXXXXLVSFVSXXXXLXLSFXCRPPPPXCFSXAXXPSRFSXXLFSLSXSLXLLXXRRCLL

SEQ ID NO: 330673 - protein, 147 aa, Zea mays
  Clone ID: MRT4577_64675C.1.pep
SVKVTLVQTFSLPHDCIRRHYCQIHSQLPSVLAAGSVLYVDLSVFSTVNLLQIGIIWLLSVFDEGVKEIIECSHCLVSVGGVLHVVLVVLHFFFVVGAALFYEVHCLSKVWGGCICCSWGVMITGLTPLDGGNWRGARRYTERGTAG

SEQ ID NO: 330674 - protein, 78 aa, Zea mays
  unsure (1)..(78): unsure at all Xaa locations
  Clone ID: MRT4577_64677C.1.pep
RCPPPRCCSGPPPCASWCGSCRPRXSGXPPPRCAPXARXXRPPRRXGPPGPXXWSSPRXRRPRRRAAARRPGAGRPAA

SEQ ID NO: 330675 - protein, 86 aa, Zea mays
  unsure (1)..(86): unsure at all Xaa locations
  Clone ID: MRT4577_64678C.1.pep
MAETEVDLDSIIDRLLEVRGSRPGKQVQLLETEIRYLCTKAREIFISQPILLELEAPIKICGDIHXQYYDLLRLFEYGRLPPRANY

SEQ ID NO: 330676 - protein, 233 aa, Zea mays
  unsure (1)..(233): unsure at all Xaa locations
  Clone ID: MRT4577_64679C.1.pep
MISWASSLPRKLVVAAALLALSVAIAASPAPANQSSCYKRLFSFGDSLIDTGNYIVHFSATPGPVVELPYGETFFGRPTGRWSDGRLIVDFIVERLGFPYWPAYLQAAAGKSPAEEFRYGVNFAVASATALSQDFFRKKRLRVDLMPPYSLDVQIGLFKKVVAVLGSTDQERKAAMASSLFLVGEIGANDYIQPLFQNKTLEWVRPLVPRIIRSIALSIEALIELXAKTMYVP

SEQ ID NO: 330677 - protein, 132 aa, Zea mays
  Clone ID: MRT4577_6467C.1.pep
MGRRFPELGMNRTHCREMSWIETVPYFFLGSGATVEDILNRTTSLSTYAKMTSDYVRQAIPRRAWDGIFGKLAQPSAGLMILDPYGAQVGAVPEPATPFPHRAGVLYNIQYVSVWSAGGHGAAHIKWVKDLY

SEQ ID NO: 330678 - protein, 175 aa, Zea mays
  unsure (1)..(175): unsure at all Xaa locations
  Clone ID: MRT4577_64680C.1.pep
TFRLMHVQGLPXWTNTSSVTIQDVIQGEVLLAVLSNYMVDIDWLLTACPSLRKVPHVLVLHGQDGASLELMKKLKPANWILHRPPLPISFGTHHSKAMLLVYPQGIRIVVHTANLIHVDWNYKSQGLWMQDYPWKDTVDMNKKTPFENDLVDYLSALKWPEVRVNLPGVCDVNIN

SEQ ID NO: 330679 - protein, 53 aa, Zea mays
  Clone ID: MRT4577_64681C.1.pep
SGVNMSVPCTINQYRLDTEVFEQPEPTATLHGTEAVWQKLMHVGGTMTYISKA

SEQ ID NO: 330680 - protein, 91 aa, Zea mays
  unsure (1)..(91): unsure at all Xaa locations
  Clone ID: MRT4577_64682C.1.pep
KKWVVFLGKKKTSDSQAQPIPPNQRILSLSVHKSCDGLRCQTMAESSPITRSGRRASALEAAAAPPGPRGKGYRGCGTAVRRLRTGPSXPN

SEQ ID NO: 330681 - protein, 43 aa, Zea mays
  Clone ID: MRT4577_64683C.1.pep
GGSGKPPLGHPFEKTKKELKERLNEKVEGRGSTRVFGGVERED

SEQ ID NO: 330682 - protein, 78 aa, Zea mays
  Clone ID: MRT4577_64684C.1.pep
VKVIKVTRGCLYYVPHVRILGVAISSRERSAMLFLMWGFLCLLSSTIGLKIALLFCAYKAGAYVFPLGDQMHVSTHWL

SEQ ID NO: 330683 - protein, 74 aa, Zea mays
  Clone ID: MRT4577_64685C.1.pep
TGEPGGLPLKFGGGLKPNPLDLGPPKGFWEKTLGPPSGFLSPSFKTSGGVKPFFFNYLTTPNWVFFRGGKGEGF

SEQ ID NO: 330684 - protein, 143 aa, Zea mays
  unsure (1)..(143): unsure at all Xaa locations
  Clone ID: MRT4577_64686C.1.pep
RLSTWASPISTGSDTNTPTRLHPSTVRAWRRPSEFSAKNITILQQICVARHLRILARARSASAHMILNTPIPFNFENTGTXQAPLGPADFPCEQPAGTYSIKEMNTIGAGGSLGGQLMGGATHGGGACQVSITTDTKPNKDSQ

SEQ ID NO: 330685 - protein, 90 aa, Zea mays
  unsure (1)..(90): unsure at all Xaa locations
  Clone ID: MRT4577_64687C.1.pep
GGGRSVRIPVAPXSAQAKRVFADHPHLRVINGGERLPGGRHLLLIQQDGLGPARYGQSWLRLYSEGVLGQRQQPLLADLQIPGPHCKEAL

SEQ ID NO: 330686 - protein, 69 aa, Zea mays
  Clone ID: MRT4577_64688C.1.pep
MSAGYRAEDDYNYLFKVDLIGDSGVGTYNLLSRFTRNEFILEYKSTIGCEFATPSLQVDRKATKAQIWD

SEQ ID NO: 330687 - protein, 87 aa, Zea mays
  Clone ID: MRT4577_64689C.1.pep
GERGGFTSVARGYPVFLLFNGPPFRGPGALFFHFFFVRFFFFFFFLSFLFSFFFFFFFFFLLISHHQFIIASPSPSFVPVVIQSTGI

SEQ ID NO: 330688 - protein, 130 aa, Zea mays
  Clone ID: MRT4577_6468C.1.pep
MHAYVSSEFGSRENELADAKFAWLCAKHVKSNAIVIAKNSCMLGMGSGQPNRRESVRIAFRKAGEEAKGAALASDAFFPFAWNDAVEEACQRGVAVIAEPGGSIRDQDAVECCNKYGVALVFTGVRHFRH

SEQ ID NO: 330689 - protein, 105 aa, Zea mays
  Clone ID: MRT4577_64690C.1.pep
LKLIYSHTGGGHPQTGGGGQNKFNFRKNFTGEPGLQTTPEKPRGFNIRGFTLQKPGGPGLQKTLHGFNRRGGFFNMGPGGIQFIPFSGTGTGLWGYLAHIYANLP

SEQ ID NO: 330690 - protein, 40 aa, Zea mays
  Clone ID: MRT4577_64691C.1.pep
VAEWKNMSVFQSMQNTSLPDEIVHQVLHICLFPSISPRVR

SEQ ID NO: 330691 - protein, 144 aa, Zea mays
  Clone ID: MRT4577_64692C.1.pep
TPQNQLKKKVGGGNPLFREWGGLKEQKTNLWAGIKKRGPPLIPGETREMFIQVQKSFESPKGQGTLEKGKPFLGGSRFSGFPHFPNFLKIPKKRGWFILAGRGEPQTGVPGGPFLHQKIGGANWGLHLASLRAKAKGVFLSLGG

SEQ ID NO: 330692 - protein, 108 aa, Zea mays
  unsure (1)..(108): unsure at all Xaa locations
  Clone ID: MRT4577_64693C.1.pep
TQIHSVTYYCPVGWGGICLVHISNSVRSKIWVLFFFKLKIHLLGCWGAKFKPXYNLIXXXSXLTXTNSTXSNLXNSSYPPTPXTFXTFXPHPSHPPFXNSPFSSPIPP

SEQ ID NO: 330693 - protein, 183 aa, Zea mays
  Clone ID: MRT4577_64694C.1.pep
MHVDMSHRVRLAAAALVAVAALALALAPGAAAKWQRTRNGTVVSYDRRSLMIDGHREIFFSGSIHYPRSPPDMWPELIAKAKEGGLNTIETYVFWNIHEPEKGEFNFEGQNDVVRFFQLIQEHDMYAMVRLGPFIQAEWNHGGLPYWLREIPDIVFRTNNEPYKMHMETFVKIIIKRLRMPTF

SEQ ID NO: 330694 - protein, 60 aa, Zea mays
  Clone ID: MRT4577_64695C.1.pep
QDNFMRGKGPELLPTPLAETPCTARTTCHMGTQSPTRMIFSRLTKNRPLSEMIDCNHTYI

SEQ ID NO: 330695 - protein, 77 aa, Zea mays
  unsure (1)..(77): unsure at all Xaa locations
  Clone ID: MRT4577_64696C.1.pep
NLTGNKIPPPPKAHGLXPKIPKALYFLIKKPLPIRNPFQKTKKVKASQFRLIFFXTRIPPLAPYSKRPKKLPPPWKF

SEQ ID NO: 330696 - protein, 59 aa, Zea mays
  unsure (1)..(59): unsure at all Xaa locations
  Clone ID: MRT4577_64697C.1.pep
ATQRKDTERFPQERLTAAFFLWXGWVARHAALASYHAAHGKRARPLAITRQAVLVQGVH

SEQ ID NO: 330697 - protein, 125 aa, Zea mays
  Clone ID: MRT4577_64698C.1.pep
PAGSFCSFSFPSASGRRRFAAVRASAETMATEKLGIKVERNPPESRLSELGVRQWPKWGCEKSKFPWTYSAKETCYLLQGKVKVYPEGHGEEFVEIGAGDLVVFPKGMSCTWDVAEAVDKHYNFE

SEQ ID NO: 330698 - protein, 152 aa, Zea mays
  Clone ID: MRT4577_64699C.1.pep
NGGDEESKDEGGGKHGEQKKKKKKYTTGRLSFCSFSFPSASGRRRFAAVRASAETMATEKLGIKVERNPPESRLSELGVRQWPKWGCEKSKFPWTYSAKETCYLLQGKVKVYPEGHGEEFVEIGAGDLVVFPKGMSCTWDVAEAVDKHYNFE

SEQ ID NO: 330699 - protein, 72 aa, Zea mays
  Clone ID: MRT4577_6469C.1.pep
GPHTISQLSTPKKRESRVIYSSIPLSPDYPNTTTSTHTIRRYMIPSTDDPSFTTNQASATSGPYATSHTYNT

SEQ ID NO: 330700 - protein, 66 aa, Zea mays
  unsure (1)..(66): unsure at all Xaa locations
  Clone ID: MRT4577_646C.1.pep
GTTLGRGVANHPLPGGGFAEIGLGCERKKLGINFKQALGIFLKNKKSQGLFVCFFXXXPFPPTKXP

SEQ ID NO: 330701 - protein, 118 aa, Zea mays
  unsure (1)..(118): unsure at all Xaa locations
  Clone ID: MRT4577_64701C.1.pep
LTSTLHGPLSVPLPLHPPHHPPDHYSYCSSLHYKSQHPTNLPNNSSSNLXXTHXHHHLHYHYQHLSYHXNFQXTXLXTLLXTITSXXTLINXLIKIKPSTKPTHTSKNTSKPQPNLFQ

SEQ ID NO: 330702 - protein, 84 aa, Zea mays
  Clone ID: MRT4577_64702C.1.pep
VGLLSMLSERERDQRRILGSWRRQLGPGTLNTGYKHVYNYALRDSIGEEVVKDQDLRSHRGGFEAGEESARDQQRRETGPRRQP

SEQ ID NO: 330703 - protein, 147 aa, Zea mays
  unsure (1)..(147): unsure at all Xaa locations
  Clone ID: MRT4577_64703C.1.pep
LVRTSSESVVRRPGKAPEGAVPGPSPGRHAAARSRRASSSSIPPAADGFGAGTPEPNPHSQYFFRNYXGSGLATSXAYIAPLARGXPAWRPDAGMSTTGRGRNYELPIFKGRRRRTRHPAMCGALPYDGPYLPLNQFQCWRAVKHTR

SEQ ID NO: 330704 - protein, 93 aa, Zea mays
  unsure (1)..(93): unsure at all Xaa locations
  Clone ID: MRT4577_64704C.1.pep
MLVQVSYAIGVPXPGSLFVDTYGTGAIPDMEILKIVKDNFYYKRCMINMNLDLKKGGNCRYLMTAGYGHFKRDDLYLTCEVVNPLKVENPCSR

SEQ ID NO: 330705 - protein, 586 aa, Zea mays
  unsure (1)..(586): unsure at all Xaa locations
  Clone ID: MRT4577_64705C.1.pep
HASAHASAHASGGTEITLYLRAGTNPEFPGRPTRQGLVKNYSQFVSFPIYTWQEKSRTVEVEEEEESKGEEATEESKSEEATEGEKQKKKKTITEKYWDWELANETKPIWMRNPKEVEKTEYNEFYKKTFNEFLDPLAYTHFTTEGEVEFRSVLYVPGMAPLSNEEIMNPKTKNIRLYVKRVFISDDFDGELFPRYLSFVKGVVDSNDLPLNVSREILQESRIVRIMRKRLVRKTFDMIQEIAEKDGKEDYNKFWESFGKFMKLGCIEDTGNHKRLAPLLRFYSSKNETDLISLDQYVENMPENQKAIYYIATDSLQSAKTAPFLEKLVQKDIEVLYLIEPIDEVAIQNLQTYKEKKFVDISKEDLELGDEDEDKEKESKQEYTLLCDWIKQQLGDKVAKVQISKRLSSSPCVLVSGKFGWSANMERLMKAQTLGDTSSLEFMRGRRIFEINPDHPIIKDLNAACKNEPESTEAKRAAELLYEAALISSGYTVSAANPRACCWPIYDCEYDVIVHLCYXPDSPAELGGKIYEMMTMALGGRWGRLETEEAEVIASIDDADSSEGATTTAEVVEPSEVRTESDPWKD

SEQ ID NO: 330706 - protein, 66 aa, Zea mays
  Clone ID: MRT4577_64706C.1.pep
YIYIGSNHIIGGPFIYGYSKPNWFNQNSCRPPSISPKTGPKHAEGGSHPKNPFFFFFSQTPKKSLF

SEQ ID NO: 330707 - protein, 35 aa, Zea mays
  Clone ID: MRT4577_64707C.1.pep
CLTLLTTQTNHAGLKNKVVSVIMMARAARVARRKL

SEQ ID NO: 330708 - protein, 273 aa, Zea mays
  unsure (1)..(273): unsure at all Xaa locations
  Clone ID: MRT4577_64708C.1.pep
LGTLSTSARRICQRDGPDTYGDLNARRTPPPNAPPPPTPPPPPAPPLPRPQNPTTPPPPPPXPPPPPPLPPPPPPLPPPPPPPPPLPPPPPPPPPPPPPPPPPPPXPPPSPPPPPPPPPPPPPPPPPPPHPPPPPPPPPPPSSSPPPPPPPRSPPPPPPPPPPPPPPXPPPPPPPPPPPPRPLPPPLPPPSPLPPPSPPPPSPPPPPPXPSPPPSPPPLLPPPPPPPPPPPPPXPPPPPPPPPPLPPPLPPLCPPTPPPPPPPPTPSPPPPPS

SEQ ID NO: 330709 - protein, 127 aa, Zea mays
  unsure (1)..(127): unsure at all Xaa locations
  Clone ID: MRT4577_64709C.1.pep
NNTREHDHQDPIANNIMDMGAALAWLVGGSSCCSPKVSPRPNITTNYNAKRLTPRATWYGQPNXPSTTDNXGTCAINNMNLPPYSAMTACRIFHIFNDGKACGSCYKARCKEKPAXSGNLITVYITD

SEQ ID NO: 330710 - protein, 92 aa, Zea mays
  Clone ID: MRT4577_6470C.1.pep
SFCANTEVSRSICTSVWLKERTRFMYWLMKVTRRSCGAGDERHADGRDGHERSLFGIGAGGEDRVLVSSLDHVRFPHALTRADVRVGALEEF

SEQ ID NO: 330711 - protein, 64 aa, Zea mays
  Clone ID: MRT4577_64710C.1.pep
MEDKYCRTCYRRCRTSHDYDSSYNSKSGTDDYGHGEGGYNKSGEDNDYGRIGDDGYGKSGGDDY

SEQ ID NO: 330712 - protein, 75 aa, Zea mays
  Clone ID: MRT4577_64711C.1.pep
SGSQIVGGARDNALFARLEFQSSTGITGASHFKHVLTRLPPTHHPDILYGPRMVTPHRPICSLIHTQDPIYSHKH

SEQ ID NO: 330713 - protein, 96 aa, Zea mays
  unsure (1)..(96): unsure at all Xaa locations
  Clone ID: MRT4577_64712C.1.pep
GGGVSTKSGFPRTTNIRVQRSAIPAQHLFSLRLGDSNKPAASYIPLXAVGGRGVFLYFSAXXAGKKGQAHWNKARXPLEXXHXXGAXXXQXEKQQT

SEQ ID NO: 330714 - protein, 56 aa, Zea mays
  Clone ID: MRT4577_64713C.1.pep
RKKKIYITHFIKDLATNKVRRVMIDGDGVRMLHYVLADLACVPGIATYVPLFHWSI

SEQ ID NO: 330715 - protein, 65 aa, Zea mays
  Clone ID: MRT4577_64714C.1.pep
MGHGVSCARTGDEHDFFRAAQLGDLDALGALLAADASLDRRATLYDRLSPVHIADVNGRLRGALH

SEQ ID NO: 330716 - protein, 114 aa, Zea mays
  Clone ID: MRT4577_64715C.1.pep
EGLHETLIFLMNDPDPQKLSPHASWFFIQKMGRGGDHKNFLVVREAWRPLPTTGGAKTRGGLLLLLGGRARKKGLLNNAGKAGANHGPHPKHPRGAPARGAHEGGPERPPRINP

SEQ ID NO: 330717 - protein, 125 aa, Zea mays
  Clone ID: MRT4577_64716C.1.pep
YARDCCSTWPLLHFFPRSAPSAADSHGQTGPSPARRLQQPWRPSLLPFFFLKQSVPSLLSISLELKCREPHPSSPQRSVPSSLRVPCSTASRKPAPLPLLFHAPHFFHGKPVGSPLPSAPMVSLS

SEQ ID NO: 330718 - protein, 91 aa, Zea mays
  Clone ID: MRT4577_64717C.1.pep
MSETDIYIPPKVLVYIRNLERDNMSTKKRINIRERNREKKNGICACTPTPENANVRDLELPITPFIFLIKKTMLLSTNKKKKKKKKKKKIK

SEQ ID NO: 330719 - protein, 30 aa, Zea mays
  Clone ID: MRT4577_64718C.1.pep
LAADDSTVVSAAGATEAKSSVGSQVPRPLL

SEQ ID NO: 330720 - protein, 92 aa, Zea mays
  Clone ID: MRT4577_64719C.1.pep
TWIRETPLADALFVFQVQVQKKLQMRIEAQGKYLQTILEKAQSNLSYHATGAANLEATRSQLTDFNLALSGMEFMTGTMSSALRTKGCYFWT

SEQ ID NO: 330721 - protein, 81 aa, Zea mays
  Clone ID: MRT4577_6471C.1.pep
QKQAGFNSYRLLQLLQYFCLYRLQLLLQYFCLYRLHIDYNCFYNIFVSIDYNCSGQSNANSPIHLQHAACKRCSQFLTFCH

SEQ ID NO: 330722 - protein, 68 aa, Zea mays
  Clone ID: MRT4577_64720C.1.pep
QDPRSHLTMATVTAGDVPTGCHPYRRSRTRCSSPYLHCLLFPIASASRFFFPSLPVCHAATAVIWMLS

SEQ ID NO: 330723 - protein, 241 aa, Zea mays
  Clone ID: MRT4577_64721C.1.pep
ALDKILRTEVLPHGARPLPSATGHPSARPRSSVGSDRAPFSAPSPWRPVGSPVPRRLGASMAASLFPCDFMASLRRIFPELVAMAAPSCSSMARLSLAPSRAPPHAQMPARCQLALLSVFSLCRARCWFALLAARAPLRRAQASGVFLPCAESQPACRAQPPFPLILPRPWSSSPQRRALRATVSCSLRASSSRAESLCCVPSLKFLCARSPVPWVSFSLPQLSGVWPASIRVRSYRHRRV

SEQ ID NO: 330724 - protein, 84 aa, Zea mays
  unsure (1)..(84): unsure at all Xaa locations
  Clone ID: MRT4577_64722C.1.pep
MGPLSNNMVGVGAFLASLPGGXCWAPKVAAGSNIITNYXNGXWLTARATWYGQTNGAGAPDNSGACGIKNVNLPPYSGMTACGN

SEQ ID NO: 330725 - protein, 107 aa, Zea mays
  Clone ID: MRT4577_64723C.1.pep
GRAGHRRQRGGPFLRRLLGFRRHLAPSPLAPGRRLRRSLRRRRRAADRVNPWFTAHRGRATPAARAPAPLAANAAHPIAGAASVGEVRGAGERESVCEACNTTHFRV

SEQ ID NO: 330726 - protein, 74 aa, Zea mays
  Clone ID: MRT4577_64724C.1.pep
NLRSKPGVPEGGIVKGIQPSNGPNVPGVGPGEHFNGLQKRCPGKVVPAGMIRQATTTNQGVGEIHRRWIHRGFS

SEQ ID NO: 330727 - protein, 52 aa, Zea mays
  Clone ID: MRT4577_64725C.1.pep
RYQRWRPFPVRSLRQSSMATSCNWTRATRVCNMIINKSNCAATCPTTIWRSE

SEQ ID NO: 330728 - protein, 157 aa, Zea mays
  unsure (1)..(157): unsure at all Xaa locations
  Clone ID: MRT4577_64726C.1.pep
MQAPRGGGFFGKRKERDYYYPYPSVSSSSEQAVLLQRQPPPYARPEPDTRSVKPDRPAMRFGAKPPLPQPGAQVGCNKLLAGYLAHEFLRCGTLLGERRLELPRLKEKDPSASTSTPAPEPSRRYAEVSRLAYGGXGARIPGVVNPSQLGRWLRIKE

SEQ ID NO: 330729 - protein, 77 aa, Zea mays
  unsure (1)..(77): unsure at all Xaa locations
  Clone ID: MRT4577_64727C.1.pep
TSAVAPFIGFCMTHPSPRLAAAWLQEVASVNAVVGLRAASAFRLSALSWSYALALLVRXWXXXLXAKLRERERGGSC

SEQ ID NO: 330730 - protein, 98 aa, Zea mays
  Clone ID: MRT4577_64729C.1.pep
FFFFFFFFFGVFFFFLVFFSFFLFPLGESPGFFLKKKKPPRPKVFPPKRLGKTPCEHFMQRGGAHLKKPPKKFQKNSRGKSRTIPPRAPRFPPCWAPR

SEQ ID NO: 330731 - protein, 547 aa, Zea mays
  Clone ID: MRT4577_6472C.1.pep
MATADTGASTVTDSRLRATGVKQALISLSDKTDLANLGNGLQRLGFSIISTGGTASSLEASGVNVTKVEEITQFPEMLDGRVKTLHPSIHGGILARRDQEHHLKALKEHGIGTFDVVVVNLYPFYDKVTSGAISFEDGIENIDIGGPTLIRAAAKNHKDVLVVVDHKDYPALLEYLEGKQDDPDFRRTLAWKAFQHVASYDSAISEWLWKQSNKDSFPPSFTVPLTMKSTLRYGENPHQKAAFYGDRSLSLVNAGGIATAIQHHGKEMSYNNYLDADAAWNCVSEFESPTCVVVKHTNPCGVASRHDILEAYRLAVRADPVSAFGGIVAFNTTVDEDLAREIREFRRPTDGETRMFYEIVVAPGYTAEGLEVLKGKSKTLRILEAKRRRSGKGTLLSLRQVGGGWLAQEPDDVTPEDVAFTNVSERAPDARELSDAKFACLCVKHVKSNAIVIAKNSCMLGMGSGQPNRLESLRIAFRKAGEEAKGAALASDAFFPFAWNDAVEEACQRGVAVIAEPGGSIRDQDAVECCNKYGVALVFTGVRHFRH

SEQ ID NO: 330732 - protein, 83 aa, Zea mays
  unsure (1)..(83): unsure at all Xaa locations
  Clone ID: MRT4577_64731C.1.pep
RKRKKNRERASDRRLDSHGARRELHSHRRRGRLRAPGDRVHFTEFIQKNLHLYQIKNTIPLXTDADDNLTRDELSTDLRESAY

SEQ ID NO: 330733 - protein, 792 aa, Zea mays
  unsure (1)..(792): unsure at all Xaa locations
  Clone ID: MRT4577_64732C.1.pep
MGSACQAGTDGPSRKDVLGIGNAALENGHHQAEADADEWREKEEDLANNGHSAPPPGMQQVDEHKEEQRQSIHWERFLPVKTLRVLLVENDDSTRQVVSALLRKCCYEVIPAENGLHAWRYLEDLQNNIDLVLTEVFMPCLSGIGLLSKITSHKICKDIPVIMMSTNDSMSMVFKCLSKGAVDFLVKPLRKNELKNLWQHVWRRCHSSSGSESGIQTQKCAKLNTGDEYENGSDSNHDDEENDDGDDDDFSVGLNARDGSDNGSGTQSSWTKRAVEIDSPQPISPDQLVDPPDSTCAQVIHPRSEICSNKWLPTANKRNVKKQKENKDESMGRYLGIGAPRNSSAEYQSSLNDVSVNPIEKGHENHMSKCKSKKETMAEDDCTNMPSATNAETADLISSIARNTEGQQAVQAVDAPDGPSKMANGNDKNHDSHIEVTPHELGLKRSRTNGATAEIHDERNILKRSDQSAFTRXKHNISVITRLXHNSKLHANPLXSARYHTSVASNQGGARYGESSSPQDNSSEAMKTDSTCKMKSNSDAAPIKQGSNGSSNNDVGSSTKNVAARPSGDRERVASPLAIKSTQHASAFHTIQNQTSPANLIGEDKADEGISNTVKMSHPTEVPQGCVQHHHHVHYYLHVMTQKQPSTDRGSSDVHCGSSNVFDPPVEGHAANYSVNGGVSVGHNGCNGQNGSSAVPNIARPNIESINGTMSQNIAGGGIVSGSGSGNDMYQNRFLQREAALNKFRLKRKDRNFGKKVRYQSRKRLAEQRPRVRGQFVRQSEQEDQTAQGSER

SEQ ID NO: 330734 - protein, 157 aa, Zea mays
  unsure (1)..(157): unsure at all Xaa locations
  Clone ID: MRT4577_64733C.1.pep
PPVPPPLVSPQPHPSQRVPLAPPLSPLPLSSPPTLPLSLTPPPFPFPPCPPPHALPSFPPHAPSPRPPPCAPFLPPMLSPSPTSPRCSLSSTPSSPSSQYRYLRPLXPSPXMVSPCPLMPTSIPXASASPAPGXPVPVVPAPRHPPQPVPPSAXHPQ

SEQ ID NO: 330735 - protein, 82 aa, Zea mays
  unsure (1)..(82): unsure at all Xaa locations
  Clone ID: MRT4577_64734C.1.pep
FFFFFFFFFGFFFFFFFXHRTVCQFTKLEFWFVYYLELMSILILSYKSPFFFLGPKTNIFFFRLGGEQATLKNLGYVKTFFC

SEQ ID NO: 330736 - protein, 73 aa, Zea mays
  unsure (1)..(73): unsure at all Xaa locations
  Clone ID: MRT4577_64735C.1.pep
SESPPHFAERPTEHHKRAEGTGPLNXXKREDRNHTGAHKTNKSRGSXLPGGPPGKQRITDKTGAGRHGGGTAT

SEQ ID NO: 330737 - protein, 102 aa, Zea mays
  unsure (1)..(102): unsure at all Xaa locations
  Clone ID: MRT4577_64736C.1.pep
QKPVRAQPKPLNPRPGLRPPQVQGAPESLRRGGGPAAVSGPDPLPGPRRASGDPAXPLLLSXPLILASLGSFLSLFFFLMVMPHSVGDDDSCIHLMRARMQK

SEQ ID NO: 330738 - protein, 121 aa, Zea mays
  unsure (1)..(121): unsure at all Xaa locations
  Clone ID: MRT4577_64737C.1.pep
LATGSLFLRGIHCQWLLVVLPVMXKNASRSNGSFPLYLLHTSNMPIIHHCSLTSYPYXLSRLIYSKYGGNFLDXXPGKWHGSKYCGHCTADLGGTYXETAPTKLADFIGSPAHAFIYMWIM

SEQ ID NO: 330739 - protein, 99 aa, Zea mays
  unsure (1)..(99): unsure at all Xaa locations
  Clone ID: MRT4577_64738C.1.pep
AHASETTYLTMSFSPIISYRPARSDHKRGRSPIATHAISNFTFKILLFDFRAQAPTYPTPLTXFHTLALQSTSTASSLSSDSVKSISLALASMDCIHAH

SEQ ID NO: 330740 - protein, 80 aa, Zea mays
  Clone ID: MRT4577_64739C.1.pep
RKTVGILTAIVFVTRQLLCSHRRVGCEPLYSGHNTHPTERQSAGSKGKKQMNNKDFSRVHHKKKKEENKKKKKKETTKKT

SEQ ID NO: 330741 - protein, 243 aa, Zea mays
  unsure (1)..(243): unsure at all Xaa locations
  Clone ID: MRT4577_6473C.1.pep
AYAFLQLFATFGIXSEFNEDELCKLLPSVSRRRQTPELCRLLGLSQKMPGVIGVLVDSARPIDAINLAYAFGLTEQFEPVQLLKAYLREVKKVSHAKNGKMSPGAQNEMNERELSALKAVIKCVEEHKLEEQYPVDPLQKRVIQLEKAKADKRRAVEAAKPQSKRPRANGSLYAPRVTSFPEKSFYQATPERHPYPYERQFVYGAEXPPPPYDDERGSLHXSPAHTPYYGNGYPVQYQVPYIH

SEQ ID NO: 330742 - protein, 74 aa, Zea mays
  Clone ID: MRT4577_64740C.1.pep
GTSFVTYFGFEQHGHNIADAKKDDPLCSLHLALCPACYRPNKTPWSAATTGTTSTGTGLTSNLTTRGWSRPGGK

SEQ ID NO: 330743 - protein, 119 aa, Zea mays
  Clone ID: MRT4577_64741C.1.pep
MTCSRKKYKKIPLPRLCTAVQPFLPSMLVFVTALCVGSPLTINIKVVLSPFGLTILLLLFSFHTSSSVAGYHLAGSWFLKSDDVKALQRTISFETGMQSSLLALALVDDEKVEVVRATV

SEQ ID NO: 330744 - protein, 131 aa, Zea mays
  Clone ID: MRT4577_64742C.1.pep
MVYKFGYYTRAESSPTRSKVLPLRHGGWVPHIVQDGPGQREPKPPRVMRATDQRLQAFLHFRPDQRVKGWTAIQTACNRTEGAHPFDFNASSMEAQAHTSCNRCAGYYMQETAPPLAPVPRLLDCEISAAT

SEQ ID NO: 330745 - protein, 75 aa, Zea mays
  Clone ID: MRT4577_64743C.1.pep
YSLTHCFNIYISNILKQNKGYFYKPNLSFMIKTHTTIPLLKLNLNDQFQSSSKILNLSSPPNFFSSIPTNLFNPH

SEQ ID NO: 330746 - protein, 60 aa, Zea mays
  Clone ID: MRT4577_64744C.1.pep
ISVLMIHICSLQIGVICVVSLYTQQRDVNHLCLSHCHTQLCHVTSFSCFILFQQCSLSLV

SEQ ID NO: 330747 - protein, 111 aa, Zea mays
  Clone ID: MRT4577_64745C.1.pep
HLQFGTNKCCPGTSSHTQTSSFVRSWMWAQHLGYTMCAYSCRSCTKGKCAPSVRARVEANRQVVPPGHNYGGSHMGARKPRIGAQSGSSDAVTVGTRAPWPCERRSLVPNS

SEQ ID NO: 330748 - protein, 138 aa, Zea mays
  Clone ID: MRT4577_64746C.1.pep
FVLGCARSTAAQLTSPSCGSAARYGVRLVQDAKACVDDDYVRSMVDLLEERRGARPDLAASLVISAWTRLGLEDLDFGAGKAAHMGPLTSEIYCVFLPVVGDPHAVTVLVSVPQAAADKFQHFCLGFLKDVEVDAKLT

SEQ ID NO: 330749 - protein, 100 aa, Zea mays
  unsure (1)..(100): unsure at all Xaa locations
  Clone ID: MRT4577_64747C.1.pep
PILYTLSFPLLSSLIFSPHNNFPHXPSISXISPTPQLTLTKNNKXFISXPPFFFFFSFSFFFFXXIXXIIIYXXXHNTPXHILPXLXXSTHTTHXXPXXP

SEQ ID NO: 330750 - protein, 104 aa, Zea mays
  unsure (1)..(104): unsure at all Xaa locations
  Clone ID: MRT4577_64748C.1.pep
MRPTRREGESLTFHQLALRAPHAKKKVFFRGPKNACEAVRHFAKAPGVXSSHTXPYVSYKGSKLYKASGMRNXRVFKVYNTQLWPFFVAIEHSVNSCVWSGDRN

SEQ ID NO: 330751 - protein, 231 aa, Zea mays
  unsure (1)..(231): unsure at all Xaa locations
  Clone ID: MRT4577_64749C.1.pep
MSQHALSDQQVNNELSKMTAFIKQEAMEKAREIEIKANEEFEIEKSKLVRQETDAIDSQYEKKFKQATMSQQITRSTVSNKTRLKVLGSRQEMLDNIFEEAQKKLAEGAKDKAKYQKALKGLLLEGFFALNEPELQVRARKKDYDVVKKAIEEAAKDFKKELGKDITAKIQEDDPLPEGXSPGGVFIISGSGKIDIDNTFEXRLKXCXESAAPAVREALFGKTPTPQSRLN

SEQ ID NO: 330752 - protein, 61 aa, Zea mays
  unsure (1)..(61): unsure at all Xaa locations
  Clone ID: MRT4577_6474C.1.pep
XKXXILXLKXDXGKXPNDHXKXVIXNIDXXNDCXGYNWPPHFGYGPRCRGRXKYIEDKXMX

SEQ ID NO: 330753 - protein, 418 aa, Zea mays
  Clone ID: MRT4577_64750C.1.pep
ESIPTRPNRQTLVSEDIVHNLLHLISNTGPAIECKLLQVFVGLTDSSTSVQNIVDAIKSSGAIVSLIQFVEAPQREVRMNSIKLLNNISPYMGQELADAFRGNFSQLSSLVKVIVDNNGISEEQAAAAGLVADLPMGDSVLTRRLLQDGAFAAVISKVLRIRQGEIRGGRFVNPFLEGLVRIVSRITFVLDDDPDIIAVARDYNLTSLFTDLLQMNGLDVVQIVSAVSLEKLSQQSKHLTKILPAPSPGLCFSIFPCLSQKTVATGVCRVHCGICSARESFCLLEGKAVEKLVACLDNNNEKVVEAALAALSTLLEDGVDIEQGVMVLCDAEGINPILAVLCENRNEALRQRAVWAVERILRTDEIAYEISGNQNVGTALVEAFRHGDSRTRQVAERALKHVDKLPNFSGIFSKMGAQ

SEQ ID NO: 330754 - protein, 67 aa, Zea mays
  Clone ID: MRT4577_64751C.1.pep
GKRMNHLVFLGAHQKTPRGGFYLYGTRDAPRQAQGKGRRSFISSGNSPLFLNGQNPAKCLEWTKPNG

SEQ ID NO: 330755 - protein, 70 aa, Zea mays
  Clone ID: MRT4577_64752C.1.pep
LVQIIVITSPFPATPKPRLLEHILLSSRKLNHNVSDKQQLIILFGSQPRSSKPALSLMLFTNSICNGLLP

SEQ ID NO: 330756 - protein, 82 aa, Zea mays
  Clone ID: MRT4577_64753C.1.pep
RTPSTRFNEQWTALDTNSNMMVINFSASWCVEHPVHRTGLQGAGLPLVLRYVHQDQVTARKVASTCKVRQCLRSSWTSIASR

SEQ ID NO: 330757 - protein, 267 aa, Zea mays
  unsure (1)..(267): unsure at all Xaa locations
  Clone ID: MRT4577_64754C.1.pep
MAPAAPAGLASVAVAVAVAVLAAAASAAVTYDRKAVVVNGQRRILMSGSIHYPRSVPEMWPDLIQKAKDGGLDVVQTYVFWNGHEPSRRQYYFEGRYDLVHFIKLVKQAGLYVHLRIGPYVCAEWNFGGFPVWLKYVPGISFRTDNEPFKAEMQNFTTKIVDMMKSEGLFEWQGGPIILSQIENEFGPLEWDQGEPAKAYASWAANMAVALNTSVPWVMCKEDDAPDPIINTCNGFYCDWFSPNKPHKPTMWTEAWTSWYTGFXGIP

SEQ ID NO: 330758 - protein, 69 aa, Zea mays
  Clone ID: MRT4577_64755C.1.pep
DPLVTILKLIYHLLYIKYRCHFLLYLISNTKEFELLAHSIPCLAPDSSTSPPHKTLLMFLLTLSIPCLI

SEQ ID NO: 330759 - protein, 267 aa, Zea mays
  unsure (1)..(267): unsure at all Xaa locations
  Clone ID: MRT4577_64756C.1.pep
MNAPCLKSMFDTNPNLIQDGLRHRDAIPLILIHDGGGTIFSYYILDDLCRKLLGIANPRFKSGVPWAGGLHEMASNYARFVATAILSGPVILGGWSLGGLLALETAYVLSQSYPDVSVAGLVLIDSVCPVPPKAGWGPSEARLTERRIEWPSTTAPATKVCVERCFREAHRMVRDWTVPXFSXTPPAVLIRCRDPAPAPDDGILYVDLYRNDCKLGWDNYCKDLFCQVLDIQGHHYNVFALDHIEIITGMIKTACETIENSWSSLAR

SEQ ID NO: 330760 - protein, 77 aa, Zea mays
  Clone ID: MRT4577_64757C.1.pep
GLGYYLFNWGAPMTPTGIHKEDGKIKTEQPQQRRYYSARDTPELMTTKRTQEILVKEDEVEIYLKGGALYTKTQRKA

SEQ ID NO: 330761 - protein, 93 aa, Zea mays
  unsure (1)..(93): unsure at all Xaa locations
  Clone ID: MRT4577_64758C.1.pep
LPLXLNNSFFSXTISLPLERVSYNNHPTPHPPFISHIYYQLLLPLPFPLQLIHNFFLIPLHHKQPSLLPHLPHRPSLYQQLLPKHHLPNYPFS

SEQ ID NO: 330762 - protein, 51 aa, Zea mays
  Clone ID: MRT4577_64759C.1.pep
CIKVGRASSFGQGMLKPDNPVSKPAFCVLACMCLHEESLCYRKLFHLVYIY

SEQ ID NO: 330763 - protein, 68 aa, Zea mays
  Clone ID: MRT4577_6475C.1.pep
SIWNSKSLVGDKATDATFLRAGPLPPAGAYLWSIRTFGHHKRAARPYNKLKSTILGGLLKIKATMWAE

SEQ ID NO: 330764 - protein, 87 aa, Zea mays
  Clone ID: MRT4577_64760C.1.pep
LKIQSTSKLITSSEGGRSACVLVKRGSLVESDVSPYLYKNAPSLGMGTMIKIVERRRAPRCSSAGCQCRPRKACSSLISTPCSSCCP

SEQ ID NO: 330765 - protein, 94 aa, Zea mays
  unsure (1)..(94): unsure at all Xaa locations
  Clone ID: MRT4577_64761C.1.pep
HPHLVSSLHLESGMYICPYHIFDEVGRAWVPSGGPDNGVGRYHASTLPRSPRTMFSVSCLDNLFHCITCYGQQLLHGVEMREEHAXPWSTLATR

SEQ ID NO: 330766 - protein, 179 aa, Zea mays
  unsure (1)..(179): unsure at all Xaa locations
  Clone ID: MRT4577_64762C.1.pep
GSSAPRSPCSLALSLQDPKRRYILIYLRGCGVCNHLSFFLCADHNKLLPGWSHFAQFTIALINKDPKKSKYSDTLHRFWKKEHDXGVKXFMELSELHDGFIVQDSLTIKAQVQVIRXIDRPFRCLDGQYRRELIRVYLSNVEQIYRCFIDEKEGRXSRLIEDKLGWSSFSGFWLAIFHL

SEQ ID NO: 330767 - protein, 179 aa, Zea mays
  unsure (1)..(179): unsure at all Xaa locations
  Clone ID: MRT4577_64763C.1.pep
FCSSVCIFRHFHHGSSYCRYILIYLRGCGVCNHLSFFLCADHNKLLPGWSHFAQFTIALINKDPKKSKYSDTLHRFWKKEHDXGVKXFMELSELHDGFIVQDSLTIKAQVQVIREKIDRPFRCLDGQYRRELIRVYLSNVEQIYRCFIDEKEGRXSRLIEDKLGWSRLDKLTNVSVDSG

SEQ ID NO: 330768 - protein, 363 aa, Zea mays
  Clone ID: MRT4577_64764C.1.pep
MAFPTDPAAVEEKVEAEDEALPAAVAGAGDRGDVSHEEWRRWGTSSPLPGAVAGVIRDLLEMEAAASERMRFGGVGSKLKGSFKDVEDKKHRAVYERLADSDQKLQYFSARQIGCRLLGCRGYLCRKCWLPTEDCMCTNIVPCNLWKGVKFWLYMHPKDFLRQNNTGKLLWQVFGIQAAQLCLFGIQEHEDIMWDAFQSSGKGKISVLYPNKTTTPKSVKDLEFDGFSLTTDLRENLQDGPFNFVLLDGTWSNSAALYRRLKERWTAVWGDEALPCIALSTLSASVMHKLRPQPAWDRTCTAAAAAGLLWELSSRPELISFGLEKQAEAVECSLDNLLDALTARRLRLGRSITRKQRHSRNCI

SEQ ID NO: 330769 - protein, 84 aa, Zea mays
  Clone ID: MRT4577_64765C.1.pep
MAPAQPKLKKYLDKRLFVQLNGSRKVIGVLRGYDVFLNIVLDEAVEEKDNGEKVRIGMVVIRGNSVVMLEALERIGGDDRRGDR

SEQ ID NO: 330770 - protein, 61 aa, Zea mays
  Clone ID: MRT4577_64766C.1.pep
MAKKALIAKAKRKPKFAVRAYTRCQKCGRPKAVYRKFGLCRVCVRDMAHAGELPGVHKASW

SEQ ID NO: 330771 - protein, 178 aa, Zea mays
  unsure (1)..(178): unsure at all Xaa locations
  Clone ID: MRT4577_64767C.1.pep
MRFGGVGSNXKGSFKDVEDKKXRAVYERLADSDQKLQYFSARQIGCRLLGCRGYLCQKVLWCPTQQCKRLSVVKLSVCLXLQCWLPTEDCMCTNIVPCNLWKGVKFWLYMHPKDFLRQNNTGKLLWQVFGIQAAQLCLFGIQEHEDIMWDAFQSSGKGKISVLYPNKTTTPKSVKDLE

SEQ ID NO: 330772 - protein, 210 aa, Zea mays
  unsure (1)..(210): unsure at all Xaa locations
  Clone ID: MRT4577_64768C.1.pep
MFLLLGRCLXNNINQLPHSVQTFSPLQKVYYPRPGTYNSAHVYLPNSTDVPLASRQFSSKIQPSMHGFDSTNSNQPFTSIRPPMPISRLDATSGPLTNLHTASEISNFKGMFPSSLPAPVHVELKPPITLPAEMNSESTISNQQNYCKIGLEMSLEPVNLVYEGNNKDSVATCDISCNLIPQPVSTPQTQTRPTSVDHATPVVDPQTILT

SEQ ID NO: 330773 - protein, 158 aa, Zea mays
  unsure (1)..(158): unsure at all Xaa locations
  Clone ID: MRT4577_64769C.1.pep
LNDKTTSSPKQDGTGTRRWSKRGIQKDLKDLHKDPPTSCSARPDGQDMSHWQETIMGTSDRPYSEEDFLDTIHYPPDYPFKPPKEAFPTIVIHPNIISIVSICLNILNDQLDPELTISKVLLTIXSLLTDTNPDHPLLPXIAHMYKTDRHKYKNTAMT

SEQ ID NO: 330774 - protein, 102 aa, Zea mays
  unsure (1)..(102): unsure at all Xaa locations
  Clone ID: MRT4577_6476C.1.pep
RVLPFLFRRQRRXISARLRVLRSLLLVRTTITGDGARTGRLLRLRLGYDLYLIGLKLGKFLIYRRNERFSYLIGAEAGGAEGLLGSDLEYGRDVMLLYRLLR

SEQ ID NO: 330775 - protein, 111 aa, Zea mays
  Clone ID: MRT4577_64770C.1.pep
SIQTALPAGWSTWRLEQRRRQKPERTEERSRVSGGWEGFWRVSGGWEGSWWLGGFLEGRATLDGPKTRVKPSTKTATTKNDQEVFDQTTNRPGRRLVGRLGRLETLIASSS

SEQ ID NO: 330776 - protein, 109 aa, Zea mays
  unsure (1)..(109): unsure at all Xaa locations
  Clone ID: MRT4577_64771C.1.pep
FKKKIFFFFFFFFFFGAQTKNQPFYQCTGPGTKQPLDPQPLPVQGGGGGGPPXXLTPTQPGERHGGFFLSPFPFFLPGPXAVPSPSLLFATCLGGGDLVPFGPCGPSPS

SEQ ID NO: 330777 - protein, 47 aa, Zea mays
  Clone ID: MRT4577_64772C.1.pep
TFPPLGITAAPSLGPSTSEACCSFTVSHSTWALATTVFLPSTIGSMT

SEQ ID NO: 330778 - protein, 163 aa, Zea mays
  Clone ID: MRT4577_64773C.1.pep
TKKKCLAAAIECINKAARRGVHSICRAAGAPRDEGGLPDHGAGQGPVELVVGLGGHERWLDALRAWAKLACFNLRGFILYCPACVLSVLTVCVCLCVCSRYHLPRSPAASVTKAAKSTLEMGKEMVEKLAESAARATEEALERTTEKVRRKVSPSARRPDGDL

SEQ ID NO: 330779 - protein, 161 aa, Zea mays
  unsure (1)..(161): unsure at all Xaa locations
  Clone ID: MRT4577_64774C.1.pep
MSGNRNGRGXRVAPRRPVATCMAAIIVCVVVLLVAASALLFLLSSPPPPATGVPGNGPPREPVELAIGLAGHERWLDALRAWAKPHCFGLRVCVCVARYHLPRSPAASVTKAAKSTLEMGKEMVEKLAESAARATEEALERTTEKVRRKVSPSARRPDGDL

SEQ ID NO: 330780 - protein, 114 aa, Zea mays
  unsure (1)..(114): unsure at all Xaa locations
  Clone ID: MRT4577_64775C.1.pep
MRVVLVALPLLTLSASATSTLTIGGXDAHPWSPVYIPWSRHFTPAVQLPPTGHLPTGLQLCTTGQMPPPXHVQAPDHLPWTPCHXPTHSXRSHSNXQAHPCPKTTLIMQRPLPT

SEQ ID NO: 330781 - protein, 84 aa, Zea mays
  Clone ID: MRT4577_64776C.1.pep
FISQCNDQKRNRMHLMIDKHSLEGVQQPRCLPTHVFEVRETADVMGPWLTAIIPVLVIHVHLRSMCSTHSADRLPSILHLPGID

SEQ ID NO: 330782 - protein, 116 aa, Zea mays
  Clone ID: MRT4577_64778C.1.pep
VEAGVRKGENLNKMCAMGMGAFPREVRPGFLPGGKGFFAYFFKNPGGGGFLVFQIWGGPIFGVLGSGGFGPLWFQFVGPLVPCLARPGSDCGPCFFSEFFFRIIFFLPGDNFFPPW

SEQ ID NO: 330783 - protein, 119 aa, Zea mays
  Clone ID: MRT4577_64779C.1.pep
MVSIAFGWTSEVISNDQIRQMQIESAGQVFRVLYEPIKKRDTLLREEIDYSGLSSNFLSPSMIAALTVLYMDKHQNTACRNLVVESEAKKSLVLPTWSGFHACCSCTTGVTRQQATGYV

SEQ ID NO: 330784 - protein, 126 aa, Zea mays
  unsure (1)..(126): unsure at all Xaa locations
  Clone ID: MRT4577_6477C.1.pep
ASGSFVVWGCGRXXFSLGGXLCPCFXFVAGPVPCXXAVARRGGFXASARXPXXWVPXGXPARXFXLFRSAPLLLLAGPVXSCPXXWRGXGPSGPCFSVGGSLSPLALXARLRSLGKKMPRAVSLPG

SEQ ID NO: 330785 - protein, 159 aa, Zea mays
  Clone ID: MRT4577_64780C.1.pep
MTLEALCRDVLIYDTFNAADASAASAGMGELFRQCTTGGGGTSAGASQANSVQQGQMKRRRRQGSTKNADSQQITHIKVERNRRRQDTEYLAALRSLMLDFYDVQSDQASIISGSIDFVKELERQLQSPGGAEDAAAQRPTQRTQAVIMLSISFQSCFV

SEQ ID NO: 330786 - protein, 71 aa, Zea mays
  unsure (1)..(71): unsure at all Xaa locations
  Clone ID: MRT4577_64781C.1.pep
GPSTVVPYAAPPPQYDGYGYPPPGYGYLPPPPQQAGYGYGYPPPQAASYGYQQXAVRPQKKKTAAGTSSRS

SEQ ID NO: 330787 - protein, 194 aa, Zea mays
  unsure (1)..(194): unsure at all Xaa locations
  Clone ID: MRT4577_64782C.1.pep
MDRDLFRTVKQGTRNQARLLYHRLVCRLPHLLAVTLLLVVAPPLVSTLSLAALWGEARANAAVLVAARAGCAAAVYAYATSRPRPVYLVDLAGYKPGPAHEATRAQAIRQFGLAGGFDDESMSFQKRMMERSGLGEATHFPASLMSIPVDMCLQTARDESEAVVFGVVDELLAKTGVRAEDLRVVIANXSLYSP

SEQ ID NO: 330788 - protein, 98 aa, Zea mays
  Clone ID: MRT4577_64783C.1.pep
SPLDHGLHMHYTRRDQPHVAQSVRVSKVKVPARPFLRDRLAIDTTISMPSPADTITTGATVLRGCLDRDTPPSHGLATSRLVLGYVRKPVRTRGRTRR

SEQ ID NO: 330789 - protein, 66 aa, Zea mays
  unsure (1)..(66): unsure at all Xaa locations
  Clone ID: MRT4577_64784C.1.pep
KCNFRTSKELRTYQKGQFQLSSILSXSRQYLESQKVIINSYSILKHRSSLFTEITLHVLLNQTKNN

SEQ ID NO: 330790 - protein, 96 aa, Zea mays
  Clone ID: MRT4577_64785C.1.pep
APTTSGSGARRPCHCPAHGRCWLWLHRVDVDSNIHIMAKQRHLIKVLIVILKCMLLSLGGRINIHLGILTGSSRRHRLLNGLQYIENGRTNYDKNK

SEQ ID NO: 330791 - protein, 85 aa, Zea mays
  Clone ID: MRT4577_64786C.1.pep
GVVWRSFLFCQEHIICEFVRFSFLQFPYRGQIQCFIQGSKHNWFIAPAFFFFAGIKNLLLLKKLHSLLPKFFKRYNFFFKTWPNL

SEQ ID NO: 330792 - protein, 115 aa, Zea mays
  Clone ID: MRT4577_64787C.1.pep
AMKVSTFLYHGVALLGGEVGRVVGTGGERGDGEEETAMTWACGGEEAGDQVWRRKAAAPNPREQQIRREHGSRRVANDERAAYCAGLEAGRGRDTARVEGGGGMVAPSGEGEKRR

SEQ ID NO: 330793 - protein, 104 aa, Zea mays
  unsure (1)..(104): unsure at all Xaa locations
  Clone ID: MRT4577_64788C.1.pep
KVSALKIFGSHLVGCSEAPCFEGCSATQMLSDIHFQRAWVQDVILPVNELQQSWRMTLEXDRSCVVDLFVVPKXAERRFWRPGMYVMIICVYIAAYQAIKVPYS

SEQ ID NO: 330794 - protein, 36 aa, Zea mays
  Clone ID: MRT4577_64789C.1.pep
QNVKTSPSGKNGIGKIPGGVSIEIVFDQAIVLFLKI

SEQ ID NO: 330795 - protein, 88 aa, Zea mays
  unsure (1)..(88): unsure at all Xaa locations
  Clone ID: MRT4577_6478C.1.pep
CPLFDXXLLASIERXLSDXXXHVNLIXGSDXPKXPKAAXPAXXAEGKXPPXGADAXXLYTTXLXXIRXTFXEXXPXXXXMEAXDVKLI

SEQ ID NO: 330796 - protein, 107 aa, Zea mays
  unsure (1)..(107): unsure at all Xaa locations
  Clone ID: MRT4577_64790C.1.pep
GWGGWSCVFFRGLPLSFVCARMVCGWSVCFFCCSGGGCRGASLGCAACLGGLLGGLAACVGWLRSGGRALSVIGRRWAAPAXRLLLPLPWCPXXWCVRLSGHVIGVL

SEQ ID NO: 330797 - protein, 34 aa, Zea mays
  Clone ID: MRT4577_64791C.1.pep
APEYLKVVPSVGIAFMTYETLKGLLSSIDIDDES

SEQ ID NO: 330798 - protein, 171 aa, Zea mays
  Clone ID: MRT4577_64792C.1.pep
SSRPPQFPHAALPGSLPRALVCAPLPASPPPVRPHLPCRAGGLELSPALNPSPSSLRLTAPVGPAPLPLRACHGCCPLASLASSSSRRSKPPRPQVLATFCSSSTSQRSLLLVSMPSRAPQPHGGALLPPSPGVPSLYARSTSPVPNARPSGTSLDELVARLTWPSTLPLG

SEQ ID NO: 330799 - protein, 83 aa, Zea mays
  unsure (1)..(83): unsure at all Xaa locations
  Clone ID: MRT4577_64793C.1.pep
LLPAPILCALLPPRRIPTRASSTAIRSTTATTTTPXPPPPPAPPVRPPPPPPPLHCPXPLPCTPPLSPLYXPPSPPPPPPPPP

SEQ ID NO: 330800 - protein, 146 aa, Zea mays
  Clone ID: MRT4577_64794C.1.pep
MGRVRTKTVKKSAKVIIERYYPRLTLDFETNKRICDEIAIIASKRLRNKIAGYTTHLMKRIQRGPVRGISFKLQEEERERKDQFVPEVSALDFTQNSESGQLDVDTETKDLLKHLGFESIPVNVIPVTQQQIPERGQRYGNRPRRD

SEQ ID NO: 330801 - protein, 76 aa, Zea mays
  Clone ID: MRT4577_64795C.1.pep
ISRPNTICMSLCTIHGILFIDLWTFFHSFCLNSNFSLSIVSSIPYAYISGKKFLRHICCGCSVTFSLMLNVTQEYP

SEQ ID NO: 330802 - protein, 165 aa, Zea mays
  unsure (1)..(165): unsure at all Xaa locations
  Clone ID: MRT4577_64796C.1.pep
FTREIITTNTLGLMICCREAINMMRNQPRGGHIFNLDGAGSDGRPTPRXELQMNEVNNVMVHNLSPGMVTTDLLMSGATTKQAKFFINILAEPPDVVADYLVPNVRAIRVKPNMQVKKHGCFVGLVVRSASFQLKRLGTILFIKRHLLFSKDRMYYKCHLSKRIQ

SEQ ID NO: 330803 - protein, 73 aa, Zea mays
  unsure (1)..(73): unsure at all Xaa locations
  Clone ID: MRT4577_64797C.1.pep
SILIGGGAFFASKGFFFNKTGFLAHCIGHVGPCPKRPVFFNMNKNIKKINXXGLLKRPXFKKSPXXXGRPPAS

SEQ ID NO: 330804 - protein, 73 aa, Zea mays
  unsure (1)..(73): unsure at all Xaa locations
  Clone ID: MRT4577_64798C.1.pep
SGFWFWSAXXWLGPSSLAXPRXSXXCCXALGGSGCXSCXWFGXSCAAACSCGWAPPSXSFIGAXXXXFFXXKX

SEQ ID NO: 330805 - protein, 393 aa, Zea mays
  Clone ID: MRT4577_64799C.1.pep
METISRSRPQLTLTCDLRAFTAAGATRARAPGATSLPYGPPAFLSRAGRRPSMAATFTVAARLPLRGPARAPSRPAVAAVTRLRSRQERRGLAATGGRGPARVRAETFSGGGGVGRRDPMAPPYNVLITGSTKGIGYALARKFLEAGDNVIICSRSAQKVESVVGDLKEEYGEQHVWGTVCDVRNGKDVKALVEFARDKLKHIDIWINNAGSNAYTYKPLVETSDEALMEIITTNTLGLMICCREAINMMRNQPRGGHIFNLDGAGSDGRPTPRFAAYGATKRSVVHLTKSLQAELQMNEVNNVMVHNLSPGMVTTDLLMSGATTKQAKFFINILAEPPDVVADYLVPNVREIPTKQSMKPTYIRFLTGLKAYSRIFSRLAFGARRNKYVTED

SEQ ID NO: 330806 - protein, 127 aa, Zea mays
  unsure (1)..(127): unsure at all Xaa locations
  Clone ID: MRT4577_6479C.1.pep
KRKSDGXGDAPPGERDPHPGTAPPRAGPSGGRSTRRXSKRGRGGGPQPKPGGXGAAGDPPPPPRAPPAGRPRRPPAETAKGSPPPRLPRADLKEAKDFGATKRVVSNGLSFLFRVKNVSKLSVRGSL

SEQ ID NO: 330807 - protein, 124 aa, Zea mays
  Clone ID: MRT4577_647C.1.pep
VYYLHCLFIFFFTKTHIHYCQRITMELPEHIISGYFIYSGPNSTFLKLGGGFRAPVPRGGGGFLQAAFRWSTQPGLGGKGAPHGESTFLCKEDPRTHIHLRDRWTITACKMGVLETWRTHQTFM

SEQ ID NO: 330808 - protein, 84 aa, Zea mays
  unsure (1)..(84): unsure at all Xaa locations
  Clone ID: MRT4577_64800C.1.pep
MLDEDQTAVCDEQTRSAPILNERILYYMLRRSAAAHAWHDLEIGPDAPAVFNVVAEITKGSNVXYDLDKKTGLIKVDRILYSSV

SEQ ID NO: 330809 - protein, 54 aa, Zea mays
  Clone ID: MRT4577_64801C.1.pep
LVLKLCDVKVNRLRQDCQRSFMRWRKDPTKKLSPEEVSVFRGSPCRHHVRVQVP

SEQ ID NO: 330810 - protein, 125 aa, Zea mays
  unsure (1)..(125): unsure at all Xaa locations
  Clone ID: MRT4577_64802C.1.pep
KKLKELEKEAYRLAGKNFSLNATADIADILYTHLKLPVPKGCEKGKLHPSTDKQSLDHLRDQHPIIPLIKEHRTLAKLLNXRCGPFVHVLNCALNHKGTXIHGNWLQTSTATGRLSMEEPNLQCV

SEQ ID NO: 330811 - protein, 52 aa, Zea mays
  Clone ID: MRT4577_64803C.1.pep
PKLSETQCLSGARKIGKKVEKSVLPPPLKSFQFFSKTPSLEASCCLHALMYI

SEQ ID NO: 330812 - protein, 86 aa, Zea mays
  Clone ID: MRT4577_64804C.1.pep
YPVPALSRSAPAWLPTPWRSPPRDGRHPHEVGFFGRGPHQHAQDPGQAQVAVSGSPWYGARPSQVPRSLVQLATQATSPASSPDDY

SEQ ID NO: 330813 - protein, 117 aa, Zea mays
  unsure (1)..(117): unsure at all Xaa locations
  Clone ID: MRT4577_64805C.1.pep
AGPGSTPFPRLHPVPPAPCRFRFPRRHGPLASSHVVFPPLHRLVLLGARQQRLIHPAASAPRTGLVVRCSLQELRSRIDFIRNTXKITXGMKLVAAAKVRRAQEAXXSSRPFLETVV

SEQ ID NO: 330814 - protein, 106 aa, Zea mays
  Clone ID: MRT4577_64806C.1.pep
PGYTCSVEILGLVSRKSHYYSARRRCVHHHLLSQLLRVPPPSPAARVTTRADGDGGHGVRYGGDTLHAPSGRRPPQPHQTPHHRREDPANKAALHPRAPADRRHPN

SEQ ID NO: 330815 - protein, 581 aa, Zea mays
  unsure (1)..(581): unsure at all Xaa locations
  Clone ID: MRT4577_64807C.1.pep
MELRQGEGRKAHMAPTAIGNREEIGFFVCQPYHRCSMPLIKMCLAIETFDTLELRAAGCDGTSQVCATREHTTPFRRSFARRCGESKEQRVPDDLWQYSSIKGIEELEDNLSMLGQMIEELELTWNKLAAVRCSCGVFEPIWGKLEIGVPQRTIEGDTGWLVDQEEQVTRSAPYISAEANSKFVDQHTSPEEDFPSADRSHRSVGKVEKLVTSAPPPLSTIGYSVDVADGNEVPPPEKKECEYRNGTWVSDNRRPLYSGWQPEACEMPEFEASQFLRRXKTIAYVGDSLGRQMFQSMMCMVTGGKERLDVEDIGAEYGFVLAPGAKRPDGWAYRFPSTNTTILYHWSSTLCDLEPLNPSDRATSYAMHLDRPPAFLKSNLHRLHVLVLNXRGKMRANRWEMYLGGAPNNDRNTAVIWKAKNFMDSGRAGWADAQLPRHPKLKAFYSSISPRHFFNGDWDTGSSCDNTSPLAKGGSGVHLDRSEDADAEGAVRGTGVRLLDVTALSRLRDEGHISRYNIKATPGVQDCLVRPLNHCLWYRWNHLIRVPAAFARAKYSGPVSGLAVAPSVIRHAIRRRTSGST

SEQ ID NO: 330816 - protein, 237 aa, Zea mays
  Clone ID: MRT4577_64808C.1.pep
MRLGSINGLRFTQLKLVILAFFMLFVLWKWEKGSSYYDSEILQPDPLVLTHPANSKFVDQHTSPEEDFPSADRSHRSVECEYRNGKWVSDNRRPLYSGFGCKQWLSESWSCRLTQRKDFAYEKFRWQPEACEMPEFEASHFLRRMQDKTIAYVGDSLGRQMFQSMMCMVTGGKERLDVEDIGAEYGFVLAPGAKRPDGWAYRFPSTNTTILYHWSSTLCDLEPLNPSDRATSYAMHL

SEQ ID NO: 330817 - protein, 118 aa, Zea mays
  unsure (1)..(118): unsure at all Xaa locations
  Clone ID: MRT4577_64809C.1.pep
LHASLGPVSPYPESPYSLLAAGFQRLGFHNPGASGVAXVXXLSPFXCCRGCGGSRTGRPSPRLRPLSGSWXRPVAVLPRRLWCFPSSWRVPLPGPWLPLFSVSCLPFCARSPAFPVWL

SEQ ID NO: 330818 - protein, 97 aa, Zea mays
  Clone ID: MRT4577_6480C.1.pep
GVLFSNITAIFWEGGYTHYEGLLLVLHKSFILNGSFNSAPNQVYAYIIYFYYVCFILPHTLVLLSILCFFLYTNIKFSSYCIFPFFVITKFFVPFFI

SEQ ID NO: 330819 - protein, 455 aa, Zea mays
  Clone ID: MRT4577_64811C.1.pep
MRLGSINGLRFTQLKLVILAFFMLFVLWKWEKGSSYYDSEILQPDPLVLTHPANSKFVDQHTSPEEDFPSADRSHRSVGKVEKPVTSALPPLSTIGYSVDVADGNEVPPPEKKECEYRNGKWVSDNRRPLYSGFGCKQWLSESWSCRLTQRKDFAYEKFRWQPEACEMPEFEASHFLRRMQDKTIAYVGDSLGRQMFQSMMCMVTGGKERLDVEDIGAEYGFVLAPGAKRPDGWAYRFPSTNTTILYHWSSTLCDLEPLNPSDRATSYAMHLDRPPAFLKSNLHRLHVLVLNTGHHWNRGKLRANRWEMYLGGAPNNDRNTAVIWKAKNFTVHNVVRWVDAQLPRHPKLKAFYRSISPRHFFNGDWDTGGSCDNTSPLAKGGSGVHLDRSEDADAEGAVRGTGVRLLDVTALSRLRDEGHISRYSIKATSGVQDCLHWCLPGVPDTWNEILAAQL

SEQ ID NO: 330820 - protein, 159 aa, Zea mays
  unsure (1)..(159): unsure at all Xaa locations
  Clone ID: MRT4577_64812C.1.pep
ALVREFCAXTGPNQDDALARTEKLSXVNPMLGSRDCXFGLSNPELXRMPARPIXEAVMLLTNHSLWEHSNTLVGQGCPEIMVALARAPHDLGLKVTVMRPGAQKVGRIVADTIGGXAGAMVAIRSSXLGADDTLEQAEFFFFRTNYRTHMTFGYLRDDV

SEQ ID NO: 330821 - protein, 47 aa, Zea mays
  Clone ID: MRT4577_64813C.1.pep
IRLERSWCTAFFYHSGIKRGHVRGAMMVFTALMARRAPALTSHDDEH

SEQ ID NO: 330822 - protein, 118 aa, Zea mays
  Clone ID: MRT4577_64814C.1.pep
TRYSSIRWSMLLVLPGLYLMSKRGIKAPWRAETRNRIGEGKKQRVAVRSSDVWSVRQCWTGLHQLGHRVGHLSLLRLVAHVCVFLSGYWVMGRVVGLGGALGGTGRCRPFLTSSRRLE

SEQ ID NO: 330823 - protein, 100 aa, Zea mays
  Clone ID: MRT4577_64815C.1.pep
PGCFFFFNFFFLFFFFFFFFFKEPYKLLKFPAYGFLLTSCTLSIFHTSKGGGGIPKTSGQSLFTAMIMDVSPLHTGHLKVLRTCSCPETKRSFSNRGTNC

SEQ ID NO: 330824 - protein, 43 aa, Zea mays
  Clone ID: MRT4577_64816C.1.pep
MALRLNDVALCLSPQLADRTPRCSIRKINADNTITIIPHYQPR

SEQ ID NO: 330825 - protein, 101 aa, Zea mays
  unsure (1)..(101): unsure at all Xaa locations
  Clone ID: MRT4577_64817C.1.pep
NGYTEFFFFANNGLWDLVPNKHLFAFFKDEDNPXVSPRKLSEFPFRGGGPPNIPCIFLKFFPHKMVYGFPPPPHKSWLPPSCFYFPQFSPLILPPPKFGFP

SEQ ID NO: 330826 - protein, 133 aa, Zea mays
  Clone ID: MRT4577_64818C.1.pep
MAKGGLSKLRCMIKRWHSSSRIVSRAPSPSSAHDGATSGDAHGASFHGADEVPKGLHPVYVGKSRRRYLVAEELVGHPLFQTLVHRTGGTTGGAAAGTVVGCEVVLFEHLLWMLENADPQPESLDELVDYYAC

SEQ ID NO: 330827 - protein, 103 aa, Zea mays
  unsure (1)..(103): unsure at all Xaa locations
  Clone ID: MRT4577_64819C.1.pep
NVFCKGNNTATPSTDICAMINAIAMSACVANTTNIPEWSLSPIANVLLPYXLRSTIASLXTTEMLRPIRXLQHALAGNIPISPLAAKQSPALSLVQPLVQTIR

SEQ ID NO: 330828 - protein, 45 aa, Zea mays
  Clone ID: MRT4577_6481C.1.pep
GSSAPMLTDKLHLYHIELLALWLLLNHLFFSFNDLLLNYLYLLVT

SEQ ID NO: 330829 - protein, 70 aa, Zea mays
  unsure (1)..(70): unsure at all Xaa locations
  Clone ID: MRT4577_64820C.1.pep
ANSWLHINQLAEVKEIENNMRELEGICNPIIAKMYQGXGPGMGAEAGMDEDAPTGGSGAGPKNQPVDKVA

SEQ ID NO: 330830 - protein, 109 aa, Zea mays
  Clone ID: MRT4577_64821C.1.pep
PIDRVFSTYEFLVEVVARFLVHPNLTSVKLKSTRVLTNYCVVRTLDIRPWKYLVPCMREDLFARITGLTNNSYFDGAHEVRHYLRKHSDLGCIVLEVAKDSQIPRQVNC

SEQ ID NO: 330831 - protein, 95 aa, Zea mays
  Clone ID: MRT4577_64822C.1.pep
PIRDRPTATLKGNASPPPATAGARGSVDGPATRFLHRHLGWQAPLKHTHWLPQHHLRRQTLTWTGGFDTHPGTIAYPKVFHLDAGRRELCSKGSL

SEQ ID NO: 330832 - protein, 65 aa, Zea mays
  Clone ID: MRT4577_64823C.1.pep
KQCLVWVPKICPFCWALKIMLGVGHLKKKKKKKKKKKKKKKKKKKKIKKKKKKKKKKVLCVVTTA

SEQ ID NO: 330833 - protein, 85 aa, Zea mays
  Clone ID: MRT4577_64824C.1.pep
NPPSQVPSPPNASDQPIRGRTEKKKSCRSNFRRHGTRSPDSCGEGDPGLLLHRDHRRPDPLDCHPVPPDDELSPGGGAASDLHRR

SEQ ID NO: 330834 - protein, 97 aa, Zea mays
  Clone ID: MRT4577_64825C.1.pep
KYVFWFHTFFYLIVKLFFLRKMQIFSKRALNNSWQPPQKALLWGGKGENTGPPPGHGSGARGFFRGKGKKPPSPRWGEDHVHRPLLGGLFKCPTPVF

SEQ ID NO: 330835 - protein, 78 aa, Zea mays
  Clone ID: MRT4577_64826C.1.pep
TDLFTNVPSPTPLNSEQTVQHQTARSDGLICHRRLTVQKINAPIAIGRTRDVSSHACFTGCPLTHWSTCHFNTKKIGT

SEQ ID NO: 330836 - protein, 150 aa, Zea mays
  unsure (1)..(150): unsure at all Xaa locations
  Clone ID: MRT4577_64827C.1.pep
MANVHLYAVSACAIILSLATYALAGDADMLQDVCPADYTSSVKLNGXFPCKANFSCARXFFYGLRNPCNTNNLSGXYSTAVNEDKFPGVNTLRVCMARIDYALGGQNTSYTHTLATXIILXLDSTLKVSFITIGNTHFTKTVTKDDVFVF

SEQ ID NO: 330837 - protein, 280 aa, Zea mays
  unsure (1)..(280): unsure at all Xaa locations
  Clone ID: MRT4577_64828C.1.pep
MASPDATXYFSGASSRCLSGADEVDNEEALQWVMMERLPSFERLRTGLVRPADASDGGNASDRGRRRRHTHEEVDVRAMGLAQRQAFVERVLRVTDEDNERFLRKLRPRIDRANIQIPTVEVRFRGVNVQAECHVGTRALPTLANVSLDVAESLLGRVGVKLGKRKTLHILKDGSGVVRPSRMTLLLGPPSSGKTTLLLALVGKLDPTLEVSREVTYNGYGLDEFVPXKKAAYICRHVHEEGRRRRRRRDGAEAGGGSGGLLAVDQPRGRRHRRLSGVVP

SEQ ID NO: 330838 - protein, 80 aa, Zea mays
  Clone ID: MRT4577_64829C.1.pep
KILFWPPYLCLYTQITYVLSGPFTKKKWPWQRDRTTGGQPKPHCKNAKWCGGGLALPDVTPSWGLAYTTKGEGTEGVATG

SEQ ID NO: 330839 - protein, 228 aa, Zea mays
  unsure (1)..(228): unsure at all Xaa locations
  Clone ID: MRT4577_6482C.1.pep
MAATAAEEMERMVEAEWEEGKQGMRKRKRYGLVEYRALPAYLRDNEYIHRHYRCEWPLPQVLLSAFSIHNETLNVWTXTQVPNAVDIRSLQHLPDVLRKADIHKIQAELVSCLPSLPHLSDLQKLKDELKTSWNSMEVLPSLSRWHLLELLANCLPHRFTHPNETSLSVLVSSLQLAELLDYILLLLLQGYYCFALRSREVNFSEVGEDFTSVGLYQRKSEDQCDRSF

SEQ ID NO: 330840 - protein, 109 aa, Zea mays
  Clone ID: MRT4577_64830C.1.pep
GAAPSDQDGAGERVQMLRMVTPAHGELGTTTQACGLVHVHDRSVLGHEQEQQGGPRIGPSGPGTGASSGAVAWASAVRARARVVAVRRVHDLQSGHVHHHAHLACVPSF

SEQ ID NO: 330841 - protein, 130 aa, Zea mays
  unsure (1)..(130): unsure at all Xaa locations
  Clone ID: MRT4577_64831C.1.pep
AQWXKPPNPKKAFRDEAVTGDRSHSAKSSDEDRPIIGMVAAHWKDKEPANFTSKWWDGNGIPNSTNKYKEDQKVSWHATPFEERLEKALSEEKSLSERNCSSGKTSQFLGVEGEESDTAGSNRLYATAYA

SEQ ID NO: 330842 - protein, 125 aa, Zea mays
  unsure (1)..(125): unsure at all Xaa locations
  Clone ID: MRT4577_64832C.1.pep
MANXRSHVAANXDRACMKVAELQAKRLHRFITLQMHDKVKEIDGDQDTHRATSYHDFTNSLPENDCRYAIYDFDFDTAQDVQKSRIFYILWSPSSARVKSMMLYASSDHRCQSDLNGXIEDELQA

SEQ ID NO: 330843 - protein, 77 aa, Zea mays
  Clone ID: MRT4577_64833C.1.pep
GFIVAYVSFGDGGKIAFFVATDMASLFVLFSVLSFGVCQFKCPMLSVNQSVSSCSFLLYQMIMGQSFFKLSYLLFIV

SEQ ID NO: 330844 - protein, 230 aa, Zea mays
  unsure (1)..(230): unsure at all Xaa locations
  Clone ID: MRT4577_64834C.1.pep
MAASTMXAISSTAMDGTPIKGDSFGEGRITMRKTVGXKPKVAXSGSPWNCPYRIKYLGPFSGETPSYLTGELPGDYSXDSGGVSYDRXTFTQNRIAEVXHSRWVMICALGCVVTQSVSPCIVAXSERPXVKAGSQIFIDDAVDYLGNPNLIHTQSSXLTSWAXSYVLMGXAVQGYQIXAGGPLGXVFYPLYPGGSFDPLGLCDYPDAFAELKVNEIKNGRLAMIFMCGFF

SEQ ID NO: 330845 - protein, 40 aa, Zea mays
  Clone ID: MRT4577_64835C.1.pep
AKGKGRKKSSNSWIELDDLFVPLFINRLTCNQQDLSIDLI

SEQ ID NO: 330846 - protein, 100 aa, Zea mays
  unsure (1)..(100): unsure at all Xaa locations
  Clone ID: MRT4577_64836C.1.pep
TNLLHLGNFKRSKLSLQFKAPLLEIHGWSSSXNGSGPPPQLGGGDALHDKGEPHRRLGGRLPLRFPFPFLRHRRERFGGGGGDRRAGRVQTNSXPXPSRT

SEQ ID NO: 330847 - protein, 59 aa, Zea mays
  Clone ID: MRT4577_64837C.1.pep
SLTRARPLGMRSWFTGRATAKGGGTICAMTIPFITIGMDNLIVLLRPHRRLYKGLGKTR

SEQ ID NO: 330848 - protein, 107 aa, Zea mays
  Clone ID: MRT4577_64838C.1.pep
NTRTTAGYNKRLVQWLQTMHPVMNECTFLQKQHCLYCYLGYKWRHSVYTLYVDSQAMTMNLTDKAMRLLRADEPYDDLACSCTQMRSLAVYDKTSFGYCALNHVPGI

SEQ ID NO: 330849 - protein, 49 aa, Zea mays
  Clone ID: MRT4577_64839C.1.pep
QFKIPIVPLALLPCLSCLTADELRRLDSISAYAIVLSVILGFSSLEVFS

SEQ ID NO: 330850 - protein, 236 aa, Zea mays
  unsure (1)..(236): unsure at all Xaa locations
  Clone ID: MRT4577_6483C.1.pep
MKTPMSPPACLPMVLDRHETPRTSQAPSRLAAAPPKAIARPPCPNPQGQEDNGSRGPLVEIHSPTQTQERNKASGTTNASSAPACAPRQIFDQGSRITSVHPIPGRLSSPRSRRSMAATTAEEMEKMVEAEWEEGKQGMRKRKRYGLVEYQTLPAYQRDNEYIHHHYRCEXPLPQVLLSTFSIHNETHRMVASSIPECSSISNFPALYGNLRTISPNLLSACCNKYLMGEVRINDL

SEQ ID NO: 330851 - protein, 81 aa, Zea mays
  Clone ID: MRT4577_64840C.1.pep
MASKRIQKELKDLQKDPPTSCSAGPVGEDMFHWQATIMGPSDSPYSGGVFLIYVYALVPVPFPIPNSIICLILEKREEDES

SEQ ID NO: 330852 - protein, 161 aa, Zea mays
  Clone ID: MRT4577_64841C.1.pep
KCLSYSKPCNLVYVCDTQVAFRTKVFHPNINSNGSICLDILKDQWSPALTISKVLLSICSLLTDPNPDDPLVPEIAHMYKTDRHKYENTARTWTQSTVPRVVLNAECCCIVSLGSCNSQCQKKLVLGTILRRMALQASRCLRPSSLHQSSCWKKHNVLSLE

SEQ ID NO: 330853 - protein, 134 aa, Zea mays
  unsure (1)..(134): unsure at all Xaa locations
  Clone ID: MRT4577_64842C.1.pep
RIQKXELKDLQKDPPTSCSAGPGGEDMFQRWRQRGFRRSSRICRRTLPPRAVQVAFRTKVFHPNINSNGSICLDILKDQWSPALTISKVLLSICSLLTDPNPDDPLVPEIAHMYKTDRHKYENTARTWTQRYAM

SEQ ID NO: 330854 - protein, 99 aa, Zea mays
  Clone ID: MRT4577_64843C.1.pep
KCLSHSEPCNLVYVCDTQVAFRTKVFHPNINSNGSICLDILKDQWSPALTISKVLLSICSLLTDPNPDDPLVPEIAHMYKTDRHKYENTARTWTQRYAM

SEQ ID NO: 330855 - protein, 59 aa, Zea mays
  unsure (1)..(59): unsure at all Xaa locations
  Clone ID: MRT4577_64844C.1.pep
EHNIYLRALYRLCFPKCLTISMHMXACIYPNITSTTVTTRWSMDHNMCCLQHYHWEGSH

SEQ ID NO: 330856 - protein, 77 aa, Zea mays
  Clone ID: MRT4577_64845C.1.pep
QGTIPLLQKFNPLTGNNTRYTKIHPTKPYHTLLYFYYTLIPGCHQPWGLYLEGVGGQTSPNLKEGGGLKRVNSPPKA

SEQ ID NO: 330857 - protein, 86 aa, Zea mays
  Clone ID: MRT4577_64846C.1.pep
PCVSSEFGSRGGRLLCGGTPALLRRVAIMYNGRLQDLARAHTPVVVRHAGADVLTHGATTSQTCSEPLRLTIVRAHAQQEPHKFHD

SEQ ID NO: 330858 - protein, 147 aa, Zea mays
  Clone ID: MRT4577_64847C.1.pep
MASKRIQKELKDLQKDPPTSCSAGPVGEDMFHWQATIMGPSDSPYSGGVFLVTIHFPPDYPFKPPKVAFRTKVFHPNINSNGSICLDILKDQWSPALTISKVLLSICSLLTDPNPDDPLVPEIAHMYKTDRHKYENTARTWTQRYAM

SEQ ID NO: 330859 - protein, 147 aa, Zea mays; identical to SEQ ID NO: 330858
  Clone ID: MRT4577_64848C.1.pep

SEQ ID NO: 330860 - protein, 147 aa, Zea mays; identical to SEQ ID NO: 330858
  Clone ID: MRT4577_64849C.1.pep

SEQ ID NO: 330861 - protein, 402 aa, Zea mays
  Clone ID: MRT4577_6484C.1.pep
MAATAAEEMERMVEAEWEEGKQGMRKRKRYGLVEYRALPAYLRDNEYIHRHYRCEWPLPQVLLSAFSIHNETLNVWTHLIGFFIFLALTIYTATQVPNAVDIRSLQHLPDVLRKADIHKIQAELVSCLPSLPHLSDLQKLKDELKTSWNSMEVLPSLSRWHLLELLANCLPHRFTHPNETSLSVLQSMKEDLASLIAPQLIRPIARWPFYAFLGGAMFCLLASSTCHLLSCHSRRLAYIMLRLDYAGIAALIATSFYPPVYYSFMCYPFFCNLYLSFITILGVATIAFSLLPVFQNPEFRTIRACLFFGMGASGVIPVLHKLVLFWHQPEALHTTGYEILMGLFYGLGALVYAARVPERWMPGKFDIAGHSHQLFHVLVVAGAYTHYHAGLVYLKWRDLQGC

SEQ ID NO: 330862 - protein, 147 aa, Zea mays; identical to SEQ ID NO: 308221
  Clone ID: MRT4577_64850C.1.pep

SEQ ID NO: 330863 - protein, 147 aa, Zea mays; identical to SEQ ID NO: 330858
  Clone ID: MRT4577_64851C.1.pep

SEQ ID NO: 330864 - protein, 135 aa, Zea mays
  Clone ID: MRT4577_64852C.1.pep
PIFLGSRSLKPLIGTLKGTPHGKHDGETPTCEPKRKAQKPKVRGKRALPIKKERKKTNPPAPKGLAQLKGAPGGTPPPPIFGKAVQGGALSPLRLANFWKGEAGGPFWLSPHLEKGDFSKSLILWNPRVFSHSRV

SEQ ID NO: 330865 - protein, 144 aa, Zea mays
  unsure (1)..(144): unsure at all Xaa locations
  Clone ID: MRT4577_64853C.1.pep
GHHVDEVGCGAGLRGARALGEHGRGSSASGAASDRIAYCDLLTLSLFEYCALREVSMHILQNSPWINQLHKXRYRKRVETDAQLRVRLVNLLLFTILAVIMDGIKDQIDPRDKVHQXGRMCKNMCXLTIVILMCLKPNCALNCY

SEQ ID NO: 330866 - protein, 286 aa, Zea mays
  Clone ID: MRT4577_64854C.1.pep
MGKKISTKKQKNDKTNRQFQENHKKADIVDLLHEDDGDEGTYIDCNEIRKQKTDDVRVKSRGKMQSGKKKVSRCQASDGSHNGGKEMKLSSDIEVCNRRGDGTTAANFEEIPKEKADAVKVKPKMQGDKKKTSKHQAGDGDKGAKFSCDIEGCDMSFSTQHDLSLHKRDICPVKGCKKKFFCHKYLLQHRKVHLDERPLMCSFPGCAKTFKWPWARTEHMRVHTGVRPYACTEPGCTQTFRFVSDFSRHKRKTGTRVTRKRNAAFDCSCTSTGFFSDGERSEGDGC

SEQ ID NO: 330867 - protein, 70 aa, Zea mays
  Clone ID: MRT4577_64855C.1.pep
ASPSRGLKGCKEGDIAVSLVGIMNLKVTKCYVKPYKTGKMGLKFNPRVSNPPLLVFKGWKAPKKAPFINV

SEQ ID NO: 330868 - protein, 103 aa, Zea mays
  Clone ID: MRT4577_64856C.1.pep
MDRVTKLASQRAVVIFSTSSCCMCHTVTRLFRELGVNPTVVELDEDPRGKEMEKALARLLGRNPAVPAVFIGGRLVGSTDKVMSLHLSGNLVPLLRNAGALWV

SEQ ID NO: 330869 - protein, 105 aa, Zea mays
  Clone ID: MRT4577_64857C.1.pep
MGVKFVESSKGEGELISSSHDNERVTDSIASDRKAILSLLQGMLLDDSDPLMLLSSNDTSRIEVGLGLSQLQFRPPDLDPSRCSLGQAEEIGTSIETTSFEEHIV

SEQ ID NO: 330870 - protein, 59 aa, Zea mays
  Clone ID: MRT4577_64858C.1.pep
YMTLYTQSIHSANSACFYSHINKLLLWSLLTIVHLNQRSTWLAAFDMNKLKKNTRMWHA

SEQ ID NO: 330871 - protein, 44 aa, Zea mays
  Clone ID: MRT4577_64859C.1.pep
IVSQDEAMSCKYDMYRKLGAQSSKPSRSSGLTFFLLRVFHVNVF

SEQ ID NO: 330872 - protein, 263 aa, Zea mays
  Clone ID: MRT4577_6485C.1.pep
GRDPLHVQLLVTVALAIGALCQYSPPANSTSTFTNPIVDTGADPWMFRHGGFYYMTYTNNVNITLWRSKSITDWNGAESKTIFHPEPNKPYSTDLWAPEIHQIGGAWWVIFTADPNYDSPPPEVEMWCEYNCPAVNHRMFVVAGEGQDPWTATYRYHSQLETYDQFAIDGTYFQDKNQLYHIYSCWYRKYDGWPANLCITKMSDPSTTTSPFSERQVISVPEYAWEKTPFGRASNDRLSSNEGPQQLTNPTTPKLPHLQRRPL

SEQ ID NO: 330873 - protein, 92 aa, Zea mays
  Clone ID: MRT4577_64860C.1.pep
VIQDGVQISPEIPKTGGDIHAPVPGILSKDATGGNEDIDLSIMSMIKIKKQFDLCNVMASDIMGHNNCPLSAGDISLDATGLFYKKDFLNFY

SEQ ID NO: 330874 - protein, 70 aa, Zea mays
  unsure (1)..(70): unsure at all Xaa locations
  Clone ID: MRT4577_64861C.1.pep
RVGTKSRVETLERQARIASAXXXHPELPIIITGSKDGTAPMWQSNNHKPENTPNXGPEPGWALRYIKRVK

SEQ ID NO: 330875 - protein, 206 aa, Zea mays
  unsure (1)..(206): unsure at all Xaa locations
  Clone ID: MRT4577_64862C.1.pep
MMVSAANEQAVLVNDLLSKINTAPTSEEVEQAAQDLAKTVQEKGFIMIKQYKILDQLLASVKNKKSGLEREGGLIGFNAMEEVLRHEIEPLMIQHLATFLDLYADKGGVVQEAAQTASRTLVDMIPPEATKVLLPALLEGMGHNSSSSKKWQTKIGALKLLERFTERAPDQNRECLPEIIPAVSDCLSDTKKEVAAAAXKAMMKVC

SEQ ID NO: 330876 - protein, 392 aa, Zea mays
  Clone ID: MRT4577_64863C.1.pep
STQNIKSLETALASQSFLQLGLLTGLPMVMELGLEKGFRAALSDFILMQLQLASVFFTFSLGTKAHYYGRTILHGGAKYRPTGRKFVVFHASFTENYQLYSRSHFVKGFELIFLLIVYHIFRRSYVSNVVHVMITYSTWFMAVAWLFTPFLFNPAGFAWQKIVDDWADWNRWMKNQGGIGVQPEKSWESWWNSENAHLRYSVLSSRILEVLLSLRFFIYQYGLVYHLNISQDNKNFLVYLLSWVVIIAIIGFVKLVNCASRRLSTKHQLVFRLIKLLTFLSVVTSLVLLYCLCRLSIMDLIICCLAFIPTGWGLLLIVQVLRPKIEYYAVWEPIQVIAHAYDYGMGSLLFFPIAVLAWMPVISAIQTRVLFNRAFSRQLQIQPFIAGKTKRR

SEQ ID NO: 330877 - protein, 69 aa, Zea mays
  Clone ID: MRT4577_64864C.1.pep
SEFYPEGVRGPLTRHRPPPIYHCTVVPHGPRSLVITCRALQGLNPFHNRTMLVHGPFVKRRHRHPKQRK

SEQ ID NO: 330878 - protein, 524 aa, Zea mays
  Clone ID: MRT4577_64865C.1.pep
MDVALSTIVFVIAIFIPALLTLVQRSRSRHAGHNPPPPPEPRAIPLVGHLHHLLRKKPLHRCLAHLAERHGDVLGLRFGSSRVAVVSSASVAQQCLVALDTSFGNRPRLPSARILSYEWSTMGHSNCGPYWRQARRTTSTEFSSVERVQHFADVHEQAARAMARSLCRLALASGRGRALVDVKPRLFEMLMNGLLDMLFKGTASRSGSSDEKDEAVEVSEEARCFMAMAEETMELTLTVWDFLPPLARWLDVDAVGRRLQRLQANRTEFLQRLIEEHKEMEKGGQVTRRTLVGVMLELQDKDPEAYTDQLIRSLCVSALEAGTLSTGYTIEWVMSLLLNNPHIMKKARDEIDACVGEPKRLLDATDLPKLPYLRCIILETLRLYPVVPLLVPRESSTNCTVNGFNIAKGTMLLVNTFAIHRDPRTWDDPETFLPERFEDGSNQSGKTTMDLSFGMGRRRCPAENLGMQLAGIALGTMIQCFNWERVGTELVDMAEGSGLTMAKKVPLEAFCQPRASMVDLLANI

SEQ ID NO: 330879 - protein, 99 aa, Zea mays
  Clone ID: MRT4577_64866C.1.pep
MHSTLVYRNGPPNGAAQGHDANGNGTRGRGGRGRGRGSHHGSPAPDGAPQEQMYGNVPPPASLDQPRGRGRGRGRGGRGRGGPNRGRGNGGAGGNGSQG

SEQ ID NO: 330880 - protein, 139 aa, Zea mays
  Clone ID: MRT4577_64867C.1.pep
MDLSFGMGRRRCPAENLGMQLAGIALGTMIQCFNWERVGTELVDMAEGSGLTMAKKVPLEAFCQPRASMVDLLAYIYIYIYKLYYQDNASTRHYEFSLLLQNKSKALLLLYKITLAMYVCSCRNLLSNNVSCTASYSMK

SEQ ID NO: 330881 - protein, 194 aa, Zea mays
  Clone ID: MRT4577_64868C.1.pep
YGRRLIVESANHLQKTSSKEEATSEGTHRDGSLGSSGHAGRGGTASGAAGGGSSARGSGPDGGFFAGSRGSSRAGKGGSLRADAGKRGGSAGVDGGKGGGSTTSDGADARRDSRADGGLNRVDDRRSSAASGDGRLDLAGNRGEGRVDLGGGKAGTGDHGNGGETHVDGLICGFGGVLDEVTVWLIPAGLEGPN

SEQ ID NO: 330882 - protein, 105 aa, Zea mays
  Clone ID: MRT4577_64869C.1.pep
SIPEKRNLDAQTQIWAGASTNQETRDRIPYYGQTCVDYTAAVGSELRNPSTKGIDRPRDRNQKGGPPRWLKGDKTPRIRITKWGLMRIIGGPGPTKEGPQIECQV

SEQ ID NO: 330883 - protein, 102 aa, Zea mays
  unsure (1)..(102): unsure at all Xaa locations
  Clone ID: MRT4577_6486C.1.pep
VAERRPKIKEASHEWASVNKLKPILMTKPEEITKEEYADFYKSLTNDWEEHLAVKHCYVWGQLWVKAVIFVAKRALFDXFDTKLKRHIIXLYVHSAVIMDNC

SEQ ID NO: 330884 - protein, 89 aa, Zea mays
  unsure (1)..(89): unsure at all Xaa locations
  Clone ID: MRT4577_64870C.1.pep
VCXGXAALXVXVXGRRNFLSVFGXXXFXFFPGPPXXXXVPPSALLPSCXSXXXXCSVXVPXPLRGLXLLVAPPPCPFLXSQSLARPRGS

SEQ ID NO: 330885 - protein, 47 aa, Zea mays
  Clone ID: MRT4577_64871C.1.pep
VILFMKVDVGNGRFLHMKVLRGLSGDDDLKLLDYQTNKTKNDELTDF

SEQ ID NO: 330886 - protein, 142 aa, Zea mays
  unsure (1)..(142): unsure at all Xaa locations
  Clone ID: MRT4577_64872C.1.pep
MAVGKNKRISKGKKGGNEKXAGGGFLRRTWYDINGPIGLQXAXIGKTLVSRTQGTRIASDGLKHRVFEGCLXADLQGVDRGIKGLPRENQGFRCLKGARAGNGAHTSGAMEFYPPDKAQESLGKGGRHWIWKAHGWMCKDNR

SEQ ID NO: 330887 - protein, 140 aa, Zea mays
  unsure (1)..(140): unsure at all Xaa locations
  Clone ID: MRT4577_64873C.1.pep
MMSTRYCIVNLIMQXLPSSYSRSWTRIEKXISRHSFNTHDLLLHCEDFRIRTLYSILTLRDYLSKSNGFSNGASYXIRRXIEDLKRCRRVESGTLTANGDAVDSYLSSLVCYDCKXATMSPXDDNVVNIQSQVDNSEDDM

SEQ ID NO: 330888 - protein, 98 aa, Zea mays
  Clone ID: MRT4577_64874C.1.pep
GWAGHEFLMDEIEGRGHPAQHTGSGEAKTGKQENINNERVGRLASVEGVREQLNVHSDPIPNGRQHDWIPNLDVLSSKTNPEKMLANIYNEGGYRGLS

SEQ ID NO: 330889 - protein, 228 aa, Zea mays
  Clone ID: MRT4577_64875C.1.pep
MAASTFLLVAFLALVTSHAIASDPSPLQDFCVADKDSPVKVNGFVCKDPMAVNADDFFKAAKLDQPRDTTKSKVGSNVTLINVMQLPGLNTLGISLARIDYAPLGQNPPHTHPRATEILTVLEGTLYVGFVTSNQADRSNKLFAKVLNKGDVFVFPQGLIHFQFNPVHDKPAVALAALSSQNPGAITIANAVFGSKPPISDDVLAKAFQVQKGTIDWLQAQFWENNHY

SEQ ID NO: 330890 - protein, 86 aa, Zea mays
  Clone ID: MRT4577_64876C.1.pep
AWNLWADLCACGCAGGFDGKSTGFFTGNLRTHTHFEGPKDSSTTTKNKHGNLFTHTMENGTGDADIKEIFSFTEDVPNDHKRSDHT

SEQ ID NO: 330891 - protein, 78 aa, Zea mays
  Clone ID: MRT4577_64877C.1.pep
FGGKKHSPFTNPNCYSLNYISLTLTTLGYAHHLPFLTILNLIKQLPNLTLLSPSQSLTAFFSIFAVPPPLNTKRSVHF

SEQ ID NO: 330892 - protein, 180 aa, Zea mays
  unsure (1)..(180): unsure at all Xaa locations
  Clone ID: MRT4577_64878C.1.pep
MKEALALVGGARRLSAPEEDELLGLLAGFPDDDGGGGGGSDRELSFSDLVEAGARPAIADADLGAAKAPCGDRPCAAVALPSSHEAAAAASKQPAARQRAARRSGGSRGSCGGGGDGVLLNFYVPGLLTRSMTAPRPSRGPPSPGAVQGAPAXACCRRRQSQQQDADXGAIGCWPALXGT

SEQ ID NO: 330893 - protein, 314 aa, Zea mays
  Clone ID: MRT4577_64879C.1.pep
HASAHASAHASAHASADAWAAILPVMERDDAAYDGFVKGCADLCRSQGVLVNTFRLLEQRAVETVAAGHCTPPGLPTPPIYCIGPLIKSEEVLGKGGEECLAWLDAQPRASVVFLCFGSIGRFSAEQIREVAAGLEASRQRFLWVVRAPPSDDPAKKFEKPPEPDLDALLPEGFLARTKDRGLVVKSWAPQRDVLAHASVGGFVTHCGWNSVLEAIMAGVPMVAWPLYAEQRLNRVFLEKEMQLAVAVAGYDSDKGLVPAEEVAAKVRWIMDSEGGRMLRERTLAAMRQAKDALREGGESEATLAGLVDNWKRT

SEQ ID NO: 330894 - protein, 65 aa, Zea mays
  Clone ID: MRT4577_6487C.1.pep
SITEPQVNIINILKCVQRPQIWNDKVKIMWHIVLQNLGKHCQYLPNATRASKHKADELCIILQQK

SEQ ID NO: 330895 - protein, 480 aa, Zea mays
  Clone ID: MRT4577_64880C.1.pep
MEAAAAAETGLAQKPVVLYPSPGMGHLVSMIELGKILGARGLSVIIVVVEPPFNTGATAPFLAGVSAANPSISFHRLPKVERLPPVKTKHQEALTFEVTRVSNPHLREFLAAASPAVLVVDFFCSIALDVAEELRVPAYFFFTSGAEVLAFFLHLPAIHERTAASFQDMGKELVHVPGIPSFPATHCILPTMERDDVAYDGFLKGCTDLCRSQGIMVNTFRSLEQRAVETVAAGHCTPPGLPTPPIYCIGPLIKSEEVLGKGGEECLAWLDAQPRASVVFLCFGSIGRFSVEQIREVAAGLEASGQRFLWVVRAPPSDDPAKKFERPPEPDLDALLPEGFLARTKDRGLVVRSWAPQRDVLAHASVGGFVTHCGWNSVLEAVMAGVPMVAWPLYAEQRLNRVFLEKEMQLAVAVEGYDSDEGIVAAEEVAAKVRWLLESDGGRMLRKRTLAAMRQAKDALREGGESEATLTGLVDEWKRI

SEQ ID NO: 330896 - protein, 147 aa, Zea mays
  unsure (1)..(147): unsure at all Xaa locations
  Clone ID: MRT4577_64881C.1.pep
PQGPFASRVILAPENQKALVGQKVYGGIXPLCLYLPPVIPPVLGLTQPRLAPLPNIMRAKSQVFKKVVPKAPGVALRSAMGVFGGKDPPKRKAGVFFLSVDGPFAGLKNEARVLDPFGYFSGRKGAAVPFWRLKKRGSPNVAAPFSQ

SEQ ID NO: 330897 - protein, 46 aa, Zea mays
  Clone ID: MRT4577_64882C.1.pep
GVYLGHNLPFNQSFLGVYIPMLIALFGRTGLGVQKVKLRTCASLVF

SEQ ID NO: 330898 - protein, 82 aa, Zea mays
  Clone ID: MRT4577_64883C.1.pep
MMKDAVIEHGESSKAPLVAAPVAAGGVGRAVSIADVFLRFLAIVATIGSAVSMGTTNETLPFFTQFIQFEAKYSDLPSFTFF

SEQ ID NO: 330899 - protein, 78 aa, Zea mays
  Clone ID: MRT4577_64884C.1.pep
GGGGGGPPIGHRRHDRMRTCTSWWTTQHNMSLSMWCSRITTTTLSWMTMRHCRTTLVLALQVQCKSTCEVQRVSLSDR

SEQ ID NO: 330900 - protein, 60 aa, Zea mays
  unsure (1)..(60): unsure at all Xaa locations
  Clone ID: MRT4577_64885C.1.pep
LASWGXLRSWRSRRFWSSSLSGFFWPPVXGFAXLGLKVALRRALAXRAELARWWERXRRR

SEQ ID NO: 330901 - protein, 47 aa, Zea mays
  unsure (1)..(47): unsure at all Xaa locations
  Clone ID: MRT4577_64886C.1.pep
TNTFYLSKKKKKKKKKKKKKKKKKKKKKKPKKKKKKKXKELWVVPTV

SEQ ID NO: 330902 - protein, 162 aa, Zea mays
  unsure (1)..(162): unsure at all Xaa locations
  Clone ID: MRT4577_64887C.1.pep
RLNQTARETAQEKIARLEGADTAPESQSQQRPSVVLKAPRPAXDTTKTTRGTPPGRXDRRXXQAPESXRKXFTSRDRYRRXVECARLHLRRLWPGXRRXAIWRSAAPQKGTVPGVXTEEVRDVARARLAHRCLYARRHYPHHQAGSCRPLRPRPCTGRPWRL

SEQ ID NO: 330903 - protein, 94 aa, Zea mays
  Clone ID: MRT4577_64888C.1.pep
QMPPSLHPRLLPKRLQSPLMLLAEEHVPESVLVEEPDAAADVEHHKAKDVVAPHAAVAEPHHTEEDAVEKNVDKDDKPVAPANADHHVASAAET

SEQ ID NO: 330904 - protein, 429 aa, Zea mays
  Clone ID: MRT4577_64889C.1.pep
PEPLIRVVVTLFLLHTTNSSSPPPGSSRKQQHCGSRCFVVSLLLVLLALVASDVYLSFPNRRRVLPLFPQQLLSRRQQRGGEGGCDIFRGEWVPDPDAPYYTNDTCKVIHEHYDCMGYGKPDLGFVNWRWQPDGCDLPRFNPWRFLHMMRGKTLAFVGDSLGRNHKDSLICLLTTVAEPTTSWPSSKHTVYYYADYNFTVAHFWAPYLVRHEQIDEDGPAHTGVWNLYLDEPDGVWAAHVAEFDYAVVSASSWFYRPSMLYEAGRLVGCHYCRLPNVTDLTLRYALRMATRAALRALSGADGRFRGTALLRTVDPSQYEGGEWNKDGNCVRTAPFRRGQNAVQGLEREFRTLQLEEFASAEKAATDGGGKVRMLLMDTTEAMILRADAHPSKYRGWTPEKHFTLHNDCVHWCLPGAIDTWNDMLLHMLK

SEQ ID NO: 330905 - protein, 137 aa, Zea mays
  Clone ID: MRT4577_6488C.1.pep
KKKKKKKKKKKKKKKKKKKKKKKKKKKKKKKLKKKKKKKKKKFCPCPGGPPGGEKQNFFFLKGTPTKGLLKKQGGNRQALGVKQKGNLVWQKNWENGVQGTLGIYFWENIPGKNLGEHIAGHYKGGLIVRGNNWGLN

SEQ ID NO: 330906 - protein, 82 aa, Zea mays
  Clone ID: MRT4577_64890C.1.pep
RLDKVDLSGHYNAETAEDSVMPVPKSVVTKGGVHQSKAVPSASIHHHPLQGGIRWTLSLQTWYPNMGISHVEPQFNKMHNHQ

SEQ ID NO: 330907 - protein, 143 aa, Zea mays
  Clone ID: MRT4577_64891C.1.pep
VTSPYGNTVHHNENATTGQFAFTTSEAGNYLACFWIDSVEKGSGTSLNLDWKIGIAAKDWDTIAKKEKIEGVELELRKLEAAVESIHHNLLYLKAREADMRTVSERTNSRVAWFSILSLGVCVAVSVLQLWHLQGFFRKKKLI

SEQ ID NO: 330908 - protein, 134 aa, Zea mays
  Clone ID: MRT4577_64892C.1.pep
LASNIDAHPRNGARRMRNKEGSRPNPAERSGAMARLAVPARSSSDEGCGQGVSIAHGASLRIGALFLRDLLRGSGGEARADTYRGAGLHGRAPECEPGALALARQSSACSSYRTEHYTLTCSMNDGYTRLSRPS

SEQ ID NO: 330909 - protein, 211 aa, Zea mays
  Clone ID: MRT4577_64893C.1.pep
MAASVFPALLLAVAAVLLLPVAEAVWLELPPSGTKCVSEEIQPNVVVLADYAIMYESHPSSHPTVAVKVTSPYGNTVHHNENATTGQFAFTTSEAGNYLACFWIDSVEKGSGTSLNLDWKIGIAAKDWDTIAKKEKIEGVELELRKLEAAVESIHHNLLYLKAREADMRTVSERTNSRVAWFSILSLGVCVAVSVLQLWHLQGFFRKKKLI

SEQ ID NO: 330910 - protein, 134 aa, Zea mays
  Clone ID: MRT4577_64894C.1.pep
MMLAVTVSQVVALLSSALSGTEGGSGVAVAVGTAKAVGAEQGERWRRRCGGHDDHPASAAGYCCVCISACRDGDDVRSLPCGHAFHRDCVDRWLALCRRTCPLCRLHVGGPAVGLAEQQQQLSEDLVIWFSSLF

SEQ ID NO: 330911 - protein, 383 aa, Zea mays
  Clone ID: MRT4577_64895C.1.pep
MAVSSPSSAPEKKRKWLLSNRKVTDKYLREARKILAAAPECGGGDAVAALGLVDAALELSPRMEAALELRARALLALRRYREVAEMLRDYIPSCGKSCSGEDTSSSSSASLLSTGSGDLGTISRAKLLSPDRHRSDDAEPDARPVRSFRCFDISELKRRVLAGLSKNPNTDTQWRYLVLGQACFHLGLIEDAMVLLQTGRRLASAAFRRESVCWSDDSFSSSSSSSATAAAPCVPSGKTSSSGWAFIIPATESEAVSQLLAHVKLLLRRRAAAMAALDAGLPAEAVRHFSKILEARRGVLPHPFAAACLVGRAAAFQASGRPADAIADCNRALALDPAYIPALRARADLLQSVGALADCLRDLDHLKLLYDAALRDGKLPGPR

SEQ ID NO: 330912 - protein, 74 aa, Zea mays
  Clone ID: MRT4577_64896C.1.pep
EYAPLAGTKSGSKWFGQLGPQSAHCKRTYAALSEHQYALGLSGHHHSPTPIHSHQYYHPGGAKKNVVPAGPRAE

SEQ ID NO: 330913 - protein, 234 aa, Zea mays
  unsure (1)..(234): unsure at all Xaa locations
  Clone ID: MRT4577_64897C.1.pep
MISSQSGQSCPVKREDYCSCCGKNLMFPFRSRQVIDKYLREARKILAAAPEGGGGGDAAAALGLVDAALELSPRMEAALELRARALLALRRYREVAEMLRDYIPSCGKSCSGEDTSSSSSASLLSTGSGDLGTISRAKLLSPDRHRSDDAEPDARPVRFFRCFDVSELKRRVLAGLSKNPNTDXQWRYLVLGQACFHLGLIEDAMVLLQTGRRLASAXFRRESVCWSDDSSRRR

SEQ ID NO: 330914 - protein, 137 aa, Zea mays
  Clone ID: MRT4577_64898C.1.pep
APAPALDSRPRPRPCLEDRRGASRGAAPEEDRRGRAVGYAPRRDARVLGPDRARPCAGSEAEAAPLLGGPPRSQPWSRARGGPPRSGGRARAAPGCAGAGARPRLPLRRIRGRGRALARRQSSSLLVPTRRPSGPRA

SEQ ID NO: 330915 - protein, 68 aa, Zea mays
  Clone ID: MRT4577_64899C.1.pep
ARTVESTVRRDTQVHKARHPSSHRHRDQPGYAGAVGAIPFRALLAKAWSTSSFDPSNCLHLHRFSPFV

SEQ ID NO: 330916 - protein, 41 aa, Zea mays
  Clone ID: MRT4577_6489C.1.pep
TGREPLGYPWMIQAPGTFLRCAYGPSTPKAPPASCELPRVR

SEQ ID NO: 330917 - protein, 56 aa, Zea mays
  Clone ID: MRT4577_648C.1.pep
TGPKLASLNLRFHFKCHLYTKLQQEPSLKWRPWQEGTALCRNHGKADIRSSKLDTM

SEQ ID NO: 330918 - protein, 70 aa, Zea mays
  unsure (1)..(70): unsure at all Xaa locations
  Clone ID: MRT4577_64900C.1.pep
KRSVSFTIDXLEPVEDXVMEVASXLEKFLQXRVKVAVCKAGKLGDSGTISRDKSIVTVSSDGRFSKRYLE

SEQ ID NO: 330919 - protein, 86 aa, Zea mays
  Clone ID: MRT4577_64901C.1.pep
MPSLNLWTNINLKGLATSAFLAEASKSVANIMGKPKAYLMVVLKGSVLLAFGGPQNPPLYGGLFSIGGLNPVLTKNFIAGFVFILK

SEQ ID NO: 330920 - protein, 102 aa, Zea mays
  Clone ID: MRT4577_64902C.1.pep
RANFLAKKHFSCNIVQVGLRGNSPPHRAKFKLVLANTENRSPPQRGLASLWPPHKGPQMGPQKDPYKLLSLLPTFFQVLSAGTGETSPMRPIFIPERATALR

SEQ ID NO: 330921 - protein, 152 aa, Zea mays
  Clone ID: MRT4577_64903C.1.pep
SRPAGVYVLSQGFPGLTLLKSADLSPVSWMSVAWYPIYHIPYQRSVKDLSACFLTYHTISSSFQDYGLETMTNDCCHPVADGKQNGHMDKKSNTVSLPPFGLAAHKVHGSLWTNPMTGDHRKMDFLFSAADSWLKQLGVQHHDFNFFITHPM

SEQ ID NO: 330922 - protein, 91 aa, Zea mays
  Clone ID: MRT4577_64904C.1.pep
LFAIGLSPVFSLARCRPAAVACLSPWAGWLPFLSLGRLSALRSAAFLLLLVFLFAGLLLPTLRCGPLFLLSCWLCCSPLLFCRCVFSVLLA

SEQ ID NO: 330923 - protein, 116 aa, Zea mays
  unsure (1)..(116): unsure at all Xaa locations
  Clone ID: MRT4577_64905C.1.pep
MGGQWLGEGMPPSNLQCFLDCTTPTVDTHILPKTNGRLPADAWHHAEMDSVEYFNLSDLWEQYYEWSAYGAGATVQLPGGERVVQYYVPYLSGMQLFTNKVLTAFRXFGEDXGMDF

SEQ ID NO: 330924 - protein, 56 aa, Zea mays
  Clone ID: MRT4577_64906C.1.pep
YLPFVFFIIHIFCCYNTMYTNLSCAQDMFSYYLSATFLFMKYSMLCYLVLYLSLPS

SEQ ID NO: 330925 - protein, 344 aa, Zea mays
  Clone ID: MRT4577_64907C.1.pep
LQRQGPCGESSHRGRGGGKGKGGRMGGQWLGEGMPSSNLQCFLDCTTPTVETHILPKTNGRLPTDAWHHAEMDSVEYFNLADLWEQYYEWSAYGAGATVQLPGGDRVVQYYVPYLSGMQLYTNKVLTASRSFGEDNGMDLWSDDEDNEKMSRSWSSTSDESLFNCDVLWSNRKRPGHLYFEFFEVGSPYGRVPLIDKVYELSQGFPGLTSLKSAELSPVSWMSVAWYPIYHIPYQRSVKDLSACFLTYHTISSSFQDHGLETMTTDCCHPVANGKQNGHMDKKSNTVSLPPFGLAAHKIQGSLWTNPMTGDRRKMDFLFSAADSWLKQLGVQHHDFNFFITHPM

SEQ ID NO: 330926 - protein, 61 aa, Zea mays
  Clone ID: MRT4577_64908C.1.pep
PSNNQAKPKKTRSFLGVFHLHWFLSLYIFIRQSFLESLFLFLSRLFIILFFPLDSSRILSF

SEQ ID NO: 330927 - protein, 110 aa, Zea mays
  Clone ID: MRT4577_64909C.1.pep
HILTAVERFFLRGGRLGLVGALAFLTPPYGYRGLKDSHVYIREGSTGLALDMATGAAQAGARVYITARNHARHEEELVGIHRDLVREHDAVNADEERYFNAVARALHEDD

SEQ ID NO: 330928 - protein, 279 aa, Zea mays
  unsure (1)..(279): unsure at all Xaa locations
  Clone ID: MRT4577_6490C.1.pep
MLLRKHPSPTRPGRTCLQPGVPLVRPRSRIPATTLSERRHLLRSSAAASSSFPSRDSPLSAAKGSSQNKPPDEIRRWKAVSPGMHESADPETETEDPSPPRTALWSARRRARAAWRKVVSWVPRKARSLVLLNLVTLIFASNISVVKQAEALLDPDLFNMLRFTIAAIPFVPLLLKSLRNMQILFRGLELGIWVSVAYLAQAMGLVTAGAGRASFISALTVIIVPFLDGLIGAEVPAHTWFGAFLSLFGVIMLELSXSPPCVGDLLNLXSAXFFAXHML

SEQ ID NO: 330929 - protein, 73 aa, Zea mays
  Clone ID: MRT4577_64910C.1.pep
GARISLFFLNTYKNGVGCVEPQDTLTNEKLAPVYATMPKPVERALSRREGCRLYQQHSDHTWTGTCLPVKKPA

SEQ ID NO: 330930 - protein, 75 aa, Zea mays
  Clone ID: MRT4577_64911C.1.pep
TCSGLCKSVCLRIMYIIIVNIWVSESKLCYQCYTYNLIQNFREVKFNQFYVTKEQFIYKAALQTRRGLDSSAQQS

SEQ ID NO: 330931 - protein, 76 aa, Zea mays
  unsure (1)..(76): unsure at all Xaa locations
  Clone ID: MRT4577_64912C.1.pep
GPTGALENACXALGAXVPALDSSSRXAGAVLARLXSPSXRXRXASLTTELTGMRSGASSLEGRRGHCGLLPAAPLP

SEQ ID NO: 330932 - protein, 58 aa, Zea mays
  Clone ID: MRT4577_64913C.1.pep
PVRPRVRGHIHNPINFSFLAAHYPPRDGLHDSYQDHSSRSKNKNRDHRFTRKFYDNRR

SEQ ID NO: 330933 - protein, 512 aa, Zea mays
  Clone ID: MRT4577_64915C.1.pep
MGCCGSSQRAGTHPEKKPPGALPPHRPSYSLNQHQAPAPPPPSAARAGARQVPPLKEFSLAELRAATAGFAAGNIVSESGEKAPNFVYRGRLDAGRRAIAVKKFTKMAWPDPKQFAEEAKGVGKLRHCRLANLIGYCCDGDERLLVAEFMPNDTLAKHLFHWENQTIEWAMRLRVAYYIAEALEYCSTEGRPLYHDLNAYRVLFDENGDPRLSCFGLMKNSRDGKSYSTNLAYTPPEYLRNGRVTSESVIFSFGTILLDLLSGKRIPPSRALDMIKGNNIQVLMDSHLEGNYSTDEATTLVDLASQCLQYEPRDRANTKKLVSVLEPLQIKSEVPSYEMLGIPKHEEEAPPPPQPQRPLSPMGEACSRTDLTAIHQILVNTHYRDDEGSNELSFQEWTQQMRDMLEARKRGDFAFRDKDFKAAIDCYTQFVDVGTMVSPTVYARRSLCHLMCDQPDAALRDAMQAQCVYPDWPTAFYMQAVALAKLNMQSDATDMLNEASQLEEKRQKNTKP

SEQ ID NO: 330934 - protein, 89 aa, Zea mays
  Clone ID: MRT4577_64916C.1.pep
VIYLIKKPPRGGSGKKGGEQTPQETLEQPETREHANRAVHGNTQGHGRQKKARNKRPPGYPRQRQGALPGSREQGGQERTCSTRGPGKG

SEQ ID NO: 330935 - protein, 90 aa, Zea mays
  unsure (1)..(90): unsure at all Xaa locations
  Clone ID: MRT4577_64917C.1.pep
MGCCGSSQRAGTHPEKKPPGALPPHRPSYSLNXARQVPPLKEFSLAELRAATAGFAAGNIVSESGEKAPNFVYRGRLDAGRRAIAVKKFT

SEQ ID NO: 330936 - protein, 196 aa, Zea mays
  unsure (1)..(196): unsure at all Xaa locations
  Clone ID: MRT4577_64918C.1.pep
LPPRRPSYSLSQNQNQAPPAARAGAHQVPPLREFSLAELRAATAGFAPDNIVSESGDKAPNFVYRGRLEPSRRAIAVKKFAKMAWPDPKQFAVXSPPLPPVGRSRXGGQGSLAVRLSPPSPPIRCXWLCFFLRLQEEAEGVGKLRHRRLANLIGYCCDGEERLLVAEFMPNDTLAKHLFHCTFSSSLPILCPLVRF

SEQ ID NO: 330937 - protein, 188 aa, Zea mays
  Clone ID: MRT4577_64919C.1.pep
EIRMSFLNSKSNNELAPINWIASGFTKTCGDFRIGRYQITETVNIFSHRVCWSKGPRGIIRIIPQKGDTWAVYRNWSPDWNELTPDDVIYKYEIVEVIDDFTEEQGVTVVPLLKVAGFRAVFHRLTGSSVVRRIPKEELFRFSHRVPSCLLTGEERNNAPKGCHELDPAATPVDLLKIITDVKDDTTR

SEQ ID NO: 330938 - protein, 129 aa, Zea mays
  unsure (1)..(129): unsure at all Xaa locations
  Clone ID: MRT4577_6491C.1.pep
GGGXTPFLARTCTAFLMRRVGRPRCPVHQVHXXWLXEASTVTSCTPSMPLSTFRXLLLCNXWHVDRQPSDTTSLNDPGAAAILLTPHGEALFETXSLLPVRPRHERSPEELSAEQWLGVFFLFFCXXXX

SEQ ID NO: 330939 - protein, 61 aa, Zea mays
  Clone ID: MRT4577_64920C.1.pep
SHSSTHTNNTYHFFRRPSSPTTINMPPCSCCNHEASTCSSSRSCCQPQIPSSISNDHSPMH

SEQ ID NO: 330940 - protein, 122 aa, Zea mays
  unsure (1)..(122): unsure at all Xaa locations
  Clone ID: MRT4577_64921C.1.pep
ESGRPIASADAWAHGPNDRTLALWLKGDPSYLEGELDLTLATYGINAXCTHLGXVEPRNGAENLFICPCHGSLFNYQGKEVRGPAPLSLALVHADVDDGXVLFAPWVXTDFRSGVDPWRKAC

SEQ ID NO: 330941 - protein, 63 aa, Zea mays
  Clone ID: MRT4577_64922C.1.pep
TLSRSSPILSSISSLISNSTLRTVQSTVQNNVLGDYMNNLLHTVLDRNKKKKKKKKKKPPPTP

SEQ ID NO: 330942 - protein, 151 aa, Zea mays
  unsure (1)..(151): unsure at all Xaa locations
  Clone ID: MRT4577_64923C.1.pep
NICKDFTEDEIRDALFQMEGNKAAGPDSIPVEFYQVCWSIVKNDIINLFHXLDVSRLNYGIITLIPKTKEASKIQQFRPICLLNCLYKLITKVLTIRIEPFAEKLISEHQSAFLKGRNIMNGVLILHEILDETKRRKETGIILKLDFEKHT

SEQ ID NO: 330943 - protein, 51 aa, Zea mays
  Clone ID: MRT4577_64924C.1.pep
KGFYVVQKLSKLKNLVVKSVDSLCSFSNSFTLQTVTVESHLFVLIQNVLRK

SEQ ID NO: 330944 - protein, 154 aa, Zea mays
  unsure (1)..(154): unsure at all Xaa locations
  Clone ID: MRT4577_64925C.1.pep
LSLTSWARSQAAPAQLILDEAPLCSSHRCDCFQKLQFIFEATYDHLNMLELIGTTYILALSNLRMDNERLGFPIAAIREIXILEKLHHXSFIQLQEIFSSPPPDXTDSSNRLYVTSTRLSIYXMLFQHMHHELTVIADRSXMSITVPEVKCHLR

SEQ ID NO: 330945 - protein, 86 aa, Zea mays
  Clone ID: MRT4577_64926C.1.pep
VIPLACLYTMHVVERDPDRVPKHCAGILQRKGLGSLRLRSQIHRHHTSMPFTQNSIGVLNRCVIRQMVQICFPIDFMGQVTNVHHL

SEQ ID NO: 330946 - protein, 772 aa, Zea mays
  Clone ID: MRT4577_64927C.1.pep
MELTLPFVILLALLASPSLPHANGDGGNTTTYIVFMDPARMPSVHRTPAHWHAAHLESLSIDPARHLLYSYSAAAHGFAAALLPGHLPLLRSSPEVLQVVPDEMFQLHTTRSPEFLGLLTPAYQPATGNLEAATHDVVIGVLDTGVWPESPSFAGGNLPPPPAHWKGVCEAGVDFPPSLCGRKLVGARSFSRGLRAANGGAIGVGKRTFRSARDRDGHGTHTATTAAGAVVANASLLGYATGTARGMAPGARVAAYKVCWPEGCLGSDILAGIDAAVADGVGVLSLSLGGGSAPYFRDTVAVGAFGAAAAGVFVSCSAGNSGPSGSTVSNSAPWVATVGAGTLDRDFPAYVMLPTGARLAGVSLYAGPSPSPRPAMLPLLYGSGRDNASKLCLSGTLDPAAVRGKIVVCDRGVNARVEKGAVVKAAGGAGMILANTAASGEELVADSHLLPAVAVGRAVGDKIREYAARGGGRPMAMLSFGGTVLGVRPSPVVAAFSSRGPNTVVPEILKPDMIGPGVNILAAWTGVAGPTGLAKDGRRTRFNIISGTSMSCPHISGVAALMKAAHPDWSPAAIKSALMTTAYTVDNTNSSLRDAADGSVANAFSYGAGHVDPQRALSPGLVYDISTHDYAAFLCSLNYSAPHVQVITKASNVSCGAPNKSRPGDLNYPSFSVVFGQKRKTKPAAALRFRRELTNVGPAASVYDVKVVGPESVAVTVTPARLTFRQAGQKLRYYVTFASRARQGHAKPDFGWISWVNDEHVVRSPVAYTWKM

SEQ ID NO: 330947 - protein, 65 aa, Zea mays
  Clone ID: MRT4577_64928C.1.pep
KKKKKKKKKKKKKKKKKKKKKKKKKKKKKKKKKKKKKKNLGHISQKPLRRNLEKTNKIGGPFSLN

SEQ ID NO: 330948 - protein, 100 aa, Zea mays
  Clone ID: MRT4577_64929C.1.pep
WHQSDCCWGYLFGSGEPPKPAVAPAVSAPPAAAGAPPAEKPPAAKPDGTSQIAAGVTSQTNNYHRADGQNTGNFLTDRPSTKVHAAPGGGSSLGYLFGGN

SEQ ID NO: 330949 - protein, 57 aa, Zea mays
  Clone ID: MRT4577_6492C.1.pep
FFFFFLASIQPFRVVLKNIKTIKNCNSITKSLRKLKMRIIWTLAIVVIMILVAPNYK

SEQ ID NO: 330950 - protein, 133 aa, Zea mays
  unsure (1)..(133): unsure at all Xaa locations
  Clone ID: MRT4577_64930C.1.pep
MTTMRRLPSALEGVNDLDRDVLPEXSTAVSGEVNFYFAHGTRWQDERRNESLFVSNNAIFKPSKAMRGXIPICYAQYYIFGNLXPHGFARNTTXRAHTXDLPLAAPTFNSAYIDLILKPTENDEKIWPHNFEY

SEQ ID NO: 330951 - protein, 54 aa, Zea mays
  Clone ID: MRT4577_64931C.1.pep
KAEIGRWLAGCHANSSSVDVTEAMGAKRCEKDCSARGVCNYNLGECRCFHGYSG

SEQ ID NO: 330952 - protein, 134 aa, Zea mays
  unsure (1)..(134): unsure at all Xaa locations
  Clone ID: MRT4577_64932C.1.pep
MSRGGSAGGGQSSLGYLFGSGXPPKPAVAPAVSAPPAAAGAPPAEKPPAAXLMAPAVSAPPAAAGAPPAEKPPAAKPDGTSQIAAGVTSQTNNYHRADGQNTGNFLTXLQDRPSTKVHAAPGGGSSLGYLFGGN

SEQ ID NO: 330953 - protein, 74 aa, Zea mays
  unsure (1)..(74): unsure at all Xaa locations
  Clone ID: MRT4577_64933C.1.pep
GVNAPGLAFVAEKRLQIPXIQYPVRWLLHLISSHWSRLLLQTPLLLGVLQVNYKYMYAYVMIWNANSHKERRGT

SEQ ID NO: 330954 - protein, 62 aa, Zea mays
  Clone ID: MRT4577_64934C.1.pep
LQTHVMNLLISAKLVQGSCWLIWTVLNKSSSEPQRSSLIVWITRSGSNAPPSCWHFPLLEIA

SEQ ID NO: 330955 - protein, 254 aa, Zea mays
  unsure (1)..(254): unsure at all Xaa locations
  Clone ID: MRT4577_64935C.1.pep
KASIGTXSQAYRFLQVSDGFDNIGCRDLQNYYRGLREKIKNVDAQLFVAQMERKKEANSAFFYXFVVDXHGKLLYIFWVDATSRKNYSHYGDXVSFDATYSTNQYNMTFAPFTGVNHHMQSVCFGAAFLXNEKIEXYELLFRTFLLTMGVKAPRLIITDEDASMKSIIRTILXDTIHRFCMWHIMEKVGPPMNHDKXEFWAALNTCVXWGSETREEFKMRWNAIIVAYGLESNEWLANRYQIREPWIPAFFMDI

SEQ ID NO: 330956 - protein, 56 aa, Zea mays
  Clone ID: MRT4577_64936C.1.pep
QIAKPSPSETLKKVFLRKPFSLSPTPLIYSQRLTTGTPPTLPLYDLFRLFPLKVNS

SEQ ID NO: 330957 - protein, 100 aa, Zea mays
  unsure (1)..(100): unsure at all Xaa locations
  Clone ID: MRT4577_64937C.1.pep
GAPPRPRELGMSFFPPEVVKKALLLAMEKKNQRALNPLQEGFGXGVLPPPPMAQGFSRGREGVPHLALPLPYARGKFLSFGPGAKKKGGAPPGVGGAFSG

SEQ ID NO: 330958 - protein, 59 aa, Zea mays
  Clone ID: MRT4577_64938C.1.pep
FDIQYQIHPDLVLPYCYPSPIHSGPTPPRPVMSRISGACSGAPPAQGSASRLAGAGLRD

SEQ ID NO: 330959 - protein, 418 aa, Zea mays
  Clone ID: MRT4577_64939C.1.pep
SWPSERLVIQVLDDSTNPAIRELVEVECARWARKGVRICYENRSNRNGYKAGAMREGLKKHYARDCEFVAIFDADFQPDSDFLRRTVPLLQRDPGVGLVQARWRYVNADECILTRIQEMSLNYHFAVEQEVGSACHAFFGFNGTAGVWRVATLADAGGWKERTTVEDMDLAVRASLRGWRFVYVGDLVVRNELPSTFKAYRYQQHRWSCGPANLFRKVLPEILHSDRVSLGKKFHLLYAFFFVRKVVAHLVTFLFYCVVIPACVLVQGDVHLPKYVAMYVPALITLLNAACTPRSCHLLIFWILFENVMSMHRSKAAVIGLLEASRANEWVVTDKLGSSKAAAAVVAKKKKHQLVRSRCCSTRREMHVLELAMGACLLYCAVYDIVFFGRDHYYMYLLLQSAAAFIVGFGYVGTSAPS

SEQ ID NO: 330960 - protein, 171 aa, Zea mays
  Clone ID: MRT4577_6493C.1.pep
MDSETTTTYLTNTQKELEAALVEKESHINQMKENTIASNPDQTTTIKELLQQKEAEPDLDKSENSSDPIPATVEDNSDNTTISESSHNDESIVVGANTENATSETVVDKYENSNDSMPAPEKNSSNTNASDSSHRNENIIVEAKEDNATSDLVVLDKSESTNGFVPVTTEE

SEQ ID NO: 330961 - protein, 70 aa, Zea mays
  unsure (1)..(70): unsure at all Xaa locations
  Clone ID: MRT4577_64940C.1.pep
MSTEEAVVPEVPVTEVPAEVPAAHVVDAPNANKAPNEKKAPNENKPSAXANKPAAHPPYAEMIVEAIAAL

SEQ ID NO: 330962 - protein, 65 aa, Zea mays
  Clone ID: MRT4577_64941C.1.pep
VHGMPIPSLGYMYLSLIGTQNIVFLISGLVFFSSTCIVLDKSHVMSPDGLVPRYVVSKLIQFTGC

SEQ ID NO: 330963 - protein, 49 aa, Zea mays
  Clone ID: MRT4577_64942C.1.pep
PLILNFLMYGICALRIVFFKVGLWTYRFSLRRVPVVLTLRILKSKKFWD

SEQ ID NO: 330964 - protein, 58 aa, Zea mays
  Clone ID: MRT4577_64943C.1.pep
LGSLLKGRLFFFLFGSTNNRGSLVAKSHEGRARVQTEHDICSTMGVPRSDGLAVWIAA

SEQ ID NO: 330965 - protein, 80 aa, Zea mays
  Clone ID: MRT4577_64944C.1.pep
LKNRLDRTRPRTRGAQVRRTKISERIRKLQELVPNMDKQTNTSDMLDLAVDYIKELQKQVKVSNPVSSLQMSTCQALFGT

SEQ ID NO: 330966 - protein, 36 aa, Zea mays
  Clone ID: MRT4577_64945C.1.pep
CRCTSKTRLALYIVKAWFILYYVNPLSSSIQCISIT

SEQ ID NO: 330967 - protein, 97 aa, Zea mays
  Clone ID: MRT4577_64946C.1.pep
SQQQGMSRSAGAAVSTADVTFDYCSPPAARVYLPRATAATSGRGSLHIHMQPSPVLNPVSSYHELPESLDADAKTKSATHDIEESLLQSRTETRPYI

SEQ ID NO: 330968 - protein, 73 aa, Zea mays
  Clone ID: MRT4577_64947C.1.pep
PAALLCPVRAFPPLTLSLVSSLALFVLTLHWIRKIRVCKRRMSTLAHPRFAPLPTEQTESQTDGGQSSSALKS

SEQ ID NO: 330969 - protein, 133 aa, Zea mays
  unsure (1)..(133): unsure at all Xaa locations
  Clone ID: MRT4577_64948C.1.pep
KFSLGGPPREXPRGGGAAQTNFNYICFYGKIGCLGKGTGLAPAPPGFIKVPGGAPPPFFFVGGRAPKXRVGELFKNXPSHEKGKALFVAPFGGPFKSDVKTRGIFYFPPPGGPKIPLFVRVEGPPVGPGKRVF

SEQ ID NO: 330970 - protein, 51 aa, Zea mays
  Clone ID: MRT4577_64949C.1.pep
QRQWCQRDSISSVIVLPLRVFTNVYILKLGERSGRSTTLERRRIRSGTVSG

SEQ ID NO: 330971 - protein, 79 aa, Zea mays
  unsure (1)..(79): unsure at all Xaa locations
  Clone ID: MRT4577_6494C.1.pep
LSIMVKGGSKKEVVVAILLVLQLMAAPPTAMAARSPRGAVPDGSLATTPKVTMLAXTPVLHGGDMQIHYLPNSCWLLEL

SEQ ID NO: 330972 - protein, 64 aa, Zea mays
  Clone ID: MRT4577_64950C.1.pep
EPIEGIWFGCASVDLDLHFGWSVEAQLVPWRRLYLWRRRTFCRSGPCITVLVARILYITCRDML

SEQ ID NO: 330973 - protein, 69 aa, Zea mays
  Clone ID: MRT4577_64951C.1.pep
FGSFKVISVIPLLENGDLIVFWDRCTSLIVLDGGVGNCGLRSLYGPLLFPIPFFFVFFFEFFFVLFFFF

SEQ ID NO: 330974 - protein, 32 aa, Zea mays
  Clone ID: MRT4577_64952C.1.pep
KQAFFFEALKLVKKSIFFCGTKCTYQCFCSDH

SEQ ID NO: 330975 - protein, 54 aa, Zea mays
  Clone ID: MRT4577_64953C.1.pep
IYIRFLEKKKKKKKKKKKKKKKKKKKKKKKKKKKKKKKKKKNFPPWPPVKKGKF

SEQ ID NO: 330976 - protein, 153 aa, Zea mays
  Clone ID: MRT4577_64954C.1.pep
GSCGRGGGQYLTLDTRAEDTALHQFEAQDAAVDDDDDDFGIPPPPPMPPRSHDHEAESSRATPAAPPAIDPALASILQTLTHQAAAHQQLFERMLSMFQTIQDKQDSLQQQLLQDRAESRAFMTLMLQHYGISIPPVQSVPPPPLQAPVVPAI

SEQ ID NO: 330977 - protein, 107 aa, Zea mays
  Clone ID: MRT4577_64955C.1.pep
TLLGSIPFVRPATEPRPTHKHQEGEPKPTGGSSHRDAWRTRTPARPRCLDGTSAHPGVLPDARPSNSSSTGAMIIPLTRPPNRASPDGGPPGLVLPWGLQPLGLPSC

SEQ ID NO: 330978 - protein, 44 aa, Zea mays
  Clone ID: MRT4577_64956C.1.pep
THCQHCLNDPSLEQHKKFSHDRPSWRLPNLKGVGGDLPHDVDIY

SEQ ID NO: 330979 - protein, 72 aa, Zea mays
  Clone ID: MRT4577_64957C.1.pep
MGMPHEWVLFDVMKVALVTRKKKIPAFHFERGPEQDFPNICTTKNICLRTRRLLSKRFTLQPNDGTHPQKKR

SEQ ID NO: 330980 - protein, 139 aa, Zea mays
  Clone ID: MRT4577_64959C.1.pep
DLVITHALEWPSLTVQWLPERTEPPGKDHWVQKMILGTHTSDNEPNYLMLAQVQLPHEDTEADVRHYDDEHSDNGLFGAATGEYGGCISAAEYWWTNCSEPAKPTTKVQIVQQINHDGEVNRARYMPQNSFIIATKTVS

SEQ ID NO: 330981 - protein, 86 aa, Zea mays
  Clone ID: MRT4577_6495C.1.pep
RVPILLQTKKGSRGRTQRQNMEVGCASAGERVMVAIYSRRHDQLIRRNRKRTKLMIIRLHYTPSFLKIHVTYFETEVGGCTWTNMV

SEQ ID NO: 330982 - protein, 136 aa, Zea mays
  Clone ID: MRT4577_64960C.1.pep
MGGVLMSCCLCVAYFYPAVVDMYLNLKKLQVFQVGWSPKNETILASCCLGRRLMVWDLSRIGQEQTPEDAEDGPPELMFIHGGHTSKISDFSWNPCEDWVVASVAEDDILQIWQMAENIYHDEDDLPISDEPAKTS

SEQ ID NO: 330983 - protein, 932 aa, Zea mays
  unsure (1)..(932): unsure at all Xaa locations
  Clone ID: MRT4577_64961C.1.pep
METSLKAEVRFVPRHAVTLGVVRIVVGVVSFEICGEFVAFNAPLPRQLAETELGRSGVFSRDRGRPQARRSFFSRLRPCLVIVFVPVAFNAYVLWFLNILVEAGLEADLRLRCSRARRIFASRKRALLGNGSIKDYTDRFNAMLDHTRKLDAPQKAKLFVGGLPDHIRADVAIRDPQDLQSVMYLAHAFEQRAAAQTTLPLARRFQQSHPGLPAPPCPLPGPLTAPPAAAAQPAGVHTPNAMLLLVSINGHRLVALVDSGSTTNFMLVGLMSRLQLPSTPHPTIKVQVANGDNISCQGMARSVDLRVGTEQFSIDCIGLTLGAFNVILGFEFLRLLGPILWDCDRFSMSFTKGGRRIICTPTQPLLDDLLRQFELVFAEPQGLPPALPYDHRIHLLPGAAPVVVWPYRYPQLQKYELERQCRAMLAQGIIRPNMSPFSAQVLLVRKPDNSWRFYIDYRTLNANASKDNFLIPVVDELLDELHGAHFFTKLDLRLGYHQVRMHPADVEKTAFRTHEGHYEFLVMPFGLSNTPVAFQQLKTALTTGPVLQMLDFEKTFAMDCYCDASVPQHQWLSKLFDFDFEVEYRPGRLNVAADALSRRDAELLQPAAGELGAVAALALFGPSFAFLDDICHAMATSTDSSRLCQQLQDGTLTTPWHLEDGLLLHGSRVYVPNHGDLQHQAILLAHLVWVDISMYFIEGLSKVGGTSVILMVVDRFSMYAHFIPLGHPYTAASVARAFFDSVVRLHKFPYSIISDRDPVFTGHVWRDLFKCVGXFHPQTDGQLEVVNKVIAXSLEPCAKGKLDPRYAGPFRVLECIGKVAYRLELPEGACLHDVFHVGLLKRHKGEPPEQRARLPPVQDGILLPAPLKVLRAQQRHGIWHILVQWQVLSSEEATWKALEDFRGPQLXLEDEMFAQEGRDVLTGRHYRRRTTA

SEQ ID NO: 330984 - protein, 135 aa, Zea mays
  Clone ID: MRT4577_64962C.1.pep
PADPDISLARFHLGHVSVVARPAVAVTISAALKVRVRNPDLFALDYTRLDVAIGYRGKPLGLVTSGGGRVQARAVSYVDANLQLDGIRVVEDAIYLLKDLARGSVPFDALAEVEGHLHFFFLSIPVKVHTMSNAL

SEQ ID NO: 330985 - protein, 153 aa, Zea mays
  unsure (1)..(153): unsure at all Xaa locations
  Clone ID: MRT4577_64963C.1.pep
GGVNCLXAFNPFNEWVVATGSTDKTVKLFDLRKIHTSLHTFDCHKEEVFQVGWSPKNEPILASCCLGRRLMVWDLSRIDQEQTPQDAQDGPPELLFIHGGHTSKISDFSWNPCEDWVIASVAEDNILQIWQMADNIYLDEADLPISDELENSY

SEQ ID NO: 330986 - protein, 151 aa, Zea mays
  Clone ID: MRT4577_64964C.1.pep
PADPDISLARFHLGHVSVVARPAVAVTISAALKVRVRNPDLFALDYTRLDVAIGYRGKPLGLVTSGGGRVQARAVSYVDANLQLDGIRVVEDAIYLLKDLARGSVPFDALAEVEGHLHFFFLSIPVKGRISCVVHVNPHNQTIVHQDCYPE

SEQ ID NO: 330987 - protein, 97 aa, Zea mays
  Clone ID: MRT4577_64965C.1.pep
LCEGCDQMRGAARRLVQSATKTRQINPVNGLARMPAITTPQRHGNENTSSESVVTKDENVEPLVAFSRPPPLPPVLGPLVVLSVFEMSSGGGDEDTE

SEQ ID NO: 330988 - protein, 130 aa, Zea mays
  unsure (1)..(130): unsure at all Xaa locations
  Clone ID: MRT4577_64966C.1.pep
MPKAGSGVADEEDFRAEVDERLINEEYKIWKKNTPFLYDLVITHALEWPSLTVQWLPERTEPPGKDHWVQKMILGTHTSDNEPNYLMLAQVQLPHEDTEADVRHYDDEHSDNGLFGAATXEVDFPTPPFP

SEQ ID NO: 330989 - protein, 47 aa, Zea mays
  Clone ID: MRT4577_64967C.1.pep
TPSSVPCSLTLNLHTFHPFTSYRLLHYTIAQSVSCNFSAHCTNTLPF

SEQ ID NO: 330990 - protein, 132 aa, Zea mays
  unsure (1)..(132): unsure at all Xaa locations
  Clone ID: MRT4577_64968C.1.pep
PDISLARFHLGHVSVVARPAVAVXISAALKVRVRNPDLFALDXTRLDVAIGYRGAPLGLVTSGGGRVQARAVSYVDANLQLDGIRVVEDAIYLLKDLARGSVPFDALAEVEGHLHFFFLSIPVKVKCRFLVC

SEQ ID NO: 330991 - protein, 144 aa, Zea mays
  Clone ID: MRT4577_64969C.1.pep
SSRPEDSPLAHRLQLNDPSQATRVFSSSPRPSSFARISRSATGIQDYWLQGYDQMRGAARLLVQRATKTRQINPVNGLARMPAITTPQRHGNENTSSESVVTKDENVEPLVAFSRPPPLPPVLGPLVVLSVFEMSSGGGDEDTK

SEQ ID NO: 330992 - protein, 83 aa, Zea mays
  Clone ID: MRT4577_6496C.1.pep
GTGASTFFATSNQKKTNLGEKKAPKWDKARDPFVLTALKPSLIPGGDETYFWPFIIEGIKRIALYRCADYREGQGGQRVLFSP

SEQ ID NO: 330993 - protein, 431 aa, Zea mays
  Clone ID: MRT4577_64970C.1.pep
MPKAGGGAADEEEFRAEVEERLINEEYKIWKKNTPFLYDLVITHALEWPSLTVQWLPDRTEPPGKDHSVQKMILGTHTSDNEPNYLMLAQVQLPLDDAEADARHYDDDHADIGGFGAASGKVQIVQQINHDGEVNRARYMPQNSFVIATKTVSAEVYVFDYSKHPSKPPLDGACNPDLRLKGHNSEGYGLSWSIFKEGHLLSGSDDAQICLWDIKANSRNKSLDALQIFKHHDGVVEDVAWHLRHEYLFGSVGDDYHLLIWDLRSPAPTKPVQSVVAHQGEVNCLAFHPFNEWVVATGSTDKTVKLFDLRKIDTSLHTFDCHKEEVFQVGWSPKNETILASCCLGRRLMVWDLSRIGQEQTPEDAEDGPPELMFIHGGHTSKISDFSWNPCEDWVVASVAEDNILQIWQMAENIYHDEDDLPISDEPAKTS

SEQ ID NO: 330994 - protein, 103 aa, Zea mays
  Clone ID: MRT4577_64971C.1.pep
LNREGDLLHIIACHGQRSCLDLSPSMETPRTIPAFLLQFASWMIREKPFLPRPQIGNRRHDILRATMNHGGGLGDHGGGQACVLFLVHMREEKGANEEEGSRR

SEQ ID NO: 330995 - protein, 110 aa, Zea mays
  unsure (1)..(110): unsure at all Xaa locations
  Clone ID: MRT4577_64972C.1.pep
MRSLFHSAHLLLSPKGPKIFALLTLLALLASGATPTIIPQCSQQYLYPMIAMRFEYPSIQFYRLQEAMTVCILRSLALTVQQPYALLQQXSLVNMYLQRITAXQLQQRLL

SEQ ID NO: 330996 - protein, 104 aa, Zea mays
  unsure (1)..(104): unsure at all Xaa locations
  Clone ID: MRT4577_64973C.1.pep
MSLQVALDDHASHISVFHERGGQFHLSSISSXVYRTXNICRSLTSYDERCATRIQMTQSLCGPSIMLSDRINVPVIQRPLCANVHTEKRGGNFMTEFMMGCVAA

SEQ ID NO: 330997 - protein, 127 aa, Zea mays
  Clone ID: MRT4577_64974C.1.pep
GENFPEHSPLAHRLQLNDPSQATRVFSSSPRPSSFARISRSATGIQGTSLLTSGTPLPRLRPSLLSCGPGIRRKLVPHHGSSLRENIVSSISDLWTRQKRLFTDHPACKLKQKCRDRSWRFHGRRQV

SEQ ID NO: 330998 - protein, 113 aa, Zea mays
  Clone ID: MRT4577_64975C.1.pep
TNLLAYKFFLFAPQITKNQLFFCQAQQKGQKTKKQPPPKIQSFFPTMAPTHPYLLSQTNQKKKPFHPKNNVLNPPQSKNNRFSLKPQFKPPPLIQRTPQNQVFKKNPTHPPLK

SEQ ID NO: 330999 - protein, 507 aa, Zea mays
  Clone ID: MRT4577_64976C.1.pep
MAGEVLVPVEGGRARDYGGGVTFSVAVTSLMAASCGLIFGYDVGVSGGVTQMDSFLNKFFPEVLRGMKSAKRDAYCKYDNQLLTAFTSSMYIAAMLASLVASSVTRRVGRKAVMLIGGIMFLAGSVINAGAVNVAMLIVGRILLGFGVGFTAQAAPLYLAEISPTRWRGGFTTAYHFFLVAGTLAANVANYVTNRIPDWGWRVSLGLAAVPSAVIVMGALLVSDTPSSLVLRGEPYAARASLQRVRGAGADVEAELKDIICAVEAARRDEEEGAFRRLRAEGYRHYLVMMVAIPAFFDLTGMVVISVFSPVLFRTVGFDSQRAIFGAVIISLVSLCGVALSTLAVDRCGRRFLFLAGGTAMLLFQVAVSWVLADHLGKHQAVTMPKNYAMGVVVLVCLYTFSFSMSWGPLKWVVPSEIYPVEIRSAGQAITLSVALTLSFTQTQVFISMLCAMKYAIFLFYSGWVLAMTLFVAAFLPETKGVPLETMRSVWARHWFWRKFVVLDAAR

SEQ ID NO: 331000 - protein, 42 aa, Zea mays
  Clone ID: MRT4577_64977C.1.pep
NYETNSKGVEIFWKSWLPREGTATKAALFFCHGYGDTCTFFF

SEQ ID NO: 331001 - protein, 53 aa, Zea mays
  Clone ID: MRT4577_64978C.1.pep
GAWCAWVHSRPLCRNSTVSVSPVPSCIMWSFIPRHGSLVVLLPQLSLVLAFPG

SEQ ID NO: 331002 - protein, 91 aa, Zea mays
  unsure (1)..(91): unsure at all Xaa locations
  Clone ID: MRT4577_64979C.1.pep
NIPIINARPKTRGGEGEQKTARGATPQEEGANRDQRPPQTSTNKXARQKKTAEAXRRKTGRKREPRTKPGRGDKDREGNESQEDARRNHAG

SEQ ID NO: 331003 - protein, 49 aa, Zea mays
  Clone ID: MRT4577_6497C.1.pep
NKLDPLKRAALINYFIFKYGTHLFIFFPFFFFFFFFFFFFFFFFLIFFF

SEQ ID NO: 331004 - protein, 67 aa, Zea mays
  Clone ID: MRT4577_64980C.1.pep
LCLTELQSPGTGSLSPNRFSTSYTDVALLIQLPQGVITYQDVPPEQTPGSLCSLRCTARHLSLPPTC

SEQ ID NO: 331005 - protein, 130 aa, Zea mays
  Clone ID: MRT4577_64981C.1.pep
TKHGTRAQGKQHQPTPKRASAGETKTHRARHLKASAASRSSPKEMKAKPNYKSTRLKAPQLQNRRLRSTRRVYVVEETAEPRPHGRVRGPSAASYKCPAARPKTHEDPTDGDSRRNRCQYENGREVEPQR

SEQ ID NO: 331006 - protein, 39 aa, Zea mays
  Clone ID: MRT4577_64982C.1.pep
VVSLVENSSKHSNVQILVSLPFYCLDVSLVLVRSWVCFV

SEQ ID NO: 331007 - protein, 37 aa, Zea mays
  Clone ID: MRT4577_64983C.1.pep
SFVTTCTRARALRTLRTRKLYLSDPIRNCAGQPWRLG

SEQ ID NO: 331008 - protein, 88 aa, Zea mays
  unsure (1)..(88): unsure at all Xaa locations
  Clone ID: MRT4577_64984C.1.pep
DSSGKTTTLYKLQLXRAVPPHPXIGSNVEEVASKNLRYXDWHLGCHERLYTADATYYRGTHTLIAEIDSQDXRALINMIKDELYKMLQ

SEQ ID NO: 331009 - protein, 125 aa, Zea mays
  unsure (1)..(125): unsure at all Xaa locations
  Clone ID: MRT4577_64985C.1.pep
GPCKGFNPPPLGKGALRGPPPGRWPGGLNQRHGPLGGEPPNRGRGGRETKAPVANLDSDLKGVKQKPAHGNFPPLGFKPNPKTKWGKKRVPSDQGEILTGGGHXKGKTNLFHQGLNPTHVPYWGG

SEQ ID NO: 331010 - protein, 88 aa, Zea mays
  unsure (1)..(88): unsure at all Xaa locations
  Clone ID: MRT4577_64986C.1.pep
VDYCSDDVRTVAPAGFRRHGGGVHHNVVKEKFEEVNTVSRAGANHHHHHGYHGGHCFLVRETSVXEEDINTCTGEDHKRRESFLSRAN

SEQ ID NO: 331011 - protein, 95 aa, Zea mays
  Clone ID: MRT4577_64987C.1.pep
FCFFFFFFFFFGFFFINERKFLYLYRLGPQTPKWRGTNHIFYMRWTLYNDAGEQQPEKGKTPTASYFWMVMGGGSRCLFCTSHRLTTWGRANDQP

SEQ ID NO: 331012 - protein, 184 aa, Zea mays
  Clone ID: MRT4577_64988C.1.pep
MEGVSVEFEAKSARDGAWYDVAAFLSHRLFESGDPEVRVRFSGFGAEEDEWINVRKCVRQRSLPCEATECVAVLPGDLILCFQEDKEQALYFDARVLDAQRRRHDVRGCRCRFLVRYDHDSSEEIVPLRKVCRRPETDYRLQILHAARAAAASADIHTPPREGKVELASNARSPYEQNPRSSTR

SEQ ID NO: 331013 - protein, 190 aa, Zea mays
  unsure (1)..(190): unsure at all Xaa locations
  Clone ID: MRT4577_64989C.1.pep
MGRPPSTTGAPAFRFLPSEVAEMEARLLQLNNGIPTRAMLQTLADKFSASPERAGKVAIQPKQVWNWFQNRRYSHRAKTTRVVPSPPAKMTPSGAXTTSTPLTPPPSGPLSPXVAVAHHGSSSTGKNPMEGVSVEFEAKSARDGAWXVRVRFSGFGAEEDEWINVRKCVRQRSLPCEATECVAVLSGDLI

SEQ ID NO: 331014 - protein, 160 aa, Zea mays
  Clone ID: MRT4577_6498C.1.pep
STGGKAPRKQFATKGARKLAPTTGGVKKPPRYRPGTVALREIPKFQKSQELVIPKLPFQRLVREIPQDFKTALRFQNHPVLAFQEAPKASLVGLLGGTNLWAIPDKRVPIMPKEIQLAPRIRGERVYPSFPGISASCMIQTNRKEQIGCAVLCYIELGYN

SEQ ID NO: 331015 - protein, 48 aa, Zea mays
  Clone ID: MRT4577_64990C.1.pep
HPVLQRALGVPFICNRLNPRGFGVRCSRTRTGRSARWCCCKGRRIKSI

SEQ ID NO: 331016 - protein, 381 aa, Zea mays
  unsure (1)..(381): unsure at all Xaa locations
  Clone ID: MRT4577_64991C.1.pep
MGRPPSTTGAPAFRFLPSEVAEMEARLLQLNNGIPTRAMLQTLADKFSASPERAGKVAIQPKQVWNWFQNRRYSHRAKTTRVVPSPPAKMTPSGAXTTSTPLTPPPSGPLSPXVAVAHHGSSSTGKNPMEGVSVEFEAKSARDGAWYDVAAFLSHRLFESGDPEVRVRFSGFGAEEDEWINVRKCVRQRSLPCEATECVAVLPGDLILCFQEDKEQALYFDARVLDAQRRRHDVRGCRCRFLVRYDHDSSEEIVPLRKVCRRPETDYRLQILHAARAAAASADIHTPPREAKVELASNAKSPYEQKPQKQYKMMDVNTDEEVTMVSTLEQDETQGKTVAPVPSATAETRNSSSDAVMKDAEASSVAQDDDEVQVVDKMKEG

SEQ ID NO: 331017 - protein, 61 aa, Zea mays
  unsure (1)..(61): unsure at all Xaa locations
  Clone ID: MRT4577_64992C.1.pep
MATARKVIKCKTTVAWKASKPLTIEDVEVRPPQATEVPIKXLYTALCHNRPSTFREEKGQN

SEQ ID NO: 331018 - protein, 330 aa, Zea mays
  unsure (1)..(330): unsure at all Xaa locations
  Clone ID: MRT4577_64993C.1.pep
MGRPPSAGAPAFRFLPSEVAEMEARLLQLNNGIPTRAVLQTLADKFSASPERAGKVAIQPKQVWNWFQNRRYSHRAKTPRAASSPPAKXRPRELITTSMPLTPPPSXAAQLSSVAAAHHGSSSTGKNPVESVSVEFEAKSARDGAWYDVAAFLSHRLFESGDPEVRVRFSGFGAEEDEWINVRKCVRQRSLPCEATECVAVLPGDLILCFQEGKDQALYYDAHVLDAQRRRHDVRGCRCRFLVRYDHDSSEEIVPLRKVCRRPETDYRLQILHAARAAATNADVHTPPKEVKVELASTAKSPDEQKPQKQHKMMDVNTDEGDHGLHLGAR

SEQ ID NO: 331019 - protein, 176 aa, Zea mays
  unsure (1)..(176): unsure at all Xaa locations
  Clone ID: MRT4577_64994C.1.pep
SLFSLVVCALAAPYSLFPLCFHSPLFFLTSPFLSSFLSPFXQYPLGRRGGIHHAPTSAILPLSPFILHHSSPFFNHFPSLHFSTLIIXTHSLHHLALSNLSPSSYHHLFLSFIPLCLLNSXSFFSHQPIPFTHPPXSYPLHFLPFNQLSSFNFSSYLHYXLLLPFNHLPXFIPSTL

SEQ ID NO: 331020 - protein, 107 aa, Zea mays
  Clone ID: MRT4577_64995C.1.pep
IGVILTNNAQWSEANNQSNSYTFYPEILKRNPQSLAPLCPRWRRKTTDNKSPSEKQNHPSQVPFHQIIDQTKRCRQGKGSHRPSNKLLRPLRCYMVIKTGTDLDNKR

SEQ ID NO: 331021 - protein, 72 aa, Zea mays
  unsure (1)..(72): unsure at all Xaa locations
  Clone ID: MRT4577_64996C.1.pep
GKNVSNSKAFLEKRFPEDLGLVDALPPAIFAFKEGYEGEISSPPLEIGIFXSRLXFKVFSPLEIKGFLEKGG

SEQ ID NO: 331022 - protein, 75 aa, Zea mays
  Clone ID: MRT4577_64997C.1.pep
CSPGCGASFGHGDTASIATMEFVNPFTGLRVCGRRPNENRQLKVEGCYSLRSYRVRSDQEGLQHGKSQCLQPTRG

SEQ ID NO: 331023 - protein, 136 aa, Zea mays
  Clone ID: MRT4577_64998C.1.pep
RDFEFMSVGIFQLSSNQLTGSVPRLPRSIVTFDISRNSLNGPLSLNFEAPLLQLVVLYSNRITGLIPNQICQWKQLRVLDLSDNLLAGELPDCGTKVAKQGNSSSTSMPHSSPASPPSLNIRTLLLSSNSLSCDLL

SEQ ID NO: 331024 - protein, 65 aa, Zea mays
  Clone ID: MRT4577_64999C.1.pep
LPKVMGSTLLVSRRRETTRISVATSMLIFLMTILQFISLQQARRRAPWRRATRSPPRIDPTTLPP

SEQ ID NO: 331025 - protein, 51 aa, Zea mays
  Clone ID: MRT4577_6499C.1.pep
RKLGIRLEVKSSCLFFLIDLTGDLGTILSLLSYLWTVGGGSPQLEFPYDCL

SEQ ID NO: 331026 - protein, 43 aa, Zea mays
  Clone ID: MRT4577_649C.1.pep
DTHNDVAARSTNTSTAIQLKTYCGSGDNRISKNRVFSLNNELI

SEQ ID NO: 331027 - protein, 45 aa, Zea mays
  Clone ID: MRT4577_64C.1.pep
GVRTTRKRGNQLRMTGLRAEAGRHEAPFPTGGVLNPLGQRGRKSG

SEQ ID NO: 331028 - protein, 112 aa, Zea mays
  Clone ID: MRT4577_65000C.1.pep
MSMKKRVYVGGSAFKLLRTVIVFALAASLHASLSCSPWVLVLMGPERSHPTSPSPAPPMCSAPRPHLTTLLPPRHAQLCSPARRRECPAWLPQPTRNSTAPLDRQQRNSSIA

SEQ ID NO: 331029 - protein, 38 aa, Zea mays
  unsure (1)..(38): unsure at all Xaa locations
  Clone ID: MRT4577_65001C.1.pep
GLFGFAVIYLCKVPLSCSWLICGSLLPDIVFPVWAFXG

SEQ ID NO: 331030 - protein, 101 aa, Zea mays
  Clone ID: MRT4577_65002C.1.pep
PWIRTTFRVQKKTICKKKKHAAQFSGTTFLSPAADYRMPKIRHFLASLSTCRLFRNVVLRERWCTGRDQKLLLRAWSSWRKLLLNWWYAHNICSTNILIRQ

SEQ ID NO: 331031 - protein, 104 aa, Zea mays
  Clone ID: MRT4577_65003C.1.pep
AKTKGGPLPGLGAWPKTTTFSGLRKSLVIPRFSPEQIFGPPWAPFKKGKGWGCFFLGLKKPPAPFFSNFFPGPKKVWGCFPQTPPGVFFLGAPKTKKTPFFQSL

SEQ ID NO: 331032 - protein, 71 aa, Zea mays
  Clone ID: MRT4577_65004C.1.pep
AKFPKWRTLYPEHPRGEFAANPKRVMELETKNKIVPNKTARVKSCLRQNPPGVESSPHHQKFAGLAISSPI

SEQ ID NO: 331033 - protein, 110 aa, Zea mays
  Clone ID: MRT4577_65005C.1.pep
PWRPWRSYRSSPSRCARRRHSSPTTTPPTTRAPIVVDLQREPGLSSKSIVLQIDSKSQQVSASALRHSLQDRLSRGASGGSGRGRVDEIYLKLRTSTAPSLKLIDLPGID

SEQ ID NO: 331034 - protein, 913 aa, Zea mays
  Clone ID: MRT4577_65006C.1.pep
MEAMEELSELAESMRQAASLLADDDPSDDAAPRRPTTFLNAVALGNVGAGKSAVLNSLIGHPVLPTGENGATRAPIVVDLQREPGLSSKSIVLQIDSKSQQVSASALRHSLQDRLSRGASGGSGRGRADEIYLKLRTSTAPSLKLIDLPGIDQRAVDDSMINEYAGHNDAILLIVIPAMQAADVASSRALRLAKDIDSDGTRTVGVISKVDQANGDAKVIACVQALLSNKGPKNLPDIEWVALIGQSVAIASAQSVGSENSLETAWRAEAESLKNILTGSPQNKLGRIALVDTIAKQIRKRMKVRVPNLLSGLQGKSQMVQDELARLGESMVQSAEGTRAVALELCREFEDKFLAHITSGEGSGWKIVASFEGKFPDRIKQLPLDRHFDLNNVKRIVLEADGYQPYLISPEKGLRSLIKIVLEMAKEPSRLCVEEVHRVLLDIVNASANATPGLGRYPPFKREVVAIASNALETFKNDAKKMVVALVDMERAFVPPQHFIRLVQRRMERQRREDELRNRSSKKTQEAEQPTSKRASSPQTDAEQGGGSLKSMKDKSGQQDKDTKEGSNLQVAGPAGEITAGYLLKKSAKTNGWSKRWFVLNEKSGKLGYTKKQEERHFRGVITLEECNLEEVEEEEPSKSSKDSKKANGSEKISSLVFKITNRVAYKTVLKAHSAVVLKAESMADKVEWVNKIKAVIQSKGGSFKGPSTEGSSMRQSNSDGALDTMARRPADPEEELRWMSQEVRGYVEAVLNSLAANVPKAIVLCQVEKAKEDMLNQLYSSISGQSNAKIEELLQEDHNAKRRREKYQKQSSLLSKLTRQLSIHDNRASVSSYSNDTTEAESPRTPTRSGEDWRSAFDSASNGPVAGSTNSQSRSKSADGRSRRYENGDVSSGANSGSRRTPNRLPPAPPKY

SEQ ID NO: 331035 - protein, 244 aa, Zea mays
  unsure (1)..(244): unsure at all Xaa locations
  Clone ID: MRT4577_65007C.1.pep
MPTAYSLRAPPSTAQQRLRLPPPPLPLCPAGGGAARRRRVVRVASASASPFDELYARGRPAHGPSKKSMLWNLIQDIEPLDLSVIQKDVAPETVDAMKRTISGMLGLLPSDQFRVIVEALWNPFFKLLVSSIMTGYTLRNAEYRLSFERNLELSEEVAECQKSDVIEDNHHDINLGTPVTIFRLAEEDMPQDPEKTDDESSYENMGEELGDLTLQAEEYIIQMQSRLDAMKXELHDLRRKILLC

SEQ ID NO: 331036 - protein, 198 aa, Zea mays
  unsure (1)..(198): unsure at all Xaa locations
  Clone ID: MRT4577_65008C.1.pep
MEAMEELSELAESMRQAASLLADDDPSDAAAPRRPTTFLNAVALGNVSSGKSAVLNSLIGHPVLPTGENGATRAPIVVDLQRDPGLSSKSIVLQIDSKSQQVSASALRHSLQDRLSKGTSGGSGRGRADEIYLKXLRTSTAPSLKLIDLPGIDQRAVDDSMINEYAGHXDXILLVVIPAMQAADVASSRALRVAKDID

SEQ ID NO: 331037 - protein, 392 aa, Zea mays
  Clone ID: MRT4577_65009C.1.pep
MPTAYSLRAPPSASQQRLRLPLPPPPPPLPFCPGGGAARRRRGVGVASASASPFDELHARGRPVHGPSKKSMLWNLIQDIEPLDLSVIQKDVAPETVDAMKRTISGMLGLLPSDQFRVIVEALWNPFFKLLVSSIMTGYTLRNAEYRLSFERNLELPEEGVECLKSDVTEDNHHNINLGRPVTIFRLSEEDMPQDPGKTDEASSYENMGEELGDLTPQAEEYIIQMQSHLNAMKKELHDLRRKNSALQMQQFVGEEKNDLLDYLRSLTPEKVAELSESTSPGVQETIHSVVHGLLATLSPKVHSKAPPPLDNISGGVLNLGGEDDDRAELVENASLPFQPLISVPRDYLARLLFWCMLLGHYIRGLEYRLELARLLRISSVGSFSGGDDHVV

SEQ ID NO: 331038 - protein, 57 aa, Zea mays
  Clone ID: MRT4577_6500C.1.pep
DRAYAPLCKHVGRHNWACFSGVLLCCDTELNWILHDHVSEAGDSYSGRATASLHENA

SEQ ID NO: 331039 - protein, 130 aa, Zea mays
  unsure (1)..(130): unsure at all Xaa locations
  Clone ID: MRT4577_65010C.1.pep
MISPTNFLRGRKITLVXKGGAGTGTPFFPWGAERPREXPXGLQFGTGKGKVSLAAITLKDYLPRQTTEGKNRTSTDDFTGLKLITAVKTPFLPNGRFDLKAYDFFINMQIEGGAKGLIFGGPTGEGHLMS

SEQ ID NO: 331040 - protein, 176 aa, Zea mays
  unsure (1)..(176): unsure at all Xaa locations
  Clone ID: MRT4577_65011C.1.pep
MEDKTLKKTAPDKSEVHPLNVIKVMMEDLTEADRKEIEEEIVREMEEKRNERLACFRKTKNGVIKQTVGASTSGKKPYYQSVAYGPSIHPIGNGVPQGSAPNRHVAGAQGALCSAPFATPVTYDGESFENVREQVARTLREFGFEPKGHTRSYKKPYPXFFDTVSYPRGFRIPDFV

SEQ ID NO: 331041 - protein, 71 aa, Zea mays
  Clone ID: MRT4577_65012C.1.pep
AHTPVCMSPEQVWLSSLCITTDERLQPVCMMNIVEAEYCWKDASPHWVAPCKQYQDDDNIGDATSSARSQI

SEQ ID NO: 331042 - protein, 62 aa, Zea mays
  Clone ID: MRT4577_65013C.1.pep
VLFFSCSFYNSFLLLTLNRTQMASHGSLDDGNALSHTDRLAREGFPRILWEVLQGAGYTTPS

SEQ ID NO: 331043 - protein, 247 aa, Zea mays
  Clone ID: MRT4577_65014C.1.pep
MEDKTAKKAAPDKSEVHPLNVIKVTMEDLTEADRKEIEEEIAREMEEKRNERLAFFRKTKNGVIKQTVGASTSGKKVSSSVTCEELAHMIDTYVASKYGADVTKIPRMISEGVHNSFDAFRSEFKQDISNNMPRQIRSIVQQIQEENQGKRAANSPGTSSFGIAVAPNTIDASAKGMSGSAVANSNLQQPYYQSVAYGPSINPIGNGVPQGSVPNRHVVGAQGALCSTPFVTPVTYDGEAFENVREQ

SEQ ID NO: 331044 - protein, 58 aa, Zea mays
  Clone ID: MRT4577_65015C.1.pep
QPAADLLSAPPSAPRTSCCRVGGPPPATRRAPPHMPTQLVRRSHLPAFVPRQTPYRKP

SEQ ID NO: 331045 - protein, 60 aa, Zea mays
  Clone ID: MRT4577_65016C.1.pep
KKKALPRSIKVHRKGAIKYFVRERQKAILELKRKLRYVPRQIRFRPPLFIKSLDSLVSKS

SEQ ID NO: 331046 - protein, 143 aa, Zea mays
  Clone ID: MRT4577_65017C.1.pep
SHRRRRHNRSSRAHHQSHSDPKRRPGTSPSSTTVHPNPNPKPSNPRHPRKRKTRRHRPPAPSRSHQRAQTQSEARARRGSRAASGSAPSLPLRSRRNGKSRSTRRGRGQATAARARKRRRRRVRSLIITARRPRPRRGRRRDT

SEQ ID NO: 331047 - protein, 153 aa, Zea mays
  unsure (1)..(153): unsure at all Xaa locations
  Clone ID: MRT4577_65018C.1.pep
MSASTRAAANGRPPRGGEHPDGTPKSTTAATRDARRLARNEPAXNRPREQSEEPTAERTRGHCTEKHRATAEETHRATTAETTKEHIEYXKTIATNEPHRVIQGHGRDLGDNTRERAHQLAPNGVNESEAEWSMTSTQKLREPREHSYKTLSD

SEQ ID NO: 331048 - protein, 38 aa, Zea mays
  Clone ID: MRT4577_65019C.1.pep
RLSKEAYVMLQQIRSSVTFRIGHLIATCGTRASVMTRQ

SEQ ID NO: 331049 - protein, 95 aa, Zea mays
  Clone ID: MRT4577_6501C.1.pep
LFFFYPYICLGVLIFFCFTPKSPCINPYLFLFFLKIFFIVKTRNYPSIVELKNTFTPLKRSIYIDRDLSFQIIIEGHIKIHKLDPQKYFIYRRPS

SEQ ID NO: 331050 - protein, 120 aa, Zea mays
  unsure (1)..(120): unsure at all Xaa locations
  Clone ID: MRT4577_65020C.1.pep
AGQLSCPRYLSGEAKQIEWSKIQTPTDEVVVPYDTAASAPEDLXETKKLLYKLVELKLNDGLDTTMGLTDPKSAIEERNGFTFLDLIVIXIEFLNKKCGCYGPLLLMNXLHTRAVTQEIV

SEQ ID NO: 331051 - protein, 405 aa, Zea mays
  Clone ID: MRT4577_65021C.1.pep
MSKPNPEKSPRKFWRVGLKIPATVTVMMWTVVVKTPKIVPGDLAIQFMVLKIFKVYLHQLTPEAIIRLNIFVWAVRSQGLKPDAKSFCNIHELSYETKPWGKEQYHNNFGCYSFVSRSGSSCPVPTFRKRWPGDWMTEWFYVKNDLSVREDIKGVIMRPIWQSFGLRRPKVEMNEAAEECQRAFGVICSFIGTRDLVQEHIAFRVWPLAEKWEMPQETIKEADEGGLIRLKYTFKFGDKFVEPDDDWLKSIENLSDELLGAYSKAEDNAMSAAFGGRKKKRLNRIFDAIGFVYPDYCYPIRRQKRKNTTSAKEETATAPSEPEPKRKKIKVLTHRPRYIEPASVPEFTGETSSATEAKKPTKPTLLPEVAEMAETPRRIELEEPKISLLETEEMAEAPSTEKWKK

SEQ ID NO: 331052 - protein, 62 aa, Zea mays
  Clone ID: MRT4577_65022C.1.pep
ENNTYQYQQLLILPVHQIRNRECISIEPIILLGGQGVVQAVYYGQPHHYERLVRAYSLLLLL

SEQ ID NO: 331053 - protein, 713 aa, Zea mays
  Clone ID: MRT4577_65023C.1.pep
MSEDKKAAVEMKLSLSEEKNLGFLVAMSKTNTEKITKEILEGLSEDTDDSDSYDVDSGGEDSEDRPWRPSHAVFGKSSVKENHLVNMRGRYFRDLSIVRADEGEKTCPSPEENEVVVFVVEVLKIFEIYLHQLTPEAIIKMNIFVWAARSQGLEPDAKSFCNIHELSYETKPWGKEQYHNNFGCYSFVSRSGSSCPVPTFQKRWPGDWMTEWFYVKNDLKTREDIKGIIMRPIWQSFGLRRPKVEMNEAAEECQRAFRVICSFIGTMDLVQEHIAFRVWPLAEKWEMPQETIKEADEGGLIRLKYTFKFGDKFVEPDDDWLKSIENVSDELLGVYSKAEDTALSATFGGRKKKRLNRVFDAIGFVYPDYRYPIRGQKRKGTTSAKEEAAAAPSEPASKRKRIKVLTHRPRYIEPASVPEFTGETSSATEAEEPTLQPEVAELAEAPTTTELEEPKILLPETKEMAEAPSIEKMEETKGSTEGSKISEILSPSVEIEVARIKKGPVVTPKRKRMVNVLDVLETIKSSSTTPKKTVETSEAETEIFDTKAPKQQTEAEAGPSEPTKGLILSNALRAQKDAEDEGGIATILEKKGCEHVKILAQSEATLSFEDAKDPSAEASMVGGKFFTDVWDNGGREMAREIIQKSEKGIHDARKVAEAVEKSAEPEGQIDPTKASPGPHPKGDDEIKKMAEAIMDEVVNRLLNEAAEVVLRED

SEQ ID NO: 331054 - protein, 281 aa, Zea mays
  Clone ID: MRT4577_65024C.1.pep
RGTFKFGDKFVEPDDDWLKSIENLSDELLGAYSKAEDTAMSAAFGGRKKKRLNRVFDAIGFVYPDYCYPIRRQKRKSTASAKEEAAIAPSESEPKRKKIKVLTHRPRYIEPASVPEFTGETPSAAEAEKPAEPTLLPEVAETAKVPTKIELEQSKILLSETKEKAEALSTEKMEEVKEATKGSKTSGVLSPAANVEIVKNQKVPAMTPKRKRMANVLDVLETIKSSSTPPKKAAVTPETATEISGSTAPEQEIEAEAGPSEPAKVKPLESEAEKNNKANFC

SEQ ID NO: 331055 - protein, 49 aa, Zea mays
  Clone ID: MRT4577_65025C.1.pep
PGPASDPTKAPSGPQPKGDDEIKKMAEDIMDEVVNRLLNEAAGVVLRED

SEQ ID NO: 331056 - protein, 480 aa, Zea mays
  Clone ID: MRT4577_65026C.1.pep
MANVLDVLETIKSSSTPPKKAAVIPETTTEISDTKTPEQEPEAEAGSLEPAKIKSLESEAEKITKPTFVEEIGVIAPEASPKVRDYIVRHASGKKLSEKEEQEAQRYAQKLKYPKGALIFNGSGEEDFLYCLPDSKEISVCREMSKSFGFPTLEDGLSVLSKNDLADSLAYNSLKGLILSNALRAQKDAEDEGCTIALSNLRSEVIELRNEGLEKDKILHSLINKIKEDEAAFKSQAEAQKREIEDLRKQLARAKEERILEETKRELSDQWADHLEGTVEELRSSKKRCYNKSIECVKKLKASFARVGAFSSEENFIRGNPEGPIEWIDHEAEAFEEILNSRGDICAFSGARGIATILEKKGCEHVKILAQSEAALSFEDARDPSTEASMIGGKFFTDIWDNGGREMAGEIIQKSEKGIHDAREVAEAAEKSAEPEDSAKASSGPQPKGDDEIKKMAEAIMDEVVNRLLNEAAEVVLRED

SEQ ID NO: 331057 - protein, 982 aa, Zea mays
  unsure (1)..(982): unsure at all Xaa locations
  Clone ID: MRT4577_65027C.1.pep
MSEDKKAIAEMKLSLDEEKNLGFLIAMSKTNTEKITKEILEGLSEDTGDSDSYDVDSGGEDSEDRPWRPSHSVYGEKTCPHPEENEVVVYRSFLKAGLRFPLSSFVVEVLKIFEVYLHQLTPEAIIKLNVFVWAVRSQGLKPDAKSFCNIHELSYETKPWGKEQYHNNFGCYSFVSRSGSSCPVPTFRKRWPGDWMTEWFYVKNDLSAREDIEGIIMHPIWQSFGLRRPKVEMNEAAEECQRAFGAVCSFIGTRDLVQEHIAFRVWPLAEKWEMPQETVKEADEGGLIRLKYTFKFGDKFVEPDDDWLKSIENLSDELLGAYSKAKDTAMSAAFGGRKKKRLNRVFDAIGFVYPDYCYPIQRQKRKNTTSAKEEATIAFDEPEPKRKKIKVLTHRPRYIEPASVPEFTGEIPSATEAEKPTEPTLLPEVAEAAKVPTETKLEQSKILISETKEKAEAPSTEKMEEVKEVTGSSKTSEVLNPAASIGRAKNEKVPAVTPKRKRMANVLDVLETIKSSSTPPKKAAATPETTEISDSKAPSQETETEAGPSEPAKIKPLESEAEKITKPTFAEETGVIAPEASSKIRDYIIRHASGKKLSEKEEQEAQHYAQRLKYPKGALIFNGSGEEDFLYCLPDSKEISVCREMSRSFGFPTLEDGLSVLSKNDLADSLAYNSLKGLILSNALRAQKDAEDEGCTIALSNLRSEVIELRNEGLEKDKILYSLINKIKEDEAAFKSQAEVQKREIEDLRKQLARAKEERXLKKQNVNSATNGRXSPRSDCXEELRSSKKRCYNKSIDCVKKLKASFAKVGAFSSEENFSRGNPEGVIEWIGHEAEAFEEILSSRGDICAFSGARGIATILEKKGCEHIKILAQSEAALSFEDTKDPSAEASIIGGKFFTDIWDNGGREMAGEIIRRSEKGIHDAREVAEAAKKSAEAEDPTKAPSDPQPKGDDEIKKMAEDIMDEVVNRLLNEAAEVVLRED

SEQ ID NO: 331058 - protein, 30 aa, Zea mays
  Clone ID: MRT4577_65028C.1.pep
PSTRIKYVFPLISSQTVKSMLLLLHQVAPL

SEQ ID NO: 331059 - protein, 1039 aa, Zea mays
  Clone ID: MRT4577_65029C.1.pep
MSGDKKAVAETKLSLDEEKKKTAGETKLTLDEEKNLGFLIAMSKTNTEKITKEILEGLSEDTGDSDSYDVDSGSEDSEDRPWRPSHSVYGKSTIKENHLVNMRGRYFRDLSIVRADEGEKTCPHPEENEVVVYRSFLKAGLRFPLSSFVVEVLKIFEVYLHQLTPEAIIRLNIFVWAARSQGLKPDARSFCNIHELLYETKPWGKEQYHNNFGCYSFVSRSGASCPVPTFRKRWPGDWMTEWFYVKNDLSAREDIKGIIMRPIWQSFGLRRPKVEMNEAAEECQRAFGVICSFIGTRDLVQEHIAFRVWPLAEKWEMPQETIKEADEGGLVRLKYTFKFGDKFTEPDDDWLKSIENLSDELLGAYSKAEDTAMSAAFGGRKKKRLNRVFDAIGFVYPDYCYPVRRQKRKNTTSAKEEAATAPSEPEPERKKIKVLTHRPRYIEPASVPEFTEKSSSATEAKKPTRPVTPPAAAGMTETAKKTELEEPKVSLPETKEMAEAPSTEKIGEVKKPTEEKVPEIVSPAANVETIKNQKVPAVTPKRRRMANVLDVLETIKTSSTPPKKAAAIPETTTEISDNKSPVQGTEAEAGSSEPAKIESLETEEKITKPTFVEEIGVIAPEASIRARDYIVRHASGKKLSEKEEQEAQHYAQKLKYPKGALIFNGSGEEDFLYCLPDNKEISVCREMSKSFGFPTLEDGLSVLSKNDLADSLAYNSLKGLILSNALRAQKDAEDEGCTIALSNLRSEVIELRNEGLEKDKILHSLVNKIKEDEAAFKSQAEAQRREIEDLRKQLARAREERILEETRRELSDQWADHLEATVEELRSSKKRCYNKSIECVKKLRASFARVGAFSSEENFIRGNPEGPIEWIDHEAEAFEEILNSRGDICAFSGARGIATILEKKGCEHVKILAQSETALSFEDAKDPSAEASIIGGKFFTDIWDNGGREMAGDIIQRSEKGIHDAREVAKAAEKSTEPEASFSVCNSSIAVSCPSDPAEASPGPQPKGDDEIKKMAEAIMDEVVNRLLNEAAEVVLKEN

SEQ ID NO: 331060 - protein, 128 aa, Zea mays
  unsure (1)..(128): unsure at all Xaa locations
  Clone ID: MRT4577_6502C.1.pep
DAWGTLNERITKLAGAIAVSQVGAQTETELIEKKLKVVDALNATKGXVDEGIAAGGRCTLYLIAAYDDAIKXDALNNYQQQEGAEIDGRPRSYPLKLRSTNDRINGRRCSETVLSNENCKYGYSAATG

SEQ ID NO: 331061 - protein, 954 aa, Zea mays
  unsure (1)..(954): unsure at all Xaa locations
  Clone ID: MRT4577_65030C.1.pep
MSEDKKTAAEMKLSLDEEKNLGFLIAMSKTNTEKITKEILEGLSEDTGDSDSYDVDSGGEDSEDRPWRPSHSVYGKSTIKENHLINMRGRYFRDLSIVRADEGEKTCPHPEENEVVVYRSFLKAGLRFPLSSFVVEVLKIFEVYLHQLTPEAIIRLNIFVWAVRSQGLKPDAKSFCNIHELSYETKPWGKEQYHNNFGCYSFVSRSGSSCPVPTFRKRWPGDWMTEWFYVKNDLTVREDIKGIIMRPIWQSFGLRRPKVEMNEAAEECQRAFGVICSFIGTRDLVQEHIAFRVWPLAEKWEMPQETIKEADEGGLIRLKYTFKFGDKFVEPDDDWQKRKNTTSAKEEAATAPSEPEPKRKKIKVLTHRPRYIEPASVPEFTGETSSATEAEKPTEPTLLPEVTETAEMPTKIELEQSKTLLSETKEKAEAPSTEKMEEVKEATKGSKTSEVLSPAANIEAVKNQKVPAVTPKRKRMVNVLDVLETVKSSSTPPKETAVIPEGKTEISDTKAPEQETEAEAGSSEPTKIKSLEFEEEKIAEPTFVEEISAAIPEASPKVLDYIIRHASGKQLSEKEKQEAQLYAQKLKYPKGALIFNGNGEEDFLYCLPDSKEISVCREMSKSFGFPTLEDGLSVLSKNDLADSLAYNSLKGLILSNALRAQKDAEDEGCTIALSNLRFEVLELRNEGLEKDKILHSLINKIKEDEAXLKVKLKLINANLXLRKQLARAKEERILEETKRELSDQWADHLEGTVEELQSSKKRCYNKSIECVKKLRASFAKVGAFSSEENFTRGNPEGPIEWIDHEAEAFEEILNSRGDICAFSGARGIATILEKKGCEHVKILAQSKGALSFEDARDPSAEASMVGGKFFTDIWDNGGREMAREIIQRSEKGIHDAREVAEAAEKSAEPEDSAKAPSDPQPKGDDEIKKMAEAIMDEVVNRLLNEAAEVVLRED

SEQ ID NO: 331062 - protein, 1007 aa, Zea mays
  unsure (1)..(1007): unsure at all Xaa locations
  Clone ID: MRT4577_65031C.1.pep
MSEDKKAAAEMKLSLSEEKNLGFLIAMSKTNTEKITKEILEGLSEDTDDSDSYDVDSGGEDSEDRPWRPSHAVFGKSSIKENHLVNMRGRYFRDLSIVRADEGEKTCPNPEENEVVVYRSFLKAGLRFPLSNFVVEVLKIFEVYLHQLTPEAIIRLNIFVWAVRSQGLEPDAKSFCNIHELSYETKPWGKEQYHNNFGCYSFVSRSGSSCPVPTFQKRWLGDWMTEWFYVKNDLKTREDIKGIIMRPIWQSFGLRRPKVEMNEAAEECQRAFGVICSFIGTRDLVQEHIAFRVWPLAEKWEMPQETIKEANEGGLIRLKYTFKFGDKFVEPDDDWLKSIENVSDELLGAYSKAEDTALSAAFGGRKKKRLNRVFDAIGFVYPDYRYPIRGQKRKGATSAKEEAAAAPSXSTEKRKDKGPHTSTTXLNQPRCLSSPERHLXTEAEEPTLLPEVAEMAEAPTRTELEEPKILLPETKEMAXRHRQKKWKKQKDXEGSKISEVLSPSANVETIKNQKGPAVTPKRKRMVNVLDVLETIKSSSTTPKKTVETSEAKTEIFDTKAPKQETEAEAGPSEPTKVKSLETEEEKMTEPILVEEISVVAPEASPKVLDYIVRHASGKKLSEKEKQEAQLYAQKLKYPKGALIFNGSGEEDFLYCLPDSKEISVCREMSKSFGFPILEDGLSVLSKNELADSLAYNSLKGLILSNALRAQKDAEDEGCVIALSNLRSEVIELRNEGLEKDKILHSLINRIKEDEATFKGQAEAQKREIKDLRKQLARAKEERILEETKRELSDQWANHLEGTVEELRSSKKRCYDKSMECVKKMKASFASVGAFSSEENFTRGNPEGPIEWINHEAEAFEEILNSRGDICAFSGARGIVTILEKKGCEHVKILAQSEATLSFEDAKDPSAEASMIGGKFFTDVWDNGGREMAQEIIQKSEKGIHDAKKVAEAAEKSAKPEGQIDPTKASLGPHPKGDDEIKKMAEAIMDEVVNRLLNEAAEVVLRED

SEQ ID NO: 331063 - protein, 1009 aa, Zea mays
  Clone ID: MRT4577_65032C.1.pep
MSGDKKAAAETKLSLDEEKNLGFLIAMSKTNTEKITKEILEGLSEDTGDSDSYDVDSGGEDSEDRPWRPSHSVYGKSTIKENHLVNMRGRYFRDLSIVRVDEGEKTCPHPEENEVVVYRSFLKAGLRFPLSSFVVEVLKIFEVYLHQLTPEAIIRLNIFVWAVRSQGLKPDAKSFYNIHELSYETKPWGKEQYHNNFGCYSFVSRSGSSCPVPTFRKRWPGDWMTEWFYVKNDLSVREDIKGIIMRPIWQSFGLRRPKVEMNEAAEECQRAFGVICSFIGTRDLVQEHIAFRVWPLAEKWEMPQETIKEADEGGLVRLKYTFKFGDKFVEPDDDWLKSIENLSDELLGAYSKAEDTAMSAAFGGRKKKRLNRVFDAIGFVYPDYCYPIRRQKRKNTTSAKEEAATAPSEPEPERKKIKVLTHRPRYIEPASVPEFTGETSSATEAKKPTKPTLLPAAAEMAEAPKRIELEEPKILLPETEEMAEAPSTEKIEEVKKPSEEKASEVVSPAANVETVKNQKVPVVTPKRKRMANVLDVLETIKSSSTPPKKAAATPETTTEISDTKAPEQETEAEAGSSEPVKIKSLETEEEKITKPTFVEEIGVVAPEASSKVRDYIVRHASGKKLSEKEEQEAQRYAQKLKYPKGALIFNGSGEEDFLYCLPDSKEISVCREMSKSFGFPTLEDGLSVLSKNDLADSLAYNSLKGLILSNALRAQKDAEDEGCAIALSNLRSEVIELRNEGLEKDKILHSLINKIKEDEAAFKGQAEAQKREIEDLRKQLARAKEERILEETRRELSDQWADHLEVTVEELRSSKKRCYNKSIECVKKLKASFARVGAFSSEENFTRGNPESPIEWIGHEAEAFEEILNSRGDICAFSGARGIATILEKKGCEHVKILAQSKAALSFEDARDPSAEASMIGGKFFIDIWDNGGREMAGEIIQKSEKGIHDAREVAEAAEKSAEPEDPAKASPGPQPKGDDEIKKMAEAIMDEVVNRLLNEAAEVVLRED

SEQ ID NO: 331064 - protein, 112 aa, Zea mays
  Clone ID: MRT4577_65033C.1.pep
PRIIATRGQGTTRLQLTLHEMWQKLAATLNFEVGCASWSWAGTTTSTARWPRTPRRTRLVIEIITTFYLMLEISGVQQSTKEESAERRMRWTCPLPFCLMRIIDRNRVPERR

SEQ ID NO: 331065 - protein, 77 aa, Zea mays
  Clone ID: MRT4577_65034C.1.pep
GPLGPPGGDDGPKNSCPKVVGPTLEKPKGVILWDKPDPEMVVLPVGPPVPMDFRPTGVGILVDPVGGAPPMGWESNL

SEQ ID NO: 331066 - protein, 71 aa, Zea mays
  Clone ID: MRT4577_65035C.1.pep
LLPHGSTTGVPRSATVSYTLPSRGTHTPPRNVTLGTPDITATSSGSTDLFNHRYCTYGPPGCWLLSTHLNS

SEQ ID NO: 331067 - protein, 40 aa, Zea mays
  Clone ID: MRT4577_65036C.1.pep
VAKVREIKLSDCEIYVSCEPCPMCFGAVHLSRIKVHILLF

SEQ ID NO: 331068 - protein, 58 aa, Zea mays
  Clone ID: MRT4577_65037C.1.pep
WQPTNSCRNGCLCNCEKKRTSRRKRPPPIYITVTRTHPFSHSSAELASHLFLFSITDR

SEQ ID NO: 331069 - protein, 54 aa, Zea mays
  Clone ID: MRT4577_65038C.1.pep
NVICRNAVSRFHQAVGFFHSTAPVFGYAMDCKCFLLIIVSALDMQCLASLRTGV

SEQ ID NO: 331070 - protein, 94 aa, Zea mays
  Clone ID: MRT4577_65039C.1.pep
LSLCMSSKYLPIAKLMVSVLAIDVGDHVRDHLARRSTWVGLACFLGTVAWLTLAGLEYATGATPVWVDSLGTAAPCGTVVSVTAVTSRAVRGPH

SEQ ID NO: 331071 - protein, 335 aa, Zea mays
  Clone ID: MRT4577_6503C.1.pep
MEASAAAGGGGGSAATRSSPAAVQATNDDAAASKLSCVNKGYMKDDYVRFFVRRPTRRAPIINRGYYARWSVLRTLLHQFLNAGKNSNNDKPKQILSLGAGFDTTFFQLQDEGMAPHCYVELDFKEVTSKKAAIINHYSEMKEKLGSEASISIEKGEVISTHYKLFSADIRDIPKLDSVIRMAEMDPSLPTFIIAECVLIYLDPTATGAIVSWASQKFSTAVFFLYEQIHPDDAFGEQMIRNLESRGCPLLGINATPTLSHKEKLFLGNGWQRAVAWDMLKIYNDFIDSQERRRIERLELFDEFEEWYMMQEHYCVAYGINDAEGIFDSFGFGET

SEQ ID NO: 331072 - protein, 42 aa, Zea mays
  Clone ID: MRT4577_65040C.1.pep
MVSSSSSVVNVYPLANYTFGTKEPKMEKDTSVADRLARMKVK

SEQ ID NO: 331073 - protein, 285 aa, Zea mays
  Clone ID: MRT4577_65041C.1.pep
MAMAYRVLEVTLVSANDLKKVSLFSRTRIYAVASISGFDLRIPSHSTQADHSNGCNPCWNAVVHFPIPAAADTRGLALHVRLRAQRLYLGDRDIGEVFVPIDDLLAGADKGGDPRPVSYQVRRPHSGRAHGVLYFCYKFTEVPAVSCVSEPESKQVQYAKKYVQDSKNTTDKTMVPPTVYPPPQAMASAYPPQQYCSPYAAYPRQPYGYPAPPPYGYNAASPQPAMYNYAAQPVAAPARHGGGMGMGLGLGLLGGAVGGMMLGEAIGDYETDAAYDAGFNDALAF

SEQ ID NO: 331074 - protein, 49 aa, Zea mays
  Clone ID: MRT4577_65042C.1.pep
PPQQKKLKKFGNFFSLVKRDNYFFLGARGRFPPNFLSPNQKNLVFCCLF

SEQ ID NO: 331075 - protein, 174 aa, Zea mays
  unsure (1)..(174): unsure at all Xaa locations
  Clone ID: MRT4577_65043C.1.pep
MSLLSDTIGRESLKAGDHIYSCRAVSVYXYHGXIYVXDYTVIHFTRGRGQEVXGTGIVVYIILASSXPQNESTRLGRCAPTTXDSSTETNGEKSSCLNXCFVAGGXLYRFEYTCNPALFLAKRRRGTCTIAPSDPDNXVSRRCRYLLSNYFESYNLVKNNCYDFAIYCDSALLV

SEQ ID NO: 331076 - protein, 66 aa, Zea mays
  Clone ID: MRT4577_65044C.1.pep
TALPFFFFFLYFFFFFFKKARFFLKNLTQHTPNQKSTIQNTKLHTFYEVISHLYLFPPIQISNTTL

SEQ ID NO: 331077 - protein, 89 aa, Zea mays
  Clone ID: MRT4577_65045C.1.pep
FSDPPPLPNGVSTSGSGNSGDLRAPVGPPDIPRGALLHLPSSSTSATPTVSDRGQIGTPKDPVEVDVHNDPSDEGEAEHQRYSLSPPPG

SEQ ID NO: 331078 - protein, 137 aa, Zea mays
  Clone ID: MRT4577_65046C.1.pep
GPSRPGRAGTSTLGWSTICLHLYGSTCPLALLNRSLPYHRVPRQRRASGVAAAWHERVAVVEIPASALLRHAFCRGALPICGEVARTLCGWRLGQENHQLLVGVLNPSRAAPRCRRVSTGLPSFRRRIGGRRGADKH

SEQ ID NO: 331079 - protein, 182 aa, Zea mays
  unsure (1)..(182): unsure at all Xaa locations
  Clone ID: MRT4577_65047C.1.pep
IDEGLSSLRTPNTANVIRYFPTLALNFACRDYFDSVLNFDKDRDAYCEGIASTLASGDAAAASXSLSCVYSLDYARTSVVTDAKTAKVXGDSGFNELEDVYRKTLICDGMAGLYRGFIISCGAINAYRDLDFGLYDSIEPVVLTGNLHYNFLCSLALYCLITNVAVLASYPNDTVRSXMMMT

SEQ ID NO: 331080 - protein, 1010 aa, Zea mays
  unsure (1)..(1010): unsure at all Xaa locations
  Clone ID: MRT4577_65048C.1.pep
MSEDKKTAAETKLSLDEEKNLGFLIAMSKTNTEKITKEILEGLSEDTGDSDSYDVDSGGEDSEDRPWRPSHSVYGKSTIKENHLVNMRGRYFRDLSIVRADEGEKTCPHPEENEVVVYRSFLKAGLRFPLSSFVVEVLKIFEVYLHQLTPEAIITLNIFVWAARSQGLKPHAKSFCNIHELSYETKPWGKEQYHNNFGCYSFVSRSGSSCPVPTFRKRWPGDWMKEWFYVKNDLTIREDIKGIIMRPIWQSFGLRRPKVEMNEAAEECQRAFGAVCSFIGTRDLVQEHIAFRVWPLAEKWEMPQETVKETDEGGLIRLKYTFKFGDKFVEPDDDWLKSIENLSDELLGAYSKAEDTAMSAAFGGRKKKRLNRVFDAIGFVYPDYCYPIRRQKRKNTTSAKEEATTAPSEPEPKRKKIKVFTHRPRYIEPASVPEFTGETPSATEAEKPTEPTLLPEVAETAEVPTKAELEQSKILLSETKEKAEAPSTEKMEEVKEATEGSKTSEVLSPAANIETVKNQKVPAVTPKRKRMANVLDVLETIKSSSTPPKRVAVIPETTTEISGSKAPGQETEAEAGPSEPAKIKPLESEAEKITKPAFVEETGVIAPEASPKVRDYIVRHASGKKLSEKEEQEAQHYAQKLKYPRGALIFNGSGEEDFLYCLPDSKEISVCREMSKSFGFPTLEDGLSVLSKNDLADSLAYNSLKGLILSNALKAQKDAEDEGCSIALSNLRSEVIELRNEGLEKDKILHSLINKIKEDEAAFKSQAEAQKREIEDLRKQLARAKEERILEETKRELSDQWADHLEITVEELRSSKKRCYNKSIECVKKLKASFAKVGAFSSEENFSXEAIPKXIEWIDHEAEAFEEILNSRGDICAFSGARGIATILEKKGCEHVKILAQSEAALSLEDARDPSAEASLIGGKFFTDIWDNGGREMAGEIIRRSEKGIHDAREVAEAAEKSAEAEDPAKASSGPQPKGDDEIKKMAEDIMDEVVNRLLNEAAEVVLRED

SEQ ID NO: 331081 - protein, 115 aa, Zea mays
  unsure (1)..(115): unsure at all Xaa locations
  Clone ID: MRT4577_65049C.1.pep
VRYIINNVTPLATKIISILALVALYVSATNTSIIAQCSLAPSVIITQILPPVTLMGFKQPPVQAYRLQQVIATSVLQQPIYQLQQQSLAHLTIQTIVTQQXQQCLPVLSHLAMVN

SEQ ID NO: 331082 - protein, 201 aa, Zea mays
  unsure (1)..(201): unsure at all Xaa locations
  Clone ID: MRT4577_6504C.1.pep
LKKGEGGIHVHWLLHHLCLKGLKSSTPSSSLSSPLPDRSSSSXSSAWLHARMKXSVAPSSSLSTSSLSSSASSGSTPSNSXSNSHGLRLSDXCTRYSVSSSSSSASASSSSSSFPTSNPSSSSSPISPFSSSSSPSXSSSSSPSPCSCPSISSPSSSPVIMATLPLLCGSASSPSSSTSSSSSSSSSSSSSSSSSSTPSSS

SEQ ID NO: 331083 - protein, 985 aa, Zea mays
  unsure (1)..(985): unsure at all Xaa locations
  Clone ID: MRT4577_65050C.1.pep
MSEDKKAAIKMKLSLSEEKNLGFLEAMSKTNTEKITKEILEGLSEDTDDSDSYDADSGDEDSEDRPWRPSHAVFGKSSIKENHLVNMRGRYFRDLSIVRTDEGEKTCPTPEENEVVVFRSFLKAGLRFPLSSFFVEVLKIFEIYLHQLTPEAIIRMNIFVWAVRSQGLEPDAKSFCNIHELLYETKPWGKEQYHNNFGCYSFVSRSGSSCPVPTFRKRWPGDWMTEWFYVKNDLKTREDIKGIIMCPIWQRFGLRRPKVEMNEAAEECQRAFGVVCSFIGTRDLVQEHIAFRVWPLAEKWEMPQETIKEADEGGLIRLKYTFKFGDKFVEPDDDWLKSIENLSDELLGVYSKAEDTALSAAFGGRKKKRLNRVFDAIGFVYPDYHYPARGQKRKSATSAQETASAAPSEPAPKRQRVKVLTHRPRYIEPASVPXSPVKLLRPPILKNQLQCRRSKKKLKHPQQRKQKNRVLKERKXEILSPSASVETLKNQKGPAVTPKRKRMVNVLDVLETIKSSSTTPKKTVETSEAEIEIFDTKAPKQQAETEAGPSEPTKVKSLETEEEKMTEPILVEEVSAVAPEASPKVLDYIVRHASGKKLSEEEIFEANHYAKELKYPKGALVFNGTNEEDFLYCLPDNKELLVCREMARSMGFLKLEAGLCAMSKDDLADSLTYNSLKGLILSNALRAQKNAEDESYEIAFNNLRTEVIRLRNEAMEKDKILVTLVDKIKEDEAASKAQAAAQKHEIDDLRKQLARAKEERILEETKRELSDQWANHLEGTVEELRSSKKRCYEKSMECVKKMKASFASVGAFSSEENFRRGNPEGPIEWINHEAEAFEEILNSRGDICAFSGARGIATILERKGCEHIKILAQSEATLSFEDAKDPSAEASVVGGKFFTDIWDNGGREMAREIIQKSEKGIHDARKVAEAVEKTAEPEGQIDPTKAPPGPQPKDDDEIKKMAEAIMDQVVNQLLNEAAEVVLRED

SEQ ID NO: 331084 - protein, 560 aa, Zea mays
  Clone ID: MRT4577_65051C.1.pep
MAEAPTRIELEEPKILIPETKEMAEAPSTEKMEKVKKPTEEKTSEVLSPAANVETVKNQKVPAATPKRKRMVNVLDVLETIKSSSTPPKKIVAIPEAKTKIPDTKAPEQETEAEAGSSEPTKIKSLETEEEKITEPTFVEEISAIAPEASPKVLDYIVRHASGKQLSEKEKQEAQLYAQKLKYPKGALIFNGSGEEDFLYCLPDSKEISVCREMSKSFGFPTLEDGLSVLSKNDLADNLAYNSLKGLILSNALRAQKYAEDEGCAIALSNLRSEVIELRNEGLEKDKILHSLINRIKEDEATFKGQAEAQKLEIEDLRKQLARAKEERILEETKRELSDQWANHLEGTVEELRSSKKRCYNKSMECVKKLKASFASVGAFSSEENFTRGNPEGPIEWIDHEAEAFEEILNSRGDICAFSGARGIATILEKKGCEHVKILAQSEAALSFEDARDPSAEASMVGGKFFTDVWDNGGREMAREIIRKSEKGIHDAREVAEAAEKSAEPEGQLAVSCPPSNHAKASPGSQPKGDDEIKKMAEAIMDEVVNRLLNEAAEVVLRED

SEQ ID NO: 331085 - protein, 210 aa, Zea mays
  Clone ID: MRT4577_65053C.1.pep
KAPEQETEAEAGSSESAKIKSLESEAEKITKPTFVEEIGVIAPEASPKIRDYIVRHASGKKLSEKEEQEAQRYAQKLKYPKGALIFNGSGEEDFLYCLPDSKEISVCREMSKSFGFPTLEDGLSVLSKNDLADSLAYNSLKVRQMRSLYFLLSPKFFVCLNLLTHTYFSLQGLILSNALRAQKDAEDEGCSIALSNLRSEVIELRNEVLK

SEQ ID NO: 331086 - protein, 41 aa, Zea mays
  Clone ID: MRT4577_65054C.1.pep
PTMKALYAEYRPQQLPCRQLYKKPPLQFAPPGFLNYIFIIE

SEQ ID NO: 331087 - protein, 114 aa, Zea mays
  unsure (1)..(114): unsure at all Xaa locations
  Clone ID: MRT4577_65055C.1.pep
MENIDVEVDMELNRLKLWRIPRRPLFAAEEPRTVHPATCRNIAARLTEEWCAIVDDSFTLSFKSLFSRQWQWNIYLXPLXCFGVXIRYGELFPQRSLTLAIGWLAFFAAFYSCP

SEQ ID NO: 331088 - protein, 321 aa, Zea mays
  unsure (1)..(321): unsure at all Xaa locations
  Clone ID: MRT4577_65056C.1.pep
MAYTVTRSYTDQVRPFCQYAATQRFLPTLTPSGQRPRTPSVPPRSPPVTNAHRASSLVAATGRPSLPPYARSKSKSRSRSRSRSRSRSRSPRRRDRLRSERAPHRSRSRSRSPYRRRERRGHRDFACKNCRRPGHFAKECPSAPMCNNCNLPGHFAAECTLQTVCWNCKESGHIASECKNEALCHACNKTGHLARDCPTSGANVKLCNKCFKSGHIAVDCTNERACNNCRQPGHIARECKNDPVCNLCNVSGHVARVCPKTTLASVYTGRPXFRDILCRICGQPGHISRNCMATIICDTCGGRGHMSYECPSARIFGLRRL

SEQ ID NO: 331089 - protein, 945 aa, Zea mays
  Clone ID: MRT4577_65057C.1.pep
MSEDKKAVVEMKLSLSEEKNLGFLEAMSKTNTEKITREILEGLSKDTDDSDSYDVDSGGEDSEDRPWRPSHAVFGKSSIKENHLVNMRGRYFRDLSIVRADEGEKTCPSPEENEVVVFRSFLKAGLRFPLSSFVVEVLKIFEVYLHQLTPEAIIKMNIFVWAARSQGLEPDAKSFCNIHELLYETKPWGKEQYHNNFGCYSFVSRSGSSCPVPTFRKRWPGDWMTEWFYVKNDLKTREDIKGIIMRPIWQSFGLRKPKVEMNEAAEECQRAFGVICSFIGTRDLVQEHIAFRVWPLAEKWEMPQETIKEADEGGLIRLKYTFKFGDKFVELDDDWLKSIENLSDELLGVYSKAEDTALSAAFGGRKKKRLNRVFDAIGFVYPDYHYPARGQKRRSATSAQKTASAAPSEPAPKRQRVKVLTHRPRYIEPATVPEFAGETSSATKIKEPTLVSKIEEKTEAPSAEKAEEPKTEGTKILEILSPSASVETIKNQKDPAMTPKRKRMVNVLDVLETIKSSSTTPKKTVETSKAETEIFDTKAPKQQTEAEAGPSEPTKVKSLETEEEKMTEPILVEEISAVAPEASPKVLDYIVRHASGKKLSEKEKEEAQFYAQKLKYPKGALIFNGSGEEDFLYCLPDSKEISVCREISKSFRFPTLEDGLSVLSKNELADSLAYNSLKGLILSNALRAQKDAEDEGCVMALSNLRSEVIELRNEGLEKDKILHSLINRIKEDEATFKGQAEAQKREIEDLRKQLARAKEERILKETKRELSDQWANHLEGTVEELRSSKKRFYNKSMECVKKMKASFASVGAFSSEENFTRGNPEGPIEWINHEAEAFEEILNSRGDICAFSGARGIATILEKKGYEHVKILAQSEATLSFEDAKDPSAEASMVGGKFFTDVWDNGGREMAREIIQKSEKGIHDARKVAEAAEKSAEPEGQIGIN

SEQ ID NO: 331090 - protein, 253 aa, Zea mays
  unsure (1)..(253): unsure at all Xaa locations
  Clone ID: MRT4577_65058C.1.pep
MTSSRSKSKSRSRSRSRSRSRSRSPRRRDRLRSERAPHRSRSRSRSPYRRRXAWSQGXACKNCRRPGHFAKECPSAPMCNNCNLPGHFAAECTLQTVCWNCKESGHIASECKNEALCHACNKTGHLARDCPTSGANVKLCNKCFKSGHIAVDCTNERACNNCRQPGHIARECKNDPVCNLCNVSGHVARVCPKXDSGFSDTGRPVPRYPVPHXGQPGHISRNCMATIICDTCGGRGHMSYECPSARIFGLRRL

SEQ ID NO: 331091 - protein, 974 aa, Zea mays
  unsure (1)..(974): unsure at all Xaa locations
  Clone ID: MRT4577_65059C.1.pep
MSGDKKAVAEMKLSLDEEKNLGFLIAMSKTNTEKITKEILEGLSEDTGDSDSYDADSGGEDSEDRPWRPSHSVYGKSTIKKNHLVNMRGRYFRDLSIVRADEGEKTCPHPEENEVVVYRSFLKAGLRFPLSSFVVEVLKIFEVYLHQLTPEAIIKLNVFVWAVRSQGLKPDAKSFCNIHELSYETKPWGKEQYHNNFGCYSFVSRSGSSCPVPTFRKRWPGDWMTEWFYVKNDLSAREDIKGIIMRPIWQSFGLRRPKVEMNEAAEECQRAFGAVCSFIGTRDLVQEHIAFRVWPLAEKWEMPQETVKEADEGGLIRLKYTFKFGDKFVEPDDDWLKSIENLSDELLGAYSKAEDTAMSAAFGGRKKKRLNRVFDAIGFVYPDYCYPIQRQKRKNTTSAKEEATIAFDEPEPKRKKIKVLTHRPRYIEPASVPEFTGEIPSATEAEKPTEPTLLPEVAEAAKVPTETKLEQSKILISETKEKAEAPSTEKMEEVKEVTGSSKTSEVFSPAASIGRAKNEKVPAVTPKRKRMANVLDVLETIKSSSTPPKKAAATPETTEISDSKAPSQETETEARPSDPAKIKPLESEAEKITKPTFAEETGVIAPKASSKIRDYIIRHASGKKLSEKEEQEAQHYAQRLKYPKGALIFNGSGEEDFLYCLPDSKEISVCREMSRSFGFPTLEDGLSVLSKNDLADSLAYNSLKGLILSNALRAQKDAEDXREDEAAFKSQAEVQKREIEDLRKQLARAKEEXFLKTKRELSDQWADHLEVTVEELRSSKKRCYNKSIDCVKKLKASFTKVGAFSSEENFSRGNPEGVIEWIGHEAEAFEEILSSRGDICAFSGARGIATILEKKGCEHIKILAQSEAALSFEDTKDPSAEASIIGGKFFTDIWDNGGREMAGEIIRRSEKGIHDAREVAEAAKKSAEAEDPTKAPSDPQPKGDDEIKKMAEDIMDEVVNRLLNEAAEVVLRED

SEQ ID NO: 331092 - protein, 270 aa, Zea mays
  unsure (1)..(270): unsure at all Xaa locations
  Clone ID: MRT4577_6505C.1.pep
MGRPPCCDKMGVKKGPWTPEEDLMLVSYVQEHGPGNWRAVPTNTGLMRCSKSCRLRWTNYLRPGIKRGNFTEQEEKLIVHLQALLGNRXGHSPVVVLKLLFPFCFFRCNKWIGQTKSSTARGDRVLSLLICMPCTCXVSCRWAAIASYLPKRTDNDIKNYWNTHLKKKLKNMQGGEGGAGGKRPAVPKGQWERRLQTDIHTARQALRDALSLEPSATPLAKVEPLPTAPGCATYASSADNIARLLEGWLRPGSGKGPEASGSTSTTATTR

SEQ ID NO: 331093 - protein, 1012 aa, Zea mays
  unsure (1)..(1012): unsure at all Xaa locations
  Clone ID: MRT4577_65060C.1.pep
MSEDKKAVTEMKLSLDEEKNLGFLIAMSKTNTEKITKEILEGLSEDTGDSDSYDVDSGGEDSEDRPWRPSHSVYGKSTIKENHLVNMRGRYFRDLSVVRADEGEKTCPHPEENEVVVYRSFLKAGLRFPLSSFVVEVLKMFEVYLHQLTPEAIIRLNIFVWAVRSQGLEPDAKSFCNIHELSYETKPWGKEQYHNNFGCYNFVSRSRSSCPVPTFQKRWPGDWMTEWFYVKNDLKAREDIKGIIMRPIWQSFGLRRPKVEMNEAAEECQRAFGAVCSFIGTRDLVQEHIAFRVWPLMEKWEMPQETIKEADEGGLIRLKYTFKFGDKFVEPDDDWLKSIENLSDELLGAYSKAEDTALSAAFEGRKKKRLNRVFDAIGFVYPDYRYPIRGQKRKNTISAKEEVATAPSEPEPKRKRIKVLTHRPRYIEPASVPEFAGETSSATEAEKPTKPTLLPKVAEMAEAPTRIELKEPKILLPETKEMAEAPSTEKMEEVKKPTEEKTSEVLSPAANVETVKNQKVPAVTPKRKRMTNVLDVLETIKSSSTPPKKTTAIPEAKTEISDTKAPEQETEAEAGSSEPAKIKSLETEEEKITEPTFVEEIGVIAPEASSKVRDYIVRHASGKKLSEKEEQEAQRYAQKLKYPKGALIFNGSGEEDFLYCLPDSKEISVCREMSKSFGFPTLEDGLSVLSKNDLADSLAYNSLKGLILSNALRAQKDAEDEGCAIALSNLRSEVIELRNEGLKKDKILHSLINKIKEDEAAFKGQAEAQKREIEDLRKQLARAKEERILEETKRELSDQWADHLEGTVEELRSSKKRCYNKSIECVKKLKASFARVGAFSSEXKTSQEAIPKXIEWIDHEAEAFEEILNSRGDICAFSGARGIATILEKKGCEHVKILAQSEAALSFEDARDPSAEASMVGGKFFTDIWDNGGREMAGEIIQKSEKGIHDAREVAEAAKKSAEPEGQIDPTKASSGPPPKGDDEIKEMAEAIMDEVVNRLLNEAAEVVLRED

SEQ ID NO: 331094 - protein, 96 aa, Zea mays
  Clone ID: MRT4577_65061C.1.pep
TPGQCLFQPKPKRKRMLAWNCKNKTNALVKVSFASVACNTVINVSVFVSPPQTAHVSSPFHTLPPAISSYLPPALWYNLYALSVIRVSINRLWTEI

SEQ ID NO: 331095 - protein, 102 aa, Zea mays
  Clone ID: MRT4577_65062C.1.pep
VDVDQYAVRYNNALELVEHLRAMGKTNALFQRDPVLKRDPALATSAIYQSMFGLEDGSIPATFQVIYMTGWREHPSQQKAKRRGSATISFGDIQKQFGPSEN

SEQ ID NO: 331096 - protein, 946 aa, Zea mays
  unsure (1)..(946): unsure at all Xaa locations
  Clone ID: MRT4577_65063C.1.pep
MSEDKRAAVEMKLSLSEEKNLGFLEAMSKTNTEKITKEILEGLSEDTDDSDSYDVDSGGEDSEDRPWRPSHAVFGKSSIKENHLVSMRGRYFRDLSVVRADEGEKTCPTPEENEVVVFRSFLKAGLRFPLSSFVVEVLKTFEIYLHQLIPEAIIRMNIFVWAVRSQGLEPDAKSFCNIHELLYETKPWGKEQYHNNFCCYSFVSRSGSSCPVPTFRKRWPGDWMTEWFYVKNDLKTREDIKGIIMRPIWQSFGLRKPKVEMNEAAEECQRAFRIICSFIGTRDLVQEHIAFRVWPLAEKWEMPQETIKEADEGGLIRLKYTFKFGDKFVEPDDDWLKSIENLSDELLGGXKKKKRNFCTGNCFSRSQRANAEETKGKGSHXRPRYIEPATVPEXSPVKPLRPLXKEPTSVSKIEEKAETPSAEKAEKPSTEGTKILEILSPSASVETLKNQKGPAVTPKRKRMVNVLDVLETIKSSSTTPKKTVETSEAETKIFDTKAPKQQTEAEAGPSEPTKVKSLETEEEEKITEPILVEEISAVAPEASPKVLDYTIRHASGKKLSEKEKQEAQFYAQKLKYLKGALIFNDSGEEDFLYCLPDSKEISVCREMSKSFGFPTLEDGLSALSKNELADSLAYNSLKGLILSNALRAQKDAEDKGCVMALSNLRSEVIELRNEGLEKDKILHSLINRIKEDEATFKVQAEAQKREIEDLRKQLARAKEERILEETKRELSDQWANHLEGTVEELRSSKKRCYDKSMECVKKMKASFASVGAFSSEENFTRGNPEGLIEWINHEAEAFEEILNSRGDICAFSGARGIATILERKGCEHIKILAQSEATLSFEDAKDPSAEASMVGGKFFTDIWDNGGREMAREIIQKSEKGIHDARKVAEAAEKTAEPEGQIDPTKAPPGPQPKDDDEIKKMAEAIMDQVVNQLLNEAAEVVLRED

SEQ ID NO: 331097 - protein, 53 aa, Zea mays
  Clone ID: MRT4577_65064C.1.pep
ITHYTPQAILFRPPVLYVVWNCNPFPISPRVPPITLTSAQLSPLSSGNMILYL

SEQ ID NO: 331098 - protein, 117 aa, Zea mays
  unsure (1)..(117): unsure at all Xaa locations
  Clone ID: MRT4577_65065C.1.pep
LAHSTIISFFIPPVTSMGGVLLAVHANMHQQALEGSXLXQQLIAQLQQQLLAXHLTKQAIKSHQNHQLRQSMSHITMLNPAVYMQRTSHVKQTICAHIRIANMQXQQLQQFFPTLSQ

SEQ ID NO: 331099 - protein, 71 aa, Zea mays
  Clone ID: MRT4577_65066C.1.pep
WFCYFCQLALELVEHLRAMGETNALFQRNPVLKRDTALATAAIYQSMFGLEDGSIPATFQVLYYWNNSTFI

SEQ ID NO: 331100 - protein, 294 aa, Zea mays
  unsure (1)..(294): unsure at all Xaa locations
  Clone ID: MRT4577_65067C.1.pep
SSINASRERRHENEIRHREEYDRDHDVPARSHAARTKSATASTGGTTRGRSRDHDNYSPPRDRHHPXRQQEDTCGVSALTPRLRAIQWPPNFKVSNVDKYEPKQDPGGWLAVYTTAARAAGASEDVMTAYLPIVLGQDALQWLRHLPRHCIDDWSDFSRRFTANFQSLSDKPAQPWDLKSIKCRGDETLRSYLKRFQTMRNRIPEVTEAAVIEDFYRGSNDSAFVRAILQKAPTTSEQLFQEADLYITVDERAQDLIGGAKPAPAAPRRDVNQQPFLDGLVADELKTSWPSWMV

SEQ ID NO: 331101 - protein, 907 aa, Zea mays
  Clone ID: MRT4577_65068C.1.pep
MSEDKKAAAEMKLSLSEEKNLGFLIAMSKANTEKITKEILEGLSEDTGDSDSYDVESGGEDSEDRPWRPSHAVFGKSSIKENHLVNMRGRYFRGLSIVRADEGEKTCPSPEENEVVVYRSFLKAGLRFPLSSFVVEVLKIFEVYLHQLTPEAIIRMNIFVWAARSQGLEPDAKSFCNIHELLYETKPWGKEQYPNNFGCYSFGSRTGSSCPVPTFRKRWPGDWMTEWFYVKNDLKTQEDIKGIIMCPIWQSFGLRRPKVEMNEAAEECQRAFGVICSFIGTRDLVQEHIAFRVWPLAEKWEMPQETIKEADEGGLIRLKYTFKFGDKFVEPDDNWLKSIENVSDELLGVYSKAEDTALSAAFEGRKKKRLNRVFDAIGFVYPDYHYPAWGQKRKSATSAQETASAAPSKPAPKRQRVKVLTHRPLYIEPATVPEFAGETSSATEIKEPTSVPKNEEKASAEKAEKPSTEGPKILEILSPSASVETIKSQKGPAVTPKRKRMVTVLDVLETIESSSTTPKKAVETSEAETEIFDAEAPKQQTETEAGPSEPTKPRRSATVDPGRRRAIAATEESLEFALRGLRLFPEYLSVVRIVTTVQEKMARLRHTARKSVIPFLPSRLAERPLRRTVSGQSSHLERLHHRLREEQERRRQHREQQGSSSPPQQEVESVRPRSSVAQLEAPPAPPRDVLAVGGDPGGDPDDDDSDHSTESSEPQEAEGWVARPITRDAARVYQHSRGRYPDRWEATCLVCRPEDDLQGAEAVSEHYSISERDTAEAAMQDAAQRALSQYCSLFGGVANGLNLRYYPRRPTGSTESVVVSPVGEGNPRLSSTVNLVAVLNTELDHSLDELSRARTEIAGLRAELAERRHQEGGSPAPAGTQHPYRSPPRGHHTYGSPACKTRIDLDP

SEQ ID NO: 331102 - protein, 119 aa, Zea mays
  unsure (1)..(119): unsure at all Xaa locations
  Clone ID: MRT4577_65069C.1.pep
KPENPRLAPHNPNQLHAALHPGPSQAYLXCGGQGLNRKQSADTSSVTKGTSAXTIKRGILYFMGQGFDHITGDGYTETSTAGFISALVTGFAMASNAEALCLYQRNRYVGDLFLFVCPA

SEQ ID NO: 331103 - protein, 86 aa, Zea mays
  Clone ID: MRT4577_6506C.1.pep
SWFPRLAALGTGVSPPPLGGGVGNALNDPFKWKGFIFREKGCLGPFKKKKKKKKKKKKKKKKKPKKKKKKKKKKKKKKLDLPGRPL

SEQ ID NO: 331104 - protein, 61 aa, Zea mays
  Clone ID: MRT4577_65070C.1.pep
GQRATSIPERSSLSERYKVTSIWYPNNNCVGFAHTKIKQAECYASRTSRVVFESLNQSVCD

SEQ ID NO: 331105 - protein, 141 aa, Zea mays
  Clone ID: MRT4577_65071C.1.pep
VKLSQRTSLRRKRQFLHRRRKGRWHRNQASCGNFYPWALDQVSVQQGTTHRKAETQTGRLSLAPLPQSLRKTSQKPGPPEQNLRQSQPYREEPNTNSRARETPKDPNLPRERQAFTSKRVKLPPKSPEPLTFPTALKAART

SEQ ID NO: 331106 - protein, 539 aa, Zea mays
  Clone ID: MRT4577_65072C.1.pep
MGTPVNIIVGSHVWLEDPGEAWVDGVVTEIKGGDATIATTNGKTVVASLGSVYPKDTEAPPAGVDDMTKLAYLHEPGVLHNLSCRYGLNEIYTYTGNILIAVNPFQRLPYLYDVHMMEQYKGASFGELSPHLFAIADACYRALINDQASQAILVSGESGAGKTETTKMLMRYLAFMGGRSGTEGRTVEQQVLESNPVLEAFGNAKTVKNNNSSRFGKFVEIQFDKNGKISGAAVRTYLLERSRVCQVSDPERNYHCFYMLCSAPPEDVKRFKVGDPRSFHYLNQTNCYEVANVDDAREYIETRNAMDIVGIDQDEQDAIFRVVAAILHLGNVNFSKGQEIDSSKLRDDKSVHHLKTVAELLMCDEKALEDSLCQRVIVTPDGNITKPLDPGSAALSRDALAKTVYSRLFDWIVDKINNSIGQDPDATNIIGVLDIYGFESFKINSFEQLCINLTNEKLQQHFNQHVFKMEQEEYTREEIDWSYVEFVDNQDVLDLIEKKPGGIIALLDEAWYGLWYFERFVLLKKMEKSFEKHVALCTN

SEQ ID NO: 331107 - protein, 517 aa, Zea mays
  unsure (1)..(517): unsure at all Xaa locations
  Clone ID: MRT4577_65073C.1.pep
MARCGDRDIVTAAMARQPWRRRHGWQLPLHPLQLVAAAVFALLVAAFYVVLGPYIGNTLAGNILLITFSFSAAATAALYVRCTAVDPSDRTDAKKTKRRRQLARGGGGTAKLPRLRYGYILWRYAVRLLRRVEARVTNRWVRRSYLEQWNTSVQLDPMLPFAFTSLDDIVSPCATADGHDISFCPICDCEVKLRSKHCKTCERCVDGFDHHCRWLNNCIGRRNYATFILLMFFVLLMLVIEGGTAIAIFIRCFVDSKGVKMEMEHRLHLRLPKGAHAALSVVFVIFTIYSTAALGQLFFFHMVLIRKGMRTYDYILAMREAGAAFDPFEDSDSDESIDFDSPEKPSFLSRVFCRKDEVNESARKLSIRVESDQMDASGRKDDIQINPWTLIKMSKEKAMAAAERARERIRQKLPTSPMKPLPVETKRGPLNPERKHITTGKEIVPVFTKXGLSVSPTARISSPRRRFSGSSSPKPQRYRSNFDLRLAEVSRDLETHISKQVLCSVVMKGVEGEGYSS

SEQ ID NO: 331108 - protein, 61 aa, Zea mays
  Clone ID: MRT4577_65074C.1.pep
NIIESGTHVRHSPKHHTWPMGHIINIMASWNGNGSEYLLNHNQLTLLLSEGRGLPGGTPGK

SEQ ID NO: 331109 - protein, 98 aa, Zea mays
  Clone ID: MRT4577_65075C.1.pep
GPGLKHHIQTGTYDAESTEETVLTDALGTGAPELQESPTKPGNKQMRKCIHGGLPETKKKNALATIGGEAPTKLPPKKGPVTGPLLILNLSIKRPARG

SEQ ID NO: 331110 - protein, 92 aa, Zea mays
  Clone ID: MRT4577_65076C.1.pep
TNSKTFFFFLPYKLLILEHWRPSKPCIVVPLGHWVQGGLGGPLFVFVARLKHFLGGLPPNAHSLKSRISSFYRRRGCKGLRPICPCTQRFFI

SEQ ID NO: 331111 - protein, 97 aa, Zea mays
  Clone ID: MRT4577_65077C.1.pep
CRNTRESRERSILCLLRVLRGGRKTLNFPYPSACRLRLFPEECSWRWPLITALSRSRYFLTILSVSRVIRPLMALGFPYRGTPLPTVRPVPYRIWPL

SEQ ID NO: 331112 - protein, 216 aa, Zea mays
  unsure (1)..(216): unsure at all Xaa locations
  Clone ID: MRT4577_65078C.1.pep
LRXAVVVSRRDYPMSRRCKWLPDCMEGEYARATQCVEKGILKSVDESIVGREHVVPSIVQVAFRLLEVSEGDQGEEAGLGEGVMSTEEIGINMLKSLFEVHEMARTEIIEQCKFRILSAKPQQSVPVLRLLGCLILSHPFPMLEFIAHLKELLDYFSFMNDKISTALISCILPLTKFSRDLKDYVILVVRKAMFKREDMVRIAATNAIIELIIAEN

SEQ ID NO: 331113 - protein, 84 aa, Zea mays
  Clone ID: MRT4577_65079C.1.pep
MNPSAPSYPMASLYVGDLHPDVTEAMLYEKFSPAGPILSIRVCRDMITRRSLGYAYVNFQQPADAERALDTMNFDVIKGKPVRI

SEQ ID NO: 331114 - protein, 90 aa, Zea mays
  unsure (1)..(90): unsure at all Xaa locations
  Clone ID: MRT4577_6507C.1.pep
VLRGTEREKGTHCDKQVQDFAHTHARDGDLGGAQIKSGSQNGAMIESIIKGGKIAXSDETIKQAQXDALIXKSENDTLLIDGCSRXEENR

SEQ ID NO: 331115 - protein, 67 aa, Zea mays
  unsure (1)..(67): unsure at all Xaa locations
  Clone ID: MRT4577_65080C.1.pep
AIAPGFLAFYMPPHLGKNLXKKILSPLPLGRYAPPQEVPGLVEFLALTPPPSFIPGQVLPISGGMVM

SEQ ID NO: 331116 - protein, 78 aa, Zea mays
  unsure (1)..(78): unsure at all Xaa locations
  Clone ID: MRT4577_65081C.1.pep
RFGGLYFSFILFFLFYLTFIFCGRGRINIEQGFMNKTYNSHRFNKNTSPSQGGAKLKWFTHIPLLITNKYPXPWAGSI

SEQ ID NO: 331117 - protein, 87 aa, Zea mays
  Clone ID: MRT4577_65082C.1.pep
SLGVQDGRARHAPHPGFFLPGARPGGGPVPEPVCPPRGPRQQRGVPQPQVPLKGWCFSIPAAPPPSCFLWKAKGMRVVKDPEALHRS

SEQ ID NO: 331118 - protein, 47 aa, Zea mays
  Clone ID: MRT4577_65083C.1.pep
DMPTDKLPNNPVQSYNMQQRNKTAMTSSRSDLWRPYALVRLTIDVYA

SEQ ID NO: 331119 - protein, 42 aa, Zea mays
  Clone ID: MRT4577_65084C.1.pep
WFVSHLDHEQVQEHSGQDELRIVHHDHGTARAPSSSRSGFFQ

SEQ ID NO: 331120 - protein, 105 aa, Zea mays
  unsure (1)..(105): unsure at all Xaa locations
  Clone ID: MRT4577_65085C.1.pep
LHVSAGIRPHDHPLICSRNQRWERRTMVXYNIHHRQTVYVELGLTGRISVVPQTRTFIIITLVVESSDISYTVTVKIQEXEGIPPXNXRLTFAGNHLYDGPTLSY

SEQ ID NO: 331121 - protein, 979 aa, Zea mays
  unsure (1)..(979): unsure at all Xaa locations
  Clone ID: MRT4577_65086C.1.pep
MSEDKKAAAEMKLSLDEEKNLGFLIAMSKTNTEKITKEILEGLSEDTDDSDSYDADSGGEDSEDRSWRPSHAVFGKSSIKENHLANMRGRYFRDLSVVRADEGEKTCPTPEENEVVVYRSFLKAGLRFPLRNFVVEVLKIFEVYLHQLTPEAIIRLNIFVWAVRSQGLEPDAKSFCNIHELSYKTKPWGKEQYHNNFGCYSFVSRSGSSCPVPTFRKRWPGDWMTEWFYVKNDLKTREDIKGIIMRPIWQSFGLRRPKVEMTEAAKECQRAFRVICSFIGTRDLVQEHIAFRVWPLAEKWDMPQEAIKEADEGGLIRLKYTFKFGDKFVEPDDDWLKSIENLSDELLGVYSKAEDTALSAAFGGQKRKGTTSAKEEVAAAPSEXTGKKKDKGXTHRPRFIEPASVPEXSPERPLRPPKLKSQPSQXLPEVAEMAEAPTRIELKEPKVLLPETKEMAEAPLTEKMEKAKGFTEGSEISEVLSPSANVESIKNQKGRAVTPKRKRMVTVLDVLETIESSNTTPKKTAETSETETKVFDAEAPRQQAETEAGPSKPTKEVKISESIPIEEISAVAPEASPTVPDYIVRHASGKKLSEKEKQEAQFYAQKLKYPKGALMFNGSGEEDFLYCLPDSKEISVCREMSKSFGFPTLEDGLSVLSKDELADSLAYNSLKGLILSNALRAQKDAEDEGCAIALSNLRSEVIELRNEGFEKDKILHSLINKIKEDEAIFRGQAEAQKREIEDLRKQLARAKEECILEETRRELSDQWANHLEETVKELRSSKKKCYDKSMECVKKIKASFASVGAFSSEENFKRGNPEGPIEWINHEAEAFEEILNSRGDICAFSGARGIATILEGKGCEHVKILSQSEATLSVEDVKDPSAEASMVGGKFFTDIWDNGGREMAREIIQKSEKGIHEARKVAEAAEKSAEPEGQIDPTEASSGPHPKDDDEIKKMAEAIMDQVVDRLLNEAAEVVLRED

SEQ ID NO: 331122 - protein, 900 aa, Zea mays
  unsure (1)..(900): unsure at all Xaa locations
  Clone ID: MRT4577_65087C.1.pep
MSEDKKATAEMKLSLSEEKNLGFLIAMSKTNTEKITKEILEGLSEDTDDSDSYDVDSGGEDSEDRPWRPSHAVFGKSSIKENHLVNMRGRYFRDLSVVRADEGEKTCPNPEENEVVVYRSFLKAGLRFPLSNFVVEVLKIFEVYLHQLTPEAIIRLNIFVWAVRSQGLEPDAKSFCNIHELSYETKPWGKEQYHNNFGCYSFVSRSGSSCPVPTFRKRWPGDWMTEWFYVKNDLKTREDIKGIIMRPIWQSFGLRRSKVEMNEAAEECQRAFGVICSFIGTRDLVQEHIAFRVWPLAEKWEMPQETIKEADEGGLIRLKYTFKFGDKFVEPDDDWLKSIENYPTRGQKRKSATSAQETASAAPSEPAPKRQRVKVLTHRPRYIEPAIVPEFAGETSSATEIKELTSELKFEEKAEAPXQQRKQKNRVLKXTKILEILSPSASVETTKNQKGPAVTPKRKRMVTVLDVLETIESSSMTLKKTVETSKAETEIFDAEAPKRQTETEAGPSEPTKLSEKEKQEAQFYAQKLKYPKGALIFNGSGEEDFLYCLPDSKEISVCREMSKSFGFPTLEDGLSVLSKNELGDSLAYNSLKGLILSNALRAQKDAEDEGCVMALSNLRSEVIELRNEGLEKDKILHSLINRIKEDEATFKGQAEAQKREIEDLRKQLARAKEERILEETRRELSDQWANHLEGTVEELRSSKKRCYDKSMECVKKMKASFASVGAFSSEENFTRGNPEDPIEWINHEAEAFEEILNSRGDICAFSGARGIATILEKKGCEHVKILAQSEATLSFEDAKDPSAEASMVGGKFFTDVWDNGGREMAREIIQKSEKGIHDARKVTEAAEKSAEPEGQIDPTKASPGPPPKDDDEIKKMAEAIMDQVVNQLLNEAAEVVLRED

SEQ ID NO: 331123 - protein, 331 aa, Zea mays
  Clone ID: MRT4577_65088C.1.pep
MPPWIGRSTRRRRARPPAHVDRAIPAIPDDEPYLDVIARPSPSQPYPSPDLPRRRFSGGDGCWDYLADHPATGIKEDEATFKGQAEAQKREIEDLRKQLARAREERILEETKRELSDQWANHLEGTVEELHASKKRCYNKSIECVKKMKTSFASVGAFSSEENFTRGNPEGPIEWISHEAEAFEEILNSRGDICAFSGARGIATILEKKGCEHVKILAQSEATLPFEDAKDPSAEARTVGGKFFTDIWDNGGREMAREIIQKSEKGIHDARKVAEAAEKSVEPEGQIDPTKASPGPPPKDDDEIKKMAEAIMDQVVNQLLNEAAEVVLRED

SEQ ID NO: 331124 - protein, 202 aa, Zea mays
  unsure (1)..(202): unsure at all Xaa locations
  Clone ID: MRT4577_65089C.1.pep
LLLFLLQNGCYKWANHLEGTVEELRSSKKRCYDKSMECVKKMKASFASVGALSSEENFTRGNPEGPIEWINHEAEAFEEILHSRGDICAFSGARGIATILERKGCEHIKILAQSEATLSFEDAKDPSAEASIIGGKFFYXIWDNGGREMAGEIVRRSEKGIHDAREVAEAAEKSAEAEGQLDPTEVSPGARPRGDDEIKKDG

SEQ ID NO: 331125 - protein, 307 aa, Zea mays
  Clone ID: MRT4577_6508C.1.pep
MGRPPCCDKMGVKKGPWTPEEDLMLVSYVQEHGPGNWRAVPTNTGLMRCSKSCRLRWTNYLRPGIKRGNFTEQEEKLIVHLQALLGNRWAAIASYLPKRTDNDIKNYWNTHLKKKLKNMQGGEGGAGGKRPAVPKGQWERRLQTDIHTARQALRDALSLEPSPSAPPPAKVEPLPATAPGYKTYASSAENIARLLEGWLRPGSGGGKGPEASGSTSTTATTQQRPQCSGEGAASASASHSGGAPANAAAQTPECSTETSKMAGSSVGAGSAPAFSMLERWLLDDGMGHAEVGLMTDVVPLGDPSEFF

SEQ ID NO: 331126 - protein, 63 aa, Zea mays
  Clone ID: MRT4577_65090C.1.pep
PPQVLELAGNATQVFKVKGFPPPPFQLAILGSRGLAPLPQGPLPGGGVFPPLSKSLVPQSSRE

SEQ ID NO: 331127 - protein, 332 aa, Zea mays
  Clone ID: MRT4577_65091C.1.pep
MSALKKSDKKAALDFAAWSFNVTTSVGLIMVNKALMATYGFSFATTLTGLHFVTTTLMTIVFRWLGLSQPSHLPLADLVKFVIFSNLSIVGMNVSLMWNSVGFYQIAKLCMIPASCLLEVVFDHVHYSRDTKLSIMVVLIGVAVCTVTDVSVNARGLIAAVIAVWSTALQQYYVHFLQRKYSLNSFNLLGHTAPAQAGSLLLVGPFADYLLTGKRVDHFSFSSLALFFLALSCFIAIGVNLSQFICIGRFSAVSFQVLGHMKTVLVLSLGFLFFGKEGLNLQVVLGMVLAVLGMIWYGNASAKPGGKERRSILPVRSASLKGSSEEKAGAEK

SEQ ID NO: 331128 - protein, 881 aa, Zea mays
  Clone ID: MRT4577_65092C.1.pep
MSEDKKTATEMKLSLDEEKNLGFLIAMSKTNTEKITKEILEGLSEDTDDNDSYDVDSGGEDSEDRPWRPSHAVFGEKTCPNPEENEVIVYRSFLKAGLRFPLSNFVVEVLKIFEVYLHQLTPKAIIRLNIFVWAVRSQGLEPDAKSFCNIHELSYETKPWGKEQYHNNFGCYSFVSRSGSSCPVPTFRKRWPGDWMTEWFYVKNDLTVREDIKGIIMRPIWQSFGLRRPKVEMNEAAEECQRAFGVICSFIGTRDLVQEHIAFRVWPLAEKWEMSQETIKKADEGGLIRLKYTSKFGDKFVEPDDDWLKSIENLSDELLGVYSKAEDTALSAAFGGRKKKRLNRVFDAIGFVYPDYRYPIRGQKRTNTTSAKEEAATAPSEPEPKRKRIKVLTHRPRYIEPASVPKFTGETPSATEAEKPTKPTLLPEVAEMAEAPTRIELEEPKILLPETKEMAKAPSTEKMEEVPAVTPKRKRMVNVLDVLETIKSSSTPPKKTVAIPEAKTEISDTKAPEQETEAEAGPSEPTKVKSLETEEEKITEPILSEEISAIAPEASPKVLDYIVRHASGKKLSEKEKQEAQLYAQKLKYPKGALIFNGSGEEDFLYCLPDSKEISVCREMSKSFGFPTLEDGLSVLSKNDLADSLAYNSLKGLILSNALRAQKDAEDEGCAIALSNLRSEVIELRNEGLEKDKILHSLINRIKEGEATIKGNCRRASFIQEKMLQQIDHEAEAFEEILNSRGDICAFSGARGIATILEKKGCEHVKILAQSEAALSFEDARDPSAEASMVGGKFFTDVWDNGGREIAREIIRKSEKGIHDAREVAEAAEKSTEPEGQIDPTKASPGPHPKGDDEIKKMAETIMDEVVNRLLNEAAEVVLRED

SEQ ID NO: 331129 - protein, 268 aa, Zea mays
  Clone ID: MRT4577_65093C.1.pep
MADSGLTNEIRCHQGKFVIFSNLSIVGMNVSLMWNSVGFYQIAKLCMIPASCLLEVVFDHVHYSRDTKLSIMVVLIGVAVCTVTDVSVNARGLIAAVIAVWSTALQQYYVHFLQRKYSLNSFNLLGHTAPAQAGSLLLVGPFADYLLTGKRVDQFSLSSLALFFLALSCFIAIGVNLSQFICIGRFSAVSFQVLGHMKTVLVLSLGFLFFGKEGLNLQVVLGMVLAVLGMIWYGNASAKPGGKERRSILPVRSASLKGSSEEKAGAEK

SEQ ID NO: 331130 - protein, 35 aa, Zea mays
  unsure (1)..(35): unsure at all Xaa locations
  Clone ID: MRT4577_65094C.1.pep
GPGRFHLGRAXRRAPLFKGVQWGLGFLTYMIGMXL

SEQ ID NO: 331131 - protein, 81 aa, Zea mays
  unsure (1)..(81): unsure at all Xaa locations
  Clone ID: MRT4577_65095C.1.pep
RFDLVRPAFGRLKGGVGLITXXXXKSGLFVGINKGHVVTKRELPLRPSHRKGKATKRVXFHXAGVGXXXXFXPYKXXITXL

SEQ ID NO: 331132 - protein, 247 aa, Zea mays
  unsure (1)..(247): unsure at all Xaa locations
  Clone ID: MRT4577_65096C.1.pep
MPSRLLQQPLPPAAPPPPPLLAHSQHRRHALLTATIASAVAAVALLLLLVVLLRRRRLRIPTLPCSPLLDSGRPLRRYSRRTLRRATGGFHPSRLLGSGAASPVYLATFPDASLAAVKTCASAHELHLLASLPESPRLVSLHGYSPGPGSGGGAAERPLLLVFEYMPQGSLQGALFGXRRRCPXGQFLDWQKRLAIIRDVARALAFLHVECQPPVVHGDLKPSNVLLDANFRAKVVDFGLARFKTPD

SEQ ID NO: 331133 - protein, 78 aa, Zea mays
  Clone ID: MRT4577_65097C.1.pep
SYILHTVRTRKGLVWSRNRRLSLITHRLTICMEAHPVGITRGHLKRATPKAAYTPSAHVRPPTKGRTALTVMLQRAIL

SEQ ID NO: 331134 - protein, 24 aa, Zea mays
  Clone ID: MRT4577_65098C.1.pep
DPYHSVHDPMKYSYTLERLAIDVA

SEQ ID NO: 331135 - protein, 49 aa, Zea mays
  Clone ID: MRT4577_65099C.1.pep
FRQCREQDEIFYVSTRFPLSKHRTSQTHYFFFGAAFGTLVPGGTFFFTL

SEQ ID NO: 331136 - protein, 89 aa, Zea mays
  Clone ID: MRT4577_6509C.1.pep
HPQILRHPRRHRPRSLLQRALPPCVGDVQDYPDPEYIPTVKLQLMARIHGGRIDHYGIIGVKLSHAHLMAQDTQHLPDPTHGSYGHELN

SEQ ID NO: 331137 - protein, 610 aa, Zea mays
  Clone ID: MRT4577_650C.1.pep
GRLSSASALSCQSGAPVCVPQPDPTSTSNSRKIDATMDQHRTCQPDTSSVSFDLLHEPKSGSLFSLKTQDLEFEYPSPIPKQEGKGISVNQSGSTSVAHENLATKTCVHPPTSKIDSLQPLKERSCPTERDSITQLEHLFEENVVKRNNEVVNPVSDAEGIAVSDVLESLTEQEGEKYSTHGADCEKYSTHGAAPLQNLVPASAEEEQPQCSSPIALSPWGEPSYYQGEAVDSALWGVQDGNDMWSMPSPTPGLQPSSEEARADHGDGAFVETLPRQGDEKTEHANSSASGSGVPEQVKPKASTASGPSLDGSTKALGWQLLGSSLEGSAKASGWKPPALSIEGIANASGSQALYPTQGSTKSSGCQRSSSSPDGNRKAPGWQQSSTSPVGSGKAHGWQRSGSFTQGGTKAAGWQPSGSSTDRSAKVDGWQRTSSSPEGNRKASGWHSSGRESSKITYGASENRKSFSSHQATTPTGRHSLARRQGSSDKGAAGWEETLGNTWEASKRQQGNSDKNAGCGEALGSNRTWHPSSGNPSRSSQGNHQHDRHSHGSDSRRGSSNYPRRSDHRHDHGSGGSSRPSSRGQPQRGVCKYYENGHCWKGSKCQYLHR

SEQ ID NO: 331138 - protein, 68 aa, Zea mays
  Clone ID: MRT4577_65100C.1.pep
MALSGSMEGIWDGSLYLGLDLCAGELEYITLRVGEDFGLICDDAEALHSADLTNLEMGWPNTIVRDNT

SEQ ID NO: 331139 - protein, 51 aa, Zea mays
  unsure (1)..(51): unsure at all Xaa locations
  Clone ID: MRT4577_65101C.1.pep
XFXXFFFFSKKLKWSKKVFLPSYNRTKFTCGKYYYVKIIVLNSAAFLEHIT

SEQ ID NO: 331140 - protein, 43 aa, Zea mays
  unsure (1)..(43): unsure at all Xaa locations
  Clone ID: MRT4577_65102C.1.pep
LPDSHRPSFNASICRLSRWRWYGASGRSWPTVSAGGGGXRLPR

SEQ ID NO: 331141 - protein, 92 aa, Zea mays
  Clone ID: MRT4577_65103C.1.pep
CRNDDLAPLELPLGIPRPCPQHELALSFGAGSSTSTCCCPSRPSSPVRLLVPRHPGLGRAAAPRSAHLGGGASVAVVPSRIWEVGWKGIRER

SEQ ID NO: 331142 - protein, 59 aa, Zea mays
  Clone ID: MRT4577_65104C.1.pep
YMHVVIALIISEASWPYAQQVPRAGVNSRAEVRRYNRGREEWMTRWWRGEARKDTRGLR

SEQ ID NO: 331143 - protein, 225 aa, Zea mays
  unsure (1)..(225): unsure at all Xaa locations
  Clone ID: MRT4577_65105C.1.pep
MATVFLRSLAMAMADTALPPTHKLLPTVSLPLLPSSTRAAPLLLCASRRLPPAPLVASSDAVETSIEWVDDEEEEAGEAFDEEGEDVEEEVLASGDEGEGEYAAVEPPEEAKVYVGNLPYDIESEGLAQLFDQAGVVEVAEVIYNKETGQSRGFGFVTMSTIEEADKAIEMFNRYXETGRSRGFGFVTMVSKEELDDAISALDGQELDGRPLRVNVAAERPQRGF

SEQ ID NO: 331144 - protein, 289 aa, Zea mays
  Clone ID: MRT4577_65106C.1.pep
MATVFLRSLAMAMADTALPPTHKLLPTVSLPLLPSSTRAAPLLLCASRRLPPAPLVASSDAVETSIEWVDDEEEEAGEAFDEEGEDVEEEVLASGDEGEGEYAAVEPPEEAKVYVGNLPYDIESEGLAQLFDQAGVVEVAEVIYNKETGQSRGFGFVTMSTIEEADKAIEMFNRYDISGRLLNVNRASPRGTRMERPPRQFAPAFRAYVGNLPWQADDSRLVQLFSEYGEVVNAAVVYDRETGRSRGFGFVTMVSKEELDDAISALDGQELDGRPLRVNVAAERPQRGF

SEQ ID NO: 331145 - protein, 286 aa, Zea mays
  Clone ID: MRT4577_65107C.1.pep
MATMSLRSLAMAMADTALPPAHKLLPTVSLPLLSSSTRAAPLLLFARRRLPLAPLVTSSDAVEAKSADEEEEKAGEPVDMEAGEFEEVLASGGEGEGQYAAVEPPEEAKVYVGNLPYDVDSEGLAQIFDQAGVVEVAEVIYNRETGQSRGFGFVTMSTVEEADKAIEMFNRYDISGRLLNVNRASSRGTRMERPQRQFAPAFRAYVGNLPWQVDDSRLVQLFSEHGEVVDAKVVYDRETGRSRGFGFVSMVSKEELNDAISALDGQELDGRPLRVNVAAERPQRGF

SEQ ID NO: 331146 - protein, 175 aa, Zea mays
  unsure (1)..(175): unsure at all Xaa locations
  Clone ID: MRT4577_65108C.1.pep
MNYCAKHPDVIIHIAGYIXMPLXGILAADASTXGPLGKSLSIHLCYTTLEENRSNLRELRFCCPEALQDIGGAMIFHETLXLKSTEVKAFVNXIKEGRVLAVISADNVTIXEDCATDNETITAEFRPYCTKRWANCYKECAWFDIWSXLLRLNTAERNQLTMXLNRQGLSTYEIF

SEQ ID NO: 331147 - protein, 303 aa, Zea mays
  Clone ID: MRT4577_65109C.1.pep
MASSVAVSLRALAAAPLPKSSPATSCPFFVLLAPALPRRLLRLRSARRLPLAPLAASDSAFESSVGVNYAEPDDSEKDKEVELFGSGDDEGAGELVDDHSVEVSAAVEDEVEEEVGEYVEPPEEAKVYVGNLPYDVDSERLAQLFDQAGVVEVAEVIYNRETDQSRGFGFVTMSTVEEADKAIEMFHRYDISGRLLTVNKAAPRGTRMERPQRQFAPAFRAYVGNLPWQVDDSRLVQLFSEHGEVVDAKVVYDRETGRSRGFGFVSMVSKEELNDAISALDGQELDGRPLRVNVAAERPQRGF

SEQ ID NO: 331148 - protein, 86 aa, Zea mays
  Clone ID: MRT4577_6510C.1.pep
GGVPFLRMGHFRGGVFGVPLKGGVIKRGFLFQGPRFWGGNLGVFAFFNKGSGVFPFFDSPLGGFPRPLFFVSIFKGPLFFWGGVCL

SEQ ID NO: 331149 - protein, 52 aa, Zea mays
  Clone ID: MRT4577_65110C.1.pep
FPFLPTLPPTLPSTPTLKISHYDINLIIMLFHTVSYFIHILNLTTTSQPIHN

SEQ ID NO: 331150 - protein, 89 aa, Zea mays
  unsure (1)..(89): unsure at all Xaa locations
  Clone ID: MRT4577_65111C.1.pep
NPPQVGSLPAPPXHKTTRLQLPPXPSSLPASXYHLPSPXRTSPPIHSSPDTCTDVHVPQPLHLPLPPCHYPTQPPTTQPHAHPHPYPRQ

SEQ ID NO: 331151 - protein, 128 aa, Zea mays
  unsure (1)..(128): unsure at all Xaa locations
  Clone ID: MRT4577_65112C.1.pep
RFVARADAGGGGGFMEEEPEXTARDTEXKRTRTPPSKEAAGIPVTENCTRVGQLRLLXWEVSYCDAITRDAEGGYTVVAQNTRKVSANEAPIMKGSYKAREPGTLVLTVNNRVSNKTTLLDRSKVKST

SEQ ID NO: 331152 - protein, 591 aa, Zea mays
  Clone ID: MRT4577_65113C.1.pep
MEPPTGFWASLLSFLKFLPYFCGLLVLGLIKGVLLCPWACLIMAIGISALVLGLWPMHLIWTYYCIVRTKLVGPVVKLLLLIAATAVLIIWLIIGIPGSIFAGLVYGFLAPIMATFDAVGEGKEKPFVHCFVDGTWSTITGSCTVVRDVKDLLFHSYFSLMDDLRLQKPPDGEPYEIRLLDIPGALIAAAFGLLLDGIMFTLIAFYKCPVMLFKGWKRLIQDMIGREGPFLETACVPFAGLAILLWPFAVVGAVLASILSSAPLGAYAAVVAYQESSLILGIAYVFSSVSIFDEYTNDVLDMAPGSCFPRFKYRKGKDESSHGHSVPLSRPASFNREKQEGKRPPSRVTSFKNSIDDFNPFKLLDHLFAECRNQGEDLVNRGVITMKDIEETKSGKVGSGVLNVGLPAYVILNALLRSAKADSVGLILSDGSEITSDNRPKNTIFDWFFDPLMVIKEQIKAENLTDEEEEYLKMRVLLAGDPSRLKGSLPHVPSLTERKKADIDAFARRLQGITKSISRYPTSKRRFDVLVKALLSELERTMGQSGNGSQSQAQRLRNSVARMLSQKSMGKTANIRDEDPEAQMTRLSRTP

SEQ ID NO: 331153 - protein, 95 aa, Zea mays
  Clone ID: MRT4577_65114C.1.pep
ALLRRIGRSLFPIKQVAPALKSSPLFLSHDESPGGFLGIFLLNGALGGDMNLPPGVRGVKLSYGVSRLQVIRGGLLWFMFPGNRASVARFFGPKK

SEQ ID NO: 331154 - protein, 94 aa, Zea mays
  Clone ID: MRT4577_65115C.1.pep
AARPRPSALALAPPHNSRLLTQRHQRCTPLHPCSADLRHRPCPSSPRNHRPSRRASAAIHGITFLLHARAPSSVRAPPPFFAHPMLRHLRRDSS

SEQ ID NO: 331155 - protein, 170 aa, Zea mays
  Clone ID: MRT4577_65116C.1.pep
MEPPTGFWASLLSFLKFLPYFCGLLVLGLIKGVLLCPWACLIMAIGISALVLGLWPMHLIWTYYCIVRTKLVGPVVKLLLLIAATAVLIIWLIIGIPGSIFAGLVYGFLAPIMATFDAVGEGKEKPFVHCFVDGTWSTITGSCTVVRDVKDLLFHSYFSLMDDLRLQKPP

SEQ ID NO: 331156 - protein, 98 aa, Zea mays
  Clone ID: MRT4577_65117C.1.pep
MQTSTVDNLFTLLLQRLQGITKSISRYPTSKRRFDVLVKALLSELERTMGQSGNGSQSQAQRLRNSVARMLSQKSMGKTANIRDEDPEAQMTRLSRTP

SEQ ID NO: 331157 - protein, 61 aa, Zea mays
  Clone ID: MRT4577_65118C.1.pep
QDEKISFHETEYFEGTEYRVQEQCVPALEGLAASHPHVFKHLIHGRHHHHSAKHDRLGPKS

SEQ ID NO: 331158 - protein, 173 aa, Zea mays
  unsure (1)..(173): unsure at all Xaa locations
  Clone ID: MRT4577_65119C.1.pep
LNYDPGWIKITVILSDANVPGEGELXIMSYIRGQRNLPGFNPDTRHCLYGLDADLIMLXLATHEVHFSILRDVVFTPGQQDKCFLCGQVGHLAANCEGKAKRKAGEYDEKGEAIVPKKPYQFLNNWNLREYLGYEFRMANPAFQIDFGRIVDDFIFMCFFVGNDFLPHMATLG

SEQ ID NO: 331159 - protein, 117 aa, Zea mays
  unsure (1)..(117): unsure at all Xaa locations
  Clone ID: MRT4577_6511C.1.pep
RGGPSRPPTLPINFFKECPRAKNLRNLIWFGNSLGGFVVAKFALKHPEHVQQLILVGPAGFXXKTELSFEGLTKFRAPWKGLLMNRFWGSNFTPQRVFRGWGPWGPGLVQRFTSARF

SEQ ID NO: 331160 - protein, 68 aa, Zea mays
  Clone ID: MRT4577_65120C.1.pep
ENKFFFFFFFFFFYQTIGFKLGKNLKVIPLRGIYIRGMQRIYGLKGVGTWAPIFLLPKLCGVAPGGVF

SEQ ID NO: 331161 - protein, 234 aa, Zea mays
  Clone ID: MRT4577_65121C.1.pep
MKYVLVTGGVVSGLGKGVTASSIGVVLKACGLRVTTIKIDPYLNTDAGTMSPFEHGEVFVLDDGGEVDLDLGNYERFLDIKLTRDNNITTGKIYQAVINKERRGDYLGKTVQVVPHITDEIQDWIERVAVIPVDGKEGPPDVCVIELGGTIGDIESMPFIEALGQFSYRVGPGNFCLVHVSLVPVINVVGEQKTKPTQHSVRGLRGLGLAPDVLACRSTQPLEEHVKRSMKLFC

SEQ ID NO: 331162 - protein, 279 aa, Zea mays
  unsure (1)..(279): unsure at all Xaa locations
  Clone ID: MRT4577_65122C.1.pep
MKYVLVTGGVVSGLGKGVTASSIGVVLKACGLRVTTIKIDPYLNTDAGTMSPFEHGEVFVLDDGGEVDLDLGNYERFLDIKLTRDNNITTGKIYQAVINKERRGDYLGKTVQVVPHITDEIQDWIERVAVIPVDGKEGPPDVCVIELGGTIGGKIFSPNNASGILGAGDIESMPFIEALGQFSYRVGPGNFCLVHVSLVPVINVVGEQKTKPTQHSVRGLRGLGLAPDVXACRSTEPLEEHVKIKLSQFCHVPISNIVNLHDVTNIWHIPLLLRDQKTM

SEQ ID NO: 331163 - protein, 114 aa, Zea mays
  Clone ID: MRT4577_65123C.1.pep
GGSGPPGPNALQAPRALGGLTQRCAGSGTSPSPPGGPLAESPFIPWGPPPLPFRLFPPPPKNPVQGHCCFLGNLFPLKGKASLLFPPPPLKFVFSPGPFIPPLFFRLVFPPFAL

SEQ ID NO: 331164 - protein, 44 aa, Zea mays
  Clone ID: MRT4577_65124C.1.pep
NVMPNITGYSSVPYLAQFAPHTRWVPFSPFLPTVKFMGGHHLIF

SEQ ID NO: 331165 - protein, 155 aa, Zea mays
  Clone ID: MRT4577_65125C.1.pep
MASAEARRLAVVPQLDIEQILKEAQHRWLRPAEICEILKNYRNFRIAPEPPNRPPSGSLFLFDRKVLRYFRKDGHNWRKKNDQKTVKEAHERLKSGSIDVLHCYYAHGEENINFQRRTYWMLEEDYMHIVLVHYLETKGGKSSRARGNNMIQEAA

SEQ ID NO: 331166 - protein, 112 aa, Zea mays
  unsure (1)..(112): unsure at all Xaa locations
  Clone ID: MRT4577_65126C.1.pep
FKKGSPPKAPFEXGFPQGGAPPMVGFLKPSQKGPGRKMASKFSPHLVIPPKGGGGPPPQKNPPPGRAGANKALAHFRFPLPGIWVCSPVAPALPFGKVPIQGFPADFFFGPI

SEQ ID NO: 331167 - protein, 117 aa, Zea mays
  Clone ID: MRT4577_65127C.1.pep
PLCFNYACICYTYSIRIQKDAPRFKKTIWGIKKKKTPTKAKGGRPTRTPNNPQNKRAGQHVLMNPEPTKGDERTSQVEAVAVEKEKRAGPAFGRPQTRGAEGPRPALPRYAKKQTLG

SEQ ID NO: 331168 - protein, 59 aa, Zea mays
  unsure (1)..(59): unsure at all Xaa locations
  Clone ID: MRT4577_65129C.1.pep
ARARQLSEXFKSKEFVSSDESSSGENKSKKKRRRSEDSEEEELASTPPXSEDSASGSDE

SEQ ID NO: 331169 - protein, 182 aa, Zea mays
  Clone ID: MRT4577_6512C.1.pep
MASIARSSLLRQTAMASRLATAAIPATRSTSMPSIRTQLKGVAAFHNTTRRSAILPPGPQRIEGGINEPAPVPEPSSTHGSYHWTFERFLAAGLVPLTVAPFAAGSLNPTLDAILCSVLLLHSHMGFQQVVIDYIPSRTYPGLRKTFNWLLNIATVLVGVGLYEFETNDVGITEAVRRVWKA

SEQ ID NO: 331170 - protein, 92 aa, Zea mays
  unsure (1)..(92): unsure at all Xaa locations
  Clone ID: MRT4577_65130C.1.pep
MGVPLSVAWYAVLALILRAALSQACSSMLKLGDWMVDATHLAQEGMPDXLSTARLTYRMCDLGYLTSHWFDRRLDHDFIFEELRVPLVKGSM

SEQ ID NO: 331171 - protein, 108 aa, Zea mays
  Clone ID: MRT4577_65131C.1.pep
RSRGPYVLGARRPWLELGCRSWGRREQRLDEAHATGKCCWRRTPVEEHMQGRRRAVLWEGVTGARHGRYWGRHSTSLSSSEEVLTLQRGKEGSCSMAEAWEPGSRGGR

SEQ ID NO: 331172 - protein, 46 aa, Zea mays
  Clone ID: MRT4577_65132C.1.pep
NEMTSTVISLVGFFFATGAIREHDSFMYVYYTIKCRHASTKIYAEL

SEQ ID NO: 331173 - protein, 81 aa, Zea mays
  unsure (1)..(81): unsure at all Xaa locations
  Clone ID: MRT4577_65133C.1.pep
MPHVNYYLCFIKNKSWSTTDQSLNDENTKFSNLTEAKVDLDKSSXRSREXGFTTFHYKQAINDTIEGNNPLYFDIKNITVD

SEQ ID NO: 331174 - protein, 83 aa, Zea mays
  Clone ID: MRT4577_65134C.1.pep
MVTTTVLAALLVDAALAGGARAQLKEGFYDYSCPQAEKIVKDYLKGHIPHAPDVASTLLRSHFHDCFVSGCDPAWLLNAMGLS

SEQ ID NO: 331175 - protein, 163 aa, Zea mays
  Clone ID: MRT4577_65135C.1.pep
MSMDSDSSSHSGADYRSFRQITRDRLLVEMLRSTRKSSKSSWKVLIMDKLTVKIMSFSCKMADITEEGVSLVEDLYKRRQPLPSMDAIYFMQPTKENVDIFMSDMSGKNSLYKKAYVFFSSPVQRELVAHIKKDSTVLTRISALSEMNLEYFAIDSQGFITGH

SEQ ID NO: 331176 - protein, 74 aa, Zea mays
  unsure (1)..(74): unsure at all Xaa locations
  Clone ID: MRT4577_65137C.1.pep
YESVHDTAVKVVYIDDTFRLQERPPYDKKSFVSYIKIYIKNLTAXLXPDKAVEFKTGVEGATKIILSXLNDLQF

SEQ ID NO: 331177 - protein, 88 aa, Zea mays
  Clone ID: MRT4577_65138C.1.pep
KMWLLVVSTALLLSVSLGDFSCEAFTWQGDIYFRSYYNGQGLFDYTIGAGGDIFSMRDNLRNYALLLSPPYIPGLETDRVIQLVWWDG

SEQ ID NO: 331178 - protein, 121 aa, Zea mays
  Clone ID: MRT4577_65139C.1.pep
RVVRKEHIVQALPQRLCCSPPLEQRHLVKLKHQRGAAFPRHGRLGCWCRRRSWVRRSCPLHRAVAVEKGWRGLDVVRQAVHLVVHDHAACMLVGNDNDQRARRRPCRFVCPSLLRATSAGK

SEQ ID NO: 331179 - protein, 36 aa, Zea mays
  Clone ID: MRT4577_6513C.1.pep
TLLEYVTTRPGSLVALARQHNLSCLGQAAFVRICYT

SEQ ID NO: 331180 - protein, 232 aa, Zea mays
  unsure (1)..(232): unsure at all Xaa locations
  Clone ID: MRT4577_65140C.1.pep
PPPPPXPPPPPREPAXPLPKPKXPNPLPNPPPPPPPPPPPPPPRPPPLPNPAPMPCPLPPPRPSPPPRPPPXPSPSSHLPSSAADAPASLPRAGGGGARGTXQTERERARGEPSTAPTLASHRPPPPPPPTESGARXRCSSAPAGRPLYKXHPPSPARSPSPXPPPPSTDTHPPCQPAPSRPPPPVXPPASPPQNPPRRPVAPIGSANRSQQRGKHMLPFVLEFLIDVACDQ

SEQ ID NO: 331181 - protein, 80 aa, Zea mays
  Clone ID: MRT4577_65141C.1.pep
CLRPMAGRARTSLTRLTEAAESRSTLLLTRTCMSGYPTSILRFHNAYHIVRYAYQDTNKPCKTSDTVNACNQSGKKHASR

SEQ ID NO: 331182 - protein, 58 aa, Zea mays
  Clone ID: MRT4577_65142C.1.pep
FSCSTHVSFYLESIVQSAKLGVYKENCLPELHCHHFHQSGSLHEYAQNLIFNVLVHCK

SEQ ID NO: 331183 - protein, 165 aa, Zea mays
  unsure (1)..(165): unsure at all Xaa locations
  Clone ID: MRT4577_65143C.1.pep
DPSSRPRCSLPVNLDRSRGGVPRWRTGRRFLLSLLLSPFLLAVTAAXASSASPAVEDELRGXRSRRSXTMRRRAASVMVPITILKSAVSDGAVCMDGTPPAYHLDPGSGAGSRSWIVNLEGGAWCNSAKTCRLTRSSGRGSSDHMDKEIPFTGIMSSSRTVNPDF

SEQ ID NO: 331184 - protein, 170 aa, Zea mays
  Clone ID: MRT4577_65144C.1.pep
SDISVFLPALPLTVPTSLTYANAGEDDETNRGSKNESPSSRWCTLLRIHPRQIERERLLLPCPQTGEEGRGRGAAAWLWRTTTLWQWRICTPPDQLEQGPAVVRRRRWQRGRGGRRKRRWERTMAAVVADACASSRLRGGGGGGEGTGVGRRRGWGLGRGEKSSVWVGPG

SEQ ID NO: 331185 - protein, 54 aa, Zea mays
  Clone ID: MRT4577_65145C.1.pep
LIWSPVCRNDISWHFETFLVGPDGVPVRRYSRRFRTIDIEPDIEALLSTQPSNP

SEQ ID NO: 331186 - protein, 156 aa, Zea mays
  Clone ID: MRT4577_65146C.1.pep
TVVLFLRPRFGPWTNFMYRRDSYTPVSVIFTRKNYSSRGVGMFVQSSVQTFPLYMSTKAPRPWNSQRKPFNGWQPDSETPGTASLYVQKVFQSRFCTAANYTAGPLCQSSTTASQRCNFGRAAVSFQTLFSRHTCLFFFLFQFLFLSLSVSSIFIT

SEQ ID NO: 331187 - protein, 222 aa, Zea mays
  Clone ID: MRT4577_65147C.1.pep
MKMALLTSRCAPRLPLRICHTARARGGLLVPPQLLLPRQDNWKKLLPLQRPPAPAHPRRLFCSFSDFLKAAEAGPARHGALLSFAVARNRLQDAVAGNHRDRALEALAELKAFAGSEHYYGDGYRATELLLAALSPLARLCKGQGLVVDDDGAVVTKESLAVACLLLRNASAEIGATLCEEISQEEDVKSSLERIRDRSGCDCDEVRELANEILARLPSTPN

SEQ ID NO: 331188 - protein, 97 aa, Zea mays
  unsure (1)..(97): unsure at all Xaa locations
  Clone ID: MRT4577_65148C.1.pep
VQXLFFFFFFFFFFFKKNHLLSCIIPNQGEKCDGTPTSPWATTQRLRSSKHHRRGGRRTNMEKAAPTEGRRPKQGERRRARGRPPLKKAFGWPRGGA

SEQ ID NO: 331189 - protein, 247 aa, Zea mays
  Clone ID: MRT4577_65149C.1.pep
MKMALLTSRCAPRLPLWICHTARARGGLLVPPQLLPRQDNWGSAPVVSACSAVVAAARGASATAAEKKKLLPLQRPCAPAHPRRLFCSFSDFLKAAEAGPARHGALLSFAVARNRLQDAVAGNHRDRALEALAELKAFAGSEHYYGDGYRATELLLAALSPLARLCKGQGLVVDDDGAVVTKESLAVACLLLRNASAEIGATLCEEISQEEDVKSSLERIRDRSGCDCDEVRELANEILARLPSTPN

SEQ ID NO: 331190 - protein, 184 aa, Zea mays; identical to SEQ ID NO: 322539
  Clone ID: MRT4577_6514C.1.pep

SEQ ID NO: 331191 - protein, 85 aa, Zea mays
  Clone ID: MRT4577_65150C.1.pep
IVKILAHLIPSDPFFPNKPLWEVHFASNFMRKIISFSKTFNPYWNQRQIHSTKGTQQKIYPQRVFFWSGLFWELGTIFIGGQKTL

SEQ ID NO: 331192 - protein, 54 aa, Zea mays
  Clone ID: MRT4577_65151C.1.pep
QPSPPCTKPAPAASARPRPLLRFVPSPFAISLEDIGQDERRRVHRHRSPSAPRR

SEQ ID NO: 331193 - protein, 56 aa, Zea mays
  unsure (1)..(56): unsure at all Xaa locations
  Clone ID: MRT4577_65152C.1.pep
TAFVDYCIPFVSYVAGATLSLRPSAPVFLIRFSCXRXSSRAASRQDSFYASSLRRL

SEQ ID NO: 331194 - protein, 94 aa, Zea mays
  Clone ID: MRT4577_65153C.1.pep
RPYQLSLPSISTSAPLEPVSRACRLAQTGSTTISNKETEASLHKLPSQHRGCDVSAHQVECTRLVHALQLPAVHVAQLYIMSVQHAAAIYMFWS

SEQ ID NO: 331195 - protein, 804 aa, Zea mays
  Clone ID: MRT4577_65154C.1.pep
RIPATPPPPGGSATPPPPGGSAPPPLPPPAGSAPPPLPPPAGSAPPPPPAGSATAPPPVSPAPSRTSSPSSPYSPPPHDEVLGAPSAVASCSSQEATAASSDGRIQLQEGKVFVQLGAKEQRDPTSWICDTGATNHMTGSRAAFADLDTAVSGSVRFGDDSMAEIEGRGTVLFKCKNGEHRSFTGVYYIPRLTANIVSLSLGQLEEADYDVHLRRGGMEDREPEGRLLARIPRAGNRLYVLNVDVARPVCLAARGEESAWRWHARLGHINMPALRKMAREELVRGLPSIEQVDQLCEACLAGKQRQSAFPDQTQWRAERALELVHGDLCGPVTPATPSGNTYFLLLVDDRSRYMWLTLLRSKDRAAAAIKEFQARAEAESGCKLLALRTDRGGEFTSKEFMEYCAADGVHRQLTAPYSPQQNGVVERRNAMVAGTARCLLKAKGLPAWFWGEAVNTAVYLLNRVPTKAVEGKTPFEAWYGKKPAVHHLKTFGCIVYVKNTTPHLKKMEDRGRKMISVGYERGSKAYRAYDPATKRVHVTRDVVFDESAQWDWPEGAKAGTGADHGGDDTFTIQSGVVAGQGGLQAGAPVAAMQHMTPPGTPGEAGVASPGVQFATPPAALDEDLDADHDDDAPLRFRKVEDVTGAASTPGYAARALWNEQLFAVSAEEPRSLAHAGQDPCWRRAMEEELRAIEDNHTWTLTELPPGRRAIGLKWVFKVKKDEHGAVVRHKARLVAKGYAQRQGIDYDEVFAPVAHLEVVRLLLALAAQEGWQVHHMDVKTTFLNGDLQDEMELKNWWWEFMLMI

SEQ ID NO: 331196 - protein, 50 aa, Zea mays
  Clone ID: MRT4577_65155C.1.pep
SHSPSHLHIPTNIACPNIWHLSLSTFCNNIFPRSSVSLSKQSSSRQEVSH

SEQ ID NO: 331197 - protein, 244 aa, Zea mays
  Clone ID: MRT4577_65156C.1.pep
MSSASLAARLLRRAASSSRASTLSRRCAHSSATSRAPVSLARFHPAAASPSGTTARRFLSSQSPASSSKISPDENLRRVIDSEIECVVESEEGSAQQIDPPEDFPFEIIDNPGDQSIVLKRELAGETIKATVYTNFDTEENLNNEDSGAENDDDSFKPALQMVVTVEKPGGSILEFECNFNDDELAIENMRLLNRDAKFTENAYEGPQFSDLDESLQKSFHRYLEVRGIKHSLHDWLHEYMMSK

SEQ ID NO: 331198 - protein, 86 aa, Zea mays
  Clone ID: MRT4577_65157C.1.pep
PPPGPSLRKPHTSFTRSHPNSTCRSQIISVLPQDPFECRRPTVSVFQLSLSESLDGLAEQAFYLVGNIDEASTKAINLEEESKLKK

SEQ ID NO: 331199 - protein, 84 aa, Zea mays
  Clone ID: MRT4577_65158C.1.pep
KNLPALILAPWTNKMREGPKKTCWAGGGPTKLKMVSNKTRREKPASPARFNFNYPVGLCIPLYLGVAFKLQPPGGNPILLFLTS

SEQ ID NO: 331200 - protein, 70 aa, Zea mays
  Clone ID: MRT4577_65159C.1.pep
SFIIIMHTPYDMLHLVSLLMMLMKIIGDDKRRLMVNKVIDIDGVVNIVGVDLCTWWSRMWLAFLDQDVDT

SEQ ID NO: 331201 - protein, 117 aa, Zea mays
  unsure (1)..(117): unsure at all Xaa locations
  Clone ID: MRT4577_6515C.1.pep
SPPAPIARTKQTARTSTGGNAPQTHLATNAARKMDPATRGLKNPHRFLPGNVALREIPTYXTSTDLLIRKLPFQLLVQEITXDFNTDIRFQSSAVATLQDATQAXLVSLFEDTDLCS

SEQ ID NO: 331202 - protein, 80 aa, Zea mays
  Clone ID: MRT4577_65160C.1.pep
CSSRFSTASVNQRNLSKKRYPRKTKHFKKAFYMADWYKQGRLVDKIFPTCCCSHDVDLDASNPKLRQLENVVSVSVLHTN

SEQ ID NO: 331203 - protein, 89 aa, Zea mays
  Clone ID: MRT4577_65161C.1.pep
KQREVTALGFVCLMPHICIQKSGSMGIFFLPVWVPKQGVKKLDSKGIQIWRYTLWSPVVRPAWFKALRLASVVPPYENGPRASGRLATW

SEQ ID NO: 331204 - protein, 50 aa, Zea mays
  Clone ID: MRT4577_65162C.1.pep
LSLSGLKIFHAEAITYSSMPKPKARNEGMMRSHHHGVVGWQVATRTLGGV

SEQ ID NO: 331205 - protein, 31 aa, Zea mays
  Clone ID: MRT4577_65163C.1.pep
CKQIKHQSCRFIRVTQNNYQLNNGMFLELKF

SEQ ID NO: 331206 - protein, 71 aa, Zea mays
  Clone ID: MRT4577_65164C.1.pep
TLSYSSTGNKGIDPRCVGDRLPYITTKPPGQKVTHTTGLGFLHHHHKPETWHKKKLKAKRRWETLHSRENK

SEQ ID NO: 331207 - protein, 80 aa, Zea mays
  unsure (1)..(80): unsure at all Xaa locations
  Clone ID: MRT4577_65165C.1.pep
FITSAFDAAGCSCVRVYYFHRHHSLQGGARRAVSEFTDPFVFLARFQRSRPAXPAHVSGGRSEFRTPFRGSRARPTGDAG

SEQ ID NO: 331208 - protein, 129 aa, Zea mays
  Clone ID: MRT4577_65166C.1.pep
ICPKLLRIPWKLTFVSEVDRLEKAVNIDVELIVHVNQIGEGAEATSVSEESSQQVGDIEQAYTQKEASVSDLPIEIETLHSDAIIKELPQKAPDNMQTDIATTPKQSHNPGDNVVFEAVTEVPSTAQDQ

SEQ ID NO: 331209 - protein, 116 aa, Zea mays
  Clone ID: MRT4577_65167C.1.pep
CSYVHWHQWAQAVTVAYRYIEVLLNSPNDAICRWNDRRIVPMRENKLLIHCSDGGNPVPLSSASAGALLCRIPALPSPPLLSVPLFSAVLFRAAVTCGAIAATSARVSGMSVDSCV

SEQ ID NO: 331210 - protein, 68 aa, Zea mays
  Clone ID: MRT4577_65168C.1.pep
APLYHCMPDTGGGTQLLMVVMATQTASATTCHQRGASRRLLWQVTCHYSACNCRTFPTYGWACCSTCW

SEQ ID NO: 331211 - protein, 81 aa, Zea mays
  Clone ID: MRT4577_65169C.1.pep
HQLLQWNTHDCSKLGKGKKFLGNGNFSRQTMWRDKNLGCVMGGFFDQIHGNTMPCFGILVNKPFQVVLYKKKVALFISHVF

SEQ ID NO: 331212 - protein, 184 aa, Zea mays; identical to SEQ ID NO: 322539
  Clone ID: MRT4577_6516C.1.pep

SEQ ID NO: 331213 - protein, 62 aa, Zea mays
  Clone ID: MRT4577_65170C.1.pep
LHCWQSPQYSFPPSRSVSFLSSHSVEQKLSWSCSRAALAVFAALFFLTYASYGTVHVTSSTV

SEQ ID NO: 331214 - protein, 64 aa, Zea mays
  Clone ID: MRT4577_65171C.1.pep
GANHFILYATNQKETSTATQATVNLCVAPEKKAKPKEIQAPEQNGENAHSCSCGDNCKCNPYNN

SEQ ID NO: 331215 - protein, 102 aa, Zea mays
  Clone ID: MRT4577_65172C.1.pep
MSATKTKVQSIIDENPVAVFSKSYCPYCRQAKQLLSDSGAKFYAIELDQVDDGSAIQSTLGEMTGQTTVPNIFIAQKHIGGNSDLQSKKGQLNNLLKEAGAV

SEQ ID NO: 331216 - protein, 154 aa, Zea mays
  unsure (1)..(154): unsure at all Xaa locations
  Clone ID: MRT4577_65173C.1.pep
EPLVFVGGLSLGATEKXHSLQNAFKNXGEVLEXSKIILNREXTKRSRGFXGFVTFSTEEGMGNPIKGMNGKELDGRKITVNKAQSRGAREGGGGGNGGAREGGVYGGGGPLNGGGVYGGGGGYGGGGGYGGGGGGYGGGNRGGGYGNSDGNWRN

SEQ ID NO: 331217 - protein, 140 aa, Zea mays
  unsure (1)..(140): unsure at all Xaa locations
  Clone ID: MRT4577_65174C.1.pep
MAHSLAASFSPAAARRQVTNVISSRSSVSFQSHRMTSVSIRSRPSSLRFKICCSAKKETVDKVCSIVKEQLALPDGTAITGESKFAELGADSLDTVEIVMGLEEXFNITVDETSAQDIATVQDAADLIEKLMLEAPPKVV

SEQ ID NO: 331218 - protein, 104 aa, Zea mays
  Clone ID: MRT4577_65175C.1.pep
PPQPCQERVLWPPKILLVKLRRVVFSQKPPGRGMCMSLIPDACVFFGLCMAPVNGSSIGGLLSGPPQRLLYLCFLPPFKINFVWVKDGSTKINLLVKLMTGPTK

SEQ ID NO: 331219 - protein, 64 aa, Zea mays
  unsure (1)..(64): unsure at all Xaa locations
  Clone ID: MRT4577_65176C.1.pep
LKGSLGSEVGXVLXVPSLLRRRRPPXWGCSPPXLVGAAASLXXXXVRLRARXXRGPQEGXPVGR

SEQ ID NO: 331220 - protein, 133 aa, Zea mays
  Clone ID: MRT4577_65177C.1.pep
MALQMQAPSLTRAPAGSPARLRSAFCAPPLLVRVRLPAPGRARSAAAARITMRFGRVETKQAYICRDCGYIYKDKTPFEKLSDDYYCPVCAAPKRRFRPYEPPVAKNANATDARKARKEQLKKDETVGKALPI

SEQ ID NO: 331221 - protein, 61 aa, Zea mays
  Clone ID: MRT4577_65178C.1.pep
DPRLKKGWGYFRVPPPRDLRVWPRRKRVFFCWPKKKKKKKKKKKKKKKKKKKKKKKKKKKK

SEQ ID NO: 331222 - protein, 45 aa, Zea mays
  Clone ID: MRT4577_65179C.1.pep
IYLIWQHRLRDISIGSEEKSRGGGSLKTNKPYNTYGASRERHYLT

SEQ ID NO: 331223 - protein, 78 aa, Zea mays
  Clone ID: MRT4577_6517C.1.pep
LLHRILPVLFIFQISKIVQSRKVAPDSNTLANQRLIRNPRRVTAFSKNSQSIDPTEAPAPAPAPVGVRRHEPPPWPYP

SEQ ID NO: 331224 - protein, 218 aa, Zea mays
  unsure (1)..(218): unsure at all Xaa locations
  Clone ID: MRT4577_65180C.1.pep
MPRLCSWYQQGLAAHPWRTXDVSSGILWALQDIXAQTVTYYSARPDRLGHDGSPPDPEVKENDYTAECRAACHRVGLTSSVMIRYVXGPVVSYWYEYLNRILLLRIPPNTXDSTPDHXGADAFLFGPLDLLLIISYGGLNHGXRTLKXVKADCEXDLIPXLLLRATHXPAVQIGNFRFDTAPYQVPSVNLVXTSGQMMPAWXDHHADASWKRCPTSLQ

SEQ ID NO: 331225 - protein, 54 aa, Zea mays
  unsure (1)..(54): unsure at all Xaa locations
  Clone ID: MRT4577_65181C.1.pep
XRXXGAHAQHQRRRRHQPVVGAKHRRAQPVGALRQVVGVHPRSRAAXQRTKLRR

SEQ ID NO: 331226 - protein, 83 aa, Zea mays
  Clone ID: MRT4577_65182C.1.pep
PEQVHRASETSSRGDEHTSARHASRLPSSYTRGRCSMLARSRKGEALRTGGPTTNKGGVRTRRGGRASMADLLQRTSRSRLKV

SEQ ID NO: 331227 - protein, 60 aa, Zea mays
  Clone ID: MRT4577_65183C.1.pep
CSSSSCPSVSYRPHLEQNMNSSLCVRSVSFLILWVGLVACLVFVAPLKTENEAMPAPVCR

SEQ ID NO: 331228 - protein, 48 aa, Zea mays
  Clone ID: MRT4577_65184C.1.pep
WTHHFQELYRALLNCTIIALTFEKSEIIRSVSEIMKIAKIHTYALMMS

SEQ ID NO: 331229 - protein, 93 aa, Zea mays
  Clone ID: MRT4577_65185C.1.pep
SAVFPIPNGRVRHFLTSTFTGPTGPDAWRVYLMDHGLFFGTGGGLSNFWNLSSPFRLEGSGPCTPENRGVLVGPFRPRGDPRARKGPPAYFRA

SEQ ID NO: 331230 - protein, 127 aa, Zea mays
  Clone ID: MRT4577_65186C.1.pep
MATLSAAPLVGAAAVARPCQAQGLPQLRVRAEKARCGAAHSRRPSQRRDGNNGASSSLLAVATSAVTTSPALALVDERMSTEGTGLSLGLSNNLLGWILLGVFGLIWSLYTVYTSTLDEDDDSGLSL

SEQ ID NO: 331231 - protein, 100 aa, Zea mays
  Clone ID: MRT4577_65187C.1.pep
VILSSSLSSLAQTFQGGSHILPFSHLSSLYLPTMMHDSSANGTERHARTHFVVHMRARPLARRCGACVPHWVLMRCDRRLANTASGICCPKLTHRAPGHS

SEQ ID NO: 331232 - protein, 127 aa, Zea mays; identical to SEQ ID NO: 331230
  Clone ID: MRT4577_65188C.1.pep

SEQ ID NO: 331233 - protein, 102 aa, Zea mays
  unsure (1)..(102): unsure at all Xaa locations
  Clone ID: MRT4577_65189C.1.pep
PVVLFPARXPAXVGVFLXPFFCAXLRCXXXPRSXGVCFGXXSXLSXCGSRRAPPVSVAAWPPPXXXASPPRXPFQGAPGXAVFRWPAVFGRXRGCGGSARPL

SEQ ID NO: 331234 - protein, 71 aa, Zea mays
  unsure (1)..(71): unsure at all Xaa locations
  Clone ID: MRT4577_6518C.1.pep
LRKLGFLACTVVGFSYGGMVSFKMAEAHPDLVRXLVVSGSVVGHDPTPSARRLLEGIGLMSFGRESAVGAS

SEQ ID NO: 331235 - protein, 34 aa, Zea mays
  Clone ID: MRT4577_65190C.1.pep
AHVLRWLPFMINTYTERVAVTWTLSITYIHHLTH

SEQ ID NO: 331236 - protein, 73 aa, Zea mays
  Clone ID: MRT4577_65191C.1.pep
VSDLALPAPAPCLCLGARRSPRRGGRTPSLIIRPRGRTPAGCRRRRRWGSRRGGCGGRAGRWSGQQPRVDAVA

SEQ ID NO: 331237 - protein, 114 aa, Zea mays
  Clone ID: MRT4577_65192C.1.pep
TTAVYTACWRWRWPHRSQAWASSQMPKSLLFHSIPSHPTRTRPRVARSAAAAERRCRTGGCSRCARIWMPPLLLAVGVRVRLSSHMNYGWTTNASLFPWIYAAALPSHPPSASL

SEQ ID NO: 331238 - protein, 56 aa, Zea mays
  Clone ID: MRT4577_65193C.1.pep
NARTPHADPITSTHHSLDPDRWLYHPSRHHRTHRVVVKCMYSVPRCLLALSSLLFK

SEQ ID NO: 331239 - protein, 126 aa, Zea mays
  Clone ID: MRT4577_65194C.1.pep
SEADRSSLTSSIAMPPVAVFIIDTALPLSLTVLSVTSDATSYNNYPNSPPPPPRRRQEYKQQPPQSTLRANNTTTKEQYDKSKEDERQETDTKRTVTTPSIIILFFQSPQPQSFIKFFSIHINLLS

SEQ ID NO: 331240 - protein, 86 aa, Zea mays
  Clone ID: MRT4577_65195C.1.pep
TPPPPLFFPACLKPVSFFCPAPPAFCCSRPPLLPCEVFISSILSPPLWVKGVRRFLFGCFSPRDLEGFFLKKLALGIPLFGPLANF

SEQ ID NO: 331241 - protein, 63 aa, Zea mays
  unsure (1)..(63): unsure at all Xaa locations
  Clone ID: MRT4577_65196C.1.pep
GELFKEGGGDSPAPLRELXEKRKEKAKVASKKKKKMAKLGVKAQKATQEKMGFQLENFAPNKK

SEQ ID NO: 331242 - protein, 118 aa, Zea mays
  unsure (1)..(118): unsure at all Xaa locations
  Clone ID: MRT4577_65197C.1.pep
GGGDKLYFFFLCFFFLFFVFFWGNRGLLFGTEYTLEGDSTLNLSIQPIGGGRGGFFFXTPXXXXTQEEQATXTPPXHRERPTGXKEQGWGPATPWXTPTTEAPPPRARQGRNPPHGGT

SEQ ID NO: 331243 - protein, 50 aa, Zea mays
  Clone ID: MRT4577_65198C.1.pep
SIRSSPLCILVPVSSLLCHNHSIHTAMLPVIPRILLYVSAMCTSVYRHYR

SEQ ID NO: 331244 - protein, 130 aa, Zea mays
  Clone ID: MRT4577_65199C.1.pep
GRGNHFPYKSPQYHSLTGLAWWHCIVQYHATATAAVALAIEYRPSACSHEKTCTPGSLTAGGQDLLVVCAATGRGRPALLRIHQPPIQGRGGDLPLLRGGQQLIRLRNRFLSASPQALHGLHLQPHHSGT

SEQ ID NO: 331245 - protein, 22 aa, Zea mays
  Clone ID: MRT4577_6519C.1.pep
QQPSVASDRGSYPSLEFIQLMV

SEQ ID NO: 331246 - protein, 110 aa, Zea mays
  Clone ID: MRT4577_651C.1.pep
LKDSHFDLCYSHTTMIHVGSARRNLTYYSLKENIVRQHIAPYYEGHFPLIQGGKKCMGKKRGFQSPKPQGAKKLHSRGGGPNSQRRPIVHRGTGGVPSVEGSSHRTTRMI

SEQ ID NO: 331247 - protein, 125 aa, Zea mays
  unsure (1)..(125): unsure at all Xaa locations
  Clone ID: MRT4577_65200C.1.pep
GTANGTSVSVENVGLLTLTHVGSRRVVQISAGCMIFLAILGKFGALFASIPLPICAGMYWIFLAYAGACGWSLLEFCNLNSFRTKFILGFAFFMGSSVPXYFNEDTAAAGYGPVHTGARWFNDRI

SEQ ID NO: 331248 - protein, 147 aa, Zea mays
  unsure (1)..(147): unsure at all Xaa locations
  Clone ID: MRT4577_65201C.1.pep
VKRLPSLEMDLAAANHECRGCNYTRETNLTHSGKKPLVVIAIMTTFGMKNYPDTVRKSSLPTCSMFKKLXEEKCILVHFLLXKNLKSXHTIDREIDYKNMSTKDYLILDDHLEPNQXSFXKTKNCFTNSSNTFYSALHCYVNDQIYI

SEQ ID NO: 331249 - protein, 60 aa, Zea mays
  Clone ID: MRT4577_65202C.1.pep
LEKGGYFYWGAYFFDPVLSSGLLVLELYPGGRIFSHLFFFVLAFFSSLGCNPGFIGMPVL

SEQ ID NO: 331250 - protein, 64 aa, Zea mays
  Clone ID: MRT4577_65203C.1.pep
LGTAHRQYSTFSHKKDWRNVGKHRIPNTHQAFNGNCACYKVPRKNPGPLLLYHSIHALDEHHDV

SEQ ID NO: 331251 - protein, 190 aa, Zea mays
  Clone ID: MRT4577_65204C.1.pep
MGRLTEEQAAREAGSAGTNATSLKLTHRALSDVSCLSSFKNLEHLDLGFNCLVTLEGLSSCANLKWLSVKENKLVSLKGVEGLSKLQVLNAGKNELTKMDEVTSLTSLGALILNDNNISSICKLDQLQQLNTLVLSKNPVFTIGNALVKAKSMKKLSLSHCQIENIGSSLVKCVELKELRLSHNKISTIP

SEQ ID NO: 331252 - protein, 168 aa, Zea mays
  Clone ID: MRT4577_65205C.1.pep
KKPRGKFTFKGPSQGPPNPKGLRGPKPPFFLKLKKGDLTPPNPFGFGPPQPPPKKPPPPKKKNPQGKPYSQGGHQKTKKILGRKVLPKPNFNPRGPGFPGLPEKKRPSPVSKNFGTTLIMFGTIAPGNYPNPENFGTRSRIFGNTAPGPPRAIQKSPRLWGQTPLGPP

SEQ ID NO: 331253 - protein, 73 aa, Zea mays
  Clone ID: MRT4577_65206C.1.pep
ISSFLSYSGFSAIRYDILLIPMTPPQLPAAQHSWAHHVNDALHDILRGSYGVDSDTQYLVEPILVADCRVSNA

SEQ ID NO: 331254 - protein, 113 aa, Zea mays
  Clone ID: MRT4577_65207C.1.pep
KSPKPFPPYLAGPKPPPPPPKFRGLKIIWTPQAGPVWALKILFGLSFFLGSLTRPNFFPIFPRVPPLGILCPPIGFPCFSPPQRSFGFSLCKAHLGIMPPPPLFFFLKPGFWP

SEQ ID NO: 331255 - protein, 213 aa, Zea mays
  Clone ID: MRT4577_65208C.1.pep
MDAADARPSAPSAAAAAVAGASVADEPRDARVVRELLRSMGLGEGEYEPRVVHQFLDLAYRYVGDVLGDAQVYADHAGKAQIDADDVRLAIQAKVLLELARSRNRMPLPKSIAPPGSIPLPPEQDTLLAQNYQLLPPLKPPPQFEETEDENEESNPSLTPNPANSNPTFSQDQRSNEQQHTPQHGQRVSFQLNAVAAAAAKRPRMTVDQLNIG

SEQ ID NO: 331256 - protein, 114 aa, Zea mays
  Clone ID: MRT4577_65209C.1.pep
WSQTCALCQSGRHLQCFLSYQVQGPRYGDFKDCLRLFNKQEHTCSPGAFLMSPMGLLIRPLATFLMTHSMKRLESSIRVSRELHVVVDRGIVCWRTVLFFGPSEAPCGGSSRSS

SEQ ID NO: 331257 - protein, 82 aa, Zea mays
  Clone ID: MRT4577_6520C.1.pep
AMASTMCMLPHVPVGDVVAQGTIEQLLWPHIKTKRTISVLWDWVPRLAFKCWNQLPALPAIVPGGRSGQGGGVRVCMILQLH

SEQ ID NO: 331258 - protein, 65 aa, Zea mays
  unsure (1)..(65): unsure at all Xaa locations
  Clone ID: MRT4577_65210C.1.pep
TXXXQXXXQXXXFXNFPMIXXNRXKXLSXXISXASLQSPKGAXRXDVXSDIPHLVRSLRSGSWXE

SEQ ID NO: 331259 - protein, 225 aa, Zea mays
  Clone ID: MRT4577_65211C.1.pep
MDAADARPSAPSAAAAAVAGASVADEPRDARVVRELLRSMGLGEGEYEPRVVHQFLDLAYRYVGDVLGDAQVYADHAGKAQIDADDVRLAIQAKVNFSFSQPPPREVLLELARSRNRMPLPKSIAPPGSIPLPPEQDTLLAQNYQLLPPLKPPPQYEETEDENEESNPSLTPNPANSNPTFSQDQRSNEQQHTPQHGQRVSFQLNAVAAAAAKRPRMTVDQLNIG

SEQ ID NO: 331260 - protein, 68 aa, Zea mays
  Clone ID: MRT4577_65212C.1.pep
TRHARQSSEFGSRYFVCVARLHAGVPDTARVAHTLETLTGALFQLSSIICEVNRQLMLRTIYESKHLD

SEQ ID NO: 331261 - protein, 146 aa, Zea mays
  Clone ID: MRT4577_65213C.1.pep
MVVLTEEFHGLSLKRKGAYEPGLFDGADDRSSGLSLPCRATKMRRLSCPDGPSDGDDQTVTAASEDDVAMGDAAPSHSPGTVGGDKRAVVVYGDGSSSRQIDAPRLALRAGVDADWIRVMFREANSRTVRELLAGAALERRSEPDL

SEQ ID NO: 331262 - protein, 85 aa, Zea mays
  unsure (1)..(85): unsure at all Xaa locations
  Clone ID: MRT4577_65214C.1.pep
YDALLLPGDLSYXDFVQPRWDSYGXLXXXXASXRPWMVTXGNHXXDRLPLLEPRPFKAYNARWXMXYDYAXXGTPPSDDNLFYSF

SEQ ID NO: 331263 - protein, 52 aa, Zea mays
  Clone ID: MRT4577_65215C.1.pep
RVARVSPPCCATTHHLSLLSLSGLHGVVRSRPLSSPAIYCCCLLPGRIPESG

SEQ ID NO: 331264 - protein, 127 aa, Zea mays
  Clone ID: MRT4577_65216C.1.pep
MAEGEETKVEGTREEERADAGAGAEEEEVEVKFRLFDGSDIGPIRCNAAATTVAALKDRVVADWPKDKTIVPKSANDVKLISGGKILENDKNIAQCRAPFGDLPSTVITMHVVVQPSSAKSKPDKKT

SEQ ID NO: 331265 - protein, 68 aa, Zea mays
  Clone ID: MRT4577_65218C.1.pep
MFGRAPKKSDNTRYYEILGVSKDASQDDLKKAYRKAAIKNHPDKGGDPEKVSARAGHFVWLRPVRGGE

SEQ ID NO: 331266 - protein, 86 aa, Zea mays
  Clone ID: MRT4577_65219C.1.pep
PRRPVPNWMGFVSFESLGKKLLSRLRVMNQKPECFAMVGAPLGLFKLCLGCGLKLGKSPPLLVLKPVQKSCPGNRTNEAPVKGQGD

SEQ ID NO: 331267 - protein, 108 aa, Zea mays
  Clone ID: MRT4577_6521C.1.pep
ACWFGRAPCTSGSSHPADVMWAAYHFRMDFCLGRCNQNWLGSVVVKPTSQALFVPLFHALENDSPLSFSLSCGPNVFFGLPLVVICIKSVFRAAQLIKHSTQGINHRT

SEQ ID NO: 331268 - protein, 65 aa, Zea mays
  Clone ID: MRT4577_65220C.1.pep
CYASAGVSFAYVEKSPLVLPIRGVSRPNIVFVHLAIGLGCRRILGCCAAPSSERGRNVRVCGRVG

SEQ ID NO: 331269 - protein, 527 aa, Zea mays
  Clone ID: MRT4577_65221C.1.pep
MAFPAVPLLAALLLVAATRLWDYVFVRLVWRPYAITKGFREQGIHGPSYRFFKGCNEEIRSMKEKTDGLVLDVGDHKYLPRIAPHYLEWRAQYGEPFLYWYGAQARICIFDYELARQILSSKSGHFVKNDAHPTLLALVGKGLGFMEGSDWVRHRRVINPAFTIDKLKIVTETMLDFADSMAGELEAEASQNENGETQVDIYKHFSDLTVDNIAYAIFGSSYKLGKQVFEAQTELLGITMATFLDVPIPGSKYLPTQANRRKWMLETKLKSLLTRIIQPRLASGEHGNDLLGVMLDSCTETKQGGKQQQVDRLRLSLSMEEIIHECKLFFFAGHENTALLLTWSVYLLSIYPEWQERLRKEVLREFGRDAPNPNALNRLKEMTMVLFETLRLYSPALFMQRKTLADMTVGPIKLPKGTAIVIPIPIMHRDKQAWGDDADEFSPMRFANGITGAAKVPHGLLAFSMGPRSCIGQNLSMLEAKSTLALMLRKFSFALSPDYVHAPVDLFTLKPKFGLPVILRPLDNVLI

SEQ ID NO: 331270 - protein, 51 aa, Zea mays
  Clone ID: MRT4577_65222C.1.pep
PRVRNSAPPLARFCSLAPGSRRRRHASVSQAWTPLTVRAMSPAAHARSPFT

SEQ ID NO: 331271 - protein, 564 aa, Zea mays
  unsure (1)..(564): unsure at all Xaa locations
  Clone ID: MRT4577_65223C.1.pep
MAFPAVPLLAALLLVAATRLWDYVFVRLVWRPYAITKGFREQGIHGPSYRFFKGCNEEIRSMKEKTDGLVLDVGDHKYLPRIAPHYLEWRAQYGEPFLYWYGAQARICIFDYELARQILSSKSGHFVKNDAHPTLLALVGKGLGFMEGSDWVRHRRVINPAFTIDKLKIVTETMLDFADSMAGELEAEASQNENGETQVDIYKHFSDLTVDNIAYAIFGSSYKLGKQVFEAQTELLGITMATFLDVPIPGSKYLPTQANRRKWMLETKLKSLLTRIIQPRLASGEHGNDLLGVMLDSCTETKQGGKQQQVDRLRLSLSMEEIIHECKLFFFAGHENTALLLTWSVYLLSIYPEWQERLRKEVLREFGREAPNPNALNRLKXKKLXLRLSLLLAYICVLTFDLMTMFLILLLAFLSNLQMTMVLFETLRLYSPALFMQRKTLADMTVGPIKLPKGTAIVIPIPIMHRDKQAWGDDADEFSPMRFANGITGAAKVPHGLLAFSMGPRSCIGQNLSMLEAKSTLALMLRKFSFALSPDYVHAPVDLFTLKPKFGLPVILRPLDNVLI

SEQ ID NO: 331272 - protein, 64 aa, Zea mays
  Clone ID: MRT4577_65224C.1.pep
FEETSFTFFWVTLQPIWSIGVSNRDRAQKQQSGLLMGEMAFFLFQLRNIGQGGRKRPIEHFPIG

SEQ ID NO: 331273 - protein, 64 aa, Zea mays
  Clone ID: MRT4577_65225C.1.pep
LIDRDRARVTCARGCSAHVRRGSQQQLILRGREAMFRKSCKNEEFEKSYVYDEADEWQKDDKDK

SEQ ID NO: 331274 - protein, 77 aa, Zea mays
  Clone ID: MRT4577_65226C.1.pep
GGKKRKGHNQLLPSGGGGGRGCISSGPGGEKAGRAKIWGALWESISPLITPFDLSLLAGGVRPSYSPMRDAKVALGW

SEQ ID NO: 331275 - protein, 76 aa, Zea mays
  unsure (1)..(76): unsure at all Xaa locations
  Clone ID: MRT4577_65227C.1.pep
RLGTGEGARGRLLSLMHRIGDLIGDXLYEHANELAGVXTSLKDLVKGLLNIDQIIAEYNNAIPEDVREKVKDGALG

SEQ ID NO: 331276 - protein, 188 aa, Zea mays
  Clone ID: MRT4577_65228C.1.pep
MTSGASGRTATAGTAALLPLLFLLLQVSAGAGAGADCHFPAVFNFGDSNSDTGGLSAAFGAAPPPNGRTFFGMPAGRYCDGRLVIDFIAENLGIPYLSAYLNSIGSNFSQGANFATAGSTISRQNTSLFLSGFSPISLDVQSWEFEQFINRSQFVYNNKGGIYRQLLPKAEYFSQGLYPFDIVKRTHR

SEQ ID NO: 331277 - protein, 73 aa, Zea mays
  unsure (1)..(73): unsure at all Xaa locations
  Clone ID: MRT4577_65229C.1.pep
KGLNKNPAHGIFPPLVFKPSAKTNGGNKRSLSXLGEITMGGXNKGGKTNLFKEGLNPVNVPYGGGNNPPLGKF

SEQ ID NO: 331278 - protein, 87 aa, Zea mays
  Clone ID: MRT4577_6522C.1.pep
LEVATLPLPINTNIWHERPEFDLMKLLSQCEARANYQRNGQLTYLVSCSWGHSQGLMHSPCQPWHSCFAFLAPTAGRLTLLAFATDT

SEQ ID NO: 331279 - protein, 53 aa, Zea mays
  unsure (1)..(53): unsure at all Xaa locations
  Clone ID: MRT4577_65230C.1.pep
QKGLXXKXXHQXAKXXPGHPYIXXRGEQXEEXTYRHIYVSRKXKKXKKXGRXX

SEQ ID NO: 331280 - protein, 81 aa, Zea mays
  Clone ID: MRT4577_65231C.1.pep
HLHTLSCFRPVSTWNMHLIRSMYRNHLNLSSEYEGDMHSSSRGGSIVRHGVLIGSPCTVRNFLFFSSHVLIAHPQFKARGE

SEQ ID NO: 331281 - protein, 146 aa, Zea mays
  unsure (1)..(146): unsure at all Xaa locations
  Clone ID: MRT4577_65232C.1.pep
HWVPRGRPGIKGCLRKRREWAHLXXDQASKANXESNSLLPDVPDAENIRTGPDRDSEGSADLHQDNLPRGKRKCRKRRRLELKGRRVRDTRKRSSIDSSSEDAAAPLSDSSSDRNSNPRDDESKEDNSVAQEIGGYIDAKGAASST

SEQ ID NO: 331282 - protein, 107 aa, Zea mays
  Clone ID: MRT4577_65233C.1.pep
LYPTLGPGMHFKHTRAPQKIFFDPHNHHHFVYLKERGQANSGCMKPENPPRGPHLSPSLRGRGPPLWLSPALKKHPVIRRGRSRTNPFYMFPTYSFALWEHPAKMMG

SEQ ID NO: 331283 - protein, 145 aa, Zea mays
  unsure (1)..(145): unsure at all Xaa locations
  Clone ID: MRT4577_65234C.1.pep
AWNFGLIYVLVYVLGTSVVDELIGITGKCSLSTNAENAEENXRFLRVFTSSFRRLLXHTSGATSPEEISHXKIKDGKFPADASKEGGASFGTKADKGITEAAGIDKEIIIXGYDDSGKCRVKHHEVGVCPVKRCVASKTGFNELL

SEQ ID NO: 331284 - protein, 124 aa, Zea mays
  Clone ID: MRT4577_65235C.1.pep
VNSGPSPSSRVSSSVGLVAPGISELSASSTMGAEKGNVASVPGLSESGTKPSGRELASGRRVTGEPSIARVPLRCSPFSFKWRLGRWEMEKRVMEMGYEEWAPQSSARLGSGTSSDPREHGGRG

SEQ ID NO: 331285 - protein, 188 aa, Zea mays
  Clone ID: MRT4577_65236C.1.pep
MAGTKLVSLGLIVLMSMGLANAVRVARFSTADGSGQGGGGGGGYVNGAGSGVGSGTGVGDSSPEGVHASAGGGGAGGGTSQYGGSAYGVGLGSGSASSTYSGSDGGSSSAGGAGGGGGGGKAGGSWDSSAQGSGSGVGSGSAYSNRYPYGPRYAGATANGNGGGTGNSQNGGAGGGKGSGSGFGDAIP

SEQ ID NO: 331286 - protein, 71 aa, Zea mays
  unsure (1)..(71): unsure at all Xaa locations
  Clone ID: MRT4577_65237C.1.pep
VSSGGDDGAKNAXPEVDELSLEQAKRVISVQTSPDAXDSVVLPVGTPETMDFRPKRVRIFVDTGAEGPHIG

SEQ ID NO: 331287 - protein, 62 aa, Zea mays
  Clone ID: MRT4577_65238C.1.pep
SQTRPSHSMSLSHTSRLPPTPSQVQYPFFRLLHSQQNVDFSKSRSPVYSRRFLCYCGCSRRL

SEQ ID NO: 331288 - protein, 46 aa, Zea mays
  Clone ID: MRT4577_65239C.1.pep
EARYLKEVIPVLKVRTVLLELTTKMYCYKKLKTSSDLGPPETSVNR

SEQ ID NO: 331289 - protein, 93 aa, Zea mays
  Clone ID: MRT4577_6523C.1.pep
SIVPRTKKPLPGDHLVSTQQGKSRKNVHQYPSQDSELATSHSVPQEPMSMELVQERERTTRRPYTDQSQDVFKEAKVAKSMPSSAKPMYPQQP

SEQ ID NO: 331290 - protein, 51 aa, Zea mays
  Clone ID: MRT4577_65240C.1.pep
RGCEEQIYSMSEQFIVIVEFTIQSIISMVDVLVFHVLRVFIGGVEYAFCSS

SEQ ID NO: 331291 - protein, 63 aa, Zea mays
  Clone ID: MRT4577_65241C.1.pep
PTRPPTLPQTFKLTRALTRMSHSIYLLTTGATNSSFMNIKTIAECLADDLINSAKGSSNSYSI

SEQ ID NO: 331292 - protein, 99 aa, Zea mays
  Clone ID: MRT4577_65242C.1.pep
TDQRPPQHRRSRQDQQQLTTDGMMLAERSDGLLLVVEAPRVGERGATCCWGRLQQRVAAMVFHILLASRDAFGGGVCVSRERRRTACMLWQIALWGDDN

SEQ ID NO: 331293 - protein, 52 aa, Zea mays
  Clone ID: MRT4577_65243C.1.pep
KQRELALVVGAARTVVLMLLTTTVSRLGLMQLHELQQDHAGATVVLVGWCKR

SEQ ID NO: 331294 - protein, 91 aa, Zea mays
  Clone ID: MRT4577_65244C.1.pep
NRWSFSYRKDIFEFLYSSRSIPLNLAKNKQAEHQNAGVTVQRTSALKLKTVQSISRNKRDQWQAKNKIQIFRPITAAGASCVRGNAARGAS

SEQ ID NO: 331295 - protein, 46 aa, Zea mays
  Clone ID: MRT4577_65245C.1.pep
QSHGSSDHASAWQGREGSLPMRSQASPYGSTRQHPWHHEPADAQAD

SEQ ID NO: 331296 - protein, 32 aa, Zea mays
  Clone ID: MRT4577_65246C.1.pep
FPLKKKKKKKKKKKKKKKKKKQKKKKKKKKKK

SEQ ID NO: 331297 - protein, 86 aa, Zea mays
  unsure (1)..(86): unsure at all Xaa locations
  Clone ID: MRT4577_65247C.1.pep
EMARHSPLRFLLXYGRGLRGATGAGAPARGGLKKLQRDRKETRWFLLGYWVIQSAGLWAPGAQTFALVKGISRGPFIFFFSCKLFT

SEQ ID NO: 331298 - protein, 72 aa, Zea mays
  Clone ID: MRT4577_65248C.1.pep
GRGAPILFFCSPLSSPIFLVFLPRKIFLTQIRGSFLAPWPGGTGGPFPPRDFPFFGKFATYPRNLTLYRDHM

SEQ ID NO: 331299 - protein, 54 aa, Zea mays
  Clone ID: MRT4577_65249C.1.pep
AARGTHVMTVDALFVLVAIQWDGRRGISLLVTTWPLLMPTKSLDFVCGGSMRTN

SEQ ID NO: 331300 - protein, 134 aa, Zea mays
  unsure (1)..(134): unsure at all Xaa locations
  Clone ID: MRT4577_6524C.1.pep
SLIEDSEGEALRKDDVVHSGAGGGXELAANDYTDPPPAPVVDAADLGSWPLYRPVIXQLIPTLILLYVTVATVIGYNHQTHASSSRASADASCGPVPVLFIDWAFGGMILLLVYWTARIYGGHINPGVTLCSLT

SEQ ID NO: 331301 - protein, 46 aa, Zea mays
  Clone ID: MRT4577_65250C.1.pep
YSHNAKKKKTMKSITWFRNLGQRKSRSTAKQVLIDQHFLSTAILIQ

SEQ ID NO: 331302 - protein, 101 aa, Zea mays
  unsure (1)..(101): unsure at all Xaa locations
  Clone ID: MRT4577_65251C.1.pep
QPTGANLEVFGGDSKKNIHNGAQEITEDFTDLXNETIFDDHPYNISFTKEAVLSAIADGKTXEGASGPHCLLDPNDRPKGNXRLDQYAIALHLLDEGKRVM

SEQ ID NO: 331303 - protein, 77 aa, Zea mays
  unsure (1)..(77): unsure at all Xaa locations
  Clone ID: MRT4577_65252C.1.pep
KDRPDAVVTSLFTEPKVLGLMQPLCKNAGVKLASVISSPEPTHVGAASTGFGLFTVVCQLGMLFVVITDLSMHTXFF

SEQ ID NO: 331304 - protein, 48 aa, Zea mays
  Clone ID: MRT4577_65253C.1.pep
CSGGLNIRRTRLRSPVDPRNHVDDECHGSQGGERYSMTHCPRRIVILC

SEQ ID NO: 331305 - protein, 115 aa, Zea mays
  Clone ID: MRT4577_65254C.1.pep
CFTKHHTITESAKHQFACSSHKQANGSQQARSSNLATRAPASISISLANTNSLWLVATGYCLCGWEEREVSKDRLLTRRQVTLAAGCCCCCCCRVASPSVHSTKSGRCIESGRRS

SEQ ID NO: 331306 - protein, 92 aa, Zea mays
  Clone ID: MRT4577_65255C.1.pep
RSLIDPLRLVALLAQHDQLGQVRHGRRLIHLVRIQPVHGLRPAGSQEAIPGMVVVLVVVLIGQRRRRRGRQSPGGRGVDEPGRHEISTMPST

SEQ ID NO: 331307 - protein, 78 aa, Zea mays
  Clone ID: MRT4577_65256C.1.pep
KNQLLKWYKGGFRSGYPGHYDVALLTIVYVTIDLWCLNQDRVHVLVNLSYSIDCLNFPPSFFFFFFFFYFFFFIFFFF

SEQ ID NO: 331308 - protein, 79 aa, Zea mays
  Clone ID: MRT4577_65257C.1.pep
KNNISNLWYSKNPDRPVPFSYKIGTIPHKFKWGGSTDATQPGEDKGLFSCNKIGLENISKHFLFFGKGWRKNPWGGRKL

SEQ ID NO: 331309 - protein, 52 aa, Zea mays
  Clone ID: MRT4577_65258C.1.pep
KRDVCWGKGVIKKVCEDRRGDMINGENCMVIKGLVFGVFGDGMIFNFYGVDG

SEQ ID NO: 331310 - protein, 134 aa, Zea mays
  Clone ID: MRT4577_65259C.1.pep
GSTNTATTSRNLSRRLIKRSIRLLLLLSVRINLTNRPSRLNRPNLISNKNSRLTTRSSIKRRSNRITTKLKIPTLLIRRIPHSNRRIHPIHIHHIIRLTSTPPSLRPNSRFDCVTDKHINKHINKHINQPKVPS

SEQ ID NO: 331311 - protein, 93 aa, Zea mays
  unsure (1)..(93): unsure at all Xaa locations
  Clone ID: MRT4577_6525C.1.pep
MHLTQAVHQPIANCRLLAHLYLANAPAXEXRLMLGDNLXSLVPTLSNASTQXVTGMLWERDQTDAIHLLEXANALKAKDADTVAVLRSAQDLQ

SEQ ID NO: 331312 - protein, 77 aa, Zea mays
  Clone ID: MRT4577_65260C.1.pep
QFFWLFRLHMDSHRFYNFLGSIDYNGGGQSNANSPFHFQHPVCKRGCQFFSFWLLIPAPPPLWVSFFQPYPSRARGV

SEQ ID NO: 331313 - protein, 110 aa, Zea mays
  Clone ID: MRT4577_65261C.1.pep
MGALECSANITMTKPARKLGAVVEGVCPVRFDHTRGISAVAGSCRDRPRPSPERCCGALKTFACPYSDLINDNDHNGCASDMFYQIIVRGRLRPGLFSQMCVEGPLGLSC

SEQ ID NO: 331314 - protein, 237 aa, Zea mays
  unsure (1)..(237): unsure at all Xaa locations
  Clone ID: MRT4577_65262C.1.pep
MLTEKLHITIAHIGHGYSAKTTTAGPLIXYPLEGIDSRGIEMFRKMLLYLNKRAPWNPRLLRXASRTESERRIPIDIDPAETLETPKNYCPCIDAHARRDCIFNVITGTSHCDCACLILDSISDXYYCGISCGGRSRSHVLXLAFSLWSVTEDSPRCNKMHAPTPEYSNARLSXEVVRELSSYLERVGYNPDKIAFAPISGSDGDNMIERSTNLDWYQXPTLLEALDXITEPKXPSD

SEQ ID NO: 331315 - protein, 105 aa, Zea mays
  Clone ID: MRT4577_65263C.1.pep
GGGDRGDLTGACRGGLVYVNPRVYILNWPPWRSLKKWDICGGKEKPGIFQAQFFKSTKRFQRLGKKKKGLPPPPRNPRAGKRGYFTGKGANKNPEKFSQNPPPKN

SEQ ID NO: 331316 - protein, 78 aa, Zea mays
  unsure (1)..(78): unsure at all Xaa locations
  Clone ID: MRT4577_65264C.1.pep
HAAYHHGGRHAYPRQPGPXSRLLPQAPLLAPRSPRLPTTPTPRPTRLTPGPAAPSPNPNLPPAPGPAPAPAPGCTPPA

SEQ ID NO: 331317 - protein, 257 aa, Zea mays
  unsure (1)..(257): unsure at all Xaa locations
  Clone ID: MRT4577_65265C.1.pep
MADAPAPARGGFGSRGDRGGDRGRGRGRGRGRRGGKSEEKEWQPVTKLGRLVKAGKIKSMEEIYLHSLPIKEYQVVDFFLPKLKDEVMKIKPVQKQTRAGQRTRFKAIVVIGDSEGHIGLGIKTSKEVATAIRAAIIIAKLSVVPIRRGYWGTNLGEPHSLPTKESGKCGSVTVRLIPAPRGTGLVASPAVKRLLQLXAGVQDIYTASSGSTKTLENTLKAXFVAVAHTYGFLTPNLWTENALTPSPLEEYSDILRG

SEQ ID NO: 331318 - protein, 71 aa, Zea mays
  Clone ID: MRT4577_65266C.1.pep
HDAFGQIRISDQHSLSTRQNLRTRQHLHNANSCDDETDMAKLYESVMIVHMVVLLFVLSKLVPVGYGINNL

SEQ ID NO: 331319 - protein, 76 aa, Zea mays
  Clone ID: MRT4577_65267C.1.pep
NQVNRLREDWQSKTLRHLSFSFSSLFCPFYKFTVLYVMDGWMNERMSTRRMPWSSANQDDMRLLVLSLAVQPGQPA

SEQ ID NO: 331320 - protein, 201 aa, Zea mays
  Clone ID: MRT4577_65268C.1.pep
KLVVSGGCADSGVLLSDTYLLDVAMDRPVWREVPASWKPPSRLGHSMSVYGGRKILMFGGLAKSGPLRLRSSDVYTMDLSEEEFCWRCLTGSGMPGAGNPAGAGPPPRLDHVAVSLPGGRILIFGGSVAGLHSASQLYLLDPTEEKPTWRILNIPGRPPRFAWGHSTCVVGGTKAIVLGGQTGEEWMLTEIHELSLVSRSV

SEQ ID NO: 331321 - protein, 95 aa, Zea mays
  unsure (1)..(95): unsure at all Xaa locations
  Clone ID: MRT4577_65269C.1.pep
MGKIXIRLNGXGRIGRLEARVALHSEDVELDHVNDPFITTDYMTYMLQYDTVHGHWKHSDFSLKDSQTLLLGDKPRTSFGMMNPEEXPWGEAGAE

SEQ ID NO: 331322 - protein, 82 aa, Zea mays
  Clone ID: MRT4577_6526C.1.pep
TTGFSMARRLSWVQTLLQQLLLLVCSDDCHIKWVVYKQLVSHSRRQDSPHLLGSLVVVAVSVVAFQVHVRVYRTGSVPPYGQ

SEQ ID NO: 331323 - protein, 116 aa, Zea mays
  Clone ID: MRT4577_65270C.1.pep
MEWDSESDGAGSVDAGYEEQEEEEEERGGEGGGGDAGGGGGMFTFAIEGMLRSSGPCGLVVTDALEPDCPIIYVNRGFEEATGYRAEEVLGRNCRFLQSRGPFARRRHPLVDAALV

SEQ ID NO: 331324 - protein, 630 aa, Zea mays
  Clone ID: MRT4577_65271C.1.pep
MEWDSESDGAGSVGVDEQEEEQEQEEEEEERGGEGGGGDAGGMFTLAIEGMLRASGPCGLVVTDALEPDCPIIYVNRGFEEVTGYRAEEVLGRNCRFLQCRGPFARRRHPLVDAALVSEIRRCIDNGIEFRGDLLNFRKDGSPVMNRLHLTPIYGDDETITHYMGIQFFTDANVDLGPLPCSMTKEPVRSTRFALDNTFRPISTRPEHSNFCREYSSLFQLTDEVLCQSILSRLSPRDIASVSSVCRRLYDLTRNEDLWRMVCQNAWGSETTRALETVPAARRLGWGRLARELTTLEAVAWRKLTVGGAVEPSRCNFSACAVGNRVVLFGGEGVNMQPMNDTFVLDLNASNPEWRHIDVSAAPPGRWGHTLSCLNGSWLVVFGGCGRQGLLNDVFMLDLDAKQPTWREIPGVAPPVPRSWHSSCTLDGTKLVVSGGCADSGVLLSDTYLLDVTMDRPVWREVPASWKPPSRLGHSMSVYDGRKILMFGGLAKSGPLRLRSSDVYTMDLSEEEPCWRCLTGSGMPGAGNPAGAGPPPRLDHVGVSLPGGRILIFGGSVAGLHSASQLYLLDPTEEKPTWRILSVPGHPPRFAWGHSTCVVGGTKAIVLGGQTGEEWMLTEIHELSLANNSV

SEQ ID NO: 331325 - protein, 122 aa, Zea mays
  unsure (1)..(122): unsure at all Xaa locations
  Clone ID: MRT4577_65272C.1.pep
LPSYISDKRTHNSRWREQHESAILHYFPPAPITXLHKLLLHLNHENMTTYTIIYMLKCNVLKSPTPNSIRCIYYCHFHLSSIIGIXPTICRXTNSEFILNIIDTPGLIEGGCINYQAINIIN

SEQ ID NO: 331326 - protein, 78 aa, Zea mays
  Clone ID: MRT4577_65273C.1.pep
ESSVRGINPYQIQAADSAHTERHPGTPALELGIGVANSSHMDMPEGSLGTLPFYIYVLGFSFAMQVTDVGTTPGTNLI

SEQ ID NO: 331327 - protein, 93 aa, Zea mays
  Clone ID: MRT4577_65274C.1.pep
EQKLGNSLPDGRFLFKTQRDPRVQNPVGSSVQGPRSHFSLGTTLDRVGVKPKAIGPPLFREGKIHFFTTLPGPEHVGEPGDHPVDVTPLVDPP

SEQ ID NO: 331328 - protein, 95 aa, Zea mays
  unsure (1)..(95): unsure at all Xaa locations
  Clone ID: MRT4577_65275C.1.pep
ETPPHRDKGMRHMVGPDWRQXFDVVIVQADKPSFFTDRRXPFRKLDEKGSLQWDRITRSEKGKIYRQGNLFDFLRLTEWRGPRVLYFGDHXYSDL

SEQ ID NO: 331329 - protein, 213 aa, Zea mays
  unsure (1)..(213): unsure at all Xaa locations
  Clone ID: MRT4577_65276C.1.pep
TSGGGGSNLAPPRHPLASAVSAARTKTRRQVCPAEHGLRSRTRDLFERAFREKXYMPLTTYFRTYXLXDYSDAQANXGISHREMRHKCXNGRTGXRARNVSKRAXGTKIYKKGYGRIITKXIHARGQHVQAXRCTNXFRLTKAKNEQLEVAAXRAAEAIITKKISIACPSPVFMXVEGTTIETAATIAYDELNDVRLDTDVGCTIYQEDPALH

SEQ ID NO: 331330 - protein, 66 aa, Zea mays
  unsure (1)..(66): unsure at all Xaa locations
  Clone ID: MRT4577_65277C.1.pep
APITTSFFGISXHTRLWECNFLFLVAHIHHPNNFIIESQVISNLKEGPSNDVLLVGALLRLCQKQV

SEQ ID NO: 331331 - protein, 49 aa, Zea mays
  unsure (1)..(49): unsure at all Xaa locations
  Clone ID: MRT4577_65278C.1.pep
EKSLYKRKSLLTQEVNLMNKKKVSLQKVKKTQWCXNKVVKQAAMSTLKF

SEQ ID NO: 331332 - protein, 68 aa, Zea mays
  Clone ID: MRT4577_65279C.1.pep
ILIELLRDLGGGGGGGNPHRRGRTVVGSPAPTILHIYDPNPSHPHVLPLPTSPAVPSDYSKFLSVLVH

SEQ ID NO: 331333 - protein, 87 aa, Zea mays
  Clone ID: MRT4577_6527C.1.pep
TATPASTSARPSLRDMPCERVLVCGAELDSLLPRDRAYYEALAASGWSGTVEWFESQGQDHVFFLFKPDCGESVALMDRLVAFFAAN

SEQ ID NO: 331334 - protein, 32 aa, Zea mays
  Clone ID: MRT4577_65280C.1.pep
KCMHSRLFQDVFVPAPLVLFTFLWISNLNRKS

SEQ ID NO: 331335 - protein, 370 aa, Zea mays
  Clone ID: MRT4577_65281C.1.pep
MATASGTDAGAQPRDDPSLLPFASFSLGLSIRAPATPTLASVPSTLHLPTQISTLAVCLHPSAAQPSSRRTTRLNSATSSVIASNLSTYKEQLREVKKLIKEKKDDAGISEYIDMEKELQEVITLTEEILATAKQTESAQNVAGLSPPSYSAGVQSEGLDDLSHSHKFAVGTRVQAVWSEDGEWYNATVEALTPNGYYVAYDGWGNSEEVDPDNVRLLEEEAADALGQAEKEAEATKMAIKRKIEQAATSDFQARSLPAKLRIEPSDPEDVKAAKRKKIHAFKSKSRFEQLEFAQNKRQNAWQQFQTKGKAKKVGFFSGRKKESIFKSPDDHRGKVGVTGSGKGLTDFQRREKHLHLKGGSGDAADDDEE

SEQ ID NO: 331336 - protein, 260 aa, Zea mays
  unsure (1)..(260): unsure at all Xaa locations
  Clone ID: MRT4577_65282C.1.pep
YHFLCLLQVITLTEEILATAKQTESAQNVAGLSPPSYSAGVQSEGLDDLSHSHKFAVGTRVQAVWSEDGEXELXYNATVEALTPNGYYVAYDGWGNSEEVDPDNVRLLEEEAADALGQAEKEAEATKMAIKRKIEQAATSDFQARSLPAKLRIEPSDPEDVKAAKRKKIHAFKSKSRFEQLEFAQNKRQNAWQQFQTKGKAKKVGFFSGRKKESIFKSPDDHRGKVGVTGSGKGLTDFQRREKHLHLKGGSGDAADDDEE

SEQ ID NO: 331337 - protein, 371 aa, Zea mays
  unsure (1)..(371): unsure at all Xaa locations
  Clone ID: MRT4577_65283C.1.pep
ANSNWGKRARDESHRAGEDRQRQGGGRRNRRRREAGMEDLSVEELASNLSTYKEQLREVKKLIKEKKDDAGISEYIDMEKELQEXMPSKVITLTEEILATAKQTESAQNVAGLSPPSYSAGVQSEGLDDLSHSHKFAVGTRVQAVWSEDGEWXFSLIYLSLFVSRXLPLIFFTSFHYNMFDXELXYNATVEALTPNGYYVAYDGWGNSEEVDPDNVRLLEEEAADALGQAEKEAEATKMAIKRKIEQAATSDFQARSLPAKLRIEPSDPEDVKAAKRKKIHAFKSKSRFEQLEFAQNKRQNAWQQFQTKGKAKKVGFFSGRKKESIFKSPDDHRGKVGVTGSGKGLTDFQRREKHLHLKGGSGDAADDDEE

SEQ ID NO: 331338 - protein, 77 aa, Zea mays
  Clone ID: MRT4577_65284C.1.pep
NPDRRGTLMTNPFFMQGSSPRLRKRIDFVVLNKPFHFISFQIPMRGLFVLKKKKKKKKKKKKKKKKKKKKKKKKKAA

SEQ ID NO: 331339 - protein, 77 aa, Zea mays
  Clone ID: MRT4577_65285C.1.pep
GPPAGSHSKLVTGSGKRIGQFTTGGFSPCLKKNIVMGYVKSGMPKVGTELKVVVPGKSYNPVVPKIPLGPPKYYKPW

SEQ ID NO: 331340 - protein, 60 aa, Zea mays
  Clone ID: MRT4577_65286C.1.pep
SSNCWCVCSRALGGCISYTYAGAAHHAVTCTCSTSTSSRRKRFLCMCCPILASPEALGML

SEQ ID NO: 331341 - protein, 51 aa, Zea mays
  Clone ID: MRT4577_65287C.1.pep
FLIEQSRISSNDIKLHLYFRLDRRYESKCDVRVNTNQREQYDAIVHLFIGT

SEQ ID NO: 331342 - protein, 56 aa, Zea mays
  Clone ID: MRT4577_65288C.1.pep
MAGSTARTVKDVNPHEFVEDYSAHLKRYGKMELPERLDLVMIARFKAPPPYYPDWH

SEQ ID NO: 331343 - protein, 69 aa, Zea mays
  unsure (1)..(69): unsure at all Xaa locations
  Clone ID: MRT4577_65289C.1.pep
LQRRPDVWFIPTNSTLVFQKIVGRGRGSKQGLGLRTNSPSYNILTDRGGGPEHCPKLKTPTCVPTPSXS

SEQ ID NO: 331344 - protein, 54 aa, Zea mays
  Clone ID: MRT4577_6528C.1.pep
FLSTPLPIDRGAFIYMIPRHFFSVSLLFQFYTNTPTLSILSCDLKLDSEDLPNT

SEQ ID NO: 331345 - protein, 119 aa, Zea mays
  unsure (1)..(119): unsure at all Xaa locations
  Clone ID: MRT4577_65290C.1.pep
MATKIFSLLMILALSTCVXNATIFPQCSQAPLASLLPPYXPSMIASVCKKRXLQPYRLQXXXEXSNXXLSPXFXQSTALSVWRSLXVXTXRVSXLQQLVLPLINRXALAXXSPYSXQQQ

SEQ ID NO: 331346 - protein, 394 aa, Zea mays
  Clone ID: MRT4577_65291C.1.pep
MHIWPTCTLVQRGTHVHTDGCIPTPKSMASSPRSPPPAPTPEFEISRQSRLFAALSKKVIDLDELRMLAAQGVPDAAGVRATVWKLLLGYLPNDRSLWEQELAKKRGQYAAFKDEFLTNPVERAQQVPTEGHHNVSAEHVDNGFLHRSEVTREEHPLSLGKTSAWNQFFEYSEIMEQIDRDVKRTHPDMQFFCGDSSFAKSNQESLKNVLLIFAKLNAGIRYVQGMNEVLAPLFFVFRSDPDDKNAEFAEADSFFCFVELLSGFRDNFCQKLDNSAVGIRGTLAKLSQLVAKYDGELQQHLEITTEVNPQFYAFRWITLLLTQEFNFADTIHIWDTLLSDPGGPQETLLRICCAMLILVRKRLLAGDFTSNLKLLQNYPPTKISHLLYVANKLH

SEQ ID NO: 331347 - protein, 113 aa, Zea mays
  Clone ID: MRT4577_65292C.1.pep
LGECSCVSRPSFSSTSSRTARGCHPLSYNSITYIYIYKLSNYYMILLQPTGTELVNKKSQIRLVGEKISNWIGWGAPGSASSATAERRSRGPVRATLKGPSGKPRWWTLPHKK

SEQ ID NO: 331348 - protein, 110 aa, Zea mays
  Clone ID: MRT4577_65293C.1.pep
SPFLFVFFSGPPLASGLSLFLRRFLPLSASVPALLLCRLLSFPVARAGSAVSLLVALPAVPPVPPRPFLSSPWWLFPRPFSGSAWFGVAFLVQIMVVSPLEPFSVLSCGC

SEQ ID NO: 331349 - protein, 92 aa, Zea mays
  Clone ID: MRT4577_65294C.1.pep
MCGFFFFFFGGSETSIFTQFARFPDKNLGIQPGSSPGLGRKNAHRFFLPPEPTDQTGLSPSKGEGFLFSPWRSSGLRRQMKPGETYGQHRNA

SEQ ID NO: 331350 - protein, 119 aa, Zea mays
  unsure (1)..(119): unsure at all Xaa locations
  Clone ID: MRT4577_65295C.1.pep
EAALQNALIGTTTDXIDPCYSSXATRHGLSTCDLRHIHATGDKLGIVFNDAATRYQGXQSSKIIALGIRDRYKKFADRLTPYIAGTNRVLDEFITHKKILLIEGGQTDMLATDFGTEDI

SEQ ID NO: 331351 - protein, 99 aa, Zea mays
  unsure (1)..(99): unsure at all Xaa locations
  Clone ID: MRT4577_65296C.1.pep
LRVPGRYYTADPRVRFNQLAALXPAAYLQHQILLPFTELDXASSRASXLTQQQKLASYNHFAANRRTLLQLQQLVPLAQLALTNPXAGYQQHIIGGALF

SEQ ID NO: 331352 - protein, 184 aa, Zea mays
  Clone ID: MRT4577_65297C.1.pep
MASRAPSIAPAVLRQLRSQPQRLSSFLQTPLARSVANLNLNQQSFRAAHNIPRPSPRTYAKPKSGQANVGESAKSEGERPEIKPTHYQLSFTCVPCGHRSHHNVSKQGYHYGSTLITCPSCRNRHVISDHLHIFGDKPFTIEELMKKKGQLVKRGTLGEDGDIEFWPEDSLPGSKGSNNNESSE

SEQ ID NO: 331353 - protein, 129 aa, Zea mays
  Clone ID: MRT4577_65298C.1.pep
ERAPADTHQGKAVDSSLNWQDQHPVNATRVPPAANRNTGQGASSSRAGSLENRIPGSKEEPRRNVVPANYTETRERAGGDPRTMQTEPPKNRSDGRGTATPGRNPPKIRANKKANRNPQRKRKPPKPNP

SEQ ID NO: 331354 - protein, 227 aa, Zea mays
  Clone ID: MRT4577_65299C.1.pep
PHCTTAILRAVPSSYSHARLPRDQEEHARCTGAPRPRGLRLHPGGEMGLTFTKLFSRLFAKKEMRILMVGLDAAGKTTILYKLKLGEIVTTIPTIGFNVETVEYKNISFTVWDVGGQDKIRPLWRHYFQNTQGLIFVVDSNDRERVVEARDELHRMLNEDELRDAVLLVFANKQDLPNAMNAAEITDKLGLHSLRQRHWYIQSTCATSGEGLYEGLDWLSNNIANKA

SEQ ID NO: 331355 - protein, 323 aa, Zea mays
  unsure (1)..(323): unsure at all Xaa locations
  Clone ID: MRT4577_6529C.1.pep
MDPSSEIILDTPYFRIYSDRRIDRLMGTETVPAGFDPSTGVTSKDVVIDSDAGLYVRLYLPLPXGGCRRVTAAQRXDSKTKLPVLVYFHGGGFVTQSAASPIYQRLLNALAARAGLLIVSVNYRLAPEHPLPAGYEDSFRALEWVAASGGDPWLSRHGDLRRVFLAGDSAGGNIVHNVAMMAAASGPRVEGAVLLHAGFGGKEPVHGEAPASVALMERLWGVVCPGATDGVDDPRVNPLAAAAPPRPSLRDMPCERVLVCGAELDSLLPRDRAYYEALAASGWGGTVEWFESQGQDHVFFLFKPDCGESVALIDRLVAFFAAN

SEQ ID NO: 331356 - protein, 65 aa, Zea mays
  unsure (1)..(65): unsure at all Xaa locations
  Clone ID: MRT4577_652C.1.pep
GMSKNQTIQFVLRPWVTDAASCAVYEEYVNSDFLSSFSDLYLVPRVLXESVLHVARICAASFSRS

SEQ ID NO: 331357 - protein, 156 aa, Zea mays
  Clone ID: MRT4577_65300C.1.pep
PPEREGGGTRKRPGGGPLLFLRAKRGGRKTRGPPRPFWPFFFPLPAPFLCSPAFPVWGSGDRGLFPFSRGGKGVFWALGKAIAPRRVCNLWGGPLVLGVNVGGGFFFQRPFFLFFFFPGASLGKPLFLSRPGGPRFPPPKQTPPPPPKKKKKSPPP

SEQ ID NO: 331358 - protein, 33 aa, Zea mays
  Clone ID: MRT4577_65301C.1.pep
HNLTIYFAGDTLLVRPDQIPSKVWSHRPSTKRG

SEQ ID NO: 331359 - protein, 74 aa, Zea mays
  Clone ID: MRT4577_65302C.1.pep
AYYFRCVGTRSEWDSITIFLNEPSTSKGKDLNKEGKPRSSMPSLFLIARCQTRFLPPGRGRGRPGRCGACGRVG

SEQ ID NO: 331360 - protein, 44 aa, Zea mays
  Clone ID: MRT4577_65303C.1.pep
MTHIPRCPLPPTAVQSRAPLVVFETILVNHSCPLCFKVGESDTI

SEQ ID NO: 331361 - protein, 147 aa, Zea mays
  unsure (1)..(147): unsure at all Xaa locations
  Clone ID: MRT4577_65304C.1.pep
RPFSGAGFMWGAGRXAGLPSVGARFSGFRLHSCLSAILRAFCFGLATLVLLVGGLCPSRLGPFGLLLLXSLPGPYRLSASLALGLLLAVLSAGGPLQSRPRVCSPCGVGSSFPLTRAPGIPAPGFPAGRPLRSPRRSCLCRPSSCVP

SEQ ID NO: 331362 - protein, 116 aa, Zea mays
  Clone ID: MRT4577_65305C.1.pep
MPLNVVSVLCLARVCSRLLLPLAAVVPVGGDSKGGNMSKKNNLAKRKKQYEFDLQREKEAKEKQAKKLQAKKSKMKIDGAEKKRKGGQFKVGKKKVKTKLSALAKAKAAQAMEVDK

SEQ ID NO: 331363 - protein, 59 aa, Zea mays
  Clone ID: MRT4577_65306C.1.pep
RPRGGVLEAARAHLIGRRRRSLISQLHRGLHTCTSSQLLSREIYKKKNREDTVKKRRYR

SEQ ID NO: 331364 - protein, 175 aa, Zea mays
  unsure (1)..(175): unsure at all Xaa locations
  Clone ID: MRT4577_65307C.1.pep
DHGVVVLLSHEGHVAYCHSSQGVLRANPLGGNDEILXLFEGELENLVPEIHEEGLXKAXANQVLLVXDVYYKVQDGARXPARFVVAQVTGSYHYVLLHKATKSLLDLSHPEGRAALFCQITGEVCVRFSHDIHMCKGXIXKLLAPLPQGCFXXKGLGGLKWYENPKLKGCSVPTN

SEQ ID NO: 331365 - protein, 51 aa, Zea mays
  Clone ID: MRT4577_65308C.1.pep
AGRDPLFLSPPPIKSRHAISELRVRLEQDIYSVMEHNEAGCQYRMANAMHQ

SEQ ID NO: 331366 - protein, 75 aa, Zea mays
  unsure (1)..(75): unsure at all Xaa locations
  Clone ID: MRT4577_65309C.1.pep
RGSCHPLGLADDLYAFCELGARELKNGRLVMICMISIVCKDIATGXGPIWNLACHIGDPCNNNTWAYDTNFRPGD

SEQ ID NO: 331367 - protein, 121 aa, Zea mays
  Clone ID: MRT4577_6530C.1.pep
RPISLGALVEGLRTRGPYDLISDQYIGSSVGQGESRPTRRRGGGAVHLRRSGGETELAIIQSSRTSSPGSEQELESEQRRSFVDRRRHSSFYSRNGNPNTRTNEEDKHINKPINKHINQPK

SEQ ID NO: 331368 - protein, 134 aa, Zea mays
  unsure (1)..(134): unsure at all Xaa locations
  Clone ID: MRT4577_65310C.1.pep
MEDASGGGQEDRRPSRAGARDGNGTGAQNLRAFLHTRQCHVTRPSCRPRPTYALSFSRGIGYSTSWAKVLQVFGYGYFIRNPXGFYLDNKILGFIKGYKPTFNIACIDHTRSPEHTGRTXRLKPTTXAICWGIA

SEQ ID NO: 331369 - protein, 159 aa, Zea mays
  Clone ID: MRT4577_65311C.1.pep
PRVRPRVRVLQRIGVGMVLAVVAMVAAALVESRRLRAEPALLSIFWLLPQYVLLGVSDVFTVVGMQEFFYSQVPASMRTTGIGLYLSVFGVGGFLGASLITLLEMATARPGNARGWFSDDPREARIDNFYWFLALLCFVSFVVFTHLCKYYNDRSASGR

SEQ ID NO: 331370 - protein, 53 aa, Zea mays
  Clone ID: MRT4577_65312C.1.pep
LIMNTSYIIWDSAITNIIWYTTMGAREIYSGNLLDQTFKFPGITRLSYHYSCK

SEQ ID NO: 331371 - protein, 138 aa, Zea mays
  unsure (1)..(138): unsure at all Xaa locations
  Clone ID: MRT4577_65313C.1.pep
MAIDVPQCTLKAIDKIRRGFLWRGSKYAKGGHCLVTWARNIEKRTVQEALQNKRWIEDIKGALTVGVLVDYLQLWEMLEGFQLQAGTQDKHIFTVSANGLYSAKAAYEGLFISSVSFPHYDRVWKTWAXPKCRFFLWL

SEQ ID NO: 331372 - protein, 124 aa, Zea mays
  Clone ID: MRT4577_65314C.1.pep
NPLDRYFPPWRGNVIPAKLEMNPARVGGMSLSVNPKSGVPGAKTGPGYFRLYVAWNKTFKALLTPPGIVFFPNGPFLFYPPAPVGPLNSSPGPNPRGNPSPDCPPLFALKKGFWFAFEGYEKGV

SEQ ID NO: 331373 - protein, 258 aa, Zea mays
  unsure (1)..(258): unsure at all Xaa locations
  Clone ID: MRT4577_65315C.1.pep
LPNFIVYSVKAVLNVLCLCIFHSNSITRGCSYFYTTLLNQEPEDVFACQENMESENEVMESPPLNDSNSQSKPKGRSKNFNEAEDILLMSAYLNIRKDAITGRDQXKAXFWERVEKYFNVNRTFESDRNWSSLKHRWGIIHKXVSSFQGFHDSIERKNESGKTSDDKLAEANVMFHQFKNKAFSLFHAWNILRHEPKWAEDKTSNEGNANGDSHPNAQRPAGRKAEKEKMKAKRRNSDEESDPSIEEVKKNERIEREN

SEQ ID NO: 331374 - protein, 120 aa, Zea mays
  unsure (1)..(120): unsure at all Xaa locations
  Clone ID: MRT4577_65316C.1.pep
MGKDNVIKSGPGGGKFLAKDYTDPPPGPLIDPGELGSWSLNRPGIPELIATLVFLYITGATGIGYKHQTDXALGLGPNPACGGVALLGIAWAFGGKILXLGYXTAGIWGGHINPAGTLGL

SEQ ID NO: 331375 - protein, 249 aa, Zea mays
  Clone ID: MRT4577_65317C.1.pep
DRRLRGSITFLWSCHDRWRASLAVPGRAVRAFSGAPPVCVSPFPWAERRRSVVSSRPFLWCSTPVPSSPGRLSSDPGVPSPDLVLGRPPGRFPARSGQLPDGSAGSKWKPAICVVIVEVFNTGTILLGKLALDGGMFVFSLLSYRSVLGAVFMLPFALFLERGRWKELNMKALGWLFINAFVGYSLPMALYYYGLHDTTASYGVVFSSLTPLFTFVLSLLLGMESLRLKSKEGSAKVGGALVCFAGALL

SEQ ID NO: 331376 - protein, 53 aa, Zea mays
  Clone ID: MRT4577_65318C.1.pep
AVYIRWCDVHYVPHIQLSTVPLVGQGVIYHIHVISLKSVQLERVKQGRCHCDQ

SEQ ID NO: 331377 - protein, 62 aa, Zea mays
  Clone ID: MRT4577_65319C.1.pep
CMEGQNPKVPWRAKLAALRFVPYWCNVIGVTVMGRSRCGDRLEPKALKSIIALPVHSYPHWS

SEQ ID NO: 331378 - protein, 106 aa, Zea mays
  Clone ID: MRT4577_6531C.1.pep
SVLTLLQPNKDPPSLSAKEEEETNGEKDSETNSCRKTAQPNMQQTNQEPKKKKKKKTNWHIVVLVPGSPGCVPRSMLTKPHRARSRWCTTLSFQNFSLTHTFPLSS

SEQ ID NO: 331379 - protein, 141 aa, Zea mays
  Clone ID: MRT4577_65320C.1.pep
MAHWVSDSDGSDNFEWDSDGNGEEPANFNAAGAGSSALRSTNTDAPGPSTRVIHLTDPYICYYMFFSSCYSGMFKPLVPTWPGWGWIHMVIMNIIRIMISIQRHEHSQCYCYLVCSGYHCNRSCLFVGLLLKLLMAMGRLG

SEQ ID NO: 331380 - protein, 90 aa, Zea mays
  unsure (1)..(90): unsure at all Xaa locations
  Clone ID: MRT4577_65321C.1.pep
TKATSVGEKNVRIFDLVGGTFDVSLLTIDAGIFXVNATAGDTHLMCYDLDYRMVCHSVQEFKRMSNQDIIGNPMAHLRLTTSCEMVKRTL

SEQ ID NO: 331381 - protein, 63 aa, Zea mays
  unsure (1)..(63): unsure at all Xaa locations
  Clone ID: MRT4577_65322C.1.pep
XIIRSHRTILPLISSSFQNFLKKQKKSLTQLVILPPGQQTDGFVGAGAIGVGDHRGVVFFLSS

SEQ ID NO: 331382 - protein, 89 aa, Zea mays
  unsure (1)..(89): unsure at all Xaa locations
  Clone ID: MRT4577_65323C.1.pep
MEDDGSFEEPNEDTIAIRKLAEDNSQELYPGCQNYSKLRFLVRLLHIKLLGGWTDXSFDLLVDLLVDALPKGSALPRNFHEAKKVVKSV

SEQ ID NO: 331383 - protein, 80 aa, Zea mays
  Clone ID: MRT4577_65324C.1.pep
DPSSERYTSAFSAGIECVTQARAASAPTTAAVIRHYRRRTEACVATTGPRARMCIPWACIVPAGLAARRTGRTLLVVVGE

SEQ ID NO: 331384 - protein, 118 aa, Zea mays
  Clone ID: MRT4577_65325C.1.pep
MDRDGRPGWLPSLGFAFLSFNCGMAVYRSWDDPYAVAFVLAAYAALVLLFRCLHLLERRRDQRLKLAVWGLSTLLTLMFSYKIAAVMPPWAQLLVWGMGILTVVAGFYAFFVARPEEP

SEQ ID NO: 331385 - protein, 71 aa, Zea mays
  Clone ID: MRT4577_65326C.1.pep
RLWSPFKRVGAEGPPHKCAPIKWSAPPLLLEVSLPAELMLHRGQRIDSQALFLSNRTRVLDAHVDILGRPI

SEQ ID NO: 331386 - protein, 50 aa, Zea mays
  Clone ID: MRT4577_65327C.1.pep
PHVLSSCIIREDCIASLKICGWWPRPMYQSCLVTTMLVRAAAYSQFSLRW

SEQ ID NO: 331387 - protein, 55 aa, Zea mays
  Clone ID: MRT4577_65328C.1.pep
YTLLYKLSQTALSYISSWREHLLLLTYYIVRESFYYMIYVGQILTGDYCTFISHM

SEQ ID NO: 331388 - protein, 542 aa, Zea mays
  unsure (1)..(542): unsure at all Xaa locations
  Clone ID: MRT4577_65329C.1.pep
MSSVYVLEPPTKGKVVVQTTAGPLDIELWPKEAPKAARNFVQLCLEGYYDGTLFHRVIKNFLVQGGDPTGSGTGGESIYGAPFADEFHSRLRFNHRGLVACANAGTSHSNGSQFFITLDRCDWLDKKNTIFGKVTGDSIFNLLSLADVETDKDDRPVYVQKILSVEVLWDPFEDIVPRQLKKAESVAKADAEVKPKKKAVKQLNVLSFGDEVEEEENEAATSVQAKIKSIHDVLDDPRFLKGEPEDVQLSKEQEEMKKMPDQTVRDALISKKVESREQENAPLSDDFPEGLNEDDWXNRFVAQSLKIRRELXDMFPCKKNCKXSIGYKLGVNRALGKSSSXRDTDEDDDQEHELQKAKKLSLKKKGAGSEASAERMSKADANLQLLNPAEQERHLQKQKKRRLQGREDETLAKLQKFKSSFLSKNLATNHVEEKNPSTDKAEKEDEEEDDYKGWHTNLLSFLPSSSKXLLDLSCPLSHRKFMYLVKIRNDIKPGFXDGMARKDDPDDYVVVDPLLEKGKEKFNKMQAKLKRREREWAGRSLT

SEQ ID NO: 331389 - protein, 146 aa, Zea mays
  unsure (1)..(146): unsure at all Xaa locations
  Clone ID: MRT4577_6532C.1.pep
KKNKIRKKKKYKIKKKKIKKIKKYKNKIXYKKXQKKKKKKKKPKKKKKKKKTKKRKKKKKKYTKNKKKKKKTNKKXRKPDHTHNTNKKPGKKRNKYKTSKTTRVRSNAKERYAAGTGHNENKEPTRSPTSDVARAMIHVRTCSERR

SEQ ID NO: 331390 - protein, 57 aa, Zea mays
  Clone ID: MRT4577_65330C.1.pep
VSVSTNCISIVTQKNSRMVKLSHLQERAKYPVSLVYANMKPKNSHLNGACPNSHESL

SEQ ID NO: 331391 - protein, 99 aa, Zea mays
  unsure (1)..(99): unsure at all Xaa locations
  Clone ID: MRT4577_65331C.1.pep
PFGGGCCRMAHRTVRCATRHCPXRQPXHQGGGHHLLMTLTENTHLLIDAADVAYPDPIAIRSARSLHQYAXGHTLLLATPLLIDSQDNISPGKQTNXXN

SEQ ID NO: 331392 - protein, 70 aa, Zea mays
  Clone ID: MRT4577_65332C.1.pep
LWGIEHVMFSDLGEFVYSWGLNGMKYPKISEFPHDRGTNLLVSAPLPDFLLWPRSPFNTCGSKKKKNDRR

SEQ ID NO: 331393 - protein, 98 aa, Zea mays
  Clone ID: MRT4577_65333C.1.pep
SLVALLGSCLGNLHPFHPSPVFVSNTNLYVLNGIAKVILQLLSVGLKSDDKWSVEYGLLPFIPTAKSFKMDIVLAMLLQLQRWISYPCLFFMGMCSRF

SEQ ID NO: 331394 - protein, 107 aa, Zea mays
  unsure (1)..(107): unsure at all Xaa locations
  Clone ID: MRT4577_65334C.1.pep
RKNARGLYVRVSILGTMMGNKKHNETQYVIKIVVEITGEDTKGDAGWHVGXRSSXITKGNTTSYKTLCRRVSRTDSRSDGNSAMFKSKLKSNLMAGTVRVMVYPIMF

SEQ ID NO: 331395 - protein, 83 aa, Zea mays
  Clone ID: MRT4577_65335C.1.pep
QIHTARSQCEMDPIYNESKLLNAPIVRCPMRICPIMVHRHSDRHRHVRVHTASTAARSAKRHLLLYADERNELGLSHEGHPYV

SEQ ID NO: 331396 - protein, 47 aa, Zea mays
  Clone ID: MRT4577_65336C.1.pep
LQYTKVSRIRLPRYTCLRARARRNGRLRVPRLRGGGSHAGDGERGAR

SEQ ID NO: 331397 - protein, 178 aa, Zea mays
  unsure (1)..(178): unsure at all Xaa locations
  Clone ID: MRT4577_65337C.1.pep
MAGAERAEAVALEQGLLDPEESNQLVYTGDGSVDFSGNPVVKERTGRWKACPFILGNECCERLAYYGISTNLVTYLTKKLHAGNASAASSVTTWSGTCYLTPLIGAILADAYWXXGMTLLTLSASVPMLMPPXCEGSFCPAASPFQXTXFFLXLYLIALGXTGGIKPCVSSFGADHLM

SEQ ID NO: 331398 - protein, 42 aa, Zea mays
  unsure (1)..(42): unsure at all Xaa locations
  Clone ID: MRT4577_65338C.1.pep
ANKNACTXTHXIPNMYSRYFPGKENFFSLLYIIVAARGFRTV

SEQ ID NO: 331399 - protein, 233 aa, Zea mays
  unsure (1)..(233): unsure at all Xaa locations
  Clone ID: MRT4577_65339C.1.pep
MAGAERAEAVALEQGLLDPEESNQLVYTGDGSVDFSGNPVVKERTGRWKACPFILGNECCERLAYYGISTNLVTYLTKKLHAGNASAASSVTTWSGTCYLTPLIGAILADAYWGRYWTIATFSTVYFIGMTLLTLSASVPMLMPPSCEGSFCPAASPFQYTVFFLGLYLIALGTGGIKPCVSSFGADQFDDTDPAERIQKGSFFNWFYFSINIGALISSSFLVXWVQDNVRWG

SEQ ID NO: 331400 - protein, 142 aa, Zea mays
  Clone ID: MRT4577_65340C.1.pep
CPLGEPQKSSHLIKSSIVRARWLGKDTRAELNPAAAHGEVAWERHQGGRSVTSESEGEAMRGPGHGVERELLGQAPWQAGANDHGVQAWGGVAGEHQLAVVGGGGWLRRARRLRDGTSAWGGREAMQPGSFDGAKEIPARPA

SEQ ID NO: 331401 - protein, 36 aa, Zea mays
  Clone ID: MRT4577_65341C.1.pep
LLVYSEGRGLAILAAGCNSHGDFYWYECLVAGVRGR

SEQ ID NO: 331402 - protein, 74 aa, Zea mays
  Clone ID: MRT4577_65342C.1.pep
LSVPDQSDKAPLLAVVRPAKGMFWLPVVNARSVLPILYLSPAKLPKSLCPSEKMKVNMFELAFIMFRQNYVECM

SEQ ID NO: 331403 - protein, 95 aa, Zea mays
  unsure (1)..(95): unsure at all Xaa locations
  Clone ID: MRT4577_65343C.1.pep
MHVRQLLSARGDLVELRAVSRPEDTTAIEGXLEEAPXARAXLIELYXRTLIETDVFLKDEGYRTALETFTNHRLQICLEEDDWNLMTDRMGCGQV

SEQ ID NO: 331404 - protein, 84 aa, Zea mays
  unsure (1)..(84): unsure at all Xaa locations
  Clone ID: MRT4577_65344C.1.pep
GGESLSVIYXXGEVNTXXSCXXVXPCLLCWXLTSVKWLYHVAXWYSAVTDPVXGFCAMIVEASXLSKAXPLSLXALRGFRCQCS

SEQ ID NO: 331405 - protein, 67 aa, Zea mays
  Clone ID: MRT4577_65345C.1.pep
NTRQPPRPLVSSALCLAPSLGLRCCSTVHTPRPAAALTNGARGRPTAVPRGVPVPRGGAHRNKRPVL

SEQ ID NO: 331406 - protein, 69 aa, Zea mays
  Clone ID: MRT4577_65346C.1.pep
QGRQKKKKKKKKEKKKKKKKKKKKKKKKKKKKKKKKKKKKKKKKKKKKKKKKRGGPFLGFKFSFPWFAN

SEQ ID NO: 331407 - protein, 67 aa, Zea mays
  unsure (1)..(67): unsure at all Xaa locations
  Clone ID: MRT4577_65347C.1.pep
VFMLHIVYRWWLYDLLRREPDGWLAQLRHASLTCQFRIPWEHSSKIAXTDNIFGFRLRTNLAPLLYA

SEQ ID NO: 331408 - protein, 113 aa, Zea mays
  unsure (1)..(113): unsure at all Xaa locations
  Clone ID: MRT4577_65348C.1.pep
SFLLNEVXXXXXXXXHMSIVFGENWSXXHLTLAEVSYSLEPQMKTSSTMCVSPTSQPLNFNHSLLKNHTIQMSQSALNSSSGIKTSLSLVYVCTHHFNSHQTSNLFSLGHLPP

SEQ ID NO: 331409 - protein, 297 aa, Zea mays
  Clone ID: MRT4577_65349C.1.pep
EYTAYRDNERRWVSADSDSSLIDCYQEKVAPDKVTKVGDHYVLKDNPNIRLNARAYKMSKSRGNVINPDDVVSEYGADSLRLYEMFMGPLRDSKTWSTGGIEGVHRFLGRTWRLIVGPQLSDGSYNDGTMTAEDEPTLDQLRVLHRCIARVTEEIQETRFNTAISAMMEFLNAAYKWETQPKSVIESFVLLLSPFAPHLAEELWFRLGHPQSLAYEQFPEAKSEYLEESKLVLPVQINGKTRGTILVDKACSEDDAFRTAASDEKLSKYLDGKGIRKKIYVPGRILNVILDQQKSRT

SEQ ID NO: 331410 - protein, 56 aa, Zea mays
  Clone ID: MRT4577_6534C.1.pep
KHLETPKGAIQPREIPANQRRAQLGRVIQGREERMDLAISCEAGVANGTHCVAAYK

SEQ ID NO: 331411 - protein, 51 aa, Zea mays
  Clone ID: MRT4577_65350C.1.pep
GLYVFTQGLLRFVIWLFGYEDRLIILFYFELVCFLCIGCGNCSFVLSVYTH

SEQ ID NO: 331412 - protein, 61 aa, Zea mays
  unsure (1)..(61): unsure at all Xaa locations
  Clone ID: MRT4577_65351C.1.pep
LLTTHTTTFSYKNDQYYTKQNLTPWKTXPPTVISTLIFLLHRHDLSSTIAHSLHSTYLSYQ

SEQ ID NO: 331413 - protein, 65 aa, Zea mays
  Clone ID: MRT4577_65352C.1.pep
FGTQQNSLHFFGTLPRIGGPVFEKKKYLSFLNSSEGGDFISGIWDEKKAAFQKKTSFQTFGMGNP

SEQ ID NO: 331414 - protein, 272 aa, Zea mays
  unsure (1)..(272): unsure at all Xaa locations
  Clone ID: MRT4577_65353C.1.pep
PRGRPGRVLTAERLAKAKNLKLAVTAGIGSDHVDLNAANKTNGGITVAEVTGSNVVSVAEHVLMTILTLVRNFVPAHDQIRNGEWDVAAVAKNEFDLENKVVGTVGVGRIGERVLRRLKPFDCKELLYYDYQGLSAETEKEIGCRRVEDLADMVSQCDIVTINCPLHESTKGLFNKELIAKMKPGSWLVNTARGAIVVKEDVAEALKSGHLRGYGXGDVWFPLPAPKDHPLRYAEHPXGGGGNAMVPHMSGTSIDAQVRYAEGTKSILDSYF

SEQ ID NO: 331415 - protein, 43 aa, Zea mays
  Clone ID: MRT4577_65354C.1.pep
ESTTCAAEVIPSTAGQHDGHDAAVVEQHLDELDELTRPILEAC

SEQ ID NO: 331416 - protein, 89 aa, Zea mays
  Clone ID: MRT4577_65355C.1.pep
MSKSWCQIVPFCCLVLLVFILARRSSNDKQHLEDRVKGCPVVSCVRLGVCSRNRCYSRLDEGLGAGLSLLVAVDGCSGRAQESVEVRPT

SEQ ID NO: 331417 - protein, 158 aa, Zea mays
  Clone ID: MRT4577_65356C.1.pep
HKHQLIRGRKYSRRSQAPTQRGQPPYFNFRTGREPNFYGLLQQANYAGALAPHSFPWGHTTPKTIKWGTSTSSGRNRASGIGSGGEQHRQPPGTPGVAEPPPEGREAAAAAAAGTREAAAAGPFLNLHLFLLLGRLGWLFTGGGKKGGGNQDLYHKEP

SEQ ID NO: 331418 - protein, 107 aa, Zea mays
  unsure (1)..(107): unsure at all Xaa locations
  Clone ID: MRT4577_65357C.1.pep
DAVPLLLFGTSEHTRHDLFQQLMLVHNDHSFVEYLKNTYRYSTTDDNEDRPREKKQSSSASGSSQDAXKSNSTNQRTTRGSGGXASDEASRGKNKFFLTKWFGLGSK

SEQ ID NO: 331419 - protein, 160 aa, Zea mays
  Clone ID: MRT4577_65358C.1.pep
LGTSRPAGKKIKKKKHTQQPFVSPVIGATATAARKHARTFQFIQKKTSLGRRRPAGVAVRCAPNGGGVPAAGDTKAKLKVGSPIIIVEAPVMLKTAASVPSLRHNSGQVKPGDVGRIMARKPKDVWVVRLAVGSYLLDGKFFSPLDSDNGDDGEPQAQDE

SEQ ID NO: 331420 - protein, 139 aa, Zea mays
  Clone ID: MRT4577_65359C.1.pep
MPHPLLAAVSAAVYSSFLSPPRRVPASLGRRGPAGVAVRCAPNGGGVPAAGDTKAKLKVGSPIIIVEAPVMLKTAASVPSLRHNSGQVKPGDVGRIMARKPKDVWVVRLAVGSYLLDGKFFSPLDSDNGDDGEPQAQDE

SEQ ID NO: 331421 - protein, 58 aa, Zea mays
  Clone ID: MRT4577_6535C.1.pep
TLDVSITQTHLASNTSNSIYINTDIDHFIYEDNNADNIKINELHSYIKYKPFQKIDPT

SEQ ID NO: 331422 - protein, 106 aa, Zea mays
  Clone ID: MRT4577_65360C.1.pep
FPIRAYALSGMHTDRCICIMVPVERFTYNSQLSQHGSRLFVALVRCHTRTQRTGRRRGNRYGDETSARDTEAARQEITGLEVEDTLAFGALRKKLTRQRSREHGGM

SEQ ID NO: 331423 - protein, 113 aa, Zea mays
  unsure (1)..(113): unsure at all Xaa locations
  Clone ID: MRT4577_65361C.1.pep
RGNTFTLYRLALATAASTMGISCTAXAVPTIKVGSFSEGRITMRKTVGKPKVAACGSPCYSPDRVKYLEPLCGEPPSYLTSEFPGDYRWDTSGLSSYPETLAKNRELEVTHCR

SEQ ID NO: 331424 - protein, 91 aa, Zea mays
  Clone ID: MRT4577_65362C.1.pep
KKKPGHKSGKGNNNTNTQKKAFRRSTKNPGKDRQRGHKQNGQTVAHKNKKRQKAEWPPHIWWAHSKRHNQLNKRWPHYPGKKLGGKKNSKA

SEQ ID NO: 331425 - protein, 100 aa, Zea mays
  Clone ID: MRT4577_65363C.1.pep
DDNANDETTSPASGKEARAFQAYLAYLYSYWKTPEYAQFLTHPGATLRALRLLQEESFRRDIIRPQVIESLLAGGDEGQRATAVPENEDLVEHHNGIQAP

SEQ ID NO: 331426 - protein, 145 aa, Zea mays
  unsure (1)..(145): unsure at all Xaa locations
  Clone ID: MRT4577_65364C.1.pep
MSKRGRGGSSGAKFRISLGLPVGAVINCADNTGAKNLYIISVKGIKGRLNRLPAAGVGDMVMATVKKGKPELRKKVHPAVVIRQRKSYRRKDGVFLYFDDNAGVIVNNIGEMKGXCHTRPVXKECADLWPXIASNAAHCMISRYL

SEQ ID NO: 331427 - protein, 37 aa, Zea mays
  Clone ID: MRT4577_65365C.1.pep
ALKSAAAHHNLWVDYRSGGVKDHLQLLMMHELQTNPN

SEQ ID NO: 331428 - protein, 56 aa, Zea mays
  Clone ID: MRT4577_65366C.1.pep
DGGDPRGGVTLSCIAHRLIYRFRCGSVSPMAPLRDSCFLLLCSQIHENAMRTQIPV

SEQ ID NO: 331429 - protein, 85 aa, Zea mays
  Clone ID: MRT4577_65367C.1.pep
AMRAITLSMRMRSSRGSSCELAVGSPATRYPSQVGSDSAIGLKREKCSMGSPTGGDDGVRLGEAMEQPLFAQFLGLLLKVAKPWR

SEQ ID NO: 331430 - protein, 30 aa, Zea mays
  Clone ID: MRT4577_65368C.1.pep
MAGPNNCTPYANKNYPAIFITIPTIKVCHN

SEQ ID NO: 331431 - protein, 70 aa, Zea mays
  Clone ID: MRT4577_65369C.1.pep
HRLRVAVSFSRFYSHSMSASSFKNLLRKGVTAQLKGPVGLPNSFGDQIQVNLHYAIYLVLLPQRMKQGTK

SEQ ID NO: 331432 - protein, 90 aa, Zea mays
  Clone ID: MRT4577_6536C.1.pep
EPSELVIKDAEESSVGMWPVTEFWQIHSFSRHATSLVSKADTQGTAINVSEFTLKAVPAKAPNFFWFCIFFFFKNLEMYLPGRPLERANK

SEQ ID NO: 331433 - protein, 542 aa, Zea mays
  Clone ID: MRT4577_65370C.1.pep
MASDSGPASSDPLLHGRRAPSTGGWKSALFIIWVEVAERFAYYGISSNLISYLTGPLGQTTAAAAAAVNAWSGAASMLPLLGAAVADSWLGRYRTIVASSVLYITGLGMLTLSSVFSSPQQCRDSADDGEGICPPSSLQTAFFYASLYLVAIAQSRHKPCVQAFGADQFDATDPDEAVSRASFFNWWYMGLCTSATVTIALMSYVQDNVGWALGFGVPSMAMLLALAIFLLGTRTYRFYGSRGGAGASASASASASSLFRNAFVAWRKRSREVELGHGELAQDDAVLAEEVKGLARLFPIWATCLLYGAVFAQPPTLFTKQAATLDRRIGRSFQVPPAALQCFLGASIVTCIVLYDRVLVPVTRRVSGAASGITMLQRIGTGIALSLVTLVVAVLVEMKRLRAARDAGGGGLVDGSGAGTAAVPMSLWWIVPQYVLLGAADVFTMVGMQEFFYDQVPGALKSLGLALYLSVLGVGSFISSFLITVIDAVTTRNGGTSWFADDLNRGHLDYFYLLLAALTALELLAFAYFSTSYVYKTKAGNL

SEQ ID NO: 331434 - protein, 240 aa, Zea mays
  unsure (1)..(240): unsure at all Xaa locations
  Clone ID: MRT4577_65371C.1.pep
MDGDGGGAGALHHHTRSPEDVFRDFRARRAGIVKALTTDVEKFYQQCDPEKEXLCLYGLPNETWEVTLPAEEVPPELPEPALGINFARDGMVEKDWLSLVAVHSDAWLLSVAFYFGARFGFDKDARRRLFTMINNLPTVYEVVTGVAKKQSKAPNGSSKSSKPNSKXPKEEEDSGREDAEEDQAYLCGSCGESYANGEFWICCDVCEKWFHGKCVRITPAKAEHIKQYKCPSCSTKRSRE

SEQ ID NO: 331435 - protein, 263 aa, Zea mays
  unsure (1)..(263): unsure at all Xaa locations
  Clone ID: MRT4577_65372C.1.pep
PRDTVASDGRRQRRRCGGAPXHARSPEDVFRDFRARRAGIVKALTTDVEKFYQQCDPEKENLCLYGLPNETWEVTLPAEEVPPELPEPALGINFARDGMVEKDWLSLVAVHSDAWLLSVAFYFGARFGFDKDARRRLFTMINNLPTVYEVVTGVAKKQSKAPNGSSKSSKSNSKPSKQINSNSKPVKPAHPNEEEDSGREDAEEDQAYLCGSCGESYANGEFWICCDICEKWFHGKCVRITPAKAEHIKQYKCPSCSTKRSRE

SEQ ID NO: 331436 - protein, 255 aa, Zea mays
  Clone ID: MRT4577_65373C.1.pep
MDGDGGGAGALHHHTRSPEDVFRDFRARRAGIVKALTTDVEKFYQQCDPEKENLCLYGLPNETWEVTLPAEEVPPELPEPALGINFARDGMVEKDWLSLVAVHSDAWLLSVAFYFGARFGFDKDARRRLFTMINNLPTVYEVVTGVAKKQSKAPNGSSKSSKPNSKPSKLTNSNSKPAKPAHPKEEEDSGREDAEEDQAYLCGSCGESYANGEFWICCDVCEKWFHGKCVRITPAKAEHIKQYKCPSCSTKRSRE

SEQ ID NO: 331437 - protein, 64 aa, Zea mays
  unsure (1)..(64): unsure at all Xaa locations
  Clone ID: MRT4577_65374C.1.pep
MVNMGPSYGMSREVQPKIEKKCDEQLXERLVVWIIVQCGPDVCCPDRGRLGFQAWLKNGVILSK

SEQ ID NO: 331438 - protein, 83 aa, Zea mays
  Clone ID: MRT4577_65375C.1.pep
KEGQDRNRMCHPLEAVNLKFSVSINLPMRHYSKIKIISSNAKIICNEIRLVDVFLCSATASTQFKYHHTGIVVYMHQKTKKMR

SEQ ID NO: 331439 - protein, 53 aa, Zea mays
  Clone ID: MRT4577_65376C.1.pep
HSTDYSLYSINMTAIKVAAYPLSFITSSLLYPFKHHLIRHTDHTPAYGRLLCS

SEQ ID NO: 331440 - protein, 60 aa, Zea mays
  Clone ID: MRT4577_65377C.1.pep
PHRAWHLRLLLRAAPRSMNGRHEHSQLKLAIHSMHLDLYVLRPSMDDASISTCFSHMYNN

SEQ ID NO: 331441 - protein, 94 aa, Zea mays
  Clone ID: MRT4577_65378C.1.pep
SPTHSRLAGPHRSACCMAYQNNLHTGPQASKGSKQGCKVFTRHRRRNYWVLKLALMTTMPLAPVDQWCSRAASCLHAQGAHVNPRQRIRRCMCF

SEQ ID NO: 331442 - protein, 60 aa, Zea mays
  unsure (1)..(60): unsure at all Xaa locations
  Clone ID: MRT4577_65379C.1.pep
NQYVQTLYMEMCHKAIILYTLAFIFDNLKTMAAVFKTXFYSVEXELAVLITDDKIHARID

SEQ ID NO: 331443 - protein, 125 aa, Zea mays
  Clone ID: MRT4577_6537C.1.pep
KTTEFFHAGASKERNAHPLQLFIVVRDFLGMVDQACVDIKRKVQQKKPAPSSSQPNTAAAPTVAAVTAAAATTAATASATDGQTAPAQKPPEADSKRKRVMPRFPNLPAHFMKDSADSDSSSDEE

SEQ ID NO: 331444 - protein, 40 aa, Zea mays
  Clone ID: MRT4577_65380C.1.pep
GEDVLYMCVGLLPLIWSVSCPYSRPSAYLFGPYRRASCPT

SEQ ID NO: 331445 - protein, 179 aa, Zea mays
  Clone ID: MRT4577_65381C.1.pep
MDPSFRFDPDSSDDEASGAPARGRLAQSPWEFSLYAESVAAEHARRRTTSIDEKILHLRQGCGKPVLSDGSESDVSGSGEDDSNEKEIEEESGDEEDEREIEGVGDEEESGDREGGEEGGSELGEEKDAHEEEDTVEQNETSGPVDPSNFFASSEGATFHANSFLELNLSRPLVRACEA

SEQ ID NO: 331446 - protein, 74 aa, Zea mays
  Clone ID: MRT4577_65382C.1.pep
RDPPTGCALFGIYNGMFRRRRSAFMTCLHRINGAEAEAAVPPNQKPAAHRDSFLARRPSAMPVPAAAHNGRSRP

SEQ ID NO: 331447 - protein, 56 aa, Zea mays
  Clone ID: MRT4577_65383C.1.pep
RTTCPPSPSLAPSKRAHYMRRKTCSPPPWCRASQRQRLARLARSAPHTLDPRSLGV

SEQ ID NO: 331448 - protein, 557 aa, Zea mays
  Clone ID: MRT4577_65384C.1.pep
MAAANGDACRSVGGVPRPTNPMVTPLLTDLYQFTMAYAYWKAGKHLDRAVFDLYFRKNPFGGEFTIFGGLEECIRFIANFKFTEEEIKFLRSVMPACEDDFFEYLRSIDCSDVEVYAIPEGYAVFPKVPLMRIEGPVAVVQLLETPFLSLVNYASLVTTNAARHRLVAGKSKNLLEFGLRRAQGPDGGISASRYCYMGGFDATSNVAAGRLFGIPIRGTHSHAFVSSFMGLDEITDKTLTSSDGSNTCEDFISLVQNWLIRIQDSSSLHGTFGETSQSELAAFTSYALAFPNSFLALVDTYDVMRSGVPNFCAVALALNDMGYKAVGIRLDSGDLAYLSVEARKFFHAVEKEFVVVGFGKTSITASNDLNEETIDALNKQGHEVDAFGIGTYLVTCYAQAALGCVFKLVEINKQPRIKLSEDVMKVSIPCKKKCYRLYGKEGYPLVDIMTGEDEPGPKIGERLLCRHPFNESKRAYVVPQHVEELLKCYWPGNSSNSREELPSIHEIRTRCIHHLDRMRPDHMRRLNPTPYKVSVSAKLYDFIHFLWLNEAPVGELQ

SEQ ID NO: 331449 - protein, 68 aa, Zea mays
  Clone ID: MRT4577_65385C.1.pep
WRSRSGKLFSSGLSPTTEMRILMVGLDAAELTTILYKLKLGEIVTTIPTIGFNVETVEYKNISFTVWD

SEQ ID NO: 331450 - protein, 77 aa, Zea mays
  Clone ID: MRT4577_65386C.1.pep
GKKCLSFNTPEQSAMSSNGVLNGTEATPNRSKNHENLTQVPTEGFGHAYNQADTDRAMKTNNDKLTFSGVVSLATEI

SEQ ID NO: 331451 - protein, 193 aa, Zea mays
  Clone ID: MRT4577_65387C.1.pep
MKYIHSQELLEIPEGVKVAIKSRIVTVEGPRGKLVKDLSHLAVNFTSTKKNQISIEIHHGVRKNVATLRTVRTLINNLIIGVTKGFKYKMRYVYAHFPINVNVSQNSETDLYEVEIRNFIGEKLVRRIVMHPGVDVEASTTQKDELVLSGNSLENVSQSAADIQQICRVRNKDIRKFLDGLYVSEKGNVVQDE

SEQ ID NO: 331452 - protein, 135 aa, Zea mays
  Clone ID: MRT4577_65388C.1.pep
ISDAVVRSLPTEPKVLDSTQPLLIVLGSVPEMMSQTGTTAPDLPKEIMRPNNAYFPSTSEGSSPRAGGSPVLHPSAPPTGPRYPVAGGGKECGQLRGGEGCGGGRGRRCGTRLGGGQLGQGNGDSGRRSIRPRAE

SEQ ID NO: 331453 - protein, 90 aa, Zea mays
  Clone ID: MRT4577_65389C.1.pep
KRGGPRFFPPEKCTCAPRLVNLRGDPASTPHRFSINMAPFLLSGKATVKFYYQEKTQSREGARRGGQAKYPIMGPPLWGLFFLGGGRRII

SEQ ID NO: 331454 - protein, 42 aa, Zea mays
  Clone ID: MRT4577_6538C.1.pep
ARNNIFLSGRLDPFILKELEFFFFNNLFSLEFGIPPLSKVQI

SEQ ID NO: 331455 - protein, 179 aa, Zea mays
  unsure (1)..(179): unsure at all Xaa locations
  Clone ID: MRT4577_65390C.1.pep
SQAKDKDGINGSGRIGRLGARTPGTASEGELVPDNDPFITTDYRAGGVKYDTVHGPRKERGRAHKDAKTXXXGEKPVTFFGTRNPEENPRGEAGXEQDGEXTGVFTDKDKAAAXLKGGAXRRKKXLIFLVSKXPDGANEDKHTSEXNIXSNASCTTNCLATLAKGIHDNLGIXEGLMTT

SEQ ID NO: 331456 - protein, 47 aa, Zea mays
  unsure (1)..(47): unsure at all Xaa locations
  Clone ID: MRT4577_65391C.1.pep
VPSPHLLPYNSLGRILASRCYLRCHLLPRSLVSPRPKMPDLXLRNRI

SEQ ID NO: 331457 - protein, 66 aa, Zea mays
  unsure (1)..(66): unsure at all Xaa locations
  Clone ID: MRT4577_65392C.1.pep
MARTQQLAVVATAVVALVLLAAATSEAAMGVGGGXXXIAPCISYXRGXGSGPSSGCCSGVWSLIFA

SEQ ID NO: 331458 - protein, 379 aa, Zea mays
  unsure (1)..(379): unsure at all Xaa locations
  Clone ID: MRT4577_65393C.1.pep
MDPLSVLRDYAGRNELDKIIFSGDEIHFGSDYTFPASTPTAFASKQSGRPYPLSAAVFLAQHHDLKHTDFIQAARLRRIPPVSLPDRKTFLDFLRFGHNSLPSADPLLPSAFQPQEPHLHPPSPPPEDPAAAEEATTGKQIRALERPFKDRNTILDARGRDFLAVFHAAVRRQDEQLKGGGKDAAPSSRPNSGSVAAALAKPKVLDRSLGGRXVPIILVPSASQTLITIYNVKEFLEDGVFVPSEERVRATKGGKPESVTVQKKLIRTERAGGAGGAVSFEVRDKPASLKSDDWGRVVAVFVLGKEWQFKDWPFKDHVEIFNRVIGFYVRFEDDSVEAAKVVKQWNVKIISISKNKRHQDRTAALEVWERLEEFMRART

SEQ ID NO: 331459 - protein, 86 aa, Zea mays
  Clone ID: MRT4577_65394C.1.pep
PQYHRQRPRRRNRHRRQIRIRRTIRHHRIRTHHIHTRHHQRLPLMPIIQIKIPTTITILLEFIRNKVELSRTRTHNSQATSFTNRP

SEQ ID NO: 331460 - protein, 133 aa, Zea mays
  unsure (1)..(133): unsure at all Xaa locations
  Clone ID: MRT4577_65395C.1.pep
KGQAERAILSDAIRVVGELRSEAKKLKDSNENLQEKIKELKAEKNELRDEKQRLKAEKESLEQQIKFLNARPSLVPHHPVIPASAFPAPQGPAXPPGTXMMPVIGYPGFPMWQFMPPSDVDTSDDPRSCPPVA

SEQ ID NO: 331461 - protein, 86 aa, Zea mays
  unsure (1)..(86): unsure at all Xaa locations
  Clone ID: MRT4577_65396C.1.pep
MRRRRSQAVQQLGEVDPSAGGYKLYEKHEAKKDPXLAHRHMITEEVAAVADGGAGSYVFNEHHEKKKDHKDAXRRPAERRXHHLFG

SEQ ID NO: 331462 - protein, 64 aa, Zea mays
  Clone ID: MRT4577_65397C.1.pep
RRVYKLCFREGNEEALHFDAHVLEVQRKQHDIRGCRCVFLVEYDHDQSQERVSLRRLSRRPKYF

SEQ ID NO: 331463 - protein, 121 aa, Zea mays
  Clone ID: MRT4577_65398C.1.pep
KGQAEREVCSLVRQDNDCILVCSLIFFSLHIIVFVNYHCTYDILFVRFLELGAILEPGKTPKMDKTAILNDAIRVVGELRSEAKKLKDSNENLQEKIKELKVYTISCGQVINGAVQMGGGT

SEQ ID NO: 331464 - protein, 269 aa, Zea mays
  Clone ID: MRT4577_65399C.1.pep
MERRSSVRFVPSEIARMEKLAADRKDQVFDNKFCQKLAEEFNRSVGRAGSKALQATQVQGWFLNKFPASATKPTCVPTASQEKTSASEINVSVSEKRSAASEEKLFPLDTGVSNNEDEVSPVFPLETKDMIPELEDLEFEAKSTKDFAWYDIALFLAHRRNRAGEVEVRVRFEGFGADEDEWVNVKKFIRQRSIPLESSQCKSVVEGDLVLCFREGNEEALHFDAHVLEVQRKQHDISGCRCVFLVEYDHDQSQERVSLRRLSRRPKYF

SEQ ID NO: 331465 - protein, 58 aa, Zea mays
  Clone ID: MRT4577_6539C.1.pep
NGNGIHVPDWGHNKVISFSVGDLFIERHLLPSVLYLRLMWAPPSRVCCPPRGYRRLRG

SEQ ID NO: 331466 - protein, 80 aa, Zea mays
  Clone ID: MRT4577_653C.1.pep
HTYSRSQNLLHVRRGDITCLARLRGESFAYTGARPGREPALRRASPDAFRSPNQAFEAVDSMISSDLVSSITNSILAPMC

SEQ ID NO: 331467 - protein, 252 aa, Zea mays
  unsure (1)..(252): unsure at all Xaa locations
  Clone ID: MRT4577_65400C.1.pep
MASPEGTTWVFDCPLMDDLAVAADFAAAPAGGFFWAAPPSLQPQAPVQSVVAASAPNPCMEISSSVDCGQEKEQPTNKRPRSESTTESSTKASREKIRRDKLNERFLELGAILEPGKTPKMDKTAILSDAIRVVGELRSEAKKLKDSNENLQEKIKELKAEKNELRDEKXQRLKAEKESLEQQIKFLNARPSLVPHHPVIPASAFPAPQGPAXPPGTXMVPVIGYPGFPMWQFMPPSDVDTSDDPRSCPPVA

SEQ ID NO: 331468 - protein, 56 aa, Zea mays
  Clone ID: MRT4577_65401C.1.pep
LNFIDSLSCRRGKSTRLEHLGCHLGFVKSPYASCGFMSSSYNFLWHQPIPRLYINY

SEQ ID NO: 331469 - protein, 36 aa, Zea mays
  Clone ID: MRT4577_65402C.1.pep
GQLQTAKYSISSIEPPTTKWMMKILAWLLLHSLTNC

SEQ ID NO: 331470 - protein, 121 aa, Zea mays
  unsure (1)..(121): unsure at all Xaa locations
  Clone ID: MRT4577_65403C.1.pep
KCLKYAFILRGRFLRGWSIQHSGIGVWARVTFGCELKDFLMMXADAYETREEAAKRLLAAKAPAGIWKDHXMRNXSLTVNAMEWXNPVITNSKGIQDVDHPAEGFYMRCGIVAILTNATIN

SEQ ID NO: 331471 - protein, 117 aa, Zea mays
  Clone ID: MRT4577_65404C.1.pep
IGPTSSLSCTRWQLRRRSLAYLATVAAAPARSQGFGAGAAASARPPAWPWCRRRCRRGGGSACSCIVDARASLPRCFHASYSFLSSITDRSNVRARLEGALSRTRLVDGDAHPHGLG

SEQ ID NO: 331472 - protein, 50 aa, Zea mays
  Clone ID: MRT4577_65405C.1.pep
SIVLHLLNWKNLDFPNLNRFQLIPPLPNCLITNKPLTICLSNQLPILNLN

SEQ ID NO: 331473 - protein, 212 aa, Zea mays
  unsure (1)..(212): unsure at all Xaa locations
  Clone ID: MRT4577_65406C.1.pep
HFVPLCQGATTREERGAQGKSLQKNARVPQTLLPLPPQEDTEAPAPLLLTISSLLRAISKMXPLCPSPAVIALFFALVTACFLRSSVVVVRLVPPLLEMLGGLILLCLDAEALLVAHYYYLLASFVNPLDHLSVFLYINNYILLSQLDHGLLARHVPGPAPARVAFVCSGPLPLSSLVLASRHLTFASFAXYDFCGEANDXRARRLVLGRRR

SEQ ID NO: 331474 - protein, 139 aa, Zea mays
  unsure (1)..(139): unsure at all Xaa locations
  Clone ID: MRT4577_65407C.1.pep
KKKEPWGKEISFGENKKGLGGKQKNFFFLKGWEKKILIFKGVQALPQIFVXKKKGKKGFSKWGFSKALKKKKIXKKKRGKKSLNTNKFFKPXKGKRXYNPNGPGPGKGPGGVPGGLNRGFWGPNFFPPGEKPGQFPPPG

SEQ ID NO: 331475 - protein, 93 aa, Zea mays
  Clone ID: MRT4577_65408C.1.pep
AGQLLICQIDEGQIPSLVLIIRCSTMLYVLHSLDEIRINAGHICYNADVSACHSLLRNIFMPRYGTLPAPVEASVASGAQVLLMPSDVQLEAV

SEQ ID NO: 331476 - protein, 70 aa, Zea mays
  Clone ID: MRT4577_65409C.1.pep
ELTRWWPPFVFFFGRDLVPTRARTYAILDQLWRMTEATTVANGFTASCSLLHTLFTCWILTPPLQDSQPP

SEQ ID NO: 331477 - protein, 225 aa, Zea mays
  Clone ID: MRT4577_6540C.1.pep
MSTTTEAAKSGSAAPVRCQRIGCDAVFTDDDNREGSCQYHPSAPMFHDGMKEWSCCKQRSHDFSLFLQIPGCTTGKHTTEKPITKAVSSNRTKATPIQSSKQGVGVDVCARCRQGFFCSDHGSQPKPQKPAATDDSNKEPVEKSAVPPPKKRIDVNELRTCKNKGCGKSYKEKDNHDSACDYHPGPAVFHDRMRGWKCCDVHVKEFDEFMEIPPCTKGWHNADAV

SEQ ID NO: 331478 - protein, 503 aa, Zea mays
  Clone ID: MRT4577_65410C.1.pep
MLTSQSCGRDPNRREMIRRQPGMDRFLQLLAAGVAVLLLVAPPALADDDIVEVGVNWGSQLSHPLLPGSVVKMLKANRIARVKMFDADSWPVGALVDSGIEVMLGIPNDMLETMSSSYGNAQDWVKENVTAYGDKLKLKYVAVGNEPFLKAYNGSFMKTTFPALKNIQKALDEAGVGDTVKAVVPLNADVYVSPDDKPSSGAFRPDINGLMTDMVKFLHDHGAPFVVNIYPFLSLYQSDNFPFEFAFFDGGKNIQDKGGVTYSNVFDANYDTLVHALKKAGVPDLKVIVGEAGWPTDGNKYANFKLARRFYDGLLRKLAKNEGTPVRKGKMEVYLFGLFDEDMKSIAPGNFERHWGIFTYDGKPKFPIDLTGQGHEKLLSPVTDVKYLPNQWCVFDDGAEDKSKLPSNVQYACASGDCTALGYGCSCNGLDEKSNISYAFNMYFQMQDQDVRACDFEGLAKITDKNASTRGCLFPVQIISASGRVAPALLLAALLALLVIVFV

SEQ ID NO: 331479 - protein, 240 aa, Zea mays
  Clone ID: MRT4577_65411C.1.pep
RPRQHVPPPPPLEPAAAEEAEAEEEEGGGGERRQSQRRRRRARRKRQQQEEGAASEGGGGDGADGAAAKATGKEELLPRRPQFPLASVAGALQRRIHARYDDLARASEAQCLTIEQVNEFLNCLVDARNELLQRYENVQRSFKIKKAMLSNHRNYRTSYDRLFEQVRRLETESDSLKKDAAIYNFVQERLQKSAPYKMIMELSAMELEAQEISFEELLAREKEDTAFWQRNGKMRSVSSK

SEQ ID NO: 331480 - protein, 396 aa, Zea mays
  unsure (1)..(396): unsure at all Xaa locations
  Clone ID: MRT4577_65412C.1.pep
SIAAKKAVVNYSTENLDAPILSIEEAVKRCSYFETPPFLLPLKIGDFSKGMAEADQKIYSEVKLNSQYYFYMETQAALAIPDEDNCMVVYSSSQCPETAQNVIAKCLGLPCHNVRVITRRVGGGFGGKAVRSLPVATACALAAFKLHRPVRMYLDRKTDMIVTGGRHPMKICYSVGFKPDGKITALHIGLFINAGMTKDISLIIPHNFIEALKKYNWGAFSYEAKVCRTNLATKSAMRGPGEVQGSYVAEAIIEHVASTLSADANLVRRKNLHTVESLALFHSECTEDAMGYTLHSICDQVTASENYQHRLEIIQSFNKNNKWKKRGLXFVPIVHKGLSRPTPGKVSILNDGSVAXEVGGIELGQGLWTKVKQMTAFGLGQLWPNRSQELVERIRV

SEQ ID NO: 331481 - protein, 141 aa, Zea mays
  unsure (1)..(141): unsure at all Xaa locations
  Clone ID: MRT4577_65413C.1.pep
ATRNTPRLLDYFVSTVLLTELEYGALRLQAYSQHSTQARPRRFLWPDLVXASDIALRNTAEDEXCLWRYHERRVHXRGFQEGDLEPRIRQYNCGHHMLTPRCEGPFIITKVLKPWTYKLCNEEGESYDNAWNIGXLRRFYP

SEQ ID NO: 331482 - protein, 47 aa, Zea mays
  Clone ID: MRT4577_65414C.1.pep
IEMKAMYGCRMVELGIMNEPYRTCLKLYALCLNVEKFLTVRSSILVD

SEQ ID NO: 331483 - protein, 62 aa, Zea mays
  unsure (1)..(62): unsure at all Xaa locations
  Clone ID: MRT4577_65415C.1.pep
MVPIKIGINGFGRIARLVNRDALQSPDAELVXVNDPFXITTDYMTYMFKYDXTVHGQRKHHE

SEQ ID NO: 331484 - protein, 97 aa, Zea mays
  Clone ID: MRT4577_65416C.1.pep
ATRTPSIFLHGTVTRAAGRLMLLAMATTGAQTITVPSFAPKECDNGAPRVSVRERGIDLAVATRTGEPEMDYQGVAHRGSELDLAHLNDALDQDFKK

SEQ ID NO: 331485 - protein, 72 aa, Zea mays
  Clone ID: MRT4577_65417C.1.pep
FAPASTMIVQSPCESLVDISIVASRYLCSVCKRCRSSEHVSQDGTVSCSRSSTSWQLDWLVRTKRGLCLVFR

SEQ ID NO: 331486 - protein, 83 aa, Zea mays
  Clone ID: MRT4577_65418C.1.pep
CSCCRTPRLVGFWFAPIESPPDGPACFSCSLNSQFLKFFPVFIPLIPKECGFFPYRNEFSYEETCVCGSFVIRLRPPKESFLL

SEQ ID NO: 331487 - protein, 214 aa, Zea mays
  unsure (1)..(214): unsure at all Xaa locations
  Clone ID: MRT4577_65419C.1.pep
VDPRRPAGRGRGDALLGRRRASRLEGLRDRPATRRARXXDFFDLAAGXPAXXGVLXXAMLFLRGXTARPXVQRPNEALAXXXREHRRXRAGXGAAGAXPWXEAVPRAPPAAGPGXFFRSAFXXDATLRDTVAPLLVPCHDLATAAPFVFSRADAVESDSFDFRLRDVCAATXAAGGALASVRSVDGATAIAAASGGVAAMGNPAAAAITHVLHN

SEQ ID NO: 331488 - protein, 202 aa, Zea mays
  unsure (1)..(202): unsure at all Xaa locations
  Clone ID: MRT4577_6541C.1.pep
VVLIVLWTRQRQVSRDADDRDEREEEEGRQSSKTEGRPVASTERWSPRRRWRRPSRWLHRGVTTLVVTVGHGRSDSGAAASRSAPREEGEAGAQNXRRRGRRRSXRPGRDDARPRLTLLLARPRRSCRDRRSAPRGGPRRRRRRRRISPPRPHRRDRVPRRSRGRRRSRGGGARRSRTAPRRARRRGAAGAPRRGGAEEEPA

SEQ ID NO: 331489 - protein, 104 aa, Zea mays
  unsure (1)..(104): unsure at all Xaa locations
  Clone ID: MRT4577_65420C.1.pep
SKNSFKNMACVLILNPYVGPAVYMATLAETDSVKASKEKLYSQQDQSFPEYCQGLXSAGKAWYKTMVLDSDYTEFHYFSKGLGVTHLAGKGSSVLSSSAYVDSK

SEQ ID NO: 331490 - protein, 36 aa, Zea mays
  Clone ID: MRT4577_65421C.1.pep
NWSAGSSNLDGLVCEIARRCVSSHAGRPYLRALSDA

SEQ ID NO: 331491 - protein, 37 aa, Zea mays
  Clone ID: MRT4577_65422C.1.pep
SQGTYLLLFNLPYFSSPVRHKTCSMVKNSALRYIINY

SEQ ID NO: 331492 - protein, 352 aa, Zea mays
  Clone ID: MRT4577_65423C.1.pep
MSSLAVGTSNGGSGDAAAGGAARRNTRMPKYSKFTQQELPACKPILTPNLTPKWVVSVFFIVGVIFVPIGVVSLLAARDVVEIIDRYDEACVPGNMTENKLAYIQNETLSKECIRNLTVTKDMKQPIFVYYELGNFYQNHRRYVKSRNDAQLRDASKANQTSACEPEKTTANGQPIVPCGLIAWSLFNDTYNFTRGNENLTVDKKDISWKSDREHKFGKDVYPSNFQNGALKGGATLDPKIPLSEQEDLIVWMRTAALPTFRKLYGRLYFDLKENDTITVRLNNNYNTYSFGGKKKLVLSTATWLGGKNDFLGFAYLIVGGLCIFLAFAFTLLYFVKPRKLGDHNYLSWNRR

SEQ ID NO: 331493 - protein, 90 aa, Zea mays
  Clone ID: MRT4577_65424C.1.pep
VVSVFFIVGVIFVPIGVVSLLAARDVVEIIDRYDEACVPGNMTENKLAYIQNDTLSKECIRNLTVISLDLFTVWNTTWHRKSNSAIKQFL

SEQ ID NO: 331494 - protein, 69 aa, Zea mays
  Clone ID: MRT4577_65425C.1.pep
MAKVHLYIAADCAVVLALATPALDGDPDMLHDVCPAEYASPVKLNWYAGKANFSADDYIFDGLRNLGNI

SEQ ID NO: 331495 - protein, 137 aa, Zea mays
  Clone ID: MRT4577_65426C.1.pep
STSRWRTKGGAPAGTQRSRAKIPLSEQEDLIVWMRTAALPTFRKLYGRIYIDLKENDTITVTLNNNYNTYSFGGKKKLVLSTATWLGGKNDFLGFAYLIVGGLCIFLAFAFTLLYFVKPRKLGDHNYLSWNRRHAGR

SEQ ID NO: 331496 - protein, 134 aa, Zea mays
  unsure (1)..(134): unsure at all Xaa locations
  Clone ID: MRT4577_65427C.1.pep
CRVRVGRGRIRRRVRSFVILYSVLIRRRMVGLSVRVSVLSRRVLLCCRRRRVKRCVIRIMRLRWSRLLRFVILFVLRRSSSRLVRIVGGFVFSSSFECRVCXLAAAPRSSVRYRTIDILHTYVRDVTMTRRTYV

SEQ ID NO: 331497 - protein, 96 aa, Zea mays
  Clone ID: MRT4577_65428C.1.pep
MEGLIPFIYRAVVRYRKEEGRVSLGDLFFDEPSSPTSYFRLPGGADSARYQQVTSSDLLTSQTTTSTASSGAAGVARRRSPMRCPSHRRRPVSTDP

SEQ ID NO: 331498 - protein, 106 aa, Zea mays
  unsure (1)..(106): unsure at all Xaa locations
  Clone ID: MRT4577_65429C.1.pep
RGWLGLAGGSACRPPVSTIRPLRYGLFRRGPRGIRKPLTYHLVLSGVRLNYYKLGSLSKGTLTYGSVPSRTTLAFLRSARFQXRARAQLWRSTKCLVSTCXTDSLA

SEQ ID NO: 331499 - protein, 119 aa, Zea mays
  Clone ID: MRT4577_6542C.1.pep
DKWPATEGGLLSRETPKAKIRLRRHALLTKHDIEVCNNDYDGLEHKNLPMSEEIARKRLCPTNRQERHPKLYKGKTNGCSTLLTQHMTSDTELKNRSTRKSKKTLRLLAILEITNDEDN

SEQ ID NO: 331500 - protein, 505 aa, Zea mays
  Clone ID: MRT4577_65430C.1.pep
MVLLELLIVGSTLVLSLYVRFWRSRNGPLRPVDWPIVGVLPALISMLHNLHHEVTVILAASGCNFKAQGPVGSGMRFFFTADPANVRHIFTSNHANYPKGEELAEIFDIVSGSILTVDGEACRQQRGMFQTVLSNQRVLELMFRCCRHKVVHDLLPFLARMESSGTPFDMQDLMTRLIFDLTATPIFGVDPGCLSTMMPSMHVSAAMDTVMEVGLLRHTVPTSCWKVMRQLNIGPERKLAVAHTLLHEFITEMMVKSKARCSDPAGEIAAMDIISGDPAYSSDAAMLRKILINYMIAGRDTVGTTLPWVFYNLAKDPRVVSGIREELAHIASLKASGTKNMVFFEPEETKDLVYLQAALFETLRLYPPGPFERKMVLADDVLPSGHRLCSGETILISIYSMGRMEALWGKDCDEYRPERWFTEDGAKLRYVPSHKFMAFNSGPRMCLGKDIAITQMKTIVAAVVWNFHLEMLEGQSIHPKLSCILQMKNGLKMKVKKRQEKRDLQ

SEQ ID NO: 331501 - protein, 45 aa, Zea mays
  Clone ID: MRT4577_65431C.1.pep
IYNILFGMITKILPGFQIISYFRGAGELFFQQPKVLPGFWKMNWG

SEQ ID NO: 331502 - protein, 147 aa, Zea mays
  Clone ID: MRT4577_65432C.1.pep
ASAFLPFFLPRFLLLRHMLDRMRPEDVGLSPDLSFFRARDATRGGGTPTITHTTIYKCPNFSMVILFLPRNAVIPLHNHPGMTVFSKLLLGSMHVKSYDWLNTADPDPSSATSTTSSSSSDGPCLRLAELVVDDVFTAPCDTSVLDP

SEQ ID NO: 331503 - protein, 268 aa, Zea mays
  Clone ID: MRT4577_65433C.1.pep
MMSSCRCTRVGTHVWETGSCLCSAVVAAGEDVERGQGHGHLARLEEIDMDRMRPEDVGLSPDLSFFRARDATRGGGTPTITHTTIYKCPNFSMVILFLPRNAVIPLHNHPGMTVFSKLLLGSMHVKSYDWLNTADPDPSSATSTTSTSSSSSDGPCLRLAELVVDDVFTAPCDTSVLYPTAGGNMHRFTAMAPCAILDVLGPPYSIEEDRDCTYYAELPYAHHSLVAAGDDVERGQGQGHLAWLEEIDMPRELKMCSVHYGGPPISDE

SEQ ID NO: 331504 - protein, 54 aa, Zea mays
  Clone ID: MRT4577_65434C.1.pep
WHTKTNITLYLKKKKKKKKKKKKKKKKKKKKKKKKKKKKKKKKKKKKKKKGRPF

SEQ ID NO: 331505 - protein, 235 aa, Zea mays
  unsure (1)..(235): unsure at all Xaa locations
  Clone ID: MRT4577_65435C.1.pep
MATATAALGRVASPRLVMGYLLFLTVASLLLFSPRAAAQAWQLCGNTGNYTANSTYQSNLESLAKALSANASRSRNLFAEGSVGAVPYVVYALALCRGDTNATACGSCVATGFQDAQQLCPYKNDAAVVYDDCYLRFSNQDFIASTTDNGNDNIILMNTQSVSSPVQAFDAAVVMLLNATGDYAAAXSSRFATGGRGLXASYPTIYGLTQCTPDMSSADCRSCLGSIISAMPGSL

SEQ ID NO: 331506 - protein, 69 aa, Zea mays
  Clone ID: MRT4577_65436C.1.pep
VKEYKGFTRLRRGKTRANQFQLCKTTPNKKNLRHPKVKLEPLKRPPVIFKFLKKDALFFFFLLKKKKKI

SEQ ID NO: 331507 - protein, 80 aa, Zea mays; identical to SEQ ID NO: 224569
  Clone ID: MRT4577_65437C.1.pep

SEQ ID NO: 331508 - protein, 76 aa, Zea mays
  Clone ID: MRT4577_65438C.1.pep
MSCSCGSSCGCGSSCKCGKKYPDLEETSTAAQPTVVLGVAPEKKAAPEFVEAAAESGEAAHGCSCGSGCKCDPCNC

SEQ ID NO: 331509 - protein, 107 aa, Zea mays
  unsure (1)..(107): unsure at all Xaa locations
  Clone ID: MRT4577_65439C.1.pep
LLSENDALLRHAVAPMKSKFLKYWRDIPMLYAFAFILDPRAKLRGFSNILRILSGLSGTDYSLYFTCVKNELFTMFNKXDVGRGALRQQVPRPPAVTGQRQQPWGVI

SEQ ID NO: 331510 - protein, 281 aa, Zea mays
  Clone ID: MRT4577_6543C.1.pep
MPGSDDVTPGSAPPITSTVVTSIDVTTAATNQFHRCTTGKHTTEKPITKAVSSNRTKATPIQSSKQGVGVDVCARCRQGFFCSDHGSQPKPQKPAATDDTNKEPVEKSAVPPPKKRIDVNELRTCKNKGCGKSYKEKDNHDSACDYHPGPAVFHDRMRGLFSPSLNPISVLFLQWKCCDVHVKEFDEFMEIPTCTKGWHNADAFIEDFIWKCDKSFEDGLRAAGCLSFAHGSCLEILRDSPCTLDHIWCLDSNWGFVCLKPKDANILTMSKPEKLAHAVER

SEQ ID NO: 331511 - protein, 100 aa, Zea mays
  unsure (1)..(100): unsure at all Xaa locations
  Clone ID: MRT4577_65440C.1.pep
DGVFYAHLNEMLTRELADDGYSGVXSQRQHRMSPXRTQSISRPSRNXNVLCAKGRRXRELTSVVHNTFNFPENGVELYAEQVVNRGLCTIAEAXSLRYKL

SEQ ID NO: 331512 - protein, 139 aa, Zea mays
  Clone ID: MRT4577_65441C.1.pep
AGTRSLVFLLHLCSRSLPWPPQPSPMVAELAQPPLYWWLAPISLRRASSPCSSSPSAPSCPCARSSSKSRLGAIPIDHACSCTFNSSSCMVEPSSPRPTSDSRHRSACRRPLVNARTSNLVVDAVLRAPTIVGTCSQML

SEQ ID NO: 331513 - protein, 112 aa, Zea mays
  Clone ID: MRT4577_65442C.1.pep
AYPFLDKIGFQEGQQPPKMKKDRRFTPLSWDSKPDPGLFFTNLTSKKKQVPLNHFILGGYKLRPNMHQFTAAPSLREFNGFKTFSPIRLDPTKVVPGKYIAPVRNPRVRVSK

SEQ ID NO: 331514 - protein, 88 aa, Zea mays
  Clone ID: MRT4577_65443C.1.pep
MAAPAKASWMVAMSVGAVEALKDQAGLCRWNYALRSVHRTAKANVRGGASQGKKQLPASAAAVAERRRAENSEEGLRTVMYLSCWGPN

SEQ ID NO: 331515 - protein, 79 aa, Zea mays
  unsure (1)..(79): unsure at all Xaa locations
  Clone ID: MRT4577_65444C.1.pep
MMAPTTSLLALVFLXLLPAAAXXXPPATGDAAAFNVTEILSRYPEFKLFNLLLSKTRVAREVNRRSAVTVLVPDNSAVD

SEQ ID NO: 331516 - protein, 143 aa, Zea mays
  Clone ID: MRT4577_65445C.1.pep
AKALVLGLPQNFWWPPEEWLPPPSFLQEQGRPFSATSSSSCGSWASFLSFPGVGGASPPREGVFWPRWLEGFFFKLYPSHIWFSIMSCLIVEMASLFLPFGLGFLCLENPGLSSFGSPCFFPGALFFKPFLFVWEGFELFSLP

SEQ ID NO: 331517 - protein, 127 aa, Zea mays
  Clone ID: MRT4577_65446C.1.pep
CPCVRQPAAAAAAPPAPARRCSRLAFTTHSLARSALHPLAFFLLPSRSRTLLRSHRIASHRQTHSKVDRRPTRTWPFIGAGCRSRPPAPPADGCAAARTLTHSPASPSSRQRLDSRRCTSEDIAGRR

SEQ ID NO: 331518 - protein, 69 aa, Zea mays
  Clone ID: MRT4577_65447C.1.pep
YFLFFFFFGNRGVFGKLWGLYQDAGNEDRTPPFETAFESNFTRNPQKSLTFHTPTTNIRHCEGNHKEDC

SEQ ID NO: 331519 - protein, 111 aa, Zea mays
  Clone ID: MRT4577_65448C.1.pep
HKTVIQVSSLGTLGFNSFFTSFMWTVVVFFFSMSTSCVASTLHSRIHASHHCTLLLSNLILRLSQISLTSCFVVVKKTSIFIVDSKGTKAYDLSSVVNPSIPFNSYLTKIV

SEQ ID NO: 331520 - protein, 208 aa, Zea mays
  Clone ID: MRT4577_65449C.1.pep
PVSVLLFDLLFVQPFYSLQFYQNGYGIIFLAMFVTATLISSLTSKVTAQMAASVAAATQSQVLSDLSLQLLTDGKPAALSALTQQAILNYFKRPVAIYFQRQQFVGQIPTPDATSHEVMQWVWHHGLPAGAGTDTLAGKKAFYLPIGYQGHTLAILVGQGEDFTLADRLILDRFLTPLSAALKTFYLRQEAERHALEKLDAHLKSIYC

SEQ ID NO: 331521 - protein, 86 aa, Zea mays
  Clone ID: MRT4577_6544C.1.pep
SFLLSGCRKMFQMGACCLSCAVKVSLSYRRLDRCALCRAIRLQNVSRLRIVENVCISVVLQHPEWFDKPCLCGTKTKMLFSKKGRP

SEQ ID NO: 331522 - protein, 82 aa, Zea mays
  Clone ID: MRT4577_65450C.1.pep
CLSCLSLSQALSRCVIAVAVCLSVPLLRATTALFCLPIPSTPPLCFALMSTGRLTSPSSPYRLRDALINLVAKIYSKQYNQI

SEQ ID NO: 331523 - protein, 47 aa, Zea mays
  Clone ID: MRT4577_65451C.1.pep
IHASSLIRNSSRLKANHKQHNDNDFNRGEFHWMGNHLYRSYVWVSLT

SEQ ID NO: 331524 - protein, 110 aa, Zea mays
  Clone ID: MRT4577_65452C.1.pep
ETEQRAYLSKQSSHFTVVFLPLQTDLRRSGIRDIYQAPATIESPHGCFASLKLAHRRSVQIRLHQKVITLLNNCLHNFKPSYTMPSKKTHVVQTDVTIKDRAFNTKTCNI

SEQ ID NO: 331525 - protein, 62 aa, Zea mays
  unsure (1)..(62): unsure at all Xaa locations
  Clone ID: MRT4577_65453C.1.pep
KDAMPYKILWAQTXHVNCFSCKEFSSMTKQDYQHPNKRKEHTRTIIYSNRTSENPKRLIFTN

SEQ ID NO: 331526 - protein, 43 aa, Zea mays
  unsure (1)..(43): unsure at all Xaa locations
  Clone ID: MRT4577_65454C.1.pep
MVSCMLSXTTVPLQXGGGLFEFFGLRSSVLLSMRXNAISDDFM

SEQ ID NO: 331527 - protein, 188 aa, Zea mays
  unsure (1)..(188): unsure at all Xaa locations
  Clone ID: MRT4577_65455C.1.pep
IGTSSRPGPTAWAKLVFYLQNCGXSCMLLAAHDDRPDDIDQLXLLDKKVGXPVYSXGTEMKPSQIAKNASKEAKACNAGAIITXTAGTLQADKXMMNDLKEVSKXVNPTQVFLWMMCMTAQEAAVLLSSFSDETGITVAILTMLDVDSRGAATLIALEVSEKPLRFVGQGERIEHLETFYPDRMVHGI

SEQ ID NO: 331528 - protein, 73 aa, Zea mays
  unsure (1)..(73): unsure at all Xaa locations
  Clone ID: MRT4577_65456C.1.pep
LLLLGFXGPGGTPATTTYPTHVSSLCTVQGGRGGXNFTFLLWGGGGELFLXILFYVRDLVLSGDLLRGRGKGE

SEQ ID NO: 331529 - protein, 110 aa, Zea mays
  unsure (1)..(110): unsure at all Xaa locations
  Clone ID: MRT4577_65457C.1.pep
PPEETGIGGFVKTHKTNAYFKRSQVYAKRRRAGXTDYCATIRLINQDKNSCITPTIDSAVRFTNXKDITAXQIMCARIERDLELALTYWTEQSLNRGEVGLTNYAAAYST

SEQ ID NO: 331530 - protein, 55 aa, Zea mays
  unsure (1)..(55): unsure at all Xaa locations
  Clone ID: MRT4577_65458C.1.pep
QRRVRGTCRHIHHWIKLKLKMPICSTIQKPDIRHFSVSGXAAALKPSDEPFDGTF

SEQ ID NO: 331531 - protein, 240 aa, Zea mays
  unsure (1)..(240): unsure at all Xaa locations
  Clone ID: MRT4577_65459C.1.pep
LAKGGKRGAGGAADMNHAAAHAGLRSHLAGPNNESVSRHHLPSSSSQSSKRRCNLSFTTGGARVCSQNGVQMLSPSEIPHRDWFPSDFTFGAGTSAYQIEGAWNEDGKGESSCDHFWHNHAERILDGSNSDIGANSYHMYKTDVRLLKEMGMDTYRLSISWPRILPKGTQEGGINPDGIRYYRNLINLLLENGIEPYVTIFHWDVPQALEEKYGGXLXXSHKSIVEDYTYFAKGVLDNFG

SEQ ID NO: 331532 - protein, 88 aa, Zea mays
  Clone ID: MRT4577_6545C.1.pep
REPVEKSAVPPPKKRIDVNELRTCKNKGCGKSYKEKDNHDSACDYHPGPAVFHDRMRGWKCCDVHVKEFDEFMEIPTCTKGWHNADAV

SEQ ID NO: 331533 - protein, 125 aa, Zea mays
  unsure (1)..(125): unsure at all Xaa locations
  Clone ID: MRT4577_65460C.1.pep
LRIREKKYKAVGRLLMDSILTLFXGPCTAHCLDLMVEDIGYLXRLIAQAKRVTTFIYRHGGILSAMREKIGGXDPLRPAATRFATFLTLKSLHKHQDALRALFVRCMELQQVGKDRGWKGGVILF

SEQ ID NO: 331534 - protein, 47 aa, Zea mays
  Clone ID: MRT4577_65461C.1.pep
FTLELARYVSGLVKIAKEVCELAWVQAIPGVAQGPAESGGVHIVQLQ

SEQ ID NO: 331535 - protein, 463 aa, Zea mays
  unsure (1)..(463): unsure at all Xaa locations
  Clone ID: MRT4577_65462C.1.pep
MAPLLAAAMNHAAAHPGLRSHLVGPNNESFSRHHLPSSSPQSSKRRCNLSFTTRSARVGSQNGVQMLSPSEIPQRDWFPSDFTFGAATSAYQIEGAWNEDGXXXSNWDHFCHNHPERILDGSNSDIGANSYHMYKTDVRLLKEMGMDAYRFSISWPRILPKGTVEGGINPDGIKYYRNLINLLLENGIEPYVTIFHWDVPQALEEKYGGFLDKSHKSIVEDYTYFAKVCFDNFGDKVKNWLTFNEPQTFTSFSYGTGVFAPGRCSPGLDCAYPTGNSLVEPYTAGHNILLAHAEAVDLYNKHYKRDDTRIGLAFDVMGRVPYGTSFLDKQAEERSWDINLGWFLEPVVRGDYPFSMRSLARERLPFFTDKEQEKLAGSYNMLGLNYYTSRFSKHIDISPNYSPVLNTDDAYASQEVNGPDGKPIGPPMGNPWIYMYPEGLKDLLMIMKNKYGNPPIYITENGK

SEQ ID NO: 331536 - protein, 252 aa, Zea mays
  unsure (1)..(252): unsure at all Xaa locations
  Clone ID: MRT4577_65463C.1.pep
APLLSAAMNHAGDHPVLRTHLLGPFNESFSRHHLPSSSPQSIIRMRNLXSFTTPSARVGTHNGVHMVSPSETPQSDXFPSDXFSFGAATSAYQIEGAXKEDGKGDSHWDHLCHNHPERILDGSNSDIGANSHHMYKTDVKLLXEMGMDAXRFSISWTRILPKGTKEXGIIPDGIKYYRNLINLLLEYGIEPYVTIFHXDVPQALEEKYSGFLDKSHKSIVEDYTYFARVCFDNFGDKVXNWLTFNEPQTFTS

SEQ ID NO: 331537 - protein, 263 aa, Zea mays
  unsure (1)..(263): unsure at all Xaa locations
  Clone ID: MRT4577_65464C.1.pep
MAPLLAAAMNHAACHPGLRSHLPRPNNESVSRYHLPSSSPQSSKRRCNLSFTTRSARVGSQNGVQMLSPSQIPQRDWLPSDFTFGAATSAYQIECAWNEDGKEESNWDHFCHNHPERILHGSNSDIGANSYHMYKTDVRLLKEMGMDAYRFSISWPRILTNGTIEGGINPDGIKYYINLINLLLENGIEPYGTIFHXDVPQALEEKYSGFLYKSHNSIAXDYTYFANVCFDNFGDXKRRXLTFYETQTFTSFSXYGTEVSAPG

SEQ ID NO: 331538 - protein, 76 aa, Zea mays
  Clone ID: MRT4577_65465C.1.pep
CFNQWICSYSLGSNVQGSSAWYLLHNFEWFPGFTERYGIVHVDRNNICTRYIKEFAKWFKQFNAAKKPSKKFLTPA

SEQ ID NO: 331539 - protein, 474 aa, Zea mays
  Clone ID: MRT4577_65466C.1.pep
IEGAWNEDGKGESNWDHFCHNHPERILDGSNSDIGANSYHMYKTDVRLLKEMGMDAYRFSISWPRILPKGTKEGGINPDGIKYYRNLINLLLENGIEPYVTIFHWDVPQALEEKYGGFLDKSHKSIVEDYTYFAKVCFDNFGDKVKNWLTFNEPQTFTSFSYGTGVFAPGRCSPGLDCAYPTGNSLVEPYTAGHNILLAHAEAVDLYNKHYKRDDTRIGLAFDVMGRVPYGTSFLDKQAEERSWDINLGWFLEPVVRGDYPFSMRSLARERLPFFKDEQKEKLAGSYNMLGLNYYTSRFSKNIDISPNYSPVLNTDDAYASQEVNGPDGKPIGPPMGNPWIYMYPEGLKDLLMIMKNKYGNPPIYITENGIGDVDTKDTPLPMEAALNDYKRLDYIQRHIATLKESIDLGSNVQGYFAWSLLDNFEWFAGFTERYGIVYVDRNNNCTRYMKESAKWLKEFNTAKKPSKKILTPA

SEQ ID NO: 331540 - protein, 69 aa, Zea mays
  Clone ID: MRT4577_65467C.1.pep
YWTRGHQGQFLHLLQSLGAPLLSISLAVNGTLLPLISGAVPLSVFMIQKDSLCTTTTYNERKKVYIINT

SEQ ID NO: 331541 - protein, 567 aa, Zea mays
  unsure (1)..(567): unsure at all Xaa locations
  Clone ID: MRT4577_65468C.1.pep
MAPLLAAAMNHAAAHPGLRSHLVGPNNESFSXRHHLPSSSPQSSKRRCNLSFTTRSARVGSQNGVQMLSPSEIPQRDWFPSDFTFGAATSAYQIEGAWNEDGKGESNWDHFCHNHPERILDGSNSDIGANSYHMYKTDVRLLKEMGMDAYRFSISWPRILPKGTKEGGINPDGIKYYRNLINLLLENGIEPYVTIFHWDVPQALEEKYGGFLDKSHKSIVEDYTYFAKVCFDNFGDKVKNWLTFNEPQTFTSFSYGTGVFAPGRCSPGLDCAYPTGNSLVEPYTAGHNILLAHAEAVDLYNKHYKRDDTRIGLAFDVMGRVPYGTSFLDKQAEERSWDINLGWFLEPVVRGDYPFSMRSLARERLPFFKDEQKEKLAGSYNMLGLNYYTSRFSKNIDISPNYSPVLNTDDAYASQEVNGPDGKPIGPPMGNPWIYMYPEGLKDLLMIMKNKYGNPPIYITENGIGDVDTKETPLPMEDALNDYKRLDYIQRHIATLKESIDLGSNVQGYFAWSLLDNFEWFAGFTERYGIVYVDRNNNCTRYMKESAKWLKQFNAAKKPSKKILTPA

SEQ ID NO: 331542 - protein, 566 aa, Zea mays
  Clone ID: MRT4577_65469C.1.pep
MAPLLAAAMNHAAAHPGLRSHLVGPNNESFSRHHLPSSSPQSSKRRCNLSFTPRSARVGSQNGVQMLSPSEIPQRDWFPSDFTFGAATSAYQIEGAWNEDGKGESNWDHFCHNHPERILDGSNSDIGANSYHMYKTDVRLLKEMGMDAYRFSISWPRILPNGTKEGGINPDGIKYYRNLINLLLENGIEPYVTIFHWDVPQALEEKYGGFLDKSHKSIVEDYTYFAKVCFDNFGDKVKNWLTFNEPQTFTSFSYGTGVFAPGRCSPGLDCAYPTGNSLVEPYTAGHNILLAHAEAVDLYNKHYKRDDTRIGLAFDVMGRVPYGTSFLDKQAEERSWDINLGWFLEPVVRGDYPFSMRSLARERLPFFKDEQKEKLAGSYNMLGLNYYTSRFSKNIDISPNYSPVLNTDDAYASQEVNGPDGKPIGPPMGNPWIYMYPEGLKDLLMIMKNKYGNPPIYITENGIGDVDTKETPLPMEDALNDYKRLDYIQRHIATLKESIDLGSNVQGYFAWSLLDNFEWFAGFTERYGIVYVDRNNNCTRYMKESAKWLKQFNAAKKPSKKILTPA

SEQ ID NO: 331543 - protein, 761 aa, Zea mays
  unsure (1)..(761): unsure at all Xaa locations
  Clone ID: MRT4577_6546C.1.pep
MTVTPRITVGDGRLLAHGRSVLTGVPDNIVLTHASGAGLVDGAFVGATAAEPSSMHVFTFGTLRDLRFVCCFRFKLWWMTQRMGTSGRDVPLETQFMLLECGPGDGDGDAAVYVAMLPLLEGQFRAALQGNDRDELEITLESGDKAVQTAQGTCMLYVHAGTNPFDTITQAVKVVERHMQTFHHREKKKLPSFVDWFGWCTWDAFYTDVTAESVKQGLKSLADGGTPPRFLIIDDGWQQIGSENKEESANAVVQEGAQFASRLTGIKENAKFQKKTKTKESGGGGGEQQAQTPGLKLLVEEAKREHGVRYVYVWHAMAGYWGGVKPAAEGMEHYESALAYPVQSPGVMGNQPDIVMDSLSVLGLGLVHPRRALSFYDELHSYLASCGVDGVKVDVQNIIXTLGAGHGGRVALTRAYHRALEDSVARNFPDNGCISCMCHNTDMLYSARQTAVVRASDDFYPRDPASHTVHVSSVAYNTLFLGEFMQPDWDMFHSLHPAADYHGAARAIGGCPIYVSDKPGNHNFELLKKLVLPDGSVLRAQLPGRPTRDCLFADPARDGTSLLKIWNVNKCTGVVGVFNCQGAGWCRVTKKTRVHDAAPGTLTGSVRADDVDVIAGLAGDGWGGEAVVYAYRSGELVRLPQGATLPVTLKVLEFEVFHVSPVRAVAPGVSFAPIGLLDMFNSGGAVEQCEVRGGGGGAGAVVALRVRGCGRFGAYCSRRPARCRLDAAEVDFSYDDDTGLVALHIPVPEQEFYRWDLEIDV

SEQ ID NO: 331544 - protein, 47 aa, Zea mays
  Clone ID: MRT4577_65470C.1.pep
SYSTTIARSIHGNSEVNVEHRTMVVKLHFHMRTQLNSRDGTIRMGNW

SEQ ID NO: 331545 - protein, 106 aa, Zea mays
  Clone ID: MRT4577_65471C.1.pep
VRRPTPEIEKRVVTMLRDPSVKTPTGLCRVPLHVALPRHLLAYRGKQPSSRPWSFQWSVTVCVLSRIRTSGRSTSCLRPPPPFGEVWFSLERCCSYSRVRRPQVVT

SEQ ID NO: 331546 - protein, 567 aa, Zea mays
  unsure (1)..(567): unsure at all Xaa locations
  Clone ID: MRT4577_65472C.1.pep
MAPLLAAAMNHAAAHPGLRSHLVGPNNESFSRHHLPSSSPQSSKRRCNLSFTTRSARVGSQNGVQMLSPSEIPQRDWFPSDFTFGAATSAYQIEGAWNEDGKGESNWDHFCHNHPERILDGSNSDIGANSYHMYKTDVRLLKEMGMDAYRFSISWPRILPKGTKEGGINPDGIKYYRNLINLLLENGIEPYVTIFHWDVPXQALEEKYGGFLDKSHKSIVEDYTYFAKVCFDNFGDKVKNWLTFNEPQTFTSFSYGTGVFAPGRCSPGLDCAYPTGNSLVEPYTAGHNILLAHAEAVDLYNKHYKRDDTRIGLAFDVMGRVPYGTSFLDKQAEERSWDINLGWFLEPVVRGDYPFSMRSLARERLPFFKDEQKEKLAGSYNMLGLNYYTSRFSKNIDISPNYSPVLNTDDAYASQEVNGPDGKPIGPPMGNPWIYMYPEGLKDLLMIMKNKYGNPPIYITENGIGDVDTKETPLPMEAALNDYKRLDYIQRHIATLKESIDLGSNVQGYFAWSLLDNFEWFAGFTERYGIVYVDRNNNCTRYMKESAKWLKEFNTAKKPSKKILTPA

SEQ ID NO: 331547 - protein, 120 aa, Zea mays
  Clone ID: MRT4577_65473C.1.pep
PMTNSLLPINLISIIRIILRRLRPTRLLLRTTMHLTMLNRPLLRRPSRPIILHRILQQMPRSKRRIITTTIRISTTINIRIIKTHLHHLLRPHTTTRRRSNDRNRTRQADAEPDRVASST

SEQ ID NO: 331548 - protein, 105 aa, Zea mays
  unsure (1)..(105): unsure at all Xaa locations
  Clone ID: MRT4577_65474C.1.pep
FPGFSVSGVRQHGGHRGPFNDGCYVVGSSGPPPPRRLRVQRHGGRGGDEDGAGDLLHLHPWMRRLISDRRDGVAGMGWRRGSLCLPPRSLAWVVRTPGRPEXYPF

SEQ ID NO: 331549 - protein, 59 aa, Zea mays
  Clone ID: MRT4577_65475C.1.pep
VCYARDHMFCSLEGLVQRSQFLFYNLVTSHLRYENMLFSCIICVIIITFSCTFVRLLMK

SEQ ID NO: 331550 - protein, 30 aa, Zea mays
  Clone ID: MRT4577_65476C.1.pep
DKAPYVAKANKLKLEYNKAIAAYNKGESTA

SEQ ID NO: 331551 - protein, 83 aa, Zea mays
  Clone ID: MRT4577_65477C.1.pep
RGRKGGGPIATLGWANFWKGDWFGPFWFLPHLPKGDFLPSHLIWVTPGFSRPHGFKTRAVNLILGAPIKNFFLARQGKVTLVL

SEQ ID NO: 331552 - protein, 109 aa, Zea mays
  unsure (1)..(109): unsure at all Xaa locations
  Clone ID: MRT4577_65478C.1.pep
KVKDWGTLFFGGSVVAVFGCRNPDEIPWGAVGAEYVVESTGVFTDQEKAAAHLKGGAKKVAISAPSKGALMFVXVWCNQKEYKSDINIVSKASCTTNCLAPLAKVINDK

SEQ ID NO: 331553 - protein, 377 aa, Zea mays
  unsure (1)..(377): unsure at all Xaa locations
  Clone ID: MRT4577_65479C.1.pep
MADEDIQPIVCDNGTGMVKAGFAGDDAPRAVFPSIVGRPRHTGVMVGMGQKDAYVGDEAQAKRGILTLKYPIEHGIVNNWDDMEKIWHHTFYNELRVSPEDHPVLLTEAPLNPKANREKMTQIMFETFECPAMYVAIQAVLSLYASGRTTGIVMDSGDGVSHTVPIYEGYTLPHAILRLDLAGRDLTDHLMKILTERGYSLTTSAERXEIVRDIKEKLAYVALDYEQELETARSSSSVEKSYEMPDGQVITIGSERFRCPEVLFQPSLVGMESPGVHEATYNSIMKCDVDIRKDLYGNVVLSGGSTMFPGIADRMSKEITSLAPSSMKVKVIAPPERKYSVWIGGSILASLSTFQQMWISKGEYDETGPGIVHMKCF

SEQ ID NO: 331554 - protein, 90 aa, Zea mays
  unsure (1)..(90): unsure at all Xaa locations
  Clone ID: MRT4577_6547C.1.pep
SIIASSNNLTLHISXPVTPHLLFLSSLIDLHTLAPKVSFHMISITHPCDGYFLFCIXMHFNFTSXFPFIFINEHLYFLHSDNFYFNNTLI

SEQ ID NO: 331555 - protein, 58 aa, Zea mays
  Clone ID: MRT4577_65480C.1.pep
RKRRRFQCVCHRLFFDARGNSTTFYPAKRMRSTLSPDGAVWRPRPIKSSTAAVSLVLH

SEQ ID NO: 331556 - protein, 160 aa, Zea mays
  Clone ID: MRT4577_65481C.1.pep
DEAVKLFDKMLQLRCSPDSSFHAQVMPLFCKFSKVKEVITLHRIMKEGNIQLSLQLSSALVRCLCENELLDDATIVFKEMVASGHAPMGITYVDMINCYCTKSKFHSAMIFLEENGVTELEPYNVLLTWLCRNDRLQYSVSYLEKLHSRGFVDCESWNIV

SEQ ID NO: 331557 - protein, 99 aa, Zea mays
  Clone ID: MRT4577_65482C.1.pep
TASKVKQDMPPPGGYGPIDYKRNLPRRGLSGYSMLAIGIGTLIYGHWSIMKWNRERRRLQIEDFEARIALLPLLQAETDRRTLQMLREDLEEEAIIMKD

SEQ ID NO: 331558 - protein, 23 aa, Zea mays
  Clone ID: MRT4577_65483C.1.pep
YTLCYEWIIMTILIYETLDVMYL

SEQ ID NO: 331559 - protein, 79 aa, Zea mays
  Clone ID: MRT4577_65484C.1.pep
AVAGHSLCRIDRVLVLYIRRLLQDLMRTSLGQQQWWGCERKSGAVVRHSVHRRERTNVIFNKSHGVSSWPRPTTNGTRG

SEQ ID NO: 331560 - protein, 95 aa, Zea mays
  Clone ID: MRT4577_65485C.1.pep
SEQRHIRFQLLLVRIREGSWPSETERRNNHIMRAWLWGPCRPYNVRANCQRKPYACRAQGNTHSQTLISYAKAKLRLRDCVVCLARQAESLSLVA

SEQ ID NO: 331561 - protein, 185 aa, Zea mays
  Clone ID: MRT4577_65486C.1.pep
TVRHQWRLSPRHHFIPFPPSVHTLPRPASRCTRARGCLWCPRSHPPRVPSPSARAHDPHPRCRPSCCVCISTRTPTILDVVPVAAVASPCASPPKHARSPGAQTSGAAPPADRVDSCRVCLGEACRGIRQRGLSMSGPVALPPCWPSLPRQLRLNAGFLRVCLRIRARHAHRLGGGPRCSLYLSQ

SEQ ID NO: 331562 - protein, 239 aa, Zea mays
  unsure (1)..(239): unsure at all Xaa locations
  Clone ID: MRT4577_65487C.1.pep
MVLPDTNNVDISGAKDSAALHHELNMGLPDGAHNVGISGANDSAALGHQLNMGLPDGAHNVGISGANDSAALDHQLNMGLPDGAHNVGISGANDTAALDLGLPDGAHNAGISGANDSAALDHQLHMGLPDGAQLDATPQEATDAVDATAAFGLQMPSDERDNNIEKVTEFGDGKEIPLVDETNAAANITAHVDTRDKDCHQDASADMQRNTNADTPLFVQDDITHDSATIQXAPDVAFA

SEQ ID NO: 331563 - protein, 177 aa, Zea mays
  Clone ID: MRT4577_65488C.1.pep
NSPSALSSSATSLSLISAACTSILQRPRLLPRAGRAGPCPSSARPQPRPSHGSRLELCSPNSAALGFLSLPRVAESSARPELLQCRAGLELSWPPPCPVFHGARWWWVGVGGGDSLTATRPARGIHDLRSLLDSCAACPARPNPLQTPSMARYLLQPGRPSLRVFTIGLAVPAPLGT

SEQ ID NO: 331564 - protein, 244 aa, Zea mays
  Clone ID: MRT4577_65489C.1.pep
MPPLTAREGMAPHKSELKGSRRMQSQPAGAFPARRTPLSTSPTKEWTRITRRKEVNIPYRGRKTQRAILPAPPPLKEDGKKHTAMPAPFYPHVLFIQGRLESSPVSDDEPTMQGEEPPQRDARRRRNRRRNVRPHHEASEWNPAQPVSWDEASEIGETPDERAHRERRNSRRRDRRQAQERERELAEQDARLRWENPLLARNLYLNFARALNTPSEVGGVLAQITDGLPRTPDVEGYWRLRVTY

SEQ ID NO: 331565 - protein, 76 aa, Zea mays
  Clone ID: MRT4577_6548C.1.pep
MRVPAMSTTTEAAKSGSAAPVRCQRIGCDAVFTDDDNREGSCQYHPSAPMFHDGMKEWSCCKQRSHDFSLFLQIPG

SEQ ID NO: 331566 - protein, 40 aa, Zea mays
  Clone ID: MRT4577_65490C.1.pep
FHVGLCEHSPPDHTHDIPIIVTIELLNPDAKAHLHMLQST

SEQ ID NO: 331567 - protein, 113 aa, Zea mays
  Clone ID: MRT4577_65491C.1.pep
SILATLCLDERSKYGLTCETRPNITAPARFARQIRYSMSSLIVYHSHCVSPASAQARRLHAQISRTRLTISTRVVCSIQLYLMCSNREAGGTAAIMYYGARMGWNLTMSCLST

SEQ ID NO: 331568 - protein, 64 aa, Zea mays
  Clone ID: MRT4577_65492C.1.pep
GPAFSDIHRGDTKSAAMVSIPATTLSVILYVLLCASAGTGLDNDAMRLRHPGPRILRHLPRRGS

SEQ ID NO: 331569 - protein, 129 aa, Zea mays
  unsure (1)..(129): unsure at all Xaa locations
  Clone ID: MRT4577_65493C.1.pep
VVDCRICGDPHSVLRVAFIEFSXKVLHIDLLLRFLFYVIKSSFDEXGVCFFSAEGARTALNLGGTIFGFYPGRDLPAKTAILPVNPKVLPRTDDEKEMVMRTVYCTNIDKMGTQLDVKKFFVELCGGGI

SEQ ID NO: 331570 - protein, 160 aa, Zea mays
  unsure (1)..(160): unsure at all Xaa locations
  Clone ID: MRT4577_65494C.1.pep
PRVREHWRDLVVAVREGVLIPRPETEAIIDMVRAVEDFADGWWADLGTGSGAIAEGLARELAGQGRVFATDVIQVGIDVARLNVQXRYGVQDKVEIMHGSWXEPVQDLKGKLMGVISNPSFIPPDDLPGLQPGGGCRALKLELDVGKDGLEHLVRLCVRV

SEQ ID NO: 331571 - protein, 65 aa, Zea mays
  unsure (1)..(65): unsure at all Xaa locations
  Clone ID: MRT4577_65495C.1.pep
RPARLRXGLXSXXRGXAXRPPRLXSLARXGRLLXAVXLPCPXAXXRWPVEXXXGRXXXXRXRXRR

SEQ ID NO: 331572 - protein, 108 aa, Zea mays
  unsure (1)..(108): unsure at all Xaa locations
  Clone ID: MRT4577_65497C.1.pep
MVGQKQFSFLMXIVLSSRSCYRTIIPQCSQAPIASLFRPYVSPAVSRVCENSILQPYMIQQAIAASILPLSPLILQQPVGLLQGVHMAHLLAQNHKAQQLQQLALGNL

SEQ ID NO: 331573 - protein, 62 aa, Zea mays
  Clone ID: MRT4577_65498C.1.pep
AAPASAAGVGLGAATAPAAGSGAVRGGGGGRRCWTGSGTWPAATAAAPAGGAGPAPEPEPAA

SEQ ID NO: 331574 - protein, 821 aa, Zea mays
  unsure (1)..(821): unsure at all Xaa locations
  Clone ID: MRT4577_6549C.1.pep
MTVTPMITVGDGRLVAHGRSVLAGVPDNIVLTHASGAGLVDGAFVGATAAEPSSMHVFTFGTLRDLRFVCCFRFKLWWMTQRMGTSGRDVPLETQFMLLECGPGDGHGDGDAAVYVAMLPLLEGQFRAALQGNDRDELEITFESGDKAVQTAQGTCMLYVHAGTNPFDTITQAVKVVERHMQTFHHREKKKLPSFVDWFGWCTWDAFYTDVTAESVKQGLKSLADGGTPPRFLIIDDGWQQIGSENKEESANAVVQEGAQFASRLTGIKENAKFQKKTKTKESGGGGGEQQAQTPGLKLLVEEAKREHGVRYVYVWHAMAGYWGGVKPAAEGMEHYESALAYPVQSPGVMGNQPDIVMDSLSVLGLGLVHPRRALSFYDELHSYLASCGVDGVKVDVQNIIETLGAGHGGRVALTRAYHRALEDSVARNFPDNGCISCMCHNTDMLYSARQTAVVRASDDFYPRDPASHTVHVSSVAYNTLFLGEFMQPDWDMFHSLHPAADYHGAARAIGGCPIYVXETDNQLLIRTNDVVGLPKSLSIAASVPDKPAQGSXLETGEPNDLVACPCGMAAEVPAPKTRPVAAAAMIGRRHQRAHYRRAALSIXGTQAAVAKPNSDSTAVAACVALRHAFRRTAREPVSVNDKPGNHNFELLKKLVLPDGSVLRAQLPGRPTRDCLFADPARDGTSLLKIWNVNKCTGVVGVFNCQGAGWCRVTKKTRVHDAAPGTLTGSVRADDVDVIAGLAGDGWGGEAVVYAYRSGELVRLPQGATLPVTLKVLEFEVFHVSPVRAVAPGVSFAPIGLLDMFNSGGAVEQCEVRGGAN

SEQ ID NO: 331575 - protein, 90 aa, Zea mays
  Clone ID: MRT4577_654C.1.pep
KKGMQMWMSLPLGLNMVHDKSASWSYSRGFSPSIESSAKCGKWYLLGRMRHVERRAVGFVVRLFVDSSHHSVCTPPKKKKKKGGHRIVSS

SEQ ID NO: 331576 - protein, 69 aa, Zea mays
  Clone ID: MRT4577_65501C.1.pep
FRIGLLHDKKTDILSSGINQQSCVACPTELLPSLLRCTAAAIPAPCAHDLLYLCFLESVAVCISCLPSA

SEQ ID NO: 331577 - protein, 106 aa, Zea mays
  unsure (1)..(106): unsure at all Xaa locations
  Clone ID: MRT4577_65502C.1.pep
MEQGVGKPPFFDGTNYPYWKIHMSAYLQSIRYRVWEICLDANFDATSDQITPIQMEFHDSNNKARNTLFSCLSLGEFERVGXLTTAXYQIWGPTTREISIERATPL

SEQ ID NO: 331578 - protein, 62 aa, Zea mays
  Clone ID: MRT4577_65504C.1.pep
ATRTTRSRSLAVALVRVLRGVDLPTLAFMTPQFYTFFVGPIGALYAMSLWVFNFGYIYLAGA

SEQ ID NO: 331579 - protein, 61 aa, Zea mays
  Clone ID: MRT4577_65506C.1.pep
NGPLQWGKNSLTFHGAKKKTPGGQTNPKNGQGVLGKPKNFEFNNQNNPNPPAFLALGCLFK

SEQ ID NO: 331580 - protein, 163 aa, Zea mays
  Clone ID: MRT4577_65507C.1.pep
MDQMLGKHLQMPSVTTSAACQQPQSPPPSPQQQYRGVRKRKWGKWVSEIRQPGTKTRIWLGSFESAEMAAVAHDVAALRLRGRDAQLNFPGCVAWLPRPATSHARDVRAAAAEAADRVRCDPALLLLQQAAAARCHDYDHDHEFGAGPAPVVELGSDEEFELD

SEQ ID NO: 331581 - protein, 164 aa, Zea mays
  unsure (1)..(164): unsure at all Xaa locations
  Clone ID: MRT4577_65508C.1.pep
KKKFWVLMLLGLSASAATATIFPQCSQAPIASLLPPFLSPTPSFVLXGGXLQPYXIQQTKTNNILPLSPLFLQQSSPLLHQLPLVHLLAQNMMVQQLQQLVLANLTAYFLXQHFLLINQLAALNSFFYLQQQQLPFIHLPISYPHQFLSFNQLXTYNFSAYLLH

SEQ ID NO: 331582 - protein, 107 aa, Zea mays
  Clone ID: MRT4577_65509C.1.pep
RYRAPVFLCLAPMTPRTLAGGGPPHDLPARTKGGAHLNTAAPISSFSQQDPGRSELSLSGGWYMGRVGFFGKLRSVPRKRIEGPAIVFSPRSKMKKQNKSPKQKTNS

SEQ ID NO: 331583 - protein, 228 aa, Zea mays
  unsure (1)..(228): unsure at all Xaa locations
  Clone ID: MRT4577_6550C.1.pep
VVLIVLWTRQRGSRDADDRDEREEEEEGRQSSKTEGRPVASTGRWSPRRRPCRRWRRPSRWLHRGVTTLVVTVGHGRSDSGAAASRSAPRXRRGGSPEHRRRGRRRSXRRPGRDDARDRESPRRAELLRGAEDPGRARRARGXLLLARPRRSCRDRRSAPRGGPRRRRRRRRISPPRPHRRDRVPRRSRGRRRSRGGGARRSRTAPRRARRRGAAGAPRRGGAEEEPA

SEQ ID NO: 331584 - protein, 70 aa, Zea mays
  Clone ID: MRT4577_65510C.1.pep
WIVRPGRADGLPCWWFQLPPLGLGLWRLVIVLELKTFRQGSLFNPCPPRAKTLEFLNFTGPSISRGGKAD

SEQ ID NO: 331585 - protein, 87 aa, Zea mays
  Clone ID: MRT4577_65511C.1.pep
MDMLSAAEQRTLEQRMQKRQVKEFMGAFGGLVEHCFMSCVDDFTSKAISNRESGCINRCVQKWMASQQRISDRFQEHNAQLTAQMNK

SEQ ID NO: 331586 - protein, 181 aa, Zea mays
  unsure (1)..(181): unsure at all Xaa locations
  Clone ID: MRT4577_65512C.1.pep
MFGTPNSPSLFGTPSSTPSFGTPSTTPAFGTPSSTPAFGAPSSTPAFGVPSSTPAFGAPSSTPAXFGRPLRARRLARHRRPRRSEXPSSSPSPFGFQQQVTPSPSPFGFGGGAGGQITTQMAPVAPLPLSPSDRDIQAMVDAYKEDPGNPRYAFRHLLFSVTDPSQRVKPVAASDIMWAEA

SEQ ID NO: 331587 - protein, 156 aa, Zea mays
  Clone ID: MRT4577_65513C.1.pep
MSPVMHRFAWQSYSEDTNSLDDSAFARDGLIEQLSLTWDKSDYLWYTTHVNIGANERFLKSGQWPQLTVYSAGHSMQVFVNGRSYGSVYGGYDNPKLTFSGYVKMWQGSNKISILSSAVGLPNNGDHFELWNVGVLGPVTLSGLNEGKRDLSHQRW

SEQ ID NO: 331588 - protein, 74 aa, Zea mays
  Clone ID: MRT4577_65514C.1.pep
LQFVLQVCVYVPTQRLFFHACVRSLGALITLYNCICIYQILCPSYITNLRNCMHVYIVPTYVPSVCHSAIFLML

SEQ ID NO: 331589 - protein, 67 aa, Zea mays
  Clone ID: MRT4577_65515C.1.pep
ILSAFSQSRSCKASASQFKFGVTILSDMPVVCKRKVSLDLLDRRPPPYLSACFLRIKIRRNRSHMFS

SEQ ID NO: 331590 - protein, 206 aa, Zea mays
  unsure (1)..(206): unsure at all Xaa locations
  Clone ID: MRT4577_65516C.1.pep
MMVHHDLLSGDELLPDSFTYXELENGVLRELQAKCCTQGPVDVDIGANPSAAGXDEDESVXDDTAAKEADIADTFRLHELPPFDKKSFVSYIRKYIKNLLLVXQPEKAYDFDKGCXGATKYLLSKLKDHRXILLDESMKDDASEVFCYYKDAATKPTFLYFSHGLNDIKCYACGEIIYPCGYTIYVTSIICKTIVGLAELNSKGLD

SEQ ID NO: 331591 - protein, 78 aa, Zea mays
  Clone ID: MRT4577_65517C.1.pep
TSSRSRAAALFFFFFFFFLFGFFFFFFFFFFFLAKKRLFPHGTRGKSNKNKSDIYFLGIKSQGISPQEKQLPDYSLPT

SEQ ID NO: 331592 - protein, 98 aa, Zea mays
  Clone ID: MRT4577_65518C.1.pep
RLARSAACGLAPRRPSSLPTSRRGPVSCTYARGGGCGHETAGSEAQQPSSRSAAAVHVSLAASHHLITTSYMNEMGRCHSHDTRHWKGSDMAIRRQKR

SEQ ID NO: 331593 - protein, 274 aa, Zea mays
  Clone ID: MRT4577_65519C.1.pep
MQLKNRREAVTATVLVAVSVLATLARTDGALCDKSDKAALLAVKSALGNPPALSGWNSTVACCSWEGISCNATTGRVTDLTVFALNISAPVPAAIANLTALQSVNLAYNQLYGSIPAFLGPRALPDLTFLRLDGNRLSGAIPPTATVFNLLLVGNRLTGPIPAAFAGAAFGDVELSDNQLTGDASALFGAEKPLNALSLSRNRFRFDLGRVELPEAMDILEIDHNMVYGSIPAAAAERKWLAFDVSYNQLCGPIPQGRYTHRFGAKHFAGLEPN

SEQ ID NO: 331594 - protein, 76 aa, Zea mays
  Clone ID: MRT4577_6551C.1.pep
RDCTSDPSPMGAFASWVPSSLSLFPPAGSSAAPIQLWFPNDIAPASHSDPSLLLSFLSFSPLLRTKCKHSPPYRPL

SEQ ID NO: 331595 - protein, 71 aa, Zea mays
  Clone ID: MRT4577_65520C.1.pep
IKAFQKFFLYPPNRPLWVLNRQKLQELAGWGSIYIIVGSSVNRAKHIGPWWVLQSGFEEALLLGHLNGEVV

SEQ ID NO: 331596 - protein, 111 aa, Zea mays
  unsure (1)..(111): unsure at all Xaa locations
  Clone ID: MRT4577_65521C.1.pep
KPDMLGLIEXQLPXLAAAYSVSPAGRIPVMCSTAPSYATAPTPITAGAPSARVCSAINTLNYNMTLITHATSIAHAIDLAPIIASLNLTTINYYRLEIPSTFLSTLVQSIT

SEQ ID NO: 331597 - protein, 162 aa, Zea mays
  Clone ID: MRT4577_65522C.1.pep
CPRDFTLLRRVGAGDIGTVYLCRLESQSQAPEGSACEYAMKVVDRRALAKKGKLARAAAEKRVLRRLDHPFLPTMFADFDAGTDLSCIVMEFCRGGDLHSLRHRMPGRRFPLASARFYGAEVLLALEYLHMMGIVYRDLKPENVLIRGDGHIMLTDFDLSLE

SEQ ID NO: 331598 - protein, 56 aa, Zea mays
  Clone ID: MRT4577_65523C.1.pep
KKKKKKKKKKKKKKKKKKKKKLKKKKKKKKKKKPKKKKKKKKKVCPLPPTPPRGNF

SEQ ID NO: 331599 - protein, 105 aa, Zea mays
  Clone ID: MRT4577_65524C.1.pep
DLVDGDALKEGSEANRYAVICMVVSGGRWRESSVWTLVVCLILLWGLGRCYLTVDCCDAGSGGRGCTDAPHERSQVPLPALDVPEKHICISPSRSIMGDRLEVPM

SEQ ID NO: 331600 - protein, 194 aa, Zea mays
  unsure (1)..(194): unsure at all Xaa locations
  Clone ID: MRT4577_65525C.1.pep
MAGKADGPAIGIDLGTTYSGVGXVWHHXDRVXEIIVNDQGNXRSTPSYVALTDCERLMGHADKIHVVMXPINTVFDAKRLIGRRFTDACVQSDIKLWPLKVIPGPDEKPMIVVQHKVEEKQLAAPEIYYMALIKMREIAEAYLGSTIKNADVTVPASFNDSQGQATKDAGVIAGLNVLRIINEPTAAAIAYGLD

SEQ ID NO: 331601 - protein, 62 aa, Zea mays
  Clone ID: MRT4577_65526C.1.pep
PKDREEKPAPWPRVKRNNGRFLPRFRLPENAKTEQITAPMENGVLTVPVPKKDPKKPKIKSI

SEQ ID NO: 331602 - protein, 95 aa, Zea mays
  Clone ID: MRT4577_65527C.1.pep
QNSAPLVCSGPIYQEMVEQRPRGAPETDDIGGHGVLHDFRWVMAMDGKGHGSSREGVEAAEGSRGGRRWGLGRACPPGRGQERGRVGGRVGGRVG

SEQ ID NO: 331603 - protein, 109 aa, Zea mays
  unsure (1)..(109): unsure at all Xaa locations
  Clone ID: MRT4577_65528C.1.pep
FVXXXSXXLXGFSXXAAAXAAGGVXAXXPXXXLXXLXXXLRPRGALRGXRPLPPSXXPFGXVLXGXLGARXGXSXLXVAAAXALPXRXPFXVAVWWPFXLXPPGRGXXG

SEQ ID NO: 331604 - protein, 132 aa, Zea mays
  unsure (1)..(132): unsure at all Xaa locations
  Clone ID: MRT4577_65529C.1.pep
ERSNNLLSFQGKKRRISCHGKTHGIHYCNLNVIIVLFPSKKREDAWGGGGQXSXKQRMNKHVHRRDTRGVKTERTLFYVAGSFLSVTTWIRTCIRSATSARRPPRNPKVLPMEDHFVVAAPAMASLVQRARS

SEQ ID NO: 331605 - protein, 67 aa, Zea mays
  Clone ID: MRT4577_6552C.1.pep
SSCNCGKMYPDLKKKNGGGAQASPPPVVLGVAPKTKKAAQFKAAGNSGKAAPGCSCGDSCKCSPCNC

SEQ ID NO: 331606 - protein, 84 aa, Zea mays
  Clone ID: MRT4577_65530C.1.pep
EGRGSPPPPAPYRRASTPEAWQVCRGRPVASPTGDDLPRARPGCPAGSSAAWNTWTIAQHVYLIEAVQRSAGVLRRVAQGSVGC

SEQ ID NO: 331607 - protein, 29 aa, Zea mays
  Clone ID: MRT4577_65531C.1.pep
MATEKLGIKVERNPPESRLSELGVRQWPT

SEQ ID NO: 331608 - protein, 145 aa, Zea mays
  Clone ID: MRT4577_65532C.1.pep
MTSPMVATPVQLRSTGRLSFCSFPSSASGTAPSRRRFGAVTVRASAETMATEKLGIKVERNPPESRLSELGVRQWPTWGCEKSKFPWTYSAKETCYLLQGKVKVYPDGHGEEFVEIAAGDLVVFPKGMSCTWDVAEAVDKHYNFE

SEQ ID NO: 331609 - protein, 87 aa, Zea mays
  Clone ID: MRT4577_65533C.1.pep
HHVLAHNGHREMFQHVVDALYAVLVLHDGHRGAIRRGRGGLPEDSLGGADDVAHVHLRLRGVPVTLFQSVQALEYSAIRWRCPSRTA

SEQ ID NO: 331610 - protein, 125 aa, Zea mays
  Clone ID: MRT4577_65534C.1.pep
MGKKGNWFTALKKAFTSSPKEKPTNVHQLVAQYPSTHAHGWEKKRWGGFGRSRPHAEPASPAAGALINIPLYREPSSIEKILGDAEMDQQRQYYAATRAQYQITPARPTTAVAGSAASAAAVPLP

SEQ ID NO: 331611 - protein, 102 aa, Zea mays
  unsure (1)..(102): unsure at all Xaa locations
  Clone ID: MRT4577_65535C.1.pep
PHTKYCSQKVRLLXATANVLLSPQGSSIQQKQVSCLGIHLHAATWISVPFAAVAVFATQKGRTCIYTKHIVVVSGKTKFGLRETILHWERPYAILLRSRSCL

SEQ ID NO: 331612 - protein, 60 aa, Zea mays
  Clone ID: MRT4577_65536C.1.pep
RGAWLLSQINMRDTTTYSERLLYTNQRFITCSQKITRGLVGEDKTQTGRACFRELKTFWI

SEQ ID NO: 331613 - protein, 51 aa, Zea mays
  Clone ID: MRT4577_65537C.1.pep
MGKKGNWFTALKKAFTSSPKEKPTNVHQLVAQYPSTHAHGWEKKRWGGFGR

SEQ ID NO: 331614 - protein, 86 aa, Zea mays
  Clone ID: MRT4577_65538C.1.pep
LQSLCSQHCAQGLLLARHQPLLSFCAEEIVSLCPSLCLHCSSLDSHALSSHHDSHTLGASCCIWFPGSCLPTSNTEAACERVSLSF

SEQ ID NO: 331615 - protein, 84 aa, Zea mays
  Clone ID: MRT4577_65539C.1.pep
RALRLPRPRAPLDRHRAHLIKHRERGDLTDETVQGAGVELDSVNNEGGGLSAEEGDLGEGDGSLDDGLQEELEHAPGLLFKGTR

SEQ ID NO: 331616 - protein, 117 aa, Zea mays
  Clone ID: MRT4577_6553C.1.pep
PFKEISIPGPRTKKKLLDINGLGKTKVKKFGGPLLSTLEGFLRQPPNSRRNNGGGGGGNEPSHSAKKRKGSPPLFSTSFGGDDFYERPGPPFQKGAGKTRTVFGPGPPWPGPDFYGP

SEQ ID NO: 331617 - protein, 46 aa, Zea mays
  Clone ID: MRT4577_65540C.1.pep
LYLTTTFFFFFLLFNSLYIIHGGHLKRGVNSPFPNKNPIINLHSLC

SEQ ID NO: 331618 - protein, 64 aa, Zea mays
  Clone ID: MRT4577_65541C.1.pep
LGCKPPKKEKWGLEQKFHVLFSWSEPFPPTWGLTTLPLGETFSCILLPINRPRQKRRGFYGAPP

SEQ ID NO: 331619 - protein, 174 aa, Zea mays
  unsure (1)..(174): unsure at all Xaa locations
  Clone ID: MRT4577_65542C.1.pep
QRSGRLPYNQRVRXRGHRRLTDGLEQGVDLVGGYYDAGDHVKFGLPMAFTVTLLSWGVLEYGGGVAGAGELAHALQAIKWGTDYFVKAHTAPAELWAQVGDGDSDHYCWQRPEDMTTSRRAYKVDAEHPGSEVAAETAAAMAAASAVFXRAGDAHYAHLLLHHAQQLSNIADTH

SEQ ID NO: 331620 - protein, 70 aa, Zea mays
  Clone ID: MRT4577_65543C.1.pep
EGVAGVTVSEGAVVDAIALAYLHPTVGVASLLTSWLGQIEGHGTDLMTAFRPAAGHMGCNYAVRTRRLGV

SEQ ID NO: 331621 - protein, 61 aa, Zea mays
  unsure (1)..(61): unsure at all Xaa locations
  Clone ID: MRT4577_65544C.1.pep
KFVANEPTTKGGTYYPLTVQNALRAQDXASECKLPWLYLXVDSGGANTTQAADVLPERDNF

SEQ ID NO: 331622 - protein, 107 aa, Zea mays
  Clone ID: MRT4577_65545C.1.pep
MAACRGALLADVIAINVVGSASADKYKPTESILVNCGSAKEGKDVDGRKWAADQDKSWLVDAGKSSIMGDADVQDPSIASAVPYMTARVFTKEAMYNFFVGDADRHW

SEQ ID NO: 331623 - protein, 107 aa, Zea mays
  unsure (1)..(107): unsure at all Xaa locations
  Clone ID: MRT4577_65546C.1.pep
YKPETRKTQTGRGGKLLTPYTYQKGGQGQGSYKNTGRKKFFYHHTTHAQITGLQIGKSFIYLPSLSPFXFALIRGSKPIVVRVAVEGXSCTHTPPPPFFGRAKNNRA

SEQ ID NO: 331624 - protein, 62 aa, Zea mays
  Clone ID: MRT4577_65547C.1.pep
PFNTESSNHVQSHPRPVHAANSHDGHAAIANDGNAAHAVDGHAPEPPALREGQTMALRSPVP

SEQ ID NO: 331625 - protein, 100 aa, Zea mays
  Clone ID: MRT4577_65548C.1.pep
GVFGDGIRISRLNHCFSIKLLKSFPARTQVLDSHTWLGKDSPKPTQGGLAGPFVDTLKRGSYRDFTREGGPLNPLTPKKKRNTEALGYPGNPERDLGGQQ

SEQ ID NO: 331626 - protein, 142 aa, Zea mays
  unsure (1)..(142): unsure at all Xaa locations
  Clone ID: MRT4577_65549C.1.pep
MGKEXTHILIVVIGHVDSGKSTTTGHLIYKLGGIDKRAIERFEKEAAEMNKRSFKYAWVLDKLKAERESGITIDIALWKFETTKHYCTVIDAPGHRDFFKNMXTGTSPAGWAGVMIDSTTRGFEGGISKDGQTREHALVGFT

SEQ ID NO: 331627 - protein, 60 aa, Zea mays
  Clone ID: MRT4577_6554C.1.pep
IPRGSFFFFNTHFQLNFSYINIYFTNNLNIKNIPTSHLNKLTTHSDEQSHINATKACPSQ

SEQ ID NO: 331628 - protein, 132 aa, Zea mays
  Clone ID: MRT4577_65550C.1.pep
MEPPAAAAADSSPDPTPQDQFPAPSPSPSASPAKRSAWKHPSPNGPAVMDANHWPALSDAAKGIKLPDSSSSSPAPVAAPSAVANSSSSQKHGAHHVRHKSARRGGGGEHSPRDHPDRTTATGWDHAGGGGG

SEQ ID NO: 331629 - protein, 69 aa, Zea mays
  unsure (1)..(69): unsure at all Xaa locations
  Clone ID: MRT4577_65551C.1.pep
FLISLLNSCIXXXTSXRPHYSVHNSHHFSTLIQLAYYHSINNYFTNLHQHLLNLNLYLVHPINSLPRTH

SEQ ID NO: 331630 - protein, 131 aa, Zea mays
  unsure (1)..(131): unsure at all Xaa locations
  Clone ID: MRT4577_65552C.1.pep
NETDPHAXTEQQRTAQPKRHGERDEGEGERRDPPPGEXREGAQQKQRPKTQGNRAQHSKDGRQQGTEDAQGGGEDTAAGGGRKXGQATEKRGEKKREKKGANEGXKXERXEXXDFLRPLLSLLXVCVXRLE

SEQ ID NO: 331631 - protein, 68 aa, Zea mays
  Clone ID: MRT4577_65553C.1.pep
NFKEGIKQTGFHDHRFISGAMICNVKINHRELLYDNADNEIMHIANINRKRQIKVKRGHVVCSRIIHL

SEQ ID NO: 331632 - protein, 98 aa, Zea mays
  unsure (1)..(98): unsure at all Xaa locations
  Clone ID: MRT4577_65554C.1.pep
TYPSRCTHPGVSHTTEDFPPTIFWRSLILLSCSTIRPSITCVFFSYTFFTLPTLXFSGFFPISSYSLLASFVFIFPLIFFFDFILDFLFIFWFFFLFF

SEQ ID NO: 331633 - protein, 85 aa, Zea mays
  unsure (1)..(85): unsure at all Xaa locations
  Clone ID: MRT4577_65555C.1.pep
MWRTDKSVVTLQTRTVGANPKGATGSAXQPCYFDMIKDGIMERKERTVCDSLATGVFVXDKRAASVPXNYNKMLCIQLRGCITKD

SEQ ID NO: 331634 - protein, 158 aa, Zea mays
  unsure (1)..(158): unsure at all Xaa locations
  Clone ID: MRT4577_65556C.1.pep
ILVTVKMTLXNFNFLLNYTQXALIXQPATSDCITQLISXNYKTLTXRGVEYNDTCSVLGVXKFSNDLVMQTTELGNVQSELFLRKXSRCFTFEKGWALRRRVSHNGDQXLMSCPEDCSXCANASPTTKQALTLPLLIYCGILXTAGLCTMSGIKMFSK

SEQ ID NO: 331635 - protein, 50 aa, Zea mays
  Clone ID: MRT4577_65557C.1.pep
FYISVFYSIITKGSVKTPPNWQTMDLRLTCFCKDEVSGPLDKSQILHLKT

SEQ ID NO: 331636 - protein, 246 aa, Zea mays
  Clone ID: MRT4577_65558C.1.pep
MHKLGRGSRDKVQQFMAITGASEKAALQALKASDWHLEGAFDVFYSQPQIAVANTRHLEELYNRYKEPDADMIMVEGISQICNDLQVDPQDIVMLVISWHMKASTMCEFTRQEFIGGLQSIGVDSIEKLQAKLPSLRAELKDDQKFHEIYNFAFAWAREKGQKSLALETAIGMWQLLFAERSWPLIDYWCQFLQVRHNKAISRDTWAQLLEFVKTIDPQLTNYDEEGAWPYLIDEFVDYLKENGLA

SEQ ID NO: 331637 - protein, 154 aa, Zea mays
  unsure (1)..(154): unsure at all Xaa locations
  Clone ID: MRT4577_65559C.1.pep
MCRLRVSLLYKASAPLHLTPSEATTLGRSVLRLSNTDLEVCDTSDELLHQVDAXFEGRPRVASXEVAELVLLQXATRKRLLEGVAMKVAEMVKEVKKSXGRGGAIWEVAKNRSLGKWHEDVMXLMLGHTRMEETLIFLDIQRASLPAVSAKRSS

SEQ ID NO: 331638 - protein, 133 aa, Zea mays
  Clone ID: MRT4577_6555C.1.pep
RGKTADLSYQQSSLSRSGGRFFFFFLKHEKEYFHIHGRTNCRYAVNNLMARFDHMHYLILMQPLYKGKQVTNSNLIRSRTGLRYPAHTYMLQITERKIPALKVELDAQIPQGAHQLTCHLPFHFFYLRLPRRL

SEQ ID NO: 331639 - protein, 235 aa, Zea mays
  unsure (1)..(235): unsure at all Xaa locations
  Clone ID: MRT4577_65560C.1.pep
MHKLGRGSRDKVQQFMAITGASEKAALQALKASDWHLEGAFDVFYSQPQIAVANTRHLEELYNRYKDADMIMVEGISQICNDLQARTFIYFGWLSCLHLCVLIXILIXQIMCVSLXXVDPQDIVMLVISWHMKASTMCEFXRQEFIGWTXSQIGVDSIEKLXQAKLPSLRAELXDDHKFHEIYNFAFAWXKXEKGQKSXXALXTAMGXMWQLLIXERSWPLXIDYWCXFLQVRHK

SEQ ID NO: 331640 - protein, 155 aa, Zea mays
  Clone ID: MRT4577_65561C.1.pep
MIVSSLFSVRTAASVAHVSFEYKWLHKQLVQLRDVPVMDGFICLSHTCSLHAEKFHEIYNFAFAWAREKGQKSLALETAIGMWQLLFAERSWPLIDYWCQFLQVRHNKAISRDTWAQLLEFVKTIDPQLTNYDEEGAWPYLIDEFVDYLKENGLA

SEQ ID NO: 331641 - protein, 49 aa, Zea mays
  Clone ID: MRT4577_65562C.1.pep
QYHQITPEHSVFLNGHEPENITNAIVPEKDLTLILCTTDQQLNVITQVQ

SEQ ID NO: 331642 - protein, 194 aa, Zea mays
  Clone ID: MRT4577_65563C.1.pep
PASAYTTLMGGVYKCGRREVGDGLWNLMRLRGCVPTLATYNVRIQFLVNRGRGWQANELARKMYVAGIKPDEITYNLIIKGFFMMGEHEMAKTVFGAMHGRGCKPNSKVYQTMVHYLCERRDFDLAFRLCKDSMEKNWFPSVDTINQLLKGLMAISKDRNGKEIMKLVTGRKPSYSDGEMRVFKDILSHRKTGR

SEQ ID NO: 331643 - protein, 73 aa, Zea mays
  Clone ID: MRT4577_65564C.1.pep
KKSPPGGSGGAKNRMRTASAILKKKYNSAVRGGCAHKTKKEPGIWQDLIQYWPRAGGRTQTLTRGGGEPFYRP

SEQ ID NO: 331644 - protein, 185 aa, Zea mays
  Clone ID: MRT4577_65565C.1.pep
GMWSSMSDLVRHWPASLEPPPTGTCCSPCTPDARDIHWRRDELMLPLAFPHCLFTSSSFPGGGWRQRWHLMAQRRRRRGGAGSQSVGRQQVREASPCPLAPPAIACLPHRPPPSPCCHILPPIRTAKTLPALLPHDDTADLDRRRHGREQEEVSRGEGRRWIDDDVVEERRRVERQGRRLQVRRG

SEQ ID NO: 331645 - protein, 78 aa, Zea mays
  Clone ID: MRT4577_65566C.1.pep
RRNFSQKRRTTGLMHMDLHGKPRKKAKPGTAVAQGPSAKAWGTKRGSENGEHRNTGKPKRGAHKHAKYSEKYLTGTNP

SEQ ID NO: 331646 - protein, 133 aa, Zea mays
  Clone ID: MRT4577_65567C.1.pep
MARTTNGWARGLLAFAAVAVAVSAGRRYSWDVEAAVAVFRRGRGALGPWAAPAYVAAHALTLALCPPYAIFFEGAAALFFGFLPGVVCVFCAKILGASLSFWIGRAIFKYFTSAMEWLQRNKYFHVVVKGVEK

SEQ ID NO: 331647 - protein, 84 aa, Zea mays
  unsure (1)..(84): unsure at all Xaa locations
  Clone ID: MRT4577_65568C.1.pep
HDEGARDASASSGSRKSFDLEELPQPGCGTFXRVCHLKTQGSDVAIKRINARFFAGNASEQDRIMTDFRNEAHNLACLHHPNVV

SEQ ID NO: 331648 - protein, 218 aa, Zea mays
  Clone ID: MRT4577_65569C.1.pep
ARAPAGIQTLPSQPHRPHRRHAVPGAPSPALPAAAPTPASGRRLATRVRAAAVSDEPKLNKYSARITEPKSQGASQAVLYGDGLTDADLHKPQVGVSSDWYEGNTCNMHLLQIAEAVRDGIRDAGMVAFRFNTVGVRDAICMGTRGMSYSLQSRDLIADSIETDMWAYHYHANISVPGGDWNMTGAIMAMGRVHRPRILAYGGSIKADDFDVNSYDIA

SEQ ID NO: 331649 - protein, 229 aa, Zea mays
  Clone ID: MRT4577_6556C.1.pep
MGKRWIPLEANPDVMNQFIWGLGVSERAVQFCDVYGLDDELIALVPHPVLAVLFLYPFTSLDEENKEESSVSAKSTAGGKDLSKKVYFTKQTVGNACGTVGVIHAIGNATSQIKLVEGSYFEKFYKQTADMDPAQRAAFLEEDDEMEDAHSVAASAGDTDANVDVNEHFVCFSCVDGELYELDGRKSQPTSHGPSSPETLLQDAAKVIKARIAENPNSMNFNVMALSKK

SEQ ID NO: 331650 - protein, 88 aa, Zea mays
  unsure (1)..(88): unsure at all Xaa locations
  Clone ID: MRT4577_65570C.1.pep
LAARHAGLPAALAQISTVEFLSPSLAPVAELCILAEFVKLPWTCGHXSXRHVRSSSCFWQVPMCARARHPLDLVDELRLVGRSSYDRS

SEQ ID NO: 331651 - protein, 55 aa, Zea mays
  Clone ID: MRT4577_65571C.1.pep
LVTQHIRVRIDPPHNCFIQFATPTAVVETAVYTSVLAKRENVFSFLASAVEQLDI

SEQ ID NO: 331652 - protein, 59 aa, Zea mays
  Clone ID: MRT4577_65572C.1.pep
KIIIKNFLANKQFNKTVQDLRQLLHFYKILGIPFDKSFPWGTDNFGGWTMHKPNFSIVI

SEQ ID NO: 331653 - protein, 223 aa, Zea mays
  unsure (1)..(223): unsure at all Xaa locations
  Clone ID: MRT4577_65573C.1.pep
TRAPGCTFTAVFPTRVLLRVVNAGLNSGVFFNLAGHNFTVSLDPYTSNLNTDTLVLSPGQTVYSLVTTVLIPGSYYVLYXLXPXXXXXXXXXXXXXXXXXXXXXXXPPXPXPPXPXXXXPPPPPPPPPPPPPXPPPPPPXPPPPPPXPPPPPPPPPPXPPXPXXXPPPPPPPPPPPXXRPXPPXPXPPXXPPPPPPPPXXXXXPPPPPPPSPPPXXPPPPPGG

SEQ ID NO: 331654 - protein, 77 aa, Zea mays
  Clone ID: MRT4577_65574C.1.pep
RHELESKISFRLETQRSRGFGFASFSMEEATRNDFGEMNAKELRGLNRNVNRGQCLRSRRRRRPGRRRGGRPSWRPG

SEQ ID NO: 331655 - protein, 58 aa, Zea mays
  Clone ID: MRT4577_65575C.1.pep
QGKTSLPTSSPNQTRFQNRCHTELTDYTHSYGLTDKSRPLHSHMIYLTGILKRLAGVP

SEQ ID NO: 331656 - protein, 138 aa, Zea mays
  Clone ID: MRT4577_65576C.1.pep
SFLASTEDAFLLCSGLVLSEPDTSEDVSEHSVLTISQELVPSSCGKQLLDTDEEQTSSAPGPPTWLLLVSFIGCGKGFWKFPSLPPSRGAKSPLEDQPPSGPRHESHPRLGARGERNGERGRRFLAERNAKDEDPGRL

SEQ ID NO: 331657 - protein, 125 aa, Zea mays
  unsure (1)..(125): unsure at all Xaa locations
  Clone ID: MRT4577_65577C.1.pep
VGPDWETTVEWQLCLLRPXMVRTLVNLSVVYHPRXPEMSPLQAIXRAAFVENHYMCRLQKFGDPQPEFALYNTKWVFKKTFGMCKQAPLTMSKPTTLFDSLDSNGTCPLIAIEDKRTRGRTRNTD

SEQ ID NO: 331658 - protein, 55 aa, Zea mays
  Clone ID: MRT4577_65578C.1.pep
CPDRKQGGGFHYKGATVNQWNKVKRGSSTGWGFEESTLKYNLTRDNKATTGKKRG

SEQ ID NO: 331659 - protein, 51 aa, Zea mays
  Clone ID: MRT4577_65579C.1.pep
ILALATLITTRAPVLSTVSWGSLEASELVGEGLAELMPSWQIEIRPNSHAE

SEQ ID NO: 331660 - protein, 75 aa, Zea mays
  Clone ID: MRT4577_6557C.1.pep
HYQIYPLECSKRESHGTIFLVIFTLSLISICKLVGDQIHRYIDIWSMSIIIFNPQTSFATIFPSLVPFLTGNCLG

SEQ ID NO: 331661 - protein, 66 aa, Zea mays
  Clone ID: MRT4577_65580C.1.pep
IRVAKRKVFWKEIRVGKAGRFKRGGRCKKKFNFFFFEVVPILFFSQLLVFFFFFFFFFFFFFGRVG

SEQ ID NO: 331662 - protein, 175 aa, Zea mays
  unsure (1)..(175): unsure at all Xaa locations
  Clone ID: MRT4577_65581C.1.pep
RGRXDGRMFGLETPLMVALQHLLDVPDGDAGAGGDKASGAAAGGGPTRTYVRDARAMVXYLXXVKVFXGAXVXVVXFVGLGLGVFLVFVVVVWVLVVFVLWCCVVCVFLFFVLVFLLCFFFFVVVLFFFFFFVFFFFFFFFFFFVFFFFVVCFFFFFFFFFFLFFVFFVFFFFFF

SEQ ID NO: 331663 - protein, 469 aa, Zea mays
  Clone ID: MRT4577_65582C.1.pep
HWVPRGRPEKSAGHRPPPTPSSPPCPRTGSVGAPALPTPTRRRDDREGGEQRKDSLELHLSASAVCGSDHVTVATSNWSWLRIDFWRRQRDCDLEHGEFDRLLGRRLQVEARSELSGRRGFVSQFSAGHVLSRAGNNVQVFSLNELKTATQNFHMLNCIGRGGFGAVYKGNLKDGTQIAIKKLAVESKQRISEFLTEINVISNVRHPNLVRLIGCCAEGKNRLLVYEYAENNSLANALLGPKNKCIPLDWQKRAAICIGTASGLAFLHEKAQPCIVHRDIKASNILLDKKLLPKIGDSGLAKIFPDTVTHISTRVAGTMGYLAPEYALLGQLTKKADIYSFGVLLLEVISSENSSKPTWGPNMHVLVEWTWKLREEGRLLEIVDPELKKYPEEQMLRFIKVALLCTQATSQQRPSMKQVVNMLSNKAEIDLQNVVAPGVLKEPRQRTGGFGSLTAGTTSSKPKHQRQSS

SEQ ID NO: 331664 - protein, 393 aa, Zea mays
  Clone ID: MRT4577_65583C.1.pep
MGSSVGCLGGGSKSRQDQNGQVVAGSSPRSGHELSRPGNNVHVFSLNELKTATRNFHMLNCIGRGGFGAVYKGNLKNGTPIAIKKLAAESKQGISEFLTEINVISNVRHPNLIKLIGCCVEGSNRLLVYEYAENNSLANALLGPKNKCIPLDWQKRVAICIGTASGLAFLHEEAQPRIVHRDIKASNILLDKKLLPKIGDFGLAKLFPDTVTHISTRVAGTMGYLAPEYALLGQLTKKADIYSFGVLLLEMISGESSSKSTWGPNMHVLVEWTWKLREEGRLLEIVDPELEKYPEEQMLRFIKVALLCTQATSQQRPSMKQVVNMLSNQTEIDLQNVAPPGVLKEPRQRTGGFGGLIADTSSSQSTKGNPAESYSTQTNMNSSQFSTTDVSPR

SEQ ID NO: 331665 - protein, 57 aa, Zea mays
  Clone ID: MRT4577_65584C.1.pep
QCAGGNSAYVNFWRLQLIIDSCFCRYMSELYVRFGSAKKGAARFSDRHDQLTRNFAA

SEQ ID NO: 331666 - protein, 95 aa, Zea mays
  unsure (1)..(95): unsure at all Xaa locations
  Clone ID: MRT4577_65585C.1.pep
PAGAIFDGAFGKNTANDQQLFNDTLWNINKELAFVSFELQAFINQYDGMVYYGVXNNVADKESQLGTKYYVSQIAFYKGLVCDSFLRIVTLYMLC

SEQ ID NO: 331667 - protein, 35 aa, Zea mays
  Clone ID: MRT4577_65586C.1.pep
FGSSTSTTQNLLFSRSLYALRWGWTPGSDDARPLG

SEQ ID NO: 331668 - protein, 165 aa, Zea mays
  Clone ID: MRT4577_65587C.1.pep
RAPPALPKIFLVSNAWPPPFPGIWSVSLGPGYLCSPVSPLFSRVQETFFPFSPPFPLGVWGVLTPPPPFPPGWVLAAFSPPPEALPGAFSIVSLAHRVPGFLPFCPPSCSPVLAPPPFFSLFGGFCSLVPPPPFYFCRVLVFKSLPPPQFFLIFVFPQQPKTKKK

SEQ ID NO: 331669 - protein, 86 aa, Zea mays
  unsure (1)..(86): unsure at all Xaa locations
  Clone ID: MRT4577_65588C.1.pep
AHLLRRQRHDRNSSLVPKCMLCSRVRIPARVCVMAGLLFGAGRGPVVFPGGXFFPHXHFFXKNPLSPPPPLXPXPTIXXXLFPLLS

SEQ ID NO: 331670 - protein, 79 aa, Zea mays
  Clone ID: MRT4577_65589C.1.pep
AHDDVTPIPTHFSVVDISIPRSRFLFWCLTMCCGVANSCEACSSSSFSSVCVCDILQRFLAVSMPKHMWIHRVWWLWYQ

SEQ ID NO: 331671 - protein, 213 aa, Zea mays
  unsure (1)..(213): unsure at all Xaa locations
  Clone ID: MRT4577_6558C.1.pep
MGKRWIPLEANPDVMNQFIWGLGVSERAVQFCDVYGLDDELIALVPHPVLAVLFLYPFTSLDEENKEESSVSAKSTAGGKDLSKKVYFTKQTIGNACGTIGVIHAIGNATSQIKLVEGSYFGKFYKQTADMDPVQRAAFLEEDDEMEDAHSIAASAGDTNXELYELDGLKSQPTPHGPSSPETLLQDAAEVIRARIAENPNSMNFNVMALSKK

SEQ ID NO: 331672 - protein, 78 aa, Zea mays
  Clone ID: MRT4577_65590C.1.pep
EVRKAETRTESDLSTPFSPTGSLEADINLSLLHFPADSKQSCYPDLVGSLLPYTVVTVSVTWWRWAIEMTTAAAVAGR

SEQ ID NO: 331673 - protein, 166 aa, Zea mays
  Clone ID: MRT4577_65591C.1.pep
RPGTEPSADTDEQSRAKEWTPWPATTATKEQQPYFGGVERTPSELELEGVAPVVNLRRSDFSWTAFLPDGATRDHPAAHVTDDNADLADDFPPAMVIIGGFDPLMDWQRRYADVLRRKGKEVLVAEYPGMFHGFYGFPELPEATKVLQDMKAFVDSHIPTPKLADA

SEQ ID NO: 331674 - protein, 842 aa, Zea mays
  Clone ID: MRT4577_65592C.1.pep
MVPREIGMFPFMLLPLKFNLVPNSARVQVAKDEDMDQLEMEMELSGGSGSGHLDGLLSFADVDDDRPEQKPQHSGLELQTTADAAGQQQQLATANGKKKRYHRHTAHQIQQMEALFKECPHPDDKQRLKLSQELGLKPRQVKFWFQNRRTQMKAQQDRADNVLLRAENESLKSDNYRLQAAIRNVVCPNCGHAAVLGEMSYEEQQLRIENARLKDELDRLACIATRYGGGRQPSMSSSALVCLSAPPPVLMPPLDLDMNVYSRHFTDQSPVMGCGDLIQSVLGPPSQQITGTAEHHASTPSFMGAMAPVQEQDRQLVLDLLRAFSMTLAKMCRAGESLWLRRRGASSEVMVADEHARMFSWPVNGGQQDSSASPGGAAARTEGSRDGTVVIMNSITLVDAFLDANKWMELFPSILSKARTIQVINHGSASGHMGSGSLLLMQAELQFPSPLVPAREVVFFRYCVHNGDEGTWSLVDFPAEGFQLEALQTPSVVRCCRRPSGCIIQDMPNGYSSVVWVEHTEIVGEEKPLHQVFKDYVASGSAFGATRWVSLLQRQCERLASELARNIADLGVIRTPEARTNMMKLSQRMITSFSANISASGSQSWTSLSETTEDTIRVTTRKNTDPGQPSGVILTAVSTSWLPFNHQKVFELLADEQQRCQLEIMSSGGSLHEVAHIANGSHPKNCISLLRINAASNSSQNVELMLQESSTHPDGGSLVVFATVDVDAIQVTMSGEDPSYIPLLPLGFAIFPAANPSAAATSAAGSGDGQSSPAGNADEPASGCLLTVGMQVLASAVPSAKLNLSSVTAINSHVCNAVHQITAALKGAGAGGAAEPAAAASE

SEQ ID NO: 331675 - protein, 357 aa, Zea mays
  Clone ID: MRT4577_65593C.1.pep
MDSMASDDSNQGAAAKPKPKPPPLPLSVRLQLAGLTAAIDAVERRDGTVNRCLYGVIDRLLSARASPRPDASGVRSYDVTMDASRGIWARVFAPAAADRPLPVVVYFHGGGFALFSPAIGPFNGVCRRLCAALGAVVVSVNYRLAPEHRWPAAYDDGVDALRFLDARGGVPGLDDGVPVDLGTCFLAGESAGGNIVHHVANRWAAAWQPSARALRVAGVFPVQPYFGGVERTPSELELEGVAPVVNLRRSDFSWTAFLPDGATRDHPAAHVTDDNADLADDFPPAMVIIGGFDPLMDWQRRYADVLRRKGKEVLVAEYPGMFHGFYGFPELPEATKVLQDMKAFVDSHIPTPKLADA

SEQ ID NO: 331676 - protein, 88 aa, Zea mays
  Clone ID: MRT4577_65594C.1.pep
TIASNRRCTRLGRGSRYRGRRYVVDDERPVKLAGEPAPQPVRAPPHDRRFLGLKEFRLEVQDPVQPYFEPDIKEALGKVAMEVVDARI

SEQ ID NO: 331677 - protein, 304 aa, Zea mays
  unsure (1)..(304): unsure at all Xaa locations
  Clone ID: MRT4577_65595C.1.pep
MAGRSTYDNPFEEGAAAAEVNPFADQAKRGGPTAQSSYSGGAFYTTSQRPAPPSTRLSPLAPEPAGFYNDFATPVDIPMDDTNNKDTKTREKELLAKEAELNRREXAGVVLEEKNWPPFFPVIHNDIGNEIPVHLQSTLYVAFASLLGLVLCLFWNIICVTAAWAKGSGPKIWFLAIIYFILGCPGAYYLWYRPLYRAMRNESALKFGWFFLFYLVHIAFCVYAAVSPSILFVGKSLTGIFPAISLIGDSVIVGIFYFIGFALFCLESLLSMWVIQRVYLYFRGSGKEAEMRREAARSAARAAF

SEQ ID NO: 331678 - protein, 168 aa, Zea mays
  unsure (1)..(168): unsure at all Xaa locations
  Clone ID: MRT4577_65596C.1.pep
MPELRSGVRQSRLRAKKVEDLVVQDPTDNLVVAAPTVAGRRGRGRGGRGGGRGAGRGRGGRGRGVPLINLDPDQPLEVLPGAGVGARAAGGAHPIEDIANKVLKMDGGSAEKIAGGEDEGTTSPVPEKVCYYYAPLLGLERKXGKGGFGQVSVGWNVXSGFTXRTGPD

SEQ ID NO: 331679 - protein, 110 aa, Zea mays
  Clone ID: MRT4577_65597C.1.pep
PPPGGEKGFFLTPPTKENWRVLAPPYCGVPPNPPRPPSLWKFFETCWFILNPPFFQPNVGFWALSPHICIVPTPGQIQNFPPKKKKTGNMARMPPGFNGGPPKHVKRAAC

SEQ ID NO: 331680 - protein, 216 aa, Zea mays
  Clone ID: MRT4577_65598C.1.pep
MAGRSTYDNPFEEGAAAAEVNPFADQAKRGGPTAQSSYSGGAFYTTSQRPAPPSTRLSPLAPEPAGFYNDFATPVDIPMDDTNNKDTKTREKELLAKEAELNRREKEIKRREDAAARAGVVLEEKNWPPFFPIIHNDIGNEIPVHLQSTLYVAFASLLGLVVCLFWNIICVTAAWAKGSGPKIWFLAIIYFILGCPGAYYLWYGPLYRAMRNESAL

SEQ ID NO: 331681 - protein, 36 aa, Zea mays
  Clone ID: MRT4577_65599C.1.pep
LHSEGALMAALSHGSVARRDKRFCAESEGRGADSVG

SEQ ID NO: 331682 - protein, 120 aa, Zea mays
  Clone ID: MRT4577_6559C.1.pep
MGTLFAVEGSYFGKFYKQTADMDPVQRAAFLEEDDEMEDAHSIAASAGDTNINLDVNVHFVCFSCVDGELYELDGLKSQPTPHGPSSPETLLQDAAEVIKARIAENPNSMNFNVMALSKK

SEQ ID NO: 331683 - protein, 53 aa, Zea mays
  Clone ID: MRT4577_655C.1.pep
KNPFICPMPKHVNKVWPRPGLHSFSPGVPRTVPLCMGVRDSEGFFSTCMRSSS

SEQ ID NO: 331684 - protein, 188 aa, Zea mays
  unsure (1)..(188): unsure at all Xaa locations
  Clone ID: MRT4577_65600C.1.pep
MGKEPMPELLTAAIXQIEYALVPMHAKRDMLXADQPAILHMLDIPPAAEALNAVNMELDDAAFPLLKVLVATTDVMKACTGANVPVMLGAFPRKEGMESKHAMSKNVSIYKSQTSALEAHASPNCNVLMIANPANTNALILKQFAPSIPQKNITXLTHLDHNMALEQISERLNVQISTVKNDIICDNH

SEQ ID NO: 331685 - protein, 125 aa, Zea mays
  unsure (1)..(125): unsure at all Xaa locations
  Clone ID: MRT4577_65601C.1.pep
TGSRGGFIKGTPRGPPAQRKTSRQAPPGKKGLCYGKQEAGKMTXTNPGQQQGHKSGQMENSTKAGQGGQRKLLNTIRAGRKDQQPNKDDGGDKTVCMCNALPEEEKKAWNQKLERQKGQEMVEQK

SEQ ID NO: 331686 - protein, 66 aa, Zea mays
  unsure (1)..(66): unsure at all Xaa locations
  Clone ID: MRT4577_65602C.1.pep
EGNIVPCLGWVANPCPVFVLSFSDVFCRGNRIFAPKHSCHTGLKDPKKLLKPPKKKRKGGRSXVSS

SEQ ID NO: 331687 - protein, 48 aa, Zea mays
  Clone ID: MRT4577_65603C.1.pep
APTRARTPTLLHLLKNTDLYRDFVTLPRTITNYTTPSTPTKNSLCTRS

SEQ ID NO: 331688 - protein, 133 aa, Zea mays
  Clone ID: MRT4577_65604C.1.pep
PPRFVRASSCARPVPGASRRRRRGRLMVVRAGGPPSTNALILAFVLPLSLFVGTLVTAARVADDLDDRFLREMEINRAILEENEASDEDGAGEEDDDGEEEEGVDLPVVVEEEPAVVGPRTRNRPRRRVFSSQ

SEQ ID NO: 331689 - protein, 146 aa, Zea mays
  Clone ID: MRT4577_65605C.1.pep
MARGAHVVRALSQPPRFVRASSCARPVPGASRRRRRGRLMVVRAGGPPSTNALILAFVLPLSLFVGTLVTAARVADDLDDRFLREMEINRAILEENEASDEDGAGEEDDDGEEEEGVDLPVVVEEEPAVVGPRTRNRPRRRVFSSQ

SEQ ID NO: 331690 - protein, 109 aa, Zea mays
  unsure (1)..(109): unsure at all Xaa locations
  Clone ID: MRT4577_65606C.1.pep
MHLYCAHPGVRIVYAGYXTLDIHFDLHAEKYWMLKQTPRTCCGTPDMGEHNFNLTSKCGKPEAYASPDPFNHWSWDGIHLTEARYGHIVRGWIYSPFDDPSILDTKHLG

SEQ ID NO: 331691 - protein, 140 aa, Zea mays
  unsure (1)..(140): unsure at all Xaa locations
  Clone ID: MRT4577_65607C.1.pep
XQQRXLSSXRQGSVGGTRPXXLADYPTSXKGGSTHVIWWXXALGGGACXXXLSEKPXXWQXRDQPLRXXSLSXPPVEQCAEGLXNPXTEXGXHPSXXXAAALIXXPARXXLRDRDRTLXXDYQTSQEGRSTPSTLVACRL

SEQ ID NO: 331692 - protein, 67 aa, Zea mays
  Clone ID: MRT4577_65608C.1.pep
GIPISLSLGFRIGLISLTYYSYSYMYIFASLCMHECISSHRSCAVRFIHSCSSIDRSTRKKNKGAHH

SEQ ID NO: 331693 - protein, 208 aa, Zea mays
  unsure (1)..(208): unsure at all Xaa locations
  Clone ID: MRT4577_65609C.1.pep
QWFNITLRHALLNLAVHLFYNKFQLYCKPPEGRYCTFDEHFFPTFFNRVDPGGITNWSVTLVGWTEAKLHSRSXKSSRCSLXELLKCQTSVNQNFRFSRDYNKVVTRVPCMXKGTKSPCYLFVTKFFPEFFNTFLQLFSGFTSACFSIFFRLAQKIPLVFFLLPVKCANDTHRLTAKWPVQGHWCTSGRPLVGLRCCLFSIALPSPSV

SEQ ID NO: 331694 - protein, 88 aa, Zea mays
  Clone ID: MRT4577_6560C.1.pep
KIFGNKCSALGYKCFYNCNFWPFFGQKRGQGVRAVIPLCQKGPRAPKRALFMHDPGEPGGSGEAKRGLELGWVEGLGRRGGLLAHSVN

SEQ ID NO: 331695 - protein, 92 aa, Zea mays
  Clone ID: MRT4577_65610C.1.pep
RLPQENSKLAAIQTREHGDGGQASGLQGQALPTTSRADTAPSRRPRLRQLHTLHQDARAHSSGLTMLMLPTMSDDTSANPLLPPSLHSMSST

SEQ ID NO: 331696 - protein, 80 aa, Zea mays
  unsure (1)..(80): unsure at all Xaa locations
  Clone ID: MRT4577_65611C.1.pep
PFRHDRHPTETYSKSHAIRKKWKYSTARNGDPIPRRSGYRVTLRHXSIRYKQSYPPFRDRHQRPVGTYTTLRHLPKHITS

SEQ ID NO: 331697 - protein, 56 aa, Zea mays
  Clone ID: MRT4577_65612C.1.pep
GKVTLPAVHYIGRVNAITPKTKLVDQTKLIQYSHYIYRAALPTLDPFLLWTKSIFT

SEQ ID NO: 331698 - protein, 189 aa, Zea mays
  Clone ID: MRT4577_65613C.1.pep
TPSVEISKSHSRTPCPRPRPPHIVRCPRRESSPRWHGACRPRTCPDPDCTLPPLDVHALALFISLAVVVVQTSLIMVERRAKKRMVFVMNKLMWLVCLFISVAFIALTYVVVGHDDWWLAWCTMGIGAAIMLTTLGSMCYCIVAHRLEEKNTRKIRRASASQSRGSWSRSVDSDEEILNSEYKTKMYAL

SEQ ID NO: 331699 - protein, 131 aa, Zea mays
  unsure (1)..(131): unsure at all Xaa locations
  Clone ID: MRT4577_65614C.1.pep
ADRACIHSLXVFHPLAPIEDKIDSCISYVSVAFRLYDLRQTGFIEREEVKQMVIAILMEFDLKLSDDLRAYFIDKSFEDANADXRAINRKGXWKEFALRHPNLFKHMSLTLTLRINEELMETLTVEERISL

SEQ ID NO: 331700 - protein, 108 aa, Zea mays
  Clone ID: MRT4577_65615C.1.pep
PASFIFLVVGSVFMRLALFCSSFFPHLSVCSAGPPVFCREGVFVFSPVAAIFVFSPGPLGLFYCFSVFVALLGPFFSFSFSRAPCKIPGFFFFLSTVPSFFLSPLVLL

SEQ ID NO: 331701 - protein, 93 aa, Zea mays
  Clone ID: MRT4577_65616C.1.pep
DRQTTIATYRGLADRSGEQHYHAADNLSAAVDERGERGHVHGGLGRGEVVEEISLALPGRNVQGRPSAPPVGPERVHVRALERSEPVLLRHRY

SEQ ID NO: 331702 - protein, 57 aa, Zea mays
  Clone ID: MRT4577_65617C.1.pep
NSKLSINVSYKSFTSIATHGHISRIYIVIVLLYDYVAYYSDVVSKTLVFANLREYLM

SEQ ID NO: 331703 - protein, 418 aa, Zea mays
  unsure (1)..(418): unsure at all Xaa locations
  Clone ID: MRT4577_65618C.1.pep
LGTSRPAARVYGNPDDNCFRRLFISFSASIFGFVNACRPLIGLDRTLLKNKYLGTLFLATGFDGDGALFPLAFGVVDEETDENWVWFLSELHELLEKNTENMPRLTILSDRRKGITDGVEFNFPTAFHGYCMRHVSEAFKKEFNNPVLANLLWEAAHALTVIEFETKLLEIEDASPEAVVWIRHLPSRLWATAYFEGTRYGHLTANIAESLNSWILDASGLPIVQMMECIRRQLMTWFNERREASMQWSTILVPAAERRVQEAIERARGYXVARANEAEFEVVSAHEGTNIVDIRNRCCLCPGWQLYGVPCAHGVAALLSCRQNVHRYAESCFTVATYRKTYSQTIHPIPDKTLWSETADQGEVKAEMVINPPKSLRTAARPRKKRVRAEDRGRVKRVVHCSRCNQTGHFRTTCAAPI

SEQ ID NO: 331704 - protein, 108 aa, Zea mays
  Clone ID: MRT4577_65619C.1.pep
AAAWGGGGCFFFFFFWFFFFFFFFFFFFFFFFFWQPLEPKNPLFYGLKHPHMSGGGGGGNTPPRHHHNNGHCPRRVPGGDLNGRPKRGPIPPPIIFFFFGAFTATSHY

SEQ ID NO: 331705 - protein, 70 aa, Zea mays
  Clone ID: MRT4577_6561C.1.pep
CWVIFFFFFFFFTMIIRFFLIGGISTTTDFLPLLGVQQRGDKPGEPKTQRKGVIWGDANLWGPQRTQQAS

SEQ ID NO: 331706 - protein, 94 aa, Zea mays
  Clone ID: MRT4577_65620C.1.pep
KTTIHKTAKVKIITSSRYSKYNYTINPYYTCSIIPLLIYHTLLPSTIFYSTILIKLLKSLLLFPIDTNSYPLHKFPFPTLYFFKNFYLLHSFFL

SEQ ID NO: 331707 - protein, 219 aa, Zea mays
  unsure (1)..(219): unsure at all Xaa locations
  Clone ID: MRT4577_65621C.1.pep
MEAIRKQASKLREQVARQQQAVMKQFGGGYGADGVFADEAEAHQHSKLEKLYISTRAAKHFQRDIVRGVEGYIVTGSKQVEIGGQLKPCCHFGEHINLNFEIVNVMCFVLLGNKLCEDGKKYGTENTCTSGSTLSKAALSFAKARSMMEKERGNLLKALGTQVAEPLRAMVMGAPLEDARHLAQRLXEVSKRQMKLREASGNSDMISRLEAAESKLQEL

SEQ ID NO: 331708 - protein, 369 aa, Zea mays
  Clone ID: MRT4577_65622C.1.pep
MEAIRKQASKLREQVARQQQAVMKQFGGGYGADGVFADEAEAQQHSKLEKLYISTRAAKHFQRDIVRGVEGYIVTGSKQVEIGNKLCEDGKKYGTENTCTSGSTLSKAALSFAKARSMMEKERGNLLKALGTQVAEPLRAMVMGAPLEDARHLAQRYDRMRQEAEAQAIEVSKRQMKLREASGNSDMISRLEAAESKLQELKSNMGVLGKEALAAMTAVEGQQQRLTLQRLIALVESERNYHQKVLQILDQLEREMVSERQRIEGAPPPVVESSMPPPPAYEEVNGIFMRNTVAELVETVEYFLAEAIQSYRAESDTELNLSAGDYIVVRKVSNNGWAEGECRGRAGWFPYDYIEKRERVLASKVAQVF

SEQ ID NO: 331709 - protein, 397 aa, Zea mays
  unsure (1)..(397): unsure at all Xaa locations
  Clone ID: MRT4577_65623C.1.pep
MEAIRKQASKFREQVARQQQAVMKQFGGGYGADGVFANEAEAQQHSKLEKLYISTRAAKHFQRDIVRGVEGYIVTGSKQVEIGGQLNSRVSFIEHMKFEFGIVSVMCFVLFRXKLCEDGKKYGTENTCSSGSTLSKAALSFAKARSMMEKERGNLLKALGTQVAEPLRAMVMGAPLEDARHLAQRYDRMRQEAEAQAIEVSKRQMKLREASGNSDMVSRLEAAESKLQELKSNMGVLGKEAVAAMTAVEAQQQRLTLQRLIALVESERNYHQKVLQILDQLEREMVSERQRIEGAPPVVESSMPPPPAYEEVNGIFMRNTVAELVETVEYFLAEAIQSYQAESDTELNLSTGDYIVVRKVSNNGWAEGECRGKAGWFPYDYIEKRERVLASKVAQVF

SEQ ID NO: 331710 - protein, 368 aa, Zea mays
  unsure (1)..(368): unsure at all Xaa locations
  Clone ID: MRT4577_65625C.1.pep
MEAIRKQASKFREQVARQQQAVMKQFGGGYGADGVFANEAEAQQHSKLEKLYISTRAAKHFQRDIVRGVEGYIVTGSKQVEIGNKLCEDGKKYGTENTCSSGSTLSKAALSFAKARSMMEKERGNLLKALGTQVAEPLRAMVMGAPLEDARHLAQRYDRMRQEAEAQAIEVSKRQMKLREASGNSDMVXRLEAAESKLQELKSNMGVLGKEAVAAMTAVEAQQQRLTLQRLIALVESERNYHQKVLQILDQLEREMVSERQRIEGAPPVVESSMPPPPAYEEVNGIFMRNTVAELVETVEYFLAEAIQSYQAESDTELNLSTGDYIVVRKVSNNGWAEGECRGKAGWFPYDYIEKRERVLASKVAQVF

SEQ ID NO: 331711 - protein, 151 aa, Zea mays
  unsure (1)..(151): unsure at all Xaa locations
  Clone ID: MRT4577_65626C.1.pep
MIKRPVCFCFSLHLLAIEFLHRAADLTLVPSVAIGRDLQAARVTAANKIRLWNKGVDSESFHPRFRNMEMRSRLTYMHIPLPFCAVLYLSVSMPGPNCGANVFVGXNGEPEKPLVFYVGRLGVEKSLDFLKRRALICPWYFDCYGLWYVQA

SEQ ID NO: 331712 - protein, 369 aa, Zea mays
  unsure (1)..(369): unsure at all Xaa locations
  Clone ID: MRT4577_65627C.1.pep
MEAIRKQASKLREQVARQQQAVMKQFGGGYGADGVFADEAEAHQHSKLEKLYISTRAAKHFQRDIVRGVEGYIVTGSKQVEIGNKLCEDGKKYGTENTCTSGSTLSKAALSFAKARSMMEKERGNLLKALGTQVAEPLRAMVMGAPLEDARHLAQRYDRMRQESEAQAIEVSKRQMKLREASGNSDMISRLEAAESKLQELKSNMGGLGKEAXAAMTAVEGQQQRLTLQRLIALVESERNYHQKVLQILDQLEREMVSERQRIEGAPPPVVESSMPPPPAYEEVNGIFMRNTVAELVETVEYFLAEAIQSYRAESDTELNLSAGDYIVVRKVSNNGWAEGECRGRAGWFPYDYIEKRERVLASKVAQVF

SEQ ID NO: 331713 - protein, 131 aa, Zea mays
  Clone ID: MRT4577_65628C.1.pep
KTRRKIGFAVLYGLTNFFTNFGPNTTTFIVPAEIFPTRMRATCHGIAGAFGKIGAIIGVFGFMFTMEEHHVAPRALWALFASNLVGLVFTFLLPDSKGKSLEEMTGETEEQQLQQDAAVVAAADHIHLVPI

SEQ ID NO: 331714 - protein, 41 aa, Zea mays
  Clone ID: MRT4577_65629C.1.pep
EDQKHDSVNKAALLCSERYGKKQYLWTQNLMLVIVLTSLVK

SEQ ID NO: 331715 - protein, 55 aa, Zea mays
  Clone ID: MRT4577_6562C.1.pep
STPNTGGNTSGSTFPTNKGSQEAKVNDKEKNKGYMLWKPSQGSPLAHYGGAVNSS

SEQ ID NO: 331716 - protein, 108 aa, Zea mays
  Clone ID: MRT4577_65630C.1.pep
ACGAGPKPPEPDRRQHCHGTTLSGNPSKKTVSFIAYPGAPDCSTQFYARRTRMTITQMLSCCLSTLTNTITILTARDPTTSQHGGVVTLWRAKGRGTELLRTHTMTIP

SEQ ID NO: 331717 - protein, 90 aa, Zea mays
  Clone ID: MRT4577_65631C.1.pep
LRCRIRDGFRSRTHQERGSHCVRVYCRCSTGWSCTMVTWRVWLREPMLARLVCRSAALHHQSGWNLSLRLHGLSDYDLRHGVADPSGRRS

SEQ ID NO: 331718 - protein, 137 aa, Zea mays
  Clone ID: MRT4577_65632C.1.pep
PPKPISFKVQGSLSFSPHFNGRKTLKKKPLPSAFPVDQKKPSPSPFPVKKNPFPRSKKQRQLALLPNQRPKILRGVKKKNPPPPKKGPPRLGQEASFCEKGFWSCKKPLVKFFHVPPPSREGFVFCFKGLWGEGGPI

SEQ ID NO: 331719 - protein, 87 aa, Zea mays
  Clone ID: MRT4577_65633C.1.pep
TNNINHHSHIYQIASHTSINKFTCCSRKREYRQGVYVQTTINEPCRKPYIICTFISTNYILIVKADIFISIDLMAMCHSLDGSMCSP

SEQ ID NO: 331720 - protein, 92 aa, Zea mays
  Clone ID: MRT4577_65634C.1.pep
SYSVVSFAACMPVTFFPHCVLCACGVSKIKDGPIVWSGSGSPPGKLGVGFAGLVLVHVIGRHRDTPCIFDLCALVCVPMSLPRLAQKSPSCF

SEQ ID NO: 331721 - protein, 99 aa, Zea mays
  unsure (1)..(99): unsure at all Xaa locations
  Clone ID: MRT4577_65635C.1.pep
CLEHGIQHDGQMRGDKXIGRGXHAVIAFLSETGSGKHVHRGVYVVLERSVTDXGQXGAYSQIIHPEQVIRGKEVAAXSCGSGQSSVGKQVYDQGEHGLG

SEQ ID NO: 331722 - protein, 48 aa, Zea mays
  Clone ID: MRT4577_65636C.1.pep
RSHRRELPLMNTFMDTSRSGMGSSLGDGEAHMTLFIPNTTLKRYTYFL

SEQ ID NO: 331723 - protein, 168 aa, Zea mays
  unsure (1)..(168): unsure at all Xaa locations
  Clone ID: MRT4577_65637C.1.pep
WRTSTSTLSHGGRFIQYNIFGNVFEVTSKYKPPILPIGKGAYGIVWSARPPLTPIRIVCCATXGLLICDLPSSALNSETAEQVAIKKIANAFDNKIDAKRTLREIKLLRHMDHENIVAIRDIIPPAQRAAFNDVYIAYELMDTDLHQIIRSNQALSEEHCQYPSIHMQ

SEQ ID NO: 331724 - protein, 75 aa, Zea mays
  Clone ID: MRT4577_65638C.1.pep
MASYGVGMLNTIGYVYSRQAAKELGKKVMFLGVPFIAEWFKDKGHFIKSQVTAATGNIELIIVYLGVLSENLGSM

SEQ ID NO: 331725 - protein, 229 aa, Zea mays
  Clone ID: MRT4577_6563C.1.pep
MGKRWIPLEANPDVLNQFIWGLGVHEEDVQFCDVYGLDDELLAMVPQPVLAVLFLYPLTSLDEEKEESSVSAATSTSAGKELSKKVYFTKQTVGNACGTVGVIHAIGNATSQIKLVEGSYFEKFYKQTADMDPAQRAAFLEEDDEMEDAHSVAASAGDTDANVDVNEHFVCFSCVDGELYELDGRKSQPTSHGPSSPETLLQDAAKVIKARIAENPNSMNFNVMALSKK

SEQ ID NO: 331726 - protein, 157 aa, Zea mays
  unsure (1)..(157): unsure at all Xaa locations
  Clone ID: MRT4577_65640C.1.pep
MAGWCEQAVALLQRPAVAEMAVDVLLCAVPIWAAVMIGLVVGWSWRPRWTGLLFLGLRSRLRILWVPPXLGARRLWXACTALSACSVATKLISSAFRRCRGKHQDRASPDDDAAATRDGGCRADGRTNFEGEHDTVTEKDLQLLLQLLDNKECGDTA

SEQ ID NO: 331727 - protein, 501 aa, Zea mays
  Clone ID: MRT4577_65641C.1.pep
MTKILLLLLLLALPLPAALALTAEGLALLTFKAAATDDPHSALSRWSESDQDPCRWPGVICANASSSAPSAAPRVVGLAVAGKNISGYIPSELGSLLFLRRLNLHGNRLSGVIPAALSNASSLHSLYLYGNRLTGGLPVALCDLPHLQNLDVSGNALSGELPLDLRGCRSLQRLVLARNAFTGELPAGVWPEMPNLQQLDLSSNAFNGSIPPDLGELPRLAGTLNLSHNHFSGVVPPELGRLAATVTLDLRFNNLSGAIPQTGSLASQGPTAFLNNPGLCGYPLQVPCRAVPPPTESPTPPATTTPLPSTASSDRHQPIRTGLIALISVADAAGVALVGVILVYMYWKVKDRKGRRDGGGDDSSKSGLCRCMLWRHGGSDSSDASSGDGDGEGKYSGGEGELVAMDRGFRVELDELLRSSAYVLGKGGKGIVYKVVVANGTTPVAVRRLGGGGGGADRCKEFAAEARAVGRVRHPNVVRLRAYYWSADEKLVVTDSLEKIG

SEQ ID NO: 331728 - protein, 656 aa, Zea mays
  Clone ID: MRT4577_65642C.1.pep
RRLNLHGNRLSGVIPAALSNASSLHSLYLYGNRLTGGLPVALCDLPHLQNLDVSGNALSGELPLDLRGCRSLQRLVLARNAFTGELPAGVWPEMPNLQQLDLSSNAFNGSIPPDLGELPRLAGTLNLSHNHFSGVVPPELGRLAATVTLDLRFNNLSGAIPQTGSLASQGPTAFLNNPGLCGYPLQVPCRAVPPPTESPTPPATTTPLPSTASSDQHQPIRTGLIALISVADAAGVALVGVILVYMYWKVKDRKGRRDGGGDDSSKSGLCRCMLWQHGGSDSSDASSGDGDGEGKYSGGEGELVAMDRGFRVELDELLRSSAYVLGKGGKGIVYKVVVANGTTPVAVRRLGGGGGGGADRCKEFAAEARAVGRVRHPNVVRLRAYYWSADEKLVVTDFVGNGNLTTALRGRPGQTVLSWSARLKIAKGAARGLAYLHESSPRRFVHGEVKPSNILLDADFTAHVADFGLARLLAVAGCAPDGPPSTGGAGLLGGAIPYVKPPATGTGPDRFGAGGGYRAPEARAPGAKPTQKWDVFSFGVVLLELLTGRGPAADHASPSTSASFSAPVSGSTATDRSGSGEHGGGAVPEVVRWVRRGFEEDVRPLAEMVDPALLRGPALPKKEVVAAFHVALQCTESDPELRPRMKAVADSLEKIG

SEQ ID NO: 331729 - protein, 85 aa, Zea mays
  unsure (1)..(85): unsure at all Xaa locations
  Clone ID: MRT4577_65643C.1.pep
MGKDDVIESGAGSGEFAAKDYTXPPPAPLIDAVELGSWSLYRAVIVEFMVPLLFLYITVATXVTGNQHHIDSLDKCLFFSAQTHP

SEQ ID NO: 331730 - protein, 176 aa, Zea mays
  Clone ID: MRT4577_65644C.1.pep
PFWQTRVHLLVSPPYGGPLNRGGWSPPPWGKKGAPSSFFKKKAPLGSFFPKKKGPFLVFPPFKNKENLVFPKFLGAFKAIFYPNFFRARKKWGGGFLGSKWGAQAKAPEKSPPQGGGQGKPQIVPLGGAPVFFRGKQYEPGLGFSQTSFKCFCPPPPFLNFLKKRFPGFFFAPRPP

SEQ ID NO: 331731 - protein, 73 aa, Zea mays
  Clone ID: MRT4577_65645C.1.pep
KKKLGSGGFGPWPAKLWSGRFGLRKGQLGFRVFWAWLKPNWGVKFGEWVLTGFTPLPLKNGGKRGFNPPPLIR

SEQ ID NO: 331732 - protein, 77 aa, Zea mays
  Clone ID: MRT4577_65646C.1.pep
NISPISSNLNTREGHDENPRVDAHHRRRRCRPVLPPSLCISPRGATTAVYRRRAETDQERQRPSCLRDRPLGSLGVH

SEQ ID NO: 331733 - protein, 162 aa, Zea mays
  Clone ID: MRT4577_65647C.1.pep
MKEGGEKKNILSKTLQRCRTSLAQRRRPPPPAAPKRAASSPSLGVPPPPPVPAAGYFTVLVGPEKERFGVRARCANHPLFRALLDAAEAEYGFAGCDGPLELPCAVDDFMEVMWEMELGDPSASPGCGRFAAGSTRGYHHVHQLAGYHLVVSPPARFLVAGR

SEQ ID NO: 331734 - protein, 37 aa, Zea mays
  Clone ID: MRT4577_65648C.1.pep
GSVRLGGAPTSFFNYRFRGWIAFWCPSLRHRVTYITA

SEQ ID NO: 331735 - protein, 78 aa, Zea mays
  Clone ID: MRT4577_65649C.1.pep
AQSVITSNPYVPPLVVAAHPHEPNQFAVGLSDGFVKVLEPLESEGKWGTPAPVTNGTPNGKTPASSTTSNPATDQIQR

SEQ ID NO: 331736 - protein, 44 aa, Zea mays
  Clone ID: MRT4577_6564C.1.pep
LFPTILSSYTPASGCGVDNSGSYELPNDFLYVNILCHLSCAVPV

SEQ ID NO: 331737 - protein, 200 aa, Zea mays
  unsure (1)..(200): unsure at all Xaa locations
  Clone ID: MRT4577_65650C.1.pep
MTCACDVMKHLFLLALFCIEDGENEXDXGIDAKASVPGGSFDITKLRASGNVKTDSTKVVXEAWASACGGTGKQTILIPKGXDFLVGQLDFTGPCKGDVSIHVDGNLLATTELRQYEDHGNWIEILRVDNLVITDKGKLDGNGPDVWSKNSCTRKYDCNILPNSLLMDFANNEEVSGVTLLNSKFFHMNMYRCEDMLIKD

SEQ ID NO: 331738 - protein, 111 aa, Zea mays
  unsure (1)..(111): unsure at all Xaa locations
  Clone ID: MRT4577_65651C.1.pep
TLVGEEKNEEKGDYLNXPXPVPFEEIQCEALMSVKPELFAGLRLDCTTGWNNXFSLSRNDHMGFFEVPAHGSDTIKVPTAHYESGANXFLDPKXMLIGRVMTDGLLTARVR

SEQ ID NO: 331739 - protein, 150 aa, Zea mays
  unsure (1)..(150): unsure at all Xaa locations
  Clone ID: MRT4577_65652C.1.pep
RGCAASNGCSKSAHPGGYGRTKAGSELEELDKMWDDATSGPGPQTGLXNLRKGTTARPLXSIKIAXTGRLLARRLEQTTSIPTTPNDAAASQLXARGTKRARQSIPPXSKLPTWVMTTSLLDRPKANTTTVYDWMYTNYMTSTTRVDGEI

SEQ ID NO: 331740 - protein, 117 aa, Zea mays
  unsure (1)..(117): unsure at all Xaa locations
  Clone ID: MRT4577_65654C.1.pep
MKKYTVVYYIFISFVSLLADKLYCCILYPEKEKALTLLRQDPNFXTITPSSDMMVRAPTYDVQLLLSIYPKMKEKXSKVSLWPPAKNSELYCKCFCLNDNQPADWSPLPPVPDDIHA

SEQ ID NO: 331741 - protein, 861 aa, Zea mays
  unsure (1)..(861): unsure at all Xaa locations
  Clone ID: MRT4577_65655C.1.pep
FGPDSELGQGLAAHRPRRAMASPLLCVLLYLLRHLTACHAARDIITPDRPLAGNETLVSGGEGNFALGFFTPPGANSTYLGVWYNKVSLRTVVWVANREAPIAGAVGDNPGATLSVSAGGTLAIAAGNRTVVWSVEPASRLASPAAQILDNGNLVLKDGAGGVAGEESYYPIDTLPPETXLGIEYVKSKNRTLTSWKSPXDPSPGPVDMVMDTSGDPQVFIWDCGEKVWRSGPXVCVHFTGVPDTATYSGITFSFVNSAREVTYSFQVHNVSIISHLGVVSTGNYGLLQRSTWVEAARAWNLYWYAPKDQCDAVSPCGPNGVCDTNNMPVCSCLRGFTPRTPAAWALRDGRDGCVRSTPLDCRNGTDGFVTVRHAKVPDTERSAVDWSLTLDQCRQACLRNCSCTAYASANVSGGAGGGXRAGAGFGXCVMWTTGLTDLRVYPDFGQDLFVRLAAVDLDVEAKSREARIKIAVGASVSALALLLAVAGLLIWSWRRRLTRTDGSSKWSSSRPTGRRYEGSSHGDDLELPIFDVGTIAAATDGYSIENKLGEGGFGPVYKGKLEDGMEIAVKTLSKTSAQGLDEFKNEVLLIAKLQHRNLVRLLGCSISGQERMLVYEYMANKSLDYFLFEKDNVVLDWQVRYRIIEGITRGLLYLHQDSRYRIIHRDLKAANVLLDKEMTPKISDFGMARIFGNEETEINTRKVVGTYGYMSPEYAMDGIFSVKSDVFSYGVLLLEIVSGRRNRGVYSYSNNQSLLGHAWSLWNEEKSIELADERMNGSFNSDEVHKCIRVGLLCVQENPDDRPLMSQVLLMLASTDATSLPTPKQPGFAARRVLMETDTSSTKPDCSIFDSATITMLEGR

SEQ ID NO: 331742 - protein, 127 aa, Zea mays
  unsure (1)..(127): unsure at all Xaa locations
  Clone ID: MRT4577_65656C.1.pep
MSGSNFGDSMGWSSSGRSSGPRRGKRGGGGGGGTDKPKQPQRGLGVAQLEKIRLQSEMAEYFHPLGGQAPSLIHRTGSLXLGGCAGVDVLAVVVAIFLLPCCRRHLVGVPNPSKFRDAIRRDRRTIQ

SEQ ID NO: 331743 - protein, 69 aa, Zea mays
  Clone ID: MRT4577_65657C.1.pep
FDAFPECLSRRLLPCLCFYYLIISGVYFAWGTGLTSLSVHRVIIYVAVGIHALLLKSPPFLAFWCPCAT

SEQ ID NO: 331744 - protein, 79 aa, Zea mays
  Clone ID: MRT4577_65658C.1.pep
EQSENGKFSNPVMQLHNTNSSKSCRQSVSNENSELILKDHSKNVVIPDDVTAKRWQTVVQVDPLLEISNKDWMNPAFLY

SEQ ID NO: 331745 - protein, 38 aa, Zea mays
  Clone ID: MRT4577_65659C.1.pep
ISHTDMCNFSVIAYRSLIFHDRGVAHISMRHLLSPDTA

SEQ ID NO: 331746 - protein, 100 aa, Zea mays
  unsure (1)..(100): unsure at all Xaa locations
  Clone ID: MRT4577_6565C.1.pep
ASPHAQXTPSPSPPPGEHPPQAAGAXGCAFHPDPPXSSWLLATAAQRPPLXXTXGRNPARRSXRADXSRRKKKEIYVVWWAAAFHLQTCSYXGLINFLSL

SEQ ID NO: 331747 - protein, 172 aa, Zea mays
  Clone ID: MRT4577_65660C.1.pep
RPRHRAATGTLRWSGCGRRDHCRCRRGERAWAWNASGGWPPPDRLLELPAAPWTRPTRWASVAGGALSRLDALTSGLSDAQRWALFGFLAATWLYLTARPGVLSGAVDMYVLAPLQLALDSVLGRRSLKMSDFVVGERIGEGSFGVVYAGAVVPKNGAVVEERFGNAKTSLQ

SEQ ID NO: 331748 - protein, 735 aa, Zea mays
  Clone ID: MRT4577_65661C.1.pep
MPLWLYLMATATSSAPLLPKPALRAASSSSLHTPNPRSKIQRATPEQQDQHVDTKWRRQPRAPPRRGEGAKRRLRSLVQRGEIDEALVLFDSMASGGGRNCPPVVPCNILIKRLCSDGRVSDAGRVFAALGPSATVVTYNTMVNGYCRAGRIEDARRLINGMPFPPDTFTFNPLIRALCVRGRIPDALAVFDDMLHRGCSPSVVTYSILLDATCKASGYRQAMALLDEMRAKGCEPDIVTYNVLINAMCNEGDVDEALNILSNLPSHGCKPDAVTYTPVLKSLCGSERWKEVEELLAEMTSNNCAPDEVTFNTIVTSLCQQGLVDRAIEVVDHMSEHGCVADIVTYSSILDGLCDVGRVDDAVELLSRLKSYGCKPDTIAYTTVLKGLCSTEQWERAEELMAEMLCSDCPPDEVTFNTVVASLCQKGLVDRAIRVVEQMSENGCSPDIVTYNCIIDGLCNESCIDDAMELLSDLQSCGCKPDIVTFNTLLKGLCGVDRWEDAEQLMANMMRSNCPPDEMTFNTVITSLCQKGLLTQAMETLKIMAENGCVPNSSTYNIVVDALLKAGKAQAALELLSGMTNGTPDLITYNTVISNLTKAGKMEEALDLLRVMVSNGLCPDTTTYRSLAYGVCREDGTDRAVRMLRRVQDTGLSPDTTFYNGVLLGFCRDRRTDLAIDCFAHMVSSGCMPDESTYVILLEALAYGGLLDEAKRLLASLCSLGVLDKKLIEEESHYS

SEQ ID NO: 331749 - protein, 52 aa, Zea mays
  Clone ID: MRT4577_65662C.1.pep
AVDMTLQPHQWTENTYISPIHGEDEKKSSSQHKDIMAKERSKGLNILHIILI

SEQ ID NO: 331750 - protein, 151 aa, Zea mays
  Clone ID: MRT4577_65663C.1.pep
QPQSPLVMVEPRGLRSSSPLQRVRRRGCCCPMSSSTFAVDVPEMPRPQTLLGAVSLHATRIQSEKRTAMSSTACEGGSGPLWSGTPLSSLYWVAGTVQETTIPSTLWAYNISGGGTYASPRYSHYDFTISIFRCRRLDYLGKLELRLRTGS

SEQ ID NO: 331751 - protein, 90 aa, Zea mays
  Clone ID: MRT4577_65664C.1.pep
LGGGIRGQGAPPKQERVVWALPHLGPCFLSFRGWPRVCLLDSPKLWGREEAFRGEHGVCSPKSFVPRPGLICHPWVLGRVFHFFIGWLAP

SEQ ID NO: 331752 - protein, 61 aa, Zea mays
  Clone ID: MRT4577_65665C.1.pep
APMHERACFVPNPVRASAACPSVHPIFFVSVFLIITIVRASQRHDVCHNNITRTPAHQHSC

SEQ ID NO: 331753 - protein, 43 aa, Zea mays
  Clone ID: MRT4577_65666C.1.pep
CHKQPQGSVLCGFYACEFMKMNGRYITNPSKVLLVIVMFVFVN

SEQ ID NO: 331754 - protein, 45 aa, Zea mays
  Clone ID: MRT4577_65667C.1.pep
FSSVYLFCFVFFFIFDNALSFLRVRHGISFGFDLGGTYLTFYLLT

SEQ ID NO: 331755 - protein, 115 aa, Zea mays
  Clone ID: MRT4577_65668C.1.pep
FRSLSRSSFFFFCFRSLRSKTISRPAGSFFLHPLGAPDKNYGPRTNTTDPHRAKRTAPTFTRAVRTAPCPRWAGPAVPGPAPAPISQWPVCTEPFRDSNCGCQRTMWVQNPPNTN

SEQ ID NO: 331756 - protein, 61 aa, Zea mays
  Clone ID: MRT4577_65669C.1.pep
SVLTSKICYLHMMCSYQDGSTGSFANSHAIPRFKTFRKGPQTHWSSNSWQGVHNHRKSRFV

SEQ ID NO: 331757 - protein, 46 aa, Zea mays
  Clone ID: MRT4577_65670C.1.pep
VHSALLSSPFKADDQAWLCIRRIESLGSKFRMIVVNNLVKINDITI

SEQ ID NO: 331758 - protein, 70 aa, Zea mays
  Clone ID: MRT4577_65671C.1.pep
AIKQWQKISIYCPCSIFMAALCHSGLVGWGIIYLVPLLFINDRPICWNLCIAWLTGFLYCIQLLELLQTV

SEQ ID NO: 331759 - protein, 82 aa, Zea mays
  Clone ID: MRT4577_65672C.1.pep
STNMHFYTLTYFITNTDPKHAERDFKLKNSVFLSFTHTTQYLCIAVSLASLIIVQPPPQVIYIIIISMVADRCYHQLHVISL

SEQ ID NO: 331760 - protein, 401 aa, Zea mays
  unsure (1)..(401): unsure at all Xaa locations
  Clone ID: MRT4577_65673C.1.pep
MDKPIQVRARVDDGGIMWSENIVPNCNWESGETMFYSEFKVLLLKGITSDIEWAGDDHLIYITTESILRPGLQASESKRYLFVKSGSKNTRFIFYLDILKQNKELAVLTPCVYGVDTTPSHCGNHVFMKRRSDELYNSELVACPLDNVAEITSPDHCSSPELQDLLHTRQQMLQQVQMHLQRAQVRMKRQAGKGRMERSFSVGDRVYVKLQPYCQSSAAERVNHKLAFKFFGPLSMVRKVNPVAYEVALPEGSNVHPVFHVSQLKSFVPANVISSSVLPALTPDYQIPEEVMDSRLQRRAGKEVPQLLVRWTSWPPSLAIWEDEHWIKEQFPRAPAWGQAVSEGGGDVNDAGIQDXWVKLLKGARENHQQEARATLFQQLRRGLRTTRPNKRRCTGLEWVN

SEQ ID NO: 331761 - protein, 764 aa, Zea mays
  Clone ID: MRT4577_65674C.1.pep
MLRLAGSFPRLPPPVRPISPAPAPSQLSLRRVLLLLSSAGFSPTSCYSSPSFAAMAAAAPPVAKKVPRQLVEHGDVRVDNYYWLRDDSRSDPDVLAHLRAENDYTAAVMSDVKQLEDEIYAEIRGRIKEDDIDAPLRKGRYYYYERTLTGKEYVQHCRRPVSTDAPITVHDVMPTGPDAPDEHIILDENVKAEGHDYYSIGAFKVSPNNKLVAYAEDTKGDEIYTVYVIDTESGEYVGQPLKGITSDIEWAGDDHLVYITMDSILRPDKVWLHKLGSDQSSDACLYHEKDDTFSLGLQGSESKRYLFVESGSKNTSFIFYLDIPKQNKELAVLTPRVYGIDTTASHRGNHFFIKRRSDEFYNSELVACPLDNVAETTILLPHRESVKIQDFQLFDNHIAVYERENGLPKVIVYRLPAIGESIGQLQGGRAIDFIDPTYAVDPEESQFHSSVLRFHYSSMRTPPSVYDYDMDSGVSVLKKIHTILGGFNASNYVTERKWAAAADGTQVPMSILYRNDLVKLDGSDPMLLYGYGSYEICIDPSFRGSRFSLVDRGFIYVIAHIRGGGEMGRKWYEDGKLLKKKNTFTDFIDCAEHLIKSKYCSRGKLCINGRSAGGLLMGAVLNMRPDLFRAAVAGVPFVDVVTTMLDPTIPLTTAEWEEWGDPRKEEFYYYMKSYSPVDNVMAQEYPNILVTAGLNDPRVMYSEPAKYVAKLRELKRDDNLVLFKCELGAGHFSKSGRFEKLQEDAFTYAFILKALGMTRKLASL

SEQ ID NO: 331762 - protein, 102 aa, Zea mays
  unsure (1)..(102): unsure at all Xaa locations
  Clone ID: MRT4577_65675C.1.pep
MVPFGPRGPPGKTGPGPGGEPGFPKGRGKKAGGKQGQNRSPGENGIPQQIHPKKGPEAKKGKPGGPKGGTNPKXNGGGPTAPFPRGKPGGPAVIKKRPTPGE

SEQ ID NO: 331763 - protein, 124 aa, Zea mays
  unsure (1)..(124): unsure at all Xaa locations
  Clone ID: MRT4577_65676C.1.pep
ATRQTGKEDMGSKRSPKELTDLHKQHPTSWRAGPXIDEDMXHCQATIMGPSDRRYSGGVFLRTXDFPADYRCKTTKAALTXTRVFHPXVYSNWSICSQHLEENXRPELXIFKWLLTMCSLLTDA

SEQ ID NO: 331764 - protein, 82 aa, Zea mays
  Clone ID: MRT4577_65677C.1.pep
GNLECLQASVTQLIGSTMGSGGDEGASVNGIVLDQSNRRLFINMKRTVHSVNIGCRKFLWQVHEANLWWPSVAIAAGAYKSS

SEQ ID NO: 331765 - protein, 93 aa, Zea mays
  Clone ID: MRT4577_65678C.1.pep
GKVRVSMFHFLSKVHIAGQKRGSCPPRLCIDLGPPKDKGRGFGGPPVKNEGQGGKQPPPPRGMGGQNIPFPLGSFWGPPRCGPRGGGQNLMIQ

SEQ ID NO: 331766 - protein, 28 aa, Zea mays
  Clone ID: MRT4577_65679C.1.pep
LQSFITLENLKLSILWFYHPRSYGKFKI

SEQ ID NO: 331767 - protein, 35 aa, Zea mays
  Clone ID: MRT4577_6567C.1.pep
LRKGEVAARDMRYRGEASHLALGYMSTSPFISVEP

SEQ ID NO: 331768 - protein, 166 aa, Zea mays
  unsure (1)..(166): unsure at all Xaa locations
  Clone ID: MRT4577_65680C.1.pep
FGTRLTSEGSPFYRRVQLEGECVLTFPPSYHAGFNWSLNCAQPANVAPIDWVPVEQNAADLYREQATIITMSHDKLMIEAVRKTLIAHGHMLSLKRNSSANLKWKSICGPDSTICKSLKARIEMEXTKTKYILFMTVXMNTDSEFDSTDKQCAMRYYELDLLTEGC

SEQ ID NO: 331769 - protein, 61 aa, Zea mays
  Clone ID: MRT4577_65681C.1.pep
FVPQNQVRDRLRKFRIDDFMIHSLATAEHEHIHGLFLWIPGQFLYQRRPVLVVEYVPTYLT

SEQ ID NO: 331770 - protein, 110 aa, Zea mays
  Clone ID: MRT4577_65682C.1.pep
KKNQGCLFFPREMFKNSPFKTFGEAIPSLGAGKKGHPPPAPFLKLVWSGKGDPVPPIWGPPPKRGANSFAQGGGFPPPTFLKTRTCKKLLDPPRVFPPGKKYVNFKFQGP

SEQ ID NO: 331771 - protein, 725 aa, Zea mays
  unsure (1)..(725): unsure at all Xaa locations
  Clone ID: MRT4577_65683C.1.pep
MVARRFVVRHGPAAGGSAEAAEEQQHEVEYDTEHGLDVLRLQIFSLTAVPPDLQKIVVEADGSVVDDGTDLEAVSERLRLLAIGEEGEDDGAAARAQEKSDEEFARMLQAEEEALLLQQYNIQNDGGDVFRQRVEPYMHQVLMYEDSVGQEAAQKTVPICELEEKALVSLAKEGNFNPSKDEEKHAFLLQLLFWFKQSFRWVNAAPCDSCGRETSNVGMGTPLTSEIKFGASRVEMYXVTIVLVSPVSQGTTILVXLIQTRRGRCGEWANCFTFYCRAFGYDARLILDFTDHVWTECFSNLYGRWMHLDPCEGVYDNPLLYEKGWNKKLNYVIAISKDGVRDVTKRYTRKWHEVLSRRIITSEETVVSVLSSITGKYRTGLSPDALSVIENREKEESEELRKSAYLQVETALSLPGRLSGSVEWRKARSELGQADSLSCSSCPIRKCVDGHVSNIYDALSAFLSHFFDKKIPKERIIEAFEALKTLMLTLKSSNFKSRSATLDQKAHHLFEEIFPSIERLLSAISLKAELGTAGYQSVTVSGNPVHSSLALPVALDAVNEILSNYKNNTFFTEGNHFPRGNRVCSGSVLASREQLPIGIATAAFDGIHSSKWEEPDGAKGCWLIYTMQDGKSCELESYDLMSANDAPERDPMDWVLEGSADGGSTWNILDARNSEMFESRFLRKTFTVDKRYKANAFRFRFLRVRDSHSNPRFQIGSIDLYGKTI

SEQ ID NO: 331772 - protein, 63 aa, Zea mays
  Clone ID: MRT4577_65684C.1.pep
FLPGWSSSDPRACCFDFCLLLDLSTLLNFVPLKQACARSLSTQSDYDQSATPTSRTEASASRA

SEQ ID NO: 331773 - protein, 42 aa, Zea mays
  Clone ID: MRT4577_65685C.1.pep
TRTYIVFFTSNILSPMGANILALLALLALLASAASYTFIIQC

SEQ ID NO: 331774 - protein, 120 aa, Zea mays
  unsure (1)..(120): unsure at all Xaa locations
  Clone ID: MRT4577_65686C.1.pep
YRDPSPKLIGGSSEGGASVFKLEYNGQPACLAQSPQLYKQMSICGGFGRVFEVGPVFRAEKSNTHRHLCEFIGLDAEMEXIKEHYFEVCDIIDGLFVAIFKHLNENCQKELETINRQYPF

SEQ ID NO: 331775 - protein, 154 aa, Zea mays
  unsure (1)..(154): unsure at all Xaa locations
  Clone ID: MRT4577_65687C.1.pep
MVARRFVVRHGPAAGGSAEAAEEQQHEVEYDTEHGLDVLRLQIFSLTAVPPDLQKIVVEADGSVVDDGTDLEAVSERLRLLAIXGEEGEDDGAAARAQEKSDEEFARMLQAEEEALSLQQYNIQNDGGDVFRXKVEPYMHHVLMYEDSVGQEAA

SEQ ID NO: 331776 - protein, 99 aa, Zea mays
  unsure (1)..(99): unsure at all Xaa locations
  Clone ID: MRT4577_65688C.1.pep
TGICRLRPRRPVCRTHTLYSPDALVRSRRRAGLTSHPXPYPTPXPTPXSARLPPRSPPPWPPPPPPRPPLPPPRFRSPPAPASPSARWPWARWLQAAGD

SEQ ID NO: 331777 - protein, 493 aa, Zea mays
  unsure (1)..(493): unsure at all Xaa locations
  Clone ID: MRT4577_65689C.1.pep
QTRRGRCGEWANCFTFYCRAFGYDARLILDFTDHVWTECFSNLYGRWMHLDPCEGVYDNPLLYEKGWNKKLNYVIAISKDGVRDVTKRYTRKWHEVLSRRIITSEETVVSVLSSITGKYRTGLSPDALSVIENREKEESEELRKSAYLQVETALSLPGRLSGSVEWRKARSELGQADSLSCSSCPIRKCVDGHVSNIYDALSAFLSHFFDKKIPKERIIEAFEALKTLMLTLKSSNFKSRSATLDQKAHHLFEEIFPSIERLLSAISLKAELGTAGYQSVTVSGNPVHSSLALPVALDAVNEILSNYKNNTFFTEGNHFPRGNRVCSGSVLASREQLPIGIVXMQFLHFLVYIHRCFPYISVFENHFXTAAFDGIHSSKWEEPDGAKGCWLIYTMQDGKSCELESYDLMSANDAPERDPMDWVLEGSADGGSTWNILDARNSEMFESRFLRKTFTVDKRYKANAFRFRFLRVRDSHSNPRFQIGSIDLYGKTI

SEQ ID NO: 331778 - protein, 62 aa, Zea mays
  unsure (1)..(62): unsure at all Xaa locations
  Clone ID: MRT4577_6568C.1.pep
GGRGERGRKYGWGGWEASERLVSFSAVXXPNRASLAGLNRRASTSMGDLWAGAEGAPEGAWI

SEQ ID NO: 331779 - protein, 124 aa, Zea mays
  Clone ID: MRT4577_65690C.1.pep
AHISDNTAKALQCLKQNPNLKVETALLQATMFDDRSDDSDGDIDFPPYVPGRNLIATTGKPEDLAKSDMKDFVRQLYDEPKILGQELAPDQHDTVNFTFAIDNTGVRYNACPPEGALVFYADTP

SEQ ID NO: 331780 - protein, 279 aa, Zea mays
  unsure (1)..(279): unsure at all Xaa locations
  Clone ID: MRT4577_65691C.1.pep
LTIEPVITLLNSSPPAVQQLAAELLSHLLLEEHLQKDTVAEQSIPALIQILSSGLPNLQQRAIKALANLALAWPNTIAKEGGVFELSKVLLQSDPPLPHVVWESAAAVLSSILQYSTEFFLEVPVAVLVQLLRSGTESTVVGALNALLVLESDDSTSAEAMAESGAVEALLDLLRSHQCEEAAARLIEALLNNIRIREAKAAKNAIAPLSMYLLDPQTQSQQGRLLAALALGDLXQNEGLARSTDAVAACRALVNLLEXQPTEEMKXVAICALQNLVMY

SEQ ID NO: 331781 - protein, 51 aa, Zea mays
  Clone ID: MRT4577_65692C.1.pep
YACAVTHLTSARSYRRSAHVERDRSQRDVPDHCRERLLVCPSCISCTHHAL

SEQ ID NO: 331782 - protein, 42 aa, Zea mays
  Clone ID: MRT4577_65693C.1.pep
IKKKKKKTKKKQRKKKKKKKTKKKKKKKKPKKKQKKKKGGAV

SEQ ID NO: 331783 - protein, 187 aa, Zea mays
  unsure (1)..(187): unsure at all Xaa locations
  Clone ID: MRT4577_65694C.1.pep
EIMGQSIRDSVRMSCGVFMYDKLFWVVQVPRVKVLSIKRVVEDFRTSIPPLCMXCVDVVXCCVAGXSTAVEEXVRTINXSLSRXWSMCWSTSEWSSQPISXRSWAVTSRLGVVGRIVEQSEFILFSRXHKVTSEYMVTHSSSSTSILVIRFIITKRRLHMSLSLCVCPSVFLSQGAEAISAGLEVPN

SEQ ID NO: 331784 - protein, 220 aa, Zea mays
  Clone ID: MRT4577_65695C.1.pep
PAGTLPHYLLEAANVASLSLILAEPPLPSHRARACVLLWPPSTKLTPATTSGHHAACPSPNLAQVIVSSPARTSTRSRPRWWPVPLHCPFQHRPWHPLPQHLGPSLATVPCLGAPKNEHRLPLQAPPRRRSCQPWAYAPSSSSGESCLVHVELLPWKLSLSPTASCHVSCSIFQPSPSLLQPWWPSAWSSVMTPCRAPLQAGSSTSKFVARPCLSLGSHA

SEQ ID NO: 331785 - protein, 113 aa, Zea mays
  Clone ID: MRT4577_65696C.1.pep
KIGWYENRQCRTTVKPSDTYNRDSYYGTITINCCMSEYHRGNNPETTRNKASASFQQLLNDLRPTQSLRFTCHTTRVSSVFEKQHRDANLLEITGMHIQQAKVRPSSLDYGLA

SEQ ID NO: 331786 - protein, 104 aa, Zea mays
  Clone ID: MRT4577_65697C.1.pep
CADTKPCQFGSQSIIVSYARSKMRPSRLSYHTTISNRNAHRTARRSHMFDIRDTETISKSYVRIYQVKRLVSILSPDRANKTNKPLVRMRVPPRHGRRINAHVI

SEQ ID NO: 331787 - protein, 88 aa, Zea mays
  Clone ID: MRT4577_65698C.1.pep
RGLFFFFFCATKTRYQSSSCPWSDDKHPLQPAFLMMIPFYSPHPSPKCSAVSEETDWTSYYTSTTGNCRNQVHDSSVAQCYRSKRVRA

SEQ ID NO: 331788 - protein, 54 aa, Zea mays
  Clone ID: MRT4577_65699C.1.pep
GEKSPRRKGGGQNPVGGFPQAKTGGLKIGNPPRGGCRYHWEEAFGELLKSGFMQ

SEQ ID NO: 331789 - protein, 281 aa, Zea mays
  Clone ID: MRT4577_6569C.1.pep
MLSSAAFSSSPLLRGAPLRTRHLLLAPPARAHGGAASRARGGLPRFHAPSLPSSKGEVIRIQGDEFWHMTRVLRLGVNDKVELFNGAGGLAEGFIHKVDKGGSDVELLEDARIIAPQGIQWHVFAAFGTLKGGRADWLIEKCTELGASSVTPLLTERCHTIAENRVDRLQRLVLAAVKQCQRIHEMSLKSPIQIRHLLPVVSQSKLAFLASAEAPPLFSVLPESSIEQSGLLIIGPEGGYGLRQPRYPSYLLSCSGQMLNTGKDSNAGNLRTVLSVIFMVY

SEQ ID NO: 331790 - protein, 89 aa, Zea mays
  unsure (1)..(89): unsure at all Xaa locations
  Clone ID: MRT4577_656C.1.pep
RNKKKRRPHAPPNPPPPPPPHPTPHRPPPPPPPPPPTPPPPPPXTPPPPPPTPPPPPPPLPPPPPLPXSPPPLPPPPPPLPPPPPQPTP

SEQ ID NO: 331791 - protein, 238 aa, Zea mays
  Clone ID: MRT4577_65700C.1.pep
AVRHTAPAPPQLGVPNNHPAKRKPCRRLEGGQALLLPGRRRTSPAAATSALPAPAHRAHPRTATPAAPAAEAARPPSPTDVHASAPPFHPTDQIHHSPTRLAMPAPPHSKLPQRVLCRSGQPQLGVLRQLRLPLTCRPGQPRRRRWCWQHCSWYIALYLLAADLTGLDGGGGVVFVVVLLVLLASPAVVLGRRSWRGDCGRRPARPRTPTLRRRIPWWPRPCRCFSWRRRVVPSPLHR

SEQ ID NO: 331792 - protein, 78 aa, Zea mays
  Clone ID: MRT4577_65701C.1.pep
MAFDKVEELRPGTYGHNLQLRVLSSKPVVLHRPQGGRAGGNMRIAECIVGDDTGVVVFTARNEQVDIMKPGAIVEARK

SEQ ID NO: 331793 - protein, 50 aa, Zea mays
  Clone ID: MRT4577_65702C.1.pep
PPKPNSGITELRETYTKVKATRTHKNPNSSDTTRRRKLHTRNKLRNTNNL

SEQ ID NO: 331794 - protein, 99 aa, Zea mays
  Clone ID: MRT4577_65703C.1.pep
KKKGVRGSPLLPLKILSGGAKNYFGSSLNESPIPNKKILSKNFLITPFPPPFKLRVGKKKKKKKKKKKKKKKKKKKKKKKKKKKKKKKKKKKKKKKKKK

SEQ ID NO: 331795 - protein, 160 aa, Zea mays
  unsure (1)..(160): unsure at all Xaa locations
  Clone ID: MRT4577_65704C.1.pep
VSLILLEHAMLRIQDKEXIVAQYNFKDHWICFLIYPKVGKVLVLYYLDYDPLTYEKFLNILELAFRFYKMRGGKYDLLKQHMSLDIHYKWPEFQQGKPENLTEGASYGIIEDLCTFIMKEAIPIEGKYHDVTGILVDYLLWPEFRELTEISRLSLSHVSY

SEQ ID NO: 331796 - protein, 92 aa, Zea mays
  unsure (1)..(92): unsure at all Xaa locations
  Clone ID: MRT4577_65705C.1.pep
PKAPSPPXIQQTMYTCIECSTMRVYYGPWALPTAFLNTVIMPGYVPPPYGGRPKTMAPAVXGKSYGAIXPHAGGFXHXLMPLLQNPLSEQPA

SEQ ID NO: 331797 - protein, 252 aa, Zea mays
  unsure (1)..(252): unsure at all Xaa locations
  Clone ID: MRT4577_65706C.1.pep
DPPGLPGESLGLPLVPPFLQAQAQARHGTGSFRRGANFAVGGATALDASFFHRWDPPGGSVFPLNASLGVQLQWFQSLKRSLCATPKGCRRLLRRSLFFVGAFGANDYLLAMAATSLEQVGSLVPAVVRTISAAVERLIVEHGAATVVVPGVIPVGCAPPVLATFADPDPAGYDPRTGCLRSINEVATRHNALLQDALRELRARHAAAXTVVYADFFGPVIDMVTSPAKFGFHEDVLTLCCGGPGRFNYNRH

SEQ ID NO: 331798 - protein, 411 aa, Zea mays
  Clone ID: MRT4577_65707C.1.pep
MRRKQLLPPWLLVVLFLSWSSAAPVPASSTTTTTTTLPGQMRRRRYYDSIFSLGDSYADTGNGPVVFGWHALASPVMRPPYGSTFFGRPTGRNCDGRLVIDFLAESLGLPLVPPFLQAQARHGTGSFRRGANFAVGGATALDASFFHRWDPPGGSVFPLNASLGVQLQWFQSLKRSLCATPKGMCVALHDPRGHDHDDTDEHELTRCDRLLRRSLFFVGAFGANDYLLAMAATSLEQVGSLVPAVVRTISAAVERLIVEHGAATVVVPGVIPVGCAPPVLATFADPDPAGYDPRTGCLRSINEVATRHNALLQDGLRELRARHAAATVVYADFFGPVIDMVTSPAKFGFDEDVLTLCCGGPGRFNYNRHVFCGDPGASECKDPSARLFWDGVHLTEAAYRYVAAGWLSAIT

SEQ ID NO: 331799 - protein, 73 aa, Zea mays
  Clone ID: MRT4577_65708C.1.pep
GGFKKKPSRQPPNPSRCRTGEFTFIHGAQHRRREMKQGPNDSPYHSIKGGDREKLNKPNLDENHQNKPGRPTP

SEQ ID NO: 331800 - protein, 64 aa, Zea mays
  Clone ID: MRT4577_65709C.1.pep
CFFLGRQLVILAVVCVEAHTRVIIHQASRLLMVLGGRCPKNKLVGVCLYTCTLNDHWSGLGWWA

SEQ ID NO: 331801 - protein, 143 aa, Zea mays
  Clone ID: MRT4577_6570C.1.pep
MRSKSHGPDYNEPTPKRSVAQIIWREGTRHNFILAVKSLSDVQRTTHPNPRTRAVAPPILPAETSPVKVDTVPSWAEEKYKNQNGRALGSWPRGLELRKQIDLILTPHNGYLCKNLAIPLNLLMGDKASLDSSVSDNTVHNIS

SEQ ID NO: 331802 - protein, 62 aa, Zea mays
  Clone ID: MRT4577_65710C.1.pep
GPLQVGWGPGFFFFGAFFSPPLVFFFFPGWGPKKLVVPLPPGGGVNFFPVYDLSPWGLAPGL

SEQ ID NO: 331803 - protein, 62 aa, Zea mays
  Clone ID: MRT4577_65711C.1.pep
TFFLSFFFNPPHPIHINRLLPLKKTNHLHNPNISHTPTIQGGLTSNIDHWLTHSNNKVYLNP

SEQ ID NO: 331804 - protein, 188 aa, Zea mays
  unsure (1)..(188): unsure at all Xaa locations
  Clone ID: MRT4577_65712C.1.pep
MSGREMLLSIIILGDHAHGETWLMNQYGKASVSXHPHHATIAADFIAKEARSDDRLLTVQICHTGGQERAPNLGRDFYKGDDCCAHEYDVNVSXKYEKLTNCRRXFQSRSSPSDPQKFPLEXMHTXIDVDGDNSSXTVSEKKCKTWXSFXGNIPYFHDSAREVSHGKGAYDXIARHAVNHAPEEDMYL

SEQ ID NO: 331805 - protein, 40 aa, Zea mays
  unsure (1)..(40): unsure at all Xaa locations
  Clone ID: MRT4577_65713C.1.pep
WKGPAKNWENVLLSLGVDDRXPRVRSHEIAPVAKDNRARP

SEQ ID NO: 331806 - protein, 39 aa, Zea mays
  Clone ID: MRT4577_65714C.1.pep
LNKDQMLSLETIVDCRIQVHDPTLNKHPAYLWMTFHFRL

SEQ ID NO: 331807 - protein, 38 aa, Zea mays
  Clone ID: MRT4577_65715C.1.pep
VKHSGFGLGFERIILFAPGMENIKFVIPFPRNPGRVDL

SEQ ID NO: 331808 - protein, 69 aa, Zea mays
  Clone ID: MRT4577_65716C.1.pep
PSAHPPSSWMSESLMSGIGFHPPSSGQRPPPSTALAGSAARASSSRSRSGRQWRSRPHVGFGIRETGDS

SEQ ID NO: 331809 - protein, 50 aa, Zea mays
  Clone ID: MRT4577_65717C.1.pep
SRMMFSSYGIPKTIIVYKWHMDKRITHGRDLTNNGAHYELCNKILDEGSR

SEQ ID NO: 331810 - protein, 319 aa, Zea mays
  Clone ID: MRT4577_65718C.1.pep
MATASLFSLPSLRVLSRTSAHGPRFQILAARKPVESSTATSGSRRGGSKGAGLLSVLDRAMADEEEYRRARAQVQRKGVEVEGYAIEGISVGGHETCITVPSLNVAFDIGRGPQFAVSQDYLFITHAHLDHIGGLPMYIATRGLYNLKPPTVFVPPCIRDDVEDLLQVHRRTSQIELKVELVALDLGETYEIRNDLVARPFQTYHTIPSQGYVIYSIRRKLKKQYAHLKGSQIMKLKQSGTEITDTILYPEVAFTGDTKSDFILDPRNADALRAKVLITEATFLDDHVDVEHAREHGHMHLSEIMEHFQWFRNETIVLT

SEQ ID NO: 331811 - protein, 271 aa, Zea mays
  Clone ID: MRT4577_65719C.1.pep
ARSEEKGELLLVYEYMPNGSLDKALYGEPCTLSWPQRYTVAAGIASVLSYLHQECEQRVIHRDIKTSNILLDVNLSPRLGDFGLARLMDHNKSPVSTLTAGTMGYLAPEYLQSGKATEQTDVFSYGVVLLEVCCGRRPIDKDECGRGGGGKNVNLVDWVWRLHGEDRLIEAADARLAGEFDKAEVLLLLLVGLSCANPNCEERPAMRRVVQILNREAEPVPVPPKKPLLVFSSSASAKLQEIAFSCGDDVRGGYSVAKPASPKSEGADIER

SEQ ID NO: 331812 - protein, 34 aa, Zea mays
  Clone ID: MRT4577_6571C.1.pep
MLHKFALAFKTNTIEFFAEEDKDEYADRGARCPV

SEQ ID NO: 331813 - protein, 56 aa, Zea mays
  Clone ID: MRT4577_65720C.1.pep
IAKIPMFITSTSKRKITIRQKKRINQGYLKVIGHIKKPSCKIIIRFPKKKYNIMLI

SEQ ID NO: 331814 - protein, 150 aa, Zea mays
  Clone ID: MRT4577_65721C.1.pep
MFPNSNCMQSLSTSVGDGAKWLVNKLKGKMQKPLADLLKEHNLPVGLFPREATNYEFVPETRRLTVYIPSPCEVGYRDGSELRFDATVSGTLGEGRLTEVEGIKTKVLVWARVTAVKADAAKVHFTAGIKRSRSRDAYEVVRGGITVDEF

SEQ ID NO: 331815 - protein, 50 aa, Zea mays
  Clone ID: MRT4577_65722C.1.pep
SYYNSTLNLLKHMPVLHITINPFKLLPILSIFIFHPPHFLYYLQKKWLLK

SEQ ID NO: 331816 - protein, 238 aa, Zea mays
  Clone ID: MRT4577_65723C.1.pep
MLPARISRGSERNFIPLLQDTTTSSRAVRRGRRAQRGRLAEALWLKMYQVSVPLVEYSKNLLYSKYSARRKIQGMSLDYVSLARCSYVLVWIPCVAMVFARCISVSVWIPCGAGAEGLGEQDDDEFQDLHESYRKGATKQNLLCSSSTWFILVATSQLDDDYLNVHNMDTGDHVAVKVLVKAKVHKKKLAGQVMGSKTRIYMVLDFVMGGELHDIIVGLGAEVWMPKAKRQGLCRNKK

SEQ ID NO: 331817 - protein, 77 aa, Zea mays
  Clone ID: MRT4577_65724C.1.pep
LSLYIYICNIFVYYVKSYERDSYTLHSYYNEASRRVCYKLYIEKIICKSIESISIFHPHEFEIGLYDNFRKWWNVIF

SEQ ID NO: 331818 - protein, 49 aa, Zea mays
  Clone ID: MRT4577_65725C.1.pep
HALFDHAVHAGQRHAESPADYLGVKRTYTLSYLTSDDDIHWARAHDASK

SEQ ID NO: 331819 - protein, 55 aa, Zea mays
  Clone ID: MRT4577_65726C.1.pep
RPTKYNLPCFPFILPQANPPVTGLPSRLTYAFRKLGVGLLATSIQSGLSAMFTPL

SEQ ID NO: 331820 - protein, 162 aa, Zea mays
  unsure (1)..(162): unsure at all Xaa locations
  Clone ID: MRT4577_65727C.1.pep
KTSSXGXSKGSSEGKKKRSEQQGSSEGNTKKSKSEVSSPTSSLKASSQVPKVKLGDKITALQQIVSPFGKTDTASVLYEAINYIKWLHEQVQLLSDPYMKTSSKDYNYNAWGRLEDKEGAEMVDLRSRGLCLVPVSCTPQAYRDSNDGPDYWTPPYRSCLYR

SEQ ID NO: 331821 - protein, 75 aa, Zea mays
  Clone ID: MRT4577_65728C.1.pep
VVDASEEFSHEGDAEEVVGVGEVLHEDVLVCWLSGFFVVFLVLSLFMFFKVFFFFFLFFFFFFFYFIFFFFGRVG

SEQ ID NO: 331822 - protein, 346 aa, Zea mays
  unsure (1)..(346): unsure at all Xaa locations
  Clone ID: MRT4577_65729C.1.pep
LSSGYGGGALAHQHQHAAAGGAPERLTANLSDLVSNWSIAPPNPCLGDAHHHHRTGVVAAACDNDNAKAGMFLGSGGGVCNHEIGGHGAMLEGAATGGGGGGGQEFLRPAAGAGYSSMLGLSRNNRTMYMEAPWGSNAAGATRSLSDLISFGGAPLGKAEEPAPPTSTKALAEYKKQGHDIPSPAKTSSGGGSKGSSEGKKKRSEQQGSSEGNTKKSKNEASSPTSSSLKXSQLPKVKLGDKITALQQIVSPFGKTDTASVLYEAINYIKWLHEQVQLLSDPYMKTSSSKDYNAWGGLDWKDKSETEMDLQSRGLCLVPVSCTPQVYRDNNGPDYWTPPYRSCLYR

SEQ ID NO: 331823 - protein, 235 aa, Zea mays
  unsure (1)..(235): unsure at all Xaa locations
  Clone ID: MRT4577_6572C.1.pep
MKAFKSFLNKRRQSFQNRKSKPAEQPSAPAKADSLIETSAPAPAPASQANGDQQQVLAEAAPGTLQLALQNKSSSSTVYAYITGLALERGNTPIFIQSDGQTVYYPVGPSEILQPLQADVAIPLGNPGNTVNVRIPKIAGGRIWFSIGAKLTFRLNPGPAVVEPSVTNPSDPNFNIDWTFCEFTYNDAQLFANISYVDXVSIPVAMSLTNTQGQTQSVPGMXPDGPKVLQDRLRA

SEQ ID NO: 331824 - protein, 124 aa, Zea mays
  Clone ID: MRT4577_65730C.1.pep
GRDSESEPPVRRRAPAPSSLLPLPYVACTNATRRRELASSAPSWSPHRVASLRAERTNPRRRRPPPPSCESPTALLCSLRKPPLRCSPQAASASHRPPVPSEFLFDVLILLTLNQSLFADSEFQ

SEQ ID NO: 331825 - protein, 95 aa, Zea mays
  Clone ID: MRT4577_65731C.1.pep
TRQSQVLNSLATLPLCFTFKQRDCKYKERRIEKSDGGWFASGTGREDTRHLQGSLHGITPNHCTLTQDQKPFCCVFPIAECEGRHPCQQYILLPL

SEQ ID NO: 331826 - protein, 120 aa, Zea mays
  unsure (1)..(120): unsure at all Xaa locations
  Clone ID: MRT4577_65732C.1.pep
MGIVTQASNVTLHLLADVWAPAAKPRHMNSQLALPAPSYRGPAPFRASTEEAVEAPKVFEAPQLDPNTPYPIFXAARAALFLKAQMEDLYVITWTXPKEQVFEMPTRRAAIMREGPNPLK

SEQ ID NO: 331827 - protein, 57 aa, Zea mays
  Clone ID: MRT4577_65733C.1.pep
TARLGMMEGEDSRTYSRQRVWRRARMTSTKTLPHRLLRTGHRDSRKASARLRTRICC

SEQ ID NO: 331828 - protein, 67 aa, Zea mays
  Clone ID: MRT4577_65734C.1.pep
WGHSTFWGNGGVPGQKFVCGEHKQFGRRIPGWTRFQCAMLESGLCMFFDVIGPCVVCRCPGNFCGCC

SEQ ID NO: 331829 - protein, 79 aa, Zea mays
  Clone ID: MRT4577_65735C.1.pep
GVVLVTVSTCQALVCASRLRQGSGSISPAAGRGRRRAPREQGRRGGRRPTKRTIVRQCRCVAMMALGFVSRRAVRCRTR

SEQ ID NO: 331830 - protein, 39 aa, Zea mays
  Clone ID: MRT4577_65736C.1.pep
INDEVRRGCILYHDLTLRLKKSREDFNVAKSKITVCAKV

SEQ ID NO: 331831 - protein, 72 aa, Zea mays
  Clone ID: MRT4577_65737C.1.pep
EFHVITDAGGKAMAFRVPRTRRWGRGCSREPARCLLDSAEVEFSYDIDTGLVSVDLPVPEQELYLWTLEIMI

SEQ ID NO: 331832 - protein, 102 aa, Zea mays
  unsure (1)..(102): unsure at all Xaa locations
  Clone ID: MRT4577_65738C.1.pep
GTPRVRLPQAYAPPTSTPPRAVGRLPQTRGSHVXRLGGIRXGPSGFXSHSSIXLERSGDPPAIXIWCYFFLDIXXXPRSWLXNXAXXRVIEQXSXXXEMXDE

SEQ ID NO: 331833 - protein, 109 aa, Zea mays
  Clone ID: MRT4577_65739C.1.pep
TTLQLRNKKKTSNCCALKKKKKKKKKKKKTNAGGAVEECDVISDAGGKAMALRVRGCGRFGAYCSREPARCLLDSAEVEFSYDIDTGLVSVDLPVPEQELYLWTLEIMI

SEQ ID NO: 331834 - protein, 89 aa, Zea mays
  Clone ID: MRT4577_6573C.1.pep
RGLFFPKNGPFPNKPGPRFCFLKFNPTVHRGSLGLETLFSFRGFLEKTHPQRPPFWGLGVCKKGFCQKKIRPFWFFSNPIFWFFSTPLG

SEQ ID NO: 331835 - protein, 63 aa, Zea mays
  Clone ID: MRT4577_65740C.1.pep
TNLYTQWYCPSSNNLLFVSVTQEANRSHLTVDSSSVISAPSQLDMIEKYYDVHFSQGSMWIEA

SEQ ID NO: 331836 - protein, 40 aa, Zea mays
  unsure (1)..(40): unsure at all Xaa locations
  Clone ID: MRT4577_65741C.1.pep
TASMGDXGVXRHKPXTXIIXXXLLLHXXPTLXXWXGDXLR

SEQ ID NO: 331837 - protein, 221 aa, Zea mays
  Clone ID: MRT4577_65742C.1.pep
MAMSYTTLHYFAVSCALLVASVSSLPPPAVFQVGDERGWTVPANGTETYNHWAKRNRFQVGDVLDFKYGANDSVLLVAHDDYKQCSTETPLGRFTGGDTKFALDRYGPVYFVSGVAGHCEAGQRMIVRVIRPGASAPRGAPVAAPATPPTASGSGRSGAPSPATSPAGSGSGSSSTSPSPSPSPSPLPQASGASRRVLVSSVAVGLVLLVACAITLSSVVA

SEQ ID NO: 331838 - protein, 83 aa, Zea mays
  Clone ID: MRT4577_65743C.1.pep
HHLRGSTELAGQFDSSQLVRRARPSCSPTFRSDPSRPPTPPHSGMEMKKIACAVLVAASAATEALAAEAPATGPTSRCSKVAP

SEQ ID NO: 331839 - protein, 40 aa, Zea mays
  Clone ID: MRT4577_65744C.1.pep
YSLLLQLVVDRSVSQSVLVDDVQSCVFFIFPNGPPHTDSG

SEQ ID NO: 331840 - protein, 75 aa, Zea mays
  Clone ID: MRT4577_65745C.1.pep
RTSQRSRNQASPGGAHKPPAGECPGNRATSCGGVEYPRWRPRMWHQAIWPVPVRSGRGWVYVSRVCRAHASAHAS

SEQ ID NO: 331841 - protein, 67 aa, Zea mays
  Clone ID: MRT4577_65746C.1.pep
DEKRLCGVTTLDVVRAKTDYAVKAYVPGAGGNVPDVGGHAGITILRLYSQAAPKANLDDDVIKALTK

SEQ ID NO: 331842 - protein, 177 aa, Zea mays
  unsure (1)..(177): unsure at all Xaa locations
  Clone ID: MRT4577_65747C.1.pep
VSFYFFFFFKKRPLALQHPKAIXQHIPVVHRGTQNMTPQQLQQRELANLAENSKQQQFLPFNQPGSXNSASYWQQQQLPYSQLPAAHPQQLLPXNQLATLNYTAYXIQQQQLLPFRQLAGVSPATFLTQPQLLPFYQHAAPNAGTLLQLQQLLPFNQLALTNPAAFYQQPIIGGALF

SEQ ID NO: 331843 - protein, 58 aa, Zea mays
  Clone ID: MRT4577_65748C.1.pep
SPVHACVSMNALYRSACLCNYSPAYFLSHKHTGYPQDSHLPGLTLLEGYVPCATMPTR

SEQ ID NO: 331844 - protein, 73 aa, Zea mays
  unsure (1)..(73): unsure at all Xaa locations
  Clone ID: MRT4577_65749C.1.pep
IFDKRRNAVYQMMQSRRNPFSESEIRNWCFQIFQDLIYIHXHGYFQCDLNPDMWFCIFLQTMLQWLIYDSCLL

SEQ ID NO: 331845 - protein, 252 aa, Zea mays
  Clone ID: MRT4577_6574C.1.pep
PPWVDPASAPTFPSDPHLVDRAARLSTFAPPSPSPSSTSPAPPLPAAANAGKRKADEKPAYVHVRARRGQATDSHSLAERARREKINARMELLKELVPGCSKVSGTALVLDEIINHVQSLQRQVECGRIAGFNCKNGIDLEQVTWPEMGVHGARQLMQLQQQFWHGDLAHPHQVASQWEKRGDGHPPVFSNSSPSLFGYDLTSSGKPCTQSYITFLNEFSCLSLTSHITAWLAPQLLSLSLSRQCSLENKVY

SEQ ID NO: 331846 - protein, 96 aa, Zea mays
  Clone ID: MRT4577_65750C.1.pep
FILAYSFIGWPFERGLLNKGPPPERKGVPFDTNNSFSHFCSKKTGKRVSFFSLVPKERPPGFFSNKKSLCPSPHENLGRGLFCSLWRQGGDSGTFL

SEQ ID NO: 331847 - protein, 116 aa, Zea mays
  unsure (1)..(116): unsure at all Xaa locations
  Clone ID: MRT4577_65751C.1.pep
KNQMSCTHFLDRGRGTVCXLEAATFLSSHIRPGLFRPNQAWFGLDWDLVQSTIQTQNNPVLLYFFSLRLNLFGFLAQDLDFLPCVAPGSEPYPIRSRKIPTPTPTPNSRRRTQPRR

SEQ ID NO: 331848 - protein, 65 aa, Zea mays
  unsure (1)..(65): unsure at all Xaa locations
  Clone ID: MRT4577_65752C.1.pep
VSRNVVYQMMKSRRNPFSESEIRNWCFQIFQDLIYMHXHGYFQCDLNPDMWFCIFFTNNVAMVDL

SEQ ID NO: 331849 - protein, 97 aa, Zea mays
  Clone ID: MRT4577_65753C.1.pep
AQELQGSYSNTKKKKKKKKKKKKKKKKKKKKKKKKKKKKKKKKKKKKRKKKKKKGPKGRGPLKKREPPGGGKFNIRFFKPATPRGGPGPHFPQKGAD

SEQ ID NO: 331850 - protein, 59 aa, Zea mays
  Clone ID: MRT4577_65754C.1.pep
LRRSIQMLASLVVLGAYIDMCTVLNLQTHAQMVQDRNMCSFGMLSGMHIVMCANVQFLK

SEQ ID NO: 331851 - protein, 72 aa, Zea mays
  unsure (1)..(72): unsure at all Xaa locations
  Clone ID: MRT4577_65755C.1.pep
EGASDDILEIVRILMDSVFVEDDPQLTLQIVQNLMDGVAGLKKRVFDSAVEAGRGDGCRGYAXCXEDXQDGV

SEQ ID NO: 331852 - protein, 344 aa, Zea mays
  Clone ID: MRT4577_65756C.1.pep
LVRVMRSCPAGADAVVVGGGYIGMECAAALVANRMKVTVVFPGKHLMANLFTPKIAEFYENYYESKGVTFIKGTAVSSLQISSGKVTAAILRDGRRLPADMVVVGIGARANTELFEGQLAMEKGGIKVDGQMRTSDASVYAVGDVAAFPVKLLGGEVRRLEHVDCARMTARHAVAGALEPLGPITGEINYVPFFYSRVFALSWRFYGDNAGEAVHFGDLDFSASPSPPSAPKFGALWVRAGRVTGAFLEGGSPEEYEALARAVRRRTTVPDVAVLLARWGLAFIVQDQEGRSGATRSGRLCGSGNTSNYAWAWHATVGVAAAVSIAAFAYWYGWKAPYLAKRHF

SEQ ID NO: 331853 - protein, 102 aa, Zea mays
  Clone ID: MRT4577_65757C.1.pep
MSSPSRRSSSPESNIDGGSGSGSAGDERKRKRMLSNRESARRSRARKQQRMEELIAEASRLQAENERVEAQIGAYTTELSKVDGENAVLRARHGELAGRLQA

SEQ ID NO: 331854 - protein, 77 aa, Zea mays
  Clone ID: MRT4577_65758C.1.pep
IRQCSRFTPWCHHRCKWRVRSPVNVSNSLVARCVFKFTCRLGFSVYHPGNARPNRIEYCLQPHQLDAVALLLSSPLL

SEQ ID NO: 331855 - protein, 71 aa, Zea mays
  Clone ID: MRT4577_65759C.1.pep
KVKKEQQYTRETRHCDDCPFDSGLIWTEPRNHATFAAFLSNELLGLASPDSWDLVRPTRTLSTSPFERDAP

SEQ ID NO: 331856 - protein, 101 aa, Zea mays
  unsure (1)..(101): unsure at all Xaa locations
  Clone ID: MRT4577_6575C.1.pep
KKTTHQARREKINARMELLKELVPGCSKVSGTALVLDEIINHVQSLQXYLSMRLATVNPRGDFGGLDSFLTTEINVSLEYHGWPTYYFQERLGKCSDMHTC

SEQ ID NO: 331857 - protein, 126 aa, Zea mays
  Clone ID: MRT4577_65760C.1.pep
MASAATFLLIIAAAAWTSLTDAAPSPPPFVPPPPCAPPQSAVAFLRARCATTLYAVACYESLLPYACIFQTSHVKLARAVGDVNAAWLRSISKRVKELVARGAAGGGGTAGGAKSAALRDCASTVS

SEQ ID NO: 331858 - protein, 54 aa, Zea mays
  Clone ID: MRT4577_65761C.1.pep
TITPYRLDNIIREDASHRVCRQYKTAVADVQSKEDEVDSPNKGAALSQLLRLLL

SEQ ID NO: 331859 - protein, 70 aa, Zea mays
  Clone ID: MRT4577_65762C.1.pep
MISDDQTSLRSVLCPTSDFTCGVTMFIIISKETKNLVKKAKMTTDKQSYSEHSSNFFVYVLSCTISSWFV

SEQ ID NO: 331860 - protein, 125 aa, Zea mays
  unsure (1)..(125): unsure at all Xaa locations
  Clone ID: MRT4577_65763C.1.pep
EMLRTMKLRMRSMHARGRLLRGARPSGRSRQWEHSGSTLNPPPAKSLRPILSPPRAYASPSSVVEEVVSIDSDRYTSRPAXSTNGELVFFDPIPPHGPRRRRVRAWHATICRDLALWRRSATLAT

SEQ ID NO: 331861 - protein, 59 aa, Zea mays
  Clone ID: MRT4577_65764C.1.pep
PVPFQILVNNQPAPKIPVESVKPVNPPIFCPPKKIKPPLQCDAFLSGVPPRGGVGDYEP

SEQ ID NO: 331862 - protein, 104 aa, Zea mays
  unsure (1)..(104): unsure at all Xaa locations
  Clone ID: MRT4577_65765C.1.pep
GGGQRRGVXGPHQSFKPLEGPLGGKNFFGGAPVGSLHFVVGWFAPWPPFFKGVPGPRFFPPGGFPFLRAWLGGFLPLQVVKGPLPEREGFFPPKRAPGEGPLSG

SEQ ID NO: 331863 - protein, 211 aa, Zea mays
  Clone ID: MRT4577_65766C.1.pep
MSRITTVCCGLSRWPRGPLLAQPLSRHLPRSSQSPSIYGSFSYATQAPIPSSANPQQAPVAASKTGTDVKFSPKIEELVQTISQLSLLEAAELVDALKSRLKITEVAMPVQAASSTAQASGDKPAAANDRKAEPEKPKEKTVFSLTLTQIDATQKAKVIKEVKTIMPNMNLVEAKKFVESLPKQLKENGTKDEIEKLKKALESVGATVKVE

SEQ ID NO: 331864 - protein, 80 aa, Zea mays
  unsure (1)..(80): unsure at all Xaa locations
  Clone ID: MRT4577_65767C.1.pep
IGVGGFXRIGRLLARVALQNEDVQLVXVNYPFITTDYMTYMFKYDTGHGLWKHIDITLQDSQTLFFCDKPVTVFGIMNPE

SEQ ID NO: 331865 - protein, 143 aa, Zea mays
  Clone ID: MRT4577_65768C.1.pep
GRGVLLVAKSVTDSYVRPPPLHAFSRLGKQALRTQAGPAACIAATSQSKTVAAVVSAARMEYSAGATVVDTSAWPAAQRNGRRRFSFPMHSGGSVWIPKSGRTPKLLSPIKSVQDPSFVAAMLPRRGRSRARHLLLPNCTHPS

SEQ ID NO: 331866 - protein, 140 aa, Zea mays
  unsure (1)..(140): unsure at all Xaa locations
  Clone ID: MRT4577_65769C.1.pep
ITTNTSSGSHRHRRRKDQCASTNEGAIARHSKANMNAHMSNGQKAXKLVVMNLTAGWRGSCRAIGSLFVEHAWKFTQVVLLKVDVDEVTEVTAAYEVKAMPTLHFVKNGKTVATIVGAKTDELLALIYKHASPAPATAAA

SEQ ID NO: 331867 - protein, 137 aa, Zea mays
  Clone ID: MRT4577_6576C.1.pep
GRLGAQASSRLLESTTLRAVTFTAELLPWWWNWRREPWPTPQFKGDSSLNPADSRSNQPIEIPPLPFLLPLGSLAVRKNVDEVKSHLEYRTRNFSLKSARTALVPRRRTRMLLRSRGSKGRRNSERTRESWGGRDQD

SEQ ID NO: 331868 - protein, 117 aa, Zea mays
  Clone ID: MRT4577_65770C.1.pep
HWYLEPAGKETLQCPLLCPVRCVTAVVSTQLPPSSSLVYMKHMIHTRFTQGAPTTDNKQTRHRSRPEKGNVIVPQSLRFSPRHQSGLHSPCFCRTLRVRLLSMLPLPALRRHGVTQS

SEQ ID NO: 331869 - protein, 84 aa, Zea mays
  Clone ID: MRT4577_65771C.1.pep
NSIFNIRPYHWGHTPGWGPPQKNLPHEALLRATEGIQTYPPNLTNLLIFYSSVPHPSHLNILARPLFKPPPTILFKCTFPWGAP

SEQ ID NO: 331870 - protein, 53 aa, Zea mays
  Clone ID: MRT4577_65772C.1.pep
SAVTQSPMYGHHAVTRLHVGSNLPTSIGHTTRLDHRNHLCQKFSAAGHSIEGM

SEQ ID NO: 331871 - protein, 182 aa, Zea mays
  Clone ID: MRT4577_65773C.1.pep
AKLTGRPFRVFSLDTGRLNPETYQLFDKVEKHYGIHIEYMFPEASEVQDLVRSKGLFSFYEDGHQECCRVRKVRPLRRALKGLKAWITGQRKDQSPGTRASIPVVQVDPSFEGLDGGAGSLIKWNPVANVDGKDIWTFLRTMDVPVNTLHAQGYVSIGCEPCTRPVLPGQHEREGRWWWEDA

SEQ ID NO: 331872 - protein, 260 aa, Zea mays
  Clone ID: MRT4577_65774C.1.pep
MKLVFWHRFFLFFVLVSTSQGMSSDGLALLALSKTLILPSFIRTNWSGSDATPCTWNGVGCNGRNRVISLDLSSSEVSGFIGPEIGRLKYMQVLILSANNISGLIPLELGNCSMLEQLDLSQNLLSGNIPASMGSLKKLSSLSLYYNSFNGTIPEELFKNQFLEQVYLHGNQLSGWIPFSVGEMTSLKSLWLHENMLSGVLPSSIGNCTKLEELYLLHNQLSGSIPESLSKIEGLKVFDATTISFTGEISFSFENCKLEI

SEQ ID NO: 331873 - protein, 98 aa, Zea mays
  unsure (1)..(98): unsure at all Xaa locations
  Clone ID: MRT4577_65775C.1.pep
PLPFFREVYLSLDINIQRCRATVLSYLDCYPNISITYXILFIISMTVASVGRSFLKLXLLRNYLMSTMIQEKLNGLAIYVSISYWMRLVSMYNQRLVS

SEQ ID NO: 331874 - protein, 72 aa, Zea mays
  Clone ID: MRT4577_65776C.1.pep
ASCQLDPMQLCQEQSSVSLVAVRMAAPFSCSSTKSKSAISSSLVKSSCTDRLVLKKTMIQTSERSHAVQGQP

SEQ ID NO: 331875 - protein, 76 aa, Zea mays
  Clone ID: MRT4577_65777C.1.pep
HHLLLHRLHGFISSSVCPCMVCLSWLDRFGLDQHDAPLRLCIQSSSALNVDVAQIDRMHNTSCLAGQAELAYGPAR

SEQ ID NO: 331876 - protein, 63 aa, Zea mays
  unsure (1)..(63): unsure at all Xaa locations
  Clone ID: MRT4577_65778C.1.pep
MQNPSKVXDDENXVTYCIIHSYVTLLKMIAESLLHWVPVWYPAKVLLAAWLALPQLKDDSFVY

SEQ ID NO: 331877 - protein, 86 aa, Zea mays
  Clone ID: MRT4577_65779C.1.pep
LILDIHHSSLTSIVFCEAHQADAGAYAVDEADLRDVVVYVEFLLVNIINVLNVVQNAKLFLYEYAHRVIRWGSVVGPAHTLDYVLS

SEQ ID NO: 331878 - protein, 112 aa, Zea mays
  Clone ID: MRT4577_6577C.1.pep
MTTHDSDPQSNSSIAQVVSSLSSLDMNHTHDSTESSKRVMPAMAATHNHVGMNVNRIRPTEDIFNPHDPHIREDIIRMIMQYLSDEGYNASQMTIQDESNVKWHDREENTHE

SEQ ID NO: 331879 - protein, 72 aa, Zea mays
  Clone ID: MRT4577_65780C.1.pep
VGHSINGPLVPKPNIQTINLRYHLALVLAPPIPNYISCSFNPHGCRPLCNGIPLANPHRISYRKPKCCLIIH

SEQ ID NO: 331880 - protein, 355 aa, Zea mays
  unsure (1)..(355): unsure at all Xaa locations
  Clone ID: MRT4577_65781C.1.pep
MVATKVLPPSAARLLSVGVPPFTPSALPLSPTALLLGPSQASAVLPTAASTLLPHRLSQDAAPGPSRLGFAESGGAKIMSGHRNSHGKRYSDYTETGGGKRRNPGDDTYAPGPDDTVYRYLCASRKIGSIIGRGGEIAKQLRTETQAKIRIGESVPGCEERVITIFSSSRKTNTIDDAEDKVCPAQDALFRVHERLATDESFGNEDSEEISPQVTVRLLVPSDQIGCILGKGGHIIQGIRSETGAQIRVLSKDHIPACAISGDELLQISGDMVVVKKALCQVSSRLHNNPSKSQHLLASSLTQPYPXGTHCGSSAAPXIPGTWRISAAYSGYSARSSSSGLSGHSSLHYGKHHGY

SEQ ID NO: 331881 - protein, 544 aa, Zea mays
  Clone ID: MRT4577_65782C.1.pep
MAGHRNSHGKRQSDFTENGGSKRRNPGDDTYAPGPDDTVYRYLCASRKIGSIIGRGGEIAKQLRTETQAKIRIGRECPLGCDERVVTIFSTSRKTNTIDGAEDEVCPAQDALFRVHERLASYEGLGNEDSEEISPQVTVRLLVPSDQIGCIIGKGGQIIQGIRSETGAQIRVLSNDHIPACAISGDELLQISGDTVVVRKALHQVSSRLHNNPSKSQHLLASSLTQPYPGSTHLGGSSTAPVVGITPVIPPYGGYKGDVAGDWPSLYQPRRDESSAKEFSLRLLCAAANVGGVIGKGGGIIKQIRQESGALIKVASSNSDPDDDCIITVSAKEFFEDPVSPTIDAAVRLQPRCSEKSDLESAEQSYTTRLLVSTSRIGCLIGKGGSIITEIRRTSRANIRILSKENVPKVAAEDEEMVQISGGLDVARHALVQIATRLKANFFEREGSLSAFPSVIPYHPLPAGVSVSDEPKYLSRDTKPVGHYLYSSAFRTSDDMIPSDSYASYGGSQAPGGGYAAYSGYSARSSSSGLSGHSSLHYGKHHGY

SEQ ID NO: 331882 - protein, 42 aa, Zea mays
  Clone ID: MRT4577_65783C.1.pep
LYGAKERTKVRLKIIFYFEKLPQCKKNSDVIVTFVFKPCFFF

SEQ ID NO: 331883 - protein, 419 aa, Zea mays
  Clone ID: MRT4577_65784C.1.pep
MADKPSSTVVVGDLEALVADGLLRPLSGGPQLEWMVPSEADLTPPPGYVVSFIPFHERGFGVPASRFMRVFLHYYGVELHNFNPNSIAQAAIFAAVCEGFLGINPHWDLWTHLFSAELFASTTEVKKVRMAVRAGGCTLQLRPGRMQQYIPATLVSSNKGWQRQWFYLRNDDGRLLSFSQRVAGSGYGREAGCRCRYLARDASRAWGLGFYKPSLPPVPEDVVGQATWRVAAETKKEKTDMEKARAHERMRAREALERRRRRQERDGLPREPSPETPDDDDDDDEDDDMAARLGFSPDLRLGQGSPSQPPSGLAPSVSRAGTPRSRSEERGQAEGVLDLLAEVVQVTPGSQADPPVPQEQAPVPATQEVGPLAVVTTPGRAAPSVPRAPEVEAAPESATPARAEARGASPQARLALVRS

SEQ ID NO: 331884 - protein, 145 aa, Zea mays
  Clone ID: MRT4577_65785C.1.pep
LSQQYPIEISCGDGGSHCRSAGRPCHRAPVPRSPWRHNSMRLLALPWHLISGTRRRCLWIRSPQTSTVTRRLRFIAGRWAPAQACGRLECWTLQASVQLIPSSIEVERRLFRVLAGAPLPSIDRAWGGVCCMRAAERGRAGGRLP

SEQ ID NO: 331885 - protein, 130 aa, Zea mays
  unsure (1)..(130): unsure at all Xaa locations
  Clone ID: MRT4577_65786C.1.pep
AQAQLSETESSDVYSFGVFLLELVTGREAAGLMPPGSSNELVPVVXQMEARFASNELVDPRLGGSFTSDLLCCQMEVASSCLSPSARRRPRMRLVAAELDRILEKEMALTTVMGDGGTAIVTLGSQLFTS

SEQ ID NO: 331886 - protein, 102 aa, Zea mays
  Clone ID: MRT4577_65787C.1.pep
LAGRHKRLKGVVLKSKCDHPLIHLAKKPACPSFTSRYRRRSLRLRQTTSCRDGDEECHLRRLQQGRLRHRGPRRRCYGSHHYEHHLGRITGRRLCAGRYSAL

SEQ ID NO: 331887 - protein, 197 aa, Zea mays
  Clone ID: MRT4577_65788C.1.pep
ATAGLSHLHSLAPPLIHREFKTSNVLVDENFIAKVSDAGIHRLLRGPDGGAVAALASRGVFQDPEVHSSAQAQLSETESSDVYSFGVFLLELVTGREAAGLMPPGSSKDSLAQWMEARFASNELVDPRLGGSFTSEGMAEVVGLASSCLSPSARRRPRMRLVAAELDRILEKEMALTTVMGDGGTAIVTLGSQLFTS

SEQ ID NO: 331888 - protein, 92 aa, Zea mays
  Clone ID: MRT4577_65789C.1.pep
GVWVRSLARPGAGLLHSWRGFSCRETRVLLWCFGVKLDSVQFLPGGYASWVHLPSLGRFSVGFNPAPLAFSGGLSVHFPPVRLESVYGAKLF

SEQ ID NO: 331889 - protein, 357 aa, Zea mays
  Clone ID: MRT4577_6578C.1.pep
MAPLPPSAASGPVSSSPRSLVPDACAEPMRRASPPQELPVARGEIQAALAPANASSAGAHGGGGSFTALLGLPTSQAMELLLPRTTPPALATAPAPTFPSDPHLVDRAARLSTFAPPSPSPSSTMTDQPLPAAANAGKRKADPVDRAPKGKAAKKGKTAEEKLAGGDGDDEKPAYVHVRARRGQATDSHSLAERARREKINARMELLKELVPGCSKVSGTALVLDEIINHVQSLQRQVEYLSMRLAAVNPRVDFGGLDSFLTTECGRIAGFNCKNGIDLEQVTWPEMGVHGARQLMQLQQQFWHGDLAHPHQVASQWEKRGDGHPPVFSNSSPSLFGYDLTSSGAQQTPASKLKTEL

SEQ ID NO: 331890 - protein, 98 aa, Zea mays
  unsure (1)..(98): unsure at all Xaa locations
  Clone ID: MRT4577_65790C.1.pep
MDHTQSAVAVAVMAPVLLLEAVVMTSDGGINCVQVNSAIKRYVTXAYVMGSGPSASCSTCVMNVMIAGRIAADRCAACICLSNAAMGVNGLKACNTAS

SEQ ID NO: 331891 - protein, 71 aa, Zea mays
  Clone ID: MRT4577_65791C.1.pep
RNFIGISLFSHETGNFRLFQRRPESCWIQPYSRLYIRGCSAVLACTTLDSLDPSQDGQSGNQIDYDNSWPA

SEQ ID NO: 331892 - protein, 259 aa, Zea mays
  Clone ID: MRT4577_65792C.1.pep
MAACRPSGLSVLCSLYRFYICMLSIHVPRAHSLSFDLSFSKPQSPDLPQKINFNGDAYLTPDTLELTRNQRDQSITNSTGRATYAQPVPLWDGATGETASFTTTFSFRIRPDSSTYPGDGMAFFLGHYGSDIPVHSGGGMLGLVPTHTNGTGNGTVVAVEFDTFQNPTNDDISSNHVGIDVDSLNSTASTDTTSPTKNLTSGYLMAATVRYENVTRLLALELTVNDTSYYVNATVDLKGYLPERVGVGFSAATGNGGEQ

SEQ ID NO: 331893 - protein, 106 aa, Zea mays
  unsure (1)..(106): unsure at all Xaa locations
  Clone ID: MRT4577_65793C.1.pep
GGGGFNCGQPGHVARDCSSGGGGYSGGSGGGGGGXYNCFFAVHFSRDCPWGGGGGXXRLGGXRFGGGGGSSPGERKETLPATVPRQVFPRPASQPDRIGSVHHLLV

SEQ ID NO: 331894 - protein, 65 aa, Zea mays
  Clone ID: MRT4577_65794C.1.pep
INIITTQNSSSSQLMIKFHSARTKSHPGSRTWCISFQTFKKKIFREFFFQDFSPQSAYKVILCSL

SEQ ID NO: 331895 - protein, 31 aa, Zea mays
  Clone ID: MRT4577_65795C.1.pep
SVLVSYYTATGDPLDPTEDALFQGCLVEDVC

SEQ ID NO: 331896 - protein, 93 aa, Zea mays
  unsure (1)..(93): unsure at all Xaa locations
  Clone ID: MRT4577_65796C.1.pep
MGLTKTKIESFLPLVQKVERRLSSTSHFLLLAGRLQMINAVFSSLQTYYMCTLKIPISIVKQINKNRRHCLXRGTDINAKKXAQAAWKLXCKP

SEQ ID NO: 331897 - protein, 41 aa, Zea mays
  Clone ID: MRT4577_65797C.1.pep
NNIKARESISQAISLSDIERYIDLDFHINTNYNSIGDDITI

SEQ ID NO: 331898 - protein, 122 aa, Zea mays
  unsure (1)..(122): unsure at all Xaa locations
  Clone ID: MRT4577_65798C.1.pep
CITXVWLYAHILTASGAYKHTALVTQINCRTDRANLISSSQWXRLPYVSLTNFNINVFTFFMXFHSLRISIPYPLQWGAPTFSADHAFGMMAAVMVSLIETTAAFKAAARLASATPRVRPRV

SEQ ID NO: 331899 - protein, 208 aa, Zea mays
  unsure (1)..(208): unsure at all Xaa locations
  Clone ID: MRT4577_65799C.1.pep
MAAPPATAAAASRCLSGAKSCRAAERSSSSFAVSAPSTGLRQSRSRVLSVRAKVATGVQRASTVDDGAKRPWKLSDARLVLEDGSVWRAKSFGASGTQVGEVVFNTSLTGYQEILTDPSYAGQFVLMTNPHIGNTGVNPDDEESNQCFLGGLIIRNLSICTSNWRCKETLEEYLTKRNIMGIYDVDTRAITRRFREDGXLLGVLSTDQ

SEQ ID NO: 331900 - protein, 173 aa, Zea mays
  Clone ID: MRT4577_6579C.1.pep
KAKGRTPLEAQASSRLLESTTLGGVTFKAELLPWWWNWRREPWPTPQFKEDSSLNPADSRSNQPMEIPPLPFLLPLGSLAVRKNVDEVKSHLEYRTRNFSLKSARTALHSQKKITSLEHKTMMDRKNSNTLETEPRSHLVPRRRTRMLLRSRGSKGRRNSKRTRESWGGADQD

SEQ ID NO: 331901 - protein, 76 aa, Zea mays
  unsure (1)..(76): unsure at all Xaa locations
  Clone ID: MRT4577_657C.1.pep
MSCNCGSXCGRGSSCKRGQKSPDLEETRTAAQATVVLVVAPAEKAAPEFVEAAAGSGVAAHGRSRGGNCKCDPCNC

SEQ ID NO: 331902 - protein, 158 aa, Zea mays
  unsure (1)..(158): unsure at all Xaa locations
  Clone ID: MRT4577_65800C.1.pep
ANCPASEVLNLKPNXCLFSNXPGDPAAVPYAXKTVQAMRPKVPVFGICMGHQLIGQALGGKTFKMKFGHHGGNHPVCDLRSGRVDISAQNHNYAVDPESLPEGAEVTHVNLNDNSCAGLQYAKMKLVSLQYHPESSPGPHDSDTAFGEFIELMKSNRL

SEQ ID NO: 331903 - protein, 74 aa, Zea mays
  Clone ID: MRT4577_65801C.1.pep
FCFLQNMHIFHTELPINAIQVAIRICVTPKWNPNQYVNGDILGVVKFFIRAHVGRYFMLAGRVGANCNLYCIYW

SEQ ID NO: 331904 - protein, 493 aa, Zea mays
  Clone ID: MRT4577_65802C.1.pep
MNSNLFFPQKLGGGVPCPPAGLHPSPHLKTSPLAKKLVRPCLSLHSTMAAPPATAPATARCLSVAKSCWAAERSSSSFVLSAPATGLRQSGSRVLSIRAKVATGLQRACIADDGAERPWKLSDARLVLEDGSVWTAKSFGASGTQVGEVVFNTSLTGYQEILTDPSYAGQFVLMTNPHIGNTGVNPDDEESNQCFLGGLIIRNLSICTSNWRCKETLEKYLIKRNIMGIYDVDTRAITRRLREDGSLIGVLSTDQSLTDNELLEMAQKWKIVGVDLISGVTCDAPYEWSDKTDSEWEFKRDPSSETFHVVAYDFGIKHNILRRLTSYGCKITVVPANWPASEVLNLKPNGVLFSNGPGDPAAVPYAVKTVQEIIGKVPVFGICMGHQLIGQALGGKTFKMKFGHHGGNHPVCDLRSGRVDISAQNHNYAVDPESLPEGAKVTHVNLNDNSCAGLQYSKMKLMSLQYHPESSPGPHDSDTAFGEFIELMKSNRL

SEQ ID NO: 331905 - protein, 84 aa, Zea mays
  Clone ID: MRT4577_65803C.1.pep
ARPQFLVSTPPFFLFPGRFGLAPSANPKATGGFKLEGRDSGLQRGAPPGFPLPHPLALGPVGPILGVGFVLGFKNPGALAQIMG

SEQ ID NO: 331906 - protein, 49 aa, Zea mays
  Clone ID: MRT4577_65804C.1.pep
SRDQIHDFSFNATGVTLWLRTISWERGILSVSKKCVLPSTYVDALHAEN

SEQ ID NO: 331907 - protein, 60 aa, Zea mays
  Clone ID: MRT4577_65805C.1.pep
ESKPVDVGSAATDVMPCTRVMGGTTVWLFINCQFPNSLVLYSMYVSIVSTPSPYSLVLNS

SEQ ID NO: 331908 - protein, 185 aa, Zea mays
  unsure (1)..(185): unsure at all Xaa locations
  Clone ID: MRT4577_65806C.1.pep
PAGIPLLELFHPNKQSLNQSLHHSHPKCLPSPPPPRSSSLPSLRPPSATSGTSSSSRTSPSSTLPSSPPNGSRALLPTPTSSSGPSRTAPSSRLSRRSTPASTTTSPTASSHPSPPXSXTPPSSAPSAPTPSPLARTRVRPLSPGAETSPATPTLVLSLTPSSSAVRPSLTSPRLLQKKKKKTRG

SEQ ID NO: 331909 - protein, 134 aa, Zea mays
  Clone ID: MRT4577_65807C.1.pep
IADKFAPDALSTFVPASAIPDGWMGLDIGPDSIAAFNAALETTQTVIWNGPMGVFEYDKFAIGTEAVAKKLAELSRKGVTTIIGGGDSVAAVEKVGVADVMSHISTGGGASLELLEGKELPGVTALDEAATVTV

SEQ ID NO: 331910 - protein, 424 aa, Zea mays
  Clone ID: MRT4577_65808C.1.pep
MPLLPLLPVMASTFSPTSAARALLPGSTSRPLFLAASASSGRIQPSRKGLDFRRGRFTVCNVAAPTAAEQEATATASAAKETQRPVYPFAAIVGQDEMKLCLLLNVIDPKIGGVMIMGDRGTGKSTTVRSLVDLLPDIRVVVGDPFNSDPDDPEVMGPEVRQRVLQGDTGLPVTTAKITMVDLPLGATEDRVCGTIDIEKALTEGVKAFEPGLLAKANRGILYVDEVNLLDDHLVDVLLDSAASGWNTVEREGISISHPARFILIGSGNPEEGELRPQLLDRFGMHAQVGTVRDAELRVKIVEERARFDRDPKTFRESYHDEQEKLQQQISSARSNLGAVQIDHDLRVKISKVCSELNVDGLRGDIVTNRAAKALAALKGRDSVTVEDIATVIPNCLRHRLRKDPLESIDSGLLVIEKFYEVFS

SEQ ID NO: 331911 - protein, 62 aa, Zea mays
  Clone ID: MRT4577_65809C.1.pep
VYPNWSFYYEFAQYQLLRGSSSAEERGERVRGGAAGEEPPGGGRGGGHGGKTLAGRAGIVGG

SEQ ID NO: 331912 - protein, 169 aa, Zea mays
  Clone ID: MRT4577_6580C.1.pep
KKTTHQARREKINARMELLKARPPRRSKVSGTALVLDEIINHVQSLQRQVEYLSMRLATVNPRGDFGGLDSFLTTECGRIASFNCKNGIDLEQVTWPEMGVHGARQLMQLQQQFWHGDLAHPHQVASQWEKRGDGHPPVFSNSSPSLFGYDLTSSGAQQNPASKLKTEL

SEQ ID NO: 331913 - protein, 109 aa, Zea mays
  Clone ID: MRT4577_65810C.1.pep
GSLFITGNCEFLVNKAGIEVCFLSTHVGVFRSLHARPEKSLALTLSRRIIWQLKSSLTTSRLRLFGYKSPCESLEIWSLALYVPLQFVPLAATFKKYFPPRCSGFFFPP

SEQ ID NO: 331914 - protein, 124 aa, Zea mays
  Clone ID: MRT4577_65811C.1.pep
YGTLFTAHLGKLPQLNFPAFDGEFPKLWQSRCEKYFAMYGVDPIVWTQVATMHFSGSAARWLQSIEHKLPSLTWSEFGGLISERFGKNQYEYLLRQLLHIRQHSTVTDYVEHFSQLVDQLNAYN

SEQ ID NO: 331915 - protein, 161 aa, Zea mays
  Clone ID: MRT4577_65812C.1.pep
MKYSFAIAALATAVSAQSLADVPKCAIPCLDDAITSKTDCKTTDLTCVCKSFDDVRSAATSCVITKCGSDVAINEVLPATEKLCSGGSGSGSAEESSKADTTKVETCTKVVVTTSAVGTTAVETTAVETTSVPPVVDSKTTADPPVGETPTTNSEAAGGAT

SEQ ID NO: 331916 - protein, 95 aa, Zea mays
  Clone ID: MRT4577_65813C.1.pep
CSAADVTDTDHAALFAMFTKEGEQGERNAGPDAMHWILRRSRSFMLIKHFQMCEMCQGIFRCVCLASETAEFVSLISPKPSWNPASAEVVREKKS

SEQ ID NO: 331917 - protein, 53 aa, Zea mays
  Clone ID: MRT4577_65814C.1.pep
NSSLVRIPKKKKKKKKKKKKKKKKKKKKKKKKKKKKKKKKKKKKGAAPFFFFF

SEQ ID NO: 331918 - protein, 80 aa, Zea mays
  Clone ID: MRT4577_65815C.1.pep
MHESVQDQNHKRRNSLVSLPYLRMLLDLQTSLFLTSELYLIHPHSSLHCDCEHKFKLSMLITYQHNTFVHNSHLDDRLSR

SEQ ID NO: 331919 - protein, 169 aa, Zea mays
  unsure (1)..(169): unsure at all Xaa locations
  Clone ID: MRT4577_65817C.1.pep
EIPVLGPESAPVSTHIGCINSSNLLPVRRSLVGSFEESLLSGRYSCXKDNQSIDGFLAILNVTGGSFSPPTQKFPFTVSSIDEDSSLLYYSSIDLAGRLPTNNTKGPKLKRSLSSSDSRSTNSRLRIPVKGRIQLVVSNPEKTPLHTFFCTYDLSDMPAGTKVLTLGMS

SEQ ID NO: 331920 - protein, 80 aa, Zea mays
  unsure (1)..(80): unsure at all Xaa locations
  Clone ID: MRT4577_65818C.1.pep
TXSHTXLQELEPXRLYHXHCCXSDFLFSKKLPSPKIXCVSKPIPLVILRAISEIIKALLSFFGFHLPSRVKNIHFPNKRV

SEQ ID NO: 331921 - protein, 60 aa, Zea mays
  Clone ID: MRT4577_65819C.1.pep
MCTLFSLVTCLKKKKNKKKKKKKNIKKKKKKKKKKKKKKKKKKKKKKKKKKKKKKNGGAV

SEQ ID NO: 331922 - protein, 190 aa, Zea mays
  unsure (1)..(190): unsure at all Xaa locations
  Clone ID: MRT4577_6581C.1.pep
EGLLPESREFSCKDYMDPPPAPLIDAEXELTQWXDTGTVIVHSSSCTLLLLYITVATXIGDKHHTDLXGTGPKAFCGAPSXILAIDWAFRGMIFILLYCTAXGISXQHMNPARVAFXQLLHRKVSLDHALVYISAQWLDDILGCGTRXGFDSAYYMYYDGGLNQLIDGYYKGTRLVVEIILTXMLVYTVF

SEQ ID NO: 331923 - protein, 188 aa, Zea mays
  Clone ID: MRT4577_65820C.1.pep
FRRWVLLDHAEEVVVEDEEDDDDEDDEDDDELDGQEGDASGKSKQSRSEKKSRKAMLKLGMKPITGVSRVTVKKSKNILFVISKPDVFKSPNSDTYVIFGEAKIEDLSSQLQTQAAEQFKAPDLSQITSPETSGPGQEDNDEEVDETGVEAKDIELVMTQASVSRPKAVRALKASNGDIVTAIMDLTT

SEQ ID NO: 331924 - protein, 204 aa, Zea mays
  Clone ID: MRT4577_65821C.1.pep
MTAQTAEELATQIEQQKLEEQKTEAEEVVVEDEEEEDEDDDDDDKDDDELDGDASGKSKQSRSEKKSRKAMLKLGMKPITGVSRVTVKKSKNILFVISKPDVFKSPNSDTYVIFGEAKIEDLSSQLQTQAAEQFKAPDLSQMISNPETSGPGQEDNDEEVDETGVEAKDIELVMTQASVSRPKAVKALKASNGDIVTAIMDLTT

SEQ ID NO: 331925 - protein, 126 aa, Zea mays
  Clone ID: MRT4577_65822C.1.pep
MGKEKIKALLHCKKSVRPFEADTDLLEMKALSQALGIPLHLAAVDDNPLPDRTVQVKWIDFIPRPGPLGSIREYYLGPLGSIRQYYLPSATDKHPVLPAEYFLLSGRMPLVTILRTVRATAILYRK

SEQ ID NO: 331926 - protein, 65 aa, Zea mays
  Clone ID: MRT4577_65823C.1.pep
KAIRGMGTTGNSHLGGGGTNTTQISPLNDQTRILGRGYSTTILFFQRGTPPVRNYWARSMLLQDQ

SEQ ID NO: 331927 - protein, 761 aa, Zea mays
  Clone ID: MRT4577_65824C.1.pep
MMRLSTPARTCFPSTLPPPQLPPPQLPSRSPHLLASALAPRSAAWRRGLPPPPPPVVSAMRRRGRRRAAPPPAAAGGGGGGELAASDSQEKRAGTDLKTLSTRFWKVAAPYWWSEDKTQARLRLAAVFALTLGTTGISVGFNFLGRDFYNALADKDQEKFTTQLLYYLGAFAGGIPFFVLRDYARETLSLRWRSWMTSYYMKRYFKNRTFYKIQSQSIIDNPDQRINDDLSAFTGTALAFSLTLFNAAVDLVSFSNILYGIYPPLFIVLVVYSLGGTAISVFLGKNLVNLNFMQEKKEADFRYGLVRVRENAESIAFYGGEENELQLLLEVQESAFENLSELLIASRNLEFFTNGYRYLIQILPAAVVAPMYFSGKIEFGVINQSVSAFNHILSDFSLIVFQFQSISAFSAVIDRLGEFDDLLDGNESSQSSQRDSIDGINIVFKSSGPCVPSSNGSLTQSDPCMVLEIRNLTLLTPRSGNVLITGLTMELKDKDHLLVMGPSGSGKTSLLRALAGLWTSGTGEIIYHVRGSTQLQKPNPSSDKPSSMNLKGEEESLQSSKQRRDNGIFFVPQRPYMVLGTLRQQLLYPTWTEEVQHSPDNDDKNSDPLPFLSEVSTSDLVGAKSEVPSTAELIEVLEDVKLGYILPRFNGLDSTHDWASVLSLGEQQRLAFARLLLATPTLVLLDESTSALDEANEAHLYSQIEAAGITYVSIGHRKTLHKFHNKALYISMSDSTDTNPRNWELKPADKLPAEEPSQFPS

SEQ ID NO: 331928 - protein, 104 aa, Zea mays
  Clone ID: MRT4577_65825C.1.pep
LHTVWICRSWEIHRSACEAAQRSETDSNGSLATTAHVTMLSHTLCLIYRENVNTLLASLLFVYVTVVIASAKKYLILLVELRPFREGTTLTCLRQSRRPLRCLS

SEQ ID NO: 331929 - protein, 64 aa, Zea mays
  Clone ID: MRT4577_65826C.1.pep
SCLDICQEARVYDLIDHAYRVLKPARQYTVLLSGPRTGLYQGQDTRDLLRGHALHLSTETRYLG

SEQ ID NO: 331930 - protein, 97 aa, Zea mays
  Clone ID: MRT4577_65827C.1.pep
GGTARPPPGPALPPTPPTSTPNWDIHHREREQGAAGSLHCRPACTALIGALCAVGRIHPSSRIMLMVVAGRECDLGAANLTSWPQIRGASWAGKGTA

SEQ ID NO: 331931 - protein, 181 aa, Zea mays
  Clone ID: MRT4577_65828C.1.pep
GYLEAGRVVVHSLGGTAISVFLGKNLVNLNFMQEKKEADFRYGLVRVRENAESIAFYGGEENELQLLLDRFRRAFENLSELLIASRNLEFFTNGYRYLIQILPAAVVAPMYFSGKIEFGVINQSVSAFNHILSDFSLIVFQFQSISAFSAVIDRLGEFDDLLDGNESSQSSQRDSIDGINI

SEQ ID NO: 331932 - protein, 163 aa, Zea mays
  unsure (1)..(163): unsure at all Xaa locations
  Clone ID: MRT4577_65829C.1.pep
MMIKTQADLLSFLSEVSTSDLVGAKSRVPSTAELIEVLEDVXKLGYILPRFNGLDSXHDWASVLSLGEQQRLAFARLLLATPTLVLLDESTSALDEANEAHLYSQIEAAGITYVSIGHRKTLHKFHNKALYISKSDSTDTNPRNWELKPADKLPAEEPSPFPS

SEQ ID NO: 331933 - protein, 503 aa, Zea mays
  Clone ID: MRT4577_65830C.1.pep
KKKKKKKKKKKKKKKKKKKNFSPAAALLILISARAASAPAGRRIPPASSMPWVRNLRRFVDTGAGLGSEALMELETKRILLEIFKERQRKSAEAGSIPSFYKKKPEEGSISSRVQRLAKYRFLKKQSELLLNADDLDAMWVCLRENCVIDDATGAEKMNYEDFCHIATVCTEQIGQKCKRFFSPSNFMKFEKDDSGRIAILPFYLYVMRTVSLTQARIDMSELDEDSDGFLQPHEMEAYIRGLIPNLAQLRDMPTAFVQMYCRIAARKFFFFCDPHRRGKACIKKVLLSNCLQELMELHQESEEEVTDTEQAENWFSLTSAQRICDMFLALDKDTNGTLSKQELKEYADGTLTEIFIERVFDEHVRRSKVGGGNSREMDFESFLDFVLALENKDTPEGLTYLFRCLDLNGRGFLTTADIHTLFRDVHQKWIEGGNYELCIEDVRDEIWDMVKPADPLRISLSDLLSCKQGGTVASMLIDVRGFWAHDNRENLLQEEEEQVEEA

SEQ ID NO: 331934 - protein, 161 aa, Zea mays
  Clone ID: MRT4577_65831C.1.pep
MIHFVLLISRQGKVRLTKWYTPYPQKQRSKIIKEISTLVLTRGPKLCNFVDWQGYRVVYKRYASLYFCMCIDPADNELETLQIIHHYVEILARYFGNVCELDLIFNFHKAYFILDEILIAGELQESNKKSVLRLVTTQDALVEAAKEEAGSLRNIIAQATK

SEQ ID NO: 331935 - protein, 57 aa, Zea mays
  Clone ID: MRT4577_65832C.1.pep
SFNCVCFCACQFQFVNFGISKFSNQHLFVCGFFFVNKTKHHEISKSHLPKNISHWLF

SEQ ID NO: 331936 - protein, 74 aa, Zea mays
  Clone ID: MRT4577_65833C.1.pep
YLMCLGNTETYVGPSCSTPQFRLSAWTKGGLHRTEVVKLSEVGVLSVSLGAVIKVTLNGLPGWLGPWRQAVAGH

SEQ ID NO: 331937 - protein, 94 aa, Zea mays
  Clone ID: MRT4577_65834C.1.pep
SDRAFGDSRAFSVSPADSAPPVGSDASGDSGEVLPARSPAPGRGAPPAPRPPPPAPPRGGLPPSPPPPPLFVPPPFPPPPFFVLDSPPPLPWHN

SEQ ID NO: 331938 - protein, 94 aa, Zea mays
  Clone ID: MRT4577_65835C.1.pep
AFGSSVATVMPMMIPVSNTKITLKDDSPRSSTVSLEPAPVTVHIDHLVVERSDDGSFHIRDSHMLNTGNDLKENVKSDSVLLTSGKYDLKKQRV

SEQ ID NO: 331939 - protein, 134 aa, Zea mays
  unsure (1)..(134): unsure at all Xaa locations
  Clone ID: MRT4577_65836C.1.pep
PPCGFYCCPQASQEKVXGCRQXIVCLSSKEGPPPVRACWEEKGFFEIAPRLXCPCWGPQIGLLLGLRXPGFAIYVPLVLGIPPNFFLFLVILFVTPPPLLELSFVPGPRLQMPVLGSWLPKXKKKKKKKKKKKK

SEQ ID NO: 331940 - protein, 56 aa, Zea mays
  Clone ID: MRT4577_65837C.1.pep
YIGYLFLPYTVIPASSLLLPVVQNIISFLPRPSSSKVCTSFSNFTAFWITGRLSRV

SEQ ID NO: 331941 - protein, 59 aa, Zea mays
  Clone ID: MRT4577_65838C.1.pep
DGEKWIVNLIRETRLDAKIDSQDGTVIMNHPPNNVYQQVIEKTKGGFFRTQVLNAAVSK

SEQ ID NO: 331942 - protein, 44 aa, Zea mays
  Clone ID: MRT4577_65839C.1.pep
NHFIHIHGVLFIYLAKREGFFLYLQRPGLKQIKSKCPQTHKVWI

SEQ ID NO: 331943 - protein, 217 aa, Zea mays
  Clone ID: MRT4577_6583C.1.pep
MELDSIECVSYSDGMEDDDDTAAVTSSQLPRPFLKSSSTAGAAAAAAAAVNVVVVSDRAGAAGTVAGAGPLVISPATGVHELLECPVCTNSMYPPIHQCQNGHTLCSTCKTRVHNRCPTCRQELGDIRCLALEKVAESLELPCRYYSLGCPEVFPYYSKLSHESQCSFRPYNCPYAGSECSVVGDIPFLVAHLRDDHKVDMHSGCTFNHRYVKSNPR

SEQ ID NO: 331944 - protein, 65 aa, Zea mays
  Clone ID: MRT4577_65840C.1.pep
AISSPLLLPTFRRLTPTSSLRAAAAMSSSSSAVVAPIESLRALQGPPGGVSLECRKVDVCYLQNQ

SEQ ID NO: 331945 - protein, 49 aa, Zea mays
  Clone ID: MRT4577_65841C.1.pep
RLFYRLGSRFARCGSRSQAPQSLAPSWTLDSERRVRDAPASRVRQDRSH

SEQ ID NO: 331946 - protein, 248 aa, Zea mays
  unsure (1)..(248): unsure at all Xaa locations
  Clone ID: MRT4577_65842C.1.pep
SRSKPPTLASPLPTFLRPGLMAEIEVVSEGGRRDEDEERRRQQQQGAGEPDPVVDVYSAAAYGDLERLRGFVEQGGAATALREPDGNGYHALQWAALNDYPHVALYIVEHGGDVNATDHARQTALHWAAVRGSTSVADVLMEHGARVEAADVNGFRAVHVASQYGQTAFLHHIISKYGADFDALDIDGRSALHWAAYKGNADTIRLLLFMDANQVRQDKNGCTPLHWAAIRGNLEVCTVLVHTGTXEE

SEQ ID NO: 331947 - protein, 129 aa, Zea mays
  unsure (1)..(129): unsure at all Xaa locations
  Clone ID: MRT4577_65843C.1.pep
TPQAWQRLVHLPLRLAGGSASSPLPVAAWELLARDGNRSWLAMALPPVEAQRQARPDLASWYRFLSPTXYHAEDHGYQHRPQARPIPQLRPHRRNISSVTNCILTLNHILSACXLPVLPPVPCKDVHYS

SEQ ID NO: 331948 - protein, 60 aa, Zea mays
  Clone ID: MRT4577_65844C.1.pep
MGLLMLLHVLLVAAAARAPAAQAWGKEGHYMTCKIADGFLTSEALTGVKALLPSWANGEL

SEQ ID NO: 331949 - protein, 221 aa, Zea mays
  Clone ID: MRT4577_65845C.1.pep
MAAAARPSNATLLARLRDGTAKFELLDDSAFALAHAPPAWPRLHCFGRIAPSLRGGWSAALNKVEHYGVQRVTGDGRCMFRALAKGMAKNKGIPLAPREEVEDADDLRMAVKEIICDSETGRQEYEEAVIAITVEQSLKRYCQRIRRPDFWGGESEFLVLSRLCRQPIIIYIPEREYHGRGNGFIPIAEYGLEFTKNTKQWKKKTPVRLLYSGRNHYDLLV

SEQ ID NO: 331950 - protein, 72 aa, Zea mays
  Clone ID: MRT4577_65846C.1.pep
HARVCKFDTSIAAALPENSAESNPSELQALGPKLSVFRSLKLTELTLITLIICMFRASIGLQRYITLQILIF

SEQ ID NO: 331951 - protein, 79 aa, Zea mays
  Clone ID: MRT4577_65847C.1.pep
SSGLQISEALKLQMEVQKRLHEQLEVQRQLQLRIEAQGKYLQKIIDEQQRLTGEKSETSAGGAFGSDSRDHFPDSELAE

SEQ ID NO: 331952 - protein, 157 aa, Zea mays
  unsure (1)..(157): unsure at all Xaa locations
  Clone ID: MRT4577_65848C.1.pep
HQKPQHTXQPHHQHPQEXHAPGTHNEGQXPTTHISHHANATAPPHNHQHPPXRRRKQSNKRPKHHTMTHLHTLRHHRLPPRHRRHQXDTNYEYAYHHNQNPTHXGDHHXHIQLRRHRHHQHLSKRHSHHHTHQAHXHHNRHHHQIHKHINQPKGSKP

SEQ ID NO: 331953 - protein, 184 aa, Zea mays
  Clone ID: MRT4577_65849C.1.pep
ATGRRTKRPCPPHDTPPLHLSFTTSSSSLPSCRECPSSPPLSLARHGTAPLSDPVSSSPRRLPDLTDEVCRHPLVPAHPALLSVSPVAELPQLAPTLVVVSFVAPLVPELAGRAPLSNTGILHSSVLCSASTSLAASICVVRLTLSCLGRAVHRRSLRQTTSSSNLVRFTAAPSSSASSITGPP

SEQ ID NO: 331954 - protein, 119 aa, Zea mays
  Clone ID: MRT4577_6584C.1.pep
FHCFGQYFCLHFEAFQLGLAPVYMAFLRFMGDENDSRNYSYSLEVGANGRKMIWEGTPRSIRDSHRKVRDSHDGLIIQRNMALFFSGGDRKELKLRVTGRIWKEQQNPDSGACIPNLFS

SEQ ID NO: 331955 - protein, 75 aa, Zea mays
  Clone ID: MRT4577_65850C.1.pep
SISCSRTWETRESRSPLSPYGEVEHQFVLQDAPSIGLRLLVLQLACISGGSAYSGVTRRGSGVRERDEWQRQADL

SEQ ID NO: 331956 - protein, 55 aa, Zea mays
  Clone ID: MRT4577_65851C.1.pep
SYGGGYGQGNYGRKKQDDDSDDEKKNRYAKRDDSDDEKKERYEKHHHHRRHNYDD

SEQ ID NO: 331957 - protein, 131 aa, Zea mays
  Clone ID: MRT4577_65852C.1.pep
GNPGTTHATGLNPKSKERNRRPFKRTSRGFTPEKRQRRTNRGTKPNKTKRGEETRGRHKTDEGAAAQDDKNKRRGTHDAQKGTRPQKEHQHTPQSKGEKEGRGNHQDTTREPEENRKEKEKGEHERKKQPA

SEQ ID NO: 331958 - protein, 33 aa, Zea mays
  Clone ID: MRT4577_65853C.1.pep
GGAQGYGGGGGYSGRREGGGGGYGCGGGGCWRD

SEQ ID NO: 331959 - protein, 69 aa, Zea mays
  Clone ID: MRT4577_65854C.1.pep
QQEERPVFSRFFFHKKCPLNQSPYYLKRKTKIPGGKGESGVAIMFALTRKISKMFEARMLILTLETWAA

SEQ ID NO: 331960 - protein, 66 aa, Zea mays
  Clone ID: MRT4577_65855C.1.pep
DSALANGTTFVLGRVILNMSPQRNNCFKRFVINNLYRFLQKNFRSNISSLKIAPSKTLHVGMQYEI

SEQ ID NO: 331961 - protein, 83 aa, Zea mays
  unsure (1)..(83): unsure at all Xaa locations
  Clone ID: MRT4577_65856C.1.pep
MALLSRLHLLAQIAACMAEMTARAFLKHPKVLICSMLATQRNKPXKGGNRLRKNNGSGLKTPSEASDGTFTDSKCPSDPALSL

SEQ ID NO: 331962 - protein, 690 aa, Zea mays
  Clone ID: MRT4577_65857C.1.pep
SISEAEVKQTPESFEHPAPSEPQLEIVEANINAPKEVIEVENSEPEDGWQPVQRPKSAGGSGKQMKHYRPTTRKVYDPDSHDPTYTSQYKARNSYSNNRYYFLRKRTVVPTTYTDPQQHVKVQTFGARFGRKIYKAVTYRVKPATATTEVLDTFKSTEQMSGKAESQVANSQAHNPTSTDHKGSESHGTLVASSGNAPSYKDVALARPGTIAKTQIQKPRDDVPQNQPSLGQIIAQEMKDSLVDSLQVEQGPVSANTNNSKEETNVLGKLQKLEETKFSQGELEIENLCKDRVQDLPIPKAEESGIGSEPVNSKKDANVLSNTSQELSSSSNDGAAIEFSESTGSVKTEQTEKSDTDFFEALPRSIENISVSASTTNTGSLGGDGSEKSKPNLVLSNIDLREMPNKKLSASAPPFNPSPPSVLSPLSGNVGLPPPGAIPGVAPWPVNVSLHPGHSTMVPSGPPLCTSPHHLYPPAPRSPNLMHPVPFIYPPYSQPQVVPNTTFPMNTNIFRPNHYGWQPYMGPAPSEFVPMSAWSSSHTIDFIPTPHVVDPISQSLADKHIQSDAAVVSIGPSLDSSAVVAKEEMETPAVAVSGNLISNKHDDQDKQLKDATRIELSPEMQEDNKHDEGSFRIYVKGKSRRKQTLRIPISLLNKTYGSRSFKLVYNKVVRENDIFRPSSVSFAEVVSSGN

SEQ ID NO: 331963 - protein, 78 aa, Zea mays
  unsure (1)..(78): unsure at all Xaa locations
  Clone ID: MRT4577_65858C.1.pep
ISMISALSIRWYPILAAXCRDVFQFFRTIXXSYSSVFGIACVTSHLXLSSSRVTGYSVRREXXLTKSWNGSQELFQRP

SEQ ID NO: 331964 - protein, 572 aa, Zea mays
  Clone ID: MRT4577_65859C.1.pep
MAAMAAAAAAAAGGVGLHLIGAATATLIVAVLVAAVLGRRRRARARAQAPPVEGKPAPEAGCAVGDGAGPDVGTDVIIVGAGVAGSALAYTLGKDGRRVHVIERDLTEPDRIVGELLQPGGYLKLIELGLQDCVEEIDAQRVLGYALFKDGRNTKLAYPLEKFHSDVAGRSFHNGRFIQRMRQKAASLPNVQLEQGTVTSLLEENGTVKGVQYKTKSGEELKAYAPLTIVCDGCFSNLRRALCSPKVDVPSCFVGLVLENCQLPHPNHGHVILANPSPILFYPISSTEVRCLVDVPGQKVPSIASGEMANYLKTVVAPQIPPEIYDSFIAAIDKGSIRTMPNRSMPAAPLPTPGALLMGDAFNMRHPLTGGGMTVALSDIVVLRNLLKPLRNLHDASSLCKYLESFYTLRKPVASTINTLAGALYKVFSASPDQARNEMRQACFDYLSLGGVFSNGPIALLSGLNPRPLSLVAHFFAVAIYGVGRLMLPLPSPKRMWIGARLISGACGIILPIIKAEGVRQMFFPATVPAYYRAAPTGEKAKRENRFRAAGPTMISWQLMFHGWHFSCASGC

SEQ ID NO: 331965 - protein, 51 aa, Zea mays
  Clone ID: MRT4577_6585C.1.pep
ISPASSVLILGALHIQLKKPAWIFFLSPSVPALVIHDNKKSYPNVILSKQF

SEQ ID NO: 331966 - protein, 114 aa, Zea mays
  unsure (1)..(114): unsure at all Xaa locations
  Clone ID: MRT4577_65860C.1.pep
RNTTLGLRHCFIYSERRRPDRHLRVLLVALALLALAASATXSTHTSGGXCGCQPPPPVHXLPPPXHLPPPXHLPAPVHLPPPAHLXXPXFLPPLRAPPGPVXVXPPAPHYPGPP

SEQ ID NO: 331967 - protein, 62 aa, Zea mays
  Clone ID: MRT4577_65861C.1.pep
GLKGGIAAEAYRFPYALVFGYQTLFLYFCTCTLGHGGSRGSFGRTRASSRTRWPPRPRTRRR

SEQ ID NO: 331968 - protein, 529 aa, Zea mays
  Clone ID: MRT4577_65862C.1.pep
MAATAAAAGVEFPLIGVAVATLIVTVLVAAVMRRRRRPWHQAPLVEGKPAPEAGCAVSDGGTDVIIVGAGVAGSALAYTLGKDGRRVHVIERDLTEPDRIVGELLQPGGYLKLIELGLQDCVEEIDAQRVLGYALFKDGRNTKLAYPLEKFHSDVAGRSFHNGRFIQRMRQKAASLPNVQLEQGTVTSLLEENGTVKGVQYKTKSGEELKAYAPLTIVCDGCFSNLRRALCSPKVDVPSCFVGLVLENCQLPHPNHGHVILANPSPILFYPISSTEVRCLVDVPGQKVPSIATGEMANYLKTVVAPQIPPEIYDSFIAAIDKGSIRTMPNRSMPAAPHPTPGALLMGDAFNMRHPLTGGGMTVALSDIVVLRNLLKPLRNLHDASSLCKYLESFYTLRKPVASTINTLAGALYKVFSASPDQARNEMRQACFDYLSLGGVFSNGPIALLSGLNPRPLSLVAHFFAVAIYGVGRLMLPLPSPKRMWIGARLISGACGIILPIIKAEGVRQMFFPATVPAYYRAAPTGEKA

SEQ ID NO: 331969 - protein, 120 aa, Zea mays
  Clone ID: MRT4577_65863C.1.pep
PTRTKQTARKSSCGKAPRKQVSTKGGRVSAPATGGVKKPHRFRPGTAALREIRKYQKSTELLIQKLSFQLLVREIAQDFKTDLRFQSFAVTSLKEASLGAFLPIRMTSSFCLLITKPKKI

SEQ ID NO: 331970 - protein, 38 aa, Zea mays
  Clone ID: MRT4577_65864C.1.pep
IPYNLNTKARWINLTAKCRGQLFQPEFYLVTLTHRFRD

SEQ ID NO: 331971 - protein, 36 aa, Zea mays
  Clone ID: MRT4577_65865C.1.pep
RRKRNRRVLIRLGQPGYASGSLHRGTWRRSSALVYP

SEQ ID NO: 331972 - protein, 94 aa, Zea mays
  Clone ID: MRT4577_65866C.1.pep
GSGSSMWNRVGRMQLVSVSASSLDQGMKVHAWKIKLCLDRCPRYVLPAARGVSSLILFVRHGARGVHLQIARRAVGLLLLHPDARPHQSRCGRP

SEQ ID NO: 331973 - protein, 205 aa, Zea mays
  Clone ID: MRT4577_65867C.1.pep
MTTSIEYDYLFKLLLIGDSSVGKSCLLLRFADDSYVDTYISTIGVDFKIRTIDLDGKTVKLQIWDTAGQERFRTITSSYYRGAHGIIIVYDVTDMESFNNIKQWLSEIDRYASDNVCKLLVGNKCDLVDSKVVDTEKAKDFADSLGIPFIETSAKESINVEEAFLTMSSEIKKRMATQPTVERRPTVHVHMKGQPIQQKSSCCSS

SEQ ID NO: 331974 - protein, 49 aa, Zea mays
  Clone ID: MRT4577_65868C.1.pep
GGVFFKKRKKHKKKKEKKKKLKKKKKKKKKKKKKKKKKKKKKKNSQGAR

SEQ ID NO: 331975 - protein, 64 aa, Zea mays
  Clone ID: MRT4577_65869C.1.pep
TGPRFQTGATHDTLLSMNPLFFLIAQTGFLYQDEATHRQNTRATTKTTKKKKKKRKKAKKKKKN

SEQ ID NO: 331976 - protein, 69 aa, Zea mays
  Clone ID: MRT4577_6586C.1.pep
SRTQTMPSVAKSVIQYAPARSPLECLCINTMLVMVLRYQIYSFLRWWSYTRLRTHEININMRLNVVHLP

SEQ ID NO: 331977 - protein, 205 aa, Zea mays
  Clone ID: MRT4577_65870C.1.pep
MTDKKNEDYVVRMGDDNYDKNEKPSFQPRSPPPMAYGSSQLHSLEQLEKNPPLSIAAYCLSSISMTVVNKYVVSGSFWNLNFFYLTVQAVVCIGTITLCKQLGMIKVLAPFDADRARKWFPISLLLVGMIYTSTKSLQFLSVPVYTIFKNLTIIVIAYGEVLWFGGSVTPLALLSFGLMVLSSIVAAWADIQSAINGDFGTGDSA

SEQ ID NO: 331978 - protein, 118 aa, Zea mays
  Clone ID: MRT4577_65871C.1.pep
HHVRTCMDLSPLRQPPFFFFFVFIVFFFFSFFFFLRDRRDSFLVSSCNSEGPERVGGGGADKLPQTRVGEDFRNSRAYDQKYGGVIKSGRAAVRAVETWSSLRNDGRIPLSIDHYRQN

SEQ ID NO: 331979 - protein, 57 aa, Zea mays
  Clone ID: MRT4577_65872C.1.pep
TTRTCTRDPYFKSAFILHPIKSLSKRSWSSNEKLELIHAWRLGGIFGGLMTIWVMVH

SEQ ID NO: 331980 - protein, 353 aa, Zea mays
  unsure (1)..(353): unsure at all Xaa locations
  Clone ID: MRT4577_65873C.1.pep
MVLGNVAIVVGSGIVGSVLTGGEFGLPDFRDAISGAFKFLTKSAKPGKDGPSTSSPHTAELFSQVNHLREELQMLSKSNHVSIVTVDGRPGPGAYGITAVVIGGAIGYLFIRWKGWKLSDMMFVTKRGLSDACNVVGKQVDQVSESVNVAKKHLAGRIDRVDCSLDECQEITEATKEEVTIIHGDLSAFQKEMETVHLVVRSLETKLGRLAYTQXGQHEEYMICVNSLKDWIRARKLILVXTSSTSRPAIESSERIVRVGSLPLALEPESPRIEAPKVVRSSTVMSASGLSLLAGTTIPPKRDQPGVYSRASSMKEGSSELPSGVRNSAEPSPRRSGASTLFGGLGFLRNYTS

SEQ ID NO: 331981 - protein, 263 aa, Zea mays
  unsure (1)..(263): unsure at all Xaa locations
  Clone ID: MRT4577_65874C.1.pep
MVLGKIAIVIGSGVIGSVLTGGESGLPDFKDAISGAFKFLTKSSKQGKDGPSTSRPHTSELLTQVNYLREELQMLSKSNHVAIVTVDGRPGPGAYGITAVIIGAIGYLFIRWKGWKLSDMMFVTKRGLSDACNVVGKQVDQVSESVNVARRHLAGRIDRVDCSLDECHEITEATREQVTIIHGDLSAFQKEMETVHLVVRSLEAKLGRLAYTQXGQHEEYMICANSLKDWIRARKLRLXVTSSTSRPAIDPQRXIARAGSLPQ

SEQ ID NO: 331982 - protein, 353 aa, Zea mays
  unsure (1)..(353): unsure at all Xaa locations
  Clone ID: MRT4577_65875C.1.pep
MVLGNVAIVIGSGIVGSVLTGGEFGLPDFRDAISGAFKFLTKSAKPGKDGPSTSSPHTAELFSQVNHLREELQMLSKSNHVSIVTVDGRPGPGAYGITAVVIGGAIGYLFIRWKGWKLSDMMFVTKRGLSDAXNVVGKQVDQVSESVNVAKKHLAGRIDRVDCSLDECQEITEATKEEVTIIHGDLSAFQKEMETVHLVVRSLETKLGRLAYTQXGQHEEYMICVNSLKDWIRARKLRLXVTSSTPRPAIESSERIARAGSLPPALEPESHRIEAPKVVRSSTIMSASGLSLLAGTTTPPKRDQPGAFSRASSMKEGSSELPSGVRSSAEPSPRRSGGSTLFGGLGFLRSYTS

SEQ ID NO: 331983 - protein, 264 aa, Zea mays
  unsure (1)..(264): unsure at all Xaa locations
  Clone ID: MRT4577_65876C.1.pep
HPSTHASAHASAHASVIVGIAGGCGVLFVALAGAAAYAFIQRRRAEKAKEELGGPFASWARSEERGGAPRLKGARWFSYEELKRSTNNFAEANELGYGGYGKVYRGMLPTGQFIAIKRAQQGSMQGGHEFKTEIELLSRVHHKNLVGLLGFCFEQGEQMLVYEFMSGGTLRDSLAGKSGLHLDWKKRLRVALGAARGLAYLHELADPPIIHRDVKSSNILMDEHLTAKVADFGLSKLVSDSERGHVSTQVKXTLGYLDPXEYYM

SEQ ID NO: 331984 - protein, 93 aa, Zea mays
  Clone ID: MRT4577_65877C.1.pep
LLAGQTWHHCSFLRGDHMRRFYGSNMLGQWNGPDACGVLYCTRPVWARTVDGPDRPRIFLVGCAFSLEEVVIKWMLHLVCRVFLYLCVTCYWL

SEQ ID NO: 331985 - protein, 48 aa, Zea mays
  Clone ID: MRT4577_65878C.1.pep
FHDLSSKTPRQAYPQKSMSGGVNLILAELHQGAKQDDTQSSQNLSSST

SEQ ID NO: 331986 - protein, 52 aa, Zea mays
  Clone ID: MRT4577_65879C.1.pep
PCWVCKTIGVKWQKCLKMSRGGQLKAPCTVQTETPRGCFKKARRAPTIYRAK

SEQ ID NO: 331987 - protein, 88 aa, Zea mays
  Clone ID: MRT4577_6587C.1.pep
TSGSAIVAAARDTLKHRMCGQRRRRGVGPCPRELLHHGAELGGVDHVHRRGHLLPAPPVRRLPGPAAGSFLLLSGVAADHHQAMESRS

SEQ ID NO: 331988 - protein, 67 aa, Zea mays
  Clone ID: MRT4577_65880C.1.pep
FFLTQPKNFTLFFFLKKKTIFIIQIHFKFFKHNYPPITPIPPQLKKKTHQGKMKNQLIPNINQKPLS

SEQ ID NO: 331989 - protein, 107 aa, Zea mays
  Clone ID: MRT4577_65881C.1.pep
SGGPSPVQAHGAFSLQHASLLRMFPGTTAKDTMKEIEASSKSSLVFIPHRPAPTRESSSCLTLSVRSACCLSLSFSLSLSWSLSFSDFVLVPDLLFFFFMLFPLPFA

SEQ ID NO: 331990 - protein, 180 aa, Zea mays
  unsure (1)..(180): unsure at all Xaa locations
  Clone ID: MRT4577_65882C.1.pep
TSSRREIPVLAHQVQSLPTSLLRRRTPRRAPDLLFYSAEEVXGDPLEPPQTESYCGYVIPLVVRSWYVEGKRFADSLMIDYHRQHGVEILIARISNTYVPSMNIADGRGVRKYIALVLLGDPLTAHKXGXTRNRSCCYGADTVDGLIRLLDGNNTGPINLDNQCDFSVLELAGRENDLIN

SEQ ID NO: 331991 - protein, 96 aa, Zea mays
  Clone ID: MRT4577_65883C.1.pep
PTRSSAPVRVVASRDVDVLLPRRFARVFPRLEHHRGAVRHAVALSAQLRVVQRVSGHYRRAYHSICLSNRLPIPRARGSRLREKRLQSGRGCLHPR

SEQ ID NO: 331992 - protein, 119 aa, Zea mays
  Clone ID: MRT4577_65884C.1.pep
WGRAQKGFFFLILKKLPGLQFLCPRSLNQQKKLPLPKRLAFNLISWGVCGAITAQFWTSALGLDHCPVYPHQQRALGGVIRVVTQKHVHNMLSAVRHGHTPRLCQSWCPRFCIPLTQTR

SEQ ID NO: 331993 - protein, 294 aa, Zea mays
  Clone ID: MRT4577_65885C.1.pep
MGSPRKSDKKAALDFAAWGFNITSSVGIIMVNKALMATHGFSFATTLTGLHLLTTTLMTIVFRWLGLSQPSHLPLPDLIKFVIFSNLSIVGMNVSLMWNSVGFYQIAKLCMIPASCLLEVVFDRVHYSRDTKLSIMVVLVGVAVCTVTDVSVNAKGMLAAVIAVWSTAFQQYYVHYLQRKYSLNSFNLLGHTAPAQAGSLLLVGPFADYLLTGKRVDHFSFSSLALFFLALSCFDMVGVNLSQTRRQRAAQRPTAEVCKSQGKFGRKGRCREIVLLSLIANLNGEFSVPRLNFW

SEQ ID NO: 331994 - protein, 131 aa, Zea mays
  unsure (1)..(131): unsure at all Xaa locations
  Clone ID: MRT4577_65886C.1.pep
GRRHQRAALRLPQVLRVGVQPYYTGXGQTIAMFQPVRQQCWQQHMRMMDVQSDLHELQMMMQFERTVAVRNSLYEPALMQKQHQLLAAQGLNPMAWMMEQNMPDMGGLCQCQLPSYRANPXGVYAAIPAYY

SEQ ID NO: 331995 - protein, 103 aa, Zea mays
  Clone ID: MRT4577_65887C.1.pep
MTTTTSARLRPLAVGVALFVFLPWLSYVLEAAEEGRAAAPWFWPPQIGGDDPYYYCLSWRLMVEAGNAKGWRAVPAQCVGYVRVYMAWGQTTRDVGAVRGAGG

SEQ ID NO: 331996 - protein, 62 aa, Zea mays
  Clone ID: MRT4577_65888C.1.pep
TSVSANCRSVGFFLIVCYGFLFMSVFPKVCLVYFCILIILFQNCCSVPPFYIISLPLNTLLF

SEQ ID NO: 331997 - protein, 119 aa, Zea mays
  unsure (1)..(119): unsure at all Xaa locations
  Clone ID: MRT4577_65889C.1.pep
FNQLSTLSLAAYLHQQXLXPFSQLDSAYSQQQLFLPFNQIXALFPSDYFQQQMLIPFGQLVTTSPASFLTQQQLLPLYQQFVANAAALLQLQQLLPYVQLDLANPTAFYXQHIIVGALF

SEQ ID NO: 331998 - protein, 95 aa, Zea mays
  Clone ID: MRT4577_6588C.1.pep
ITLTSLRHRTLLLITPTTHTFELSTIHRVTDLLHMLRSLHLFRDKDATTRTDAAVAVRMMTTYAIPTPLSHALMHYRPSSVRLVVSLNTAGGRVS

SEQ ID NO: 331999 - protein, 45 aa, Zea mays
  Clone ID: MRT4577_65890C.1.pep
HCFFRFYLHSLLSSIVRSQFLSALITPCSFPPMFQSSLKPSATNT

SEQ ID NO: 332000 - protein, 92 aa, Zea mays
  unsure (1)..(92): unsure at all Xaa locations
  Clone ID: MRT4577_65891C.1.pep
NGFTPTESTNTPQFSLFPWRVHTTLVIPPLPSRGGLSGIGPTEAKLTHDDACGQLKGRSSSLHXARSLNNSDRNSTLRLLSRASHLPDLDFY

SEQ ID NO: 332001 - protein, 81 aa, Zea mays
  Clone ID: MRT4577_65892C.1.pep
KKKKKKKKQKKTLKKKKTTNGNQEKNPTKTDHKKQKKQIKQQKGPPLYGSQPIDHIQTRLTLLQRLPITPEMTRLYTLASL

SEQ ID NO: 332002 - protein, 98 aa, Zea mays
  unsure (1)..(98): unsure at all Xaa locations
  Clone ID: MRT4577_65894C.1.pep
HSCADTCAAISRRGKGIRGLXLGXAKHHRLVLRDNMQGITNPAIQMLATKGSNKRISGLMYEDTRSVLNILLENVMRDAMTYTKHAXRMTVTVMDVDY

SEQ ID NO: 332003 - protein, 109 aa, Zea mays
  unsure (1)..(109): unsure at all Xaa locations
  Clone ID: MRT4577_65895C.1.pep
KGKPAQDGTLGKGNQKSPLNPKTRTLLPASPASVNSCPRAQPTXGGTTQELXRSQKGXXPXAAPPSSSNXKWTNKNXEGGPNPKKRQPRTKTKTNXAXKKXGKPDDXXP

SEQ ID NO: 332004 - protein, 303 aa, Zea mays
  Clone ID: MRT4577_65896C.1.pep
MASSVAVSLRALAAAPLPKSSPATSCPFFVLLAPALPRRLLRLRSARRLPLAPLAASDSAFESSVGVNYAEPDDSEKDKEVELFGSGDDEGAGELVDDHSVEVSAAVEDEVEEEVGEYVEPPEEAKVYVGNLPYDVDSERLAQLFDQAGVVEVAEVIYNRETDQSRGFGFVTMSTVEEAEKAVEMFHRYDVNGRLLTVNKAAPRGSRVDRPPRQSGPSLRIYVGNLPWQVDDSRLVELFSEHGKVVDARVVYDRETGRSRGFGFVTMASQDELDDAIAALDGQSLDGRALRVNVAEERPRRGF

SEQ ID NO: 332005 - protein, 85 aa, Zea mays
  Clone ID: MRT4577_65897C.1.pep
MITININLGQLTEKIKTLGKSSMLPEIDTSTTILGCTIVVNTSRAFTVFYSDRRGGLSLSWVWSQCTQRMGKQACCHQLVMEAGR

SEQ ID NO: 332006 - protein, 96 aa, Zea mays
  Clone ID: MRT4577_65898C.1.pep
EPWPSQNYSGFHKNWGKNLGNREKSRARGPKNLGKRTPKNPIGGGGPRRNPKGKRPPGEPGIFPNPAPRNKLGAEPGSGAKPWGPGNPGGGNPTGV

SEQ ID NO: 332007 - protein, 103 aa, Zea mays
  unsure (1)..(103): unsure at all Xaa locations
  Clone ID: MRT4577_65899C.1.pep
PPTPTNAPEQPRRRPAPETGQNNKAHPPMVPPPAGKKKKWKDAGTGPNGTVQHKKQLAGSEPSTPRPHPKENPTRTPAPPQGPNPEGTNQRRPPVGPKXPGGQ

SEQ ID NO: 332008 - protein, 145 aa, Zea mays
  Clone ID: MRT4577_6589C.1.pep
LLMVSAAGTCLGCLLPRVRFLAKEHHWGKDLNLVLALAGILIFGGSFSLGMGGIPWVIMSEIFPINMKGAAGSLVTLVSWLGSWIVSYAFNFLLVWNSYGTFFIFASICGLTVVFVEQLVPETKGRTLEEIQASMNSSLAPPSDI

SEQ ID NO: 332009 - protein, 77 aa, Zea mays
  Clone ID: MRT4577_658C.1.pep
GVKATVHPMIGTVAQAPEIYGRRLRMDIPQSLVGECAAKSGGWSARNDIRVWWVCRTTLCWGPGMEIVACGKAVSGF

SEQ ID NO: 332010 - protein, 121 aa, Zea mays
  unsure (1)..(121): unsure at all Xaa locations
  Clone ID: MRT4577_65900C.1.pep
GQWAWPFHLQTYGPRTPPLVPPSGDVGVDGMVISLAALLAGTVTNPYGDGYYQGDAGAGLEAATVCAGIFGTGSYPGYPGKLLTDPATGASYNAVGLGGRKYLLPALWDXKTSQCKTLVQT

SEQ ID NO: 332011 - protein, 99 aa, Zea mays
  Clone ID: MRT4577_65901C.1.pep
HHLLLLPRVQCKLRWSTMVFAAANSQRSQVMKPSRSSTSQATGSATTVPGAGEAMTAAVGCCEYFAKLYFIFMKYVPHGMAGKQSGAGTFDLQKKCICM

SEQ ID NO: 332012 - protein, 428 aa, Zea mays
  Clone ID: MRT4577_65902C.1.pep
MDAAPPTITKSPPSLVPPAGPTPGGSLPLSSIDKTAAVRVSVDFIQVFPAPTSGKEDWSPSSAIAAMREGFARALVPYYPIAGRIAEPVPGEPEIECTGEGVWFVEAEASCSLEEARNLERPLCIPKEELLPRPPAGVRVEDTLLLAQVTKFTCGGFSVGICFSHLVFDGQGAAQFLKAVGEMARGLPEPSIKPIWARDAIPNPPKPPLGPPPSFTAFNFEKSVVEIALDSIKRVKDQVASETNQKCSTFDVVTAMIFKCRALAVDFAPDAEVRLGFAASTRHLLSNVLPSVDGYYGNCVYPGGLTKTSQEVKEASLVEIVTAIREAKEALSSRFLDWLSGGAKENHYNVSLDYGTLVVTDWSHVGFNDVDYGFGEPSYVFTLNDDVNIVPSVVYLKPPKPKQGIRLVLQCVEGRHSAVFSEELQKHA

SEQ ID NO: 332013 - protein, 137 aa, Zea mays
  unsure (1)..(137): unsure at all Xaa locations
  Clone ID: MRT4577_65903C.1.pep
FKDAVRGLSLSKLKXGPVVAVRLFVVAGLLXFLFQGRPVAQRPSPPIPLVQRPTPRGLPGGGXFSCPTVFLYFLGSISNRRNPHKMFGFAPPRTFVAAAGGLFPMFFPKFLVVGFPPGCIPPKGGFFRPGKTLRACS

SEQ ID NO: 332014 - protein, 428 aa, Zea mays
  Clone ID: MRT4577_65904C.1.pep
MAAAPTTVTKSPPSLVPPAGPTPGGSLPLSSIDKTAAVRVSVDFIQVFPAPTSGKEDRSPSSTIAAMREGFAKALVPYYPVAGRIAEPVPGEPEIECTGEGVWFVEAEASCSLEEARNLERPLCIPKEELLPRPPAGVRVEDTLLLAQVTKFTCGGFAVGICFSHLVFDGQGAAQFLKAVGEMARGLPEPSIKPIWARDAIPNPPKPPLGPPPSFTAFNFEKSVVEISLDSIKSVKDQVASETNQKCSTFDVVTAIIFKCRALAVDFAPDAEVRLGFAASTRHLLGNVLPSVEGYYGNCVYPGGLTKTSQEVKEASLVEIVTTIREAKEALSSRFLDWLSGGAKENHYNVSLDYGTLVVTDWSHVGFNEVDYGFGEPSYVFTLNDDVNIVPSVVYLKPPKPKQGIRLVLQCVEGHHSAVFGEELQKHA

SEQ ID NO: 332015 - protein, 98 aa, Zea mays
  Clone ID: MRT4577_65905C.1.pep
GRRRGAAAAAGRRLRRGRGALGVARRYAVGEPGLVGRSPAACWPVTQSLAEQRARGHGTRTNATWRWWPVGSGARASTQASRLRSIGGGAGARRSAVW

SEQ ID NO: 332016 - protein, 55 aa, Zea mays
  Clone ID: MRT4577_65906C.1.pep
FFFFFFAMGGLGSRPDILFYFSIVYRFHMIPSSSVDVQLSAYYCETLQEQASITH

SEQ ID NO: 332017 - protein, 71 aa, Zea mays
  Clone ID: MRT4577_65907C.1.pep
PPLQYLRIAEAAERHEEMKELNLIMDQSTCSCQVEDAKNLELQCPVSEFSKIENVYIFNDKILAKHFSFSV

SEQ ID NO: 332018 - protein, 113 aa, Zea mays
  Clone ID: MRT4577_65908C.1.pep
HSNPPIYPNHHFCKSHKQKLKGPHLCLGSIFYVAAKKDTFPACKVDLPFYFPARRQQNQRSLPCFKGTTPPNCLDNSLLTVAPTALFGLPPEFCCPSNTPPGQCELSSCAFFS

SEQ ID NO: 332019 - protein, 237 aa, Zea mays
  Clone ID: MRT4577_65909C.1.pep
VRPRLPGRPPDLQDPRRRRRLLRAIGDPIHPLRAIGDPIHASRRIRAPPSEPHPKPHVSSLTLAPKSEPPLPAALRRPPDVHAVALSPTLSLSPQRRRPTSLEILAMVRGGRAARRGGPGAGRCFRARGQGDGGVEAVQLLKIIISSKPVTSVSVRSPADGAVDVRAEHGEEAITDARLPHRACAFPSTAPLAQCAIPATPSPTRRVLPDSTRRAFVNLVCYACRARDHADPPFPRP

SEQ ID NO: 332020 - protein, 89 aa, Zea mays
  unsure (1)..(89): unsure at all Xaa locations
  Clone ID: MRT4577_6590C.1.pep
TEQSKPGTMPPKLDSLVSLNVLNLAHNQISGLILMAVTKLSSLYELNLSQXQNYLSGLIPSDIGKLXNXQSLLDLSSNNLSGHIPESLN

SEQ ID NO: 332021 - protein, 215 aa, Zea mays
  unsure (1)..(215): unsure at all Xaa locations
  Clone ID: MRT4577_65910C.1.pep
MKYVLVTGGVVSGLGKGVTASSVGVVLKSCGLRVTSIKIDPYLNIDAGTMSPLEHGEVFVLDDGGEVDLDLGNYERFLDIKLTRDNNITTGKIYQSVIDKERRGDYLGKTVQVVPHITDEIQEWIERVAMNPVDGTEEPADVCVIELGGTIGDIESMPFIEALGQFSYRVGPGNFCLVHVSLVPVLNVVGEQKTXPHSVRGLGLIIDILHEAHPT

SEQ ID NO: 332022 - protein, 70 aa, Zea mays
  Clone ID: MRT4577_65911C.1.pep
HSELARTSAKPPRNQQSTGAEELVDAMRVASSELLMLCRHGHEQNVHGYRGAHREHVPWPGSITNMWTHP

SEQ ID NO: 332023 - protein, 121 aa, Zea mays
  Clone ID: MRT4577_65912C.1.pep
AGRASAKRTSPCSLYSPRQPSPSRRPPSIPRPPWSSAFPAMVSPSRRSSSVCLCSSPAATPSPSPPWRSPLPQPNDVVDHRSQQLAITHGCTSTLSGSRPGPARYAPPHLARPRPTQMLIG

SEQ ID NO: 332024 - protein, 46 aa, Zea mays
  Clone ID: MRT4577_65913C.1.pep
SNAGIPRLTAIAAKSTREPPYTPTPLLPLPLSGKVVEASRSFGTQM

SEQ ID NO: 332025 - protein, 62 aa, Zea mays
  Clone ID: MRT4577_65915C.1.pep
EVHYLGWSLNESTLLDAYIAMFVTEFLRQLGMLSSSLNVLRAENVSYDRPRFSGTALLIDRE

SEQ ID NO: 332026 - protein, 56 aa, Zea mays
  Clone ID: MRT4577_65916C.1.pep
KQLSSIEAANATGSSGFLKPIVLTLPEHHLQPKPLKPAAAVRGFHDLDQQNNNCGL

SEQ ID NO: 332027 - protein, 114 aa, Zea mays
  unsure (1)..(114): unsure at all Xaa locations
  Clone ID: MRT4577_65917C.1.pep
FYPLLFSLLKHXSCAGSILLHVLAKXAXSVYGADPEPELLRLAVAASFPSLLFEIYPFHAEALAGLISASVRAALEAPLNYSRNHLSYLLPRFVPRAIYLDSYLLAXYDVRRLW

SEQ ID NO: 332028 - protein, 94 aa, Zea mays
  Clone ID: MRT4577_65918C.1.pep
RCCLHSQGSYLGTSIIQRADRVVGARHTGQSPQDHAALWNVSVMWSTRVSSGGSIRSSLVLPYEVRRLSDTSSEMASRRYLSANSHAESHTSAM

SEQ ID NO: 332029 - protein, 199 aa, Zea mays
  Clone ID: MRT4577_65919C.1.pep
MSSYVACMNGGNIKSSESYDDTDEIPLYVTNKEFDKAKTKVRPSAMREVILELPKVRWEDVGGQCSVKEQLIEAIQLPQKCPEAFERLGIRPPRGLLMIGPPGCSKTLMARAAASEAKLNFLAVKGPELFSKWVGDSEKAVRSLFAKARANAPAILFFDEIDGLAVTRGQENDGTSVADRVLSQLLVEMDGLDQRVGVT

SEQ ID NO: 332030 - protein, 63 aa, Zea mays
  Clone ID: MRT4577_6591C.1.pep
RNLFDASIRLQDDTRYVLSHEEVSKHVAYRRPDLTRSWIKHLSLVQGLDPQKSVTSIHTEDEN

SEQ ID NO: 332031 - protein, 47 aa, Zea mays
  Clone ID: MRT4577_65920C.1.pep
KLMKRELIRGDYKKEIRCYFGVFNRVRCFIISPFFFFFFFFFKKFFF

SEQ ID NO: 332032 - protein, 69 aa, Zea mays
  Clone ID: MRT4577_65921C.1.pep
LLSACSAFSTCCYSISFNFVSSQHPLSFNFVSTRSPLTLSAPAPSTGDEGVGIHYNYYGKDGHEDAFLL

SEQ ID NO: 332033 - protein, 64 aa, Zea mays
  Clone ID: MRT4577_65922C.1.pep
ASMAAQLSVVHVHGFEHTAVVFYSSIQLELKLVAAGEGEERESAHRPSNTDTGLTSRSGRGKHE

SEQ ID NO: 332034 - protein, 108 aa, Zea mays
  Clone ID: MRT4577_65923C.1.pep
FPGKSFLLFFSPPGGKKKRLLFLSGGGWFMPFASKVKIFPPWEGLVPTFIRGAPVEILWPVYSFRWGGLKGTFVGVVCFQSRGGPPLFSGWEVGPLKKKGGGLGPLFF

SEQ ID NO: 332035 - protein, 44 aa, Zea mays
  Clone ID: MRT4577_65924C.1.pep
TIPTALTDIYSNNFKLSIYMRIKTVVASLSLTLSQKPLSFAPMI

SEQ ID NO: 332036 - protein, 68 aa, Zea mays
  Clone ID: MRT4577_65925C.1.pep
KKKKKKKKKKKKKKKKKKKKKKKKKKKKKKKKKKKLLTIKNKKKKKKQKKKKNTLSRGALKKGELVKT

SEQ ID NO: 332037 - protein, 49 aa, Zea mays
  Clone ID: MRT4577_65926C.1.pep
RVLCLCLCSTSPAPAPLSDGHHSALTLLARSLRTRSRFAHGINRGDVAV

SEQ ID NO: 332038 - protein, 194 aa, Zea mays
  unsure (1)..(194): unsure at all Xaa locations
  Clone ID: MRT4577_65927C.1.pep
PPPRLPPPXXPPPPPPXXPPPPPXPPPPPPXPPPPSRRPPPPXPPPPRPPPXPPPPPXPHEAPHKMPRLTPAXHPHPGPRPXIPRSPPQSPSRXAGIPSPSDPXPAPPPRGPSPPPXPTPYPNPXRNPPPPXPRSRPAPPPSQPPTSPSRHSSRPPRPTSTPSPGLSSXPRRPRAPSGPXEVPPRSHPTMPSPQ

SEQ ID NO: 332039 - protein, 156 aa, Zea mays
  unsure (1)..(156): unsure at all Xaa locations
  Clone ID: MRT4577_65928C.1.pep
MAATDVEYRCFVXGLAWATDDHSLHNAFSTYGEVLEAKXILDRETHRSRGFGFVTFSTXEEXMRNAIEGMNGKEXMDGRNITXVNEGQSRVGRGGVVAAYGGXRGGVDYGVDGRRDVGDDYLGDGVYDDAGCYSVAGVDYDGENRGGGVLNSDGYW

SEQ ID NO: 332040 - protein, 115 aa, Zea mays
  unsure (1)..(115): unsure at all Xaa locations
  Clone ID: MRT4577_6592C.1.pep
LFFKPWEGGGPPQSHQGTGGDSRPPGGTTPKAGRXGRRKWGKLXAKGRPKGGGRXEAPNHTDHYXGPGRGRYDGKGNPALNEEAWKDPLNETVGPEGDPEDPRPWPKQQLKLSRL

SEQ ID NO: 332041 - protein, 128 aa, Zea mays
  unsure (1)..(128): unsure at all Xaa locations
  Clone ID: MRT4577_65930C.1.pep
MAPPTPPLCWGSRGSPGFGFGGERIEMAASDGENRCFGGGPGWGTGEQFLQKGFXTNGRAXESKNNLDRETQRSRGFGFVTFSTEEAMRNAIEGMNGKELDGRNINRNEAQSRGGRGGGGGGTGVAVE

SEQ ID NO: 332042 - protein, 53 aa, Zea mays
  Clone ID: MRT4577_65931C.1.pep
EAGRGCSLETVAHLLYIRITLADASQLPPNVNQTLIWRRDWQSMVMITPTSTV

SEQ ID NO: 332043 - protein, 92 aa, Zea mays
  unsure (1)..(92): unsure at all Xaa locations
  Clone ID: MRT4577_65933C.1.pep
RYAWGFXXGMILRAASYCTAGXPGGHIRPSVXYSGVFLVXRKLSXLTRGXLFYIXIMHCSXPYCGAGVVKGFQQGLYMGNGGGANEARPCCT

SEQ ID NO: 332044 - protein, 188 aa, Zea mays
  unsure (1)..(188): unsure at all Xaa locations
  Clone ID: MRT4577_65934C.1.pep
HWVPRGRPGRPAYHYHSRLPALSPSPXPPSSPNPMAPKPXKLSPPLLLQSARSAPQNAAADAGARHPHPGPRPXIPRSPPQSPSRXAGIPSPSDPXPAPPPRGPSPPXSPPTPYPNPXSRNPPPPXPRSRPAPPPSQPPTSPSRHSSRPPRPTSTPSPXSLRAPRRPRAPSGPRXVPPRSHPTMPSPQ

SEQ ID NO: 332045 - protein, 105 aa, Zea mays
  Clone ID: MRT4577_65935C.1.pep
WCVSTSTTVATVTAISATPTETGGTERWGPRGQVILFAPVLLTLVQRVYLRSSRVCCCPSVFLIEGRSVSVVSAVFILGSSRPMHLPAWTADRWVLFPPSGFILS

SEQ ID NO: 332046 - protein, 59 aa, Zea mays
  Clone ID: MRT4577_65938C.1.pep
PLVGHIQSVKIGQRTTCSRNNMVDHHLIGSSDGLNKSDYCSINLFIPCNKLLVRFKFQS

SEQ ID NO: 332047 - protein, 215 aa, Zea mays
  unsure (1)..(215): unsure at all Xaa locations
  Clone ID: MRT4577_65939C.1.pep
MGRTTARCYRQIKNKPYPKCRYWRGVPDPNIMIYHVGMHTNGADDXPYCVHLVSXQMENVSTDALDAARIXCNKYMTKSXXKDVFHLRIRFHPFHVLCINHMISXPGADRIQTAMRCAFAQPQATCAEVHIGQCLLSARCKDNNAAHATEILRLFKVQFPDPRKIIDSLKCFFTKFSRADYLKYERVGTIVPDGVNANLLGNHGILDKRAPGKAF

SEQ ID NO: 332048 - protein, 70 aa, Zea mays; identical to SEQ ID NO: 261799
  Clone ID: MRT4577_6593C.1.pep

SEQ ID NO: 332049 - protein, 141 aa, Zea mays
  Clone ID: MRT4577_65940C.1.pep
MAAAEAASSAPAPEHLLEVEDDEVLIDFKPNAKCRADLRLRSLHPSLPVAFKVQTSSPLKFLVSPPRGAVPPLSSASLRVVLRPQPHAPPSFPRSRADRFLVLSSLSAARLDSVGSSNDGGGGGGVRAVRLRVFFGGPYLL

SEQ ID NO: 332050 - protein, 55 aa, Zea mays
  Clone ID: MRT4577_65941C.1.pep
NELKLKEIKNGRLPMLPILVYFIQGLVPGVGPFQNLFDPLADPVNNNVFPSLKFP

SEQ ID NO: 332051 - protein, 258 aa, Zea mays
  Clone ID: MRT4577_65942C.1.pep
MQGISICGSVASPHGANCRRACVARNDVRLPCEANAVSQGLHSLHWCAHKPQMKNNGRRMNAAVKTNARWLFGGDGRSNDARLERSESANEDILIFYFQMDLQTRIQYALNIEQFDVAKQLREKLTEIETEIIRQREARRGSPKTEAQDKALNLIRVRADLQKAIDSENYALAAGLRDDIAKLEVESLAVSAKALAYQNVKYAFRLGQKVRHNIHGYRGVICGMDPVCCESKSWMETANVDKLSKGPNQPFYQVLVDV

SEQ ID NO: 332052 - protein, 219 aa, Zea mays
  unsure (1)..(219): unsure at all Xaa locations
  Clone ID: MRT4577_65943C.1.pep
MSSLLKLVVFLGLTFATSFARSNDPMFAYNGFSNTNLELDGTASITENGLLELTNGKVMSKGHAFFPDPLRFRRSPNSTVQSFSASFVFGIISVYNNLSSHGLAMFVAPGKDFSAATPVGYLGLFNAQNDGNGTNRVFALELDTYXNSEFQDIDNNHVGINVNGLHSVESHAAGFLPXIETARLXSFEDLTLCSQKXARVWVDYDSESARISSTVAPLN

SEQ ID NO: 332053 - protein, 332 aa, Zea mays
  unsure (1)..(332): unsure at all Xaa locations
  Clone ID: MRT4577_65944C.1.pep
MQGISICGSVASPHGANCRRACVARNDVRLPCEVNAVSQGLHSLHWCAHKPQMKNNGRRMNAAVKTNARWLFGGDGRSNDARLERSESANEDILIFYFQMDLQTRIQYALNIEQFDVAKQLREKLTEIETEIIRQREARRGSPKTEAQDKALNLIRVRADLQKAIDSENXRADLQKAIDSENYALAAGLRDDIAKLEVESLAVSAKALAYQNVKYAFRLGLKVRHNIHGYRGVICGMDPVCCESKSWMETANVDKLXYVDPELLVAYVAEENLSAAEESEKGRFDHPYIEFLFYGEDTAGDFIPIKQLREKYDQPRYEASGDESDNDGNTNS

SEQ ID NO: 332054 - protein, 139 aa, Zea mays
  Clone ID: MRT4577_65945C.1.pep
MANNRIFDEYNPAVEWSRSDEADAVRISLPGFKREDIRVLVDSHGHLRTRGERHIAGNRWSRFQTDVDLPANCNADGIRAKFENDRLTITLPKSRGLLMNVAIAVVVLLGVTVHLWLSLRNATGGAREHGHGPRADGGP

SEQ ID NO: 332055 - protein, 63 aa, Zea mays
  Clone ID: MRT4577_65946C.1.pep
IGAGLFSRGQRQDHRCLAGGSCFLQGRGIFAGPAGLTATPGWTAGAKPSWPLGSKRGWFSPGT

SEQ ID NO: 332056 - protein, 44 aa, Zea mays
  Clone ID: MRT4577_65947C.1.pep
HHRRWGVWLAHLLPGRSYRVSTWVRFWGSGRSCTPRRPPQVWSG

SEQ ID NO: 332057 - protein, 99 aa, Zea mays
  unsure (1)..(99): unsure at all Xaa locations
  Clone ID: MRT4577_65948C.1.pep
FRRPNDAALPFPRHKHTHCGEDRNASPPQAXPRAIPPVRVALCAPPSSSSTPSLPCHPRLASPPPXPPPHASGSTVAARRRPPWPPIPAAVPAVPPLNP

SEQ ID NO: 332058 - protein, 73 aa, Zea mays
  Clone ID: MRT4577_65949C.1.pep
PKKASLARIEQITTLDANDYTKRSMLIMETARDRSSVIYDTLKQSLSGTMCNVTASVGPTSASALGIGAGWSR

SEQ ID NO: 332059 - protein, 34 aa, Zea mays
  Clone ID: MRT4577_6594C.1.pep
MGLAFGKLFSRLFAKTEMRILMVGLDGGGTNHNL

SEQ ID NO: 332060 - protein, 204 aa, Zea mays
  Clone ID: MRT4577_65950C.1.pep
EARPGSELPISKRVTSDQSSLFPSASPPISLSPSSLHAPSLAVLPLTHAVLGSVLRTNPAPDFFQSQTTRPDPSFPAFIHFNSDFGGWCFLPCPNLVKMGSNKNGVSGAANSNAVNGASPACVPGVVCFLVGSAFGAMAVLHASWLAEVGGEWASAARGAARPAGSIGAHRLLVTISLLFLAASVWRLAKRSAAVEARVGSTDS

SEQ ID NO: 332061 - protein, 422 aa, Zea mays
  Clone ID: MRT4577_65951C.1.pep
MFGRMPRKSSNNTKYYEVLGVSKTASQDELKKAYRKAAIKNHPDKGGDPEKFKELSQAYDVLSDPEKREIYDQYGEDALKEGMGGGSSSDFHSPFDIFEQLFPGSSTFGGGSSRGRRQKRGEDVVHTMKVSLDDLYNGTTKKLSLSRSALCSKCKGKGSKSGASGTCHGCRGAGMRTITRQIGLGMIQQMNTVCPECKGSGEIISDKDKCPSCKGNKVVQEKKVLEVHVEKGMQHNQKIVFQGQADEAPDTVTGDIVFVLQLKDHPKFKRMYDDLYVEHTISLTEALCGFQFVLTHLDGRQLLIKSDPGEVIKPGQHKAINDEGMPQHGRPFMKGRLFVEFNVVFPEPGALSPAQCRSLEKILPPKPGSQLSDMELDQCEETTLHDVNIEEEMRRRQQQKKQEAYDEDEEEDAQPRVQCAQQ

SEQ ID NO: 332062 - protein, 40 aa, Zea mays
  Clone ID: MRT4577_65952C.1.pep
ITWIYAEFFFVPQYDCTHYALCMFLVAVAIATALGFRSAG

SEQ ID NO: 332063 - protein, 145 aa, Zea mays
  Clone ID: MRT4577_65953C.1.pep
GSAKLGVIYVLVKLGIHKVKMHVLKEKQWILIVAKFRAKLIDIINPYYSGDTFLPTISSLIYNFKALFAATYGNTNSFNIGNFESTFVPAPKVNFRYDSGIFLLQYLSNYRGLGMEGFPNASTTTITPLKALFSLLCDSSVHNRN

SEQ ID NO: 332064 - protein, 71 aa, Zea mays
  Clone ID: MRT4577_65954C.1.pep
LPQRGPPWLWMIMERPKFGSPNLEEISMLLGVPKQIEGHPFCALGDFAACPFQGLFRPFSPKLERRIPHPP

SEQ ID NO: 332065 - protein, 104 aa, Zea mays
  Clone ID: MRT4577_65955C.1.pep
REHSEVCGFCLAIWMCILFGAGEWLSKCRPFIGGGSWWSRPPVDFPLRYWRRSFCVQEERRGLEECYGLLFFVGGGGFKGPEVVGVFVHQGVGLPFFSGRDVAP

SEQ ID NO: 332066 - protein, 103 aa, Zea mays
  Clone ID: MRT4577_65956C.1.pep
WWVSAVSAMAGALRLKRKSRCINRNKVSPLRPCMEVIVGAVSVWRTRAACKARGIEWRCSPGASRRKQVGMIQGTPPAPVWCPPCEVGIFGMRVDGIVCFALA

SEQ ID NO: 332067 - protein, 98 aa, Zea mays
  Clone ID: MRT4577_65957C.1.pep
SVLLDLHGLVCGCLAFIHNINILIHLLSHCSALHRFLTLRIVIVNKSYHMSHSYRIIISHSSTVCLCFRTILIRSTMGLLDPLVEASPESINVPMCSL

SEQ ID NO: 332068 - protein, 121 aa, Zea mays
  Clone ID: MRT4577_65958C.1.pep
LRSVRRPEPFAVASLSRVPPSAPAGRGGPFCAPCFQPLPPRRLVGVAPALPDGDGPRHGLAAERDAAVRGQHGVVPPPVASGRLSDVGPLRVVVGPVPDGGVARGVVVAVPVAPVLFFLRA

SEQ ID NO: 332069 - protein, 66 aa, Zea mays
  Clone ID: MRT4577_65959C.1.pep
FLGEGFRESWIFYSPAAHFKPSIKQPIPFWVIKKIQICTNVLFNGSSGARRRLLPKELNCCSAVVM

SEQ ID NO: 332070 - protein, 83 aa, Zea mays
  Clone ID: MRT4577_6595C.1.pep
TVCLSHRAGGPLGGLFSAASRILSTRPVFFYEPSLVADPRWGGPIFVCTCEGFDKGAPFPGWVARQKTASWFSFFFAKEERMM

SEQ ID NO: 332071 - protein, 55 aa, Zea mays
  unsure (1)..(55): unsure at all Xaa locations
  Clone ID: MRT4577_65960C.1.pep
LSRGAXPIXEYFMXXXELVRRXIYTDTQGLQIHLXSTTMCKKIIIVXNNXKSVKX

SEQ ID NO: 332072 - protein, 144 aa, Zea mays
  unsure (1)..(144): unsure at all Xaa locations
  Clone ID: MRT4577_65961C.1.pep
YFFGGGPKKALHNELEAIEGAGVGQGTCVAYLSSNLISSARQGLYWEWGVVIPELVRRRASYIAFIVPLGVLSSTIVRVAPALXVQHPGPKNSRKCAPLHSLRVCADLASVSSSSCPSDRWLPSPFWRTAFQEGLLLRPLPPCR

SEQ ID NO: 332073 - protein, 74 aa, Zea mays
  unsure (1)..(74): unsure at all Xaa locations
  Clone ID: MRT4577_65962C.1.pep
MAAKIFSILKLLALSAGVAYATIFPQYSXAPSAARRHSYIPSMSAXLCEHAALYTYRFVLAIAPSRPVSADPFL

SEQ ID NO: 332074 - protein, 91 aa, Zea mays
  Clone ID: MRT4577_65963C.1.pep
YDNDNNYISKKKKKKKKKKKKKKKKKKKKKKKKKKKKKKKKKKKKEKKKKKKPKKSKPTCRLLNLVLSKHKNSSPLARFPPTGKTRETPPF

SEQ ID NO: 332075 - protein, 56 aa, Zea mays
  Clone ID: MRT4577_65964C.1.pep
MGDLLGSPRVAFPFQTGKSSDPPPPPPPPPPPVPSRRASTALPPPNPDPPPPTPAS

SEQ ID NO: 332076 - protein, 328 aa, Zea mays
  unsure (1)..(328): unsure at all Xaa locations
  Clone ID: MRT4577_65965C.1.pep
MAADATASPSFSYLPPPLPTSHLDIQAAVAEAAELRALHAALLQXAAPPMPGPTPALAGAPPSSAXPALPRPAPLPTAAEDYPVFAPMYDEEPLGGTNCIRQDNRSLSENWSGVGLDHDGLEDDEVAFSDFDNHNTFSSSNSELHLSSSNEHLRNRRACRNHPSFLQPTALAADGLIRSTSRMTDLTEFKVVTTCNTCKPATINRGDDAKSLKNLDCTVPLSNYHPTVAAFPRTRHKGPQHILSWLLPKSKRKPRPDVSPTTVECENMSQLLKDWGVFSLDSLKKEVVEANEHRDAALQEVSGMKLSLGELTTKIASLGAYCSELKRL

SEQ ID NO: 332077 - protein, 121 aa, Zea mays
  Clone ID: MRT4577_65966C.1.pep
ARAAGFTTKITQKYPKKNNHLITAISKNQTKKICQKGSTTIRNFKETSGFSLHSKMPNGKLLDAAPRWGRLGVLLEQGRTLSQVPMFPPRTPLTPQQMQEQQLQHQQAQLLNFSGQTVATP

SEQ ID NO: 332078 - protein, 171 aa, Zea mays
  unsure (1)..(171): unsure at all Xaa locations
  Clone ID: MRT4577_65967C.1.pep
MADQKVAQLGPGAACCGWNHCGRRLAAGAVDGSVSVYDSQPSPSSKWQAHEHAIVAVVWLPPDYGDAIACVCADGTLSLWEEIAEDDQLPIWRKCKVFEGGSXHPNCTVWXLLSSLKMVIAYSDGQVKVYELLDSLELDKWQLQAELQNIIDPVSRIXKPACISASIAWSP

SEQ ID NO: 332079 - protein, 43 aa, Zea mays
  Clone ID: MRT4577_65968C.1.pep
LSKFLLMANIQGLIFNILIDFFNQFLDLYLLNTQTQYYLLNAF

SEQ ID NO: 332080 - protein, 272 aa, Zea mays
  Clone ID: MRT4577_65969C.1.pep
MTSKGTRPWSRLSEAETAVNRAVAGSRVGRYFKLDARKSSFTKELRAGAATFLTMAYIISVNAAVLTDSGGPCTVRDCTPVPTNSTVAATPPGPECTVAGANNPGYQQCLARTKSDLVVATAVAAMAGSFAMGLFANLPLALAPGMGANAYFAYNMVGFHGSGPIGYSTALAVVMLEGLVFFALSVVGLRSRLARMIPRNIRLASAVGIGLFLAFTGLQAHQGVGLVGASPSTLVTLTACSDVDTVTGACLGGTMRSPTFWLGAVGFLITAT

SEQ ID NO: 332081 - protein, 57 aa, Zea mays
  Clone ID: MRT4577_6596C.1.pep
MHFPLVLKRLIKIGGVALLKDPSLDGLAWNELVIFWDNLSRVAWPTFYKVIIGKPLA

SEQ ID NO: 332082 - protein, 71 aa, Zea mays
  Clone ID: MRT4577_65970C.1.pep
KHPSKNKGINLKFFFFSWGQNRPVLFYGFRFGPKVVNCNVFKVGLFWPCFAVKCCQAQNWGPVLINKSMGP

SEQ ID NO: 332083 - protein, 188 aa, Zea mays
  Clone ID: MRT4577_65971C.1.pep
MYQSRRSTDDEVNIQEDTMAATSSKATGPWSRLSEAEAAVNRAVAGSHVGRYFKLDARKSSFTKELRAGAATFLTMAYIISVNAAILTDSGGPCTARDCTPVATATNSTTADCAVVGAKANPGYQQCLARTKSDLIVATAVAAMAGSFAMGLFANLPLGLAPGMGAHAYFAYNMIGFPGSGTIGYRTA

SEQ ID NO: 332084 - protein, 136 aa, Zea mays
  unsure (1)..(136): unsure at all Xaa locations
  Clone ID: MRT4577_65972C.1.pep
PTYVKLLXEIVQRVPTVGDDLIGTNLFMVSNSVYETTXCSSLVXVNQIGSVTESVEADNMDKRSGWXVMAGHRXSXTHDTFIADLSGGLSTVHITMGAAXRSERMAKYNLLLRIXEELGDASVYAGAKFRSPVQPY

SEQ ID NO: 332085 - protein, 29 aa, Zea mays
  Clone ID: MRT4577_65973C.1.pep
HQHRSIESNMENNNVVRLYPTKINNYRNI

SEQ ID NO: 332086 - protein, 82 aa, Zea mays
  unsure (1)..(82): unsure at all Xaa locations
  Clone ID: MRT4577_65974C.1.pep
SSSPTTQREGGRQNKLHRTRFSRNPKNVAAALTHEGPHKNYHLPAHIHVSATTPXSNWGGGGKRPLPTTCTNRRPRVLWNCT

SEQ ID NO: 332087 - protein, 87 aa, Zea mays
  unsure (1)..(87): unsure at all Xaa locations
  Clone ID: MRT4577_65976C.1.pep
VELLGGLXKWWFSGAFGPMGVLHPSGVLCQKNVGGVFLASLGEMALLFIMPSFFFVQASLFGLTHRFFPRPLFLGGPFFIGVKVFLL

SEQ ID NO: 332088 - protein, 44 aa, Zea mays
  Clone ID: MRT4577_65977C.1.pep
YSCKQSNNNSCERGLTHTDKQTLMLDVLNQVSCSLAELDQARHA

SEQ ID NO: 332089 - protein, 62 aa, Zea mays
  Clone ID: MRT4577_65978C.1.pep
VPQLLGVCYRCYRSQQGYFFSGHGCSIRKNFFFQQNWLVSRLIARKELRVVVFRPAFGCGCF

SEQ ID NO: 332090 - protein, 102 aa, Zea mays
  Clone ID: MRT4577_65979C.1.pep
SAKCHPRHGKDMACLLMYRGDVVPKDLNPSLATIKTKPTIQFGDWCPTWFKCGINYQASNVVPGGDLAKVQRSLFLIFNFTSGVEGFFRIDHKFDLMYPKRA

SEQ ID NO: 332091 - protein, 42 aa, Zea mays
  Clone ID: MRT4577_6597C.1.pep
MVARKDKKKKKKKKKKKKKKKKKKKKKKKKKKKKSTLRCYHC

SEQ ID NO: 332092 - protein, 101 aa, Zea mays
  Clone ID: MRT4577_65980C.1.pep
MATTAASSLLKSSFAGSRLPSATRTTTPSSVAGATPCAGGGPIRASICYSPTPAYDLTCFRFSPIKESIVYREMTRRYMTDMITHADTDVEICGAGSAALS

SEQ ID NO: 332093 - protein, 113 aa, Zea mays
  unsure (1)..(113): unsure at all Xaa locations
  Clone ID: MRT4577_65981C.1.pep
QRKHKPTKAAKXXXXXXXXXXXARAXTATXXPQSXQXXXXXXXPPXXXPAGAGGXENPXXQPXRXQQAXAXGXXXXXPXXPQQXXAXXQQXXXXXXXAQNNRAQQPQQXXXAN

SEQ ID NO: 332094 - protein, 147 aa, Zea mays
  unsure (1)..(147): unsure at all Xaa locations
  Clone ID: MRT4577_65982C.1.pep
MEEASASLSLSAMATTAASSLLKSSFAGSRLPSATRTTTPSSVAVATPRAGGGPIRASISSSPTPPYDLTSFRFSPIKEFIVSREMTRRYMTDMITHADTDVVIVGAGSAGLSCAYEXLSKDPTVSVAIAEQSVFPGGGAWLGGQLF

SEQ ID NO: 332095 - protein, 88 aa, Zea mays
  Clone ID: MRT4577_65983C.1.pep
MATTAACSLLKCSFEGSRLPSATRTTTPSSVVVATPRAGGGPIRAFISYPNPPYDLTCFRLSPIKESIVSREMTRRFMTDMITQTDTD

SEQ ID NO: 332096 - protein, 44 aa, Zea mays
  Clone ID: MRT4577_65984C.1.pep
VDHEQDEPEAPPRIKIRNISLALVAHRQAGRGVRHGCKCVPYAL

SEQ ID NO: 332097 - protein, 83 aa, Zea mays
  Clone ID: MRT4577_65985C.1.pep
MATTAASSLLKSSFAGSRLPSGTRTTTPSFVAVATPRAGGGPIRAFIFFPNPPYDLTFFRFSPIKESIVSPEMTRRYMTDMIT

SEQ ID NO: 332098 - protein, 47 aa, Zea mays
  Clone ID: MRT4577_65986C.1.pep
KVKRRGSSRRRRSNEDVIEKWLLAVNGCYILLVNSGREEAKTKIVVC

SEQ ID NO: 332099 - protein, 60 aa, Zea mays
  Clone ID: MRT4577_65987C.1.pep
MILCIPGMTPSICSLLPEIARTVFLYLPVNQRVLSLKPRVTVYIVRVSRRVDGRPCLPIL

SEQ ID NO: 332100 - protein, 110 aa, Zea mays
  unsure (1)..(110): unsure at all Xaa locations
  Clone ID: MRT4577_65988C.1.pep
MATTAASSLLKSSFAGSRLPSATRTTTPSSVAVATPRAGGGPIRASISSPNPPYDLTSFRFSPIKESIAPREMTRRYMTDMITHADTDVVIVGDGTVGXLPCAYQLSKDP

SEQ ID NO: 332101 - protein, 196 aa, Zea mays
  unsure (1)..(196): unsure at all Xaa locations
  Clone ID: MRT4577_65989C.1.pep
MRLPLPLPSPSPMRRRHLPLPLPLLPLVLLHLLFAASSGSPSSEVAFLTAWLNTTAARPPDWSPAALSPCNWSRVSCAGGTGETGAVTSVSFQSVHLAVPLPAGLCAALPGLVSFVVSDANLTGGVPDDLWRCRRLTVLDISXTALTGFLPSSLGYATGLENLALNSNQLSGPLPPVLAALAPTLRNLLLFVTRLS

SEQ ID NO: 332102 - protein, 90 aa, Zea mays
  Clone ID: MRT4577_6598C.1.pep
RCGVPPCSPSGPFIIVCPAGGVPRGTPSVRWSIERWTQKGQLGPSVEGFLGSVHPNVDGFSVPAPLGPIKDHYTKKKREKKKQKKKKNQK

SEQ ID NO: 332103 - protein, 95 aa, Zea mays
  Clone ID: MRT4577_65990C.1.pep
KSCSDLTDASLAAIGRGCGRLAKFAIHGCDLVTPAGVRRLATALRPTIKQVSILHCRRLHTAACLTALSPIRDRVESLEISCVWEEVEQPESVAN

SEQ ID NO: 332104 - protein, 66 aa, Zea mays
  Clone ID: MRT4577_65991C.1.pep
LVRTFQQRWLFRPRRACVVLRRRLCACLLSRCCMGFLSWWAIACGAKSACPFRPTPLHSGARVGDN

SEQ ID NO: 332105 - protein, 72 aa, Zea mays
  Clone ID: MRT4577_65992C.1.pep
ENTDLGYDAAKGEYVDMVKAGIIDPLKVIRTALVDAASVSSLMTTTESIIVEIPKEEAPAPAMGGGMGGMDY

SEQ ID NO: 332106 - protein, 70 aa, Zea mays
  Clone ID: MRT4577_65993C.1.pep
CHTQPCKLMRRRGLSKQRRGDTTKTRISSKTAQLEMTIYHLTNPEKAQKNDVNNTYDEPKAHANATAIHK

SEQ ID NO: 332107 - protein, 51 aa, Zea mays
  unsure (1)..(51): unsure at all Xaa locations
  Clone ID: MRT4577_65994C.1.pep
RXXXPXXXLIXRLFXNRPHXLRDVXSGLNXXXPHAXGASXFFXCLXHTTYX

SEQ ID NO: 332108 - protein, 103 aa, Zea mays
  Clone ID: MRT4577_65995C.1.pep
DGVEPANLLPVPPREEEPPPPPLLPVPPHPLRPPYQQHLSVREDRTRADGADVERPAARPRREDRVVVQLEQQRARRRARARGGRARRRGGGCRRRRWRGPAG

SEQ ID NO: 332109 - protein, 72 aa, Zea mays
  Clone ID: MRT4577_65996C.1.pep
TPMGDWVPRGRPVKATALSLTPHNKTLLNALMCTHPCFKNHSTPGCPHCNQCSGEDECNMEDFQELQDFDEF

SEQ ID NO: 332110 - protein, 491 aa, Zea mays
  Clone ID: MRT4577_65997C.1.pep
LPNLTPWSDHNQSPRNMYQCQMAKQTMGFCGQALKFRTDVKAFHLQTPQTPIVRTGTYTKYCMDEFPSGTNAIVAVLSYTGYDMEDAMILNKSAVERGMFRGHIYQTECIDLSTKSRDNVPETFAKSILTRDTSNVIDSDGLPRLGQAVHPNEQYYSVHNSLTNVIRPVKLKGTEPAFIDYVAVNGTGSKCGLQKANIRLRRVRNPIIGDKFSSRHGQKGVCSQLWPDIDMPFSANTGMRPDLIINPHAFPSRMTIAMLLESMAAKAGSLHGKFIDATPFANSLKKDKDSDKPNSIVDELGPMLASYGFNYHGNEVLYSGVFGTEMDCEIFIGPVYYQRLRHMVSDKFQVRTTGRIDQITRQPIGGRKHGGGIRFGEMERDALLAHGSSYLLHDRLHSCSDYHIADVCSFCGSLLTATMIKSDTQKKVKHEMLGLPTVRPAKNFACQACKTSKGMETVAMPYVFRYLAAELAAMNIKLELRLSNKSGLPLS

SEQ ID NO: 332111 - protein, 27 aa, Zea mays
  Clone ID: MRT4577_65998C.1.pep
LLMCVNMLRLGQTATRIILILDQDSSL

SEQ ID NO: 332112 - protein, 43 aa, Zea mays
  Clone ID: MRT4577_65999C.1.pep
QKTSYAAGFLVGLRSRVGRLKGLAPPLGGSSRSQAHLDVGYGL

SEQ ID NO: 332113 - protein, 58 aa, Zea mays
  Clone ID: MRT4577_6599C.1.pep
GGGHQGACVRGGDLAQLVHAVQLPRVHARVQGVLVQVVAEIWSGCVTGLRVTYFFTAG

SEQ ID NO: 332114 - protein, 84 aa, Zea mays
  Clone ID: MRT4577_65C.1.pep
DADSSSISAYALIPCGLVSSPQYHALCSVAISCIATPYAFSDFRGCPLRAMYSPPIEITLYGLCKHFKQSMCFLASHDECCAAQ

SEQ ID NO: 332115 - protein, 40 aa, Zea mays
  Clone ID: MRT4577_66000C.1.pep
DPLRGCAYTGRDHPQRSKVWRAVRGDVRGYLVNMQLVLEA

SEQ ID NO: 332116 - protein, 103 aa, Zea mays
  Clone ID: MRT4577_66001C.1.pep
RKKIAPSPWGGPTGRGAAFFRGVTSRGGRPLWETGPQRDGGFMGLLRAAGDHLAKFNKRLGVGPPQQVGPGKGAAIAPAAASEANVLVNKFGRRGGLFFHPWA

SEQ ID NO: 332117 - protein, 73 aa, Zea mays
  Clone ID: MRT4577_66002C.1.pep
ACVVPDHKHHVHTHVFANSGLNEMLEIYTIGPCPECLSSPMQPQHVLCFALAYSHEVHLHVIHGQTLCTPLNQ

SEQ ID NO: 332118 - protein, 65 aa, Zea mays
  unsure (1)..(65): unsure at all Xaa locations
  Clone ID: MRT4577_66003C.1.pep
PNFSPTSQQNTSHKIFRPVQXSKHIPSILFSLLIPYPTCLPNDYPIPNPIQLSSYYFQSHLSIPT

SEQ ID NO: 332119 - protein, 49 aa, Zea mays
  unsure (1)..(49): unsure at all Xaa locations
  Clone ID: MRT4577_66004C.1.pep
VFVHNPRYSFWTRSFTHCAPEIEKLIQSVARSYGXKGADDGMGLADGAH

SEQ ID NO: 332120 - protein, 224 aa, Zea mays
  Clone ID: MRT4577_66005C.1.pep
MDAGAARPSAPSTAAVAGASVADEPRDARVVRELLRSMGLREGEYEPRVVHQFLDLAYRYVGDVLGDAQVYADHAGKAQIDADDVRLAIQAKVNFSFSQPPPREVLLELARSRNRMPLPKSIAPPGSIPLPPEQDTLLAQNYQLLPPLKPPPQYEETEDETGEPNPSNPANSNPSYSQDQSNKEQQQQHTPQHGQRVSFQLNAVAAAAAAAKRPRMTIDQLNMG

SEQ ID NO: 332121 - protein, 133 aa, Zea mays
  unsure (1)..(133): unsure at all Xaa locations
  Clone ID: MRT4577_66006C.1.pep
MTTVSVLYYALKRMYIAENMGKTKVMITPTSKVXIIQPLTVXMQPLVYIATSXSIIDDHRSGXIVVQLHGRLKNRDLLKPRFDIGETHILGCTARVLPSIHLGYLPLTTSARIMHHEEGRLKNVRRKGLGLFY

SEQ ID NO: 332122 - protein, 147 aa, Zea mays
  Clone ID: MRT4577_66007C.1.pep
TGIVSKRPNTRLAQLMATSRGHPPKPGKSVGQEFVDHRLLSRIGHYPDSKDLPRQLDMVAYFSDEPPCQTTHCTNVAVEQFNAQQQSDDKKIMRAVGVDSNMFILDQNDPLSYWHVYFKAYVGRNRYRCFAELSGEKGPELLRYCTA

SEQ ID NO: 332123 - protein, 126 aa, Zea mays
  unsure (1)..(126): unsure at all Xaa locations
  Clone ID: MRT4577_66008C.1.pep
TLNHTNWGALYTVPVVYKPAGHCFLTTSXTTQTMLYYXYNKTKFHLLYDNXSAIKMSDIPDDHNRTNHIPNPYHILTYHQQIIYINISYINTTDQLSYIFTKPYIXQTLSKLNHKHHILDISNFYF

SEQ ID NO: 332124 - protein, 108 aa, Zea mays
  Clone ID: MRT4577_66009C.1.pep
MSSEKSHRLYVKGRHVSYQRSKRNSNPNISLLQLEGVESTKDAEWYLGKRVAYVYRVGSSKSNPIRVIWGKIRRTHGNSGLVRASFQHNLPPKSFGASVRVMMYPSSI

SEQ ID NO: 332125 - protein, 126 aa, Zea mays
  Clone ID: MRT4577_6600C.1.pep
PLLPVMIQQLNTFLPFSVRMSTSVVSDDLTRVFQLISFNVYADIQAMVRCDSSMISVLLSSMSPFLISALALIQNVFLSIYTRECSFFKLEPLTSGMVLVIPNSELLVEPGRFQALATSYTPDAAT

SEQ ID NO: 332126 - protein, 83 aa, Zea mays
  Clone ID: MRT4577_66010C.1.pep
AGLFLGRHPPFPHPWPPLPLPLAATLHYFLLPLDLPPRSKDREEEEQDGLKRKRGSRRCSTPISCRFSWGNPRCLLLIKGSGK

SEQ ID NO: 332127 - protein, 183 aa, Zea mays
  Clone ID: MRT4577_66011C.1.pep
SFLFLKILGLDPNTKRARRVGADTVVAEKQRGKLARMRIANDDSAAWHGVLQRLSVEARSEKRRWHPARPELETGRGRRSSQGYQGEGAARRGGRAGSMCGGVRRARRGTVPWPTPPEYYHHREPYTCEVSREIRMHGRVHGGAGRTCGHGGAWTMGKQRQRSSTLVGGARLTSRMRQAELRR

SEQ ID NO: 332128 - protein, 87 aa, Zea mays
  Clone ID: MRT4577_66012C.1.pep
IQTSFDKKFLIKSWLCLGSIIMRVKVDVLLLPTPLDEQQAPRVSPRNLQEEMGKNISLILSSSSIQRAPPFLDPCCVGGDLGGGSNG

SEQ ID NO: 332129 - protein, 42 aa, Zea mays
  Clone ID: MRT4577_66013C.1.pep
NRTPFISDPCVFACYLVLACSRLLAGSRLFLARQEQQQQEPV

SEQ ID NO: 332130 - protein, 98 aa, Zea mays
  Clone ID: MRT4577_66014C.1.pep
FSHPWPPLPLPLAATLHYFLLPLDLPPRSKDREEEEQDGLKRKRGSRRCSTPISCRFSWGNPRWLHSRSCLVHFSSSMKVLVAHQGEWEVAAHTPSLS

SEQ ID NO: 332131 - protein, 167 aa, Zea mays
  unsure (1)..(167): unsure at all Xaa locations
  Clone ID: MRT4577_66015C.1.pep
MQHFVSFLKKKKKKKKKKKNKNKKKKKKKKKKKKKPCCPPATPKGSSSTPGGKMGANRKDGPPRNLMHKLPRRMKGSSKPNKGLNLIGPPGSGKETQPPIIKEENCLGHXTTGEMLRAAGPTKKPLGIKAKKAMKKGELVSKDLVGGIIDEAMKKPSCQKGFILEGF

SEQ ID NO: 332132 - protein, 87 aa, Zea mays
  unsure (1)..(87): unsure at all Xaa locations
  Clone ID: MRT4577_66016C.1.pep
AGIQAKARTPHSRDPQLSAGGKGTNVFTAPPQKSDHTKNDEILPVANXAPHKHLKKGYRMGALKNHGGMGGVPQKPKELLHAYEVLS

SEQ ID NO: 332133 - protein, 91 aa, Zea mays
  Clone ID: MRT4577_66017C.1.pep
KQTSFDKKFLIKSWLRLGSIIMRMKVDVLLLPTPLDEQQAPRVSPRNLQEEMGKNISLILSSSSIQRAPPFLDPCCVGGDLGGGSNGGWLP

SEQ ID NO: 332134 - protein, 106 aa, Zea mays
  Clone ID: MRT4577_66018C.1.pep
ASGCPLLEEWNLAVCHGVHLPGWSAIGLYCSKLRVLHVNRCRHICDQSLLALGNGCPRLEAVHINGCAKVTNNGLALFTLSRPHVNLRVYEVMSIGPSIENLFRLH

SEQ ID NO: 332135 - protein, 80 aa, Zea mays
  Clone ID: MRT4577_66019C.1.pep
RGREDQGDVLPHLFLKISWGNPRWLHSRSCLVHFFFFDEGACCSSRGVGSSSTSTFTLIIMLPRHSHDLIRNFLSKDVCF

SEQ ID NO: 332136 - protein, 96 aa, Zea mays
  Clone ID: MRT4577_6601C.1.pep
GVPTFPTSAGAIPWFLPCPQSTPQESKLWAPVKIVIPKIVKPQPPPVTHLSCLCIKGTKNFLNANGIPPVRKNFWLPRQATPYLDVATLSPPVNPF

SEQ ID NO: 332137 - protein, 132 aa, Zea mays
  Clone ID: MRT4577_66020C.1.pep
SDNTTSTSTPNRSYQETVYLSLKAPHHLGCGSRAANVVLQQVFHLHPLSSKDRAPFYPLGSSGDMVWLHLRKDRFPTLRRSKLMPRAAGPFKVLTKINDNAYILDLPAEFGVSTSFNVADLKPLYGRDEELS

SEQ ID NO: 332138 - protein, 34 aa, Zea mays
  Clone ID: MRT4577_66021C.1.pep
PRVHPTGRQERQVPNTFEMCEALNKVNYDMVRCK

SEQ ID NO: 332139 - protein, 261 aa, Zea mays
  unsure (1)..(261): unsure at all Xaa locations
  Clone ID: MRT4577_66022C.1.pep
MAALSVPLRTAAALSSSGAGSRAAADPSKVSCVRSKGSAHFGCSFPSIAASSSSARNIEPLRAIATQAPPAVPQYSSGEKTKVGINGFGRIGRLVLRIATSRDDIEVVAVNDPFIDAKYMAYMFKYDSTHGPFKGSINVVDDSTLEINGKKITITSKRDPAEIPWGNFGADYVVESSGVFTTIDKASVHLKGGAKKVVISAPSADAPMFVVGVXEMSYDPKMNVVSNASCTTNCLAPLAKVVHEEFGILGGLMTTVHATTA

SEQ ID NO: 332140 - protein, 89 aa, Zea mays
  unsure (1)..(89): unsure at all Xaa locations
  Clone ID: MRT4577_66023C.1.pep
TYYLHFKHSIDPTGTAKLNSFLMLLDLTATATTQTISPLCSQNSIDXILPPYLXRQLSXICEILIAQPYKILHSIESRILTLSPMFLQQ

SEQ ID NO: 332141 - protein, 533 aa, Zea mays
  unsure (1)..(533): unsure at all Xaa locations
  Clone ID: MRT4577_66024C.1.pep
MAAKQPVVAAAASGHPKMGEEKLIIRPEKVRFIDVLSMLLLRRPITSYAFVEAGDRTAADLGSTPGDWLVALTQVIQKALAGAYYPALVVGAVVEFLLNFVALNNGILGIFLNLFRCKLVIPLNREAPNFRSMIGMIDGRTELXRCQPAAAQRTGGCRWWXSAAAGSGGDDYYLDVESGSAAVPLVQQQYVNGRLVRLRTFSVFEVSMMAAKIAYENAAYIENVVNNVWKFHFVGFYNCWNKFVGDHTTQAFVFTDKAEDASVVVVSFRGTEPFNMRDWSTDVNLSWLGMGELGHVHVGFLKALGLQEEDGKDATRAFPKAAPNAVPGKPLAYYALREEVQKQLQKHPNANVVVTGHSLGAALATIFPALLAFHGERGVLDRLLSVVTYGQPRVGDKVFAGYVRANVPVEPLRVVYRYDVVPRVPFDAPPVADFAHGGTCVYFDGWYKGREIAKGGDAPNKNYFDPRYLLSMYGNAWGDLFKGAFLWAKEGKDYREGAVSLLYRATGLLVPGIASHSPRDYVNAVRLGSVASA

SEQ ID NO: 332142 - protein, 88 aa, Zea mays
  Clone ID: MRT4577_66025C.1.pep
KKNKKKKKKKKKKKKQKKNKKKKKKKKKNKKKGGAPLRVQPLLPRECNFKPLQSCPQISLHGPSFYTFLTGKTRRLPSLVPFQQTPLS

SEQ ID NO: 332143 - protein, 76 aa, Zea mays
  unsure (1)..(76): unsure at all Xaa locations
  Clone ID: MRT4577_66026C.1.pep
QYGPDSRVHNDYWWPGRKGEERRCGGKCGCGCLCKCGNRWGGGIKMYPDMAAQMTTTTQSLMMGAXPSKAHAEGGF

SEQ ID NO: 332144 - protein, 79 aa, Zea mays
  unsure (1)..(79): unsure at all Xaa locations
  Clone ID: MRT4577_66027C.1.pep
VDSEYIPDLSANSPLCVSGKYRGKFPDTVKAKGYLVDMKEVLIELKVQQLKEVTLDKVLVTQHIDLMTAXAWLSAAKQL

SEQ ID NO: 332145 - protein, 44 aa, Zea mays
  Clone ID: MRT4577_66028C.1.pep
VPPCVQGYDPIIITRCVGSLHALASIGCTSSSVIAPVSESLLLL

SEQ ID NO: 332146 - protein, 92 aa, Zea mays
  Clone ID: MRT4577_66029C.1.pep
HTPTTSSLFFFFSSINNFSLNPNINHTILTPIYPFTTPSISTSNFKFKIFITTKTTSTLTKPTLSTHLTYNHQYILPPFQFSNFLHSLFLII

SEQ ID NO: 332147 - protein, 133 aa, Zea mays
  Clone ID: MRT4577_6602C.1.pep
MAVPLLTQKIVKKRVKQFKRPHLDRYKCLKPSWRRPKGIDSRVRRKFKGCTLMPNIGYGSDKKTRHYLPNKFKKFVVHNVSELELLLMHNRTYCAEIAHNVSTWKRKEIVERAAQLDIVVTNKLARLRSQEDE

SEQ ID NO: 332148 - protein, 45 aa, Zea mays
  Clone ID: MRT4577_66030C.1.pep
CLDLTTPLANLCVTRELLMSTMVGWCSFSVCRLDTNVHLLAIQVL

SEQ ID NO: 332149 - protein, 191 aa, Zea mays
  Clone ID: MRT4577_66031C.1.pep
PPLARCYGLPWLLHLRFLHHARHAHAAHTAGCVNPSRIYAGERVCSLRRPAAVGRVHSLRPHAAGRLRSLRPDAAGRLCGSARHADGRRTYSARPGLALRRLRLAAGLTIMGHYFLSCPALGSIPAGAWYLRRLVHGLGRHRPHDISSQYSNLLHFGSYSYLHHRWQRFLFTITHVGYASFPFTSTPITMP

SEQ ID NO: 332150 - protein, 134 aa, Zea mays
  Clone ID: MRT4577_66032C.1.pep
PSCGAPTASLPTSKLQISSMTSSLVRWSARPCLPWLPVSPCDAPARIQLSSPKSLMAAHGVLVDVVLVGISLCASLLPCARTLLLSSAVSISPRSVSSSLCVPLQARQPPLSCHRTPNAVIHGRDLAKCVRRLT

SEQ ID NO: 332151 - protein, 46 aa, Zea mays
  Clone ID: MRT4577_66033C.1.pep
SVPPHELAWRSRAASLSVHEGVGRTLKGRDLSRVRDAVWKRTGFED

SEQ ID NO: 332152 - protein, 170 aa, Zea mays
  Clone ID: MRT4577_66034C.1.pep
KILMIQMGPTLLPRKDRPLAQGTKGPIKNHGPTQKTLLSFSKWGTHNLLLLKKKHFALLLLMGPPGYLGAASSRGGETTFGGVFIRAVLVPFCFLLQGAKFKTCFLGHNKGPRGEDNPTKRVKCNPPRELLTWFPGFAGALIDGQPKPFFDRGPREWQQRGGPRPPPGGQ

SEQ ID NO: 332153 - protein, 134 aa, Zea mays
  Clone ID: MRT4577_66035C.1.pep
MGKTWALITHLHALAGPSLTLIYPLYASICAMESATRVDDEQWLAYWIIYSFITLFEMAAEHVLYWIPLRYEAKLLLAAWLVLPHFRGASFIYDRFVREQLRKNGVRLHGHHHGHAADHVPHVFQAEHRHGVHS

SEQ ID NO: 332154 - protein, 65 aa, Zea mays
  Clone ID: MRT4577_66036C.1.pep
PFLRPLLFGPCLFGALPLQCFARVSPFGVGCCSTSFFREALCFLHPHRCLCDYSPGSFFIFGVGK

SEQ ID NO: 332155 - protein, 62 aa, Zea mays
  Clone ID: MRT4577_66037C.1.pep
ILGAFITNIGILLFLLLPLPTSIPFSIHIPCPYPGLHCLNCSNACLTTNIGTYWLNPYANYL

SEQ ID NO: 332156 - protein, 73 aa, Zea mays
  Clone ID: MRT4577_66038C.1.pep
QRRVTREAQSHEGKTNLGLAKKTSSMSESFENSLPTLFFKRNKKIYTVTLTTHYLSSRSFYTCNKNIRQSRYG

SEQ ID NO: 332157 - protein, 74 aa, Zea mays
  Clone ID: MRT4577_66039C.1.pep
KATGPSPIAYRTRNPSAGSPPSESANKPGAGVAHVGPGGALSSIVSPVHNPTAEIKGCLSEETETLPSSVIFGK

SEQ ID NO: 332158 - protein, 87 aa, Zea mays
  Clone ID: MRT4577_6603C.1.pep
LEQLKVLFFCLGLSADGRIPRCWPKMRLKPAVPVLSSWRPPSRSLPRPYSRITVACSPRNRAIEGKMKTDLSSDSEEGNSNQETGGR

SEQ ID NO: 332159 - protein, 101 aa, Zea mays
  Clone ID: MRT4577_66040C.1.pep
KTFLPDLKISPELGQPNYPHPGERTISNPTYGGNTFTGITTLALEILINYFWEALKLLSIPNFFNFPGKEPHPRGKPSPYSPKPPNLHFQNGGFLILTPKT

SEQ ID NO: 332160 - protein, 68 aa, Zea mays
  Clone ID: MRT4577_66041C.1.pep
RCTHLLYLSYISCTKLSSDPFTSLMGSFCSIRNPKHASGTGRPWEFISSSRSAALAAPSTSDHAMLLC

SEQ ID NO: 332161 - protein, 96 aa, Zea mays
  Clone ID: MRT4577_66042C.1.pep
GKHLDMTDGRPRSTPSRDHKDWRLCRPNQSRSTRNRSNQPNRSESIDSRQGNHRKFSGVAGFGFGAAARVSLRGRGKFSGAAVEKENKSPAGLEVP

SEQ ID NO: 332162 - protein, 132 aa, Zea mays
  Clone ID: MRT4577_66043C.1.pep
YRDADLFIFSGEISESVGALMLLLIAPDTDPGASPLSSTAPCMDPPGARSTLHQRQGSVHVGRSVGLRAPLCCFSSPHLLSRGRGGEPERDGERSGGAGVWRAAGRDCLVVRGWEAGAGMRQRAVRTRPASR

SEQ ID NO: 332163 - protein, 159 aa, Zea mays
  unsure (1)..(159): unsure at all Xaa locations
  Clone ID: MRT4577_66044C.1.pep
RRRTGRIPGDPRPAREPHPDHTAARPEAKEPKQGTPPGEAXTVAARGEPAGVGEPTGEAARRAXPERPHXKKAPHTTAETPTSPRTGRXEPEKASKGTARTTAPASKKAEKTEAPAXXAGTRHAPTAXXPGGRATPKRQRGTQPXASQAEHQGTTHTRD

SEQ ID NO: 332164 - protein, 67 aa, Zea mays
  Clone ID: MRT4577_66045C.1.pep
RPGSCHERLRAHDYEPIRKVQDLNEHAQNQPLFQVMELHAASTYYHRPSLAELVTLLGNSIYNRRTM

SEQ ID NO: 332165 - protein, 139 aa, Zea mays
  Clone ID: MRT4577_66046C.1.pep
PPWGAPIKVAKDPQRGLLTPGAQLAWPHPCPPVLNKTFLGPEPPKKGFFFWEKIFTWAPFGSFWPTPFLKKKAPIFPPFISTVKFLTQRVVTPKKFLVNPPFTPFFFHGGLPFPKKKKPPLGKKPRKKPPKKNKKKKKK

SEQ ID NO: 332166 - protein, 51 aa, Zea mays
  Clone ID: MRT4577_66047C.1.pep
YTTPHHTLITAITHTLYQRVISIVDRDSTSYKLCQHRNNRWRRPPRRPSVT

SEQ ID NO: 332167 - protein, 113 aa, Zea mays
  unsure (1)..(113): unsure at all Xaa locations
  Clone ID: MRT4577_66048C.1.pep
LGRIPEPGVRGRVQTIHGFVFKDYPEPHRRFSIHVXASVNWNFALNDPGLSRLAFIYIGAQKNVLPSIDWPAIYRMDPDKTLQFLTLIMLDFITLSDDALLYNSPPCYAIYNS

SEQ ID NO: 332168 - protein, 60 aa, Zea mays
  Clone ID: MRT4577_66049C.1.pep
GENQKKKGGAYNGIKPRPAPPKGGNPTHRGAILRDPHSHPRLGEKSGKELKPWGDKRSRS

SEQ ID NO: 332169 - protein, 133 aa, Zea mays
  Clone ID: MRT4577_6604C.1.pep
MAVPLLTQKIVKKRVKQFKRPHLDRYKCLKPSWRRPKGIDSRVRRKFKGCTLMPNIGYGSDKKTRHYLPNKFKKFVVHNVSELELLLMHNRTYCAEIAHNVSTRKRKEIVERAAQLDIVVTNKLARLRSQEDE

SEQ ID NO: 332170 - protein, 46 aa, Zea mays
  unsure (1)..(46): unsure at all Xaa locations
  Clone ID: MRT4577_66052C.1.pep
APERAPSVFFFFFLFYNARKPLFACFIPNHAAXAAACRLLCWVLGR

SEQ ID NO: 332171 - protein, 81 aa, Zea mays
  Clone ID: MRT4577_66053C.1.pep
KKKPTLAQGGHGLFPGDFPFGDPGLETQGGGPPGKPPGKLGDPFSPGGQKNPPGGKKRNPERPPGGQKAPPKKRGRGPKNL

SEQ ID NO: 332172 - protein, 76 aa, Zea mays
  unsure (1)..(76): unsure at all Xaa locations
  Clone ID: MRT4577_66054C.1.pep
MPADAKRLIXXRRFSDPSVQSDMKLWPFKVVAGPGDKPMIVVSYKGEDKQFSAEEISSMVLTKMKEIAEAYLGSTI

SEQ ID NO: 332173 - protein, 47 aa, Zea mays
  Clone ID: MRT4577_66055C.1.pep
PVDEYICSEGNHECVQPVFTMPIKEPSSADRVIDCGRYWPEIHYSIN

SEQ ID NO: 332174 - protein, 98 aa, Zea mays
  Clone ID: MRT4577_66056C.1.pep
HEAIFSLRLADQPGFELLTITRVILYYITLPTAPWDWMDNLADLEATAAVEAATTGVLKRKRDTPSIEMDMNVPLLLTEKLSRAGPYHAMPPNAEPLV

SEQ ID NO: 332175 - protein, 148 aa, Zea mays
  unsure (1)..(148): unsure at all Xaa locations
  Clone ID: MRT4577_66057C.1.pep
MASGDATLFEESFTVMEYDQSKYDRVARIHCTSADSQTIMSLDINIELFPCVRGDSLHVVLTTTLALDGSKEEEKGWRDVGKGGDAPATIADLYDYVCHGKIYKFEETFDGNTINAYXSFGGLLMSLQGPVKKLTPLRVDNVYLLVKK

SEQ ID NO: 332176 - protein, 78 aa, Zea mays
  Clone ID: MRT4577_66058C.1.pep
FGWLGLSQNHMGQVTSIYDFRTVVFFQEPTYSGIVYSLWRHSVRSSRGGPDGVEGPVDPKMRSVLFMMCVCRVHYGIS

SEQ ID NO: 332177 - protein, 36 aa, Zea mays
  Clone ID: MRT4577_66059C.1.pep
RESAPTPMKRGYKLAKLGCWEEEADAMEEKAGGLDE

SEQ ID NO: 332178 - protein, 175 aa, Zea mays
  unsure (1)..(175): unsure at all Xaa locations
  Clone ID: MRT4577_6605C.1.pep
AAEDQHXXRTAGTPXGXXXTXNPXQXXKXXXXXAXTAPTGTGXXAXKPPXQDKERKXPTXXXXXQXAXNXXXAGXGETXXXPQGRGTRNQXXQXXXXRRGXXAXPPXXXXXRAXREXPKTDGKAARTXAKXXXXRQXXXAXXGHPXXTRXXGXAXKTXTNHKHQRASAAAEEGAT

SEQ ID NO: 332179 - protein, 137 aa, Zea mays
  Clone ID: MRT4577_66060C.1.pep
DCILDDLVASEELLAVSPTLFTESTTIVSLCRIVLLVTLLFERSIGSALLSTSQTAEPNVFVSLTPLAATFSLAFSKDEDNRSGTDVACVTLSAGRFNFMQRAEVFPQESLFSSLQSQEPLAVLVSMRDSSQISPFN

SEQ ID NO: 332180 - protein, 81 aa, Zea mays
  unsure (1)..(81): unsure at all Xaa locations
  Clone ID: MRT4577_66061C.1.pep
MARGLVAPHWVAVGLLSWHSLGLLVAGLGGHDDLHDDXQEDFHGHSHRHSHEDFHHGHSHAHGHGHTHESIWHGHTHDHDH

SEQ ID NO: 332181 - protein, 134 aa, Zea mays
  Clone ID: MRT4577_66062C.1.pep
FGSIFGIKLFRLSDYRVQFVVYFAYINLQVSFAFLMATFFSNCRTASVTGYLFTIGSAYSGEYLFRPIFEDMSLSRSWSTLMELFPPFCLYRIIYEFSPPPSPLYRTNFSGVHWEDLSDHKNGMLDILIIKAVE

SEQ ID NO: 332182 - protein, 105 aa, Zea mays
  Clone ID: MRT4577_66063C.1.pep
KSIAASREESDVFVTNNNGNMAKVLAGRRRYMGHKRTIRPNAKKLNVLFQTRNQLSWDTFSRKVQRVQRGLMGEPDDIRPKQDDFHEFPSSCICSRKPGNISATT

SEQ ID NO: 332183 - protein, 79 aa, Zea mays
  Clone ID: MRT4577_66064C.1.pep
MLRHLVRTGQLADARSLFDAMPRRDEVAYATLLSGYAAAADFPGAMALFSRFRASSSQPHDAADPFILSPVLKACASAA

SEQ ID NO: 332184 - protein, 70 aa, Zea mays
  Clone ID: MRT4577_66065C.1.pep
YYKMLKSQRQVNTTIIPCRLNPGTVSNLHHGSIWNQCALTCIRTHRYRHRRPLTPRGGPSDPYTCRARSW

SEQ ID NO: 332185 - protein, 77 aa, Zea mays
  Clone ID: MRT4577_66066C.1.pep
MFPMLTGFISYGQQTIRAARYIGQSFIITLSHTNRLPITIHYPYEKSITSERFRGRIHFEFDKCIACEVCVRVCPID

SEQ ID NO: 332186 - protein, 82 aa, Zea mays
  Clone ID: MRT4577_66067C.1.pep
PILYNRCDLQHKIVFCPIFIRSARNSLSAPAPGGDIRHPPHVNDEPIKLGALLTFCGWHRRSANESKRNAYIPPPPINIGPS

SEQ ID NO: 332187 - protein, 38 aa, Zea mays
  unsure (1)..(38): unsure at all Xaa locations
  Clone ID: MRT4577_66068C.1.pep
HXHQLPHPAITDHLDKTHSITSTYTHIHANTKISQHHI

SEQ ID NO: 332188 - protein, 68 aa, Zea mays
  unsure (1)..(68): unsure at all Xaa locations
  Clone ID: MRT4577_66069C.1.pep
TMLLRKKEPPVRLALQRNITEMEVTPMQSRYGYTTRVDTFGRIYSWKAFKLKKFEKSPWSEVAXAWKT

SEQ ID NO: 332189 - protein, 83 aa, Zea mays
  Clone ID: MRT4577_6606C.1.pep
WCVQHQSNPLVWFLKSPFQDKNGKTTSVVASNTKIYQPIKNSFSPQKVNVPERIAPPPRGALNVRTSNPSSPLGICTGPSPGN

SEQ ID NO: 332190 - protein, 112 aa, Zea mays
  Clone ID: MRT4577_66071C.1.pep
GSSAEAGFEIVECALRRRGYALRLRELGGRHSRPDKKELRPSGFRPAQQIAHAHGGGGRRAGGRGGVGGARGGRAGPRDRWRPPIHSPVSWIGCRRILGSRCTARGSRSGER

SEQ ID NO: 332191 - protein, 195 aa, Zea mays
  unsure (1)..(195): unsure at all Xaa locations
  Clone ID: MRT4577_66072C.1.pep
TFAFVYISPEMGVTLSMLVRRLFHQKEDERFYIDRVSDAPWLQTTILYKVTFADIMTAIPTIAFNXKLAQYXKTLTITSLMIVSRXDKIRTLWRXHHFQNTQXLLFGVDSNDXRQRVVVAKHDLHRMVNDDELRDAXLLEFANEQYLSNDMNADXITDKLGLHSLHHXHCDILSTCATSGEGYDEKHDWLSNTSL

SEQ ID NO: 332192 - protein, 390 aa, Zea mays
  Clone ID: MRT4577_66073C.1.pep
MEDLSNMTLTIVIGKNVAFEMSQKMCRGVEPTSSRPYAFTCDERKGKKKAPTPSSSSEEEEEEESDDDEDNQPCTSSSEDVKTIRHVGKVMRMIRKINLMGVPLQVEDLLFNIDRKKQRKRGCFACGEKAHFRDNCPNMAKPKKERSKGKTLTSVRTWDDSSSEDEPPSTRSHRSSSRSSRSSHKCLMARGNKSIPSSSDESSSDDEGEGKPSVDELAEAVEFFQDVCTKQKAQLKTLKNKLISSQNDYKEVARLGKALYDKKGKAKQIRPPQDNTTAGVNKPMEGETVICRLCHKEGHKSFQCKAMTGDKQRQKLKQKPSSKISNTYIKKVDKKTATPYLIKKKKDGKVIASKANKQANKGKGAKRIWVPKEIISTMKSTKKVWIPKGK

SEQ ID NO: 332193 - protein, 88 aa, Zea mays
  unsure (1)..(88): unsure at all Xaa locations
  Clone ID: MRT4577_66074C.1.pep
LKEALEXXRRAFFKLGEAYTNLGXSLSEETTAAPPAGEDREADLDANGHGAETYYGASDSDYETAHNRALHQPTVASLELLTTLNGEH

SEQ ID NO: 332194 - protein, 548 aa, Zea mays
  Clone ID: MRT4577_66075C.1.pep
MDTHRPPHFDGTNFPYYSARMACYLEAIDLGVWRVTRDGMKPLKNPEKPTTSEEKEIHLNARAKNCLYESLSMDIFNQVFTLKTANEIWLKLHELHDGTSNVREQKHCLVLNEYNSFAMKDDELVRYMYSRLNLIINELNSIGINKLGDADIVRKIISLLPQQRYGSIITILHNMEDLSNMTPTIVEDLLFNIDRKKQRKRGCFACGEKGHFRDNCPNMVKPKKERSKGKALTSVRTWNDSSSEDEPPRTRSHRSSSRSSRSSHKCLMARGNKSIPSSSDESSSDDEGEGKPSVDELAEAVEFFQDVCTKQKAQLKTLKNKLVSSQNDYKGLLEKFETFANLNSELSTKIELLECSAPSTATDDSLIKKNEKLKAKLASSQEAIENLLEKMEILSIHNNELTTKLENIGSTPAASLVEIPEIIKKDASTSCFDLIDDSNPCNQVVVENIVVETCSDEVAKENEQLKQEVARLGKALYDKKGKAKQIRPPQDNTIAGVNKPVEGETVICRLCNMEGHKSFQCKAMTGDKQRQKLKQKPSSKISTPTSKR

SEQ ID NO: 332195 - protein, 645 aa, Zea mays
  unsure (1)..(645): unsure at all Xaa locations
  Clone ID: MRT4577_66076C.1.pep
MDTHRPPHFDATNFPYYSARMACYLEAVDLGVWRVTRDGMKPLNNREKPTTSEEKEIHLNARAKNCLYEYLSMDIFNQVFTLKTANEIWLKLHELHNGTSNVREQKHCLVLNEYNSFAMKDDELVRDMYSRLNLIINELNSIGINKLGDADIVRKIISLLPQQRYGSIITILHNMEDLSNMTPTIVIGKIAAFEMSRKMSRGEEPTSSRPYAFACDERKGKKKAPTPSSSSEEEEEEXVMMTKIINHXIILRGRRNSRGSSXNIDRKKQRKRGCFACGEKGHFRDNCPNMAKPKKERSKGKALTSVRTWDDSSSEDEPPRTHSHQSSSRSSRSSHKCLMARGNKSIPSSSDESSSDDEGEGKPSLDELAEAVEFFQDVCTKQKAQLKTLKNKLVSSQNDYKGLLEKFETFANLNNELSTKIELLESSAPSTATDDGLIKKNEKLKAKLASSQEAIENLLEKMEILSIHNNELTTKLENIGSTPAASLVEIPEIIKKDASTSCFDLIDDSNPCNQVVVENIVVETCSDEVAKENEQLKQEVARLGKALLCHMEGHKSFQCKAMTGDKQRQKLKQKPSSKISNTYIKKVNKKDATPYLIKKKKNGKVIAIKANKQTNKGKGAKRIWVPKEIISTMKSTKKVWIPKGK

SEQ ID NO: 332196 - protein, 539 aa, Zea mays
  Clone ID: MRT4577_66077C.1.pep
MDTHRPPHFDNTNFPYYSARMSCYLENVDLGVWRVTRGGMKPPINPEKPTTIFTLKTANEICLKLHELHDGTSNVREQKHCLVLNEYNSFAMKDNEFVRDMYSRLNLIINELNSIGINKLERKGKKKAPTPSSSNDEEEKEESDDDEDNQPSMSYHPPRMKKQSHASKRSRIFSLTLTGKRKEGEDASHARRRATSGTAVKIWPNPQKGGATARCLQVSKLGMTLQAKMNLQGCTATDPHHVHHDHHASALWQEDVCTKQKAQLKNLKNKLISSQNDYKGLIEKIEIFANLNCELSTKRNEKLKAKLASSQEAIENLLGKMEILSIHNDELTNKLENIGSIPEVYFVEIPEIIKKDASTSYFDLIDNSNPCNQVLVKNVVIETCSDEIAMENEQLKQEVACLGKALYDKKGKAKQIQPSQNNTTARVNKPVEGKTTICRICHKEGHKSYQCKAKTRDKQKLKQKLKQKPTSKIFNTYINKVDKKAATPYLIKNKKNGKVIAIKSNKQANKGKGTKHIWVSKEIISTMKSTKKVWITRGK

SEQ ID NO: 332197 - protein, 34 aa, Zea mays
  Clone ID: MRT4577_66078C.1.pep
RSIHQVVISIHTNRIGQYNIKLVMARSSLGNTTS

SEQ ID NO: 332198 - protein, 44 aa, Zea mays
  Clone ID: MRT4577_66079C.1.pep
LFSYMCRFVFKAHAKYLIFEAFYEYIIEVISGQRYALKTMQSQM

SEQ ID NO: 332199 - protein, 133 aa, Zea mays; identical to SEQ ID NO: 332169
  Clone ID: MRT4577_6607C.1.pep

SEQ ID NO: 332200 - protein, 702 aa, Zea mays
  Clone ID: MRT4577_66080C.1.pep
MDTHRPPHFDGTNFPYYSARMACYLEAVDLGVWRVTRDGMKPLKNPEKPTTSEEKEIHLNARAKNCLFESLSMDIFNQVFTLKTANEIWLKLHELHDGTSNVREQKHCLVLNEYNSFAMKDDELVRDMYSRLNQIINELNSIGINKLGDADIVRKIISLLPQQKYGSIITILHNMEDLSNMTPTIVIGKIAAFEMSRKMSRGEEPTSSKPYAFACDERKGKKKAPTPSSSSKEEEEEEESDDDEDNQPCTSSSEDEETIRRVGKVMRMIRKINLMGVPLQVEDLLFNIDRKKQRKRGCFACGEKGHFRDNCPNMAKPKKERSKGKALTSVRTWDDSSSEDESPRTRSHRSSSRSSRTSHKCLMARGNKSIPSSSDESSSDDEGEGKASLDELAEAVEFFQDVCTKQKAQLKNLKNKLVSSQNDYKGLLEKFETFANLNSELSTKIELLESSAPSTATDDSLIKKNEKLKAKLASSQEAIENLLEKMEILSIHNNELTTKLESIGSTPAASLVEISEIIKKDASTSCFDLIDDSNTCNQVAVENIVIETCTDEVAKENEQLKQEVARLGKALYDKKGKAKQIQPPQDNTTAGVNKPMEGETVICRICHKEGHKSFQCKAMTGDKQRQKLKQKPSSKISSTYIKKVNKKDATPYLIKKKKNGKVIAIKANKQANKGKGAKRIWVPKEIISTMKSTKKVWIPKGK

SEQ ID NO: 332201 - protein, 230 aa, Zea mays
  Clone ID: MRT4577_66081C.1.pep
MDTHRSAHFVGTYFPYYSARMACYLEAVDLGVWIVTRDGMKPPKNLEKPTTTFTLKTANEIWLKLHELHDGTSNVREQKHCLVLHEYNSFAMKDNELVRDMYSCLNIIINELNSIDINQLGDADIVRKILSLLPQQRYGSIITILHNMEDLSTMTPTIVIGKIAAFEMSQKMCRGEEPTSSRPYAFACDERKGKKKAPTPSSSSEEEEEESDEGEDNQPSTSSSKDEETI

SEQ ID NO: 332202 - protein, 163 aa, Zea mays
  unsure (1)..(163): unsure at all Xaa locations
  Clone ID: MRT4577_66082C.1.pep
MAAVPKKVEKTSISSDRPLWFPGVVAPDYLDGSMVVDYRIEPFRIAKPVQYLKVELDSLDQNLAKNDGEXIIGTRLESSDVKSTPLQPYSEEFLLQRVRECEFIHGRXSMIGTLGALTVEWITGVTWXDAGNADLWNASSYLXQTVPISISTLIWIEVIAIGY

SEQ ID NO: 332203 - protein, 111 aa, Zea mays
  Clone ID: MRT4577_66083C.1.pep
MCRGEEPTSSSPYAFACDERKGKKKAPTLSSSSEEEEEEESDDGEDDQPSTSSSEDEETIQRVGKVEDLLFNIDRKKQRKRGCFAYSEKGHFMDNCPTMAEPKKERSKGKA

SEQ ID NO: 332204 - protein, 322 aa, Zea mays
  unsure (1)..(322): unsure at all Xaa locations
  Clone ID: MRT4577_66084C.1.pep
NSRDVSLRVKKKEMHLNVRAENCLYGSLNMKVFNQVFTLKTANEIWLKLHELHDDTSNVHEQKHCLALNDYNSFAMKENELVRDLYSRLNLTINEFNSIGINKLGDADIVRKIISLLPQQRYGSIITILHNMEDLSNMTPTIVIGKIAAFEMSRKMSRGEEPTSSRPYAFACDERKGKKKAPTPSSSSEEEEEEXVMMMKIINHXIILRGRRNNPTRQKGQGSXFNIDRKKQRKRGCFACGEKGHFRDSCPTMAEPKKERSKGKALTSVRTWDDSSSEDEPPRTRSHRSSSRSSHKCLMARGNTNTPSSSDESSSDDEGEGK

SEQ ID NO: 332205 - protein, 649 aa, Zea mays
  unsure (1)..(649): unsure at all Xaa locations
  Clone ID: MRT4577_66085C.1.pep
MDTHKPPHFDGTNFPYYSARMACYLEAVDLGVWRVTRDGMKPLKNPEKPTTSEENEIHLNARAKNCLYEPFSMDIFNQLFTLKTANEIWLKLHELHDGTSNVREQKHCVVLNEYNSFAMKDDELVRDMYSRLNLIINELNSIGINKLGDAGIVRKIISLLPQQRYGSIITILHNMEDLSNMTPTIVIGKIAAFEMSRKMSRGEEPTSSRPYAFACDERKGKKTAPTPSSSSEEEEEEXVMMMKIINHAHHPXQGRRINPTRRKGRRSSXNIDRKKQRKRGCFACGEKGYFRDSCPTMAEPKKERSKGKALTSVRTWDDSSSEDEPPRTRSHRSSSRSSHKCLMARGNTSIPSSSDESSSDDEGEGKPSLDELAEVVEFFQDVCTKQKAQLKTLKNKLVSSQNDYKGLLEKFETFANLNSELSTKIELLESSAPSTATDESLIKKNEKLKAKLASSQEVVENLLEKMEILSIHNNELTTKLENIGSTPAASLVEIPEISKKDASTSCFDLLDDSNTCNQVFVENIVVETCSDEVAKENEQLKQEVARLGKALLCHKEGHKSFQCKAMTGDKQRQKLKQKPSSKISNTYIKKVNKKDATPYLIKKKKNGKVIAIKANKEANKGKGAKRIWVPKEIISTMKSTKKVWIPKGK

SEQ ID NO: 332206 - protein, 161 aa, Zea mays
  Clone ID: MRT4577_66086C.1.pep
GCRRVLVTGTGPLGCAPAILAQRSRNGECAAELMRAAALFNPQLARVLDQLNARFGAGTFIAANAFRVHFDFVSDPAAFGFATAKDACCGQGPHNGLGLCTPLSNLCADRSKYVFWDAYHPTERANRVIVSQFMSGSLDYVSPMNLSTVLQMDAAFHQIEY

SEQ ID NO: 332207 - protein, 77 aa, Zea mays
  unsure (1)..(77): unsure at all Xaa locations
  Clone ID: MRT4577_66087C.1.pep
HAYGHASAHASVHACAHAYVHACCACNESKAFAFCKNNSIKKLTASMKNYSPDSTRTLAINATIEKTKHRFXNYGKF

SEQ ID NO: 332208 - protein, 58 aa, Zea mays
  Clone ID: MRT4577_66088C.1.pep
YRQCGMTERSIDNVRWRPNYDQLASEYESTGQSKKRFCHEKAGSFPTRRAMRHTLPSC

SEQ ID NO: 332209 - protein, 54 aa, Zea mays
  Clone ID: MRT4577_66089C.1.pep
RVDMLPRGGTGAASPQSAMHACFARRTVLSARHEYYHYLKLDKAYDFRILFMSL

SEQ ID NO: 332210 - protein, 48 aa, Zea mays
  Clone ID: MRT4577_6608C.1.pep
RTSRRPPSDWIGATSGLGWNPSLGRLGSEVSDEVETTDEETWSGSALP

SEQ ID NO: 332211 - protein, 117 aa, Zea mays
  unsure (1)..(117): unsure at all Xaa locations
  Clone ID: MRT4577_66090C.1.pep
GGGPGAGGGYGGGAGGGYGXGAGGGAGGGYGGGAGGGAGGGYGAGAGAGYGSAPGAGSSSSSNNVIAAHAAVCSAAGACISVYHMCIYKTLGDDLVSRSVIIIPFARQNRCAEMLPS

SEQ ID NO: 332212 - protein, 282 aa, Zea mays
  Clone ID: MRT4577_66091C.1.pep
MMTLLKTYNHNDKQHQFSLPKRNFVTYAVYALIAVALLYLFVDPAAPPAAGSGATAASSTTTTKPSSSLPPSPYYEASSPIISTSSAAAPLCDYSDGEWVPDARPPLYDGTTCGAIKDDGRSCTANGRADTGYVHWRWQPRACDLPDFSADAFLRWLRNRHVAFVGDSLARNQAESLVCLLSSRSPSPPDLAHRSADGRFRRWVFRDDSAGNATVSVFWSPFLLRGVEKSERDGVRYNQVFLDAFDERWMSELHGIDVAVLSAGHWFRIPSVYHRGGRVVGC

SEQ ID NO: 332213 - protein, 226 aa, Zea mays
  Clone ID: MRT4577_66092C.1.pep
MMTLLKTYHHHNDKQRQFSLPKWNFVTYAVNALIAVALLYLFVDPAAPPAAGSGATAASSTTTSTSSAAAPPCDYSDGEWVPDARPPLYDGTTCSAIKDDGRSCTANGRADTGYVHWRWQPRACDLPDFSADAFLRWLRNRHVAFVGDSLARNQAESLVCLLSSRSPSPPDLAHRSADGRFRRWVFRDDSAGNATVSVFWSPFLLRGVEKVERDGGRYTRSSWTRS

SEQ ID NO: 332214 - protein, 85 aa, Zea mays
  unsure (1)..(85): unsure at all Xaa locations
  Clone ID: MRT4577_66093C.1.pep
MAGKGDXPAIGIDFGTTYSCVGVLQHDRVEIIAQRQGNRTTPSXVAFTXSERLIGDAAKNQVANEPINTVFDXKRLIGRKFSDAS

SEQ ID NO: 332215 - protein, 79 aa, Zea mays
  Clone ID: MRT4577_66094C.1.pep
EEFDDAGHSMSAKDLMQDYFIGEVDLDPTPDIPEMEVFRKEQDTGFASKLKDNVVQYWAIPAAVIGISAVVAILYARRK

SEQ ID NO: 332216 - protein, 228 aa, Zea mays
  Clone ID: MRT4577_66095C.1.pep
MMPSSDGGEGVADVPRGPDGRSSPSNSSTVELDGDGGGARKAGASPSSSVRPYVRSKNPRLRWTPELHLCFLRAVDRLGGQDRATPKLVLQLMNVKGLSIGHVKSHLQMYRSKKIDGSGQVIGGGGSWRGRLHRQLQDGGQAAYSLGHLSLHHGAGQTTAASSAILSARSGAWPHWNSFHDDPSYSMLLHGGHHHLLGSNPTATTTTHQQQLKLQQLLHPLTTVLRSR

SEQ ID NO: 332217 - protein, 114 aa, Zea mays
  unsure (1)..(114): unsure at all Xaa locations
  Clone ID: MRT4577_66096C.1.pep
TRVVAKGAGKRAATPPGAAGLTQWLSQWHRELPNERPNVRRAEPPADTSDADLDADRHDPTHSSLHPLSLQLSAMTNSMTKRXLTLXVELLXRNXYQYGHTNLYHDLLNAGHDP

SEQ ID NO: 332218 - protein, 64 aa, Zea mays
  unsure (1)..(64): unsure at all Xaa locations
  Clone ID: MRT4577_66097C.1.pep
TLQKGNIKXAASSPDNIALSVTKSHRETGNVLEVFXRVQPSDKDIGAKAPKNFNIQGVWYALLE

SEQ ID NO: 332219 - protein, 57 aa, Zea mays
  unsure (1)..(57): unsure at all Xaa locations
  Clone ID: MRT4577_66098C.1.pep
RPPPPVPDTKIRIYDVGMKRKGADEFPYCVHXVSXDKEKVSSEAPQXARXARNKRPP

SEQ ID NO: 332220 - protein, 50 aa, Zea mays
  unsure (1)..(50): unsure at all Xaa locations
  Clone ID: MRT4577_66099C.1.pep
DESFVKEWKKVFWEEAGIIKAVPGXKVGKSVSNSGKWMPPASGKLPPKVW

SEQ ID NO: 332221 - protein, 543 aa, Zea mays
  unsure (1)..(543): unsure at all Xaa locations
  Clone ID: MRT4577_6609C.1.pep
AFSAWGQGLYYLYLEAVSVRKLKSHAVSDKXIQASGICHSQSSTVNDDFAVKYKEKYGTDVFRRILQSFCPSIYGHEVVKAGITLALFGGVQKNSMDQNMVPVRGDIHVIVVGDPGLGKSQLLQAAAAVSPRGIYVCGNTTTKAGLTVAVVKDSMTNDYAFEAGAMVLADRGICCIDEFDKMFTEHQALLEAMEQQCVSIAKAGLVASLSARTSVLAAANPIGGHYDRAKTVNENLKMSAALLSRFDLVFILLDKPDESLDKRVSDHIIALHXMMLIISDPTRGPEQGHILMVIRGLELXKFSSFKAXGYTQRKTRTSLHYLGNFFANIYLIQENMXPRMSKAAAAILKEFYLKLRNRSASADGTPITARQLESLVRLAEARARVDLRDEVTEEDAQDVVDIMKESLYDKYVDEHGFVDFTRSGGMSQPKQAKKFLNALNKESELQQKDCFSRTELYTIADKISLQVPDLDTLVEKMNIAGYLIQKRSGMYQLVTAPYXTMQPTRSRWRVFLNETRICTCFVCTSACSRSPDTLEGLNPFQHN

SEQ ID NO: 332222 - protein, 62 aa, Zea mays
  Clone ID: MRT4577_660C.1.pep
VPISLYLPISIFRGRERERGVKLTDDADMVWCPLKTMMSCPFAASVGFMALMIPYICYHFHE

SEQ ID NO: 332223 - protein, 453 aa, Zea mays
  unsure (1)..(453): unsure at all Xaa locations
  Clone ID: MRT4577_66100C.1.pep
MASSPRSPPAPTPEFEISRQSRLFAALSKKVIXLDELRMLAAQGXPDAAGVQATVWKLLLGYLPNDRALWPVGAEELAKKRGQYAAFKVFVAHMVSSLWPPMXLDRSSPKNRDPXPEFAKVQTEGPXNVNAEHVHNGFLHRSEXTREEHPLSLGKTSAWNQFFEYSEIMEQIDRDVKRAHPDMHFFCSDSSFAKSNQESLKNALLIFAKLNAGIGYVQGXNEILAPLFVFRSDPDDKNAXGVRDCFYQVLSALHIVLLIAEAFLFSLVITIFCCIMLPGILVXFAEAGSLFCFVELVSGFRDNFCQKLDNSAVGVRATLAXAKLSQLVAKHDGGLQQHLEITTXKWIPLPLTEEFNFADTIHIXWDTVLSDRDSLQDTLLRICCXLVRKRLLAGDFTSILELLQNYLPANISHHLYSAHKLQCTDLFLRPKRCCVCSAGLWLSPSSIAKGIQN

SEQ ID NO: 332224 - protein, 95 aa, Zea mays
  unsure (1)..(95): unsure at all Xaa locations
  Clone ID: MRT4577_66101C.1.pep
TEVNPQFYAFRWIPLPLTQEFNFADTIHIXWDTVLSDRDSLQDTLLRITCQRTSAITSTPPTNCSAPISFAPEALLCLFSRVWLSPSSIAKGIQN

SEQ ID NO: 332225 - protein, 164 aa, Zea mays
  unsure (1)..(164): unsure at all Xaa locations
  Clone ID: MRT4577_66102C.1.pep
QIQSNKKGKANTATHGHRREEETQPPKRRKKERKRERRRDPASKKKTDRTGPRGGENQQTGRPRGGNPARPQPGPKQGQTRAPGETASQGQPPTTHQPKAKRNKPGEPRGGTKGNKLXEVRGPHSGGXNTGNRGGKEKKKTXQKAGRRTGGSGGPSPLKGGPGR

SEQ ID NO: 332226 - protein, 186 aa, Zea mays
  unsure (1)..(186): unsure at all Xaa locations
  Clone ID: MRT4577_66103C.1.pep
SCLESLLKFAEAGSLFCFVELVSGFRDNFCQKLDNSAVGVRATLAXAKLSQLVAKHDGGLQQHLEITTEVNPQFYAFRWIPLPLTQEFNFADTIHIXWDTVLSDRDSLQDTLLRICCXLVRKRLLAGDFTSSLKLLQNYPPTNISHHLYSAHKLQCTDLFLRPKRCCVCSAGLWLSPSSIAKRIQN

SEQ ID NO: 332227 - protein, 36 aa, Zea mays
  Clone ID: MRT4577_66104C.1.pep
PLGYSFDRAVYFSHQGEDDKKERFKGQASGPQSNVT

SEQ ID NO: 332228 - protein, 91 aa, Zea mays
  Clone ID: MRT4577_66105C.1.pep
PQLLSTPSAVPQCVLKLERDTLMGGHGCWQSSTLTSQPHGGIVLLFHDVNVLSGSPRSAQRPGRCWETGPGLSMAAARRVQAMAKVPATGR

SEQ ID NO: 332229 - protein, 76 aa, Zea mays
  Clone ID: MRT4577_66106C.1.pep
GSSIAAALHSFWPRFVFSGGCGVPRWAGLGTHHKTADGGCLQITAHICPLAYSQLVRVDANQSPAPLRPRIPRGER

SEQ ID NO: 332230 - protein, 89 aa, Zea mays
  Clone ID: MRT4577_66107C.1.pep
ACHASIRCRYEDKSFCKQGNMLVLSSQMLQKTCNAKMNLDGHLFKGCSIQILFSNSGLAPNKLDNLASVAEFTRSEMYSSDGCDNHGIG

SEQ ID NO: 332231 - protein, 220 aa, Zea mays
  unsure (1)..(220): unsure at all Xaa locations
  Clone ID: MRT4577_66108C.1.pep
MHIHDVLIVGAGPAGLAAAARLREHTPSATFTDDEHQRYHWIKKHGRKMNIKNYRKNKDSLPTPPSTPSNSDCGCEHQESSEEAIDMLVLDADGADWMSKWKRLFKTFHIDYLRSPMFFHVDPADRDGLLAYTYEQERDKDIMALXNIAGKEVSKHKKKKKLKQGRFLGGTPDVDRRIEKTTLRQRRICSMHTAXKVVRAVSPWQRYDPSRKRDGYSIRR

SEQ ID NO: 332232 - protein, 138 aa, Zea mays
  Clone ID: MRT4577_66109C.1.pep
SSSAVDKRDDQEVSVKTKPPAKNFLEQRDVGYRGTCCAGGVLHILAENAITPAEHGDETWEPLGITARRRRRRRVRGTYAPPPPALMGWGRNGWVGQHRRARGVEEDGEDEPTRAWRTRTTGWVASRIFPPPELPVSP

SEQ ID NO: 332233 - protein, 66 aa, Zea mays
  Clone ID: MRT4577_6610C.1.pep
NPFVSILRYSDYRFHDDYERIWQDRRMSIKQPAKFATHKGEADLLWRLSIVTVAALVSKEAPRVVV

SEQ ID NO: 332234 - protein, 69 aa, Zea mays
  Clone ID: MRT4577_66110C.1.pep
NMDDFSSFLSAWNGYTLLIRYASSKLSSTDEPVSPPTQSVLTAVEPGALDHFYQQSKRKKSPNLCRAQS

SEQ ID NO: 332235 - protein, 70 aa, Zea mays
  Clone ID: MRT4577_66111C.1.pep
IQAHAWGLLPVATPYSVLPRDLAQGQAVHVRLALGHQVSCSVPTRALAASARTLRVVPRREQAHQEKDVR

SEQ ID NO: 332236 - protein, 86 aa, Zea mays
  Clone ID: MRT4577_66112C.1.pep
IYHDCGRQLRLMRYYIRKGLGHHPRRGSESERVRKACRNFRHYHTQSTNWSSLGIRTVVETYLSHLRDSFARGRDDNTRVNCRSNS

SEQ ID NO: 332237 - protein, 81 aa, Zea mays
  Clone ID: MRT4577_66113C.1.pep
QKTNIKRKKPWGVYGPFLCAAAKCLYDRLKLFPGFLSPSMRPLLQNNKRVLPPPPNKRKSSEGLSLSLSLSLWVICICNLM

SEQ ID NO: 332238 - protein, 134 aa, Zea mays
  Clone ID: MRT4577_66114C.1.pep
IGTLEAGREIFLSCPAKGDLHKGGLEERRRTYPTRPAALSSLPPPRSSDPIPQCLTAVPLPAPTTPALPPRRRPSLSPLMAARSTPMFLATTPPPSLLRNLAPAASRAAPLLPRNRASSPAVVGASLAAKPRDR

SEQ ID NO: 332239 - protein, 83 aa, Zea mays
  Clone ID: MRT4577_66115C.1.pep
CYLCLYKQVATCCSDSPEQTCALPLAVHFSLLQCAWFSLTDHRIVSTGKLVLREHSSGASRIRGLQRSWCFWSSTARSHPRAE

SEQ ID NO: 332240 - protein, 134 aa, Zea mays
  Clone ID: MRT4577_66116C.1.pep
RNVFFLLYMRDSLILISEQIKALLHIMIIVQIDKITGSPMEKKNIYYFRENKSGQIELSSAQTITGHACSIHPSMVLGPTLNLSISRFRRQRSTHNSWRRSPIPWEQRSCPAGRRRQISQQGRRSSSLLQEHRR

SEQ ID NO: 332241 - protein, 123 aa, Zea mays
  Clone ID: MRT4577_66117C.1.pep
EIDPVLSSKGDLDWRRRTYPTRPAALSSLPPSSSKLRSDPIPQCLTAVPLPAPTTPALPPRRRPSLSPLTAARSTPMFLATTPPPLLRNLAPAASRAAPLLPRNRASSPAVVGASLAAKPRDR

SEQ ID NO: 332242 - protein, 40 aa, Zea mays
  Clone ID: MRT4577_66118C.1.pep
RPWLVWQEAGYYSSAPAAKSGAGGQGSSAAPKESGFFATW

SEQ ID NO: 332243 - protein, 54 aa, Zea mays
  Clone ID: MRT4577_66119C.1.pep
KACISVHGIKCENNMPRCSQELICTINIIKPSERPRLSILCLFFVSLHSVYKIK

SEQ ID NO: 332244 - protein, 91 aa, Zea mays
  Clone ID: MRT4577_6611C.1.pep
IEPLAPYMHNRAHQGARKLFLFLAPEDPAREVTAGTFSRQAHERLYIPLFPRSSQKKGFLCVNPTLDPYYSGHEVTTSILLLLSLLFLQQS

SEQ ID NO: 332245 - protein, 77 aa, Zea mays
  Clone ID: MRT4577_66120C.1.pep
SLPTRRVKTKRSIHVCRSHAGNRPPAHLPAPAPASAKRRRSTDKLDFQPGHGPAFFSDGVARQTGLPVGPRSPVTAG

SEQ ID NO: 332246 - protein, 185 aa, Zea mays
  Clone ID: MRT4577_66121C.1.pep
LGPSRPAGNPACSSLVSSSSSKLRSDPPMSDSSPAPGAYYSGPPAAPPPESKPVDGGQVNADVPGARTTYRSDPRASSILLTIPPITFLVYCNCNDLGLFGKSRLLLLLRPCCEIWRRRPAGQLRCSQGIGLLRQLLWVLLWRRNREIDRFSVGPRTMDGWMEHACPVIVCADESSICPDLFSLK

SEQ ID NO: 332247 - protein, 161 aa, Zea mays
  Clone ID: MRT4577_66122C.1.pep
RSDPPMSDSSPAPGTRSPHPSYSYMQTVKLSKHTGDAVYRLPRMLIRWPVLFVLVLLQAPTTPALPPRRRPSLSPLTTARSTPMFLVRALHYTTDPIQAFLLLTSFLILPPTTVARMCLTTLLACLARAGYYSSSVPAAKSGAGGQGSSAAPKESGFFASW

SEQ ID NO: 332248 - protein, 159 aa, Zea mays
  Clone ID: MRT4577_66123C.1.pep
RSCPVQQGRPGLEEEDLPTRPPALSSLPPPPRSSDPIPQCLTAVQLPAPTTPALPPRRRPSLSPLTAARSTPMFLVRALPTDLIQRVSSILLTIPPPITFLVYCNCNDLGLFGKKQATTPPPLLRNLAPAARAAPLLLRNRASSPPVVGASLAAKPRDR

SEQ ID NO: 332249 - protein, 67 aa, Zea mays
  Clone ID: MRT4577_66124C.1.pep
MSDSSPAPGAYYSGPPAAPPPESKPVDGGQVNADVPGYYSSVPAAKSGAGGQGSSAAPKESGFFATW

SEQ ID NO: 332250 - protein, 137 aa, Zea mays
  Clone ID: MRT4577_66125C.1.pep
PGTSALTWPPSTGLDSGGGAAGGPTYPASSSLVSSSSSSKLRSDPPMSDSSPAPGAYYSGPPAAPPPESKPVDGGQVNADVPGARTTYRSDPRATTPPPSLLRNLAPAARAAPLLLRNRASSPPVVGASLAAKPRDR

SEQ ID NO: 332251 - protein, 82 aa, Zea mays
  unsure (1)..(82): unsure at all Xaa locations
  Clone ID: MRT4577_66126C.1.pep
LQWRRHPTCYTILHAIPDSKMKLGADFERCALAEFNRDPYELNXTYDXLYSSIWTXRLDFLEAXYRWGTPTHGEPFYYLPLW

SEQ ID NO: 332252 - protein, 107 aa, Zea mays
  Clone ID: MRT4577_66127C.1.pep
SLPSIILIVIDGNGSLDGSRSPHKHRLGLRRMRLRLDDHALAPVAFASTLIIVILPHPQVFCLWARGRMLMLHMDTLRYHDNIPLLVYVYLDGEVASCSSPRRVRVW

SEQ ID NO: 332253 - protein, 163 aa, Zea mays
  Clone ID: MRT4577_66128C.1.pep
QPSISLTPGALPPMQCAVAGALSTQVRNPFSVFPSLLPRRYCGPLLVARRGQRARGRGNPASVRVPLARPWAWPCGRRGSGAAALHRLARVPAHGPGAAERRLRRGHGKQPWRAQPVAPPRPTAAHRWRAPTPGGQRWPFPCSWIFFSFVQLPDHAIGRDRRR

SEQ ID NO: 332254 - protein, 314 aa, Zea mays
  Clone ID: MRT4577_66129C.1.pep
MDPRETMGRCMDSSKGLGFTEVAKARASTNKVVCCHFSLDGKLLATGGHDKKVVLWFTDVLKRKSALEEHSSLITDVRFSPGMTRLATSSFDKTVRVWDADNPDYSLRTFTGHSASVMSLDFHPNKEDIVCSCDSDGEVRCWSINNGSCVTCVRVFNGGATRLRFQPRQGKYLAAASEKGISILDAETLQVCRTPLQGHVQIIQSVCWDAAGNYLASVSEDSVRVWSFTSGNYIECIHELICSGNKFHSCVFHPNYPNLLIIGCYESLELWDIREKNTVTISNAHDGMVAALAASSASGLVASVSHDQLVKLWR

SEQ ID NO: 332255 - protein, 102 aa, Zea mays
  unsure (1)..(102): unsure at all Xaa locations
  Clone ID: MRT4577_6612C.1.pep
YIHLQGIEHSDVKPYNILYDGEFCSKDVNFGMAREEXHTDXLIGDEXTFXRWMAPYMYKHNPYFRKDDMNIYGLILREIFIPSXPYKNITSIHAPFSFVYKN

SEQ ID NO: 332256 - protein, 54 aa, Zea mays
  Clone ID: MRT4577_66130C.1.pep
ITKLFKSKCQMSRLKMLPTEGTANTIVSGGDKYTPPRKCQNPVMSYNPGLNREK

SEQ ID NO: 332257 - protein, 63 aa, Zea mays
  Clone ID: MRT4577_66131C.1.pep
LSAKIRKGPPGHGSLGIEDRLPFFATVQSFSFLGLETVRPHKIVLYVWHSPRKWVGSPSFIRA

SEQ ID NO: 332258 - protein, 104 aa, Zea mays
  unsure (1)..(104): unsure at all Xaa locations
  Clone ID: MRT4577_66132C.1.pep
GAKVEGGGKCVVSTTXRYGPAYSTRVKFEDNAWPVFPANSSDPMGAADPVWTESFWNTIGLRVYPVQDPAYDWLIFLAGLGITAASYCAVPFGRAYISKVAKLD

SEQ ID NO: 332259 - protein, 218 aa, Zea mays
  Clone ID: MRT4577_66133C.1.pep
MNSPTRLIEQVLPFARETVDMVLDGLASMPMIISPSDLDEFSNFLKVMCQQARRWISDEGPIPSIFYSRESQHGDTWIWRFHIMSMYMLKRLDECLKTLEMDLPLSSESIGVMESQTIWAARSHILVMLTELDFIAAIYEDVGHNLQLVLLAHKAPLNALVRCSKRNERLHWLVKHKNLLCFEARRSLVFMMLPEGKDDFGELHEMLIDRSHLLDESF

SEQ ID NO: 332260 - protein, 563 aa, Zea mays
  Clone ID: MRT4577_66134C.1.pep
MNSPTRLIEQVLPFARETVDVVLDGLASMPMIISPSDLDEFSNFLKVMCQQARHWISGEGPMPSNLYSRESEHGDTWIWRFHNMSMDMLKRLDECLKTLEMDLSLSSKSVGVMESQTTWAARSHILVMLTELDFISAIYEDVGHNLQLVLLAHRAPLNALVRCSKRNERLHWLVKHKNLLCFEARRNLVFMMLPEGKDDFGELHEMLIDRSHLLDESFNYIAQAKQTELRGGLFMEFKNEEATGPGVLREWFCLVCQALFSSKQVLFSPCPEDKRRFYLNETSAVDPLHLKYFTFAGRIIGLALMHKVQVGVVIDRTLFLHLAGRSITLEDISVADPVKYASCKKILEMDAAEIDNLYLTFSRGAHELGTEKIIDLCPGGQDISVNIWNREHYIDLLIKNIFVDSISSQLTHFTDGFADILVNPKRREEFFECLDLEDFDRLLGGSSNAINLQDWKSHTQYNGYKEKDRQITLFWKAVERMSIERQRQLLFFWTSVKYLPSDGFCGLSSKLFIYKTSDSPDRLPSSQTCFYRLCLPPYTSLKMMENQLQKITEEHVSCSFGTW

SEQ ID NO: 332261 - protein, 101 aa, Zea mays
  Clone ID: MRT4577_66135C.1.pep
IDTIKAVTWKIQMFIKQVADTHRARTYTTYNIENRTTNSRCQYACTTGKGALHGTLLDKTPVASIHWCLAKVKIPIPRPGRLPCVGRITQSDFGVETQVRT

SEQ ID NO: 332262 - protein, 126 aa, Zea mays
  Clone ID: MRT4577_66136C.1.pep
VTTRYQHFCSQKKKKQREVDAPLRVEIGVYPRYCRPDARTGECKNVESPPSQASTASSRAPSSVSCKIVHFASLSHMHAWISMACTNKARADVFFLPTCFSSKSRKRTLLVCKPPSGSNRIREVQP

SEQ ID NO: 332263 - protein, 130 aa, Zea mays
  unsure (1)..(130): unsure at all Xaa locations
  Clone ID: MRT4577_66137C.1.pep
LFFRIVYHIRREIVTLKLFKHPNAARLHEAVARKTMIYMVLDFVNGDELFDKIDMKGKLTKHEGGGLFQHLSYGGSYCHDRGVYHRDLRPDNVHVDRKGTIEISDFSLSAIPXHLRSDGLVHTTCGRRKY

SEQ ID NO: 332264 - protein, 80 aa, Zea mays
  Clone ID: MRT4577_66138C.1.pep
SLTMRCRITSQLRADPSAWAGSNLGPVRKYGINYRSVTVPRQDLVHPGLSLFPAQEVIQRERFRLPAPANARVEVHQVGS

SEQ ID NO: 332265 - protein, 58 aa, Zea mays
  Clone ID: MRT4577_66139C.1.pep
DFGLRPVELGGFWNCNVWLPWVIAFGLFHPTVGWLFLGGLNLCYHLLPIFLLRPDWLA

SEQ ID NO: 332266 - protein, 70 aa, Zea mays
  unsure (1)..(70): unsure at all Xaa locations
  Clone ID: MRT4577_6613C.1.pep
MQLRNIDTYIIYATTCDDGKVKPRGSNCMDLADPCAQYYVDAXLNQPNVMKTIRANTRLTYRWARCRGTF

SEQ ID NO: 332267 - protein, 84 aa, Zea mays
  unsure (1)..(84): unsure at all Xaa locations
  Clone ID: MRT4577_66140C.1.pep
SSPPYRPEPEPCKTQAMYFKNCLXRERVREXCTGVVADPACYCEVEREALIDCAPGHHCSRADKKIKIAEMNLSCMKNLKCKHA

SEQ ID NO: 332268 - protein, 154 aa, Zea mays
  Clone ID: MRT4577_66141C.1.pep
MSLVRRSNVFDPFSMDLWDPFDTMFRSIVPSAVSTNSGTATFASARIDWKETPEAHVFKADLPGVKKEEVKVEVEDGNVLVISGQRSREKEDKDDKWHRVERSSGQFVRRFRLPENAKMDQVKAGLENGVLTVTVPKAEEKKPEVTAMAIEISG

SEQ ID NO: 332269 - protein, 152 aa, Zea mays
  Clone ID: MRT4577_66142C.1.pep
MSLVRRSNVFDPFSMNLWDPFDTMFRSIVPSAASTDSETAAFASARIDWKETPEAHVFKADLPGVKKEEVKVEVEDGNVLVISGQRSKEKEDKDDKWHRVERSSGQFVRRFRLPENAKVDQVKAGLENGVLTITVPKAEEKKPEVKAIEISG

SEQ ID NO: 332270 - protein, 40 aa, Zea mays
  Clone ID: MRT4577_66143C.1.pep
VLVGLFLPPPCVLPLKAPHPCMEGSDRMLQPPLIRCHSLM

SEQ ID NO: 332271 - protein, 33 aa, Zea mays
  Clone ID: MRT4577_66144C.1.pep
LIKKPLFTLLHSKFFNKLIFIIPYFYKFLQIPL

SEQ ID NO: 332272 - protein, 152 aa, Zea mays
  Clone ID: MRT4577_66145C.1.pep
MSLVRRSNVFDPFSMDLWDPFDTMFRSIVPSAASTNSETAVFASARIDWKETPEAHVFKADLPSVKKEEVKVEVEDGNVLVISGQRSREKEDKDDKWHRVERSSGQFVRRFRLPENAKVDQVKAGLENGVLTVTVPKAEEKKPEVKAIEISG

SEQ ID NO: 332273 - protein, 152 aa, Zea mays
  Clone ID: MRT4577_66147C.1.pep
MSLVRRSNVFDPFSMDLWDPFDTMFRSIVPSAVSTDSETAAFASARIDWKETPEAHVFKADLPGVKKEEVKVEVEDGNVLVISGQRSREKEDKDDKWHRVERSSGQFVRRFRLPENAKVDQVKAGLENGVLTVTVPKAEEMKREVKAIEISG

SEQ ID NO: 332274 - protein, 88 aa, Zea mays
  Clone ID: MRT4577_66148C.1.pep
PKASGLFRNRDTSRTTIRFLQPLHCFLAIKREVIHQRRVFSSNLQHKKAAKMRTTAVLRNAARTPLIKFLGKRTTPASVDHTPHAHPA

SEQ ID NO: 332275 - protein, 171 aa, Zea mays
  Clone ID: MRT4577_6614C.1.pep
KQVHGRAVKTGHTSETEVANALISLYGKCGSIEDAKMIFSEMSLRNEVSWNTIITSCSQHGRGLEALDLFDQMKQEGLKPNDVTFIGVLAACSHVGLVEEVLSYFKSMSNVYGLNPIPDHYACVVDILGRAGQLDRARRFVDEMPITANAMIWRTLLSACKVHKNIEIGEL

SEQ ID NO: 332276 - protein, 152 aa, Zea mays
  Clone ID: MRT4577_66151C.1.pep
MSLVRRSNVFDPFSMDLWDPFDTMFRSIVPSATSTNSETAAFASARIDWKETPEAHVFKADLPGVKKEEVKVEVEDGNMLVISGQRSREKEDKDDKWHRVERSSGQFVRRFRLPENTKVDQVKAGLENGVLTVTVPKAEEKKPEVKAIEISG

SEQ ID NO: 332277 - protein, 290 aa, Zea mays
  Clone ID: MRT4577_66152C.1.pep
MASGGDLPSGFADESKSTKTEGSSNECQGVPPAAAAGLSGPFDFSSMQSLLNDPSIKEMADQIARDPAFNQMAEQLQKGAQTAGEQGMPPLDPHQYMETMQKVMENPQFMTMAERLGTALMQDPTMSSMLENLTSPTHKEELEERMSRIKEDPALKPILDELENGGPAAMIKYWNDPETLQKIGEAMGASFPFGAGSSAEPSGTEETEEEGGDDDESIVHHTASVGDEEGLKKALDGGADKDEEDSEGRTNLFILIVIKKKKKKKKKKKKKKKKKKKKKKKKKKKKKKRG

SEQ ID NO: 332278 - protein, 41 aa, Zea mays
  Clone ID: MRT4577_66153C.1.pep
MHACVGNSARGRVELEVHLWEMAGAKKLSLLTAPIPGIPAS

SEQ ID NO: 332279 - protein, 38 aa, Zea mays
  Clone ID: MRT4577_66154C.1.pep
VLSRGPDYMITRVTRYATVFCLYQRANRRTLSRLRFRF

SEQ ID NO: 332280 - protein, 323 aa, Zea mays
  unsure (1)..(323): unsure at all Xaa locations
  Clone ID: MRT4577_66155C.1.pep
EENSNIRRVFRRTSRASSXAGFSNPFDFGSMQSLLNDPSIKEMADQIARDPAFNRMAEQLQKSAQSTGEQGTPPLNPQQYMETMQKVMENPQFMTMAERLGNALMQDPAMSSMLETFSSPSHKEQLEERMSRIKEDPAMKSILDELENGGPSAMMKYWNDPDTLQKIGEAMGASFPFGAGSSAEPSGTEETEEEGGDDDESIVHHTASVGDEEGLKKALDGGADKDEEDSEGRRALHFACGYGELKCAQILLEAGAAVDALDKNKNTPLHYAAGYGRKECVDLLLKHGAAVTLQNLDGKTPIDVAKLNNQDEVLKLLEKDAFL

SEQ ID NO: 332281 - protein, 79 aa, Zea mays
  Clone ID: MRT4577_66156C.1.pep
PPITKEAPPVAIGTLHTSGLNADTIVALHAQVVGVHNIRSLVPVVLDLASSHYPRWQAQVVLTLRRFGLADHVLDDSLP

SEQ ID NO: 332282 - protein, 110 aa, Zea mays
  Clone ID: MRT4577_66157C.1.pep
RPGLPPPRRWCCLLSHPRTRETLSLLCQRCRVLPHTYGVVPKTPVLPLQASAVTIIDLWTSVSGGHGSTPPVSTRFVSPSWRSDDAIDLRALQSRLPQAAKESLHSILVL

SEQ ID NO: 332283 - protein, 165 aa, Zea mays
  unsure (1)..(165): unsure at all Xaa locations
  Clone ID: MRT4577_66158C.1.pep
METMKATRTLVQPVYSTPHPLAGEKVPLTVFDRAAFDIFVPTVLAYPTPAPSNEALKDGLRRAVALYPHLAGRLAVDDRGRRFLHVNDEGVLVVEAAISADLSGVLAGGMTDANVVVDELYPXSQRTNVGAALLQIKLNRCRCGGLXVXRIICHQHVADGHSMSA

SEQ ID NO: 332284 - protein, 236 aa, Zea mays
  Clone ID: MRT4577_66159C.1.pep
MAPLPFLLGFLLGALALAAVEAAAILLLLRRLRRSQAAAGDALPAADELPGERPFPYEKQGFLWILEPEKMPKLSNDRLSAGGPRETKDKKNIVEVFPAKKMAKIKGNSLCLSGPDGSQATIELLNCTVLAVSASSMPSRKWAKRFPVKLESKDNEIYNGSKVCYLYTDTSWEKESWCKALRIAATADKEKLNWHAKLSEKFLNYISSLNSEYPCFLKPDILSGEDHEAMDKTSKT

SEQ ID NO: 332285 - protein, 50 aa, Zea mays
  unsure (1)..(50): unsure at all Xaa locations
  Clone ID: MRT4577_6615C.1.pep
GPEASKVRRFIEXDITARRLLQLTAILGMCMLIGDGILTPAISILSAVDG

SEQ ID NO: 332286 - protein, 105 aa, Zea mays
  Clone ID: MRT4577_66160C.1.pep
CPGSRYGVHTVLLEGSTDGNNTSNGRAKSVDYPLTKKLGRFSTRQGHTYRGGSYRDAVLGADPEARRSSDAARARASIGWGEEGHAAAGVAPADWRLNSTTHYRV

SEQ ID NO: 332287 - protein, 187 aa, Zea mays
  unsure (1)..(187): unsure at all Xaa locations
  Clone ID: MRT4577_66161C.1.pep
MADKGDGPAIGIDLGTTYSCVGVRQHDRVEIIANDQGNRTTPSYVIFADSERLIXDAGNNQVGMNPINTVFDAXRLIGRRVSDESVQRDIKLCPFKVISGPGEKPMIVVQHKGEEKHVAAEEISSMVLIKMXEIAEAYLVSTIKNAAVTVPAYFNDSQRQVTKDAATIAELNELRIIDXPTAAAIAY

SEQ ID NO: 332288 - protein, 37 aa, Zea mays
  Clone ID: MRT4577_66162C.1.pep
APYLRSCGTSLTALRCMCCLPKSSSLRPALFFSNYVL

SEQ ID NO: 332289 - protein, 139 aa, Zea mays
  unsure (1)..(139): unsure at all Xaa locations
  Clone ID: MRT4577_66163C.1.pep
MAGKGDGPAIGIDLGTTYSCVGVWQHDRVEIIANDQGNRTTPSYVAFTDSERLIGDAAKNQVAMNPINTVFDAKRLIDRRLSDFXSRPHIKLWPFKVISAPGENPMIAVHHKGEEKQLAAEETSSMALIKMREIAEPYL

SEQ ID NO: 332290 - protein, 141 aa, Zea mays
  unsure (1)..(141): unsure at all Xaa locations
  Clone ID: MRT4577_66164C.1.pep
MAGKGDGPAIGIDLGTTYSCVGVWQHDRVEIIANDQGNRTTPSYVAFTDSERLIGDAAKNQVAMNPINTVFDAKRLIXRRFFDASAQSDIKLWPFQVNSGPGEKPMIVVQPQGXEEKQVAAEQISSMVXLIHMPEIAEAYP

SEQ ID NO: 332291 - protein, 185 aa, Zea mays
  unsure (1)..(185): unsure at all Xaa locations
  Clone ID: MRT4577_66165C.1.pep
MAGKGDGPDIGIDLGTTYSCVGVWQHYRVEIIASDQCNRTTPSYVSFTDSXERLIGDADKYQXVAMNPINTAFDAKRLIDRRIRGASVQSDIQLSAFNDISGPGDKPMIVVQHXGEEKQFAAEEISSMDLIKMREIAEAYLGSTINNAVVTVPAYFNDSQRQATKDAGXVIAGLNVLRIINESTA

SEQ ID NO: 332292 - protein, 36 aa, Zea mays
  Clone ID: MRT4577_66166C.1.pep
GKKVKGPGVRDMESETVTLRVTNTIAVFNGPIQGEC

SEQ ID NO: 332293 - protein, 138 aa, Zea mays
  Clone ID: MRT4577_66167C.1.pep
MAGKGDGPAIGIDLGTTYSCVGVWQHDRVEIIANDQGNRTTPWDVGFTDSERLIGDAAKNQVAMNPINTVFDAKRLIGRRFSDASVQSDIKLWPCKDIAGPGEKPMIVAQHKGEEKQFAAEEICSMALIKMRENAEAY

SEQ ID NO: 332294 - protein, 165 aa, Zea mays
  Clone ID: MRT4577_66169C.1.pep
MAGKGDGPAIGIDLGTTYSCVGVWQHDRVEIIANDQGNRTTPSYVAFTDSERLIGDAAKNQVAMNPINTVFDAKRLIGRRFSDASVQSDIKLWPFKVISGPGEKPLIAAQHQGEDNHLAAEQISSMLLITPRATAEAYLWSTIKNAVVTVPAYFNDSQRQGTKDA

SEQ ID NO: 332295 - protein, 93 aa, Zea mays
  unsure (1)..(93): unsure at all Xaa locations
  Clone ID: MRT4577_6616C.1.pep
LQLKLCDFAVGTFCFLSYGVAESCTVSNSENKRTLPAWMLKATSGNQAAKTADQNKQALESADIGALDQSKLIKRNNRRPLXNLDSVATGELG

SEQ ID NO: 332296 - protein, 85 aa, Zea mays
  Clone ID: MRT4577_66170C.1.pep
GEEVHPLWAKAQGSQEPIDSMNRSMLENNSLVRQLLSFSQGQVPPSQVWLTTIAPTALWLVQRLVTVGPNGKFFFRVQLSKGLMP

SEQ ID NO: 332297 - protein, 59 aa, Zea mays
  Clone ID: MRT4577_66171C.1.pep
WSRKGRSILAQVTWLDPVPSPNHCCLPGCLFTVPMWQQSRQRQKWTYCREQYRYMETIM

SEQ ID NO: 332298 - protein, 195 aa, Zea mays
  Clone ID: MRT4577_66172C.1.pep
LETLVPCSITSTPTIPSRAREPLSEKRDGRKGDGPAIGIDLGTTYSCVGVWQHDRVEIIANDQGYRTTPSYGGFTDSERLIGDAAKNQVAMNPINTVFDAKRLIGRRLIDASVQRDIKLWPFKVISGPGEKPMIVVQHKGEEKQFAAEEISSMVLIKMREIAEAYLGSTIKNAGGTVPAYLNDSQRQVTKDAWGD

SEQ ID NO: 332299 - protein, 59 aa, Zea mays
  Clone ID: MRT4577_66173C.1.pep
MVKYSQEPVYPTKGANAIGRDLRVHFKNTRETAFALRKLPLTKAKRYLEDVISHKQAIP

SEQ ID NO: 332300 - protein, 157 aa, Zea mays
  unsure (1)..(157): unsure at all Xaa locations
  Clone ID: MRT4577_66174C.1.pep
MAGKGDGPAIGIDLGTTYSCVGVWQHDRXVEIIANDQGNRTTPSYVAFTDSERLIGDAAKNQVAMNPINTVFDAKRLIGTRVSDASVQRDIKLWAFKVISGPGEKSMIVVQHKGEEKTVAAGEISSMGLIQMPEIAEAFPGSTIKNGWVTEPGLFND

SEQ ID NO: 332301 - protein, 238 aa, Zea mays
  unsure (1)..(238): unsure at all Xaa locations
  Clone ID: MRT4577_66175C.1.pep
MXXKGDXPXIXIDLXTTYSCVXVWXHDRVEIIANDQGNRTTPSYVAFTDSERLIGDAAKNQVAMDPINTVFDAKRLIGRRFIDVSVQSDIKLWXFKGISGPGEKPMIVVQHKGEEKQFAAEQISSMVLIKMREIAEAYLGSTINNAVVPXPAYFXNDSQRQATKDAGEIAXGLKVLRILNXESTAAIIAYVLDKKATNVREXKNVPLFDLGSCNLCCSLLPIEKESFEDKAGDPPSSG

SEQ ID NO: 332302 - protein, 61 aa, Zea mays
  Clone ID: MRT4577_66176C.1.pep
SEHPQTYLLLLPSTDLAALSSKITGPPCVPCPICERNNCVALVHKVYMLLAPFYYSSLDQL

SEQ ID NO: 332303 - protein, 50 aa, Zea mays
  Clone ID: MRT4577_66177C.1.pep
VCAPVIFGPAPHVCTEAGEMQGPSFCSRAYMAHCRCVCSFIELVFGPEML

SEQ ID NO: 332304 - protein, 70 aa, Zea mays
  unsure (1)..(70): unsure at all Xaa locations
  Clone ID: MRT4577_66178C.1.pep
MERRSSSGAGSCLGLLAVPLVSTSVILVSYRLNGRLXADLRVIIPGKGNGPPDKGRRRTRKTRKVPFPAN

SEQ ID NO: 332305 - protein, 856 aa, Zea mays
  unsure (1)..(856): unsure at all Xaa locations
  Clone ID: MRT4577_66179C.1.pep
DDVKGEGLYLLNQLTCHLTCNAANDAMGDKIDEQCPVMEGNLSDTNKFVDSNPVVSEKAMEPNECYITMAISRHPFLRRWILSRYKKLCDSCKPAVVSEVSSCLKVLGSLSEPSDDKSHTGNESSVLEKLDNNVRENMRPDELISSSEQGALAKTESVDNYGNKFSQNKNVDMVRSDNQKSDELTDAKLDDFKGGTVVSDAQHQGSRSDLLMPKSVYDSAGGSTSLTSPGQHFGRAKHLFSEPFDIYGTYVARDVISVSKELWVGSLGNRATEALVRSKFEEFGPLVNFLFYPSRKFSLVEYRNILHAVHACGYMQGSSIWGGFLQVKYLDRLIGSKGVIRGIAIGESRHVYVAKVKNKKDKDEVFDDLKMAGLKWPSGITDIPGENALLLEFETAVDAATAKFYIRHQARPNVCSRDMNLPGHQLLVQNIDHSVPDIDLINAFSQFGEVIRWQINRADSNCFIVYRSQDAAARAKSHLHGARFGLKSITTRPRTYSAGSVHDKTVSPVAPLLGQSVPDNSVRHEIRNPXSQDIMQDMQHQGIDLFMXPPPNTSRAPQGNFPCPPVSTHHSSVMPPPPIQTSFVRPMYPGPGSPWENTTPNPPPFSHVSPRMMPGSNFRVNPASLPFVPSCVTPVSQLPGGSAQHSEKMPPSLPLPTVAPPPFTPLDMPPTHPPPLPISQPPSVPPPPNSPPPQPFADSSDSQKPSSHPQWQGPLLKSGLHYCRIYASRIELDACRYENTVSEPAEWPSALDVTKRTAFQHVKTTFNNTPPNKREVCRLVPCSNGDQRGFRDFISYLVQKECAGVIRIPAVKAMWTRILFILPPTSDACGMVGIPPLPADTMIVVTLPKETTVEAS

SEQ ID NO: 332306 - protein, 96 aa, Zea mays
  Clone ID: MRT4577_6617C.1.pep
KGKCCRFLFFSQNRTLFLPFHTIQGEIPDTSGNIKNLPKKKKKPNPPLLAGQSSTFLGWRRPYPGPPPKLFFAFPAPFPLGIPTTRGPLNWLGANF

SEQ ID NO: 332307 - protein, 35 aa, Zea mays
  Clone ID: MRT4577_66180C.1.pep
PSFYTCAQAHTFGAFLNHKALTHPTNHLPLNIYFS

SEQ ID NO: 332308 - protein, 92 aa, Zea mays
  unsure (1)..(92): unsure at all Xaa locations
  Clone ID: MRT4577_66181C.1.pep
MQVEWNEDEVFNFLVNYXXGKMLVSSYRETSMQSFQVGSISDDSSASSAATVPIGAALGIALASCTFGALACFWRTQQKNRKYYHLRFLKKI

SEQ ID NO: 332309 - protein, 520 aa, Zea mays
  unsure (1)..(520): unsure at all Xaa locations
  Clone ID: MRT4577_66182C.1.pep
MAASTAAARRLLLALAVLAACLGSAPHGAVALRSLGVGGAKAADGDAAVDLDASNFTAFLQTSPESFAVVEFFAHWCPACRNYKPHYERVAKLFNGPDAAHPGTVVMARVDCASKVNVDLCNKFSVDHYPYLVWGPPTKFNLVQWKPKQENSELELIDDGRTADRLLKWINKKMGSSFNLDDKKYENESMHPKNTSDPEQIVRAIYDVEEATSHALQIILEHKMIKPDTRDSLISFLQILVAHHPSKRCRRGSAELLIDFDDHWHTNLSLSLEDSTTLLKGAGEKVCGNGVPRGYWIFCRGSKKETRGFSCGLWVLLHSLTVRIGDGESQTTFTSICDFIHNFFICEECRTHFYEMCXLPFTCSVSVPFKSARDLALWLWTAHNKVNERLMKEEKELDNADPSFPKIIWPPKQLCPLCYRSSSRTADGAMQVEWNEDEVFNFLVNYYGKMLVSSYRETSMQSFQVGSISDDSSASSAATVPIGAALGIALASCTFGALACFWRTQQKNRKYYHLRSLKKI

SEQ ID NO: 332310 - protein, 95 aa, Zea mays
  unsure (1)..(95): unsure at all Xaa locations
  Clone ID: MRT4577_66183C.1.pep
NLQQKFFTKIGPPLIKQMVGNPFAFFKKGFPLNQIICXNFVGALQKGHKFFNPWEGGNPLVAPFLKKKKFFPKNQFFLKKPFLGRNQPMVGGAIF

SEQ ID NO: 332311 - protein, 39 aa, Zea mays
  Clone ID: MRT4577_66184C.1.pep
ARNCRSGIVVRLSVKVILPGPDRSRRSAWGGLAKRTTPR

SEQ ID NO: 332312 - protein, 73 aa, Zea mays
  Clone ID: MRT4577_66185C.1.pep
ICVCEKVTRVRLAPGRPVRPILCNIIVKSCWIIIIYQTIYVVLIMIGQSYSTCVTLPMRTLKLGKSRGEIIYL

SEQ ID NO: 332313 - protein, 83 aa, Zea mays
  Clone ID: MRT4577_66186C.1.pep
GECICHRPSDCTNKVDNSRWYHSIGSCSSYGSRSQVGDPSFNVEGMNVQGMISIVDVRVSDAMIVVVSNGIASNRRGRYKLVT

SEQ ID NO: 332314 - protein, 57 aa, Zea mays
  Clone ID: MRT4577_66187C.1.pep
RKIPFFKHDHHNQSAPPTSHPNHTFNIFCHTNQNYCLTTLNNTTILSPINPKYYHQH

SEQ ID NO: 332315 - protein, 155 aa, Zea mays
  unsure (1)..(155): unsure at all Xaa locations
  Clone ID: MRT4577_66188C.1.pep
SSRIHAATNREDELLVLLHPSNANHKKLPTPPPKRHLGINMVDGRTKLVVYTLCFREAVEAPEPAVSGDSAAPQVLHSCGTRDIQADHCLDRGAARAGVARDCHRVRLDPRLRWSMDLRRAASDEDGQVATSSTSWVRKSKFFFIFFXGRPRGTQ

SEQ ID NO: 332316 - protein, 556 aa, Zea mays
  Clone ID: MRT4577_66189C.1.pep
MSNSKQHDAADDGGIPAPEAPAKRPPLNKYALACAVLASMNSILLGYGTRTHDAYNSMHPLAVAICSTRTCASCYLYADVSVMSGAQLFMKQDLKITDTQIEILAGIINIYSLVGSLAAGRTSDWLGRRYTMVLAAAIFFAGALIMGLAPSYTILMLGRFVAGVGVGYALMIAPVYTAEVSPTSARGLLTSFPEVFINTGVLLGYVSNYAFHGLPVHLSWRVMFLVGAVPPIFLALGVLAMPESPRWLVMQGRIGDARRVLAKTSNSPAEAEERLADIKNAIGIPDGVGDNDDDVVVVARRNKGSHGEGVWRDLLIRPTPPVRRILIACLGLQFFQQASGIDSVVLYSPRVFEKAGLRSNNNSLGATMAVGATKTLFILVATFFLDRVGRRPLLLTSAGGMVVSLVTLASALRAIDRLPEGQATSLAGVSIAAVLTFVASFSIGMGPIAWVYSSEIFPLRLRAQGCALGTAMNRVMSGTITMSFISLYKAITFAGSFYLYAGIAAAGWLFMFFFLPETRGSNLEDTEKLFGGGDHDEDKEDGHDAQKSTELSSSQQ

SEQ ID NO: 332317 - protein, 73 aa, Zea mays
  Clone ID: MRT4577_6618C.1.pep
MAATAGCGGGGGAKAAVTEQIAQAVRSTSNLLQLMEHTSPVQVHLAKLPKNLLEKASFAKNTERVLHQLPHVI

SEQ ID NO: 332318 - protein, 320 aa, Zea mays
  Clone ID: MRT4577_66190C.1.pep
MGILALITGKAGASGFGSASTAEHVTDGADASRLTVAITGGASGIGLETSRVFALRGAHVVIAARNTEAASEARKTIMEKNPTARIDVLKLDLSSLKSVRAFVDQFNSMKLPLNILINNAGVMFCPFQLSKNGVEMQFATNHLGHFLLTNLLLDTMKATAKSTGIEGRIVNLSSVAHHHTYPKGIDFDNLNDEKIYNDKMAYGQSKLANLLHAKELSRRLKEEGANITVNSVHPGLIMTNLMRHSFVLMKVLQVATYILWKNVPQGAATTCYVGLSPQLKGVTGKYFADCNVEKTSKLARSEELAKQLWDFSEELIKSAK

SEQ ID NO: 332319 - protein, 414 aa, Zea mays
  unsure (1)..(414): unsure at all Xaa locations
  Clone ID: MRT4577_66191C.1.pep
MGILALITGKAGASGFGSASTAEHVTDGADASRLTVAITGGASGIGLETSRVFALRGAHVVIAARNTEAASEARKTIMEKNPTARIDVLKLDLSSLKSVRAFVDQFNSMKLPLNILINNAGVMFCPFQLSKNGVEMQFATNHLGHFLLTNLLLDTMKATAKSTGIEGRXVNLSSVAHHHTYPKGIDFDXSPVAITGGASGIGLETSRVFALRGAHVVIAARNTEAASEAXRPSWRRTQRHVLMFXARRQVPQVCLGLCGPAQLDETPSKXLINXRRHGLPFSTVXDEKIXXDKMAYGQSKLANLLHAKELSRRLKEEGANITVNSVHPGLIMTNLMRHSFVLMKVLQVATYILWKNVPQGAATTCYVGLSPQLKGVTGKYFADCNVEETSKLARSEELAKQLWAFSEELIKSAK

SEQ ID NO: 332320 - protein, 159 aa, Zea mays
  unsure (1)..(159): unsure at all Xaa locations
  Clone ID: MRT4577_66192C.1.pep
APSCAGCGQPSPMFQPLRHQCSHQQIWMMDVQSVGQQFXMIIQFXRVXSASSSLYEPAFMHQPQQLLAAQGLNPMSLMMALTPPALGGLSQFPLPRFRPNPCGVPAPLPPYLWFLVFGQSPPPLFSLWIYVITPSPHPHFYVWYAPSHMHGHNKVLVLM

SEQ ID NO: 332321 - protein, 405 aa, Zea mays
  unsure (1)..(405): unsure at all Xaa locations
  Clone ID: MRT4577_66193C.1.pep
MPGGASGIGLETSRVFXLRGAHVVIAARNTEAASEARKTIMEKNPTARIDVLKLDLSSLKSVRAFVDQFNSIKLPLNILXTLFTSCSCLFFIFIYMKVSFDFVESIXHIRIITFSACFFSFIYMKVSFACFFFHIYESFRLFXAFLFALDQGLRESFSVPXNNAGVMFCPFQLSKDGVEMQFATNHLGILSLTAXLLEIVFLSGHFLLTNLLLDTMKATAKSTGIEGRIVNLSSVAHHHTYPKGIDFDNLNDEKXCAFMVLLCRNCLLIELQVMIFYXCRYNDKMAYGQSKLANLLHAKELSRRLKEEGANITVNSVHPGLIMTNLMRHSFVLMKVLQVATYILWKNVPQGAATTCYVGLSPQLKGVTGKYFADCNVEKTSKLARSEELAKQLWDFSEELIKSAK

SEQ ID NO: 332322 - protein, 74 aa, Zea mays
  unsure (1)..(74): unsure at all Xaa locations
  Clone ID: MRT4577_66194C.1.pep
WDLLHELQLHMDEGAPGRSCGICEYCVMERGMTFALYLVKSSXQMDTPTGEDYFDLLPCVVLRHTTAPTTLGSG

SEQ ID NO: 332323 - protein, 82 aa, Zea mays
  Clone ID: MRT4577_66195C.1.pep
GRVTIRRPQKRNFSLEKKFLAKPKRGILHKGKGGFLRGGFGAQNHKGAPGEKTPWFSIGKARGNSFMGPSGTWATKPTLNVW

SEQ ID NO: 332324 - protein, 86 aa, Zea mays
  Clone ID: MRT4577_66196C.1.pep
PTGRSRVIKKNRNERIKPKQQSQLACTTSPYGVHLSCMVCLNCKIPIVGGLPLPKVLKTLRCYLSLSIFCVSRLNKGNLLRSRPSS

SEQ ID NO: 332325 - protein, 41 aa, Zea mays
  Clone ID: MRT4577_66197C.1.pep
LVYYEPQFVSLRACSFLLEQTRINSKSLKLIVIIERIRVIF

SEQ ID NO: 332326 - protein, 242 aa, Zea mays
  unsure (1)..(242): unsure at all Xaa locations
  Clone ID: MRT4577_66198C.1.pep
MVQQIPKANHILDLLSLKGKVVVVTGASGPRGMGIEAARGAAEMGADVAITYASRKEGADKNVEELVKEYGVKAKAYKLNAADYNDVERFVGEVVKDFGKIDGFVANAGATANAGVIDGSAADWDHVIQIDLNGTAYCAKTVGALFRKQGHGSFVITSSMSGHIANYPQEQTSYNVAKAGCIHMARSLANEWRDFARVNSISPGYIDTXGLSDFIDAETQXLWRSMIPMXRNGDAKELKAAY

SEQ ID NO: 332327 - protein, 66 aa, Zea mays
  Clone ID: MRT4577_66199C.1.pep
GVDSGPSCSIVPLPIRIGPSVGQWKIPLALVKWDDPQLSSLPPVNVPVGVITPQVAQGQPKNMFPW

SEQ ID NO: 332328 - protein, 320 aa, Zea mays
  Clone ID: MRT4577_6619C.1.pep
MECEPEELHHRPLFARIAAAWALPLSALFLLHVAISHALFTHIDSDDTALDASSPGTDTQRRLLSRLASDWLALLLFKSAYLLALLLLSLLSVAASVFSVASVYSAKRDALTFPRVLSVVPRVWRRLAATFLAAFALLFAYHAVAVLVFVGLLVAADNGSGLAGLLAFLVAVAYLLGLVYLGVVWHLASVVSVLEDHKGFAAMRKSKDLIRGKLVTAGAIFFTLNVVFAAVELGFRAWVVRGSGAASSRLLLGLIMLAALCCVVMLALVTQTVVYLVCKSYHHESLDKANISDHLEVYLGDYVPLKASDVQMEQFQPGNL

SEQ ID NO: 332329 - protein, 63 aa, Zea mays
  Clone ID: MRT4577_661C.1.pep
VVLGVPPEKKAAPEFVKASAESVETAHPSGFGRGCKYDPSNNLCSHRSRPMDMIIIYLACGGG

SEQ ID NO: 332330 - protein, 69 aa, Zea mays
  Clone ID: MRT4577_66200C.1.pep
WVGKKDAVAVYGQGCQPWGLPGGPDPWVGILVAPIMPPFKQEKGWSPFLLIRSFAKTTPTVVEPFKFVF

SEQ ID NO: 332331 - protein, 118 aa, Zea mays
  Clone ID: MRT4577_66201C.1.pep
TTSSFSSLSWTCELFTDFSKILGCEGLFCARIDICLCTGIRCDISRIHLLCRTSITTTSFLSDLNLCHIDIRAGPPLITIGQPFGLFSSFLSSYRFLVLDNPFLGDPLTIRSTIVHSP

SEQ ID NO: 332332 - protein, 67 aa, Zea mays
  Clone ID: MRT4577_66202C.1.pep
RLRLSLAPSDRNHPTLAMALIETNVPMSPTTKTPPQCPNTQGETSQDVGAPLPDPIATPLSISDSNV

SEQ ID NO: 332333 - protein, 312 aa, Zea mays
  Clone ID: MRT4577_66203C.1.pep
MWPPSSSSSSSSSPAAVPEPGGRMSALTMRAVARMSRARWFVFLRRVYQYQNGPRSDLGSNPFNSPGWLALELGVIVAQVVLTTAVVATSAAERPAWPLRLWVAAYNVGNVLSLPLLYWRHRHSSSSSSAGGGRGDLEMHGANDAPGNRSYLMNKARAFLELFFAMWFVMGNVWVFDARLGSFQRAPRLYALCVSLLAWNAVVYSLPFLLFLLLCCFVPAVGYALGYNMNTASVGRGASDEQLAALPRWRFKEPDVARDRERDDQECCICLAQYGEKEEVRQLPCTHVFHLKCVDRWLRIISSCPLCKQELK

SEQ ID NO: 332334 - protein, 51 aa, Zea mays
  Clone ID: MRT4577_66204C.1.pep
CYQPKPYVTAACASTRGQPRERHGADSATSYAVASRRSPCRPELPDRRPPA

SEQ ID NO: 332335 - protein, 63 aa, Zea mays
  Clone ID: MRT4577_66205C.1.pep
TIRRFITPPLKFGYNFTLKPELEMRQTKSVTKMFSGPFYWTRVFGFILDRRILKFLRFGKREK

SEQ ID NO: 332336 - protein, 392 aa, Zea mays
  unsure (1)..(392): unsure at all Xaa locations
  Clone ID: MRT4577_66206C.1.pep
TRIDAVDPALRRAGRFDSEVEVAVPTVEERLLILKLYTKNLHLDEKVDLQTVAAFCNGYVGADLEALCREAAKLAYHRMLNLCEGDKVLKLLMEDWECARSMVGPSITRGVTKEISIVSWDDIGGLKDLKKELQKVVEWPIKHAAAFSRLGISPVRGVLLHGPPGCSKTTLAKAAAHAAQASFFSLSGADLYSKYVGEGEALLRRTFQKARLASPSIIFFDEADAIAPKRTGPGGNSSGNATVGERLLSTLLTEMDGLELATGIIVLGATNRPNAIDAALLRPGRFDKVLYVPPPDVEGRHEILRIHTRKMKLGEDVDLWKVAECTELFTGADLEGLCREAGMAALREDIXSNLIHDAHFQAARSSLSPSLTKAVVDEYSKVDINDPSSRKH

SEQ ID NO: 332337 - protein, 199 aa, Zea mays
  unsure (1)..(199): unsure at all Xaa locations
  Clone ID: MRT4577_66207C.1.pep
MTFVDFIDRNGWFRTGYGGNSSGNATVGERLLSTLLTEMDGLELATGIIVLGATNRPNAIDAALLRPGRFDKVLHVPPPDVXGDTRYYASPIDLQVLYVPPPDVEGRHEILRIHTRKMKLGEDVDLWKVAECTELFTGADLEGLCREAGMAALREDISASLIHDAHFQAARSSLSPSLTKAVVDEYSKVDINDPSSRKH

SEQ ID NO: 332338 - protein, 81 aa, Zea mays
  Clone ID: MRT4577_66208C.1.pep
CFCVHKGRLPPSARLPPVTLLCNGVQMSVAGDRLLCKVPGERRGAGGVWCLAFGNPDVVPLPAYVFGHRHQMNLWVGGDLE

SEQ ID NO: 332339 - protein, 98 aa, Zea mays
  Clone ID: MRT4577_66209C.1.pep
LALRSASLIASRSLIGTGNIDDAVICDATGQTIWASSPNFKLPPAEMAAIAASFTDKSETKAVIANGIKIKGEKYMTIEASDDSVKAKKVRSPPVRSV

SEQ ID NO: 332340 - protein, 125 aa, Zea mays
  Clone ID: MRT4577_6620C.1.pep
RARGPQGFAAMRKSKDLIRGKLVTAGAIFFTLNVVFAAVELGFRAWVVRGSGAASSRLLLGLIMLAALCCVVMLALVTQTVVYLVCKSYHHESLDKANISDHLEVYLGDYVPLKASDVQMEQFQV

SEQ ID NO: 332341 - protein, 140 aa, Zea mays
  Clone ID: MRT4577_66210C.1.pep
DAYGVWREYFGWFWGKHLRVIHRRSVIEVTVRVELGYQSTSNAVLFPGCVSWERYRCKAVGAAGQLVGGDMYMELFGSRSRNDKASTRATLTRLERRSGRDLGRVDSGQRGASQASRNRGSCSREARQSRASARCGATLQ

SEQ ID NO: 332342 - protein, 60 aa, Zea mays
  Clone ID: MRT4577_66211C.1.pep
PHLAWHLRLFLLASPRSKNCRLEDSQLKLAIHSMHLHLYVLRPSIDDAFISTCFPYMYYI

SEQ ID NO: 332343 - protein, 113 aa, Zea mays
  unsure (1)..(113): unsure at all Xaa locations
  Clone ID: MRT4577_66212C.1.pep
RTASNRQGGVYPPIVFRPSPLPVSLCRGMGRGRAALRRMERMLVIRRHPEPALKCELFGGPICHKVESNLIXXRLXXGDXXLDPNMXIEKCPAVNARLHLISVQFSQITAFXS

SEQ ID NO: 332344 - protein, 942 aa, Zea mays
  unsure (1)..(942): unsure at all Xaa locations
  Clone ID: MRT4577_66213C.1.pep
MDNLQQPLQPGTVLRFGSLEFMSPDGSYDMILLPPQHDGNDGRRLARRRRTRRRHLPGVEEEHPGLPRHPPRRRRGRRSNHGQARGSTSSAVRPERVDGAGTPVGDMSGVILAPGTTIGVASQQRANPRRTDDASTLARDLSGISLAPKIATRSISDATSPPSTNKEVPSVFHHVPFRFSFDPPRDPTSASAFARAYPDLPGYHMWSTWDLLTVASTSGPVGSKEEDDPNFSWDFSELRDPSAMRDFVSACDHCLSGYSDDGHSLDDEGYDPTRECFHIDQEDHDEDNHLGMPRNNDAPTTASCVEIPRELAEXPGPCGGSEHLRQNLEQEWAGRAPAGEARRRARDVQRRIIDNARGRXPPTFNGANQNLATTVILLRTMPEPSTTEGRRIQDELKDLLENAAVQQAESSASRRRGCPSEHHALSSRHIREASVHTEHTGDRTPVALDRLGXEQHRRDRRARLEERVRRGYHPRRGGRYDXLGGTDDDNLIIRNLPLFLSDAARAWLEHLPPAQIFDWDDLVKAFAGNFQGTYVRPGNPWDLRSCHQQPGESLREYIRRFSKQCTELPNITDSDVIEAFLAGTTCRDLVSKLGRKTPTKASELMDIATNFTSGQEAVEAIFRKDKQPPGRQKEDIPEASVQRGTKKKTKKKAQAKCNIVDTDLVVVAERRNPRRPPGGANVFDKMLKESCPYHRGPVKHTLEECDMLRRYFNKAGPSAEDGKDQGNNNKEGDKEEEFLEVHNCFMIYGGLSKVLMDRGSSLNIIYTKTLGLLGVDRSTIRAGAAPFHGIVPGKRVLPLGQLDLPVCFGTPSNFRKETLTFEVVGFRGTYHAVLGRPCYTKFMAVPNYMYLKLKMAGPKGTITVGSTYHHAYECDVECVEYAEAITESEALIADLDCLSXEAPDPKRHAGNFEPAEAVKSVSLDLSNDADKKVKIGSELNPK

SEQ ID NO: 332345 - protein, 40 aa, Zea mays
  Clone ID: MRT4577_66214C.1.pep
PPDISRVIVEVINTLSYITANQCRRSKMRLELKKESAVRD

SEQ ID NO: 332346 - protein, 74 aa, Zea mays
  Clone ID: MRT4577_66215C.1.pep
TTQTWFIKCVSENQNQVRIRREEKKNSSLDCSSKMSIELSSNITSEYENLPFLHFGPTFVAKSYHSFNKYIGSI

SEQ ID NO: 332347 - protein, 124 aa, Zea mays
  Clone ID: MRT4577_66216C.1.pep
MANEHFFPGEYLSSGLAAPFLGASYVQPPRSGFEAAAAMAFGLPWVDQHLPVDSSATTAHFDSALSSLVSSPASATAGGGLGFAHGGEDDVAIGDLIGRLGSICDGASANNSCYSTPISSPPRG

SEQ ID NO: 332348 - protein, 116 aa, Zea mays
  unsure (1)..(116): unsure at all Xaa locations
  Clone ID: MRT4577_66217C.1.pep
MARTKQTPGSAPTERDPRKSASSKAERKRGPTTGGVKKPDRLHPDTARLHEILSYQKSTELVIRQLQXHGLFREIAQDYQTDLTLQDSAAAVSEEAXEEDLEKLFQDTNLCVMHSK

SEQ ID NO: 332349 - protein, 168 aa, Zea mays
  Clone ID: MRT4577_66218C.1.pep
MTRGGRGDMKSFYRQQKTHAAAAAAATTKPTGGVSKKAAAHHHKKAALATNVHPAPDHGAAREGGPRVRHGHALRAMPRRHPRPAVAPRRRTALPPGGSRLGYWRDGHSFPAFRRHAPSVFSTSSVLEMRCRIHPFCSRLPHFVVAVAPVVVPSVPVTRRRNRVTYLS

SEQ ID NO: 332350 - protein, 87 aa, Zea mays
  Clone ID: MRT4577_66219C.1.pep
RFLRNGWRRSWIRTNLFFYGDQDKYVTRFLLLVTGTDGTTTGATATTKCGRREQNGWMRHRISNTELVLNTDGACRRNAGKECPSRQ

SEQ ID NO: 332351 - protein, 153 aa, Zea mays
  unsure (1)..(153): unsure at all Xaa locations
  Clone ID: MRT4577_6621C.1.pep
TRPAETPRLQSQAGRQPTSHGVRAGGAAVPGRRRHLPLFLLHVAISHALFTHIDSDDTALDASSPGTDTQRRLLSRLASDWLALLLFKSAYLLALLLLSLLSVAASVFSVASVYSAKRDALTFPRVLSVVPRVWRRLAATFLAXFALLFXYHA

SEQ ID NO: 332352 - protein, 202 aa, Zea mays
  unsure (1)..(202): unsure at all Xaa locations
  Clone ID: MRT4577_66220C.1.pep
MHCGEAWRRRLNPSEKARGEAADAAVGPRGPAPPPAQGAHRPRHASRINKQQPPLNPNPPSPXPLLPHSNPFPSSSTTNPAPPAAPSAGERSPEPXDKGRRRRHEXPSTVSRRRTPPLLPPPLPSPLVASPRRRRRTTTRRPRSPPTSTQPQITALAAAGGGGGAAREGGPRVRHGHALRAMPRRHPRPAVAPGRRPSLPWN

SEQ ID NO: 332353 - protein, 113 aa, Zea mays
  Clone ID: MRT4577_66221C.1.pep
MAAATTTKNVLLLLLLALLPLATLSSRTGPSSAHKSHGHSHRSSPSAKHPPPSPSPPSSPPSAPSPAPAATAALVRATCNSTAYYDLCVSALGADPSSATADVRGLSAIAVSV

SEQ ID NO: 332354 - protein, 234 aa, Zea mays
  unsure (1)..(234): unsure at all Xaa locations
  Clone ID: MRT4577_66222C.1.pep
SCPPPWPPRPAPSATCSRSTATSGSRPCTARAGASTPAGSRWLAAHGRSSSSPTATAGTPRATSPSSSSWTTTTPSAAAPTTTTTARSWWSSSGSRCCAAPAGRRTTGPRAGPARPPSPTRATRPWATASSXALGAGDAEVPXTTASPSAVTCPSSTTPSTSRRSPRSRSTCSGLGCLSTARSSTTARASIPNPSFPFPSATSSSRRRSSSCSSAVSTSXPNGSSPAGFYCCVI

SEQ ID NO: 332355 - protein, 90 aa, Zea mays
  Clone ID: MRT4577_66223C.1.pep
KNRHVLHKNANEDVPMGSWFIGLYVDDRRLCCSKPPDCEWKDAGRNMCVASFHWSCSGICKSADWISKVHQRCARVRMHFWAVIPLQWHL

SEQ ID NO: 332356 - protein, 167 aa, Zea mays
  Clone ID: MRT4577_66224C.1.pep
MQPPQPEPEPAANRRAPSTCSPAQRRSGGIGCMAGLLRLISPYHRSHHRKRLTAKNAPAARASQAPPPPPSSSSPRKKAAAQQPSASPAASPTKPTVQQLMTTAGHHRPPHGPGGVRAVLARRDAAAASRPESSASAAAGGGAGDSRGETEEAAGRAGKVRRGPQDA

SEQ ID NO: 332357 - protein, 63 aa, Zea mays
  Clone ID: MRT4577_66225C.1.pep
SVVCKHSAKERCLSTELSYEPILAFLEPVNVFLLFHNSPSCCVYEHPQREHVIWVLFPSSVPV

SEQ ID NO: 332358 - protein, 82 aa, Zea mays
  Clone ID: MRT4577_66226C.1.pep
LFVVGKSGPAQGCSLSWNGEQAHLNEKRRVFPPTGQLEPVSNCLAQASHGTRLLPERDFPRVAVLFFWAVFVPSLPFSLAVR

SEQ ID NO: 332359 - protein, 96 aa, Zea mays
  unsure (1)..(96): unsure at all Xaa locations
  Clone ID: MRT4577_66227C.1.pep
MALYDDKKPAAHNPADYDPAAVNTTAGNKPKADKRIPGVKSAGKDRGDGNRGETKCXKIVETCKIYIFKVLKQVQPDIGISSKDMSIMDSFINDIF

SEQ ID NO: 332360 - protein, 337 aa, Zea mays
  Clone ID: MRT4577_66228C.1.pep
MDVPAVADPGTERGEGALIQCPYCDSEAMHKLAQILLPGLAAVCVDGTTGDPFRSPSAVAVDLRKEMVDYITQRSDSFIADALIESEANQDAPGAEVPDDPFETVSVFMDDFASTKRNIIGHVSGWLLTDSRDDKIDDFVQEMEATKFWPLERREAVAELLLKNVDLKTRFHCPEKYENEERLEDHKAQCSFRPVACANDGCRAKVSVRCVKDHDAACVYKLLQCEQGCDKRLLRRDMDRHCVTVCPMRPMKCPFGCDSSFPDRDLERHCAEFLQPHLLMVLKAIHKKGRSEQDLKDLAQKLEKFDGDGKLAKALDARPLTNVVKDLEAKMKGGQSS

SEQ ID NO: 332361 - protein, 103 aa, Zea mays
  Clone ID: MRT4577_66229C.1.pep
VTSNDLRRRRDSFVSRKSTEATPTTATKHKYHKHRTRTNVYNNYYTKSTKATPPTASKHKYHKYRNKITYTTTITQSQQKQHIQQLLEYTTTFSLKSRTSTST

SEQ ID NO: 332362 - protein, 242 aa, Zea mays
  Clone ID: MRT4577_6622C.1.pep
MATKDVASMFAVALFIGAFAAVPTSVQSIGVCYGVIGNNLPSRSDVVQLYRSKGINGMRIYFADGQALSALRNSGIGLILDIGNDQLSNIAASTSNAASWVQNNVRPYYPAVNIKYIAAGNEVQGGTTQSIVPAMRNLNAALSAAGLGAIKVSTSIRFDAVANSFPPSAGVFAQSYMTDVARLLASTGAPLLANVYPYFAYRDNPRDISLNSATFQPGTSVRDQNNGLTYTSLFDAMVDAVY

SEQ ID NO: 332363 - protein, 75 aa, Zea mays
  Clone ID: MRT4577_66230C.1.pep
LLLQRCLQGPRQDPNSHIVWLQNTDAKLKALRDIEEGEELCICYIDASMDADARQKILADGFGFKSRCLRCLSGD

SEQ ID NO: 332364 - protein, 50 aa, Zea mays
  Clone ID: MRT4577_66231C.1.pep
IESRSVNPTQFMLVRSLGSPPSLFSLCVLACIVCVIVNKYLFTTANYLYP

SEQ ID NO: 332365 - protein, 615 aa, Zea mays
  Clone ID: MRT4577_66232C.1.pep
MRQSHSLSPSSSPPRPLDLISSILACSPLPVSPPPATPMSQSSPLFSVARAHAGAGGRAVAAALLLRRRPIAQLPHSIHGLRCLSPARATPSKTLLSLPRATLSSFADPDGDGGSSAKASDGGAKAGAGGEEQVGECEMSEMARAFHISPRVATSISVTIAFAALTVPLAMRSLVCHGTFRMNALAYFTLLSGFYMAWNIGANDVANAMGTSVGSGALTLRQAVLTAAVLEFSGAFLMGTHVTSTMQKGILVASAFQGKDSLLFAGLISSLAAAGTWLQVASSYGWPVSTTHCIVGAMVGFGLVYGGVDAVFWSSLARVSSSWVISPLMGAAVSFLVYKCIRRFVYSAPNPGQAAAAAAPIAVFTGVTAISFAAFPLSKVFSIAILQAVSSGAIGAIIVSRVIQKQLGDLLSSEAEKIASAEKSSAQQAGFLSDIAGPTGAQLQIVYGVFGYMQVLSACFMSFAHGGNDVSNAIGPLAAALSILQGVASSAEIVIPTEVLAWGGFGIVAGLTMWGYRVIATIGKKITELTPTRGFAAEFAAASVVLFASKLGLPISATHTLVGAVMGVGFARGLNRVRAETVREIVASWLVTIPVGAVLSIFYTLILTKILAYFM

SEQ ID NO: 332366 - protein, 303 aa, Zea mays
  Clone ID: MRT4577_66233C.1.pep
MFLRRRLLSTAAAATAARGPPPIRVSLTESAGRGVFATRPVSSGELLHSAQPLVSHPSHSLLHEVCYNCLRRKPGEGRASSGGDYFCSDACRDHAKGFHDIDKNVDWSLFDYHCSSRDLKYPYMAKRLACMVISGAANADCLNILQPALLHQGTLIEMKEEFELLESTFRKAGFQEEITTFLTIDWYINVLARIRINAFRIELVASSYEDLLSSAAASVSCDSSVGNAVYMLPSFYNHDCDPNAHIVWLQNADAKLKALRDIEEGEELCICYIDASMDADARQKILADGFGFKCRCLRCLSGD

SEQ ID NO: 332367 - protein, 160 aa, Zea mays
  Clone ID: MRT4577_66234C.1.pep
LLRAIGFLEAGREPSDAASSCVGHPGICLNAVVRPSPHLRARPWSSPRLRLLSPELTGCRSLDGLPCSHIVRTPSCSLALVTSPCQSVELLPSVAVASCRPCLDSTSPSCMGRAPYPSAAPFPCSVSTPAPIPSAHLCSCHGRPWCVNTQDCASLLVRPR

SEQ ID NO: 332368 - protein, 58 aa, Zea mays
  unsure (1)..(58): unsure at all Xaa locations
  Clone ID: MRT4577_66235C.1.pep
XDQNGCFISRLFDRTTLLHTQIQKGPYLLKPQKTGQFKRKDPTNNPQGRPQIKKRYNQ

SEQ ID NO: 332369 - protein, 93 aa, Zea mays
  unsure (1)..(93): unsure at all Xaa locations
  Clone ID: MRT4577_66236C.1.pep
HTRTLRCHQISELCPESYETVYEKIHAREFELSNLHAKXLATDYAELTILRQRFNFKATXPMSSYYNEPSTVNVEXLKXIPTTRAKSPILDLS

SEQ ID NO: 332370 - protein, 74 aa, Zea mays
  Clone ID: MRT4577_66237C.1.pep
PTRPEKVLDRGEKIELLVDKTEDLRAQAQDFRQQGTKIRRKMWWENMKMKLIVFGIVVALILLIVLTVCKDFDC

SEQ ID NO: 332371 - protein, 123 aa, Zea mays
  unsure (1)..(123): unsure at all Xaa locations
  Clone ID: MRT4577_66238C.1.pep
GNGFPPWAFHALELVELIFRPPKGGPPCLPDPSEQVISALNLVKFILIIDSKGQRFAKLFWKKTLPKVPSEWLTPLRPIAEQIQLENXKGCLLDXKQKVGMLNFVQLGLYPCIELVEEKKKGC

SEQ ID NO: 332372 - protein, 74 aa, Zea mays
  Clone ID: MRT4577_66239C.1.pep
VANIHDYTWPAYARRQPGAQLGSSYSQEPTTHVFVTFLKFWFKTENRNNRTEIIQLVWSGFCFFNIYFGSGQLS

SEQ ID NO: 332373 - protein, 61 aa, Zea mays
  Clone ID: MRT4577_6623C.1.pep
LYLPPNIFPEHQNSTYRLKIFNLYTTRSFIPKIHILKIHIYFPSTLPYTHTSFPHQTHFIS

SEQ ID NO: 332374 - protein, 285 aa, Zea mays
  Clone ID: MRT4577_66240C.1.pep
AEIIRDYKTGDSLCYAFIEFDTKEACERAYFKMDNCLIDDRRIHVDFSQSVSKLWGQFRQSKRNAKKDGCFKCGAPDHLARDCDQDGEQKNKGPSYVLKDENTQRGGNHRRSYDLVFDEDEADCSEERDHENGHRRKNRRIDDRKSELPPRGGRDRNSHERTHSDEKGSKHGKDDRNRGDRKHDDYHSYSRSGDRSSGRNDDRDYSKRHDRSRSGEEEKGYRRRDKSDGERHHRDDGYDRRRRDEDSHRKRSPDSKHRREDGGHHVRNQQSDDRSYKERRHRDGR

SEQ ID NO: 332375 - protein, 78 aa, Zea mays
  Clone ID: MRT4577_66241C.1.pep
VLVILAVVIECKAVLELLVGSLRQISVLEYKVLMMNHSSWLVSGGKAIVSVWEAMSSRRFPEDRITEPSASKRLRQRL

SEQ ID NO: 332376 - protein, 53 aa, Zea mays
  unsure (1)..(53): unsure at all Xaa locations
  Clone ID: MRT4577_66242C.1.pep
IDTRRTDYSFVKFVTRLCXVLGGTFAMTGMLDRWMXXQLIKTVTNSKTRSVLR

SEQ ID NO: 332377 - protein, 94 aa, Zea mays
  Clone ID: MRT4577_66243C.1.pep
SKKILPTNQYSARGVTEYFLPIRPTERAWPAVYFLYDLSPITVTIKEERRNFLHFITRLCAVLGGTFAMTGMLDRWMYRLVESVTNSKTRSVLR

SEQ ID NO: 332378 - protein, 250 aa, Zea mays
  unsure (1)..(250): unsure at all Xaa locations
  Clone ID: MRT4577_66244C.1.pep
TDHDHDHHDEQKKHEQTFNEEAEKMIKSVKQALGNGEGCRVYGMLDVQRVAGNFHISVHGLNIFVAEKIFEGSNHVNVSHVIHELSFGPKYPGIHNPLDETSRILHDTSGTFKYYIKVVPTEYKYLSKKILPTNQYSVTEYFLPIRPTERAWPXGTPLPSFSSMLPSFSSMLSSFILKAEVFFFHVAVYFLYDLSPITVTIKEERRNFLHFITRLCAVLGGTFAMTGMLDRWMYRLVESVTNSKTRSVLR

SEQ ID NO: 332379 - protein, 350 aa, Zea mays
  Clone ID: MRT4577_66245C.1.pep
MARIPSLKSLNAFPHAEEHLLKKTYSGAVVTILGLLIMITLFVHELQFYLTTYTVHQMSVDLKRGETLPIHVNMSFPSLPCEVLSVDAIDMSGKHEVDLHTNIWKLRLDKHGHIIGTEYLSDLVEKEHGAHHDHDHEQEHHDEQKKHEQTFNEEAQKMIKSVKQALGNGEGCRVYGTLDVQRVAGNFHISVHGLNIFVAEKIFEGSSHVNVSHVIHELSFGPKYPGIDNPLDDTSRILHDTSGTFKYYIKVVPTEYKYLSKKILPTNQYSVTEYFLPIRPTERAWPAVYFLYDLSPITVTIKEERRNFLHFITRLCAVLGGTFAMTGMLDRWMYRLVESVTNSKTRSVLR

SEQ ID NO: 332380 - protein, 76 aa, Zea mays
  Clone ID: MRT4577_66246C.1.pep
MAEVRSRVRGFLRNRWLVFVAAMWMQSVAGVGYLFGSLSPAIKSSLGYNQRQVVSLGVAKDLGDSDGFFAGKLCAV

SEQ ID NO: 332381 - protein, 107 aa, Zea mays
  unsure (1)..(107): unsure at all Xaa locations
  Clone ID: MRT4577_66247C.1.pep
PMIXSCRLXPLXITPRXLKMIEPLVHXHLDVWRDRTXXVERTKRXXSCXLLVTLSGRTNRXXSPLVXXIATXXGMXLLQSTXXSKINPTCXSLGXRPIXVSNQIPNV

SEQ ID NO: 332382 - protein, 90 aa, Zea mays
  unsure (1)..(90): unsure at all Xaa locations
  Clone ID: MRT4577_66248C.1.pep
SSRRTPRGXXHVSASSSXXWSYLXVXRCADSFXXRHCGRRXPALXVGFSXSHXXSXRAGXXHLTRGSFKWXQRPGCSNPXSXWKGYXKHG

SEQ ID NO: 332383 - protein, 56 aa, Zea mays
  Clone ID: MRT4577_66249C.1.pep
RSPAPVPCLLFDKLSTLQGGFQVFRVGLIVYNVSKAHDPAITEARARALNVTLLKV

SEQ ID NO: 332384 - protein, 42 aa, Zea mays
  Clone ID: MRT4577_6624C.1.pep
MFNTLNLAQVIVGAVGGGAMMVSGGGGGGAAASGGAAAEAPK

SEQ ID NO: 332385 - protein, 64 aa, Zea mays
  Clone ID: MRT4577_66250C.1.pep
RNTKPYGPYCDQRPRLKKGYHTTTRHCACSSILCKGVVLYYINKSCSKVDALNMDGPIILEIDY

SEQ ID NO: 332386 - protein, 56 aa, Zea mays
  Clone ID: MRT4577_66251C.1.pep
GLFILCSFYSVNKTLAQDANVKVSNYLKQVSSVEQMCIFSESESGVCGCFVSWLGV

SEQ ID NO: 332387 - protein, 75 aa, Zea mays
  Clone ID: MRT4577_66252C.1.pep
HRTAIGPCSPPCYPGPPALWICMWVIRAPRSYPCHVCKLNVPRSRSGETRRDIRVRTSSRTPCRSSRSGREPLFS

SEQ ID NO: 332388 - protein, 91 aa, Zea mays
  Clone ID: MRT4577_66253C.1.pep
FSSPFLARGAGWTHGRGMMVVGTGTSLALSSLLSLLLFAGMQMYSRQLASTEWLTIQGGLLGSGLFVFSLTAFNNLENLVFGKGFQAKIFP

SEQ ID NO: 332389 - protein, 168 aa, Zea mays
  unsure (1)..(168): unsure at all Xaa locations
  Clone ID: MRT4577_66254C.1.pep
NFRNLENPGYLKNQPPTKRQKGGKPXKKGGPPRPGATTPKKGPRTRGKTLGGGGKWATTGGASPIRGRAGGPPKINPPKPXGAARTQGLKPAKPWGGPKKNPLKPQXTPGGGVKIFPPPMGXAVFGPRPPPNQGXTPPGPLGPKSGXPGGPPGAKPAPPPGGPPPWGP

SEQ ID NO: 332390 - protein, 97 aa, Zea mays
  unsure (1)..(97): unsure at all Xaa locations
  Clone ID: MRT4577_66255C.1.pep
SARATTAATLLRIHMLLGLCACAATETMYPQCWHAAIATLMPTDLSPGVPTHREDPTLQPYMAQPAIXLGSLHNVHIXLQHASVLIQPLPXVHLLGQ

SEQ ID NO: 332391 - protein, 101 aa, Zea mays
  Clone ID: MRT4577_66256C.1.pep
LFGKYLIASLINRHRCLSDGSRAVPCCPSFLIHHHINVKKSPVNMPYIFLSDCLSSSCHPSRGYHAMSAETNDVASSAPPSQRVVSSHPRSENGISCIDRV

SEQ ID NO: 332392 - protein, 62 aa, Zea mays
  Clone ID: MRT4577_66257C.1.pep
FDLRVSSSYGSVVINAIEFIPIHLYVVPCVKRRCATECHPSPLGGSVRYDLYLPMRVERNNL

SEQ ID NO: 332393 - protein, 88 aa, Zea mays
  Clone ID: MRT4577_66258C.1.pep
GLSLMMHGLPVRVSDVAHLNCRVRMVRLLLRKLGQRNEILASAQRCVRGRADLRSIFCVSRLLYRCFTAYSICHWSSIYSTAPIRISI

SEQ ID NO: 332394 - protein, 41 aa, Zea mays
  unsure (1)..(41): unsure at all Xaa locations
  Clone ID: MRT4577_66259C.1.pep
ASGSSSSQXNPNPPSRSGLHLCRRYNNTNPDLRGWLRPPLT

SEQ ID NO: 332395 - protein, 62 aa, Zea mays
  Clone ID: MRT4577_6625C.1.pep
KVLCCKYMNVNLEPLKRHPLFFFFYLCFYFFYFFFFFFFSCYHFFFFFFFFFNFIFLCFFFF

SEQ ID NO: 332396 - protein, 152 aa, Zea mays
  unsure (1)..(152): unsure at all Xaa locations
  Clone ID: MRT4577_66260C.1.pep
MRIVHSIADMERMYSRGXKGISSTMLPYXRTPTYXLKTAIXSTVQDMITKAANKEHMPTQIGFLLRDQHXIPLVNSDTGTKILRILXRHGLAPNIPKDLYFLIKKALAITKHLERDMKDKYSKSXLILVDSRIHRLVRYYKRTKILPPTCKN

SEQ ID NO: 332397 - protein, 72 aa, Zea mays
  Clone ID: MRT4577_66261C.1.pep
LNGFTGWESLHLCIFSAELYSCTFGLTFRMHGLVQQVLSVSASRRSGSSGGAQIELLWPTLYDPLPLVGLFG

SEQ ID NO: 332398 - protein, 100 aa, Zea mays
  Clone ID: MRT4577_66262C.1.pep
KAGFFVPKTKKQVFAPVESPYAMFFGPWFFGFTPCTRFIPFARKIWGPPVKNFPWQGPGVPPFFWGGALKPGLVWFETPLNCCPLHFPFSPPFFCGGSFF

SEQ ID NO: 332399 - protein, 110 aa, Zea mays
  Clone ID: MRT4577_66263C.1.pep
AYPCQASGLRLLSTGNIHLRLTLEDPTARIHAYVHKNYLVQFFGGFLTEEAITKKMNKLLGIPEPEDSEEGAPLTRNPPWIWCCLTSFYMDKNNPWDSRKYRIFATEMRD

SEQ ID NO: 332400 - protein, 481 aa, Zea mays
  unsure (1)..(481): unsure at all Xaa locations
  Clone ID: MRT4577_66264C.1.pep
MEEAPTREPKRLRQDAAVTSAAAAAEEPQYVYLPIADAMKVPGVRVCLFAVVSEIGITDRSRGTDFTLRLRIVDQSCMDGISVTVFADKTTLLPCVKSSGDVISLHNVMITMHGEFFVSFNKEVSSFALFESKVAECSPYQTSVKYHGSKNDKELLTQMRTWLAYNPLGLKDFELQLRSLKSDSTFDLVCKVVHVHEDNDKLIFYVWDGTDTPAVEFQATLDPKAVESPPLFEGPPLPREVLCTMPIIGTVLRIFSDMPIKEVSHMQNRVYWARFCNITCKEEFGIWKGILLASSKVRLLSHEDGSVVDRRKMFASRKVNQVLCQPMASFPSNVTVLSDVEYEEEWHSTLMQSLTHKEVTHKLKTLARVVGAYPCQASGLRLLSTGNIHLRLTLEDPTARIHAYVHKNYLVQFFGGFLTEEAITKKMNKLLGIPEPEDSEEGAPLTRNPPWIWCCLTSFYMXKINPWASRKYRIFATYYRD

SEQ ID NO: 332401 - protein, 85 aa, Zea mays
  unsure (1)..(85): unsure at all Xaa locations
  Clone ID: MRT4577_66265C.1.pep
MTRSTRQVSLQLQNHVQDXLAKNPVYAFSPGLVHHSHILQRHLSIIXPPDTLYDEGYFHAIMTFPHNYPNSQPSSRFTCDMRRLN

SEQ ID NO: 332402 - protein, 544 aa, Zea mays
  unsure (1)..(544): unsure at all Xaa locations
  Clone ID: MRT4577_66266C.1.pep
MDSPPLQPTVFSLILALILVLYLALRRRGGGKNRSYPPVAGTVLHQLFNFGRLMEYQTALSRRYRTFRMLTPTCSYIYTVEPANVEYILKANFGNYGKGSTLHELREDLLGDGIFNVDGAKWRHQRKVASHEFSTRVLRDYSTGVFRDTAAELAGIVAAAAAAAGEKLDMQELLMRSTLDSIFKVGFGVNLGVLSGSSEEGAAFAKAFDDASEQVLHRFLDPFWKAKRFLNFSSEAAMKRSLRTINGFVYAVVDRKIEQMERDQQEFVSXKILPLRSPYMMGAVQTGRRDHXGDYSSDTXHFPDTXKEDILSRFLVERESDPGCSDNKYLRDIILNFVIAGRDTTAGTLSWFLYVLCRNQHVQDRIAQEVRAAASGDGGLGVPELVACLTEDAISKMRYLHAVLTETLRLYPAVPIDVKCCFSDDTLPDGYAVKKGDMVNYQPYQMGRMRFLWGADAEEFRPERWLDDAGVFVPESPFKFTAFQAGPRVCLGKEFAYRQMKIFAAVLLYLFRFEMWDANATVGYRAMLTLKIDRPLYLRTSLRR

SEQ ID NO: 332403 - protein, 42 aa, Zea mays
  unsure (1)..(42): unsure at all Xaa locations
  Clone ID: MRT4577_66267C.1.pep
XKKKKKKKKKKKKKKKKKKKKKKKKKKQKIKKKKKTKGGALF

SEQ ID NO: 332404 - protein, 463 aa, Zea mays
  Clone ID: MRT4577_66268C.1.pep
NADALGPRAGRDKADLQKAKKEQEEEQIKRLERLKLERQKRIAARSSTSNAPTPQQPRVKPSPKVSPSTYKSSKLSDTELASSSPLRKFPIKTTPGTDPEKTAKSSKLNDNTNAVSKPTLTDMKERSGRTESSNERLRKLAEPKTNSSTGHTLNSKSASVDRPRRKSMPQDSQTKKISAIMQLDQSKSATLPELKVKYSQAPAVVKNAVASRERKEVSAGAKSLRTTETASVKETNGNISRMNSSDDNVVVEKTVVMLEDEAVILHSGRNAAKETCSDDRTEKPSPESEYIAIRAPLSPVILPEAERSDDLGSSYEVVTECLKDEPEEPTLGAVEKPYQAPFARVTSLENASDNSPLPESLAHANSIKARVPEPVYTVSVEGHVVSEKPRSKEPKGLRKLLKFGRKSHAEGAMDSSVDEASAGDGSMLKNLISQDDSGASSSKASRSFSLLSPFRSKHKVIVL

SEQ ID NO: 332405 - protein, 75 aa, Zea mays
  unsure (1)..(75): unsure at all Xaa locations
  Clone ID: MRT4577_66269C.1.pep
QKFEPAPFYFILVLGLVEGLXKVFCALLFINTXRVAYLGLLAKVYDKIYVFVPVKRARITISAPAAEREPPPNTM

SEQ ID NO: 332406 - protein, 46 aa, Zea mays
  unsure (1)..(46): unsure at all Xaa locations
  Clone ID: MRT4577_6626C.1.pep
AMAFLMLTERXILXYXQLXXGXNVVGPYGLLTTLTLTPXXSSPKXP

SEQ ID NO: 332407 - protein, 157 aa, Zea mays
  unsure (1)..(157): unsure at all Xaa locations
  Clone ID: MRT4577_66270C.1.pep
QGGYSITLEPDPEIDAPWFTRGTLDRFVRFVSTPEVLERVTTIESEILQIEDGIAVQGSDSLGLRSVXKASYNPDADRALVPYKAGTQPIPPLQNHDATQEENSKDQLLRVLETRKTVLRKEQAMAFARAVAAGFDIDNLVYLITFAECFGASRLMW

SEQ ID NO: 332408 - protein, 66 aa, Zea mays
  Clone ID: MRT4577_66271C.1.pep
RRSRNRRHHLRPLRQGSIHFRVNVWCASSTHALLGVIAPLPVFMLGSSVPHFLVCSSGFFHNTVIA

SEQ ID NO: 332409 - protein, 116 aa, Zea mays
  Clone ID: MRT4577_66272C.1.pep
KKKTRLHLDSSIQCPYMPYSCKQRTLDLDLDRTWENHTHPKKRKTIGLGKREIQRMHVRGAYNPRTSSNRPGSVTGTEAGAIEYGSYNPWISAAPVDVTIVSRVASEMNGHTTAVR

SEQ ID NO: 332410 - protein, 87 aa, Zea mays
  Clone ID: MRT4577_66273C.1.pep
YAFIQLNLSLNPTNVMSMLCIFIICVFVGPLPVHGWFNVLHVPEGINCLVLVLEQGGPPEWSHQPFPGGVSLFLLMFPLAILVLTLC

SEQ ID NO: 332411 - protein, 91 aa, Zea mays
  Clone ID: MRT4577_66274C.1.pep
WRNLLRWCGRACPCHPLSLPLCPVISWDLVGLPLTRCSCYKVKCPSGRERAHRVSSVRGHGQTPQSLHHHLLPTPPPLGWLFVKSKVLRGS

SEQ ID NO: 332412 - protein, 218 aa, Zea mays
  Clone ID: MRT4577_66275C.1.pep
PTRPIDELPINPTPILWRTLLSACGGHGDVELGKRVFERILELDDSHGGDYVIFSNLCANTGYWEEMNRVRKLMSDKGVVKVPGCSSIEIDNTVHEFFAGDGRHPKSQEARKMVDEVIDQLKLVGYIPDTSHVFHVEMGEEEKAVSLKYHSEKLAIAFGLLNTAPGATLRVVKNLRVCPDCHSMAKFVSMVFNRRIILRDLNRFHHFEGGICSCGDYW

SEQ ID NO: 332413 - protein, 273 aa, Zea mays
  unsure (1)..(273): unsure at all Xaa locations
  Clone ID: MRT4577_66276C.1.pep
YLCLCVQVASWGAYLMNRNIITMSFAPRDSHEAQVQFALERGVPAMIGVMGTERIPYPARAFDMAHCSRCLIPWNKLDGVYLIEVDRVLRPGGYWILSGPPIHWKRHYQGWERTEGDLKQEQDEIEDLAKRLCWKKVVEKGDLAIWQKSINHVECVDSRKVYDAPQICKSNDVDSAWYKKMDTCISPLPDVKSEDEVAGGVLETWPKRAFAVPPRVSRXSVPGLTPEKXQEDNKVWSERVDHYXKLIPTLGKRRYRNVMDMNXXIGGFAAALM

SEQ ID NO: 332414 - protein, 89 aa, Zea mays
  Clone ID: MRT4577_66277C.1.pep
ARNATHCGLFQTGAGPGRWPVPNQVLPPRSPRQKKGAPQPRVPLKRWGIRIPAAPAPGCLLWKPKSMRVVKEPKELRGPEFRIGQPFGR

SEQ ID NO: 332415 - protein, 314 aa, Zea mays
  Clone ID: MRT4577_66278C.1.pep
MDWAAASGSPSWGAAATDPGPTMLSFAGPSSSAADAEVRLQDFAAGLAQSSRPTGAAPGAGRRSRAAVGGAGAEACSVDGCRSDLSRCREYHRLHKVCEAHSKAPVVVVGGQERRFCQQCSRFHMLSEFDEEKRSCRKRLDGHNRRRRKPQHDLTNLGGFFPYQVNQFEFYPQTIPTVGQNSDAVHLVGRQQPFSISFSRTPPDEFPHPQGQGGGSSVLHHLHAARPGHHAEGSSSHTGSSTRDNALSGTLGPECALSLLSSSLRRPSTAGVPAVGQPQVTASSTTAAAVSQAATAAVATAAFAASAGHHVVCS

SEQ ID NO: 332416 - protein, 217 aa, Zea mays
  Clone ID: MRT4577_66279C.1.pep
MASAARVLTPMALLLSLALQLAAAAVSPPGPRPTFPGDAAALASLKAAVDAATVPSYSCLASWDFSRDPCAAFPCGVHCNTPPNSSHQRVAGVSLDPAGYSGTLPAPVFASLPFLQTLSLRGNRFHGSLPAGVALPPSLRVLVLSGNDFSGEIPTSLFTPASSLDELDLSRNAFTGAIPPQIASLGSLTRMELQHNRLSGSLPSMGKMRSLVHLDVS

SEQ ID NO: 332417 - protein, 130 aa, Zea mays
  Clone ID: MRT4577_6627C.1.pep
RAGYHTYDISQASYNTASQAHHLQPQRQAYQETILPCCRLLHYVRAPQLRSFIDNANSFLGRQVHRFLPPTTQMYWLHEAVPACMLRHAAATGQQPHPLLQQPQLAKVYLQSIAITTATAAACFYQYCTT

SEQ ID NO: 332418 - protein, 251 aa, Zea mays
  Clone ID: MRT4577_66280C.1.pep
WPGSKMADELLWRIQRLFFLNGDQDLSSFLLVEFGIVKFPDYVCSISHRIFQERNDLLEYEDAIRVAQVMDESLDNNKMDLVTRCIDLSENRLCIMPKRENTITPERLRSFFSRFSASWVYSKILTLGVSVYERDRRYEDAVRILKTLLSTVACDRRRGYWALRLSIDLEHMGRPNESLSTAEGGATDPWVRAGSKFALQRRVLRLSKPPRRWKVPSYADYVKRNIREVSIEGRPLNCETGAKNVFYGYDG

SEQ ID NO: 332419 - protein, 62 aa, Zea mays
  Clone ID: MRT4577_66281C.1.pep
APEPRSFFSTVSMDPSAAVKYLNADRQACLMSICVVDRTPQLTTSKAHSPKPYFIHTQKKSK

SEQ ID NO: 332420 - protein, 117 aa, Zea mays
  unsure (1)..(117): unsure at all Xaa locations
  Clone ID: MRT4577_66282C.1.pep
FPRGACVWRPASVGASRFWCSRLGVLLVCFLPPSGGRLLLGGAPCXAAPPGAWGGLPGFGGVWACALSAPACPRGCACWGRPCLGRPPLPGLGVSSCAPPRSRVGGSWRGSCSAXGG

SEQ ID NO: 332421 - protein, 204 aa, Zea mays
  unsure (1)..(204): unsure at all Xaa locations
  Clone ID: MRT4577_66283C.1.pep
GRVSPLSHPNRTPSCASSATVPPPATAAARPARAVDRSPRRPPPYPHVADRPHAIRPRAARPPACPPLRRRRRAAASREEEHNVYAATMRYNVDEEPPVSDLNIFXWRGTSTSKGTFYHLSMDERMSALLYMYCNMEEMDPYFIKFDEENWTYSHKPTSKQLDTMRXHGRQGRPNFVDWFREHCTKTPNIHEDLRHKKKKKKSG

SEQ ID NO: 332422 - protein, 691 aa, Zea mays
  Clone ID: MRT4577_66284C.1.pep
MDPKGKGMVVNDKEKDSIFNEPRDDKPTDSGSSHKKKDRKKKRRIKKIIYYDSDASSSSPRDDDDDNDSSPKKKMVNQNYSFDYSCIPYNSNAHLLSIPLGKPPHFDGEDYSFWSHKMRSHLFSLHPSIWEIVENGMHFDSTDNLIFINEQIHKNAQATTVLLASLCRNEYNKVSGLDNTKQIWDTLKISHEGNDATMITKMELVEGELWRFAMIRGEEPTQTYNRLKTLVNKIRSYGSTRWTDRDVVRLMLRSFTVIDPHLVNLIHENPRYTKMTPEEILRKFVSGRMMVKEARYVDDALNGPLPVYEPQPIALKATSSKEALPSKVAQLEAAGLNENEMALIIKRFKTALKGRKEYPNKNKTRGKRSCFKCGKTGHFIANCPDNESDQGQEKSGKEKKKNYRKAKGEAHLGKEWDLDCSSSDSDDEGLTSSAFNKSSLFPNERHTCLMAKEKKVHVRDTPKYTTSSDDDSSDDDVDYSSLFKGLDRAKVEKINELIDALNEKDRLLERQEDILYEEHDKFVSVQKSLALETKRNEMLSSELSICHESVSSLNSLNDELNARLEEVNKTSSCVEHVVICNRCKNFDVDACDEHLASITKLNNEVASLNAQLKTCKVDYDKLKFARDAYTVGRHPSIKDGLGFRKETKNLTSQRTPVLNKEKGKAPMASSPQRNHAFIMIGKLLVVLITIR

SEQ ID NO: 332423 - protein, 93 aa, Zea mays
  Clone ID: MRT4577_66285C.1.pep
LIADKSLENTKKAKALTGIKKRAKGAGPQKLAQKKSLSPGPQKPLTGARNTSHKKRGGPQPQKGGPPFLGGPPTGPYTRGALTWGLPQLKGGP

SEQ ID NO: 332424 - protein, 286 aa, Zea mays
  Clone ID: MRT4577_66286C.1.pep
PTRPVQESLIHAMETGRYKDLHGGRVTDLNDSIVVLSTRMIQGCQDASLGVEEGNAFSEEKAVAARGHQLKIIVEPGTTNIGGGNVVVSSRHSLGSSEASSKRKLHISDGQEKTEESASTSKRLHRTSSIPFDLNLPGDDEEAHDDGDDDKSSGSHENYLEGSVGNLLRWVDGSINFKPFDFGKLCEDILQEFSNTTSKILGTRGCRLEIDAGAMEQVVAAAWASDSHENEKRPVRTWVEQVFGRSLEQVKMRCENLSSCTLRLVSCEVKEDGFGALLPSRIILDW

SEQ ID NO: 332425 - protein, 81 aa, Zea mays
  Clone ID: MRT4577_66287C.1.pep
FHSGRFVLNFIALASDTQMRYQHTEDRGNRGHWRPGDERRRQHSAGGCCTGAMGEMDSWRLEGGEAKSRRAAVADGVGLVG

SEQ ID NO: 332426 - protein, 82 aa, Zea mays
  Clone ID: MRT4577_66288C.1.pep
LATSLSWASLALGYSLSSVLVSIVNSAAGRGDPRPWLQGASLDPFPLGRFFWVMCVLSPINFLFFLFLAVRFKFRNAGVLMG

SEQ ID NO: 332427 - protein, 603 aa, Zea mays
  Clone ID: MRT4577_66289C.1.pep
MSKPTPLHVSPRIEGRNQSRRELGVTAASSTPRHLVPPQRLLSSPLRHSHLATSATISLKLVANLLTAMGTPLLIPLLVTLQLFTTSSPAVASSHISAIISQSGLDFAKDLLVSHAVATLTPMNVPDIERTMSIPLVGTVRMAASGIVLHGLAVTNSTVAVGDAGVVVAASLASANLTMEWNYSYDAWIVTISDSGNASVQVEGMEVGVSMVMKNQNGSIKLSVTECSCYMEDLDITLNGGASWFYQVFIDGFSNHIISSVENAIKNKVMEGALKLDSFLGNLPKKIDLDSVAAMNVTVVNDPIFKSSSVEFDIDGLFIPSDETAPRDMRLGDTQFALPLGSSSKMLWISLDEDVFNSVSALYFKAGLLQRMVDKIPDQFFLNTASWRFLVPRLYREFPDDNMLLNISAVSPPSVRINVGRIDATVDLDITVNVLDFGEIVPVACLSVSVDVYGAAAVSENNLVGRVELDYFSFTLKWSKVGKLHTILVQTVLRILLKKLFVPYVNSYLKHGFRLPIIKGFSVTDAYILTSYSRMIVSCDVAFIEPEVLSPVQESNTNEDLSYEVLSPVQESKTNEELTNEDLSFEVLSSLLLGSAKTSQPTA

SEQ ID NO: 332428 - protein, 109 aa, Zea mays
  unsure (1)..(109): unsure at all Xaa locations
  Clone ID: MRT4577_6628C.1.pep
KAPCPRVRIRGXPVFLGGGGASTPLSLLPPSLSISLSLAPHSSSNPPSNVQRRHQSTSQASSLTGGFFFFVFKPLLYGGGGGLPKKESSEPRQRRRNNNGARPEDRPER

SEQ ID NO: 332429 - protein, 157 aa, Zea mays
  unsure (1)..(157): unsure at all Xaa locations
  Clone ID: MRT4577_66290C.1.pep
GLAHLAALHAALAELLVLPEPRAALATAGATAFSDRLLDGLLALADAHGAFRETLVDLRRHAAEAQAALRRRDAARLASAVRAPRRAEKXLARLASSARAAAAASCRLPLPAATAAEVEVSGLLAEALGAAASASAAVFSALEAESFAGTDVAVASA

SEQ ID NO: 332430 - protein, 208 aa, Zea mays
  unsure (1)..(208): unsure at all Xaa locations
  Clone ID: MRT4577_66291C.1.pep
MLLRPALPVAVSSTLPLISHLAAVRRRCSIAATGMAGVSAASPAAAQIGSFLSKKPYAPPSWASHLALAPSHTFSLGHFPTPIHKWNLPNLPEGTEVWIKRDDLSGMQLSGDKVRKLEFLLSDAVAQGADCVITVGGIQSNHCRATAVAAKYLNLDCYLILRTSKLLVDQDPGXLVGNLLVERLLGAHIDLVSKEEYGKIGSVALADL

SEQ ID NO: 332431 - protein, 92 aa, Zea mays
  Clone ID: MRT4577_66292C.1.pep
PAGWGLAWQSVDRCAFFVPCRRDLGQRNSPFGGHPLPSYGVLGALARMRGGGQRRRSRREADVLSPWTARARAVAKAGTPQAPGRPARVDPR

SEQ ID NO: 332432 - protein, 186 aa, Zea mays
  unsure (1)..(186): unsure at all Xaa locations
  Clone ID: MRT4577_66293C.1.pep
RRPERLFFSGLAHLGALHAALAELLVLPEPRAALXPPTXATAFSDRLLDGLLALADAHGAFRETLGGRRRHVVEAQAALRRRDATRLASAVRAPRRAEKGLARLASSARXSSRRQLQAAAASGXAAEVEVSGVLAEALGAAASASAAVFSALEAVSSAATAAAAASAGSSKKPAATATLMSFVTRS

SEQ ID NO: 332433 - protein, 128 aa, Zea mays
  Clone ID: MRT4577_66294C.1.pep
DAIGVFREMVWSGERPNEFGFSCVVNACTGSRDLEAGRQVHGAVVRTGYEKDVFTANALVDMYSKLGDIEMAAAVFEKMPAADVVSWNAFISGCVTHGHDHRALELLLQMKSSGLVPNVFTLSSVLKA

SEQ ID NO: 332434 - protein, 94 aa, Zea mays
  Clone ID: MRT4577_66295C.1.pep
KEKTFFSHKFRGNNEEKKLLNYSDLLGQLTNVCVTRKRKKERKKERKRSQAQSLRASWMSKLAFLCALLVPFLANLERSSGSPNLSPCTSSGLL

SEQ ID NO: 332435 - protein, 54 aa, Zea mays
  unsure (1)..(54): unsure at all Xaa locations
  Clone ID: MRT4577_66296C.1.pep
GCRRQSEDLSSRYNGPSSDXQYSISTYANSVANRPGRIKRHSEIQQKLPHLPTS

SEQ ID NO: 332436 - protein, 90 aa, Zea mays
  Clone ID: MRT4577_66297C.1.pep
TFYGYQHQCDRPGRFPLTFISSSWAASRLSRHRISSTSWQFLRPSSSASYSMGLWPLLWHSQCNMHLDLYVPHVKYLGHPVKSSLLHRPD

SEQ ID NO: 332437 - protein, 100 aa, Zea mays
  Clone ID: MRT4577_66298C.1.pep
PTHDPRPRPRKRTLSVPLKRSPPTTRAGHNTRGDAHTTNKPAHTPQIQTHTLPHRQNRGIEDDPRRAQPQPPNKTHRGTTAATCYNNNTNNRAERQQHKD

SEQ ID NO: 332438 - protein, 48 aa, Zea mays
  Clone ID: MRT4577_66299C.1.pep
KKAKGPPRVKIPGGSPCLGTRAGLETPGWIWSPLLGFPIKSCPLADRV

SEQ ID NO: 332439 - protein, 38 aa, Zea mays
  Clone ID: MRT4577_6629C.1.pep
SCFKECCSPRKLAGYKPVEVSGYVVEDDDLFAVQNKSY

SEQ ID NO: 332440 - protein, 95 aa, Zea mays
  Clone ID: MRT4577_662C.1.pep
FPFFFIYFFPLQNKQTNKNKVNLDRVVQSICALSFFSKKYPDLEETSTAAQATVVLGVAPEKQAAPEFVEAAAESGEAAHGCSCGSGCKCDPCNC

SEQ ID NO: 332441 - protein, 63 aa, Zea mays
  unsure (1)..(63): unsure at all Xaa locations
  Clone ID: MRT4577_66300C.1.pep
RNQTXFYFFFMTLYTIPVGYXKIXPTYNTFTQKAITKLNKYYTIFXEXFLSNIPKFPINDKNH

SEQ ID NO: 332442 - protein, 218 aa, Zea mays
  unsure (1)..(218): unsure at all Xaa locations
  Clone ID: MRT4577_66301C.1.pep
MSSSSSPHAMAMPSLASLGHTITEKLTRDNFLIWKVQVLPHVRAAAMTGYLDGTNKEPAAVIVTEKEANGKKEIVETPNPEHAIWVTQDQQVLTFLLASMSREVLMQVSNHTTAAGVWQALVESFSAQSRARQIQLRLAIGNARKGDLSASAYFTKMKGLADELAAAGKPLEEDDIVSHILEGLMHEPDYXRFVTSISTRAATDRIGLNELFSLLLSA

SEQ ID NO: 332443 - protein, 123 aa, Zea mays
  Clone ID: MRT4577_66302C.1.pep
YSGRESAGCGRRLGSPPPHVHLGESACGDQVSARDVCGGNRASIPYRRLGVEGGVAWAILRRRSRFVVKPLTSAVGVRCCLNFGQEQVPQDEAHGGCCDVFVRDLGRRLPVNCGLLDRCLLIM

SEQ ID NO: 332444 - protein, 243 aa, Zea mays
  unsure (1)..(243): unsure at all Xaa locations
  Clone ID: MRT4577_66303C.1.pep
MDIRRDFHMAEGEGEWSYSKNCRRQQVAVRETRPMVETAVKQVYAALFPRTMVVADLGCSAGPNTLLFISSVLSSIAAAAAAERCKQVVKGSSSSSLXYVMGLPESYYNRLFPRQTVHLFHSSYCLHWRSQEPEGLEAWRKPCLNEDNIYIARSRTTTPSVAKLFQEQFQKDFSLFLKLRHEELVHGGRMVLVFLGRKNEDAYSGDLNQLFALVATALQSLVLKVSYISCIYMYVNFSCNFFA

SEQ ID NO: 332445 - protein, 405 aa, Zea mays
  unsure (1)..(405): unsure at all Xaa locations
  Clone ID: MRT4577_66304C.1.pep
MDIRRDFHMAEGEGEWSYSKNCRRQQVAVRETRPMVETAVKQVYAALLPRTMVVADLGCSAGPNTLLFISSVLSSIAAAAGAERCKPPSGGGDDDDHHVELQFVLNDLPGNDFNHLFRSVEEEFRRAAGCERGPPPPPYYVMGLPESYYNRLFPRQSVHLFHSSYCLHWRSQEPEGLEAWRKPCLNEDNIYIARSRTTTPSVAKLFQEQFQKDFSLFLKLRHEELVHGGRMVLVFLGRKNEDAYSGDLNQLFALVATALQSLVLKGLVEKEKLESFNLPIYGPSVGEVEDLVTQSGLFSMDLIKQFEMNWDPLDDSEGDDVVEDSARSSMNVAKYIRSVLKSLIVRHFGEAIIDAWFAEFRRLVAEHLEKEKTKFTTFAMCLXRKSDIDVSIYIYVCVLYFVRCS

SEQ ID NO: 332446 - protein, 159 aa, Zea mays
  Clone ID: MRT4577_66305C.1.pep
MDIRRDFHMAEGEGEGEWSYSKNCRRQQVAVRETRPMVETAVKQVYAALLPRTMVVADLGCSAGPNTLLFISSVLSSIAAAAAEQCKPPSGGGDDDDHHVEVQFVLNDLPGNDFNHLFRSVQEEFRRPAGCERDPPPPYYVMGLPEAYYNRLFPWQKVH

SEQ ID NO: 332447 - protein, 286 aa, Zea mays
  unsure (1)..(286): unsure at all Xaa locations
  Clone ID: MRT4577_66306C.1.pep
MDIRRDFHMAEGEGEWSYSKNCRRQQIAVRETKPMVETAVKQVYAALLPRTMVVADLGCSAGPNTLLFISSVLSSIAAAAAAERCKPPSGGGDDDDHHVELQFVLNDLPGNDFNHLFRSVEEEFRRAAGCERGPPPPPYYVMGLPESYYNRLFPRQSVHLFHSSYCLHWRSQEPEGLEAWRKPCLXEDNIYIARTTAPSVAKLFQEQFQKDFSLFLKLRHEELVHGGRMVLIFLGRKNEDVYSGDLNQLFALVATALQSLVSKGLVEKEKLESFNLPTRASWRRKS

SEQ ID NO: 332448 - protein, 175 aa, Zea mays
  unsure (1)..(175): unsure at all Xaa locations
  Clone ID: MRT4577_66307C.1.pep
MPSACPSFFSSNSARPTPSYGMNCCPRVTSSRRNSHKAHFHVPXSGQRELMDVALSTELHHKNNAGCIPIRKDVRXKILRGIYYGREGXEVNAYRRHCCINAERISLENVNGSSVNWSIHPYNAMATKLKLDKDRKALIHRKVLYRADDKDIGNLNDDDVDADAVVDGANGASLQ

SEQ ID NO: 332449 - protein, 387 aa, Zea mays
  unsure (1)..(387): unsure at all Xaa locations
  Clone ID: MRT4577_66308C.1.pep
MDIRRDFHMAEGEGEWSYSXNCRRQQVAVRETRPMVETAVKQVYAALFPRTMVVADLGCSAGPNTLLFISSVLSSIAAAAGAERCKPPSGGGDDDDHHVELQFVLNDLPGNDFNHLFRSVEEEFRRAAGCERGPPPPPYYVMGLPESYYNRLFPRQSVHLFHSSYCLQWRSQEPEGLEAWRKPCLNEDNIYIARTTTPSVAKLFQEQFQKDFSLFLNLRHEELVHGGRMVLIFLGRKNEDVYSGDLNQLFALVATALQSLVLKGLVEKEKLESFNLPVYGPSVGEVEELVTRSGLQFSMDLIKQFEMNWDPFDDSEGDNXRVVVEDSARSSVNVAKLIRSVLKALVVRHFGEAVLDACFAEFRRLVXEHLGKEKTKFTTIAMCLKKE

SEQ ID NO: 332450 - protein, 103 aa, Zea mays
  Clone ID: MRT4577_66309C.1.pep
LHSTDQSRVYLLYKGLLWPMLRLVSAHSSLHIIVVVLVLIGFSTRSQIQGCLLVVACASFHISGWCNGSSIGGHTATVGGQNYSIRSPNVAVSVLSSIQTRVP

SEQ ID NO: 332451 - protein, 103 aa, Zea mays
  Clone ID: MRT4577_6630C.1.pep
CGCGVPFLKAAGLFPLKKPREDFSSLGGIIMDGPPDQPQIALRNLLSGRKKKSRALAPFSVCRLMYNVTQMVVPYAGLYNSRPLLTVASTAFRSSCRVRAEFP

SEQ ID NO: 332452 - protein, 84 aa, Zea mays
  unsure (1)..(84): unsure at all Xaa locations
  Clone ID: MRT4577_66310C.1.pep
KALVCIGPPAGKHPTSSCFFFVPRNFXEWLLSCRLLSLEIGNNPPPQYEKXLLGFFXRRPPPQXXPREKKNNKNPSQIVQHVHQ

SEQ ID NO: 332453 - protein, 105 aa, Zea mays
  Clone ID: MRT4577_66311C.1.pep
PPAPPAFVGGGGLGAPPGVPSPCRLGSPSAPAATNNTPPQGVPPGGDHVYAPPRTGSGKAIKQFFRGRAQGGPLFWFPGRVVFVVPTPLCLMNPVGGWGGPQLGF

SEQ ID NO: 332454 - protein, 84 aa, Zea mays
  Clone ID: MRT4577_66312C.1.pep
LLLSHLLGFSANFYRVTLVRLLEKLPSSVCTKTAEEEHNVCSRIPGVATRSLLLTFVVDQHRNKNNNITIRAGTRSRDAGVLGC

SEQ ID NO: 332455 - protein, 56 aa, Zea mays
  Clone ID: MRT4577_66313C.1.pep
ILCHPSQTVASCLPQTYKGLFGYSYYTWIGWDWKKIRRTLTCLGFNPTQSHSIHMD

SEQ ID NO: 332456 - protein, 95 aa, Zea mays
  unsure (1)..(95): unsure at all Xaa locations
  Clone ID: MRT4577_66314C.1.pep
MALQNIGASNKDDAFYRYKMPRMLTKIEGRGNGIKTNIVNMVDIAKALARPASYTTKYFGCELGAXSKFDEKTGIALVNGAHDTSKLAWLLENFI

SEQ ID NO: 332457 - protein, 61 aa, Zea mays
  Clone ID: MRT4577_66315C.1.pep
TGKVDPVNALVQKGLDNHNPISVPASWPLFTGRFSFCSVPHLQHSPYLVLCLLVKYHATPD

SEQ ID NO: 332458 - protein, 116 aa, Zea mays
  Clone ID: MRT4577_66316C.1.pep
KNTSQFIKKQAPQEAGGGGPTKKEGGPQKKTRAGQTGEGKHPTLAKKITHRQRAPGARESRGGGKKQPRPRKIAKEKEGGHREPKTGNNKLGSLARPTKGSNKGGANNSRKSFHPR

SEQ ID NO: 332459 - protein, 51 aa, Zea mays
  Clone ID: MRT4577_66317C.1.pep
PLVTRTMFGEIIMWVIKRTASCYHFVFGVPPLSLVPEYGGLKLFQLKFNDV

SEQ ID NO: 332460 - protein, 38 aa, Zea mays
  Clone ID: MRT4577_66318C.1.pep
SNKTYHTHPRRGEIVPNFRIPVSSSPVPKIENLISPLI

SEQ ID NO: 332461 - protein, 46 aa, Zea mays
  Clone ID: MRT4577_66319C.1.pep
VGARIRGGGLFQFSARALDSTCQPAPDLLLIPQDTKNKGQRGVRSR

SEQ ID NO: 332462 - protein, 134 aa, Zea mays
  unsure (1)..(134): unsure at all Xaa locations
  Clone ID: MRT4577_6631C.1.pep
MDAPSSSTSTSTNSSRSASEQXASSPAATAALPPXHQAAGHQPFYYAAASAAGMAQFMGSRAIAPAXGGCAAGAAAAAVGGGGGSXPAGAGSSGAAADKTKAVVPAAAAXSKRPTKDRHPKVXXGRGRRIRMPA

SEQ ID NO: 332463 - protein, 73 aa, Zea mays
  unsure (1)..(73): unsure at all Xaa locations
  Clone ID: MRT4577_66320C.1.pep
TGQSTKETHTHPPPPPPSIGPFLSLNISVYLFPILCLWYXMRVIGNANSHGPLIGVVHALKKKKKKHQQPAXP

SEQ ID NO: 332464 - protein, 110 aa, Zea mays
  Clone ID: MRT4577_66321C.1.pep
LSSSSCTWHGRHVNEWGYVQQPNKYVLLACLSNSTLLCLLYSCQQASACLRDKLRALQCLQQLLVALMCLLKSALGKFLYRFSFSTQADAWRRVGDAGRTRGDRDTDGLQ

SEQ ID NO: 332465 - protein, 89 aa, Zea mays
  Clone ID: MRT4577_66322C.1.pep
EGVGFLVQGHASEALSSPYPSLGTEGTFLLSLALVFGMAQWFKSGSVSGNQNGIKGQLPRPFVNLCACGHVLSSVSAVIILSCWLNVFN

SEQ ID NO: 332466 - protein, 450 aa, Zea mays
  unsure (1)..(450): unsure at all Xaa locations
  Clone ID: MRT4577_66323C.1.pep
MASQPPPEPAPAEAGLESMEGLVLDTVISRAGARPAAALACASTRLRTAVADDSLWRRFCGEDLGLDAPVDPEGRPLPSFQVAYKVWSESFGMYPLPMVKRVRQFWTSMKTWLSENFPEAYKTLCEGVSEAQLKSAEDDLGFKLPMPTKLLYRFCNAQLPFSEDHDTNKSISTYGLIGGYAFYDHWVNVHLSPLEQIVEETKDFYREFPDVFHGRKFIVVATSXVSSXKTFLLDCSNGELYVGTYNLPIGGMLPCVPKALIKPAGNDLAQDGLLLWLEEHLRRLQSGMIKTRMLMASRYISLYPEAPPSCSSAVTNGIKVRSSAVFVPEHPGRPGEKFMFTYSIRMSVPEACMLGGVYYSSCQLCSRHWTIRSCDRVVSDVSGGGVIGEYPLLLPGEDEFVYESCTPLPQVPGSVEGSFSFVPGKLSRPEGKPFEVMVAPFPLDVPEYIF

SEQ ID NO: 332467 - protein, 67 aa, Zea mays
  Clone ID: MRT4577_66324C.1.pep
KVMGQIETLRGQCFEVVLFRARDLVRFLHRRWGGVPVWRRRRLVGFSIILSGVPSRGEKEGQPSGAR

SEQ ID NO: 332468 - protein, 62 aa, Zea mays
  Clone ID: MRT4577_66325C.1.pep
RGHISFLVPPLMDFTGRPCTSVVTGFFLGVPHVNPLAALSPFARWVNSGEAQTDRLSQHSPF

SEQ ID NO: 332469 - protein, 64 aa, Zea mays
  Clone ID: MRT4577_66326C.1.pep
IRSDYLAHVGDLSYVGGNNLWSFRLKQHCSVCNVFTREGRWAKYFIPLPNGPAQWMDVVPVGTP

SEQ ID NO: 332470 - protein, 115 aa, Zea mays
  Clone ID: MRT4577_66327C.1.pep
PFSLFIEGYCHFLNYCYLHRAYPLHRARNGPTPRFSIRGPHPSHGVASPLRTLRDHATCHHQFPLKPLPLSFEAQTQQNPPSVALCGFQVQTTKPAMSNAPRARPPRPDMCLASP

SEQ ID NO: 332471 - protein, 57 aa, Zea mays
  Clone ID: MRT4577_66328C.1.pep
QSPLLPHQSTNLLPIYLNCFLYTNHHSLILLIFNLPHTHRFNYYKITLNNHIPFNLK

SEQ ID NO: 332472 - protein, 124 aa, Zea mays
  Clone ID: MRT4577_66329C.1.pep
PLFISLISSLYWDYLCCSGRPHGRKSNSNRQQYPNSPVLMLLGFKRTTPPHIHNSIHPPPPIINTKCLSIIITTNSLQNTYINMGANGSALAFVSANINTVIGTLFHFFTEEHTKYPVPWTTLP

SEQ ID NO: 332473 - protein, 81 aa, Zea mays
  Clone ID: MRT4577_6632C.1.pep
KVTCPFPLKHNIKPLISPYNPKKHFFYPNQKIFLSPPPMFNSNQFPIESFALPSYKKAPPPFGGENFQFFKLDKKHLIPFQ

SEQ ID NO: 332474 - protein, 107 aa, Zea mays
  Clone ID: MRT4577_66330C.1.pep
LGSHLVAGWQRSIGRNTQAPCEGTRNVGAGSCAIMGAQDGGPAVLGAASSQAAHAIHHAQGTLQKRLLGRKGLMQQVRSQDVGRISARSLSIKSRANEGINPLDAYR

SEQ ID NO: 332475 - protein, 111 aa, Zea mays
  unsure (1)..(111): unsure at all Xaa locations
  Clone ID: MRT4577_66331C.1.pep
PAGYKYQQHQRNHGQPHQGGRQRQRPQHHITLPSGXSFPSPCSPPSFXPFSCRKKKITRSXTPGXGFFXLLFLPLLGLPPPXNPPSVPGPPCSLLLAQPPPPPCFRPPPPP

SEQ ID NO: 332476 - protein, 155 aa, Zea mays
  Clone ID: MRT4577_66332C.1.pep
PQDAGKRELLRKIMLMDQPEDGQTKQVLEQKLIASGRHLTNTNVVFIPGYSFVLMMMVLSAGGLGLLIRTTSSPRFPSVLLETFLSNIQVKVVPTVLSAQEVMLVTWRTSKSSRITTSSSLFLVANLQSAACVGLSSTFRFLRTLMFMLKTMVMY

SEQ ID NO: 332477 - protein, 150 aa, Zea mays
  Clone ID: MRT4577_66333C.1.pep
MPGRRGATMLEDLPEDIMDKILISLPSKDVGRCRAVSASWRSATSTPAFMLEHRRRQPSFPIVDGQGRPASLVVVRDANVHEQLWPFLPGPEHRLQNCLRGACDGFLVVSRGNQLYICNPVIRTYALLPEPQRQYNTIAGFYCHHSTGRI

SEQ ID NO: 332478 - protein, 61 aa, Zea mays
  unsure (1)..(61): unsure at all Xaa locations
  Clone ID: MRT4577_66334C.1.pep
XFLXXXIXXXQPYXEXXEGXWXVRKCSLNHHQWLTVTQHSKYSRELPGDRERGSTDTLAPY

SEQ ID NO: 332479 - protein, 140 aa, Zea mays
  unsure (1)..(140): unsure at all Xaa locations
  Clone ID: MRT4577_66335C.1.pep
QRGGHGRPHEQQRGAQPGRSRQRAQQXRDXENPGGTQXXRXAAQGGGGSRXNSEEARTERXXQPERSPKGDXDAPSSGAXSAAGAXGTRSXTXTXASAXAPAPGAXXPAXXATXGGXPXQAXKRGPXXGGRXXXXRHXDP

SEQ ID NO: 332480 - protein, 78 aa, Zea mays
  Clone ID: MRT4577_66336C.1.pep
LLLFSFSSLREPWTGKNRALGTLGFESLHIIISLIQEWSVLVGNGFALLFGESFLIVPRCFPFAALFLSEDDLSNSVV

SEQ ID NO: 332481 - protein, 40 aa, Zea mays
  Clone ID: MRT4577_66337C.1.pep
QGSKRVFNFLEKAPQGLVKGGKKGIFTPMGFFFVWKPFLE

SEQ ID NO: 332482 - protein, 75 aa, Zea mays
  Clone ID: MRT4577_66338C.1.pep
PTFILSIYMWAGSGHILLYKLGLSHKPSKHPYPITLTMIHMAFSKPVTHFLSPLSKATAPRKITSHIYATCYKSN

SEQ ID NO: 332483 - protein, 196 aa, Zea mays
  Clone ID: MRT4577_66339C.1.pep
SSRPGRDRRRFEGAACDARCAAANISLQGKYLVDMLHLPSHGSAPGRPLPQLQHPLAASSRSWLQIPQMGPRPCASRSSPPSTSCTPRCMATLLPSASSLPAPSSTNPPCTLVVPASPSASSDTTPTPSLSRPQQSGYTHGVLVCEWRKSLMEAKGEESVEQMSKTRQMCSCWCFSTIATSLLKHGLYRVTRTPWN

SEQ ID NO: 332484 - protein, 102 aa, Zea mays
  unsure (1)..(102): unsure at all Xaa locations
  Clone ID: MRT4577_6633C.1.pep
RLDPRDPAQGPCVPGGPLGEXVDPLYPGGRFDPLGLADDPEEFAELKVKEIKNGRIAMFSMFGYFVQAIVTGKGPLENLADHLADPVNNNAWAFATNFVPGK

SEQ ID NO: 332485 - protein, 146 aa, Zea mays
  Clone ID: MRT4577_66340C.1.pep
FSPCLDTPTPHHNNTTQFHGVLVTLYRPCLRIEVAIVEKHQQLHICLVLLICSTDSSPSSSIKLFPDCCGRDKDGVGVVSDEALGDAGTTNVHGGFVEDGAGRDDADGKSVAMHLGVQLVDGGEDRLAHGLGPICGICNQLLLDAA

SEQ ID NO: 332486 - protein, 138 aa, Zea mays
  Clone ID: MRT4577_66341C.1.pep
DRSLEPLHTLIVAGVTRTVSVLYPTRHWAMRVRPMCMEDLSRMVQAEMTRMVRVWPCIWGCSWSTMVKTGLRTVLAPSTGSATSSCWMPLEGVVAEVEAGQGQTYGRVGGACRRDTSPVARCWRRRIGHRTRRSQISL

SEQ ID NO: 332487 - protein, 187 aa, Zea mays
  Clone ID: MRT4577_66342C.1.pep
MLSPSAHEASPVAPATTIDDAPADDGNQIPDEGIASDADETERLKFLTTGTRAQDDLERDIGRQADQMLIEQADARDKKRIEKLEAEAKRAEAAIQKLKNRLALPALDIQKAKLRGEMAAYRQKIDDLDKEMDGIQQRINDRHKEPGADEAAGDSANGPLPNETQREWLIRTGKITPFSKLAQNQPG

SEQ ID NO: 332488 - protein, 74 aa, Zea mays
  Clone ID: MRT4577_66343C.1.pep
QTRGETRGRTRGRTRGRTRGEASNPRTICFSLQLAPSLVGRSVTEVVMASANSWTLEVASPVAPQRLFRAAVMD

SEQ ID NO: 332489 - protein, 71 aa, Zea mays
  Clone ID: MRT4577_66344C.1.pep
SYALDAFRYEPHYGEDDSDQVVSGFMSLSKAPFAKDQYFFSRTAQFREQLQEALDRLGSMIVDLNELVMFL

SEQ ID NO: 332490 - protein, 66 aa, Zea mays
  Clone ID: MRT4577_66345C.1.pep
CSSVQVISVITSCIRVNRTIKQTITLLLIHSEPHSYNNFMTYTSAAKSIRQPYDICHVPVGRGWHS

SEQ ID NO: 332491 - protein, 100 aa, Zea mays
  Clone ID: MRT4577_66346C.1.pep
RIDSHTPMSAVGTKTAAPPGYLTEPCAPTEILRAELPLQIGWWTNSKPAHVLASTTPPLKLTSPSLERWSPKTPMHTQLSAVRMDPMTVATQRWEDQVYG

SEQ ID NO: 332492 - protein, 141 aa, Zea mays
  Clone ID: MRT4577_66347C.1.pep
HCPQFLCSGAFLSGLPASNVQSPSEPFIGHCSFYPLKLPLQVQWVLATSPAWRLALVCGRRVRRLPVAASPVDSGCASFVTRYSASCLSAASSRPERCTVCAPASSLGGRIRLGSARRLSLGEKWNRHPDAGSTRGGEPGP

SEQ ID NO: 332493 - protein, 74 aa, Zea mays
  Clone ID: MRT4577_66348C.1.pep
KTKKTLLFFLKKGGKGRTVFQVRKTPPPPGGGQSLPTMGGVNIPGGGGALALAGAHNCLCGNKAPKGALNPPRG

SEQ ID NO: 332494 - protein, 58 aa, Zea mays
  Clone ID: MRT4577_66349C.1.pep
CLTSLAPSMQVPSRCHPWPALISSHQSFILLHRLNIQASVSLPLSWFSFGARLYWPMA

SEQ ID NO: 332495 - protein, 104 aa, Zea mays
  Clone ID: MRT4577_6634C.1.pep
MPRKITLVKEGEPQPVDAAQGEPAPAPAAPTAALTEAEVDELPRAIVRRLVKDKLSHVAGGEGAEVIVNKDAMAAFAESARIFIHYLSATSVTSHSLHSPTISD

SEQ ID NO: 332496 - protein, 38 aa, Zea mays
  Clone ID: MRT4577_66350C.1.pep
RSCSVLSRVDHDAPCYGAPMLRPACVAYRLLRARALQA

SEQ ID NO: 332497 - protein, 65 aa, Zea mays
  Clone ID: MRT4577_66351C.1.pep
LISQDLTMYNQPTSSQRTSLEFGVNTRALTRHKQQSVDGDSRRDKQAQAQHECHIYRLVFKMGQV

SEQ ID NO: 332498 - protein, 48 aa, Zea mays
  unsure (1)..(48): unsure at all Xaa locations
  Clone ID: MRT4577_66352C.1.pep
MIPXXKKKKKKKKKKKKKKKKKKKKKKKKKKKKKKKKXKKKXKXKKKK

SEQ ID NO: 332499 - protein, 58 aa, Zea mays
  unsure (1)..(58): unsure at all Xaa locations
  Clone ID: MRT4577_66353C.1.pep
MDKTRNHTAHNQTXRRGENGIKKPKRHRQTSTKGMDPKFLRSLRYSGKGNTKRRDADS

SEQ ID NO: 332500 - protein, 170 aa, Zea mays
  unsure (1)..(170): unsure at all Xaa locations
  Clone ID: MRT4577_66354C.1.pep
TRTPTCTRRWWYCCREVAGARKASQSGDAGSPSGFVLELMWGKSPVQXKKKKKKTGGGGGDVVHLVRWVQSVVREEWTAEVFDGELLRYPNIEEEMVEMLQVAMACVSRSPERRPRMADVVRTIEEVRRSGSGTATGTGTRPSTEASTPATAAEAAQSRAEEGGSSAVAQ

SEQ ID NO: 332501 - protein, 153 aa, Zea mays
  Clone ID: MRT4577_66355C.1.pep
CMKQQGVANLLAWPTLMLQQLLASPLQQCQMPMMMPGMMPPMTMMPMPSMMPSMMVPTMMSPMTMASMMPPMMMPSMISPMTMPSMMPSMIMPSMMSPMVMPSMMSQMMMPQCHCDAVSQIMLQQQLPFMFNPMAMTIPPMFLQQPRRVLHHQ

SEQ ID NO: 332502 - protein, 74 aa, Zea mays
  Clone ID: MRT4577_66356C.1.pep
GAFARPRELARGMVTAARGGGGTIRRGIAGHAHEGVGGVVRRRGIRCGGGGGEEQEGCSLEKLWFLASFRIRPA

SEQ ID NO: 332503 - protein, 152 aa, Zea mays
  Clone ID: MRT4577_66357C.1.pep
MSGEHAKREMITGDKPEASGRKNDERTPLKEAGDKHKEESASSIKSHRKGDKKKKKMKKVVYYETNSSSPSTSGAESTSSKRQERKKYSKMPIRYPRILKRAPLLSVPLGKPPYFDGEDYCMWSDKMRHHLTSLHESIWDQNITLYLETIIL

SEQ ID NO: 332504 - protein, 95 aa, Zea mays
  Clone ID: MRT4577_66358C.1.pep
LSHQPITTVWSFKESRNPPLIGPFCPGRSCSELSPPSFLVLGIGVMHTCLLHYDVWDVGSHLAPRLHKVSHRLAYLSNFVVVLHTGLLCWVAWRK

SEQ ID NO: 332505 - protein, 39 aa, Zea mays
  Clone ID: MRT4577_66359C.1.pep
KKPPRKKKKKKKKKKKKKKKKKKKKKKKKKKKKKKKKKK

SEQ ID NO: 332506 - protein, 128 aa, Zea mays
  Clone ID: MRT4577_6635C.1.pep
PYDCAVVVLSWFTRVGQVRTRDQLPHRQRALQGGNAGDWGEHRDHDEVGGACSRGTIGPIMLAHVGNDVRLPWSTPWVAGANLYANGALKMPEDTIARMTTSTLPKLQKLYAAIEDNLAADETLSILG

SEQ ID NO: 332507 - protein, 55 aa, Zea mays
  Clone ID: MRT4577_66360C.1.pep
STSPRSMPNTTSSSVPGTPHTRPRKSSAPRRSLRSAKSKATKTSPSPSSSKRTWP

SEQ ID NO: 332508 - protein, 65 aa, Zea mays
  Clone ID: MRT4577_66361C.1.pep
APILQSSTSRICGCSLANPNLIGVIMASWGGFSCYGWPFAPYSVAKGMFGKLKACLEKTMVLLIL

SEQ ID NO: 332509 - protein, 79 aa, Zea mays
  unsure (1)..(79): unsure at all Xaa locations
  Clone ID: MRT4577_66362C.1.pep
KDQADYEDVIEIISDGSVEDEGIDEGIQQYEDIYEEGNYEAERSXDVWEEGEDSDDSDLDAVLQVPNGSANPGKNGKTG

SEQ ID NO: 332510 - protein, 401 aa, Zea mays
  Clone ID: MRT4577_66363C.1.pep
MFNRIKDKLKFKLAKVLAPEIDKKLAVEEKLSSVQFFGIAPWYQENLWEPPVQIVLRDQNSHRRGVAITILSKQELNREVNQGLLLVVGSFIIGIVVILLLLGLLIRYAVLLPLGKLHRALINYDNTEQFNLPPLPSNEIGFLGQTLVQTFNQLQIYQREALEIAERKYVEIAQRYELASQATRVWVWECQPKIHYFEVDPNLITWLGFEQPLEPADGDFFIHLGDRPMFWQAIEQSLEDPTMELSTELRLEAANGEIYHCLLRGQIHQEQGEAFVKIIGTIADITEIKKAEEQLKLSNKILAKATQLKDEFLANMSHELRTPLNSILGMIETLQNQVYGPLNGKQVQSLEIVENSGRHLLSLINDILDLSKIEAGRMDLDLNPTSVSALVNHSLTFVQQF

SEQ ID NO: 332511 - protein, 229 aa, Zea mays
  Clone ID: MRT4577_66364C.1.pep
LEAAGNTPEPDMGEGSLPQLCDQTQLARRLSTFTAGESIIRPRTEPLRRARHSATSRAFSQTWQFHKRLEYLRAHSTLQNVQTDRQQIPHPSNTLLQSRFPTKTVIALVLIGGLAYYLVDIVDPSWTDDVYAAFSSGDDSSSLTTPLHFYRNRTEVQHTLDYHIPDASAPLKDPTVAKFLSDQFEKLCFGWMMTEDDARKGVEGMEDVQMPITHAAGSESTSPCEISSR

SEQ ID NO: 332512 - protein, 84 aa, Zea mays
  Clone ID: MRT4577_66365C.1.pep
KVHTAVTDRHPLWAATDLISVHSPALGRCALPARVGIRLNLAAHSFLSVIALLFSDPGGIPTPRSGPYPHGNGLSFGSFPRFID

SEQ ID NO: 332513 - protein, 43 aa, Zea mays
  Clone ID: MRT4577_66366C.1.pep
PLVRTLFSLHAGGNINYVGGNNDLYSFTLYTVRTTGYSLLLPA

SEQ ID NO: 332514 - protein, 59 aa, Zea mays
  unsure (1)..(59): unsure at all Xaa locations
  Clone ID: MRT4577_66367C.1.pep
IVAVDFKPSGPQVGKLVXVSGSIRAGPXEHPIKFSQAFHFMQTGGSFLVQNDMFGLNYG

SEQ ID NO: 332515 - protein, 114 aa, Zea mays
  unsure (1)..(114): unsure at all Xaa locations
  Clone ID: MRT4577_66368C.1.pep
GRRRPRGGGGGGVRRLSWAPRRSSGAAARARGGGVGPCQCQQCRAVRXPGGDCARRRGGPVPVPAAAERPRXXXRRAEARRRLLVAGSGGSRGSGGGGRVGAGCKGHVLASFLK

SEQ ID NO: 332516 - protein, 57 aa, Zea mays
  Clone ID: MRT4577_66369C.1.pep
FVKWVENFVPKKRSGWLIRPANVVLTQVFLRPIPCIFYGTGKKIGQPNFWQFNSFKS

SEQ ID NO: 332517 - protein, 89 aa, Zea mays
  unsure (1)..(89): unsure at all Xaa locations
  Clone ID: MRT4577_6636C.1.pep
AAKNKNTGMHFIYNHPGPMQAGCMGGGKAVPARIQKNLPPFTGTGGGGGGPFXPPXXIPPXXPKPTPLKPFSQPYPPKNQPLHFHFPPS

SEQ ID NO: 332518 - protein, 57 aa, Zea mays
  unsure (1)..(57): unsure at all Xaa locations
  Clone ID: MRT4577_66370C.1.pep
RTRCLXCVTLREQLVPLLRAQXMSLSSDXRRSCRGVTLEHAGVMLSVVVDEDRLCDV

SEQ ID NO: 332519 - protein, 255 aa, Zea mays
  Clone ID: MRT4577_66371C.1.pep
MADPAEENVVSPPPTPAAPAVGASDSPLQPAADGASTEVSAPAPEVRSRGFRLFGEDTSVHKALGGGKTADVLLWKDKKTSAVVIGGATVIWVLFEVLDYHLLTLISHVLIGVLATLFLWSKATTFIKKSPPDIPVVQVPEDLVVNVSRALCNDINRALHLFHEIAMGHDLKKFLFVIVGLWVNSVFGSSCDFLTLIYIAVLLLHTVPILYDKYQDKVDHFAGRAHTEALKQYEVLDAKVLSKIPRGPVKSKKQN

SEQ ID NO: 332520 - protein, 288 aa, Zea mays
  unsure (1)..(288): unsure at all Xaa locations
  Clone ID: MRT4577_66372C.1.pep
EKKTHTHTHKAHFSNRQRGKVRFLWHLAFLRVPWPIRRRRTLSRRHRPLRPQPWAPXSPLQPAADGASTEKVSAPAPEVRSRGFRLLGEDTSVHKSLGGGKTADVLLWKDKKTSAVVIGGATVIWVLFEVLDYHLLTLISHVLIGVLATLFLWSKATTFIKKSPPDIPVVQVSEDLVVNVSRALRNDINRALHLFREIAMGHDLKKFLGVIVGLWVLSGVGSSCDFLTLTYIAVLMLHTVPILYDKYQDKVDHVAGRAHTEALKQYKVLDAKVLSKIPRGAVKSKKQN

SEQ ID NO: 332521 - protein, 117 aa, Zea mays
  Clone ID: MRT4577_66373C.1.pep
LLSDTIAPSTAPDTNDASHSKHNSLVGREAILYALLRSDQPVAKGIIVSTNPSTIVADLPIGRQFCEVVVTCVLKRDAVLARPYDDMQTMATAYMMSLAWPSRGQQVINKASATDSN

SEQ ID NO: 332522 - protein, 39 aa, Zea mays
  unsure (1)..(39): unsure at all Xaa locations
  Clone ID: MRT4577_66374C.1.pep
QFAXVYFFLIVPIGFSPEPLFMYRLKSSTRLPSHKKNLC

SEQ ID NO: 332523 - protein, 47 aa, Zea mays
  Clone ID: MRT4577_66375C.1.pep
RPLQERQKMLNLFWRARHQQVSTRRPGHVTGTRVEQEHVIPSQLEPN

SEQ ID NO: 332524 - protein, 79 aa, Zea mays
  unsure (1)..(79): unsure at all Xaa locations
  Clone ID: MRT4577_66376C.1.pep
SCIIIYPRVHIRGLLIQQRSVHPLSSXXHLFSFPALLLNHISTCVSYPLSFLALPSPTLISFCPILSFSLTFFLLLLIS

SEQ ID NO: 332525 - protein, 176 aa, Zea mays
  Clone ID: MRT4577_66377C.1.pep
RQPPGRFELAPSAPSLLAALQLAISLARTSSSPSPPHLPLAPATREVRARPLRALPARCPPARQSCSALLHLPAPPKSSQELPSASLSAPALGAHPCGAQRFSLSGSRSPSSSMAFGPKFLIPFTPAVLVQPWSHGGGTPRSVHGRSLRRWCSTTSAASPLVSFRCECPHPSGQQQ

SEQ ID NO: 332526 - protein, 155 aa, Zea mays
  Clone ID: MRT4577_66378C.1.pep
VQHCPLTSSPVRLPGPGHKCKGLDSGHLTPITLTNICLSLRVIIVIAGTRPRLLLVASDSLACANLITGDPVSVFTTEVAATTFASQGCPFLGLLKPMFAVLGTAFSWLWARQDLQSCEHLTDVFQRNTATGATAQCLSLPKKHDGLCGLSMGLG

SEQ ID NO: 332527 - protein, 57 aa, Zea mays
  Clone ID: MRT4577_66379C.1.pep
QAWLMGVYMVVNSHSEPAAYVLPLLLLQATGRLEQVQPFFCVGNSNPVLNARGSWVA

SEQ ID NO: 332528 - protein, 75 aa, Zea mays
  unsure (1)..(75): unsure at all Xaa locations
  Clone ID: MRT4577_6637C.1.pep
XXSLESNKMPTREXXLFHSLXPKVLXPSVVLXIFIXXCPAARPLTXXXXFXPLXXKHTFFXXXWLSRKVCXREMN

SEQ ID NO: 332529 - protein, 189 aa, Zea mays
  Clone ID: MRT4577_66380C.1.pep
AAPFSSKCTKSDSWERCLCQAVIPVHEASRPYIRYLLFNSFCLFVSDLFFAGTGYLTACFALMVGPEGRAVGVEHIPELVATSTENIKKSAAAPHLNDGSLSIHVSDGREGWPELAPYEAIHVGAAAPQIPEALIEQLKPGGRMVIPVGTVFQELKVVDKKLDGTVSIRDETSVRYVPLTSRDAQLHAS

SEQ ID NO: 332530 - protein, 44 aa, Zea mays
  Clone ID: MRT4577_66381C.1.pep
SGVSARQSVDILRCRDLRTHHLLSLIQPCDRRRSCCVLICFSEP

SEQ ID NO: 332531 - protein, 84 aa, Zea mays
  Clone ID: MRT4577_66382C.1.pep
KKNSLKPPGKAPPDLLPLSKASNALGGAHHPGPSNLLGDQATLNHQGGRLSLNLGLLLEPKGLAPQNPVKQFLRHPFPPPFLRK

SEQ ID NO: 332532 - protein, 111 aa, Zea mays
  Clone ID: MRT4577_66383C.1.pep
GGCRSGWGTPSEGGELKMTALMMKSPIYFLSLVRRPLGVSSKTSTMKPTVPLSTSMGNSFSTGGGSFYHSFTRKLSASSCRTAFHQIPVLTAAMYSPLIAPTLTPVHDLRR

SEQ ID NO: 332533 - protein, 62 aa, Zea mays
  Clone ID: MRT4577_66384C.1.pep
VCTSGSSQVLHVGCQVARLVMVRVPYRPLGTASQRRLLCRLGILFLVVAPVRCEKLVQVSLF

SEQ ID NO: 332534 - protein, 125 aa, Zea mays
  Clone ID: MRT4577_66385C.1.pep
TSSSTLLENFHLLITYFIPNYTLSNHLFHFENHTIESSLPFIVSYYISKSLYYFITYLYPSYHYLNSYIILFYYNDHPHLIFFFLIKNTFHFKIYITHLSYSPSNILIYGIFTFINFHIHLFQLF

SEQ ID NO: 332535 - protein, 136 aa, Zea mays
  Clone ID: MRT4577_66386C.1.pep
NTGKCLIWVINIYSIGSEGRYTRGSQQHHDFKIVAYSHGQAELRVRAKSIQAYRSASDHILLAHSGSFLSPCLVDYIHYLGAVIHLSVKRLPQFVSIITNANHGSTPYYIQGVQASVDHEATTCTMGWHPLSDSGA

SEQ ID NO: 332536 - protein, 160 aa, Zea mays
  unsure (1)..(160): unsure at all Xaa locations
  Clone ID: MRT4577_66387C.1.pep
MGTRRDNLLILEAVLMIQALLPXSXKEGLVRIALNKLSGDQNXRVTARLFAKERQPLLLRSYNAIGSSGDHHSYVMELNNYMNAHNYXEIHDGSPQRKXTEIIDTRGQPLTAVLQSYLSIACYCHXDYKVGNANTYKKNXKTAAILYGTGSIAGLTSEDS

SEQ ID NO: 332537 - protein, 83 aa, Zea mays
  Clone ID: MRT4577_66388C.1.pep
FTPTQRVPIAIQPPPLFVSTPRFFPLPLFRQTHEQWNLITRPPPPPHFHCFPQCTSVVKPRASNTPFRFPLYKSLLHCMLRVT

SEQ ID NO: 332538 - protein, 43 aa, Zea mays
  unsure (1)..(43): unsure at all Xaa locations
  Clone ID: MRT4577_66389C.1.pep
XXXXFLIFFXGXNNIFSFYLXXXIKKXPPLFHQPFNLNYSPFL

SEQ ID NO: 332539 - protein, 175 aa, Zea mays
  Clone ID: MRT4577_6638C.1.pep
MPRKITLVKEGEPQPVDAAQGEPAPAPAAPTAALTEAEVDELPRAIVRRLVKDKLSHVAGGEGAEVIVNKDAMAAFAESARIFIHYLSATANDMCKESKRQTINADDVLNALDDMEFSEFVEPLRTSLQEFRNKNADKRSEAKKQQKEKRRKLNEETLPQKENDPADDAKENGVA

SEQ ID NO: 332540 - protein, 62 aa, Zea mays
  Clone ID: MRT4577_66390C.1.pep
LIFHKKPLTMGVAQMIGWATSKPNLDTPVHETGQKLTSIAPNAVTSALLNHQWKDAQFKCAM

SEQ ID NO: 332541 - protein, 189 aa, Zea mays
  unsure (1)..(189): unsure at all Xaa locations
  Clone ID: MRT4577_66391C.1.pep
MAASKALMLAVGVVVVAGCAVGLSGATDHIVGANRGWNPNINYSSWSANQTFYAGDLISFRYQKGTHNVFKVKETGYDNCTMDGVTGNWTSGKDFIPLPRPGRYFFICGNGFCQSGMKVAITVXASSISPRRSTPRPPPAPXTHPPPPLSPQGRGRQRQRGPRWELPPSLSFSSKEYHLQRLTETWSLI

SEQ ID NO: 332542 - protein, 606 aa, Zea mays
  unsure (1)..(606): unsure at all Xaa locations
  Clone ID: MRT4577_66392C.1.pep
NPPPVGTCLYAALRRPWGPPRRRRQRHQPPPPPPPSHRHSPRLLHDAYALASRSRRPPPAPAPPLSLRPPXIIRRAMASAAAAQAQPGGAPPATAEYEEVLGRLSSLITQKVRANSANRGNQWDLMEHYVKILELEESIARMKVIHVAGTKGKGSTCTFTESILRSCGFHTGLFTSPHLMDVRERFQLDGVNISEEKFLKYFWWCWNKLKEKTDDDIPMPAYFRFLALLAFKIFSAEQVDVAVLEVGLRGKVDATNVVKAPVVCGISLLGYDHMEILGTTLLEIAGEQAGIFKKGVPAYTAPQPEEAMTALKQRASELGISLQVVDPLEPHHLKDQHLGLHGEHQYINAGLAVALASTWLEKQGHKDTLPLNRTDPLPDHFIRGLSSASLQGRAQIVPDSQVNSEEKDKNCSLVFYLDGAHSPESMEVCGKWFSHVTKDDTRLPSSVEQSHTSMSQKILLFNCMSVRDPMRLLPCLLDALTQHELPCDLALFVPXHSQHTKLGPNPLAPAEPEQIDLSWQLSLXRMWVKSQHNXSGINNTIYRDTSKIYDSRRIAREXQRRNAREHLSTSLHVVVTXSPEIIKEVIRRSKSKLELDYDLYWNWTLI

SEQ ID NO: 332543 - protein, 173 aa, Zea mays
  Clone ID: MRT4577_66393C.1.pep
MSDSKAANPMRELRIQKLVLNISVGESGDRLTRAAKVLEQLSGQTPVYSKARYTVRTFGIRRNEKIAVHVTVRGPKAEEILERGLKVKEYELRKRNFSESGNFGFGISEHIDLGIKYDPSIGIYGMDFYVCMTRPGERVATRRRARGKVGHAHKVNQAETVKWYKNRFEGIVR

SEQ ID NO: 332544 - protein, 92 aa, Zea mays
  Clone ID: MRT4577_66394C.1.pep
PPKLGFYTSAPAEPYQIDLSWQLSLQTVWEKFLQDKGINTTKSSDTSKVFESLPVAIEWLRKNARENQSTSFQVLVTGSLHLVGDVLRIIKK

SEQ ID NO: 332545 - protein, 594 aa, Zea mays
  unsure (1)..(594): unsure at all Xaa locations
  Clone ID: MRT4577_66395C.1.pep
YRSRSPPPGGTGLYAALRRPWGPPRRRRQRHQPPPPPPPSHRHSPRLLHDAYALASRSRRPPPAPAPPLSLRPPXIIRRAMASAAAAQAQPGGAPPATAEYEEVLGRLSSLITQKVRANSANRGNQWDLMEHYVKILELEESIARMKVIHVAGTKGKGSTCTFTESILRSCGFHTGLFTSPHLMDVRERFQLDGVNISEEKFLKYFWWCWNKLKEKTDDDIPMPAYFRFLALLAFKIFSAEQVDVAVLEVGLGGKFDATNVVKAPVVCGISSLGYDHMEILGNTLGEIAGEKAGIFKKGVPAYTAPQPEEAMTALKQRASELGISLQVVDPLEPHHLKDQHLGLHGEHQYINAGLAVALASTWLEKQGHKDTLPLNRTDPLPDHFIRGLSSASLQGRAQIVPDSQVNSEEKDKDCSLVFYLDGAHSPESMEVCGKWFSHVTKDDTRLPSSVEQSHTSRSQKILLFNCMSVRDPMRLLPCLLDASTQNGVHFDLALFVPNQSQHTKLGSNTSAPAEPEQIDLSWQLSLQTVWEKLLQDKGINTTKSSDTSKVFESLPVAIEWLRRNARENQSTSFQVLVTGSLHLVGDVLRIIKK

SEQ ID NO: 332546 - protein, 42 aa, Zea mays
  Clone ID: MRT4577_66396C.1.pep
CKFLENIEGKSFIRCRSVRKEHNLQDRLQKPKSELQKLKSIP

SEQ ID NO: 332547 - protein, 96 aa, Zea mays
  unsure (1)..(96): unsure at all Xaa locations
  Clone ID: MRT4577_66397C.1.pep
PRVTRLIDHTSQTSDLTMYSDQIEPGRLFLGAKMRGRATLPTHXISLITINVVGLHLRPDSPTYPTPLKSFHKFGLYSNSTGSTLCADCINPVSLN

SEQ ID NO: 332548 - protein, 74 aa, Zea mays
  Clone ID: MRT4577_66398C.1.pep
ATRPPTRPCRSSMSLRIESRHKDKKRRPLRMIFHYNQPWLKKKHHLPYLKGARRTNIKPRAGRPERTPTTQMLQ

SEQ ID NO: 332549 - protein, 109 aa, Zea mays
  Clone ID: MRT4577_66399C.1.pep
LNSDEAAFTILAAARPCTCPQPPSRPCASSPEAPAEPCPCCAGRGLAPPTGRCAERRPPPAAAPCTEAAPTLVELRPMYLCCRRRRQRQTVDAGQGGGPAVVGLGPIWW

SEQ ID NO: 332550 - protein, 70 aa, Zea mays
  Clone ID: MRT4577_6639C.1.pep
SVLQVHCIGSLFNPAGDSTPEFIKHSVRPLAILVNEFSVFAKIQIVGRLFSGTFYSRAYAPNQGGTFTNP

SEQ ID NO: 332551 - protein, 80 aa, Zea mays
  Clone ID: MRT4577_663C.1.pep
SIKSYHRGPINIWYSRRNRINQHACRHTYMSTKTDAKHAERDSKLKNFVFFFFTHTPHNILCMAASSALLIIGQPPPHAR

SEQ ID NO: 332552 - protein, 128 aa, Zea mays
  unsure (1)..(128): unsure at all Xaa locations
  Clone ID: MRT4577_66400C.1.pep
RACAISRSSRAGLQFPVGRIHLQGERRTQAEGPLXATASVYFGSIPEYLTCQVLGPAGNANKDLNGKRITPRHLQLXAIRGDEELDTLIKGTISGGGVIPHIHKSLINKFFNEGKTSGWAFLCLTRLI

SEQ ID NO: 332553 - protein, 179 aa, Zea mays
  unsure (1)..(179): unsure at all Xaa locations
  Clone ID: MRT4577_66401C.1.pep
MYSVXHWGGSIEIARXPARHDDHSRNMDLDRGTLSARXHELDNTQQSWLLRPPDVKKNDKHVDLGCVVAKSKLLWXALSCVVAALDLIGLPILIAKSIPHKKPGPPPPDEYTEELDKALLFLHAQKSGHLPKNNGIQWRGNSALSHGSDAKDVMGGLVGGYYDAGXDNIKAPFSKDFSM

SEQ ID NO: 332554 - protein, 77 aa, Zea mays
  Clone ID: MRT4577_66402C.1.pep
FQIQIKFMFTLVTMLILHIILALYFSKSNQLLLYLLTKPPSLAHGYMYNTSSTTVHNNMHSHSLLNVKKIYYSTISP

SEQ ID NO: 332555 - protein, 123 aa, Zea mays
  unsure (1)..(123): unsure at all Xaa locations
  Clone ID: MRT4577_66403C.1.pep
MAIVNKKQSGAAASGLKHILKRCSSLGRRQQHQRSVGEEEKEEEEEATGLPSDVPRGHFAVYVGERRRRFVVPIALLDRPEFRSLLRRAEEEFGFAGAGAGGALVLPCEEVXFRCLTCALCAR

SEQ ID NO: 332556 - protein, 198 aa, Zea mays
  Clone ID: MRT4577_66404C.1.pep
MFGSGLNLVSAALGFGMTAAFAAFVCVRFICCRERRGDTRAPPSPDFAAELDGPIERTRTGLEPLVIAAIPTMKYNCEAFNSKDDVQCSICLGEYREKEILRIIPTCRHSFHLACLDLWLEKQTTCPICRVSLEELQAAMPSVCSIQQLPPEPDPDPDPENSDNPAPQCFQPARQHPRDQNNSQETHESVEVIIEIRR

SEQ ID NO: 332557 - protein, 101 aa, Zea mays
  Clone ID: MRT4577_66405C.1.pep
PSLPGVGFLGVKFTNFLIGGLIRGWGVRERAGATRLFCSGGRQLRGGLIRGIMGVRWGMGRSLLKKLAPLALVGLQKGGFGLKFSPPYFCKLPQKSCCLRR

SEQ ID NO: 332558 - protein, 55 aa, Zea mays
  unsure (1)..(55): unsure at all Xaa locations
  Clone ID: MRT4577_66406C.1.pep
PPXMRGHRSCPLARTRIGAASAEGSRLRARPAGYLAPGYVALPHXPPXXXMACLP

SEQ ID NO: 332559 - protein, 50 aa, Zea mays
  Clone ID: MRT4577_66407C.1.pep
TNNCDFINFPTKTSFPVLCVFLTLHFLLILTNSYNLHSYPIPFINDSFSL

SEQ ID NO: 332560 - protein, 173 aa, Zea mays
  unsure (1)..(173): unsure at all Xaa locations
  Clone ID: MRT4577_66408C.1.pep
SWVRGPECNHKTGKPKILLALHSASSGTFWQSACLRRTTFPRNGSKSFLTAFHFIPRTPFTKRVSFGTVRIPKFFQTPKGTPNHGILASLALFYPFTSPLWFPSQPIHSSXLLKASLPFWVEFLLGNKKIKGTNKLTTKLWWLSQKPFGLALTSSSNQAXFSFPFSNQTKXCN

SEQ ID NO: 332561 - protein, 203 aa, Zea mays
  unsure (1)..(203): unsure at all Xaa locations
  Clone ID: MRT4577_66409C.1.pep
PTRPPTRPPTRPARCEHLIPSVSCYQVLLHFLIRNKKGRIDLXRVYVDILKVGFGSCTKGGIIYSVAISLIKKDSFLQALGILRQLKSLDLKLSKGALSTIEEEFNKXKQIGDMMNLLEXEWRCSPELRLRNKIFVSVCTNLGTDQAWLLFQILEALGFAPDASTLEIFIFHSCRETKLKSAHVYLSECFSRHIKPGVYSYNA

SEQ ID NO: 332562 - protein, 144 aa, Zea mays
  unsure (1)..(144): unsure at all Xaa locations
  Clone ID: MRT4577_6640C.1.pep
MGKEVXDVSTLKVVGVRDRDYADPPTSPVIDIDELGKXSLYRAWIXAEFMATLLFLLITVATVILYNDQTDATVSVTDAWCGDVGILGISXAFGEMIFILDYCTFGISGCHINPDGTFDLFLERKDYMVRLLLDMVWESLGDIC

SEQ ID NO: 332563 - protein, 59 aa, Zea mays
  Clone ID: MRT4577_66410C.1.pep
RCCNGMNLQWFIFSYPSLHRKYGGAQKHLVPQNAVVRNCHSPNFGPNSKVFGEKTPFVF

SEQ ID NO: 332564 - protein, 122 aa, Zea mays
  Clone ID: MRT4577_66411C.1.pep
YRSRIHGPTHASSDNGACLKRHLVCNGMNDCTDGSDEKMCENWECNFDELKCPSSNQCIPIVWKCDGTKQCTNGTDEENCSETCPNPDDFFCPGGPCISSTKRCDGVNDCSNGKDEADCKDT

SEQ ID NO: 332565 - protein, 351 aa, Zea mays
  unsure (1)..(351): unsure at all Xaa locations
  Clone ID: MRT4577_66412C.1.pep
EDSLLGEGSLGRVYKAGFPNGKVLAVKKVDDSASLLSLYGGGEEDAFLELVSNVSRLRHPNIVPLTGYCVEHGQRLLVYEYVGNRTLHDVLQHLSDDDGASKKLTWNTRVRIALGTARALEYLHEVCLPPVVHSRTFKASNILLDEEYSPHLSDCGLAAALTTAVVSAEAVGSFGYSAPEVAMSGTYTAKSDVYSFGVVMLELLTGRKPLDXKKTCHCPPFPTWWPIICCIDQAHAVQSLPRRQFWXSSRERSEQSLVRWAAPQLHDIDLLARMVDPALDGLYPSKSLSRFADIIAICVQPEPEFRPPMSEVVQQLVRLMQRASIIRRQSDDLGYSYRVPDRDGGAAGDVL

SEQ ID NO: 332566 - protein, 638 aa, Zea mays
  Clone ID: MRT4577_66413C.1.pep
MRWRSPAVLRLQLWLLAVSASLAALGVLAADLSKEPFTIRISCGSFDDVRTEPTNTLWYRDFGYTGGRFANATRPSFIVPPLKTLRYFPLSDGPENCYNINNVPNGHYQVRLFFALLDNPNLDSEPIFDVSVEGTLFSSLLLGWSSDDEKTFAEALVFVQDSSLSVCFHSTGHGDPSILSIEVLQIDDDAYNFGPPREKGTVLRAVKRLKCGSGKPAFDEDLNGIHWGGDRFWLGLQTLSSSSDDQSISSENVIAETLLAPNFYPQGIYQSAIVGTDRQPSLSFEMDVTPNKNYSVWLHFAEIDNGVTAEEQRVFDVLINGDTAFKDIDIIRMTGERFTALVLNKTVAVSGITLKIILQPVKGTRAIINAIEVFEIIPAEKKTLPQEVSALRTLKGSLGLPLRFGWNGDPCVPQQHPWSGVDCQFDSTKGNWIIDGLGLDNQGLKGVIPSDISKLQHLQNINLSGNSIKGNIPISLGTISVVQVLDLSYNELNGSIPESLGELTSLQILNLNGNRLSGRVPASLGGRPLHRARFNFTDNAGLCGIPGLRECGPHLSVAAKIGMAFGVLLAILFLVVFAACWWKRRQNILRAKRLAAAREAPYAKSRTQFTRDVQMAKHQRTHENARSSNSEGSPHLLS

SEQ ID NO: 332567 - protein, 560 aa, Zea mays
  Clone ID: MRT4577_66414C.1.pep
KPTNSLSELDVSFNNLTGNLPFSMGALSKLSSLYMQNNQLSGTVDVLSNISLATLNIADNNFSGMIPQEFSSIPNLIVGGNSFVNMPASPPSTLKPPLEEPQGPVSAPTSPDTPIDQDDRKIQTGPLIGIAVGSIAAASCVLFVLVFCLHNARRRNDDEISEPKDLVGSLAVSIETAASSREVLNNNHENSAVATSDLQHVGKMMMTPDRVLHDTTNGSSTAKRPKVPVTVTSYTVADLQVATNSFCEDSLLGEGSLGRVYKAGFPNGKVLAVKKVDDSALLSLYGGGEDAFLELVSNVSRLRHPNIVPLTGYCVEHGQRLLVYEYVGNGTLRDVLQHCLSDDEGASKKLTWNTRVRIALGTARALEYLHEVCIPPVVHSRTFKASNILLDEEYSPHLSDCGLAALTTVVSPEAVGSFGYSAPELAMSGTYTAKSDVYSFGVVMLELLTGRKPLDSSRERSEQSLVRWAAPQLHDIDLLARMVDPALDGLYPSKSLSRFADIIAICVQPEPEFRPPMSEVVQQLVRLMQRAAIIRRQSDDLGYSYRVPDRDGGAAAGDVL

SEQ ID NO: 332568 - protein, 118 aa, Zea mays
  unsure (1)..(118): unsure at all Xaa locations
  Clone ID: MRT4577_66415C.1.pep
MDRDLVRATKTKAAAPKNESEDXISSDSPLWFPDAGEPDYLYVSLVDDYECDLFGLEEPVKHLQIELDSLHQNLYXNDAGEIIXSRLESSNVKTIPFQSYRDVFSLERVRQREIIHGR

SEQ ID NO: 332569 - protein, 63 aa, Zea mays
  Clone ID: MRT4577_66416C.1.pep
GGLFLLLGPPINSYIASVTFIGSKFTYPCILRHNSSICEPKFNPLALLLQPIDCENHGVTQLN

SEQ ID NO: 332570 - protein, 55 aa, Zea mays
  Clone ID: MRT4577_66417C.1.pep
LFSHDGDPSVHEPQRVYLIDPRFPSTTHTLQHSHQLTQTLLLYRDATSTLLIPLL

SEQ ID NO: 332571 - protein, 80 aa, Zea mays
  Clone ID: MRT4577_66418C.1.pep
QGGQNYSVLGGNSMVQVNGNTACLGFVKAAAGQAPAAVIGGFQLENHLLVLDVEKQQLGFTTFLNAIGLSCSNFNFTLAG

SEQ ID NO: 332572 - protein, 93 aa, Zea mays
  unsure (1)..(93): unsure at all Xaa locations
  Clone ID: MRT4577_66419C.1.pep
MEDVLRVLKELTERHRDRKVSDASIXLHDRADIYHLTGTIDEPAHSPYDGGTTVINIRLPGXYSFAPPKMHLMTQVWYPNISWHYGSNCLDIL

SEQ ID NO: 332573 - protein, 86 aa, Zea mays
  Clone ID: MRT4577_6641C.1.pep
PALALAASGVLSGIPAAPLHLAGGCCSTDRAGVPYVPGAGLKAAPLSRDRAEKHVVGQVHRGVLRAGRPGGAAVRELLLGRRARAR

SEQ ID NO: 332574 - protein, 112 aa, Zea mays
  Clone ID: MRT4577_66420C.1.pep
ESAMASENKVFRFEEVAKHNVTKDCWIIIAGKVLFFCSSPILGSPSPLWWHRILDGWRHAFGGFVGYGFVKLFGVLVGGMVIPSVSSSIAKVLGPKESLRRYLSSMIRFCGE

SEQ ID NO: 332575 - protein, 37 aa, Zea mays
  Clone ID: MRT4577_66421C.1.pep
SMSKVSSPSHFHTHTHARQPRETKQRTPPPPLLSSAE

SEQ ID NO: 332576 - protein, 36 aa, Zea mays
  Clone ID: MRT4577_66423C.1.pep
MPKQIHEIKDFLLTARRKDARSVKIKRSKDVVKFKV

SEQ ID NO: 332577 - protein, 69 aa, Zea mays
  Clone ID: MRT4577_66424C.1.pep
MPKQIHEIKDFLLTARRKDARSVKIKRSKDVVKFKVRCSKYLYTLCVFDAEKANKLKQSLPPGLTVEEV

SEQ ID NO: 332578 - protein, 96 aa, Zea mays
  Clone ID: MRT4577_66425C.1.pep
SGRHPAAEDFESLVRSSSNTAPSPPPPWVRFTDRCHDLLLTARRKDARSVKIKRSKDVVKFKVRCSKYLYTLCVFDAEKANKLKQSLPPGLTVEEV

SEQ ID NO: 332579 - protein, 113 aa, Zea mays
  unsure (1)..(113): unsure at all Xaa locations
  Clone ID: MRT4577_66426C.1.pep
PGPPTPFRQIMVLMVGIPFAGTLEGPRLWRLGLQXAVAKLGLPKFVSDLFLVGLFYHLSNQIVTNTLERGVPLPHAGGIVLKLLFVIGFXIVVFGTKISPQTGMGTSIAIAGV

SEQ ID NO: 332580 - protein, 69 aa, Zea mays; identical to SEQ ID NO: 332577
  Clone ID: MRT4577_66427C.1.pep

SEQ ID NO: 332581 - protein, 118 aa, Zea mays
  unsure (1)..(118): unsure at all Xaa locations
  Clone ID: MRT4577_66428C.1.pep
METKRSVRTLGEADLKGKNAFVRADLNGPLDDAQKITDDTRIRAXVPTSSFLLQKGAKVILARHLGRPKGATPKYXSLKPLVPRLSELLAVEVLMAXDCIAEEVDKXLVEALPQGGVL

SEQ ID NO: 332582 - protein, 69 aa, Zea mays
  Clone ID: MRT4577_66429C.1.pep
MPKQIYEIKDFLLTARRKDARSVKIKRSKDVVKFKVRCSKYLYTLCVFDAEKANKLKQSLPPGLTVEEV

SEQ ID NO: 332583 - protein, 42 aa, Zea mays
  Clone ID: MRT4577_6642C.1.pep
IRNLIDNGIAPQRHLPAHRGRTSKPGSSFNFVPCRYSQTVPS

SEQ ID NO: 332584 - protein, 87 aa, Zea mays
  unsure (1)..(87): unsure at all Xaa locations
  Clone ID: MRT4577_66430C.1.pep
QSLCNDSSIEPNTRRWTRTRTAYGWPFSTHLTHSKLFFFSQXWSVWGELXTQNSKQAGSKHRHLMSSHETSPPESQASGDETLAFTR

SEQ ID NO: 332585 - protein, 69 aa, Zea mays; identical to SEQ ID NO: 332577
  Clone ID: MRT4577_66431C.1.pep

SEQ ID NO: 332586 - protein, 79 aa, Zea mays
  Clone ID: MRT4577_66432C.1.pep
DRRVLPLAHLGQWRTYHRGHLEGGFHLYRASSHPGVTNLTTLMGSRLVYETDVLICNPHNDRVLLKDVSVSTNDLHFVN

SEQ ID NO: 332587 - protein, 93 aa, Zea mays
  Clone ID: MRT4577_66433C.1.pep
KKKIFFYLSGGTSKGLRYMLWQMKIPSLRRKTGRAYIKRGRPPPLNITTSKAKLEPEPHYTRVWVGKTTRGYSVLALASAYLSCSVHDHNITR

SEQ ID NO: 332588 - protein, 101 aa, Zea mays
  Clone ID: MRT4577_66434C.1.pep
VMTPHACLLDRCSPVRANCVSDTSVETSTACPYAETAHTAWVQSLSSHRRPDLLLNGEPCGQRLLDAQNLSCLEQDIAPAHFGGLILPHSLCLQLHDCSTR

SEQ ID NO: 332589 - protein, 77 aa, Zea mays
  Clone ID: MRT4577_66435C.1.pep
TSKLGRHRGHSGGPIVNLYVLSAFFTPPSFVYYKKGKERKKERSEYTLTVGSIVIPQARDWVIGICLNENESSTCKL

SEQ ID NO: 332590 - protein, 69 aa, Zea mays
  Clone ID: MRT4577_66436C.1.pep
LVKQVCRPSPELKCHKPCNSKMLRRKQQSKAKATTESMFFQNEKKPGGTGPLNSDPRRTGPSHAGQRKN

SEQ ID NO: 332591 - protein, 71 aa, Zea mays
  Clone ID: MRT4577_66437C.1.pep
LHLRLLLPFPAVTYIHSQRIIFNFSTTPTLIHYHLPAQLRHHYDRSLHRLEPPPIPKYSCVPLQAHNLSIT

SEQ ID NO: 332592 - protein, 70 aa, Zea mays
  unsure (1)..(70): unsure at all Xaa locations
  Clone ID: MRT4577_66438C.1.pep
FIGLRHPFRPVSYSQPAAPXQPTQSRPYRSPSSLPSTRNFTRTQLLHFHIAAAHSPPQRPNDCRLLFHCG

SEQ ID NO: 332593 - protein, 153 aa, Zea mays
  Clone ID: MRT4577_66439C.1.pep
SVVPMVAAGVPFILSFGISWCSSWPAFFFFFLVASSQCSLSIDGVFRMRLPLRLAFRLPSFLCFPAWGCPWGGELLLVLPGGAVPVALPAFPPSVGFRVPFVVAWPPPCVASGCVRLSWPLVPWVSLFVPLGFLFVFSFVGRLRSCLFPPFRC

SEQ ID NO: 332594 - protein, 167 aa, Zea mays
  unsure (1)..(167): unsure at all Xaa locations
  Clone ID: MRT4577_6643C.1.pep
FHQGNGNKCFTCGNVGHYAKNCPRXSRGRCQHQIKIEEGSRXQVRQGKLNFTTVEELPEGAPIMTGIFPVFNQPALILFDSSASHSFISXKFSIKCXLPFYHAKGSFLIATPGGKIATNQLNRNVPISLGSKIFKTTLLILGLEGMDIILGADWMTQHRVVLDVAAR

SEQ ID NO: 332595 - protein, 134 aa, Zea mays
  Clone ID: MRT4577_66440C.1.pep
FWLLVYSGHAGDILLDDGLLRPNAGVLDAGSGLECYSLLDAQLDAVLDEVSRLGEGYNAERVEVSETGWPVKGHANEGDASVGNAGGYNRNLARRVLCSNAGTPRRPDGDIDVYLLVLFNENQKPGPTFERNYG

SEQ ID NO: 332596 - protein, 115 aa, Zea mays
  unsure (1)..(115): unsure at all Xaa locations
  Clone ID: MRT4577_66441C.1.pep
VRRRTHTQPLPQNTRRHLRFKMQIFVKTLTGKTMTLEVEPADTIDNVKGKIQDKEGIPPNQQWIIFGGKQLEDGRTLADYNIQRESTLCLVLRLRGGMLMFEKALSDXTITVEAE

SEQ ID NO: 332597 - protein, 159 aa, Zea mays
  unsure (1)..(159): unsure at all Xaa locations
  Clone ID: MRT4577_66442C.1.pep
MSSSWRPTTCRAWCAAVHGPEVSMNALQWALXNLRLRPDTKPXAQLHVQPSPNLLETTKPGAXIPFLGPNWLEASASTLALEAHQATITQAIPEHPLHIXSDTNLQPKTESVVLRTLXNMCDIDLNRWLDLFLMGSXRPFHPLNPLLLLSVRNYCINHV

SEQ ID NO: 332598 - protein, 160 aa, Zea mays
  Clone ID: MRT4577_66443C.1.pep
RVQEAIERARGYQVARANEAEFEVISAHEGTNVVDIRNRCCLCRGWQLYGVPCAHGVAALLSCRQNVHRYTESCFTVATYRKTYSQTIHPIPDRTLWDETADQGQVKVEMIINPPKSLRPAAQPRKKRVRAEDRGRVKRVVHCSRCNQTGHFRTTCAAPI

SEQ ID NO: 332599 - protein, 102 aa, Zea mays
  unsure (1)..(102): unsure at all Xaa locations
  Clone ID: MRT4577_66444C.1.pep
LRGAIKRLRRGKDGKKGGKGKDYLGKKKRQKKRQKKKRLKKGMXXXKNSPKTKQKNFFFWKKKKKKKKKKXKLKKKKKKKKKKKKKKKKKKKKKKKKKKPQK

SEQ ID NO: 332600 - protein, 158 aa, Zea mays
  unsure (1)..(158): unsure at all Xaa locations
  Clone ID: MRT4577_66445C.1.pep
ALRFESAVECAKKGAKYKGAAKVDAKMAVKNKGAENPNGGTKGNADKDPNXPKRASSAMLEFMEEFREEITENNPLNKSVNAVGKACSHRRKSLSDSYKATYVTKANKLKLEYNNDISDYSTGDSTAANKAHDEEEEEEYEEDSDEFNDEDNDEGHEE

SEQ ID NO: 332601 - protein, 179 aa, Zea mays
  Clone ID: MRT4577_66446C.1.pep
MDAGGEKCGDAAAEGGEGGGDLYAVLGLKKECSDAELKVAYRKLAKRQESFEELQQLFVDMFQSDIDSGFCNRTAKAHQFQGPAKSRTCSTSPSSSPSPPPTTAKDAEVPSCNCFNKRGSSALDSGKPPKPVEGGAGQNQAGFCFGVSALCYYQFTLLDNDAAYGRGRGYLLGLIMFLR

SEQ ID NO: 332602 - protein, 114 aa, Zea mays
  Clone ID: MRT4577_66447C.1.pep
MDAGGEKCGDAAAEGGDLYAVLGLKKECSEAELKVAYRKLAKKWHPDKCSSSSSVKHMEEAKEKFQEIQGAYSGLNLPSLSTLTQYTRLTALFHPYSQTTPSPVATTDQRQLIN

SEQ ID NO: 332603 - protein, 234 aa, Zea mays
  Clone ID: MRT4577_66448C.1.pep
GFWRLPAARGEWWQGEKEAAAAAAAAPSARFLPPPPASPLRVRAPPGVASLHLWAAGTYVRGEPHASLSPLGGDAGGEKCGDAAAEGGDLYAVLGLKKECSEAELKVAYRKLAKKWHPDKCSSSSSVKHMEEAKEKFQEIQGAYSVLSDANKRLLYDVGVYDDEDDEESMQGMGDFIGEMAQMMSQAQPTRQESFEELQQLFVDMFQSDIDSGFCNRTAKAHQFQGPAKSRTCW

SEQ ID NO: 332604 - protein, 72 aa, Zea mays
  Clone ID: MRT4577_66449C.1.pep
NLTIRMISALCLEKRKVRKCTRIGIFKCTSHGPLPVTPNSTLICIEPSLFSSLPGKQLCSLQMNHLALLRDW

SEQ ID NO: 332605 - protein, 141 aa, Zea mays
  Clone ID: MRT4577_6644C.1.pep
FSLPGPLPCHLSLVFSSSCPQFTCHVSYRLVPGAALRFWAVGWAWPQKQGSSCLLLEFCKANPFTRIVLTPGALYYWSSCLGLLFYINKEMSKKKKKKKKKKKKKKKKKKKKKKKKKKKKKKKKKKKKKKKKKKKKLGGAL

SEQ ID NO: 332606 - protein, 264 aa, Zea mays
  Clone ID: MRT4577_66450C.1.pep
MDAGGEKCGDAAAEGGEGGGDLYAVLGLKKECSDAELKVAYRKLAKKWHPDKCSSSSSVKHMEEAKEKFQEIQGAYSVLSDANKRLLYDVGVYDDEDDEESMQGMGDFIGEMAQMMSQAQPTRQESFEELQQLFVDMFQSDIDSGFCNRTAKAHQFQGPAKSRTCSTSPSSSPSPPPTTAKDAEVPSCNGFNKRGSSALDSGKPPKPVEGGAGQNQAGFCFGVSDTKETPKLPGQNASRRRNGRKQKLSSKHDVSSEDETAAGS

SEQ ID NO: 332607 - protein, 178 aa, Zea mays
  Clone ID: MRT4577_66451C.1.pep
MGDLSVGHSRRWCGRFAAVLCLCAAFCKPDELPMDPLPNLPPTRSLQCFEDEQVYSCCEGAYRLNPSGIIAVPVGAVDYYCGGACVVETEDVLNCVASALDGFAFYNGASVEDVRYALRRGCSHTARRGDFNDLEPHLGDYPDIYGDDDEHSFGSKVVAAPLRLLAFLGGAGLFFLGP

SEQ ID NO: 332608 - protein, 122 aa, Zea mays
  unsure (1)..(122): unsure at all Xaa locations
  Clone ID: MRT4577_66452C.1.pep
QGXQGDTKSTXXXKKKXATXPREPSGXGPAPPKQXXEXGTGGRXXEEPXXAKTTXKXXGTTEAPAXRPRQNXGAXKGGQKXGRTHAXREEEQXKKKXRXGSPAXQXNXXXXXRRPTKQRDXX

SEQ ID NO: 332609 - protein, 35 aa, Zea mays
  Clone ID: MRT4577_66453C.1.pep
SLLVNRLSIRYSIYTMLLPHIYDPPAQGIVSYHVL

SEQ ID NO: 332610 - protein, 63 aa, Zea mays
  Clone ID: MRT4577_66454C.1.pep
RNGNGGKDPRHLIKVALGGYPFRYKGWLPVWNPPVGSILKGFGFQTKTFVRTGYIGRLQAVCF

SEQ ID NO: 332611 - protein, 130 aa, Zea mays
  unsure (1)..(130): unsure at all Xaa locations
  Clone ID: MRT4577_66455C.1.pep
AFDQAFGQAFGFKTFKTPXMFVPIQAVLPPDANGPYKRYLLQSGKWFKQNVPNQEGIALPQANLRXLDWAGXELTDXLMKILTERGYSFXNTAEXREIVRDMKEXARLHRPGLRTGDGXAKTSSSVEKSY

SEQ ID NO: 332612 - protein, 536 aa, Zea mays
  unsure (1)..(536): unsure at all Xaa locations
  Clone ID: MRT4577_66456C.1.pep
IGLAKENEELRLQLKVLIEDNKRLVELYEHTVVNVEANQDGNPVDDLLNAQPAATSDFHAHNSSSVAQESKIVDEKCTNEDNFSRVTSVELRLQLEEMHEENDRLMGLYEKAMQERDEFKRKILEQSDSEAVKHIQLDEKDVEMSEAAENPEVKHIHDSTIAALKEVLQIVRSKLELVQDKVVSAQDAVKYFKALEIASGKAEELSARIELQRLGAQRGQEEITFLKSVLSESQKKKNAFEGKYFLPAASCWNLVLKTKSLAESKFDASFGSMNQKKEQLNHLQTRKIELSAARTRARESETELKSKIDGLKAKLRAHEAQRKEEEKVLFAIDNLDTSTTLMHKPKNYGKATDLLKSEEDRMKLLCELQKARGRVXSMVHKEIRSMNECDYIDREIAVLEAEIEDSCISILETDIEKFVRDNTLAEIWEGSAKDMEALLVDYQDCVFQVNLKEEEIKVCSESLQYQARDMDELQSKLNQAMRELGELLQDRRSLTACSLDEPTLPVGEKVAADLEAVRIHVDEAKQLLILDNQANS

SEQ ID NO: 332613 - protein, 157 aa, Zea mays
  unsure (1)..(157): unsure at all Xaa locations
  Clone ID: MRT4577_66457C.1.pep
MEYSSSEDEGLVGDFIDAEDNTFTKNIDQGTGVMASQIHGDDPSVGSMPPVIGNELLMAADVLAKNDEPRMGMEFDSDAAARAFYNAYALCFGFGIRVARSRSERRKGVEVLVMKRFVCLKEGHHRKKKPVEPSNKKKRKRLSIRXIGCPAMMGGGA

SEQ ID NO: 332614 - protein, 1084 aa, Zea mays
  unsure (1)..(1084): unsure at all Xaa locations
  Clone ID: MRT4577_66458C.1.pep
CQCQPSSRRRPLTARRGPEPASRTTARFLRRRPPPPRPRGXRHWQEAPAXARDPRASWAWETEWDRAYLLACAAGLLVDPLFLYAVAVSAPLMCVFLDAWFAAAVTALRCAVDAMHASNLLLRLRGACSPRREDTDEEEAQPGRDGGVPGRGTRSKEGVFLDVLVILPVMQVVVWVATPAMIRAGSTTDVMIVLLTAFLLEYLPKIYHAVRVLRRMQGVSGYLFGTIWWGIALNLMAYFVAAHAVGACWYLLGAQRATKCLREQCAQAGSGCAPWALACAEPLYYGATASSVGAARLAWAGNATARGTCLDSADNYQYGAYQWTVMLVANPSRVERVLLPIFWGLMTLSTFGNLESTTEWLEIVFNIVTITGGLILVTMLIGNIKVFLNATTSKKQAMHTRLRSVELWMKRKDLPRSYRHRVRQYERQRWAATRGVDECRIVRDLPEGLRRDIKYHLCLGLVRQVPLFQHMDDLVLENICDRVKSLIFPKGEVIVREGDPVKRMLFIVRGHLQSSQVLRNGAESCCMLGPGNFSGDELLSWCLRRPFLERLPGSSSTLATLESTEAFGLDAADVKYVTQHFRYTFTNDKSPRDMYIYVYCISCNREGSRDFKTLPQHDIRAKARRRATVAATTYAEQAWPTASFRLCRTRVERSAVLKEGGGEGGAASAARSRRGRQISGTAWSLEAPPAWTQLPSPALASTRRRRRPALALEEGYRRRGPARPGSCCHQLALLQLQEDCCRLWVLTHRNTREWERIKGLSKFLGVKNYLAWSRRALRLLKAKRLEGYVDGTVVEPKDKPSAEWKDWDAINSLVAAWMLSSMIPAIASTVDTIISAAEMWKALEEMYSGAGNVMLMVETEDRLHNIKQGERTVAEYVQELQCLWADVDHYDPIELPHSECVVWAKKWVEIRRVLQFLRGLNPEFEGRRASMFHQSTLPSLQEAIAAISQEESRLKVMRESPPVSSHPVFSAMRTKDARECYNCGDVGHIARNCTKPFKFNRGRGRGAARGGRGRGGRSWARANATTTKEDLEIFMENEAETKSTEQHKIPGNKNQESYTRDFVNFAYTDEGEENREKTWDSYQA

SEQ ID NO: 332615 - protein, 173 aa, Zea mays
  unsure (1)..(173): unsure at all Xaa locations
  Clone ID: MRT4577_66459C.1.pep
MSPCNEVYLPMLLVPGLKECLHCGILCNERFNVMHMDRNNYDAXISTSLNFNQLWKRYXGEDKRPEDLXVSRDYNEGMVXQLMMSKGTLDPTLIDIDETXNLSFTAADGSSVFVKGKIYQVPASDMEALKSPLMCLXENRSARKFCLYAXDYNEAVSMTHQGLELTTVTTRKL

SEQ ID NO: 332616 - protein, 124 aa, Zea mays
  Clone ID: MRT4577_6645C.1.pep
RVYQGARGYQAQLPCGISAQVLQSVQGPCLLRLPNLLKRVSVTSCWAKSLLTRVSIIPPRASLKGHHNSSCSQIQPKQRMFRFSSRRMNHFLLYSTGSFIGVLFHDTGGLSCFSSPRILARTML

SEQ ID NO: 332617 - protein, 58 aa, Zea mays
  Clone ID: MRT4577_66460C.1.pep
IFLFLWVVLIFFFSRHKHQHQFKNIFLNIFKNQNAKCIKNFFNHFYTPNTNGIIHMFN

SEQ ID NO: 332618 - protein, 82 aa, Zea mays
  Clone ID: MRT4577_66461C.1.pep
DILGGGFYSWGSFLKLPFKVVVFKRQLGSALNYASVFRFIMDLLKVVLNKCQEIRAQFYLGFYFWGNILSVVIAAESKILLV

SEQ ID NO: 332619 - protein, 322 aa, Zea mays
  unsure (1)..(322): unsure at all Xaa locations
  Clone ID: MRT4577_66462C.1.pep
MPKVKNPHIFMDISMSGGSAERITFELLANVVPKTAENFRALCTGESGLGASTQKPLYYKGTHIHRIVKGFVAQGGDFSRGXYCFISPGFFQLTSRCSVLYKFNXMLFPGKGGESIYGGKFPDENFRLLHNQPGVLSMANSGPDTNGSQFFITFKALPHLDGXLNEFQAIIFXKHVVFGKVVSGIALLKKLEAVGSETGNPSYQVKIVDCGEVSNTNSQDLLKGEKEKKLRTADGNSTAEGRAKLKKTSGDHKQRKKRKHYSSDSYSSDTSDSLSYSSDSGSDSESDSSMDTSSSSDHRRKRRKGLRRISASPQRERVTYKE

SEQ ID NO: 332620 - protein, 69 aa, Zea mays
  unsure (1)..(69): unsure at all Xaa locations
  Clone ID: MRT4577_66463C.1.pep
LVLINECKIGNFLLLCHCLQYQRCMEKGWQPWGXLTCSSFPNRAVFLSCSLLPLPIVHVPRLVLGQGSG

SEQ ID NO: 332621 - protein, 193 aa, Zea mays
  unsure (1)..(193): unsure at all Xaa locations
  Clone ID: MRT4577_66464C.1.pep
MPKVKNPHVFMDISIGGGSAERITFELFANVVPKTAENFRALCTGXGDFSSGDGKGGESIYGGKFPDENFKPLHNQPGVLSMANSGPGTNGSQFSITFKALPHLDGKHVVFGKVVSGIALLKNLEAAGSETGNPSCQVKIVDCGEVSNTNSQDLLXGEKEKKLRTADGNSNAEGRAKLKHLVIIRKKKKKRPL

SEQ ID NO: 332622 - protein, 87 aa, Zea mays
  unsure (1)..(87): unsure at all Xaa locations
  Clone ID: MRT4577_66465C.1.pep
SALAIISKVXDVSKALDQRIWNIDNNTFSIQRKKEGGNVVHNVYTQIFIITPYCHLIQIKQTNDDLLEDNKLLVINFLTKLKIIIYT

SEQ ID NO: 332623 - protein, 68 aa, Zea mays
  Clone ID: MRT4577_66466C.1.pep
ALHHQPSAHRDRDRLSKKDARKAEKAEKVAQRQQQHLFNTEDLFAANYSDVVVEEIQLKAISVMFDTS

SEQ ID NO: 332624 - protein, 93 aa, Zea mays
  Clone ID: MRT4577_66467C.1.pep
AAYPGVLKQRTRSPHGPTPPSGKTGVGWLRRAAKKAADKGSHGRADSFLSSSHGHQDAPLDGPLGRLSGLRSSLQVSPHHLLDLLYRAGQLLL

SEQ ID NO: 332625 - protein, 648 aa, Zea mays
  unsure (1)..(648): unsure at all Xaa locations
  Clone ID: MRT4577_66468C.1.pep
MPKVKNPHVFMDISIGGGSAERITFELFANVVPKTAENFRALCTGERGLGASTQKPLYYKGTYIHRIVKGFVAQGGDFSSGDGKGGESIYGGKFPDENFKLLHNQPGVLSMANSGPGTNGSQFFITFKALPHLDGKHVVFGKVVSGIALLKNLEAAGSETGNPSCQVKIVDCGEVSNTNSQDLLKGEKEKXRTADGNSNAEGRAKLKKASGDYKQRKKRKHYSSDSYSSDTSDSSSYSSDSGSDSESQSSMNTSSSSDHRRKRRKGSKKDKRKLTKRKGKHTRSKRKSRGSKRRPRRSYGSSSDDSVSSKTDNSSSDSENGGHYTKRSLPKADKESTKMTNSEQGRTFPDVDKVKQTVTTINRSQSHDGSKPSNKDDNGADDRSGNYSSKDRNDPGASSRISPIQTDVNLTKPVNVYGNIGGDNADAGMSITGTERHLPSNEPVSTNGKDLAVGSADNGQPQRIRKGRGFTQKYGFARRYRTPSPERPPVRPRYDGGREDRWNNFNRYGRTGPYSRRSPVRRYHGSPRANSPSRYQRRGRSRSRSPATRHDRGGYRRPSPRRSRSPADPRRDANDRPRSGHGGGGPDHRGHSPPANNRSRSKSLDPLRSRSPDAAPAKRESSRYNRRRSSSSRSSSPDADGNKGLVSY

SEQ ID NO: 332626 - protein, 113 aa, Zea mays
  Clone ID: MRT4577_66469C.1.pep
YWVPSSRELVVSRIPRGPQAENQEPPRPHPSFRQNWRMVGYDLPVAAKKAADKGSHGRADSFLSSSHGHQDAPLDGPLGRLSGLRSSLQVSPHHLLDLLYRAGQLLLHEICES

SEQ ID NO: 332627 - protein, 61 aa, Zea mays
  Clone ID: MRT4577_6646C.1.pep
IKGYAASYFKKTLYYSAGFYQHKNCRKNIPTTPVEKGQLLHDGSSHGGARRILRDRVRPPR

SEQ ID NO: 332628 - protein, 165 aa, Zea mays
  Clone ID: MRT4577_66470C.1.pep
QAQASSRGSSLSPALLSSSINIWHKIHSNLTGHINLHLHRKHKFRIHYKRVHNAKLARNMVHGACKSLCRYFSVRDQAFVSISIRLLDLELLLRLRLYLELSLLAGAASGDLDLKGSRLFDLDLLLAGGLWPRWSGPPPPGPDRGLSFASGLGSAGLRLRLGLGR

SEQ ID NO: 332629 - protein, 72 aa, Zea mays
  Clone ID: MRT4577_66471C.1.pep
LTPACSDHEGGGFGISEGHLRATRHRHAWARAKKSAGPGDRTIMDPYQIRLWTIRRTWSGASPSRSNLDRQR

SEQ ID NO: 332630 - protein, 747 aa, Zea mays
  unsure (1)..(747): unsure at all Xaa locations
  Clone ID: MRT4577_66472C.1.pep
MPKVKNPHIFMDISMSGGSAERITFELLANVVPKTAENFRALCTGESGLGASTQKPLYYKGTHIHRIVKGFVAQGGDFSRGDGKGGESIYGGKFPDENFRLLHNQPGVLSMANSGPDTNGSQFFITFKALPHLDGYCFLFFSHLALLDSQFSNHNQTLILSXFINDMWQVMIVALSIKFXNTRLQHVTSHPYISYCTFFDTIVXFNAVSFXICDVLSYISCLFSMAQQPXEFQAIIFXKHVVFGKVVSGIALLKKLEAVGSETGNPSYQVKIVDCGEVSNTNSPDLLKGEKEKKLRTADGNSTAEGRAKLKKTSGDHKQRKKRKHYSSDSYSSDTSDSLSYSSDSGSDSESDSSMDTSSSSDHRRKRRKGSKKDKRKPTKRKGKHTRSKRKSRGSKRRSRRSHGSSSDDSVSSKTDNSSSDSEKGGHHTKRSLPKDKESTKMTISEQGRTFQEADKDEQTVTTINRSQSHDGSKPSNKDGNRADERSGNYNSEDRNGPGGSSRNNPIQVDVNLTKPVNVDGNTGGDNAEAGMSRTGEGRHLPSNDSVSTNGKDLGVGSADNGQPQRIRKGRGFTQKYGYARRYRTPSPERPPVRPRYDGGRDDRWNNFNRYERNGPYSRRSPVRRYHGSPRANSPSRYPRRERMRSRSRSPVRRHDRGGYHRPSPRRSRSPAEPRQNVNDRPRSGHGGGDPDHSPPANRSRSKSRDPLGPRSPDAAPAKRESSRYNRRRSSSSRSSSPDGNKGLVSY

SEQ ID NO: 332631 - protein, 57 aa, Zea mays
  Clone ID: MRT4577_66473C.1.pep
LDMTTQPRGPNPLKGLGGLVCLNNCNTEHSFFYVSTIARMALYGRPTTKLSCVNEVY

SEQ ID NO: 332632 - protein, 59 aa, Zea mays
  unsure (1)..(59): unsure at all Xaa locations
  Clone ID: MRT4577_66474C.1.pep
DHASLNYDLRKLAVXLFHLPRLSLFMVGYAKMXSRGSQQXRAISVHELTQQMXDAKDMM

SEQ ID NO: 332633 - protein, 64 aa, Zea mays
  Clone ID: MRT4577_66475C.1.pep
YKLGSEPVTDTQSHIVGKKTKKVLFMSGAEKSDQNPFKALWFMISGDTGVTYRVQTGVLPPFFG

SEQ ID NO: 332634 - protein, 62 aa, Zea mays
  Clone ID: MRT4577_66476C.1.pep
GNNLLELEKSQHGSRVPATGQSASDELLYNNALNQAHTGWITVLFTMLWTSLISSFTPLLLI

SEQ ID NO: 332635 - protein, 43 aa, Zea mays
  unsure (1)..(43): unsure at all Xaa locations
  Clone ID: MRT4577_66477C.1.pep
MTTPNNDGDDAYGDADDHGGGAPGYAGGNRDXDYGNSHGNWRN

SEQ ID NO: 332636 - protein, 329 aa, Zea mays
  unsure (1)..(329): unsure at all Xaa locations
  Clone ID: MRT4577_66478C.1.pep
MDNFLSLYHGGIVEQDPYGNAKFIDMRHVPVLFDGRPSLSDVFTKAKQKLGFHQADDIAVDGVLNTGHPPNVIRRVIPIDCQLDWDNYVTSAMKTHLQLMEVVVRPVVVDRPPEDFDRPIDDVPTVPDAQSGPNLIPLSQPGDGLQTDSAACIPLAQXPIAERPLLVWLILRPWHVAASVMVLXASNSPEFRNEEEPYAFAMAADLDDDRPVGELSESDIEMLQRVFPDGRDPRVHEFSDLSLSHQANAEGRDDELLDALEAGPSMMIEKGRVFKDLTALKRWLQHYTVLRKMPYRVLHSYEKHRYMVVCDKDNCAWRVCARLQKITAK

SEQ ID NO: 332637 - protein, 112 aa, Zea mays
  unsure (1)..(112): unsure at all Xaa locations
  Clone ID: MRT4577_6647C.1.pep
PGKNPPGVAPPVPQEGAPRGRPPMGKLFKAPNPLLGLEKEGPMGPFVFPVGGGPPKAPPAQAGVPGXPXRTRRRPPGRAKGPSCRPXPGKPPAEPXPSPVKKPKSPPPLSGA

SEQ ID NO: 332638 - protein, 156 aa, Zea mays
  Clone ID: MRT4577_66480C.1.pep
MAKGGLSKLKCMLKRWHSSSRISRTPSGCSARSSHDVGDAGAGFALENSWRKGVAASSVFAFGGGGTGSASFHGADGVPPGLHPVYVGKSRRRYLIAADLVGHPLFQNLLDRSGGTGAGGTVVGCEVVLFEHLLWMLENADPQPESLDELVEYYAC

SEQ ID NO: 332639 - protein, 77 aa, Zea mays
  Clone ID: MRT4577_66481C.1.pep
TAPHSTTSPDAICWKIHHSKQGLLLIYLLCLPNLLLFLCAPTGHACWPKLTPIIRQCLLIHRPIICNTITTVLTCPA

SEQ ID NO: 332640 - protein, 54 aa, Zea mays
  Clone ID: MRT4577_66482C.1.pep
ARLPRWKHNIRYLKINRVRANELTQILFRLFEAQYAEQMVLRSHIYHLVSNGGR

SEQ ID NO: 332641 - protein, 57 aa, Zea mays
  Clone ID: MRT4577_66483C.1.pep
RTPGSRDAQSPSDPSAGLLRPLRRRRGKPGVPCVHPGPKLSRPLGLVFLLIYVDLAA

SEQ ID NO: 332642 - protein, 39 aa, Zea mays
  Clone ID: MRT4577_66484C.1.pep
AFRAAGTLQRLRVHECSRHRNRRTLALRMLGLDFFPPLP

SEQ ID NO: 332643 - protein, 62 aa, Zea mays
  Clone ID: MRT4577_66485C.1.pep
LDDSSSEPSFVDNTTRLKSVVMKIADLTCLFENLGSLVCRTLNGNFIQYLGMENGYRLSSLF

SEQ ID NO: 332644 - protein, 140 aa, Zea mays
  Clone ID: MRT4577_66486C.1.pep
KKAMEINPENPIMEEPPKGAEVYKNEKSVKAPVMLLFERGLPTFGFSPEDPNTFGSRIPRRLKLGLSIHKDKGAPEADTNMPPLEDNPGKSKMEEVDKAGFILMEERKRTSGLFCGSSPLCYNPICCWYARATIVSAVSK

SEQ ID NO: 332645 - protein, 41 aa, Zea mays
  Clone ID: MRT4577_66487C.1.pep
FSLPWSPWGLEVKIPMIRANVLPPAFVPRKASRHLLAPKST

SEQ ID NO: 332646 - protein, 95 aa, Zea mays
  unsure (1)..(95): unsure at all Xaa locations
  Clone ID: MRT4577_66488C.1.pep
PFWQPRCSRNQIPLLSAVANHSGEGAIASIHIRIADPFLLCSKNDMHYAXSNHAPNSNRLKLIHVNSSPPIALSAVHLWQQSGSPLIPLAESSDV

SEQ ID NO: 332647 - protein, 47 aa, Zea mays
  Clone ID: MRT4577_66489C.1.pep
REPMALMVYTRTGVSILRILVARTKQTKALVDTAQFRATTTESKALT

SEQ ID NO: 332648 - protein, 71 aa, Zea mays
  Clone ID: MRT4577_6648C.1.pep
NACVMVMLITIWLFGNKKLKYHIRSNLYFVALFSSLLMMMVLYSYYEQLHRVVTDEFKDIGYDLYKKTLLS

SEQ ID NO: 332649 - protein, 69 aa, Zea mays
  unsure (1)..(69): unsure at all Xaa locations
  Clone ID: MRT4577_66491C.1.pep
MAQVANTLLPVSLMVVSAVELCRAIEFGERHLASDEALWDLXERCQTHHRVHRDHRHKGRLFGTFNENA

SEQ ID NO: 332650 - protein, 80 aa, Zea mays
  Clone ID: MRT4577_66492C.1.pep
PRRPTQPRTPSLTHGQYYQSYIKIDTRGTLINELRPHTIYHSYLDYYPFLLYLLYCILLSLKQINIPIGLQCHALSICIS

SEQ ID NO: 332651 - protein, 82 aa, Zea mays
  Clone ID: MRT4577_66493C.1.pep
SRVSPVVSVPPSLGMEAPEPAFSLAVPPPPSAPWLHAPVLKFLNPVPVPLGFEKPVLIPRLPPSMCAFFYPGKKASVSPVVP

SEQ ID NO: 332652 - protein, 181 aa, Zea mays
  Clone ID: MRT4577_66494C.1.pep
GRPFFFFFFACHFTPSSSDAGLSSFPFAVDRGAPASGVVLSGLSVKFQPDPDATRQTAGARILRASHLRICWLVDHKPVRTSTTGVRPWCTLRAASVATSRLGQPGQPSARRVEPGDWRRRTPRVSPAPGSEPPRIQPPARGRAADDTRRAGPGACMPRLCGSGRAALPTCEDKFAAGTGT

SEQ ID NO: 332653 - protein, 67 aa, Zea mays
  unsure (1)..(67): unsure at all Xaa locations
  Clone ID: MRT4577_66495C.1.pep
KVKRAAQLKNEAQQEAETEPSQKHSRRNKKKNYAQQKEITYLNXPQGRGSRREGAVPQDQEEQDVCL

SEQ ID NO: 332654 - protein, 69 aa, Zea mays
  Clone ID: MRT4577_66496C.1.pep
TRARRNFRSVLPLRHVICWCLVNAQAYFSHSDLSALCDQCYGREVFWILFQHHAPEPKLFCFNPQHRSS

SEQ ID NO: 332655 - protein, 152 aa, Zea mays
  unsure (1)..(152): unsure at all Xaa locations
  Clone ID: MRT4577_66497C.1.pep
VCWDNPFFFPLGTQPAPVLQECFCLARLSVSVWIQTDSFPSWFFRGAKLRVLRGRFRCRSSPGAFPGRARSSRKGGPLGCGPVTPASRSLRKKNLRLSSWSPPFPFSFPCGLAPLPGLCFPRFFFYFAPEPPQKFPPVXWFVXGLDYLRLLK

SEQ ID NO: 332656 - protein, 85 aa, Zea mays
  Clone ID: MRT4577_66498C.1.pep
RATKLINPSDDFFFFFWQSLFFFPLWGAGLKGEKVGEEKLFFFPPVFRSSWCQLKGGGCVHSWGASFKGPWKKKKKGEPADRSKG

SEQ ID NO: 332657 - protein, 71 aa, Zea mays
  Clone ID: MRT4577_66499C.1.pep
KRKLSGLTSFTLVFLDQQMRLSLPLHKAAQWPHDGLSFYVARPSGLFILSRGLATGGWVAGILTRRGSAVP

SEQ ID NO: 332658 - protein, 65 aa, Zea mays
  Clone ID: MRT4577_6649C.1.pep
ARPPWDPHTRICTTISSHGTTMSAVYRHKRAFFTTGSLRRLVPRQIKLSCAYIRVSWLYRISTYT

SEQ ID NO: 332659 - protein, 71 aa, Zea mays
  Clone ID: MRT4577_664C.1.pep
PTRPPTRPAEWSGECSHLSDLLPFRLCFDFTRFHLAGGRQIVRPSNLCLGLTKVSRNLGGYSISSIYKHSS

SEQ ID NO: 332660 - protein, 65 aa, Zea mays
  Clone ID: MRT4577_66500C.1.pep
YFLIKPNPLKVKRGWVLRLLEPHLRHPWPNAHVFHSPNQSIVFPCNYLIYMHVILCSLHSNLKKQ

SEQ ID NO: 332661 - protein, 76 aa, Zea mays
  Clone ID: MRT4577_66501C.1.pep
SSETGAKSSHRGPQQLHISNISIEGSADISQASVASDSIDGRSVTYELVADLLWRLSNNIYTDEDAHLTELEEPIR

SEQ ID NO: 332662 - protein, 90 aa, Zea mays
  unsure (1)..(90): unsure at all Xaa locations
  Clone ID: MRT4577_66502C.1.pep
VRVRARIGLPNYQRACRRIRNCRRWENLKNWDADLRKVNQATLFDLILAANYLNIKGLLDLTCHTVADMIKGKTPXEILKTFNIKNDFTP

SEQ ID NO: 332663 - protein, 93 aa, Zea mays
  Clone ID: MRT4577_66503C.1.pep
SPARRRSGRCARRAIVILVPAAVVDGRERVAVVPRARRGGGFSVRRGRRGLATTWTCCPQTWTTSYVAEHWLFFMCAAGELARFGQSQYCSSL

SEQ ID NO: 332664 - protein, 265 aa, Zea mays
  unsure (1)..(265): unsure at all Xaa locations
  Clone ID: MRT4577_66504C.1.pep
ASSSSSLPISPTHYAPMQGRRCCSTPRSSXRLPQQFDAMAISDAACAAVVKSILCAKCSPYSADLFGAGPKIRTVPSLCNSTSSANSAESKETTTTTTQDYCKLVWDTCKDVSIASSPFQPPLQGTAPPPTSPSKLTDAWQSQSDFCGSFGGRSSVCLSGDTVSFNAAGPSPSPRPEPRGVCLXERIDNGSYLSLAPHPDGSSRIFLGSQAGKIWLATVPEQGSXGALQFEGAGPFVDLTDQVHFDSALGLMGMXFHPGFAXNGR

SEQ ID NO: 332665 - protein, 697 aa, Zea mays
  Clone ID: MRT4577_66505C.1.pep
MKMLRRLMLSLSFILLLPSYLAYPLCTDARAPVLLNTTLKFCASPSRNSRGCCDATADAALSKQFDAMAISDAACAAVVKSILCAKCSPYSADLFGAGPKIRTVPSLCNSTSSANSAESKETTTTTTQDYCKLVWDTCKDVSIASSPFQPPLQGTAPPPTSPSKLTDAWQSQSDFCGSFGGRSSVCLSGDTVSFNAAGPSPSPRPEPRGVCLERIDNGSYLSLAPHPDGSSRIFLGSQAGKIWLATVPEQGSGGALQFEGAGPFVDLTDQVHFDSALGLMGMAFHPGFATNGRFFASYNCDRTKSPSCTGRCSCNSDVGCDPSKLGTDSGAQPCQYQVVVSEYSARGSAAANVSQATSAADPSEVRRIFAMGLPYTSGHGGQVLFGPADGYLYLMLGDGGKGDPFNFAQNKKSLLGKIVRLDVDSTPSSSGGDLGNTSLWGNYSIPKDNPYADDSELEPEIWALGLRNPWRCSFDSERPSYFYCGDVGQDAYEEVDLISKGGNYGWRALEGPLVYHPQWAPGGNTSLSSIDAIPPIMGYSHSDVNKNIGSASIMGGYVYRGSADPCLYGRYLYADLYASAMWTGAEAPESSGNYTSALIPFSCSKESPIPCDAAAGSPLPSLGYVYSFGEDNSKDMYVLASKGVYRVVRPSLCSYTCPAERQETSPPAAPSSNKASMAEMGMGMLLVSVIVVWVLVT

SEQ ID NO: 332666 - protein, 81 aa, Zea mays
  Clone ID: MRT4577_66506C.1.pep
WIMNPTETLGACSKRGATRRANSEQRINPHTPIRGIPGMAATGPNGLKYRRNVRVSLQSFTSQRMRAKKKSEGVERALGFT

SEQ ID NO: 332667 - protein, 36 aa, Zea mays
  Clone ID: MRT4577_66507C.1.pep
NGRPFFFFFFFFFFFFFFFFFFFFFFFLSNLQIYYA

SEQ ID NO: 332668 - protein, 59 aa, Zea mays
  Clone ID: MRT4577_66508C.1.pep
LRALLRKICLLQAQQAKATSTRRLTGGPSLQMYSRLLSPRRCATSGSYRSRTTTSLLQS

SEQ ID NO: 332669 - protein, 144 aa, Zea mays
  Clone ID: MRT4577_66509C.1.pep
GENDLSKWVEEVQQKSERPDLTSANIVVSGGRALKSKENFKLIEDLADKLGGAVGASRAAVDAGYAPNEWQVGQTGKVVAPQLYLAVGISGQIQHLAGMKDSKLIVAINNAADAPIFQVSDYGLVQDLFQAVPELVKELEQAKQ

SEQ ID NO: 332670 - protein, 50 aa, Zea mays
  Clone ID: MRT4577_6650C.1.pep
WSVSMSVLLPSFGLKPFCSIHCLNFQCMSVFSYVHKNMRIFPLSYMHIFS

SEQ ID NO: 332671 - protein, 63 aa, Zea mays
  Clone ID: MRT4577_66510C.1.pep
LFYRSLRYQTRGIYTRQTGEPPPPETSEPRHVKPSPGLPANHTADALVIAPGAGPNTSMDPTG

SEQ ID NO: 332672 - protein, 77 aa, Zea mays
  Clone ID: MRT4577_66511C.1.pep
RCRLVIGVFSCPFMGLTFSDVTKENYIDLDLSYTLKVDIVKEHLHIVAHRFRYCHQTLSSDPYMQCLVLIACMYFMH

SEQ ID NO: 332673 - protein, 98 aa, Zea mays
  Clone ID: MRT4577_66512C.1.pep
DRIKRMLSERPPDEFPPLPQSPPMQMPHYPIRRKPRRRPREEGGGGGGGGGGGNGNGNGGDSSSGGDGTSASPKTESWGGASLGDDLPTPRELCRSLM

SEQ ID NO: 332674 - protein, 120 aa, Zea mays
  Clone ID: MRT4577_66513C.1.pep
LDGHRFGTGSDDGTCRLFDMRTGHQLQVYSREPDRNSNELPTVTSIAFSISGRLLFAGYSNGDCYVWDTLLAEVVLNLGNLQNSHDGRISCLGMSSDGSALCTGSWDNFSPPCCMFLVAP

SEQ ID NO: 332675 - protein, 116 aa, Zea mays
  Clone ID: MRT4577_66514C.1.pep
RRPTPILCLCMWLLVESILGYFSLIVMYDVGIYAIFYNDLCFTRYQPYNLCNYAMRMKIPFKTCVHALETHTTYYNFQIWIKIGPHAFVWWGMRLSACSWWRDDIESRTYFYVTLY

SEQ ID NO: 332676 - protein, 57 aa, Zea mays
  Clone ID: MRT4577_66515C.1.pep
LPHSLTLSTSIYFTLNPSQQLLLNLQILSDIPTHTDINQHYNSHHIPTTYHQLSHYL

SEQ ID NO: 332677 - protein, 93 aa, Zea mays
  Clone ID: MRT4577_66516C.1.pep
IHPKNPVSVCTTVAPIKLYVPPCWSPFLVFPNPRGSNRHLCLLLWGQIRGGPHFATQTCIHMESLPVAMILILLPKKKKKKTPKKKKKKKKNY

SEQ ID NO: 332678 - protein, 62 aa, Zea mays
  unsure (1)..(62): unsure at all Xaa locations
  Clone ID: MRT4577_66517C.1.pep
EGKTGTPTSGTRSGIGGVGYAGNRGRVAGAGRGSGYGGXGXGVVWTGSARRRGEAWREEPSR

SEQ ID NO: 332679 - protein, 39 aa, Zea mays
  Clone ID: MRT4577_6651C.1.pep
RDIAIDAKLLKLGNPVLKYCMVVYNRCWNRCLFPSIVCG

SEQ ID NO: 332680 - protein, 73 aa, Zea mays
  unsure (1)..(73): unsure at all Xaa locations
  Clone ID: MRT4577_66520C.1.pep
PRVRADLMTKAGRAVYVQXVLTAKMIYAAMALDLPIWTIKAIDKIRRGFLWKGRKQANGGHCLVAWGKVTRPK

SEQ ID NO: 332681 - protein, 72 aa, Zea mays
  unsure (1)..(72): unsure at all Xaa locations
  Clone ID: MRT4577_66521C.1.pep
LGHPLGATGARGGATFLKKKKPRGKNLKFGVVPMCKGFGMGAQPVFKRGKPVNGLPHVRANQAQXFLSKEAK

SEQ ID NO: 332682 - protein, 103 aa, Zea mays
  unsure (1)..(103): unsure at all Xaa locations
  Clone ID: MRT4577_66522C.1.pep
RPLALSTTTRRGAPHDTGTAFPHALALLALAASSTYTHTSXGMXCQPPSTFHLPSPTHQPPTLHLPPSVHIPPSLHLPAPFHLSPPKHVLPTVHITTTPCHYP

SEQ ID NO: 332683 - protein, 135 aa, Zea mays
  unsure (1)..(135): unsure at all Xaa locations
  Clone ID: MRT4577_66523C.1.pep
MPRKRLAWMKNGQWHYKVSAKDELVPGDILFLPVNIQESSVTEKTKKFGNKNEIDFLRDLEIYKDRAIIVLNKPPGMPVQGGVGIKNSIDILAPXCLRXGSSEVPRLVHRLDRDCSGVLVLGRTQFSASLMMLYS

SEQ ID NO: 332684 - protein, 38 aa, Zea mays
  Clone ID: MRT4577_66524C.1.pep
KATYQGPDTWIADFGLLLFKANNIHDHNVELLNFDLCG

SEQ ID NO: 332685 - protein, 71 aa, Zea mays
  Clone ID: MRT4577_66525C.1.pep
MPRGHTPALMPGGHSGLAAPGNRTTAGGPCSRAQEGREPARRRQGTALARQQGPRPVPPWPDRPRQVAGAG

SEQ ID NO: 332686 - protein, 171 aa, Zea mays
  Clone ID: MRT4577_66526C.1.pep
MVKYSQEPGNPTKSAKAMGRDLRVHFKNTRETAFALRKLPLTKAKRYLEDVIAHKQAIPFRRYCGGVGRTAQAKSRHSNGQGRWPVKSARFILDLLKNAESNADVKGLDVDNLYVSHIQVNQAQKQRRRTYRAHGRINPYMSSPCHIELILSEKEEPVKKEADNIVAARKQ

SEQ ID NO: 332687 - protein, 102 aa, Zea mays
  Clone ID: MRT4577_66527C.1.pep
DVETWKKEGAHMCMGTYCYNFLTRIKDWTLALNLASAKYGETQNIFRPACLMFIQRLVIEAHDIAYTKNLLEKLCLPIVHKTLLGTGEDIAGHCGEPEVAHA

SEQ ID NO: 332688 - protein, 112 aa, Zea mays
  unsure (1)..(112): unsure at all Xaa locations
  Clone ID: MRT4577_66528C.1.pep
RGPPGPKGRTVRSPACXTEAPGPLLEPTNQEHQRKLRKRPTLGAGPPPVRPPPPPPASAPADXRKINPPPPPHFSQIQIRPRVRARAYKQFFFFFFFFFFFFFFFFFFIGLT

SEQ ID NO: 332689 - protein, 59 aa, Zea mays
  Clone ID: MRT4577_66529C.1.pep
GTRGPPSSFFFFFFFFFFFFFFFFFFFFFFFFFFLKSKSGKKFSGKTPKGKFFPAPRGF

SEQ ID NO: 332690 - protein, 405 aa, Zea mays
  Clone ID: MRT4577_6652C.1.pep
MVNFGKKLMADQVEEWKGYYINYKLMKKMLKQYVQQTQHGGKDREQVLKEFSRILDDQIERIVLFLLQQQGHLASRIEELGEKRSALEEYDISQVYQLHDAYREVGLDLIKLLRFVDVNATGIRKILKKFDKRFGYKFTDYYVTTRANHPYSQLQQVFKQVGIVAVVGALSRNLEYLQHHEGSFVSIYDRPAVTLKDPIIDQVNHAVQKLTHATNFMQFLGQHSLIVQEDAQSGSEDLVDDQSYHFMSLMLNLVNTFLYMVNTYIIVPTADDYAVSLGAAATVCGIIIGSMAVAQVFSSVYFSAWSNKSYFKPLVFSSIVLSLGNLLYALAFDLNSLSVLLIGRLLCGLGSARAVNRRYISDCVPLKMRLQASAGFVSASALGMACGPALAGFLQTKFKIYSITF

SEQ ID NO: 332691 - protein, 95 aa, Zea mays
  unsure (1)..(95): unsure at all Xaa locations
  Clone ID: MRT4577_66530C.1.pep
CTEPTHAHSVGQPEGPRRRRDRAADEPVARPAPGAGRTSYQNNFPPPSAKFFXGXKKNKKKXXXKKKKKKKLKKKKKKKKKKKKKKKKKKKKSLY

SEQ ID NO: 332692 - protein, 109 aa, Zea mays
  unsure (1)..(109): unsure at all Xaa locations
  Clone ID: MRT4577_66531C.1.pep
MHHRRSPSSCSTAPRHAHPSFLVDKDAKVFVVGRNDLVGXTIVCRLLMLVFTCVVAHTHAKLDLTRQANFEAFFTADAERPRYVVLMASDVGSIHANSAFPTDFITDNL

SEQ ID NO: 332693 - protein, 98 aa, Zea mays
  Clone ID: MRT4577_66532C.1.pep
PFHIFFFIPLPLRPRPDFIFMNFESQIISLFTFAQRGLFTIFPSPYMEPLLPIQPMSGGKEGNSGPQPNHCHLQCHCPGTFLSKISPRAQSRNSLNSG

SEQ ID NO: 332694 - protein, 77 aa, Zea mays
  unsure (1)..(77): unsure at all Xaa locations
  Clone ID: MRT4577_66533C.1.pep
KPLDERALPRSLQESSVFDIRKGFEDILDAAYTDALNRXEMFHRSMLSGVKAKLLXRRVRQMVHQCILSLSXGRTNP

SEQ ID NO: 332695 - protein, 37 aa, Zea mays
  unsure (1)..(37): unsure at all Xaa locations
  Clone ID: MRT4577_66534C.1.pep
VAANDDLXSIVEETLVFESDTVVAPHRKCQRVVIIRR

SEQ ID NO: 332696 - protein, 70 aa, Zea mays
  Clone ID: MRT4577_66535C.1.pep
TIIADTTSNTARTTSLYNERSMGIPRAHCYTCYGQLNVHSAVSSFRTAYTNLLTRTASKASCFIFESAFS

SEQ ID NO: 332697 - protein, 41 aa, Zea mays
  Clone ID: MRT4577_66536C.1.pep
PRSSCSATENYISSLLLEVCNSQLHFGAVISRSNHWITWSD

SEQ ID NO: 332698 - protein, 141 aa, Zea mays
  Clone ID: MRT4577_66537C.1.pep
YAKLVRRMNPPRVVIDNDSCGNATVIRVDRVNKHGILLEAVQVLVDLNLVITKAYISSDGNWFMHVFNVTDQDGSKLHNREVIDHIQKCLESDGYLVPPANGYALSEDQFTSIELTGADRPGLLSEVCAVLAALSCNIVKA

SEQ ID NO: 332699 - protein, 177 aa, Zea mays
  unsure (1)..(177): unsure at all Xaa locations
  Clone ID: MRT4577_66538C.1.pep
PAGTKQSITVFGARRRDGAGQPQLRSLLPYHALPRYYSLAEFDRLSSHGPAATLNLTNDMGTVRVKSAWSGPKISSSVYSTRPVAVYEVSQVLLPVQIFKSDSPXAPAPSPAPAPDAKASDDVAPSPASGKSASAKAKAQEKSSSYRVGGARCLALVAVSSAGLTLLWWEENRQTPC

SEQ ID NO: 332700 - protein, 452 aa, Zea mays
  unsure (1)..(452): unsure at all Xaa locations
  Clone ID: MRT4577_66539C.1.pep
MVRWGEMVEEEEDDEYAKLVRRMNPPRVVIDNDSCGNATVIRVDRVNKHGILLEAVQVLVDLNLDFFGFFVCLFWFTSCSVFNVTDQDGSKLHNREVIDHIQKCLESDGYLVPPANGYALPEDQFTSVELTGADRPGLLSEVCAVLATLSCNIVKAEVWTHDGRTAAVIQVTDEATGRAVHDAGRLSRVQELLRDVMRGDGTCNHGGTGISAERRLHTLMLDSXAAAVPRRLVAAVTRGVDVAXRPKVVVMDCAERRYTVVILRCRDRPKLLFDTLCALADLQYVVFHGTVDAEGASKDKEAYQEYYIRHVDGHPVRSDAERARLVRCLEAAVERRASNGLELEVWTEDRVGLLSEITRVFRENSLSIIRAAITTRDGKAEDTFYVSDAYGNPVDGRTMDAVGEQLGHAVLRVKRGGHDAPVKHEAEGGAVSVLGSLLKSSFQGLRLIRSYS

SEQ ID NO: 332701 - protein, 106 aa, Zea mays
  Clone ID: MRT4577_6653C.1.pep
KETRFVVNTPPLLGAWIPPLLFVCVFFMSPLFEMSGFFLVRWLPVYARPPRIFFSLGLTCFFPLAFFSGLFVFFFGGGGFSRSSFSFSPFLGFFWVLFILFFYFLH

SEQ ID NO: 332702 - protein, 65 aa, Zea mays
  Clone ID: MRT4577_66540C.1.pep
YRCRQSPWCTCRRSRCSRRWPSGATLTTSEPTSSSCIGNPGICFSCPPVDTSTLLLLNIPCYAVV

SEQ ID NO: 332703 - protein, 92 aa, Zea mays
  Clone ID: MRT4577_66541C.1.pep
KCIYLGEAHVGITSIIHTHAFLFQELGEYTQAGDRVQQHHIGTRIHGHARSKFVRAETKKSNATLCPCARGHAFSDTRTAQATYLRARGGGG

SEQ ID NO: 332704 - protein, 124 aa, Zea mays
  Clone ID: MRT4577_66542C.1.pep
HHRPWKKNWCSRNSPPWDSSGPGPPRHHARTSYLNCTRLRFYDPTWLAYFSLDRSPQAACCRSPQHHRAHLVMVSRSLVDASCRISLECAHRLCWSGCESPRRSTRPLRSTSTVQRCLATFSSC

SEQ ID NO: 332705 - protein, 39 aa, Zea mays
  Clone ID: MRT4577_66543C.1.pep
YSARIRKLATIIATARVPELDLSDDAEQFERAPQALSSF

SEQ ID NO: 332706 - protein, 133 aa, Zea mays
  unsure (1)..(133): unsure at all Xaa locations
  Clone ID: MRT4577_66544C.1.pep
MENPRVFYDMTAGGAPAGRIAMELYPNEVPKTAENFRALCTGEKXWASPGEPLHYKASTFHRVIPQFMCQGGDFTRVNGTXGESIYXGEKFXDEKFVRRHTGPXVLSMANGGLNTDGSQYFIXTEQTPWLEGK

SEQ ID NO: 332707 - protein, 102 aa, Zea mays
  unsure (1)..(102): unsure at all Xaa locations
  Clone ID: MRT4577_66545C.1.pep
GARLLGNRFFVGSGSXVSLGFLEKGSPFPLPVEEPPQLAPRAFFGAPFRYPPSGGCFSFSPVGPKGWTNLFGDNVGELPSPYYPVQKTPVXQEMANAPPVFV

SEQ ID NO: 332708 - protein, 147 aa, Zea mays
  unsure (1)..(147): unsure at all Xaa locations
  Clone ID: MRT4577_66546C.1.pep
IGISGYASITRIAARANLQREDGQLASPDKPFISSRYMTYLFNCDTVRGLWNHRDIALIDSDTLLCIDLTAFVFXLRNVIKSLATTVEMLTARETTGLFAERDIAAAYVMGGAKNSVISEPIQDACLPVAVDREDQPSSCGNIVSNA

SEQ ID NO: 332709 - protein, 148 aa, Zea mays
  unsure (1)..(148): unsure at all Xaa locations
  Clone ID: MRT4577_66547C.1.pep
NPRGAPPLSGGEKLGPPPKTRGKKTPPPKKTGKRGPLCPRGKPPNPFGGEGPPPQGKKNRPGKTRGPPPQQNFKGQKGPPFPGGGGGKKGPEPPKKGPGLPPPPRKRGATPQRXNWAPPPGAQRGDRAPLGQAPKGKGPSAQIPDPGG

SEQ ID NO: 332710 - protein, 78 aa, Zea mays
  unsure (1)..(78): unsure at all Xaa locations
  Clone ID: MRT4577_66548C.1.pep
TSNLYYHYSHAYQPTNNLAEILSNILALHKMTTLNRDXLGQETLLHLFMQTYLHYXXXDQSXXLTSNAPKLEAHSNQQ

SEQ ID NO: 332711 - protein, 145 aa, Zea mays
  Clone ID: MRT4577_66549C.1.pep
MTTRLKKNRKKRGHVSAGHGRMGKHRKHPGGRGNAGGMHHHRILLDKYHPGYLGRVGMRYFHKLRNKFYCPGVKIERLWSMGPADKAGEAGGNKAPKMDVTQLGYLKGLGKGVLPPKPIVVKAKLISKVAEKKIKAEGGAVGFTA

SEQ ID NO: 332712 - protein, 31 aa, Zea mays
  Clone ID: MRT4577_6654C.1.pep
LSLYTVLGLHTSCCAPLYHIIVLRLNMTAER

SEQ ID NO: 332713 - protein, 372 aa, Zea mays
  unsure (1)..(372): unsure at all Xaa locations
  Clone ID: MRT4577_66550C.1.pep
GLGPKVRVFGDSGGDXYTNAIHIIPDAAGPDAWANAASAAGADASIWATEDDYRQWSAEPGYGDRNPSSRAGSEQPPPGKKARGGGGGSDSGGGGSTSKSRAIGKMFFKTKLCCKFRAGTCPYVTNCNFAHGMEELRKPPPNWQEIVAAHEEXRSSGRSTXPIMTSGSVVAGDGGGGSGGGSQGGRAFKGRHCKKFYTEEGCPYGDTCTFLHDEQSKARESVAISLSPTVGGGGYNAASANGVMVQKPSNWKTRICNKWEMTGYCPFGSKCHFAHGSTELHKYGGGLVDIDGRDILSTPDSKQAGGSAKAPLESAAASTALPPHADVYHLGIQSQRSAIASQRSGQLQRPIQKWKGPDKISRIYGDWIDENE

SEQ ID NO: 332714 - protein, 114 aa, Zea mays
  unsure (1)..(114): unsure at all Xaa locations
  Clone ID: MRT4577_66551C.1.pep
PPRGEQTGNQREGPGGCVTPSARKIRNLGPLNSAFITLLPKVEGATSVRDFRPPSLVHSLAKLVTKLLANRLADRLQNMVSXXNQTAFIKKRFIFFFSNTQKSCASLYIRRKDS

SEQ ID NO: 332715 - protein, 87 aa, Zea mays
  Clone ID: MRT4577_66552C.1.pep
NLTGICRALPFGGVKCWAQKNMSRKISYPKNPFSLFMGVSLSVLGVGFPPVVDGFQQFNSKKKKKKKKKKKKKKKKKKKKNRRGGRY

SEQ ID NO: 332716 - protein, 142 aa, Zea mays
  Clone ID: MRT4577_66553C.1.pep
PLLLCTPRPRPGHRAIVFPKLRRSSRSQCHNLVEQRPFLFPILAMFPALTWSAMAFFFFGSFFFVAGSWAPNPVSLSIPCSARMRPFLAGSCFSKPLAPNIVGCYALVMELTSAQPPGLNRHVASWRSSPMVAPPHARRGWG

SEQ ID NO: 332717 - protein, 231 aa, Zea mays
  Clone ID: MRT4577_66554C.1.pep
SKQQVFIQSDDSSVLAAFKKFARFRRVLNIEAKISGASKPSVDDIKKYADTVRVNRNSVAQINGYFLTHFTDTVSNLQDANITVHEGVLKNEFMNLGFDFFADPTIEIVTYSWAVLADGLVTDYPATAASYFRSPCSDMNLNLSYSILPAQPGALVNLAAPGTLAPAGAPAPLLQPSDVVDPPLPPVKAVITADAPAPEAADNTSSASSSNAGNGLLWAAIVALLSLSFLR

SEQ ID NO: 332718 - protein, 35 aa, Zea mays
  Clone ID: MRT4577_66555C.1.pep
PNIVFVLYRLLILEMQATGMRQQGGSKGGLPSEFS

SEQ ID NO: 332719 - protein, 122 aa, Zea mays
  unsure (1)..(122): unsure at all Xaa locations
  Clone ID: MRT4577_66556C.1.pep
PGTRTPDFLFVLDAFTFRAGAIHGLKGAPSSAAEDTLTMPTSARAGPTHQHQARLGGRFXSSLMCTSACMNVVLVGAAIEPCTKTGGLSDVLSGLTAVIGLNWLRVMAASTTYDQYKDSWDT

SEQ ID NO: 332720 - protein, 70 aa, Zea mays
  Clone ID: MRT4577_66557C.1.pep
SVHKPPVFWPRLDRGGGFSCPFSSRRWSRRSRIRSRRPTTRTCFWLSVLFSSLACSRFTRNVMILVSAWF

SEQ ID NO: 332721 - protein, 83 aa, Zea mays
  Clone ID: MRT4577_66558C.1.pep
VVRQHAARWEESFEAARRGASAGRSEPSGTGPLGRERPNVDRCGRRADAPDASLDSDSEAFSHNSATRHASRHWLVRPIAKTK

SEQ ID NO: 332722 - protein, 80 aa, Zea mays
  Clone ID: MRT4577_66559C.1.pep
PGRPSLPGGTSKSNRACISPLYSTYICTNATACTIVQTIPFYWPKKRARHVGLTRQARSNLTRRRASRPSPRQQGQPWKA

SEQ ID NO: 332723 - protein, 316 aa, Zea mays
  unsure (1)..(316): unsure at all Xaa locations
  Clone ID: MRT4577_6655C.1.pep
KKKCHVDWAVLPPWRRAWLFIILGFLLVLPSATAIGQVCGNAGNYTANSTYQSNLASLAAALPANTSTSPQLFATATAGQSPDAVYALALCRGDTTSSSNLTGCAACVKNSFAYAQRTCPHAKAASVYDDDCLLGFSSSDILDPANNMSTLFQYWNPASIPSGDASVVSADVKDLLTQTARAAASSSRRFATAFMDASGSSIPTLYSLAQCTPDLSAGDCLACLQRLVGLLNATTSVRLGGRVLVLRCNFRFENMXFYDGAPTTRVTTPSSSGPPAPPFPAPTTTDKRAAXTKPWVXAXLYSVAPPLAVVAALCFR

SEQ ID NO: 332724 - protein, 69 aa, Zea mays
  Clone ID: MRT4577_66560C.1.pep
RLDAAATPEGGGGIGSGGEALAPVNTYNLTLRASGRLSDRGVAPEGAPDDMSLIHDAHVTDSQDMKYLG

SEQ ID NO: 332725 - protein, 43 aa, Zea mays
  Clone ID: MRT4577_66561C.1.pep
CGHCLRLVVLWCSIVSASCPSSSQRVTLSGWCILRSPPLCASL

SEQ ID NO: 332726 - protein, 76 aa, Zea mays
  unsure (1)..(76): unsure at all Xaa locations
  Clone ID: MRT4577_66562C.1.pep
LATNSPIRGGRASRLELTGLEEGSGAGSLLVFVVRDLXRRARWHVAPRGGARTSRTSXXXLLHASCLLLPSYSRRS

SEQ ID NO: 332727 - protein, 653 aa, Zea mays
  unsure (1)..(653): unsure at all Xaa locations
  Clone ID: MRT4577_66563C.1.pep
MEEHQVKPSDLPPTSLHNQDSAATPVTSADPARPAASNDSPSQVASAAPAAVSAPTAAPAEDAAGREASASVFSASGLSSWAKNLKIPQPSPGQESPTGKNTFARLTSGLGLRLSPKAAQQDEGAEGSTSPTTGQPGVFGSLTKGIVDSSKNAVKAVQVKARHMVSQNKRRYQEGGFDLDMTYITENIIAMGFPAGDLSSGLFGYFEGFYRNHMEEVIRFFEMHHKGKYKVYNLCSERLYDASLFEGKVACFPFDDHNCPPIQLVISFCHSAYSWLKEDIENVVVVHCKAGKARTGLMISSLLLFLKFFPTAEESIEYYNQKRCVDGKGLILPSQIRYVKYFERILTYFNGENQPPRRCMLRGFRLHRCPYWIRPSITVSNHNGVLFSTKKHPRTKELMPEDFWFSAPKKGIMVFALPGEPGLAEVAGDFKIQFHDRQGDFYCWLNTTMMENRVTLNPTDLDDFDKRKLPSPGFQIEVVLVDYDGSQPAKPKPGAGPAADKSHADSSASTVAKENSAAXLKNPTRELEXNNDRDEVFSDSDGEDGSSNGRKEKTAGGGQSSVNAAKPSQTGNMEEAAASAAASRLDKVAISSEQGTTKAPDGTSLKTEVSSKASSTTAPPPPAADSSSMSEFKAIAADASVFSFGDEDDYESE

SEQ ID NO: 332728 - protein, 129 aa, Zea mays
  unsure (1)..(129): unsure at all Xaa locations
  Clone ID: MRT4577_66564C.1.pep
RRAINLRRLFXTXTVXLXPSPAALPASSLXLPPPSXPSPRRASPRHPVPRRPPFLGSXSLPLPLRASLPHFGPLRXLLAPVPRVGGDVHLVXLLFLSRSTLFGAXXLSCVPSTYVWLDPYRVPGAILSS

SEQ ID NO: 332729 - protein, 75 aa, Zea mays
  Clone ID: MRT4577_66565C.1.pep
MKVTGIFRLSALALLSLSGNTGADSLGREAKCYNELNGCTKIYDPVCGTDGNTYPNECVLCFENRKRQTSILIQK

SEQ ID NO: 332730 - protein, 98 aa, Zea mays
  unsure (1)..(98): unsure at all Xaa locations
  Clone ID: MRT4577_66566C.1.pep
IYEGYALPHAIMRLDLAGRDLTDYLMKILTXFGYSFVTTAEREIVRDIKEKLCYVALDFENEMATAASSSSLEKSYELPDGQVITIGNERFRCPETLF

SEQ ID NO: 332731 - protein, 68 aa, Zea mays
  Clone ID: MRT4577_66567C.1.pep
KPQQTSLLKTFGNRVWAKKSFSNLHLYAPAPRFCFQGMGHVSLQKSRTKSWPARFCFLEGLIFRACLV

SEQ ID NO: 332732 - protein, 111 aa, Zea mays
  Clone ID: MRT4577_66568C.1.pep
MGVQKTIIQEGNGPSPKKGDTVTMEYTGWLKDAQSDKGKQFDSTTGRGPFQTQIGVGRVIKGWDEGVVQMKLGEKARLDITSDFAYGNQSFPGLIPPNSDLIFEVELKKIN

SEQ ID NO: 332733 - protein, 50 aa, Zea mays
  Clone ID: MRT4577_66569C.1.pep
LGAVIPTMVIGVFFFFLVQNDAVRSRGKTKKGRTNEAEARYHTNSLVTNS

SEQ ID NO: 332734 - protein, 94 aa, Zea mays
  Clone ID: MRT4577_6656C.1.pep
EPKTVWAFKRKIQTMAQFQGLDFTQKFQGNLNLHPKHFYKLFKKTFGGGRGGSLPTSKNSNALVGKRTFSYPIENTSPEINGLKDSKQSNICLF

SEQ ID NO: 332735 - protein, 114 aa, Zea mays
  Clone ID: MRT4577_66570C.1.pep
LRLYPTQGGVHDNPAPNKRSENTNQTHKTTKELQHQKEKHKTFNPRASGTPTPPPGTLKATKRTAHLEEPEKGKEARPPRRAGGKGGVPPETRTANTTGDNRALTATSHRNRKL

SEQ ID NO: 332736 - protein, 105 aa, Zea mays
  unsure (1)..(105): unsure at all Xaa locations
  Clone ID: MRT4577_66571C.1.pep
AGGVVHEKGLLPQALPSWLTRITDRICQWTGLFPSAINHVLINEYHPXKGIMPHQDGPAYYPVVAIISLASPVVINFTPHQKLKEQQDTDPQDLLAHELPSPAET

SEQ ID NO: 332737 - protein, 103 aa, Zea mays
  Clone ID: MRT4577_66572C.1.pep
HAIMTHITPDVYRVCSNLFQEANKMKCFLRDVAHNTMHNVSRTLARNLSYVAHYQNITSQYFTLFIMGRSVLFPILILSLQNCISLLVIFSIRPLLLFFLIIV

SEQ ID NO: 332738 - protein, 263 aa, Zea mays
  Clone ID: MRT4577_66573C.1.pep
MEHTTTEHTAAAGEQESPPTALALRSLADYTVGAIPTLFYVPDFISHSEQSQLLHHIYQAPAPKWKTLKNRRLQNWGGVVHEKGLLPQALPSWLTRITDRICQWTGLFPSAINHVLINEYHPNQGIMPHQDGPAYYPVVAIISLASPVVINFTPHQKLKEQQDTDPQDLLAHELPSPAETENNGSGSQERGATNESDPSSSSLMLMPCSLLIFKDQAYTDYLHGIQDSELHNLDKVENVSQCQELKHLHSDSILGGMSMEEHD

SEQ ID NO: 332739 - protein, 277 aa, Zea mays
  unsure (1)..(277): unsure at all Xaa locations
  Clone ID: MRT4577_66574C.1.pep
TTTQHTAAAGEQESPPTALALRSLADYTVGAIPTLFYVPDFISHSEQSQLLHHIYQAPAPKWKTLKNRRLQNWGTLCLLRXGGFGLEIAXLPPFLDXCRIEQEXVHEKGLLPQAXPHQDGPAYYPVVAIISLASPVVINFTPHQKLKEQQDTDPQDLLAHELPSPAETENNGSGSQERGATNESDPSSSSLMLMPCSLLIFKDQAYTDYLHGIQDSELHNLDKVENVSQCQELKHLHSDSILGGMSMEEHDTFRRSATRVSLTCRLVLKVHKKLFKI

SEQ ID NO: 332740 - protein, 45 aa, Zea mays
  Clone ID: MRT4577_66575C.1.pep
HQHITNLFFYYQHTLAFDANLLYLTLHPTYNTYNSYFNPLPMVNP

SEQ ID NO: 332741 - protein, 47 aa, Zea mays
  Clone ID: MRT4577_66576C.1.pep
SLETRVCLVLMIHYHYDVNICMEINSGTHMLCTRLCPFRNGCDSLKI

SEQ ID NO: 332742 - protein, 48 aa, Zea mays
  Clone ID: MRT4577_66577C.1.pep
SMVAPGVHVHLKRAHESCPVSMPDLQIVSCTGFADFIVACGYIVNSPQ

SEQ ID NO: 332743 - protein, 49 aa, Zea mays
  Clone ID: MRT4577_66578C.1.pep
GLCRKIYLSVLREDMSPVQKPWYSVSVTEASCLFPSLSSPPPYLDRVLN

SEQ ID NO: 332744 - protein, 61 aa, Zea mays
  Clone ID: MRT4577_66579C.1.pep
CLWLRSTPWRPKDTNFFYKSSVKLKHASHSDGDTIVDAAGKAGSVVNIRRADLHEAKQNNE

SEQ ID NO: 332745 - protein, 167 aa, Zea mays
  unsure (1)..(167): unsure at all Xaa locations
  Clone ID: MRT4577_6657C.1.pep
ITAALAQXGLLEPKDVDLLNITSMACPALPLCPLAQTEAERGILPILKRIRAVFDKVGIKDEESVVVRITGCPNGCARPYMAEVGFVGDGPNSYQIWLGGTPNQTTLAETFMNKVKLQDIEKVLEPLFSYWNSTRQEGESFGSFTNRMGFEQLKEVVNKWEGSASAA

SEQ ID NO: 332746 - protein, 89 aa, Zea mays
  unsure (1)..(89): unsure at all Xaa locations
  Clone ID: MRT4577_66580C.1.pep
SEGCKRAPWLSXDCCRSSCYSSGXTLMKLLQHCVDIQHQKRLILYHQHVEPVEQNASHVSLLQVSFLPTFTILMFKLLKIDYSQYLCCH

SEQ ID NO: 332747 - protein, 57 aa, Zea mays
  Clone ID: MRT4577_66581C.1.pep
DLFIPCFLTGYRVNTSKCNHLQTNPINLSHCAYLTHIDSPARFPLKDQWKTIASTDL

SEQ ID NO: 332748 - protein, 96 aa, Zea mays
  unsure (1)..(96): unsure at all Xaa locations
  Clone ID: MRT4577_66582C.1.pep
ARKETGGTNTRTTREPKRTTRDANNRASQEKTQKKRRSSTTHTSGKQQRPRKTKGAEGDQXKEHAKDEAHNKKPHPRQRTARGEQKQKKNAKNQKE

SEQ ID NO: 332749 - protein, 75 aa, Zea mays
  unsure (1)..(75): unsure at all Xaa locations
  Clone ID: MRT4577_66583C.1.pep
MPNXWRLGMKCAVCHTTAYFAEEAQCEGISFHKCCLLCMVCKKNLDSTTVAVHGEEIYCKSCYGKKYGPKGYGYG

SEQ ID NO: 332750 - protein, 711 aa, Zea mays
  Clone ID: MRT4577_66584C.1.pep
MARVRSTARIDRKGDEIEAAETVPISEAMKRSGLVTSEDVPAAGAEQVDVEETDYEDDYSSAVPSKPSHLDFGKSTVSEETTPKPGKDEIVVFKSFFNAGLRFPLNKMIADVLKKFGIYFHQLTPNAIVRLIVYIWALRSQGVEPFVEGFCRVHELHYQTKARRDGLHDNFGCYNFAYRKTTKFPVINYRSKWPAGWKSEWFYVKVDDDKEKLAQSPLELIFGETRPQCNMTPEGSTQTALAEFRIITEHIGTRDLVQEFLAFKKEKEPIKMKEPRPKRQRIVIVTEVIEATPPRASAPKVPAIESTTATEAVPSEAAPEEARAKDAKSEDINLETIAADIDKMLLNMATEEAAAATEETTAAKPEKEEMTEDTSEDETFDFQNLVGQELTKAKKEELKEYAISCGYWLGALLFGGIDDEGLGCIRDQTGAKVIGTLSKSISFPKLEADISRYRRQHIVGSLFYSNFKSMLLSKALKMQQDLEDKRHEVIIENLENKIKEQSAAIEKKDFELQTAEGLLEDAEAKITKLNLKLLSQSENFEQEKLKLDAKLEAEVQKSSELKESLTNLQNKCLEFSNRCIQQLKQVFHFVGASSEKFTPSTEDLPGAFEHIECEINDLDEVIAGHGDFCALAASRGTAVAFLKSGCEHGKIVNRPNFSLSPADLDNIPSLARSIANRVIKLVWTKGGRSKASDEARSHLKLVDQAEAEAAE

SEQ ID NO: 332751 - protein, 785 aa, Zea mays
  unsure (1)..(785): unsure at all Xaa locations
  Clone ID: MRT4577_66585C.1.pep
MARVRSTARVDREGDETEAVETVPISEAMKRSGLVTPEDAPAAETEQAGIEETDSEDDYNIAVPSKPSHLDFGKSTISKADFPKMVKLGYFSEDKKELIRFGGEETTPKPEKDEIVVFKSFLKAGLRFPLNRMIADVLKKFGIHFHQLTPNAIVRLSVYIWALRSQXVEPFAXKTTKFPMISYRSKWPAGWKSKWFYVKIDDDKEKLVQSPLELIFGETRPQRNMTPEAAFGTRPKRRLNRVLDVIGFEYPDYERLDKGAEGQKRKRVVGALNKDDEDQSKKKQKPEAKVLASKKRKDSISEQKSIDEEEKTSATSSDAEIEGILKVMTETLPVKLSPLGLHLTKLFHMKKEPTKTKASRPKRQRIVTVTELIETTPPRAPTPKVLTIEGTTATEAVPSEVAAEEARAEDANYEDINLESIAADIDKMLLNMAAEETAAATEETTAAKPEKEGITEDISEDETFDFQNLIGQKLTEAEKEELKEYAISCGYQPGALLFGGIDDEGLGCIRDQTGAKVVGTLSKSIGFPKLEADISRYRRQHIVGSLFYSNFKNKCLEFSTRCIHQLKQVFHFVGASSEEFTPSAEDLPGAFEHIEGEINDLDEVIAGHSDFCALAASRGTAVAFLKPGCEHDKIVNRPNFSLSPADLDNVPNLARSIANRFIKLVWTKGGWSKAGDEARSHLKLIDQAEAEAATNEPGALMNLVEESTADDADDDDTKDCKGLFKNLKFYLSREVPRESLLFIIPAFGGTVSWEGEGAPFKEIDEDITHQVDSICNNLLHQSLTI

SEQ ID NO: 332752 - protein, 57 aa, Zea mays
  Clone ID: MRT4577_66586C.1.pep
ISPHGTLLVMAKYDYGLSRGALFASRSRTLLCMLVCTGDILCHLNVHVPGASRSPGV

SEQ ID NO: 332753 - protein, 822 aa, Zea mays
  unsure (1)..(822): unsure at all Xaa locations
  Clone ID: MRT4577_66587C.1.pep
MARVRSTARVVSEGDETEATETVPISKVMKRSGLVTSEDVPAAEAEQADVEETESEDDYSSAVPSKPSHLDFGKSTISEAGLRFPLNKMIADVLKKFGIYLHQLTPNAIVRLSVYIWALRSQGVQPFAEGFCRVHELHYQTKARGDGLHENFGCYNFAYRKTTKFPVISYRSKWLAGWKSEWFYVKVDEDKEKLVQSPLELIFGETRPPCNMTPEGPTQIALAEFRVIAEHIGTRDLVQEFLAFKVFPTMKQWAMPKLEGKKKEGELIRLPYHYKFKKHFKVPCQEWLDTIEVIXFGTRLKRRLNXVMDALGFEYPDYERLDKGAEGQKRKRVADVLNKDDEEQLKKKKLKPEPKTNASKKRKATAPKQKAIDEEEETAASPSTTDVEEILKVMTESLPVKLSPFGPHLMKLFQKDKEPAQTKKAARPKKQRIITVTKAIKGTPPQASALAVESTTATEAAPSEAEDIHLESMVADIDKILLNMAAEEAAAATEETVAPKPKKEKEMAEYTSEDEAFNFQNLVGQELTKAEKEELKEYAISCGYRPGALLFGGIDVERLGCIQDQTGAKVIGTLSKSIGFPKLETDINRYRRQHIVGSLFYSNFKVVCAQSMLLSKALKMQQDLEDKKHEVIIGNLESKIKEQSTVIEKKDFELQTTEGLLAEAEAKIIELNTKLLSQSENFDQEKQKLNTKLEAEVFYFVGASSEKFTPSAEDLPGAFEHIEGEIDDLDEVIAGHGDLCALVSSRGTAIAFMKSGCEHGKIINRPNLNLSPADLDNIPNLARSIANRFIKLVWTKGGRSKAGDEARSHLKLDDEAEAEAEE

SEQ ID NO: 332754 - protein, 556 aa, Zea mays
  Clone ID: MRT4577_66588C.1.pep
MSLAGSALEAALQAVGRGLDAAGDHRLLYCKGDGRLVALEDRARDLPLPDGGVLPSVPHDVEVEQCRRDPERIRPFPSGPSSAAADGPFVCSFDKMAEYFNRKSCLSETVPLGSFNSLFSFTGSWKNDAATTKALAIDGYSLPLFRVKIRNSELTLLESVKRRIPNVWDPSALASFIENYGTHIIISVTVGGKDEVYIKQHSLSQLSELEFKNYAREIGRERFADVENKSNASSINYSEKDMTVIFRRRGGCDLVQSFSDWRGTVASAPDVIGITFLSIVSLVDDIPGKKHLARAVELYLTYKPPIEELQYFLDFRVPLVWAPAPPGIAGHHRKEPVCPSLQFSLMGPKLFISTEQISVGRRPVVGLKLILEGAKQNRLAIHLQHLGSLPKIFLPHWDSYITIGPPKWQGPEEQDSRWFEPIKWKNFAHVSTAPIEYTETNITDLSGVYIVTGAQLGVWDFGAKSVLHLKLLFSRVPGCTIRRSVWDHSPSSSSIHKADESSSSSSDNAKLLKIIDMTETLKGPQDAPGHWLITGAKLGVEKGRIVVRAKYSLLNY

SEQ ID NO: 332755 - protein, 640 aa, Zea mays
  Clone ID: MRT4577_66589C.1.pep
MARVRSTARVGSEGDETEATETVPIFEAMKRSGLVTSEDAPVAEAEQADVEETESEDDYSSAVPSKPSHLDFGKSTISEGDLSKMLNLGYFNEAKKELIRFGGEETTPKPGKDEVVVFKVSLRLLTPNSIVRLSVYIWALQSQGVEPFAEGFCRVHELHYQTKARGDGLHENFGCYNFAYRKTTKFPVISYRSKWPAGWKSELFYVKVDEDKEKLVQSPLELIFGETRPPCNMTPEGPTQFALAEFRVIAEHIGTRDLVQEFLAFRVFPTLKEWAWLNLKEEKKGEFVRLPYHYKLKKHFKVPCQEWLDTIERLDKGAEGQKRKRVADVLNKDDEEQLKKKKLKPEPKTNASKKRKATASKQKAIDEEEETAATPSATEVEEILKLFQKDKEPARTKKAARLKKQRIITVTGAIEGMPPGASAPKTPAIESTTATEAAPSEATNAEAAGTEDINLESMVADIDKILLNMAAEEAASEEAAAATEEIMASEPERKKEIAEDPLEDEAFNFQNLVGQELTQAEKEELKEYAISCGYRPGALLFGGIDDKRLGYVRDQTGAKVVCAQSILLSKALKMQQNLEDKKHEVIIGNLESKIKEQSAVIEKKDFELQTTEGLLAEAEAKITELNTKLLSQSENFDQEK

SEQ ID NO: 332756 - protein, 82 aa, Zea mays
  Clone ID: MRT4577_6658C.1.pep
RMRDVITWPARFNGVQHDTERHQNQRLRFWRWAHPHRPGALLKASDGGGPHGVLYTESPSDRPPPPIQLLCVTATNGVRCMT

SEQ ID NO: 332757 - protein, 76 aa, Zea mays
  Clone ID: MRT4577_66590C.1.pep
QEAHDSNRVRPANSVSHHSSGISVRVCTAVLHFYPSLSTPIRSCPVCDHQRTKPTYDSVSASSAKKMQTLNTNRKG

SEQ ID NO: 332758 - protein, 85 aa, Zea mays
  Clone ID: MRT4577_66591C.1.pep
GAVWSSGGCPSCPAPSDRRTIRARNPLARVLSVGLRCFGCLRVTGLLNLFMAWQVQPFVGGLRSIKHYSSAQLAAYQCRQPMAGA

SEQ ID NO: 332759 - protein, 205 aa, Zea mays
  Clone ID: MRT4577_66592C.1.pep
RRHVQISVGRRPVVGLKLLLEGAKQNRLAIHLQHLVSLPKIFLPHWDSHITIGPPKWQGPEEQDSRWFEPIKWKNFAHVSTAPIEYTETNITDLSGVYIVTGAQLGVWDFGAKSVLHLKLLFSRVPGCTIRRSVWDHSPSSSSIHKADESSSSSSDNAKLLKIIDMTETLKGPQDAPGHWLITGAKLGVEKGRIVVRAKYSLLNY

SEQ ID NO: 332760 - protein, 811 aa, Zea mays
  Clone ID: MRT4577_66593C.1.pep
MARVRSTARVDREGDETEAVETVPISEAMKRSGLVAPEDVPAAEAEQADIEEADSEDDYNIPVPSKPSHLDFGKSTISKADFPKMVKSGYFSEDKKELIRFGGEETTPKPQKDEIVIFKSFLKAGLRFPLNRMIADVLKKFGIHFHELTPNAIVRLSVYIWALRSQGVEPFTEGFCRVHELHYQTKARKDGLHENFGCYNFAYRKTTKFPMISYRSKWPAGWKSEWFYVKVDDDKEKLVQSPLELIFGETRPQCNMTPEGFEYPDYERLDKGAEGQKRKKVAGALIKDDEDQSKKKKEKFESKVLTSKKRKESIPEQKSIDEEEKTSATSSDAEIEEILKVMTETLPVKLSPLGLHLMKLFHNEKEPTNTMASRPKRQRIVTVTEVIETTPPRAPTLKMPATEIMTATEAVPSEAAAEEARAEDANSEGINLESIAADIDKMLLNMAAEETAAATEETTAAKPEKGGITEDTSEDETFDFRNLVGQELIEAEKEELKEYAISYGYRPRALLFGGIDDEGLGCIRDQTGAKVVGTLSKSIGFPKLEADISRYRRHHIVGSLFYSNFKSMLLSKALKMQQDLEDKRQEVIIENLENKIKEQSAAIEKKDLELQTGEGLLVDAEARITELNSKLLSQSENFEQEKLKLNARLEAETQRNLELKESLKNLQTSSEEFTPSADDLPRAFEHIEGEINDLDEVIARHSDFCALAASQGTAVAFLKSGCEHGKIVNRPNFSLSPTDLDDVPNLARSIANKFIKLVWTKGGRSKAGDEARSHLKLVTKSYLMLTFSFEFLNSAYNTFVQIDQAEAEAVE

SEQ ID NO: 332761 - protein, 95 aa, Zea mays
  Clone ID: MRT4577_66594C.1.pep
FSIKKKKKKKKKKKKKKKKKKKKKKKKKKKKKKKKKKKKKKKKKKKKKKGGALLRDQILLPRACKEKFFFWGPQNKIQGPGFKNGGRGKPWGYPN

SEQ ID NO: 332762 - protein, 861 aa, Zea mays
  unsure (1)..(861): unsure at all Xaa locations
  Clone ID: MRT4577_66595C.1.pep
MARVRSTARVDREGDETEATETVPISEAMKRSGLVTSEDVPAAEAEQAEVEETGSEDDYSSTVPSKPSHLDFRKSTISEGDLPKMLKLGYFNEETKELIRFGGEETTPKPGKDEVVVFKSFFKASLRFPLNKMIVDVLKKFGIYFHQLTPNAIVRISIYIWALRSQGVEPFAEGFCRVHELHYQTKARGDGLHENFGCYNFAYRKTTKFPVISYRSKWLTGWKSEWFYVKVDDDKEKLVQSPLELIFGETRPPCNMTLEGPTQIALAEXRLEGKKKEGELIRLPYHYKFKRHFKVPCQEWVDTIEXMCNEILGNYSKKEDQLMTAAFGTRPKQRLNRVMDAIGFEYPNYEWLDKGAEGQKRKRVASALNKDDEDQPKKKKRESEAKIVAPKKRKASTPKQKSIDEKERTSATSSAAEVEEIIKVMTETLPVKLSPLGLHLTKLFQKEKEPTKTKAPRPKRQRIVTVTEVIEATPPGASALKTPAIESMIATEVVPSEAAAEEARAEDAKFEDINLEGMVADIDKMLLNMVTEEAAAATEETTAAKPEKVEMTENTSGDEAFNFQKLVGQELTKAEKEELEEYAISCGYWPGALLFGGIDDERLGCIRDHTGAKVIGTLSKSIGFPKLEADISRYRRQHIVGSLFYSNFKSMLLSKALKMQQDLEDKKHEVIIENLENKIKEQSVAIEKKDFELQTTEGLLADAEAKITELNLKLLSQSENFKQQKLKLDAKLEAEVFYFVGASSEKFTPSTKDLSGAFEHIEGEINDLDEVIAGHGDFCALVASRGTAVAFLKSGCEHGKIINRPNFSLSPTDLDNIPNLARSIANRFVKLVWTKGGRSKAGDEARSHLKSDDEAEAEATE

SEQ ID NO: 332763 - protein, 72 aa, Zea mays
  Clone ID: MRT4577_66596C.1.pep
REEPRGQKNEPPENKEKKTFYAMGPGASPPELIQFSTGTKDPPPSCPLLETLLNPSGESEQAPPQPLVFVRP

SEQ ID NO: 332764 - protein, 49 aa, Zea mays
  Clone ID: MRT4577_66597C.1.pep
LAVIINTQVGKKKICEKLQPPCSCTSSPPLLATLFRLSRGRPRAPSQMS

SEQ ID NO: 332765 - protein, 187 aa, Zea mays
  Clone ID: MRT4577_66598C.1.pep
VKIRSSELTLLESVKHAIPNVWDPSALASFIENYGTHIIISVTVGGKDEVYIKQHSSSQLSGLEFKNYVREIGRERFSDVENKSNATPINYSEKDITVIFRRRGGCDLVQSFSDWKGTVASAPDVIGMTFLSIVSLVDDVPGKKHLARAVELYLTCKICFRLLSFVLCSYATQELIHHIEYSIFIMP

SEQ ID NO: 332766 - protein, 874 aa, Zea mays
  Clone ID: MRT4577_66599C.1.pep
MARVRSTSRVDREGDETEAAETVPISEAMKRSGLITSVDVPAAKAERADVKETNSEDDYSSAVPSKPSHLDFGNSTISEGDLPKMLKLGYFNEEKKELVRFGGDETTPKPGKDEVVVFKSFFKAGLRFPLNKMIADVLKKFGIYFHQLTPNAIVRLSVYIWALRSQGVEPFAKGFCRVHELHYQTKARKDGLHENFGCYNFAYRKTTKFPVISYRSKWPAGWKSEWFYVKVDDDKEKLVQSPLELIFRETRPPCNMTSEGPTQIALAEFRVIAEHIDTRDLVQEFLAFKVFPTMKEWAMLKLEEKKKEGELIRLPYHYKFKRHFKVPCQECLDTIEVMCHEILGNYSKKEDQLMTAAFGTRPKRRLNRVMDAIGFEYPDYERLDKGAEGQKRKRVASALNKDDEDQPKKKKQESEAKTVAPKKRKASTPKQKSIDEKERTSATSSATEIEEILKVMTETLPVKLSPLGLHLTKLFQKEKEPTKTKAPRPKRQRIVTVTEVIEATPPGASAPKMPAIESMTATEAIPSEATAEEARAEDAKSKDINLESMAADIDKMLLNMAAEEAATATEETTAAKPEKEEMTEDTSEDEAFDFQNLVGQELTKDEKEELKEHAISCGYRPGALLFGGIDDERLGCIRDQTGAKVIGTLSKSIGFPKLEADISRYRRQHIVGSLFYSNFKVICPQKNFEQEKLKLDAKLEAEVQKSLELKESLTSLQNRCLEFSNRCVQWLKQVFHFVGASSEKFIPSAEDLPGAFEHIEGQIDDLDEVIAGHGDFCALVTSWGTAVAFLKSGCEHGKVVNRPNFSLSPANLDNIPNLARSIANRFIKLVWTKGGRSKAGDEARSHLKPLIILTYRMTKPKLKLKSKKMKLNEC

SEQ ID NO: 332767 - protein, 103 aa, Zea mays
  unsure (1)..(103): unsure at all Xaa locations
  Clone ID: MRT4577_6659C.1.pep
NRHXKXXXXXXXGRGXXXXQXXKNXTXXRXXKQKQXHRXQHXEAXXAXXXXXXXNRAXPAAXATXXXXXPXSXTXARNXPXXXAPQAXXKRKDXPXRTRRPAR

SEQ ID NO: 332768 - protein, 94 aa, Zea mays
  Clone ID: MRT4577_66600C.1.pep
ILPGRQAHYIGGRPSLFDAYKQTKRLLTLIRVWTFCSLQYDLLCIKWALDVKDQDSRELMDCDSGLHGCLFGSLHTMEGKGICRTLATSIWTHL

SEQ ID NO: 332769 - protein, 150 aa, Zea mays
  Clone ID: MRT4577_66601C.1.pep
QNYVREIGRERFSDVENKSNATPINYSEKDITVIFRRRGGCDLVQSFSDWKGTVASAPDVIGMTFLSIVSLVDDVPGKKHLARAVELYLTYKPPIEELQYFLDFQVPLVWAPAPPGIASHHRKEPVCPSLQFSLMGPKLFISTEQVKVTP

SEQ ID NO: 332770 - protein, 838 aa, Zea mays
  unsure (1)..(838): unsure at all Xaa locations
  Clone ID: MRT4577_66602C.1.pep
MARFRSTARVDREGDETEATETVPIFEAMERSGLVASEDVHAAEAEQADVEETDSEDDYSSAVPSKPSHLDFGKSTISEDDLPKMLKLGYFNEEKKDLVRFGGEETTPKPGKDEVVVFKSFFKAGLRFPLNKMIADVLKKFGIYFHQLTLDDDKEKLVQSPLELIFGETRPPCNMTQKGPTQITLAEFRVIAEHIGTRDLVQEFLAFKVFPTMKEWAMSKLEGKKKEGELVRLPYLYKFKRHFKVPCQEWLDTIEVMCNEILGNYSKKEDQLMTAAFGTHPKRRLNRVMDAIGFEYPDYERLDKGAEGQKRKRVASALNKDDEDQPKKKKQESEAKTVAPKKRKASTPKQKSIDEKERTSATSSATEIEEILKVMTKTLPIKLSPLGPHPTKLFQKEKEPTKTKAPRPKRQRIVTVIEVIEATPPGASAPKVPANESMTTTEAVPSEAAAEEARAEDAKSEDINLESMAADIDKMLLNMAAEEAGAATEETTAAKPEKEEMTEDTSEDEAFDFQNLVGQELTKAEKEELKEYAISCGYRPGALLFGVIDDERLGCIRDQTGAKVIGTLSKSISFPKLEADISRYRRQHIVGSXFYSNFKXKALKIQQDLEDKKHEVIIENLENKIKEQSVAIEKKDFELQTTEGLLADAEAKITELNSKLLSQSENFKQEKLKLDAKLEAEVQKSSELKESLTSLQNKCLEFSNRCVQQLKQVFHFVGASSEKFTPPAEVLPGAFEHIEGEINDLDEVIAGHGDFCALVASWGTAVAFLKSGCEHGKVVNRPNFSLSPADLDNIPNLARSIANRFIKLVWTKGGQSKAGDEARSHLKLDDQAETEATE

SEQ ID NO: 332771 - protein, 377 aa, Zea mays
  Clone ID: MRT4577_66603C.1.pep
MATKEAGAATEETTAAKPEKEELTEDTSEDETFDFQNLVGQELTEAEKEELKEYAISCGYQPGALLFGGIDDEKLGCIRDHTGVKVIGTLSKSIGFPKLEADISRYRRQHIVGGLFYSNFKSMLLSKALKMQQDLEDKRHEVIIEDLENKIKEQSVDIEKKDFELQTAEGLLADAKAKITELNSKLLSQSENFEQEKLKLDAKLEAEVQKSSELKESLTNLQNKCLEFSNRCIQQLKQVFHFVGASSEKFTPSAEDLPGAFEHIEGEINDLDEVIAGHGDFCALAASRGTAVAFLKSGCEHGKIVNRHNFSLSPADLDNIPSLARSIANRFIKLVWTKGGRSKAGDEARSHLKLVDQAEAEAVEYKDEAPWMLSKLE

SEQ ID NO: 332772 - protein, 31 aa, Zea mays
  Clone ID: MRT4577_66604C.1.pep
QYTSLRIFACFNSPVNKKRSSQITLHHATTC

SEQ ID NO: 332773 - protein, 38 aa, Zea mays
  Clone ID: MRT4577_66605C.1.pep
DACADAWWIERNSAEEVLPDRARARYDYLMQLILIRDS

SEQ ID NO: 332774 - protein, 82 aa, Zea mays
  Clone ID: MRT4577_66606C.1.pep
TPSGKETWKGFFRPERPLFSLAPTFPTRWGPKGEKSPGKKNPPAEGKAGKPPQGKRPRAGKGLPGSKSSAREAGEKKGRKRA

SEQ ID NO: 332775 - protein, 98 aa, Zea mays
  Clone ID: MRT4577_66607C.1.pep
AGGGGHRIFPDGGGEPAVPPPKGQVPVYVGGKGKASQSLRYVVPVVYFNPPPFGKFLREAKEEFGFQHPGVISIPCPPARFERAGALAPGAKKGFGRW

SEQ ID NO: 332776 - protein, 60 aa, Zea mays
  Clone ID: MRT4577_66608C.1.pep
QIRLFQAKLYLLRRLSYLDTDRKLVLLNLKGCNILILPTTITESLSNFCLLHLCACYNVH

SEQ ID NO: 332777 - protein, 70 aa, Zea mays
  Clone ID: MRT4577_66609C.1.pep
FGSRIYQTLVVVWLLQATQNSVYITWRIRSSMTVINLAHDDGSLTLHSVSLGVMVGWLCVNYWWDADIPA

SEQ ID NO: 332778 - protein, 72 aa, Zea mays
  Clone ID: MRT4577_6660C.1.pep
SRPALSTARSALLALAGARPVELGDEQRELEAELRKMAPPNGRTVLIFRAPCGCPKGRMEVWGAKKVRRIKK

SEQ ID NO: 332779 - protein, 62 aa, Zea mays
  Clone ID: MRT4577_66610C.1.pep
KSPLGNPPPAFFKMAFPAGSSFTKGGALKALALNEIPPSLPGVRLKVFSLGKPLKGLMVESH

SEQ ID NO: 332780 - protein, 105 aa, Zea mays
  Clone ID: MRT4577_66611C.1.pep
GGVSRIIIEQSPLSPPTGLLLYLGPLMLAPFGVQAAFSWKSAWTLVSPMFNGTLIKKKSSQLMLLWQILGDTGRSRENTGPPKKKILFKGSHNAFLFSQFLPYFF

SEQ ID NO: 332781 - protein, 641 aa, Zea mays
  Clone ID: MRT4577_66612C.1.pep
INLPGTKRKYDVMASPAKSISSPNPMSPPRFCLSPKGNGFCNSKMAPSTPVSTAMTTAKWLRNTVSPLPSRPSGELLRFFSACDKDLTDDIAHRAGIILGAIFTSSSFGERICTSMRSASRMDAIWTEQRKMEALKLYYRVLESMCRAESQILSGNNLTSLLSNERFHRCMIACSAELVLATHKTVTMMFPAVLEKTGITAFDLSKVIEGFVRHEDTLPRELKRHLNSLEERLLESMAWEKGSSMYNSLIVARPALSVEISRLGLLAEPMPSLDAIAAHHNISLGGLPPLPFQKQERLQDKDEVRSPKRACTERRNVLVDSNSLRSPVKDIIKPKLPPLQSAFASPTRPNPAAGGETCAETGIGVFFSKISKLAAIRIRSLCERLQLPQQVLERVYSLVQQILSQQTGLFFNRHIDQIILCSIYGVAKISQLELSFKEIIFGYRKQPQCKPQVFRSVYVHWPPRSRNGKTGEDHVDIITFYNEVFIPAVKSLLVEVGPGASPKKKEEEKGPADVGPFPESPRLARFPNLPDMSPKKVSATHNVYVSPLRSSKMDTLLSPSSKSYYACVGESTYAFQSPSKDLKAINNRLNSVSGGKKVSGRLNFDVVSDLVVASSLGSDRDAKPAADPAKTTPVKCEPSDS

SEQ ID NO: 332782 - protein, 102 aa, Zea mays
  unsure (1)..(102): unsure at all Xaa locations
  Clone ID: MRT4577_66613C.1.pep
PAVGPFPGSARVARFPNLPDCXSKEVSATHNVYVSPLRSSKMDTLLSPSSKSYYACVGESAYAFQSPSKDLKAINNRLNRQDHQKEQFARGLLVQFPKQQIN

SEQ ID NO: 332783 - protein, 50 aa, Zea mays
  Clone ID: MRT4577_66614C.1.pep
MAAPKLATLALAVLLAATTLAPPAAVRAAMSCYNEYSTLMLNEKQVHIAL

SEQ ID NO: 332784 - protein, 43 aa, Zea mays
  Clone ID: MRT4577_66615C.1.pep
NLVQKGNNILVQVITINCCLIYLSLTQYFHEVDPRWPYNHFVD

SEQ ID NO: 332785 - protein, 75 aa, Zea mays
  Clone ID: MRT4577_66616C.1.pep
LSSPTFHSFLSTPHPFLEEALLNSSEPPPLSYNLPFSISSHYNINTFYTHHTYFSSNFFPQNTTSITFKPNHFLY

SEQ ID NO: 332786 - protein, 84 aa, Zea mays
  Clone ID: MRT4577_66617C.1.pep
HTHMCYYNFNDIIHSIIYMYADLITIDNSLFYKKLISKFLEVLKYIAFIDLRVYDIHSPTIPSAEEIVYHIYKMLTVLDTNILW

SEQ ID NO: 332787 - protein, 43 aa, Zea mays
  unsure (1)..(43): unsure at all Xaa locations
  Clone ID: MRT4577_66618C.1.pep
KLSWXYQRSXIFCHLXIMXLWEPWXHPSXRXXWQFXFKGXXXA

SEQ ID NO: 332788 - protein, 59 aa, Zea mays
  Clone ID: MRT4577_66619C.1.pep
TAQEQMTGNRGGMPPAPRNVICNAGIYKAFWSVSVYIVVQEIAAIVIPLLHEPQLPQKY

SEQ ID NO: 332789 - protein, 303 aa, Zea mays
  Clone ID: MRT4577_6661C.1.pep
IVSSLLQLTYAPRIHIAISGSTVKSRFTDDRFHACKEDAKFAWVRALDFTPNSSFGECSTLVLKLSKGASVSYILESLPFSGELGELAIASMDVFGSSSNVVPLVDCPNGFSVPYEVLFRLNSLVHMGKLVARHVNADLFKVLEDLSIDTLRRIFEKMSKLKSTCYEPLQFIRHEAHSMNMRKKALSNKRESGKLMRCYRIHITPSKIYCLGPEEEVSNYVVKYHSEYASDFARVTFVDEDWSKLSPNALSARTEQGFFSKPLKTGLYHRILSILKEGFCIGPKKYEFLAFSASQLRGNSVWM

SEQ ID NO: 332790 - protein, 131 aa, Zea mays
  Clone ID: MRT4577_66620C.1.pep
RPGRRRHFSRPSLIHLHSPRALLFLRTLAAAAGAMDRSPVSSLSSSFRLPPGASVSDARDDARATAAAAEETCSASRAAEKKAIAAAELATLAVDKAGDGVHAVHDAATLEVNPNGQICAYHCFLPDWAVH

SEQ ID NO: 332791 - protein, 66 aa, Zea mays
  Clone ID: MRT4577_66621C.1.pep
DPPICPGPCWLRDPPLVRCKWVRATNSYIINSMVRDRLLRPQSPGSLCSTFSSLSQMSFQASAHAS

SEQ ID NO: 332792 - protein, 64 aa, Zea mays
  Clone ID: MRT4577_66622C.1.pep
WKGLFWGAPKFVPVGYGTKKFQFFLPFVEALVFVAPFFGGFLWVDPVNEYVQNFDIFPFPKIWG

SEQ ID NO: 332793 - protein, 81 aa, Zea mays
  Clone ID: MRT4577_66623C.1.pep
PMVDKDLWPQCLPWCWPRLPGPCPVHPLPIIIVGHVLSLQCQPHRLTIQPCRPAWSPHRSALGSCLHAALSPLLCQSGGSQ

SEQ ID NO: 332794 - protein, 199 aa, Zea mays
  unsure (1)..(199): unsure at all Xaa locations
  Clone ID: MRT4577_66624C.1.pep
NPKRTTSNTTSTFIPAATPQHNPHHPRVHKPDTVIREQPCSPLAYHFRWHSCSASRRRSPSRGSRAPPPHTLPSRLPLWLWLAVRSRRPGSRXERRDGLAGRRHAXLPCPQRRPCAAALRRRSPRSARGPRRPAGASRRXPXRSPPCPARRRRGWPWRRHPCPAARRPRASPCRPTAWPAGPCPPRLCRRRRPSGRAPG

SEQ ID NO: 332795 - protein, 50 aa, Zea mays
  Clone ID: MRT4577_66625C.1.pep
SILSRNTSEQSKRHVSAPLSEVLSQGLGAPLIRTSVGSHHFNQQNRKTQA

SEQ ID NO: 332796 - protein, 658 aa, Zea mays
  unsure (1)..(658): unsure at all Xaa locations
  Clone ID: MRT4577_66626C.1.pep
MESHHGGDGKARDKFSVYQNPSLTRALDSRSARPSVTVLLVLAVISVASASSFLALTSREEQLTKLAGRAGISVLAAVFVIRLVEAALGLVALFTLLGFFRALMLYNGQKALAKADKVVLSDRQLGLLGLKXQVQKEVGKVSKSKXPKTKPSTPSEPIVPIRRSSFSYTPSRPSGQSRIGSSHLSPGGERLIMALPMSPSTPLQKHVSSPSTPWSRKSSGSAKGIQTEAMLDQFLAGLDVNIDKIMDPETKTTTPPATITSFGVATPVSITTSTTPSGAARSTPLRPVRMSPGSHQKYSTPPKKGEGELPTPMSLEQAVEAFENLGVYPEIEQWRDSLRQWFSSVVMNPLVQKIKTSHTQVKQTTATVGASVTVSQVGSDLPSTTPPVALSPLGGTKDWQPTVTVDEDGILNQLHSALLHSRDAPVAQTFGSLQQPQRNPHLPAIQACIDAITEHQRLNTLMKGELIKGLLPQSSVRADYTVQRVQELAEGTCLKNYDYMGHGNDYGKSEKKWTTELPTDSHLLLYLFAAFLEHPKWMLHVDPTSYSGSQSSKNPLFLGVLPPKERFPEKYVALISGVPAIIHPGALILAVSKQNPPIFALYWDKKQQFSLQGRTALWDAILLLCHQINVGYGGVVRGIHIGSSALNLLSVIDSDSES

SEQ ID NO: 332797 - protein, 54 aa, Zea mays
  Clone ID: MRT4577_66627C.1.pep
PIIKRGQKGGHICPAAQKGGPWAPRVPALSQSLTLGRNALVAPFKTKVERVFFA

SEQ ID NO: 332798 - protein, 49 aa, Zea mays
  Clone ID: MRT4577_66628C.1.pep
IGYLEAGRELLPTINYLTRHRMTMTLLDCDMAPGDSRIKHLSRAWSLPR

SEQ ID NO: 332799 - protein, 123 aa, Zea mays
  Clone ID: MRT4577_66629C.1.pep
LPENVHLLGLVSATDAELCHTCSRRQLPAALARCCPATALDAPGGLASSHLRVCDAAPRSTRVPGRPGRDLAKPRSACSCCTAGLKPYLTPSTLSSSVTSLPTTTGRKPRATPWRRPNQRTLT

SEQ ID NO: 332800 - protein, 96 aa, Zea mays
  Clone ID: MRT4577_6662C.1.pep
MSRQVVRSSKFRHVFGQPAKADQCYEDVRVSQNTWDSGFCAVNPKFVALICEASGGGAFLVLPLGKTGRVDKNVPMVCGHTAPVLDIAWCPHNDNV

SEQ ID NO: 332801 - protein, 142 aa, Zea mays
  Clone ID: MRT4577_66630C.1.pep
RRALGTANGGSRPHPFDARKPPPFLLRSTHLLLSYSACLSAACDAEEYKQKHCCPGGSGAGGGVMLGLRRRLGARRRGLARSGMAMAVALQAERSVIEKKKPDIKQRRVVVTGMGVVTPLGHDPDVFYNNLLDGVSGISEIE

SEQ ID NO: 332802 - protein, 502 aa, Zea mays
  unsure (1)..(502): unsure at all Xaa locations
  Clone ID: MRT4577_66631C.1.pep
MAAVAGPLCTWLVAACLSAACDAEEHKQKHFCAGGSRAGGGVMLGQRRRLGARRRGLARSGMTMAVALQAERSVIEKKKPDIKQRRVVVTGMGVVTPLGHDPDVFYNNLLDGVSGISEIERFDCSNFPTRIAGEIKSFSTDGWVVPKLAKRMDKFMLYLITAGKKALENGGLTEELRNELDKTRCGVLIGSAMGGMKVFNDAIEALRVSYKKMNPFCVPFATTNMGSAILAMDLGWMGPNYSISTACATSNFCILNAANYIRRGEADVMLCGGSDAPLIPIGLGGFVACRALSQRNSDPTKASRPWDMGRDGFVMGEGAGVLVLEELEHAKXKHAIYERGATIYAEFLGGSFTCDAYHMTEPHPEGRGITLCIEKALADAGVAREEINYVNAHATSTQAGDLKEYEAIVRCFRQNPQLRVNSTKSMTGHLIGAAGGIEAVASIQAIRTGWVHPNLNLENPEDTVDVGVLVGSHKERCEVKVALSNSFGFGGHNSSILFAPFK

SEQ ID NO: 332803 - protein, 209 aa, Zea mays
  Clone ID: MRT4577_66632C.1.pep
QEFGTRAHRLTHFILRFLRGASHELNWNISFKIIQGICHGLQFLHESQRPIIHMDLKPGNILLDDNLMPKIADFGLSRLFGEEQTRAPTTFEVRSRGYMAPEYYYRGEVSTKSDIYSLGILIIEIVTGLKVDSNTVDLSSKNLIDNVQRIWTKMPQIASKYPTLEASNLQQVKRCIDAGLNCVSEKPRERPSAGEIIKQLNGSSFPSRN

SEQ ID NO: 332804 - protein, 76 aa, Zea mays
  Clone ID: MRT4577_66633C.1.pep
TTPRPRQSKRHTGVHTQRHKVAHAASPAQPSHEKPPPTTRESEPPNDRTGPTIHDGCLRRRVDLLASPSTINATTT

SEQ ID NO: 332805 - protein, 121 aa, Zea mays
  unsure (1)..(121): unsure at all Xaa locations
  Clone ID: MRT4577_66634C.1.pep
GSKFSSPCWLRYNLSFGVPISYFSPAVLQPCDWEFPGVSQLNGFGAHPLFPIWRYFXGARAVRPFQSFLALNGVGAPPCCGSFGPAGGGVSPCGTASLCSALTPFPFXFFPSFFPPFAGFP

SEQ ID NO: 332806 - protein, 240 aa, Zea mays
  unsure (1)..(240): unsure at all Xaa locations
  Clone ID: MRT4577_66635C.1.pep
MAQPLVVKKDDDLDEEEYYSPFLGIEKGAVLQEARVFHDPQLDARRCCQVITKLLYLLNQGDTFTKVEATEVFFATTKLFQSKDVGLRRMVYLMIKELSPSADEVIIVTSSLMKDMNSKTDMYRANAIRVLCRIIDSTLLTQIERYLKQAIVDKNPVVASAALVSGIYLLQTSPXEVVKRWSNEVQEXVQSRAALVQFHALALLHQIRQNDRLAVSKLVTSLTRGXSXRSPXLAQCPTYS

SEQ ID NO: 332807 - protein, 505 aa, Zea mays
  Clone ID: MRT4577_66636C.1.pep
MAAVAGPLCTWLVAACLSAACDAEEYKHKHCCPGGSGAGGGVMLGQRRRLGARRRGLARSGMAMAVALQAERSVIEKKKPDIKQRRVVVTGMGVVTPLGHDPDVFYNNLLDGVSGISEIERFDCSNFPTRIAGEIKSFSTDGWVVPKLAKRMDKFMLYLITAGKKALENGGLTEELRNELDKTRCGVLIGSAMGGMKVFNDAIEALRVSYKKMNPFCVPFATTNMGSAILAMDLGWMGPNYSISTACATSNFCILNAANHIRRGEADVMLCGGSDAPLIPIGLGGFVACRALSQRNSDPTKASRPWDMGRDGFVMGEGAGVLVLEELEHAKERGATIYAEFLGGSFTCDAYHMTEPHPEGRGITLCIEKALADAGVAREEINYVNAHATSTQAGDLKEYEAIVRCFRQNPQLRVNSTKSMTGHLIGAAGGIEAVASIQAIRTGWVHPNLNLENPEDTVDVGILVGSQKERCEVKVALSNSFGFGGHNSSILFAPFKELPSSSSSK

SEQ ID NO: 332808 - protein, 466 aa, Zea mays
  Clone ID: MRT4577_66637C.1.pep
MQRSQVHGPPPKSANLHFLSSLSPPPPRRPASRATTGASPPRMEYERIHEPLPRRQSGGFSPAKLRAMLRGLEKHQRNSGEDTSPEANDSGELDDRRSLECSTSTEMSSNSGHRSRNRAPDDDSFDSESSSSGPPTVKRSAAVAALLPPFSRPTPSKWDDAEKWISSPTSNRTGRAGPTAGTMPKKSALAFPEHGARQPAVAKVVTDVPTIAGPLVKNSDGLAHPDLLKPAHDASIVDGPAPAVRSVSMRDMGTEMTPIASQEPSRTATPMIASSPTSSRTPTPQRTTEFSVSNIDSNKMAMSEEEVHISTRQEIMDLGERLGKTTIAAWASKEEKAAARSTDTAADNAVDVNRENRAADWQEAEKAKYLARFHREEAKIQAWENLQKAKIEAEMKRIEAKIERKRAREQDRLASKLAAVSHRAEAKREAAEARRDQEAARTEEQAAQIRETGHTPSSFSCWCWCL

SEQ ID NO: 332809 - protein, 43 aa, Zea mays
  Clone ID: MRT4577_66638C.1.pep
GPDTIDGLSIRCLHKLKCNSGHCYLGRGINIQNPCLNLCSTRK

SEQ ID NO: 332810 - protein, 426 aa, Zea mays
  Clone ID: MRT4577_66639C.1.pep
MEYERIHEPLPRRQSGGFSPAKLRAMLRGLEKRQRNSGEDTSPEANDSGELDDRRSLECSTSTEMSSNSGHRSRNRAPDDDSFDSESSSSGPPTVKRSAAVAALLPPFSRPTPSKWDDAEKWISSPTSNRTGRAGPTAGAVPKKSALAFPDYGGRPPAVAKVVAGCAYQRWTRCGFIFSGLAHPDLLKAGHNASVVVDGAAPAVRSVCMRDMGTEMTPIASQEPSRTATPIIASSPTSSRTPTPQRTAEFSVSNIDPNKIEMPEEEVQMSTRQEIMDLGERLGKTTIAAWASKEEKSAARFTDTTAYKAVDIGRETRAADWQEAEKARYLARFQREEAKIQAWENLQKAKIEAEMKGIEAKIERKRAREQDRLASKLAAVSHRAEAKREAAEARRNQEAARTEEQAARIRYTGHTPSSFSCWCWCP

SEQ ID NO: 332811 - protein, 228 aa, Zea mays
  Clone ID: MRT4577_6663C.1.pep
METVKSLLKPKPTPQQQLREWQRRLRNEGRNIDRQIRDVQREEKKVEKAIREAAKRNDMGSAKALAKEVVRSRKAVNRLYENKAQLNSISMHLGEIVATARTVGHLSKSTEVMKLVNSLMKAPEVAATMQEFSKEMTKAGVMEEMVNDALDSTLDSEDMEEEIEEEVDKVLTAIAGETASELPDAVRKEKEKMKQPSTSVPAERTAIAEAVDDGELDQIRERLARVRS

SEQ ID NO: 332812 - protein, 143 aa, Zea mays
  unsure (1)..(143): unsure at all Xaa locations
  Clone ID: MRT4577_66640C.1.pep
PAAFRAGPPPFVPSRFLPPLKADGKLSPLGSPLFLLDCLAGPFFQLRGFPCVGCPPFFVWFETSGFLVGSVQFPPPLARGRFLVVSGGLPRKRSPICFVGTLFGCAVCCYPPGVKPVKKKKKKKKKKKKKKKKKKKKKKKKKX

SEQ ID NO: 332813 - protein, 192 aa, Zea mays
  Clone ID: MRT4577_66641C.1.pep
MEYERIHGPLPRHQSGGFSPAKLRAMLRGIEKRQRNNGEDSSPEANDSGELDDRRSLECSTSTEMSSNSGHRSRNRAPDDDSFDSESSSSGPPTVKRSAAVAALLPPFSRPTPSKWDDAEKWISSPTSNRTGRAGPTAGAVPKKSALAFPDHGGRPPAVAKVVADVPTNAGPDVSPMVSTILIYLSLGHMLQ

SEQ ID NO: 332814 - protein, 70 aa, Zea mays
  Clone ID: MRT4577_66642C.1.pep
YKQRHFYNFVLNVNVLNPAQVLGIPLRATLACNSNMLYRWCTPLVFMATTINFFLNDNYSWIVDILYTFV

SEQ ID NO: 332815 - protein, 105 aa, Zea mays
  Clone ID: MRT4577_66643C.1.pep
QEKRSRSTNISQSTTHRFTWKTLQCEGKNHGTSQAKPPLYVECLQNVVHRRWLTRGVKKDDAQQTLIRVTNIYHGGLHMQNLDHKLNTLYRCRAHEASLESPLKF

SEQ ID NO: 332816 - protein, 68 aa, Zea mays
  Clone ID: MRT4577_66644C.1.pep
FFFFFFFFFFLGVFLMLGSVKQPTGKIANLLNEINFVQYLQERRKQLFADTGQTTEGKRGWPKTLEQR

SEQ ID NO: 332817 - protein, 45 aa, Zea mays
  Clone ID: MRT4577_66645C.1.pep
SLGVKRFLEHWETGCHAREIIEPVILYGVPSFVFPPIFFIDPPLS

SEQ ID NO: 332818 - protein, 109 aa, Zea mays
  Clone ID: MRT4577_66646C.1.pep
FPQEPLLPLFPPSLVPGWVPLVRPPSGLEFPLRGVRPRVFLEGIPRSKVERAKKKPLSVQFGARGPKTKPTLERKFLRREERWAQGPKKPKAPLEAPVPFFGGPKKPKK

SEQ ID NO: 332819 - protein, 89 aa, Zea mays
  unsure (1)..(89): unsure at all Xaa locations
  Clone ID: MRT4577_66647C.1.pep
LPGKKGFCGFLFPPGLTLLKVPLPQTSFVCLPPLYCMENWKWKRMCLCXTSPNTAQVVFLNSFRVINLHKIVFCCQNDQCSHGFGLACV

SEQ ID NO: 332820 - protein, 101 aa, Zea mays
  unsure (1)..(101): unsure at all Xaa locations
  Clone ID: MRT4577_66648C.1.pep
GHASPVGLTLDELDIPNDSQRQIGVIDGNSTHLGIGSYREXPHDKRQAXLLSELRGERPVVPPDLPQSDEIADVIGAFHVLAELPPDSFGPYIISMATPPQ

SEQ ID NO: 332821 - protein, 102 aa, Zea mays
  Clone ID: MRT4577_66649C.1.pep
DCLQPGVPVEVHTPTEDILLLLCDVLPSCFKDSVAANDGPPGDFVSLKNIALEDPSTATCRQLFKLAHLLIDREDDVKMFDRVNNTIRNRVGVLYGVAVPAK

SEQ ID NO: 332822 - protein, 58 aa, Zea mays
  Clone ID: MRT4577_6664C.1.pep
CRVGGHAGLRQRRRDTTGLRGVMHHTIHQPTLWRAEILATLIVNRSLLACLYRVGEIM

SEQ ID NO: 332823 - protein, 85 aa, Zea mays
  Clone ID: MRT4577_66650C.1.pep
MESGSKKAAAGVLALLLLQLMVAPTTATSRLLQQADTSPLFGLDIIAREFGHPDGTIVCSESCVFLPCVSSVFGCRCENKVCVHD

SEQ ID NO: 332824 - protein, 84 aa, Zea mays
  Clone ID: MRT4577_66651C.1.pep
MESASKKVAACALALLLLQLMVAPTTATARLLQADTSPVFGLDIIAREFGHPDGAIYCGESCVLIPCISSVIGCRCENKVCVHD

SEQ ID NO: 332825 - protein, 264 aa, Zea mays
  Clone ID: MRT4577_66652C.1.pep
RALPLISRDLHPIPEERVAENFNVQENHEAAIFTDSVVALTGLHVFEEHFDDGTDITLSSEVVSSYPRANGVTQSPSSEHAEILNPFVFMAAEHNKVDISDMHGEATAGYLLDSDDEAGKIYPEPMEGSGIDESFLSELDVVGDFGVEPMRLDQQVTDQASHGDNTTDSVTADSVISPQTSDNVSLTMSEVGAEESREQSPLADDLNGSEFGYSFGASHDDPEQTVYNPRRRILEASPYEAMIMNVEMKLPHGESEVPADDTPS

SEQ ID NO: 332826 - protein, 31 aa, Zea mays
  Clone ID: MRT4577_66653C.1.pep
GTPGPPPRPPPPPPPPPPPPPPPPPPPLPGG

SEQ ID NO: 332827 - protein, 57 aa, Zea mays
  Clone ID: MRT4577_66654C.1.pep
LISISDLKLHQMLYATSFIGGPSILATAVALYALYATIYPVTYDKDIGDYTLFYPRL

SEQ ID NO: 332828 - protein, 83 aa, Zea mays
  Clone ID: MRT4577_66655C.1.pep
MESASKKVAAGVLALLLLQLMVAPTTARLLQQADTSPVLGLDIMAREFGHPDGAIPCGESCVFIPCATSVFGCRCENKVCVHD

SEQ ID NO: 332829 - protein, 105 aa, Zea mays
  unsure (1)..(105): unsure at all Xaa locations
  Clone ID: MRT4577_66656C.1.pep
MARSSKMMGAXALLALGRGRWTXDLRNIMTTTTEKKDDAVVQPQTFPPFDRLGGGASPVFGGLPGGSIPGSSIPGFSMPGSGSSLPGFSLPGSGSMPLFGGGSPG

SEQ ID NO: 332830 - protein, 77 aa, Zea mays
  Clone ID: MRT4577_66657C.1.pep
IVSRINSSHLTLPVKLPSPSITPRTAMALGDSPVTASAAGVSCRAATESHCTATSVQQPMHTITGIHAADLSMVNGP

SEQ ID NO: 332831 - protein, 58 aa, Zea mays
  Clone ID: MRT4577_66658C.1.pep
RNHIASCCAGSYVHAGFSKPVTDPVSLSPLLQGSCRLVLAVEHYMFCFWIQIWRNREV

SEQ ID NO: 332832 - protein, 52 aa, Zea mays
  Clone ID: MRT4577_66659C.1.pep
ERNEVGSLEMRLEMRGGVRRNREKILIFFGFHRGPTKLVSVISRVLCVVTTA

SEQ ID NO: 332833 - protein, 110 aa, Zea mays
  Clone ID: MRT4577_6665C.1.pep
NLEVVQAVLTISWEYRNLSATARTVGHLSKSTEVMKLVNGLMKAPEVAATMQEFSKEMTKAGVMEEMVNDALDSTLDSEDMEEEIEEEVDKVLTAIAGETASELPDERRK

SEQ ID NO: 332834 - protein, 155 aa, Zea mays
  unsure (1)..(155): unsure at all Xaa locations
  Clone ID: MRT4577_66660C.1.pep
RWTNHLRPDLXXSVWTEEDDMALIKAHKRCGNHWSTIATFLPGRSENAVKNHWNATKRSLKAKRRLKKKSNAQQVPAGQWSVLEEYIRSLYPDLADGAGADQTPPAAEDSPPSSYNLGSYSYGEVISSPASAAAPPGSFDQMTAMGLYLGASSSS

SEQ ID NO: 332835 - protein, 146 aa, Zea mays
  unsure (1)..(146): unsure at all Xaa locations
  Clone ID: MRT4577_66661C.1.pep
ARFAWGQGPPEVALVWERRELLGPRRPPRVXAGVRPVLALDGGVARRGPYGTDVERREQQRLLTRECFHVSNARVEALRARIADEAGVKFTSFEVVAAFIWRARVKVTXSSPGEVVKMVYSMNISKLVDPPLPDGYWGNVCAPVYV

SEQ ID NO: 332836 - protein, 262 aa, Zea mays
  unsure (1)..(262): unsure at all Xaa locations
  Clone ID: MRT4577_66662C.1.pep
TTTQTNQQPWLVVLINRWWXVLAMVALMVTAAEGFISKKTWSAIRRADRDGPFVGLXCPTPTRWTPSXSSPDFKPSNNIPILDVQGRRFRFGTIGSQNVVMVMTGLSMLNAGLTTQLLLSLFRVKGIVHWGIAGNANEDLQIGDVTIPESWAHLSLWNWQRHGDGAARLSATRPPRSLTSRPRTPSTSCSSSCPSLAAVASRSRPTVWPKTCNVRRARRQIDDAEQSRRGTIQFRLVRFLFKIISHPRINLYRYCKPIFGNK

SEQ ID NO: 332837 - protein, 83 aa, Zea mays
  Clone ID: MRT4577_66663C.1.pep
NSIYKLYSILNSIRIPKYCVLGKKELRNQIMYLLRERLRLHLRLDHGGIQAVAMGGQELLVTAELDDPPAGDDGDAVGFADRE

SEQ ID NO: 332838 - protein, 122 aa, Zea mays
  unsure (1)..(122): unsure at all Xaa locations
  Clone ID: MRT4577_66664C.1.pep
ACVNETTCLPRAPRVTRVXRGCSANIYTDNASYRQFIRAHFGCTPVEMESAAVALVAHQHGVPFITIRSLSDLAGGGSSLSNEAATFLDIAAKNAVDVMLKFVPLLGRGGEQEQADGLAQDM

SEQ ID NO: 332839 - protein, 121 aa, Zea mays
  unsure (1)..(121): unsure at all Xaa locations
  Clone ID: MRT4577_66665C.1.pep
RATHASAIGDSVFLQPHIHEPQHSLAQVPILTILTQRPTTICTALSQLAMVNPGALLAPSLXLVSNPVSPSNVVANRAQKQMHQCLAALTQLAMVNPAGYLQQQQLLXSSPLAVANAPTYL

SEQ ID NO: 332840 - protein, 364 aa, Zea mays
  unsure (1)..(364): unsure at all Xaa locations
  Clone ID: MRT4577_66666C.1.pep
MAGGGTQHLLQVAAVLAAAVVLMATASEGFISKKTWSAIRRADRDGPFVGLXCPTPTRWSPSSTRRTSNPAATYPSXVQGRRFRFGTIGSQNVVMVMTGLSMLNAGLTTQLLLSLFRVKGIVHWGIAGNANEDLQIGDVTIPESWAHLSLWNWQRHGDGPENELPLENAGDYTREYGFLNFSDYTVGQDAGNPELAANTLNSVWYQPEEIFPISGTPEERQHAFWVPVNKRYYALAGKLEGLELPACVNATTCLPRAPRVTRVPRGCSANIYTDNASYRQFIRSHFGCTPVEMESAAVALVAHQHGVPFITIRSLSDLAGGGSSISNEAATFLDIAAQNAVDVMLKFVPLIARRGGEQEHAADM

SEQ ID NO: 332841 - protein, 42 aa, Zea mays
  Clone ID: MRT4577_66667C.1.pep
LGCISMVNRVGSILMFDVLNASSILKVNVPTQDLYLARKNNY

SEQ ID NO: 332842 - protein, 81 aa, Zea mays
  unsure (1)..(81): unsure at all Xaa locations
  Clone ID: MRT4577_66668C.1.pep
IKDNLALIMELLGMIPQKIPLGGRYXTEFFXNRSGDLRHIHPLRFWPLNKGLMGNFNLIEINPNGMAVFFVPILDFVPEKP

SEQ ID NO: 332843 - protein, 48 aa, Zea mays
  Clone ID: MRT4577_66669C.1.pep
SNTRRPYLYICGCSFPYRCKANTPPLKDYAVNQTPAHDCRPKEALQRQ

SEQ ID NO: 332844 - protein, 78 aa, Zea mays
  Clone ID: MRT4577_6666C.1.pep
ELTMKPSKGPEDADSFRHGLIKSQLKVPDSAYLNPRDAHGAEQPLGQLLLGMGLDEEPHVDGDPPPGPEREPQDGAGD

SEQ ID NO: 332845 - protein, 135 aa, Zea mays
  unsure (1)..(135): unsure at all Xaa locations
  Clone ID: MRT4577_66670C.1.pep
FGSSVNVERWFLTIMAGVDRDANSMSIKKGTVNIXRGVAVAGPXRTKTYLLLSPMNTLNWVTIKIDMTMDTTKRPNMPRRTLFRILLFYKNDRKIMPLITVMCWDKTTTHAEDYINVQAADLMAFLRIMNHYKVR

SEQ ID NO: 332846 - protein, 98 aa, Zea mays
  unsure (1)..(98): unsure at all Xaa locations
  Clone ID: MRT4577_66671C.1.pep
LPYDPCMPQPGGPQXXWPSAEGXSKXQLRILECRXTQTHENLDVCEKGGQSYXXKKPLRGWSEXREEGSTXXTTLGEXIVVSLTRGDRDDVESYPEYS

SEQ ID NO: 332847 - protein, 69 aa, Zea mays
  Clone ID: MRT4577_66672C.1.pep
RIRTISFNIPITQSDITYDVNFDARIVNMDHNLNMPPRAIGTLKNRGVYTETIRQAGQISDQPEGCGNN

SEQ ID NO: 332848 - protein, 107 aa, Zea mays
  Clone ID: MRT4577_66673C.1.pep
AKRHHRRDYDVSLAPSRGQADAAGQDRRPGALCLAAVPPVVATRLQGVTASRPNNLVITGVIHDPSSQRQDGLMLDAYVLPAEPRHDRAERDQVMPVPKKGLAGHDL

SEQ ID NO: 332849 - protein, 59 aa, Zea mays
  Clone ID: MRT4577_66674C.1.pep
WTRGEKCGGCPRPAGLVFLSSAFLLNEDVMNSAKNEVCMLSWFIFLFYLSIIPVGEAFI

SEQ ID NO: 332850 - protein, 69 aa, Zea mays
  Clone ID: MRT4577_66675C.1.pep
MAQMVIVVVTSHLGHSKGKRARRLEHTQKKKKKKKKKKKKKKKKKKKKKKKKKKKKKKKKKEKKNILYI

SEQ ID NO: 332851 - protein, 211 aa, Zea mays
  Clone ID: MRT4577_66676C.1.pep
ESQLILLKSFHVRLMSIVLDVDVDPSTTPWDPAKAYLFVPVGAEKCMDLLREIDWTLVNSIVNSDAWNNPLQRARPDVYLGTNERTLGGDRREYGFGKLRHGTAFGQKAHPTYGIRGAIAEFDVVKASGLVPGRGWGHFNDYQNKGKLFMADSCWDAKDLAGMVVTAAHSGKRFYVDSICYNMNAENSFPRKEGYLGPLEYSSFADYYKQK

SEQ ID NO: 332852 - protein, 163 aa, Zea mays
  unsure (1)..(163): unsure at all Xaa locations
  Clone ID: MRT4577_66677C.1.pep
MARIFIXSETSLDHEAGFKAMIRSAPLPMSSLESLASSAVRTANKVKAALIVVLTRGVTTAKLVVKYRPRVSILSDVVPVLTTDSFDWTISSEGPARHSLIYRGLIPLLAEGXAKATDLEFTEAIPDAVLKSVVQKXLLKPGDAIVALXPIGVASAIXICIVK

SEQ ID NO: 332853 - protein, 624 aa, Zea mays
  unsure (1)..(624): unsure at all Xaa locations
  Clone ID: MRT4577_66678C.1.pep
VSPHPPFPCTIGDLEAGREPIPTLPPSVFRLSPPRHTLADLVASAGARRCLPRSSPPPPXASPLPSPSSPRPPPRRVHVRVRVRPPPPRSGSSGGDEPSNATPWASPDWLTSLSRAVGRSGGDDSGIPVASAKLDDVRDLLGGALFLPLFKWFREEGPVYRLAAGPQDFVIVSDPAVARHVLRGYGSRYAKGLVAEVSEFLFGSGFAIAEGDLWTVRRRAVVPSLHKRFLSIIVDKVFCKCAERLIDKLEPYALSGEPVNMEARFSQLTLDVIGLSLFNYNFDSLTTDSPVIDAVYTALKEAELRSTDLLPYWKVGFLCKIIPRQIKAENAVTIIRNTVEELIMKCKEIVEAENEQIEGEEYVNEGDPSILRFLLASRDEVSSVQLRDDLLSMLVAGHETTGSVLTWTIYLLSKDPTALRRAQDEVDRVLQGRLPKYEDVKELKYLMRCINESMRLYPHPPVXLVLVTCNFIIGFVDSWTXLIXLLRRAIVDDVLPGNYKVKAGQDIMISVYNIHRSPEVWDRADEFIPERFDLEGPVPNESNTDFRFIPFSGGPRKCVGDQFALLEAIVALAVVLQKMDMQLVPDQKINMTTGATIHTTSGLYMNVSLRKVQQEAELALSESK

SEQ ID NO: 332854 - protein, 94 aa, Zea mays
  unsure (1)..(94): unsure at all Xaa locations
  Clone ID: MRT4577_66679C.1.pep
LSVFTSHLLYFYICDRTSLLVESVKNYXRHLFPFLYFLLIIXMNYDFLXAHQDKSSFTGESALYFNRHQTEXCISWMQVISSTHHYFCAREIYM

SEQ ID NO: 332855 - protein, 193 aa, Zea mays
  Clone ID: MRT4577_6667C.1.pep
MSKYGTIPTSSSAGGGPVPLGGASPLDFISRAKARGASALATRRPWRELVDVHAVGLPPSLGDAYLRVRANLAHFAMNYAIVVLVVVFLSLLWHPVSLIVFLVCMLAWLVLYFLRDEPLVLFGRVVADGYVLAVLAVVTLVLLLLTDATANILSSLLIGLVLVLVHAALHKAEDNAADEADRWYAPVSQQPSH

SEQ ID NO: 332856 - protein, 77 aa, Zea mays
  Clone ID: MRT4577_66680C.1.pep
WWQLAVWEEAHPYSLVVGVECGSPRSPGCCWCALPHAGLASCDGVSCCRSVLASLVCMGRLGFMSWLWPLRGTDESL

SEQ ID NO: 332857 - protein, 90 aa, Zea mays
  Clone ID: MRT4577_66681C.1.pep
SSYLYAFFGHEWKKGISQEKAKKFLVKVVFLSMARDGANGRVFRSVSINSDGVKRNFFPGDKLPLWADELEPQNSLLYIFAAGNPDPLVQ

SEQ ID NO: 332858 - protein, 88 aa, Zea mays
  unsure (1)..(88): unsure at all Xaa locations
  Clone ID: MRT4577_66682C.1.pep
ARLCVFEFFLLSCFFDMTCNNGCVGAYRIHPPDMYDLTNMTGLECLXSAAMETYLSVIRXQIRNSPETSRRMLSYYILHXSIYQAQEV

SEQ ID NO: 332859 - protein, 41 aa, Zea mays
  Clone ID: MRT4577_66683C.1.pep
MPPEPLHDESTPMTVALDRIPLKNYFVRKNTVKKSKLEIRP

SEQ ID NO: 332860 - protein, 88 aa, Zea mays
  Clone ID: MRT4577_66684C.1.pep
SRHRGRELHMKETCQAVTIIETPPLVIVGLVAYVKTPRGLRTLNSVWTQHLIEEVRRRFYKNWCKSKKKALTKYALKYQNEAGKKEIH

SEQ ID NO: 332861 - protein, 212 aa, Zea mays
  unsure (1)..(212): unsure at all Xaa locations
  Clone ID: MRT4577_66685C.1.pep
MALISLCSDTYHTHLRQTVNKMDRLRTSLYNWEREDEGHXPDTMCDQRLYDILDAWLGDDPDSXVAWETCTNTNMALACGDIITSGNAYCLNTANQTCDNIGFRRDDDVLDDHHCKDVQNIDKKNADIGQGGHGHXKKSPXEIVVCRPLTHVXQHANDENSELLPIIHVLATKLXGARLTDVRKNGTXPWLRPDGKTQVTVEYRNEGXAMVP

SEQ ID NO: 332862 - protein, 58 aa, Zea mays
  Clone ID: MRT4577_66686C.1.pep
HASAHASADAWADACSFARALVSTTLLHTVRLLRQALTRGTDDEYSDRRGAARLYTPD

SEQ ID NO: 332863 - protein, 62 aa, Zea mays
  Clone ID: MRT4577_66687C.1.pep
CVQQGMVLGPSLGSFKIPAGALSTFDTLSGIICGPMYDYIVGPIARRFTGNDRGFTELQRGG

SEQ ID NO: 332864 - protein, 74 aa, Zea mays
  unsure (1)..(74): unsure at all Xaa locations
  Clone ID: MRT4577_66688C.1.pep
XVLPPTRAXXRIGLPMCKCRSHGTFPPFRAFKASSFEIFCYSPPRXXTDRRSVWASAPPRPALEDQASSVQDVI

SEQ ID NO: 332865 - protein, 123 aa, Zea mays
  Clone ID: MRT4577_66689C.1.pep
FLRNQGRTIILKLPSESPEQSLDRYSKLVKLTDFGHKRHKDMVSTAVILTRYFRWRLCGEHSCSLSPACSAALIRCSLLGASASSVKWCLGTALQCCHRRRPQWLRARRRHWLRGTGTAQPLY

SEQ ID NO: 332866 - protein, 261 aa, Zea mays
  unsure (1)..(261): unsure at all Xaa locations
  Clone ID: MRT4577_6668C.1.pep
METVKSLLKPKPTPQQQLREWQRCLRNEGRNIDRQIRXRQPASPILRAQTHPRRVWTNEVQAVALDLDVXDVQREEKKVEKAIREAAKRNDMGSAKALAKEVVRSRKAVNRLYENKAQLNSISMHLGEIVATARTVGHLSKSTEVMKLVNSLMKAPEVAATMQEFSKEMTKAGVMEEMVNDALDSTLDSEDMEEEIEEEVDKVLTAIAGETASELPDAVRKEKEKMKHPSTSVPAERTAIAHAVDDGELDHIRERLARVRS

SEQ ID NO: 332867 - protein, 91 aa, Zea mays
  Clone ID: MRT4577_66690C.1.pep
DIRDRPCYSRVAGTRPAGSLDMKERTASRMSPLNQQEPAPRADTAADGDGDGGPRRGPTPATRCYILRQGCGHLALRVQPFNSISLIRGYL

SEQ ID NO: 332868 - protein, 86 aa, Zea mays
  unsure (1)..(86): unsure at all Xaa locations
  Clone ID: MRT4577_66691C.1.pep
RRQQRLQNFRQVRGEKPEGIQLGFTTCGVGKLNFKAWGPWGGXXPDAAGLSPAGIIPGALLLSCQWSRNISPWLPLFRRRLALYTV

SEQ ID NO: 332869 - protein, 106 aa, Zea mays
  Clone ID: MRT4577_66692C.1.pep
SVLHSLQLQVRGVLLELLRGGRESVHIRCVIIPLLTRSSCSSDNLSSRCTVLVFLETPVTNKASSDITSCRLGQDMATTWRRYIMVGLHRLRHRGSVTLDGQCHSR

SEQ ID NO: 332870 - protein, 82 aa, Zea mays
  Clone ID: MRT4577_66693C.1.pep
HPNSQIKTIKPNHIHPKTLGTIQPLFQKKHNPKFSIQNPNPCTIQQTNPICPTDQKFFPPLLFYNPNPNLNHKKNAKPPTPI

SEQ ID NO: 332871 - protein, 93 aa, Zea mays
  unsure (1)..(93): unsure at all Xaa locations
  Clone ID: MRT4577_66694C.1.pep
SGLLITQAICWTARRYKTVLISAFEWGRRVNNWVSSXXXXATRGAGAGXXXRPPPGXPRPPRAGAGGERKPASXRRRRAXGAPPQGEPPPAGP

SEQ ID NO: 332872 - protein, 360 aa, Zea mays
  Clone ID: MRT4577_66695C.1.pep
GEVTYQLPQSHSPLAPSRCQGNDSLAYVDGPLETAKGSGEVDDDVPTSSGSDDDRGLADVDGLREMLQRSRNELEVARVNSTMFEEKAQRISESAIAFKDRADGAQRDVCAAVATVQEVISKEADAKEAVQKATMALSMAEARLQLAAEALEANRGSVGPTEVSIEGMEQEALVSAQEEIKDCRAALSRCAEELSRVQDKKMKLQKEVDRLTDLAGKAQMDASNAEEDVANIMVLAEQAVALEMEASQRVNDAEMVLLKAEKAIASIDTMVELPSPAEEQRSTEEDSVSEGYEYSSDVTDDVYVRDEVSSIERLMVGDLTVQGFEQLEPSREIYDEESSVVESVEERVDLARSKEVGTRW

SEQ ID NO: 332873 - protein, 74 aa, Zea mays
  Clone ID: MRT4577_66696C.1.pep
NNKTSFLLLSKKKKKKKKKKKKKKKNKKKKKKKKKKLKKKKTKKKKKKKKKGLSLPGGPFKGGIFENIQKTGGG

SEQ ID NO: 332874 - protein, 87 aa, Zea mays
  Clone ID: MRT4577_66697C.1.pep
SRKKVRGSGLKKKKKKKKKKKKKKKKKKKKGKKKKKKKKKKKKKKKKKKKKKKKKKKKKKKKKKKKGGGPFKKPNFFSRGLESNNFF

SEQ ID NO: 332875 - protein, 63 aa, Zea mays
  Clone ID: MRT4577_66698C.1.pep
EQFPLIIKKKKKKKKKKKKKKKKQKKKKKKKKKIRKKKKPKKKKKKKKKVFPLPGGPFKRGKF

SEQ ID NO: 332876 - protein, 185 aa, Zea mays
  unsure (1)..(185): unsure at all Xaa locations
  Clone ID: MRT4577_66699C.1.pep
GKVIPAVGFGTFVLRXNPGQTYTGAGAALKTGYRHLDCAWFYQNEGEVGEAVRDFLKETPSVKREDLFICTKVWNHMHEPDEVKWSLNNSLEKFGLDYVDLFLVHWPIAAEKDGNNMPKLNAKGQYVIKEELTKNHKPTWGAMEELYKEGKAKAIGVFNWTIPHLKDLLSWCSVKPTGNQIEIHP

SEQ ID NO: 332877 - protein, 75 aa, Zea mays
  Clone ID: MRT4577_6669C.1.pep
DYSGTDAVQERSCQTTRPELYNVPTGFAAHGFQYISGFPTLDRSSIDTGPGQQLEALRASQVLLTWRHTGQLGCE

SEQ ID NO: 332878 - protein, 67 aa, Zea mays
  Clone ID: MRT4577_666C.1.pep
CLVLAAIIPAAFKSVGIMTGGPSFPDKPSLLVYHCCLEHSLHASFFFVRNLAALIKVAGYFIRSDLA

SEQ ID NO: 332879 - protein, 117 aa, Zea mays
  Clone ID: MRT4577_66700C.1.pep
FRIHSKDKHRKFVSPIVSPSIALPPSGVTILSALGPSGTKTVIHVNVRIISEVRKGAGKVPTIVPCLGVDTGPSSVLSGSAASHTITNAPKPHHGDDREGSPELTIGHGSGGLLTVS

SEQ ID NO: 332880 - protein, 104 aa, Zea mays
  Clone ID: MRT4577_66701C.1.pep
GSGRVEPEFGDTRDIVHWVSGKVASGAGAEADALDKRLAWSPYKEEMLQALRVPVRCTCSMPGLRPTMADVVQMLAEAGPPAGRTTKDDSKVLVADHHHHAPAP

SEQ ID NO: 332881 - protein, 44 aa, Zea mays
  Clone ID: MRT4577_66702C.1.pep
FLNHSSSQISAIVILGSGFGLRIGLIKLFGSPRGRPRVRRSVGR

SEQ ID NO: 332882 - protein, 82 aa, Zea mays
  Clone ID: MRT4577_66703C.1.pep
FYSHTPKFYRINGHIGARETVNSPSRCNGGTRKKRGRKNGPALTREAKKGWAADTSNGSNLRRDPYNTMTSPTTEARTGWTS

SEQ ID NO: 332883 - protein, 57 aa, Zea mays
  Clone ID: MRT4577_66704C.1.pep
CFHSTRLPAYNSVLCVLDRTLLRRSLLASSLLREKRIDLKLPTPPSSSFPKGQRART

SEQ ID NO: 332884 - protein, 123 aa, Zea mays
  unsure (1)..(123): unsure at all Xaa locations
  Clone ID: MRT4577_66705C.1.pep
DGRFTPNDDTXREXTTXHNGQAGSQAGNARRERNSXEQGXQXDGQKPGDKTRGGGEXAHNTXPSETGAGKHEPRAXTEDTEPTVFFVAPPPPYRQLFHPEKLISGKEDAANNFARGHYTIGKG

SEQ ID NO: 332885 - protein, 91 aa, Zea mays
  unsure (1)..(91): unsure at all Xaa locations
  Clone ID: MRT4577_66706C.1.pep
XXXXXXXXXXXXXXXXXXXXXXXXXTIQYMTIYNLFVYIFSVATHGYLPRIVKETSCTVSSFFFVHRRSTSSTNSKRSLASEFIHGLRPCV

SEQ ID NO: 332886 - protein, 40 aa, Zea mays
  Clone ID: MRT4577_66707C.1.pep
VPHALDLGITYLFYLHANIWTNKKKKKKKKKKVLCVVTTA

SEQ ID NO: 332887 - protein, 290 aa, Zea mays
  Clone ID: MRT4577_66708C.1.pep
GTSRPAGPGFSILVHSRPGFVLTRATTRSRFFYNRQVNDSIQVDWGEASMITAERILLSHALKDPLNDRFVFVSDSCVPLYNFSYTYDYIMSSSTSFVDSFADTKAGRYNPRMDPVIPVENWRKGSQWAVLIKKHAEVVVDDEVVLPEFQKHCRRRPLPEFWRDWDRPIPAEAWKAHNCIPDEHYVQTLLAQSGLEEELTRRSVTHSAWDLSASKDRERRGWHPVTYKVSDATPRLIKSIKDIDNIYYETENRREWCTSNGKPAPCFLFARKFTRGAGLKLLDSSLIASK

SEQ ID NO: 332888 - protein, 49 aa, Zea mays
  Clone ID: MRT4577_66709C.1.pep
DIDNIYYETENRREWCTSNGKPAPCFLFAQKFTRGAGLKLLDSSLIASK

SEQ ID NO: 332889 - protein, 130 aa, Zea mays
  unsure (1)..(130): unsure at all Xaa locations
  Clone ID: MRT4577_6670C.1.pep
MATKIFSLRMLLALSACVANATIFPERSQASIAFLLPTYLPSMIASVCENPPIHPYRLQQAIAASNIPXSPLFQQSPALSLVHSLGHTMRAQXLQQLVLPVINQVALANSLCYCQHQQFLSFNRLSTLNR

SEQ ID NO: 332890 - protein, 223 aa, Zea mays
  Clone ID: MRT4577_66710C.1.pep
MKPRRFGYGYGYGYGYGRVRRAAALLLLLLCLCLSSLFLLLLHGSSTPLEPAAAAAEARVAEAQAEVEEAPLPPGNSKVAFLFIARNRLPLELVWDAFFRGDKEGRFSILVHSRPGFVLTRATTRSRFFYNRQVNDSIQVDWGEASMITAERILLSHALKDPLNDRFVFVSDSCVPLYNFSYTYDYIMSSSTSFVDSSDTEEIKEWAHYPTHAVKHFYTLTPA

SEQ ID NO: 332891 - protein, 71 aa, Zea mays
  unsure (1)..(71): unsure at all Xaa locations
  Clone ID: MRT4577_66711C.1.pep
MTDALDNQVXSMVSXXGWVRTYRFCDNVWTXXXTDASFKNEEATEHXRMVNIVACYSKLLGQYARVPSTSM

SEQ ID NO: 332892 - protein, 186 aa, Zea mays
  unsure (1)..(186): unsure at all Xaa locations
  Clone ID: MRT4577_66712C.1.pep
AGCSAVDAPVSGGDRGARNATIWIQVAGTVGEAXSWRGIWRLASXPLYMGGPGAGQRAKLGNQIAIASTMVGLVEGMVYAHKAGLDVAKWLEAISTGAAGSKSLELYGKRILERDMAAGFYVRHFVKDLGICLSECQAMGLSLPGLALAQQLYVSLIAHGEGGLGTQALILAVERLNNTSLEKKDE

SEQ ID NO: 332893 - protein, 44 aa, Zea mays
  Clone ID: MRT4577_66713C.1.pep
IVKQMFYTSRVSLFIFSHSIYNFIHFVPSYIFNIKLQLNMSISL

SEQ ID NO: 332894 - protein, 132 aa, Zea mays
  unsure (1)..(132): unsure at all Xaa locations
  Clone ID: MRT4577_66714C.1.pep
VNLSKWEYNLQVRSVPGLDACRLDLVWCGLLPHSSLALTXRRLAIEMLDNYYRSAADYDRAXRKLGQTDNGLTKSMFFXHTMVCGKLADELRMHDEDFVVALDCMASEDTANVYAHSWTHMEDGAGLVVRSA

SEQ ID NO: 332895 - protein, 96 aa, Zea mays
  Clone ID: MRT4577_66715C.1.pep
LEAISTGAAGSKSLELYGKRILERDMAAGFYVRHFVKDLGICLSECQAMGLSLPGLALAQQLYVSLIAHGEGGLGTQALILAVERLNNTSLEKKDE

SEQ ID NO: 332896 - protein, 114 aa, Zea mays
  Clone ID: MRT4577_66716C.1.pep
PVIHSCLTRGWPYSCNSSIALSISHYILSIYTVLLLPVRWSSVLVDWTRTWDRPWRGAHPRQSATATPSPSRAPTRSSTIRCPLVVWTPLFSFTHRACGAPCKSPRRRELARVG

SEQ ID NO: 332897 - protein, 102 aa, Zea mays
  Clone ID: MRT4577_66717C.1.pep
SQTHQTSAPVGYYQQVGYCSEEVMSMAPDSFSRHRGPVQPNLVNENFEDVDTVSLAGANHHHHHGHHGGHRFVVRETTVEEDINTCTGEVHQRKESFLPKAN

SEQ ID NO: 332898 - protein, 106 aa, Zea mays
  Clone ID: MRT4577_66718C.1.pep
IMNFGENGLGGTNYQPRPSLKKDLAFYKILQRLQRGGPSGPLKKTLNTKRLWLAGKAELLSSPLQPLNQNDLFGEKKGPLSDQGLKTRPGQKAGQKLFFKLADHSW

SEQ ID NO: 332899 - protein, 73 aa, Zea mays
  Clone ID: MRT4577_66719C.1.pep
EDAELNYNPHSLDQSVSVHDLHNSLLATALNPLSGNKDFPVPFYIHQIYKRGKTEAVRNPKPPQSKRKERKNY

SEQ ID NO: 332900 - protein, 61 aa, Zea mays
  Clone ID: MRT4577_6671C.1.pep
ISGRILVVHMNCAIGAVPGFVLAISCVRRLNCNLLARIFFLGCCTALLRSSKQCMIILCPR

SEQ ID NO: 332901 - protein, 94 aa, Zea mays
  unsure (1)..(94): unsure at all Xaa locations
  Clone ID: MRT4577_66720C.1.pep
LMSYGYTSWGLRSLNSXIQAQHLISXLSRTFYKNSCMTNNKAFTIYAFKYQNDLCNNEIHLAFXKINKXASFIHLIVHTHIKNIIGLYQIKSHL

SEQ ID NO: 332902 - protein, 174 aa, Zea mays
  Clone ID: MRT4577_66721C.1.pep
MKAVPADSAAPPVPMPMPMPATKITIPVSAVGGTEAALLGKGRYKVWGLGAIALLALWSMSAASVSLRWSSSGDLASVYGDLDVPQMEEREKLVGRMWDMYTRTSDEVRLPRFWQEAFEAAYEELAGDDVQVRDAAISEIARMSAHKLELEQTLNENEEENAASNSGGRSKASQ

SEQ ID NO: 332903 - protein, 62 aa, Zea mays
  Clone ID: MRT4577_66722C.1.pep
FQNIPFFYLLTICPQLSLHSIQTIPYHSLPHFISGKTIFRNNSISTKLRSWFLPSCPYHIQR

SEQ ID NO: 332904 - protein, 91 aa, Zea mays
  Clone ID: MRT4577_66723C.1.pep
NWMFTGSVVVPGRSTRCVYGALCNSSYAYEAAQFSDSSAYESDCYDVTMVSVMFKMLLYYSLLITKQLSSRTGGLDSDSIHYPQISTSTAR

SEQ ID NO: 332905 - protein, 195 aa, Zea mays
  Clone ID: MRT4577_66724C.1.pep
MKAVPADSAAPPVPMPMPMPATKITIPVSAVGGTEAALLGKGRYKVWALAAIALLALWSMSAASVSLRWSSSGDLASVYGDLDVPLADDLDSLEMEEREKLVGRMWDMYTRTSDEVRLPRFWQEAFEAAYEELAGDDVQVRDAAISEIARMSAHKLELEQTLNENEEENAASNSGGRLAGQRRVSSSTDICGLRT

SEQ ID NO: 332906 - protein, 43 aa, Zea mays
  Clone ID: MRT4577_66725C.1.pep
YVGEGMEEAEFSEPREDLAALEKDYEEVGAEFYEGEAADEGHE

SEQ ID NO: 332907 - protein, 87 aa, Zea mays
  Clone ID: MRT4577_66726C.1.pep
LQKPTGKCSLFIVPRMWVTWAYPPGWTQKSLSSLQWASLSRGCRAAQMWPIIKAKKHRDAHHSPGKSQPRPGHATEERRAHKQDPTT

SEQ ID NO: 332908 - protein, 93 aa, Zea mays
  unsure (1)..(93): unsure at all Xaa locations
  Clone ID: MRT4577_66727C.1.pep
RRGPYLWLIRRHHPRQWQTHSQYHLHHRLWQPXLHLHPPCQRANLGQHRLLACTADWLTCHGHHLQSRHLYLQWHSRYSLWFMPPANPAPRPP

SEQ ID NO: 332909 - protein, 76 aa, Zea mays
  Clone ID: MRT4577_66728C.1.pep
TSFCRLDIDMDNFIPHVHLHEKSENKTHWHGAEIEVIIEGNWTTHRSKILHYMRQMAVITPYAQFLFKFLSDAADK

SEQ ID NO: 332910 - protein, 130 aa, Zea mays
  Clone ID: MRT4577_66729C.1.pep
RILEEPLRELISRRDIIGYRVASEGRRPFVGTGEGSAGVQIGSPVLGQTARWHPDPSPTSGSTRSHPPCPQASRLVVSLSPIEVTNVAEELVHRPIWDPTGDAFVLPGAERDKGREMMGDEEAAAAFPAG

SEQ ID NO: 332911 - protein, 94 aa, Zea mays
  Clone ID: MRT4577_6672C.1.pep
EFGKNGHFYQPKNRDEDGPKHIFGCKKTGNIKKQGLTTITCEFRIHFFLLECCANISSASHASSRQNHKVKRTLLAQELFKSMVAGDMVFLENV

SEQ ID NO: 332912 - protein, 127 aa, Zea mays
  Clone ID: MRT4577_66730C.1.pep
DTVLKAHARSGGGDYGPVLKARARSGASDGVLHDCLLMYKVVEAPCANKYKNVDVVSPISEFSSSLETASGHWRVDCFLRAERMPFYFPVLDQGARSVSSVFLCFQNDGQNMALGGFLPIKKAGRAF

SEQ ID NO: 332913 - protein, 58 aa, Zea mays
  Clone ID: MRT4577_66731C.1.pep
LLNMCTALGIHSKSFEKPFLECISEFDATEGVKYIQQSDILDYLKHVESRLQEHERCT

SEQ ID NO: 332914 - protein, 102 aa, Zea mays
  Clone ID: MRT4577_66732C.1.pep
SLTLTQNIPNTFFSRVSTYLLLHLYFHPFYFCAFITFNLLFFSLHWIFLISFNFFFFKIYSILLFFLYHLQYFLIFFLTLLLTLIFILIFFLFFSIYFFFFN

SEQ ID NO: 332915 - protein, 426 aa, Zea mays
  Clone ID: MRT4577_66733C.1.pep
MLISFQADFSSAMVQRDLELVMTTGIFPIPMTATIPVCMLNQCRKSYLRSAHWKLLVILFGALALLILVFVRYAPDSLTVGSQDYIKIDDKKSTIFEENKKSTINKTLFLNQSSKKSRTNKEHKRTEEAVAEKYPASVVDSSKRADDKNKPDEQLHTTSTVSVSRGNPVEDKASREAPQTSENLTIRIARDKGKRRKRKVGAGLAGKFEVSSSHSGNSTPSSPLSQSSTPKHGWSFSGAPSEPKHENKVESRFDVEATASPTRANHEKKKTWSQVAKEQPRSRSASPGITSPPPSPAVTAPVAWRSPSLAPTSSPTAPQSRAPGSNLVKDKAVKRDVGAAAAAAAPSPKKEFTYDIWGDHFPGNLLVVAREAAPRKMPDASEGASYSLFAREPQTLMMKPSSSAPPPMSRGRGSPPSHVASGYGIK

SEQ ID NO: 332916 - protein, 60 aa, Zea mays
  unsure (1)..(60): unsure at all Xaa locations
  Clone ID: MRT4577_66734C.1.pep
CLFIVLCIEKAHNXMCDVVLFSHLSFPFIITMVMVCCVSNRALFAPLAILISHGVLCCFA

SEQ ID NO: 332917 - protein, 472 aa, Zea mays
  unsure (1)..(472): unsure at all Xaa locations
  Clone ID: MRT4577_66735C.1.pep
MEAADYGKLFVGGISWETSEDRLREYFGRFGEVTEAVIMRDRSTGRARGFGFVVFADAAVAERVTTEKHMIDGRMVEAKKAVPRDDHSIVTKSNASSIGSPGPGRTRKIFVGGLPSNVTEADFRRYFEQFGVITDVVVMYDHNTQRPRGFGFITFDSEDAVDKALHKSFHELNGKMVEVKRAVPKEQSPGPVARSPVGVGQNYAMNRVHSFLNGFNQGYNPNPIGGYGIRVDGRYGLISGARNGFSSFGPGYGMGMNVEGGLGGTFGASSGFISNSNGRQMGSYFNASSNRLGSPIGYLGLNDVPGSMLSSMSRNVWGNGSLNYPSNPTNMSAFASPRNGGQVSLPSDNWGGLPSAHGMDNISSLGSGNLGRGTGDNNFGLPSGSYGRNNSTGTIGEPFSAAGNTYEVNNRDTYGSSSIYGGTAWRFASSEVDMPSFVHDIGNVDPTXNDXSASHMGNYPVNNNQPSRGISS

SEQ ID NO: 332918 - protein, 87 aa, Zea mays
  unsure (1)..(87): unsure at all Xaa locations
  Clone ID: MRT4577_66736C.1.pep
VGLRHRQLFRLVVVASSGVRPSYLMGGRAGCTSSWCVLLAVCVCLPVLFXPSLLWAPSRFRYKIASLAWLVAGEIIKGRAAAVQESP

SEQ ID NO: 332919 - protein, 783 aa, Zea mays
  unsure (1)..(783): unsure at all Xaa locations
  Clone ID: MRT4577_66737C.1.pep
MPVVTRSRLSAARGDGAGALPWGSASAAPAXGTTPGRXGRRREXKNHHHHHGLKEKLRALTQDYEQQKQKLAASQLRRSIRCLXRVGGDXNDENAEEEEDGGRVAKFRYDAFAQVPESAVLRENVAPPQARAPSNDGAVLARTTEPQAKENAVGRGANAMSCPTKKAVPALPVLPVPPARKLSLGGAVGGKLKAAGEVGAGTAEAAESRILVFVRLRPMSRKEKEAGSRSCVKIVNRKEVFLTESASENDYLRLKRGRDSHFCFDSVFPDSTTQAEVYSTSTADLVEGVLQGRNGTVFCYGATGAGKTYTMLGTMENPGVMVLAINDLFSKVTQKNHSIKLSYLEIYNETVRDLLSPGSPLNLREDKQGIVAAGLTQRSVYSTDEVMELLQKGNKNRTTEPTRVNETSSRSHAVLQVVVEYRSLDGVNVKRAGKLSLIDLAGSERALATDQRTQRSIEGANINRSLLALSSCINALVEGKKHIPYRNSKLTQLLKDSLGGACNTVMIANISPSNLSFGETQNTLHWADRAKEIKTKTQQTTVNEEVLDQPDSETMLVLELQKENRVLREQLAKQQQKLLTAEAQLLASKTSPQRSPAPPSHVSTPGSTQRKTRRSILAAGGGNYFSKLDSKRHAADNAQVRELQRKVSTLESEIEKMKKEHLLQLKRKDEFIRDLINRKDPNNNSEETATGDRRVVTRASVRKAQRDASAAGELKSPSRVFTSPAPTAKKRTFWDIGGNSPSVLAANGRKTRSHVATETPKKASSKLLQPGFARQTSTHQRFT

SEQ ID NO: 332920 - protein, 69 aa, Zea mays
  Clone ID: MRT4577_66738C.1.pep
NMFIGIHLLILGIGDFTLWWQPNMLAPSLASKNTFEWLVMPCFMYDGGWVCLALLDVHIHLSSGFAAPQ

SEQ ID NO: 332921 - protein, 75 aa, Zea mays
  Clone ID: MRT4577_66739C.1.pep
DRAVFCLMYKICLIGNLSSGLRLQSGFSPFSEKRAPSCTQCEVMVHLWVWGASVVPSVPSNLNTPAKAIKKEKEK

SEQ ID NO: 332922 - protein, 113 aa, Zea mays
  Clone ID: MRT4577_6673C.1.pep
ARLACQACAPYFGWTRPCAGCPSYAGGEPRCLLPDAYAFMQLESVSSASSQCISRVFIFSPECIMTIVSSEQEMSTLLSYMYHYWSPTAKQTSQNVCYSSSFSFCVARIVFQH

SEQ ID NO: 332923 - protein, 122 aa, Zea mays
  Clone ID: MRT4577_66740C.1.pep
SLCYKLSGSSGCSYPTGASAVGTMTPTTAGTMGGGTAGTSTGTGTAGAGMGTGTATGTAGTGFGGLGPGTDASMDTAAAAGLAPPHKSWWAGPGHRPRRASPLRHGARVTLGMASETWPACC

SEQ ID NO: 332924 - protein, 260 aa, Zea mays
  unsure (1)..(260): unsure at all Xaa locations
  Clone ID: MRT4577_66741C.1.pep
MRMSLLRSASQHLRRRRDYSSAAXQPERKVAILGAAGGIGQPLALLMKLNPLVSSLSLYDIAATPGVAADVSHINTRALVKGFVGDDQLGEALEGADLVIIPAGVPRKPGMTRDDLFKINAGIVKGLCTAIARHCPNALVNMISNPVNSTVPIAAEVFKKAGTYDEKKLFGVTTLDVVRAKTFYAGKANVPVTGVNVPVVGGHAGITILPLFSQATPASNALSHEDLVALTKRTQMGGTESVEAKAGKGSATLSMAYAGA

SEQ ID NO: 332925 - protein, 91 aa, Zea mays
  Clone ID: MRT4577_66742C.1.pep
LALAILIYDLSAHKTSCQGDTHSDLGPRVPIACSRRPSSCRGSSSCLCGANVSTPSSPVLRSRKGKRRPVWSHSVAGVVKAVDIIPCSEFH

SEQ ID NO: 332926 - protein, 79 aa, Zea mays
  Clone ID: MRT4577_66743C.1.pep
EMDQALSSLNENGNGMQVDHRQLGPRQEDTEFKYVDEGEIVMLWIPMRCNRALLPLLISSRAHTMRADSRKRKRKWKPY

SEQ ID NO: 332927 - protein, 61 aa, Zea mays
  Clone ID: MRT4577_66744C.1.pep
VSLSLRTLNKSGPRVMKHMPLTSACSHHVLGWNRRMISAYMLNDYAFDIVSTSDVRVSRDV

SEQ ID NO: 332928 - protein, 50 aa, Zea mays
  Clone ID: MRT4577_66745C.1.pep
SAPLLDPCIYQHGLWINEFCYSCKIVFSVNPKDKMVLVGECKEISPKKPK

SEQ ID NO: 332929 - protein, 44 aa, Zea mays
  Clone ID: MRT4577_66746C.1.pep
EKFNLARSMFYSGRRPGIKDGIGFPRGGNVTLNAPKKTPSNFVK

SEQ ID NO: 332930 - protein, 69 aa, Zea mays
  Clone ID: MRT4577_66747C.1.pep
GPGGNLFKNFFLEKLKSPCISNRAHFLLCKKDTGFKFFFGWNNMMVKQMGTFYDLTLLGSFFERGIFRC

SEQ ID NO: 332931 - protein, 49 aa, Zea mays
  unsure (1)..(49): unsure at all Xaa locations
  Clone ID: MRT4577_66748C.1.pep
TKILXPARRXYXCXSVPXXXXXXXHGXAXEIDXGRPXNXSXXPGRPSAR

SEQ ID NO: 332932 - protein, 66 aa, Zea mays
  Clone ID: MRT4577_66749C.1.pep
SVNVAWMTESVPSSTGRSCMVRVRVALQRSNAFTLDTCVVVNSCELCDEQTTVIQSLIAPPLPALA

SEQ ID NO: 332933 - protein, 80 aa, Zea mays
  Clone ID: MRT4577_66750C.1.pep
YHSICVMYNCKLWYLKTIVFQNCISKQALSVFSVCHVLGRKLTALAVVCNLLKTEIPNTDPDYWKPESFVIIHFGYRPVF

SEQ ID NO: 332934 - protein, 245 aa, Zea mays
  unsure (1)..(245): unsure at all Xaa locations
  Clone ID: MRT4577_66751C.1.pep
MDREPSVSDEDDDLETLVPQNHTKPPSPSSRSRASFGISISGFRPALPSSATSLGRVLWSRRYLLICVCLPVLFIILFFSLGGASSLPASIRLPSASPAADLASSRMREAELHALYLLRSQRSGLLSLFNRTAAPEPTNSSTAAPVSLSDLQTALLSQIKINREIQEALLSTHHSGVGNATDDALDLDLPGPGCRRRELPYNRRTIEWNPKKNRYLFAICLSGXMSNHLICLEXHMFFAALLGRI

SEQ ID NO: 332935 - protein, 251 aa, Zea mays
  unsure (1)..(251): unsure at all Xaa locations
  Clone ID: MRT4577_66752C.1.pep
KKKKKNWASRPAGPGLQEKXQKYEATFPEWNQENAKIRHEANMYFRSFWKNAQSKGQISGDSPXPFTFLRNGSSPGSNFTGKLDDNHTSAAASGAQDQVETDHMASGCYRSAETPANITNNAMSQSQPQRTGPSPVDDSAVKSEMLNSQELAIDEGMISVSSTYSQELLKSLSHALQSSGVDLSQTSISVQINLGKRAGKRSAAGVSSNSKEPPPADPASSNELGGHHLTTLGASADGLPHATKRHKRGNS

SEQ ID NO: 332936 - protein, 102 aa, Zea mays
  Clone ID: MRT4577_66753C.1.pep
LAIDEGMISVSSTYSQELLISLSHALQSSGVDLSQTSISVQINLGKRAGKRSASAGGVSSNSKEPPADPASSNELGGHHVTTLGASADGLPHATKRHKRGNS

SEQ ID NO: 332937 - protein, 136 aa, Zea mays
  Clone ID: MRT4577_66754C.1.pep
SAPVSIRISLRKPALFRRTLSPSLSPWGTAIPMIWRLWAISLGLILRATSSLGRIGLLVIMVRPVEVGVGRERARRGSVRTSRSTRIHGRINERSLLLVCTNCSWVSCLPLSFDWAFNDECFLSLTFVPNPDLGQC

SEQ ID NO: 332938 - protein, 195 aa, Zea mays
  unsure (1)..(195): unsure at all Xaa locations
  Clone ID: MRT4577_66755C.1.pep
SARGGSVRGDAWRASTVYGPTATAPPPGSAQPAGAPASAAPVKEFTHTCNVLAXVLIXGYXCSHVLSAALNYLGIIPSKTIPYVXTVFTAXYIKRGLPAAIGSSLGRLFCGKDIESXWGRYEFLNIIIMINCIXGILATXFAIVLYYVTGKESFLVTTLSGFARMLAGLLXGXLKQVLPKLELTMXLFWKIRQSG

SEQ ID NO: 332939 - protein, 102 aa, Zea mays
  unsure (1)..(102): unsure at all Xaa locations
  Clone ID: MRT4577_66756C.1.pep
APKVLXPLGIPSSPSPHEEDKGGFPEPSWLAEPLVKAAFQKFGGRMKEIQGFFAEGNHNLGPKNPFGPGIVPYELLKPFSKPGVPGGGIPPSISLWSLPSMP

SEQ ID NO: 332940 - protein, 138 aa, Zea mays
  unsure (1)..(138): unsure at all Xaa locations
  Clone ID: MRT4577_66757C.1.pep
AAAMCLMIAAKLLYVEDRLISNSVSEKATEAFEDPGLVGMPQIVGTTALSNTRTXAGGFTMGQVVQEAXPLFSGAYEGLCLCSSRLLYLIWEFPIIVIRRPAGTNKCKDGVXIVCRLSAXAMKILESKIHSLETXFRS

SEQ ID NO: 332941 - protein, 83 aa, Zea mays
  unsure (1)..(83): unsure at all Xaa locations
  Clone ID: MRT4577_66758C.1.pep
MAYYQEVDYCSEEVRSVDPDGFGRHGGGVQQHVVKEKFEEVDXRSXAGSNHHQHHHGDHGGHGFVVRETRVEEDINTCTGEVH

SEQ ID NO: 332942 - protein, 80 aa, Zea mays
  Clone ID: MRT4577_66759C.1.pep
SGSKDFFQKRLGPRCDRAPPLFCEWHPPPRFRFPLGKQGLGFFPGALGWKNVTRVLVCSPIKPQWGVTHQKLNNKYPFSP

SEQ ID NO: 332943 - protein, 94 aa, Zea mays
  Clone ID: MRT4577_66760C.1.pep
MAYYQEVDYCSEEVRSVAPAGFCRLGGGVQLHVVKEKFEEVDTVSRACANHHHHHHGHHCGHGFMVRETRVEEDINTCTGEVHERREMLLARAN

SEQ ID NO: 332944 - protein, 195 aa, Zea mays
  Clone ID: MRT4577_66761C.1.pep
MEGSSYASRSYSELAAAASGGGRTLRVIPLRHPLGSLSTSSTSPWWRAVVGRARGMGPLDWAEAALPCVAWTRNYRWKQDLQADLASGITVGVMLVPQAMSYAKLAGLHPIYGLYTGFVPLFIYAIFGSSRQLAVGPVALVSLLVSNVLGGIVNSSSKLYTELAILLAFMVGILECLMGLLRLGWLIRFISHSVI

SEQ ID NO: 332945 - protein, 122 aa, Zea mays
  Clone ID: MRT4577_66762C.1.pep
RDPPSHTAIHTSTSTSHGRCTQTHQASAPMAYYQEVDYCSEEVRSVAPAGFGRHGGGVHQHVVKENLEEVDTVARAGANHHHHHGHHAGHGFVVRETSVEEDINTCTGEVHERMQSFLARAN

SEQ ID NO: 332946 - protein, 89 aa, Zea mays
  Clone ID: MRT4577_66763C.1.pep
MADPSASSVPPVVTMGSVVTVASPPTGGGSTVSAGITGGGKGGPCAGCKYLRRKCQPDCIFAPYFPPDNLDKFAYVHRVFCTSNVIKIL

SEQ ID NO: 332947 - protein, 119 aa, Zea mays
  Clone ID: MRT4577_66764C.1.pep
STITQQSTQHFYVHGRCAQTHQASAPMAYYQEVDYCSEEVRSVAPVGFGRHGGGVQQHVVKEKFEEVDTVSRAGANHHHHHGHHVGHGFVVRETSVEEDINTCTGEVHECMESFLARAN

SEQ ID NO: 332948 - protein, 147 aa, Zea mays
  unsure (1)..(147): unsure at all Xaa locations
  Clone ID: MRT4577_66765C.1.pep
GTLGAGRALVTVLGRRVDDVTYWISRLSEILXGIPTESLTREPKVDAGRIRAELASGYLGXCPEXTTCRXPFLVSLSNLFADLSNRTLPEAKNYHVEVLHPTTGRVLIGMDPILLLMKPMPPAKVTLTDQLHAEATITLTGTGQVTY

SEQ ID NO: 332949 - protein, 115 aa, Zea mays
  unsure (1)..(115): unsure at all Xaa locations
  Clone ID: MRT4577_66766C.1.pep
VGLPPCWPRCSFRAGLCFLGCSFGFSCPLCGRLCPSAGPGSGSCSRCGGRRCRSPPRWWRAXCGWGRGGCRLRWWRPGSAPSPGRSAWSRWSCRCSWRVSGFWRSPPPPLAAAPV

SEQ ID NO: 332950 - protein, 87 aa, Zea mays
  Clone ID: MRT4577_66767C.1.pep
VDYCSEEVRSVPPAGFGRHGGGVQQHVVKEKFEEVHTVSRAGANHHHHHGNHGGHGFVARATTVEEDINTCTGEFHERRESFLARAN

SEQ ID NO: 332951 - protein, 609 aa, Zea mays
  Clone ID: MRT4577_66768C.1.pep
MKYVLVTGGVVSGLGKGVTASSIGVVLKACGLRVTSIKIDPYLNTDAGTMSPFEHGEVFVLDDGGEVDLDLGNYERFLDIKLTRDNNITTGKIYQSVIDKERRGDYLGKTVQVVPHITDEIQDWIQRVAMNPVDDTEEPADVCVIELGGTIGDIESMPFIEALGQFSYRVGPGNFCLVHVSLVPVLNVVGEQKTKPTQHSVRGLRGLGLMPDILACRSTQPLEEHVKVKLAQFCHVPISNIINLHDVTNIWHIPLLLRDQKAHEAILKVLDLQCASKVAREPQLSEWTERVSRCDRLKSPVRIAMVGKYTGLSDSYLSVIKALLHASVALDRKLVVDWVPSCDLEDSTAKETPDAYEKAWESLKGADGVLVPGGFGDRGVQGKILAAKYARENNVPYLGICLGMQIAVIEFARSVMKLHGANSTEFDPTTKTPCVIFMPEGSKTHMGATMRLGSRRTFFQVTNCKSAKLYGNACYVDERHRHRYEVNPDMVPEFEKAGLSFVGRDESGERMEIIELPTHRFFVGAQFHPEFKSRPGKPSPLFLGLVAASSGQLDHLLQRGLTSSAGRDICGKGGAQKPKACQNGHVMKPLNGLVHGHYSATRCNGVIPI

SEQ ID NO: 332952 - protein, 93 aa, Zea mays
  unsure (1)..(93): unsure at all Xaa locations
  Clone ID: MRT4577_66769C.1.pep
MAYYLEVDYCSXEVRSVAPADFCRHGGGVQQHVFKETLDDVDTASRAGANHHHHHGHHGGHGFKMRETRVEEDINTCTGEFHDRRESFLARAN

SEQ ID NO: 332953 - protein, 64 aa, Zea mays
  Clone ID: MRT4577_6676C.1.pep
LDQFRTFFRFGTNWRAHRCFPRITNFTLALPRRMWRIVSCVKNVMCAYSGGLGSIGSSTHMTST

SEQ ID NO: 332954 - protein, 172 aa, Zea mays
  Clone ID: MRT4577_66770C.1.pep
PTRSVPKGSKTHMGATMRLGSRRTFFQVTNCKSAKLYGNASYVDERHRHRYEVNPDMVPEFEKAGLSFVGRDESGKRMEIIELPTHRFFVGAQFHPEFKSRPGKPSPLFLGLVAASSGQLDHLLQPGLISSTGRHTCSKGGAQKLKAGHVMKPLNGLVNAHYSATGNGAIPI

SEQ ID NO: 332955 - protein, 111 aa, Zea mays
  unsure (1)..(111): unsure at all Xaa locations
  Clone ID: MRT4577_66771C.1.pep
VNNNKQTNNRKAHHLVAPPRTNRTRHPKHGPAGNRHTRQRXGKQGPRRTGSSVXPKSTKHPAPHQARXRDWXGKMSSQRMTXATSSGSPGINXXXAKAELXRQARVPAXRP

SEQ ID NO: 332956 - protein, 134 aa, Zea mays
  Clone ID: MRT4577_66772C.1.pep
VRARTIAKYGTRPGSTITQAIHTSTSTSHGRCTQTHQASAPMAYYQEVDYCSEEVRSVAPAGFGRHGGGVQQHVVKEKFEEVDTVARAGANHHHHHGHHGGHGFVVRETRVEEDINTCTGEVHERRESFLARAN

SEQ ID NO: 332957 - protein, 308 aa, Zea mays
  unsure (1)..(308): unsure at all Xaa locations
  Clone ID: MRT4577_66773C.1.pep
GDTPLNTRQQSERVFAPQGADGVLVPGGFGDRGVQGKILAAKYARENNVPYLGICLGMQIAVIEFARSVMKLHGANSTEFDPTTKTPCVVFMPEVIVLLQVLVXYLIYLWLKTIYASVLQGSKTHMGATMRLGSRRTFFQATNCKSAKLXSNLPHLSPLFPQEFYIWVPLSPLDCLRXKSFEFXCLRYGNACYVDERHRHRYEVNPDMVPEFEKAGLSFVGRDESGERMEIIELPTHRFFVGAQFHPEFKSRPGKPSPLFLGKQDILKHVLVFCMFKSVFFASERSPLNFGTIHEHLGRIGSSVIRPA

SEQ ID NO: 332958 - protein, 106 aa, Zea mays
  Clone ID: MRT4577_66774C.1.pep
IFHGGFFGAPQPQKSPLCGGGIPFFLPGGSLGPILPRFILKNFRGELCQFPLPQARFGPFFFLPLPRLEKNPPQTLFFFFCFGGPANCFYPIFFFIEKGPPQFPTP

SEQ ID NO: 332959 - protein, 89 aa, Zea mays
  Clone ID: MRT4577_66775C.1.pep
LGSSRPAGPGSATHRHLPIYLLHGHEMRKVDTPKCESATARRRIRQEIGDVDTTAGDSSDDGDAPPPWRRVHQHEDEQHLVALLAGAWQ

SEQ ID NO: 332960 - protein, 336 aa, Zea mays
  unsure (1)..(336): unsure at all Xaa locations
  Clone ID: MRT4577_66776C.1.pep
MAVTSGHSERADEPLKEALLAARNGSGSDGDGDGEKDLEEIRSVGSFLRHAAEENRKLWYLAGPAIITSITQYSLGGITQVFAGHLTTLELDAISTENNVIAGLAFGIMLGMGSALETLCGQAYGAKQLHMLGVYMQRSLIILNAMAVLMLPLYLFATPILRFFHQTPRXAALAGRLALYMIPQLFAYAFNFPIQKFLQAQSKGMAMAAVSVAALLLHVAISWLLMGPMGMGIEGLPVVLNAFRWLVVLSHLAYILMGYCPSARNGFDWLAFSDLSGLARLTIGXAXMLCLEMWIYMSLIGIAGNLDNAEVAVADSSIXTNLCRWTIMENFGYNAA

SEQ ID NO: 332961 - protein, 93 aa, Zea mays
  Clone ID: MRT4577_66777C.1.pep
MAYYQEVDYCSEEVRSVAPAGFGRHGGGVQQHVVKEKFEEVDTVSRAGANHHHHHGHHGGHGFVVRETRVEEDINTCTGEFHERRESFLARAN

SEQ ID NO: 332962 - protein, 74 aa, Zea mays
  Clone ID: MRT4577_66778C.1.pep
LLYGLARELITKKPKPFSTFSNHTNTHWLVYQDILLSLFKCCPPTNITINERTMAYQLTKSTLKCHTCKDDASA

SEQ ID NO: 332963 - protein, 94 aa, Zea mays
  Clone ID: MRT4577_66779C.1.pep
LSMAAQNLLPFFLHCTLTSSTFIFPSQFLPPSQYTNSSSLPQASRCTRFNFITCTAVFSSIFYKQPPFFTFWYQHQNIHCIHQTYGNTVTPYTS

SEQ ID NO: 332964 - protein, 36 aa, Zea mays
  Clone ID: MRT4577_6677C.1.pep
PPSSPVLSSLPPPRYIVALWLACNCPRRYQNSLRSI

SEQ ID NO: 332965 - protein, 120 aa, Zea mays
  unsure (1)..(120): unsure at all Xaa locations
  Clone ID: MRT4577_66780C.1.pep
DLEPAGXKLPKKGKKKKKNKKKKKKKKKKKKKKKKKKKKKKKKKKKKKKKRGEKSGKPGAPQTPGGGPPISRGGASGFFLKKKKKPGGEGPGGKKFFGVFFWKGGAPQNQGGPNGKGPPF

SEQ ID NO: 332966 - protein, 60 aa, Zea mays
  Clone ID: MRT4577_66781C.1.pep
PPEVKVKGVKNGPPPMFSMLGFFGRAIVPGKGPLKNLFGQVADPVAKKAWGKAPNFVPGN

SEQ ID NO: 332967 - protein, 71 aa, Zea mays
  Clone ID: MRT4577_66782C.1.pep
SSARYIITGSLTATLQHLPSDSKCLGYQEATAENFGRHVPSSYCLLLGQASQFLQQAKLIDPANLADHCPA

SEQ ID NO: 332968 - protein, 184 aa, Zea mays
  unsure (1)..(184): unsure at all Xaa locations
  Clone ID: MRT4577_66783C.1.pep
YPHELTGGXLQRIIIAVALSCIPKLLLPDEPTXTAPDVTIQAQILDLLRQVKEEFKTSILLITHDLGVVAEMADYVVVMYGGKVIEEAPVLEIFQNPKHPYTKGLLKSKPVMGKRIDKLYSIPGQVPNLVGLGEFCYFSGRCEHCMEICEKEAPNLNVNDHHHKVACWLKYNEFWIRIRIASAA

SEQ ID NO: 332969 - protein, 57 aa, Zea mays
  Clone ID: MRT4577_66784C.1.pep
IVFLGIFMTEMIDLSLKKTPPGYCKGSSTYELLKLPLSHPNIPKDTIFSLPALFLQN

SEQ ID NO: 332970 - protein, 116 aa, Zea mays
  Clone ID: MRT4577_66785C.1.pep
VPRAPIDLIAIPHSEIMNFDASRRAELIIKLHEQTKANIKAMNAKYEEAGSKGRKHITFEPGDLVWVHLRKDRFPDMRKSKLQPRAAGPFKVLHKINDNAYKVQLPADFGVSSSFN

SEQ ID NO: 332971 - protein, 104 aa, Zea mays
  unsure (1)..(104): unsure at all Xaa locations
  Clone ID: MRT4577_66786C.1.pep
WVGAQGGQKGLPGKPPLKGSPGPGAPNPPVQSWGGGKGNPGGPKGRGWILFGYKGVGGSKGKKKAPXGAFGGPTGNSPXGKGGPTKGGKGLWGPPKTGKGFFSP

SEQ ID NO: 332972 - protein, 41 aa, Zea mays
  Clone ID: MRT4577_66787C.1.pep
MVRSTATIAEGSLCELHVSLCYGKPVTVARHRCVGSVICYT

SEQ ID NO: 332973 - protein, 74 aa, Zea mays
  Clone ID: MRT4577_66788C.1.pep
EPNVCTWCYHGFILRADTLDPPHAPRLKGRAMCLRSALSATALWTPAPTQPATTPAQHLTPPAQLTPDHTYLNV

SEQ ID NO: 332974 - protein, 96 aa, Zea mays
  unsure (1)..(96): unsure at all Xaa locations
  Clone ID: MRT4577_66789C.1.pep
TTXPLQRGXSIQXFSSLTISSSIPIHLNATSDDFISAISFITHSVVTNNFSSHTPTDAKLNVSINLFCHIHHNFLLYLHFLSNSSPLNFIAINYTF

SEQ ID NO: 332975 - protein, 28 aa, Zea mays
  Clone ID: MRT4577_6678C.1.pep
ARQRNAPDLIGYSKQSTLTATISRMHHL

SEQ ID NO: 332976 - protein, 128 aa, Zea mays
  unsure (1)..(128): unsure at all Xaa locations
  Clone ID: MRT4577_66790C.1.pep
PLSQWLYLLTNYQIAVFHETFTPFYYHWDGSLCSKDLGTVLISLIPIPTDAEFLYMCNKTDTNRYCTTDFQXLLHLIEHKRTALDSIEELKDVFRMDHQDQNRYVCAGEHRCVMTSVGDNLXTDELAD

SEQ ID NO: 332977 - protein, 245 aa, Zea mays
  unsure (1)..(245): unsure at all Xaa locations
  Clone ID: MRT4577_66791C.1.pep
MRKAKALYGIAAAVALMAVLELRLVGANFVSDCDITWEPKNAKTDEGGNHLTLPLVSNSSGSMLRTKKQFIYGSVSTRMKLVXRATXGRHGHHLLHVIXGDNHDEIDFEFLGNETGKPYTIHTNVFADGIGQKEMQFRPWFDPTADYHNYTIFWNQCMIVWLIDGIPIRVFRNHSAQGVPFPTRRQMYAFSSIXAAEDWATQGGRVKTDWXTRAPFVAEYRDINLRVCDCALYXRAGCPDSCASS

SEQ ID NO: 332978 - protein, 103 aa, Zea mays
  unsure (1)..(103): unsure at all Xaa locations
  Clone ID: MRT4577_66792C.1.pep
GVVKLPATPGTPLSSTRPSPRSSTRSSSPRSDPDASEACFEGNPFKTVPGPFKLFWQCMRSKPGXFTNGPVVFREEPTEPYTYLQLDPPRRVEVNLEQTGSEP

SEQ ID NO: 332979 - protein, 94 aa, Zea mays
  Clone ID: MRT4577_66793C.1.pep
MSEERPVPRRESPWGLPEGDTRQPKAHRCNDRAEDVVQACFEGNPFKTVPGPFKLFWQCMRSKPGEEPTEPYTYLQLDPPRRVEVNLEQTGSEP

SEQ ID NO: 332980 - protein, 94 aa, Zea mays
  unsure (1)..(94): unsure at all Xaa locations
  Clone ID: MRT4577_66794C.1.pep
MSEERPVPRRESPWGLPEGDTRQPKAHRCNDRAEDVVQACFEGNPFKTVPGPFKLFWQCMRSKPGEEPTEPYTYLQLDPPRKXEVNLEQTGSEP

SEQ ID NO: 332981 - protein, 94 aa, Zea mays
  Clone ID: MRT4577_66795C.1.pep
MSAERPVPRRESPWGLPEGDTRQPKAHRCNDRAEDVVQACFEGNPFKTVPGPFKLFWQCMRSKPGEEPTEPYTYLQLDPPRRVEVNLEQTASES

SEQ ID NO: 332982 - protein, 95 aa, Zea mays
  unsure (1)..(95): unsure at all Xaa locations
  Clone ID: MRT4577_66796C.1.pep
MSEERPVPRRESPXWGLPEGDTRQPKAHRCNDRAEDVVQACFEGNPFKTVPGPFKLFWQCMRSKPGEEPTEPYTYLQLDPPRRVEVNLEQTGSEP

SEQ ID NO: 332983 - protein, 80 aa, Zea mays
  Clone ID: MRT4577_66797C.1.pep
FFPAKLKLFGPPGFLKFFKGAPFGSSHPPEGKKNLPVLKLKWGSWKPIYVFPSFKKKFPPFFFLGKGPIFANLPFHGPPI

SEQ ID NO: 332984 - protein, 137 aa, Zea mays
  Clone ID: MRT4577_66798C.1.pep
KARLTKKKIEKMVQEPKKSKPQDEEVKKKVDAKNALENYASTMRTPIRAAKFASKFPAEDKKKIENPVDGAISWLASNQLVKVGEFQPKIKELEGFSNPFFAKMSQGKGAGMGAPVGMDKNAPFVGTGPGPKIEEVD

SEQ ID NO: 332985 - protein, 60 aa, Zea mays
  Clone ID: MRT4577_66799C.1.pep
TLFRIRNIHTKLIRSGLTLTINRSIDKNLYIQLMIYTLQLHLVIKINLHIKVLIYLLIFT

SEQ ID NO: 332986 - protein, 232 aa, Zea mays
  Clone ID: MRT4577_6679C.1.pep
MFRSLAPRAAQRASRPVTRSTFCASNIYFQNRLRRGYASEAEEKDLVIIGGGVAGYVAAIKAGQAGMKVTCIEKRGSLGGTCLNVGCIPSKSLLNNSHLYHQILHDTKGRGIEVGDVKLNLPAMMKAKESSVSGLTKGIEFLFKKNNVEYIKGTGAFQDEHTIAVNLTEGGETTVRGKNILIATGSEATPFPGLTIDEQKVITSTGAIALQEVPKKMTVIGGGIIGLEMASV

SEQ ID NO: 332987 - protein, 80 aa, Zea mays
  Clone ID: MRT4577_667C.1.pep
YQRYHRGPINIWLQQTQSDQPTCMLYTRTCITKTDAKHAEREIANCKNSVSLSVSHTTQYLCMAASSASLIIDQPPPHAR

SEQ ID NO: 332988 - protein, 76 aa, Zea mays
  Clone ID: MRT4577_66800C.1.pep
NNTQLSKKNTIFCYFLHLSGTKSDQNPHLPRVFKKALLKHFPFTWAHTQKKKLLVSQKAPLLYFPLIYFSHHIPIF

SEQ ID NO: 332989 - protein, 85 aa, Zea mays
  Clone ID: MRT4577_66801C.1.pep
KGASSGEIKKAIKAVFEGPLKGIMGYVEEDLVSPDFPGDSRSSFFNPKAGIALNDHFIKLVFWYANEWGYSNRVVALIPPMFKTQ

SEQ ID NO: 332990 - protein, 145 aa, Zea mays
  unsure (1)..(145): unsure at all Xaa locations
  Clone ID: MRT4577_66802C.1.pep
KIAMNLRLNLIYLCLPIGDNSEDCDTCYKALYENLTLVIDDDSHNRTYTDHLLRYLFNMSDDELTSLYDYVTSMIEGTLDIYXYITGDSKIAVENSTFLDKLKTRRYEVLYMHDALDEYAGGHVIDSEVLNLVYVTQDDLNLHDT

SEQ ID NO: 332991 - protein, 63 aa, Zea mays
  Clone ID: MRT4577_66803C.1.pep
RSFRRTRSDPQPPDPLHRAALRLSNAPAPIQIKYLMEGRDQAPQWAPAVSACGAPCSVDCERR

SEQ ID NO: 332992 - protein, 89 aa, Zea mays
  unsure (1)..(89): unsure at all Xaa locations
  Clone ID: MRT4577_66804C.1.pep
ATARSLREVARAQHALRNSVRRLQVQLRGAWLGQAHQEFENLKDRADKQNHLLXWALTGHVQRQQREMAEQQQWLRQIQQRXHMAALPA

SEQ ID NO: 332993 - protein, 56 aa, Zea mays
  Clone ID: MRT4577_66805C.1.pep
MAGRWFRPEVYPLFPGTAMAAGICGFNFFRNITGNPEVRVNKAGREPGVLENHEEG

SEQ ID NO: 332994 - protein, 125 aa, Zea mays
  unsure (1)..(125): unsure at all Xaa locations
  Clone ID: MRT4577_66806C.1.pep
XKFLFLNFFFVFFLKVFPFFPPNGFFFFPKPQKNHQTSPPKGENLKKKPQKGNPPPRKPPQKKGKTTWPTQNPKEKPFLHKNPRIKKKAPPLRPKKPQGPLNQPRVANRETRDQKFLPNPWEKGL

SEQ ID NO: 332995 - protein, 137 aa, Zea mays
  unsure (1)..(137): unsure at all Xaa locations
  Clone ID: MRT4577_66807C.1.pep
TPARETPPAPKADRRAPRHPDDDTRREGXAXHXGQAGNQDGKASREPXGQEHGTQADGQRPGDKTTGGGEEXXNTXHSETGAGKHAPRAXTGDQEPTGXEEGRTGTXRQNNHPEQXXRGKEEAGNNXARGHNTXGKE

SEQ ID NO: 332996 - protein, 248 aa, Zea mays
  Clone ID: MRT4577_66808C.1.pep
KGETPAEPWRRKRSRRRSRGPSSPTTSTRKACCAVLQSWVSRKFMTGCVVLFPVAVTFFITWWFIQFVDGFFSPLYAKIGIDIFGLGFLTSLVFIFLVGIFVSSWVGSTIFWVGEWFIKKMPFVRHIYSASKQVSTAISPDQNTTAFKEVAIIRHPRIGEYAFGFITSTVVLQTDKGDEELCSVYVPTNHLYIGDIFLVNSEEVIRPNLSIREGIEIIVSGGMTMPQVIASLEPMPRKSQNIRLNRMT

SEQ ID NO: 332997 - protein, 55 aa, Zea mays
  Clone ID: MRT4577_66809C.1.pep
ARHVLGHSHPSHCRQKGRYDRTHGKKVVSIQFFEPAIACSPSTASCFKCPSSRRQ

SEQ ID NO: 332998 - protein, 102 aa, Zea mays
  Clone ID: MRT4577_6680C.1.pep
DFQTFQQEGWHYELDNPEEEITYKGVVFNEMKGVYSQPDNIMGRVSQQALSPDNTYGVDSGGDPNEIPKLTFEEFKEFHSKYYHPSNARIWFYGDDDPKERL

SEQ ID NO: 332999 - protein, 51 aa, Zea mays
  Clone ID: MRT4577_66810C.1.pep
QTSRYTDICGQVREQLYYKGGAKIIGEREGNIRLLEHRTMAPSNNNASQSL

SEQ ID NO: 333000 - protein, 258 aa, Zea mays
  Clone ID: MRT4577_66811C.1.pep
MAEEKESTSIPLSQAAEAVDPEDPAKSPPRPSSPTTSTRKACCAVLQSWVSRKFMTGCVVLFPVAVTFFITWWFIQFVDGFFSPLYAKIGIDIFGLGFLTSMVFIFLVGIFVSSWVGSTIFWVGEWFIKKMPFVRHIYSASKQVSTAISPDQNTTAFKEVAIIRHPRIGEYAFGFITSTVVLQTTYEDEELCSVYVPTNHLYIGDIFLVNSEEIIRPNLSIREGIEIIVSGGMTMPQVIASLEPMPRKSQNIRLNRMT

SEQ ID NO: 333001 - protein, 128 aa, Zea mays
  Clone ID: MRT4577_66812C.1.pep
RIPLLSRLPLCFPASSSPPLAWLNREPCAALLNRAEKKEKEMGLAKSYCTGRYRARAGSVCLAGRPGTQRKRTTAREPRVVVGCAHVTTRLFTRPSGLSKCQPSSGSGSGVPCLLVRNHAPESRATAT

SEQ ID NO: 333002 - protein, 233 aa, Zea mays
  Clone ID: MRT4577_66813C.1.pep
MVGVVLATCGGGRARRRQGARPTQGGLVQMDGSGRFTRCHGSCAHKEFDNGAAAYPVHVLRQADGFQRGRLGVSIEVVLGLEAREASWDSEEASRAVGASERWLGRVGRGGRHLGGSGGRCRARQSWGHARGSQAGYGVGCYALGEGFIGVSGHRRAVGLTGARGVHGGAPVRAQPPRHDIEHVAEFSVVAFKRSLAPNLHEFGQDPIVRFLLPTTLYRLCVEVEAFLGLCSE

SEQ ID NO: 333003 - protein, 31 aa, Zea mays
  Clone ID: MRT4577_66814C.1.pep
AFEAPPQYVLPTYEMAVKIPEKEPPPPYLPA

SEQ ID NO: 333004 - protein, 39 aa, Zea mays
  Clone ID: MRT4577_66815C.1.pep
PAWYRPGHNYRVDELLIRRPPSFFFFFYIVLNTKDNIFN

SEQ ID NO: 333005 - protein, 167 aa, Zea mays
  Clone ID: MRT4577_66816C.1.pep
RCRRGGSKRTTSNSDGASQKHDMTPTPCRDTRGSRLRRSCFPDPDDTFVRRMGEDKGSVCGRRRKFVTRTTPHPHYIHTTQLRQLNSRVITTLIEINVRIITYQNRPVHCAPTKSDARNRQTIHVVRSRQLLGLARRARAWVLTFSSLNGSNQVETTQLFKLTTLLE

SEQ ID NO: 333006 - protein, 107 aa, Zea mays
  Clone ID: MRT4577_66817C.1.pep
LFYNNGLHSESIYRVTKFSFRQQRCRLLRAGPLYNFRSYTLYTLSQEIMWYRQIISTSTYKKNQKLTHVKIMDRSTLGRFCTSPPTLRGDMHLGHNTIGTCATMLTP

SEQ ID NO: 333007 - protein, 92 aa, Zea mays
  Clone ID: MRT4577_66818C.1.pep
SSSSHNSIVNTLVITQITRYLCLQIQIHVTKWQPKDQSLRYLNIHTVAALTNNRSQEKRFTPTKRPHQFLQIKIDLPRVIGYSLMVTARCLT

SEQ ID NO: 333008 - protein, 128 aa, Zea mays
  Clone ID: MRT4577_66819C.1.pep
MVSQFMMELQGLKTVDGEDPPRILHFNPRLRGDWSGKPVIEQNTCYRMQWGTPLRCEGWRSRADEETVDGLVKCEKWIRDDEGRSEESKTSWWLNRLIGRTKTVSVDWSYPFVEDRLFVLTLTAGFEG

SEQ ID NO: 333009 - protein, 73 aa, Zea mays
  Clone ID: MRT4577_6681C.1.pep
PNFPPATEAGYMVCFPSPPGGPGVINFPLFSPGIRDLNKKVCWGLVLSQCENFFCGRVGSLSLFTKKVGLACP

SEQ ID NO: 333010 - protein, 56 aa, Zea mays
  Clone ID: MRT4577_66820C.1.pep
FFLGEKKKPLSSSKKEGPLAPLSLRPKSPTRSTAQEATKKKPTPVLPEEKKTHGCF

SEQ ID NO: 333011 - protein, 146 aa, Zea mays
  unsure (1)..(146): unsure at all Xaa locations
  Clone ID: MRT4577_66821C.1.pep
FRGEPKGPPTGPFFKKKKSGKPPALMNANPWANXINIKKLEKPSPRVQMKGFTWETPKLVPFGSAPKKIPIIFTIVPNFFSIPPLIXAPLTQNPPNENAQSFPILPFTKIKSPVFKIGQRQGPTPPSLCWKPILPLLVHPQNFVRN

SEQ ID NO: 333012 - protein, 73 aa, Zea mays
  Clone ID: MRT4577_66822C.1.pep
STLHIGGILKIGFKSFRSSLPWHCLQRWHHLLLGIMAALKSFVKPKIIKKTTKRFIWHHQANMSKFSLTGRNL

SEQ ID NO: 333013 - protein, 161 aa, Zea mays
  unsure (1)..(161): unsure at all Xaa locations
  Clone ID: MRT4577_66823C.1.pep
ARSRSRPQRSPPARSGSRSRRPRRRARARPTLLLPVSSRPPRVTSTTSSSRSRRPPERPACPPTRSSPGSRPRPTTRRPTSRTLPTTSTTSSRRLRSSCPTTPRTSSSRXMQXAXXXXSRPPPLWSRPRSKKNKSKGTPGAQRGYPAGSHNKQYVAYTKSH

SEQ ID NO: 333014 - protein, 48 aa, Zea mays
  Clone ID: MRT4577_66824C.1.pep
FGGYFFLLKGTNGWRWEAILPNWAREGYFSKGGWGNPHPLLGRGGSII

SEQ ID NO: 333015 - protein, 81 aa, Zea mays
  Clone ID: MRT4577_66825C.1.pep
AQAPYLPNQSREGSAEPITPNRWLMLSGKSPPPPPLASIDAISREGPTHYHGWTPNKKAGHKAFWYEQKEKKKKKKKRAAP

SEQ ID NO: 333016 - protein, 42 aa, Zea mays
  Clone ID: MRT4577_66826C.1.pep
MYGTMSRATHHKISSSECSGSKRTYPPGIVRLKDTTTLYLVH

SEQ ID NO: 333017 - protein, 638 aa, Zea mays
  unsure (1)..(638): unsure at all Xaa locations
  Clone ID: MRT4577_66827C.1.pep
MQRLTAIVFVATSFLVASVPHAKSADLNSDKQALLAFAASLPHGRKLNWSSTTPVCTSWVGVTCTPDKSRVHTLRLPAVGLFGPIPSDTLGKLDALEVXLSLRSNRLTVDLPPDVGSIPALHSLYLQHNNLSGIIPTSLSSSLTFLDLSYNTFDGEIPLKVQNLTQLTALLLQNNSLSGPIPDLQLPKLRHLNLSNNNLSGPIPPSLQRFPSSSFLGNSFLCGFPLEPCFGTAPSPSPVSPPSPSKTKKSLWKKIRTGVIIGIAVVGGVLLLILILVLLICIFKRKGHTEPTTASSKGKAIAGGRAENPKEDYSSGVQEAERNKLVFFEGSSFNFDLEDLLRASAEVLGKGSYGTTYKAVLEDATIVVVKRLKEVVVSKKDFEQQMEIIGRVGQHQNVIPLRAYYYSKDEKLLVFDYVPSGSLAAVLHGNKAAGRAPLNWETRVKISLDVAHGIAHLHAEGGGKFIHGNIKASNVLLSQNLDGCVSEFGLAQIMTTPQTPPRPVGYRAPEVLENKKSTQQSDVYSFGVLLLEMLTGKAPLRSPGREDPSVEHLPRWVQSVVREEWTAEVFDVDLLRHPNVEDEMVQMLQVAMACVAAHPEERPKMEEVIRRVTEVRNSYSSGTRTPLEDKPSETARAP

SEQ ID NO: 333018 - protein, 182 aa, Zea mays
  unsure (1)..(182): unsure at all Xaa locations
  Clone ID: MRT4577_66828C.1.pep
PPEMLLPALXLSRITQLVPRPALRPASVNPAPRRPAVMEPRTMVGLPRSGVVTSPTPDSMSAGSDGGSITTTTARRLLAAESCAGRRRHGGILCWARDACSSTARRLLAAGSCAGRRRRGGILCRARDASPSTARRLLAAGSCAVRESAARGTRRSARRRDPVPGGRGFSRRDSVDYNLVPN

SEQ ID NO: 333019 - protein, 68 aa, Zea mays
  Clone ID: MRT4577_66829C.1.pep
LLQRQSMPVGRVGAFDSAVCRCQRQAQCAGISAALAVVFIRLQGIHQFELCLVFTAAAATTIETANWC

SEQ ID NO: 333020 - protein, 69 aa, Zea mays
  Clone ID: MRT4577_6682C.1.pep
VDWYHVNLHLLLVEGHEHSETVLGECVTVHLSRWVSQCHSTLLSLSQSMRCARLELELNSNADAGVQAS

SEQ ID NO: 333021 - protein, 220 aa, Zea mays
  Clone ID: MRT4577_66830C.1.pep
NSARGSKVQHQQLESVRSKFRESLVAALSLDSDQQNKSQSDNVQSAGSIDNFKPGAGDAVQDLVATTSKDVCTTNSGVDTTVAPSRCEENEKLSSDLALEMTTSINDDMQQQSIQVSSEDDLLGQCMVADELLQGHGLSWVSDLDAGISEPNAEPNDLKRPRTSNVESESKRIKSANELAMEKEKFNQRAEILAFRIEEELFKFFGGVIRSTRKGQISSV

SEQ ID NO: 333022 - protein, 87 aa, Zea mays
  Clone ID: MRT4577_66831C.1.pep
LESVCIYIKTKLLNRCMRRITRCSMRATLSRLPSLGCSSSGQVRLWAVWFLSFCCPLRCKVGIKCGPDPASGECIVFAPTKICGVLF

SEQ ID NO: 333023 - protein, 63 aa, Zea mays
  unsure (1)..(63): unsure at all Xaa locations
  Clone ID: MRT4577_66832C.1.pep
NTTIPLSVVHGVIVVCRIHVDNVLCLXQFSDFPXLGRSTLTTEGKTVAVAKVADVPLAGSSTF

SEQ ID NO: 333024 - protein, 89 aa, Zea mays
  unsure (1)..(89): unsure at all Xaa locations
  Clone ID: MRT4577_66833C.1.pep
MATSRADVEKGGXRRRGRRSRXGQGAVAAXYPQHEGEREWTPWLAPSILVANITVFTIAMHYHSCPAPLAPARGATPTRPPPPLSPGSS

SEQ ID NO: 333025 - protein, 86 aa, Zea mays
  Clone ID: MRT4577_66834C.1.pep
KPFYFKDLVEIFWFGGISLGPFFLGILKGVLEASGHFFIGNLGDFFHKRGAYFFSIAVVNFGGFLGGSLLCNWRMWGVFKRSLRVG

SEQ ID NO: 333026 - protein, 77 aa, Zea mays
  Clone ID: MRT4577_66835C.1.pep
NPLGAPPFFLCKGTSFFWGNWGWANFPKPRRLKKETPKKSGKSFGGKKKKKKKKKKKKKKKKKKKKKKKKKTRGGAG

SEQ ID NO: 333027 - protein, 164 aa, Zea mays; identical to SEQ ID NO: 330327
  unsure (1)..(164): unsure at all Xaa locations
  Clone ID: MRT4577_66836C.1.pep

SEQ ID NO: 333028 - protein, 69 aa, Zea mays
  Clone ID: MRT4577_66837C.1.pep
GKELVLICISQQDDLVIQIKSLFFTPNTLFHPFHRDSLTTRSSNLSLKPPALASLHQQQPQVHFWRQAL

SEQ ID NO: 333029 - protein, 48 aa, Zea mays
  Clone ID: MRT4577_66838C.1.pep
SVTSTLRNTNAKTRSQIETEDEGGGGGYPTGATVKGHPPVHAVGLRPF

SEQ ID NO: 333030 - protein, 164 aa, Zea mays; identical to SEQ ID NO: 330328
  unsure (1)..(164): unsure at all Xaa locations
  Clone ID: MRT4577_66839C.1.pep

SEQ ID NO: 333031 - protein, 98 aa, Zea mays
  unsure (1)..(98): unsure at all Xaa locations
  Clone ID: MRT4577_6683C.1.pep
QIVGDAKDKNRKLXETVXELHIGLSNYNPQEDKRLSGVXKLPHIPHAKMKVCMLGDAQNVEEAEKMGLDYMDVEALQKLNKNKKLDKRLAKKYHAFLG

SEQ ID NO: 333032 - protein, 168 aa, Zea mays
  unsure (1)..(168): unsure at all Xaa locations
  Clone ID: MRT4577_66840C.1.pep
MATVSAAVVTTIVARAAIARPNALGXCAEGEEREGAVQLRQGRGPSQHPRAQARRCSAAAGXGDRVGGARAGARGRAHVHGGHRAEPRAQQQPAGVDPPGGLRPHLVPLHHLHLXPRRGRGVRWPLALDPPPLLLMXECKHGGGHRCKFRHGYLHLRYKKKKKKAVGN

SEQ ID NO: 333033 - protein, 127 aa, Zea mays
  Clone ID: MRT4577_66841C.1.pep
KGSVVRGENGRHRDRRRHGEVGLRRLRSVQAAALHRRRAGNWVDTGTRNRGFDGRGDGRKQRRVRRRHWIRCGTVCETGAKADAAANACGVAVLRKDCAARHERPGSDPTRAMVGTAGIRRAGREER

SEQ ID NO: 333034 - protein, 515 aa, Zea mays
  unsure (1)..(515): unsure at all Xaa locations
  Clone ID: MRT4577_66842C.1.pep
FYCLSHELQYIISREDTLXVQMQRALELANACITIVQAASHYKKDHKEWYPSPEGLITWNSQPVLRSGIWNLASLIMELLGESGAADMSMKSSLWSQLEGLTDILLEAYMCLLTAQFERGQEHGVLVQEYCERRDELLRSLYNLAKQIVEAKYQESRNGTDKPDLKESILREVISPILATAKRHEGYQTLWQICYDLDDSGLLRSLMHDSVGPHGGFSFFVFKELVNRGDYSNLLRLGEEFQEELASFLKERSDLLWVHEICLNQFSSASDTLHTYALRRSPDGDASFTTSRKPLSFAERRRLLYLSKIAATAGKDIDYEVKVARIEADIRILKLQEEIVQHDPEYAQVKSTNTLLGPSELIEMCLRRDRELSLKAFEVFALTSSSFRSSNRGLLEACWMNATDQDDWVKLSEASMSEGWSDEVIEESLQATVLFKASRLCYSPDAVVYDGTFEDVLPVKKEDVHLRGLESKCLSVEEVLMQHEDFPDAGKLMMTAVIRGKEPIFTATEPVEMDS

SEQ ID NO: 333035 - protein, 110 aa, Zea mays
  Clone ID: MRT4577_66843C.1.pep
LGDKLNREGAWDLAFYPEENIPFPSCPMGGSLEKGGDRSNLAFFSGCPDPSSDMFDPLAPVDDGSCPLEFFSQELWWSFFSIPGREAPPPNLFPPSLISKCLSSLSSFDT

SEQ ID NO: 333036 - protein, 49 aa, Zea mays
  Clone ID: MRT4577_66844C.1.pep
ESDLHVYIDACMMNLFVCLNSRVVSLLKPSGNRGPAYSDDLAGTGESHR

SEQ ID NO: 333037 - protein, 68 aa, Zea mays
  Clone ID: MRT4577_66845C.1.pep
APKKRTILKCSYRCDDLDALIDMSTDDLVQFFTARSIRSAQRGLKRKPMALMQKLRMALNDATAGEKP

SEQ ID NO: 333038 - protein, 62 aa, Zea mays
  Clone ID: MRT4577_66846C.1.pep
ITTTNNHHARAYSSTWSHHATWPAGIQRHVRLPNTIRIAAETSHLQTLLTDENGLIESSKIT

SEQ ID NO: 333039 - protein, 78 aa, Zea mays
  unsure (1)..(78): unsure at all Xaa locations
  Clone ID: MRT4577_66847C.1.pep
GGVGKKTAFCEIKGGLKKPKXRKRRKRFXVSKSQKGQTKGAVQKGSKGPKLGGGGGKPLKGIKCPSEPSSKPPLGAPG

SEQ ID NO: 333040 - protein, 51 aa, Zea mays
  Clone ID: MRT4577_66848C.1.pep
TIIAICFVNLRIIGTDLSASLSTLTLTMLTLPQRNGVIKAVAEPVQTNSVD

SEQ ID NO: 333041 - protein, 240 aa, Zea mays
  Clone ID: MRT4577_66849C.1.pep
MRGGGQVASLAGAPEFFPEPASFGRPWESRQMYRQGGGMPMPGREKNGGRHGPSSSFGEHELGHVPNGVNRKAHGDAAYDQRIVIERKEGLRHSQSETDTKRAKQQYAQRSRVRKLQYIAELERRVQSLQTEGIEVTAEMDFLGQQNIMLDLENKALKQRLESLSQEHLIKRYQQEMFEREIGRLRTLFQQQQQQQHVPQQQAPTHSRSNSRDLDSQFANLSLKHSDPSSGRDAISGLRI

SEQ ID NO: 333042 - protein, 119 aa, Zea mays
  Clone ID: MRT4577_6684C.1.pep
GLVPLAGSYNESRCQGLDGLTSREADYYQQGSRFAKWLTAVSMPNGPYELTVKEAAWRLERYSGISQDNGLVPIVEPEILLDCEHGIERTFEVSHKVWSETFYAMAVNNVMFQGILLKP

SEQ ID NO: 333043 - protein, 357 aa, Zea mays
  unsure (1)..(357): unsure at all Xaa locations
  Clone ID: MRT4577_66850C.1.pep
TAYDCSIPLAPLVADVICCPXVNSLMNIFQAAYGSGNGTLVLNQASANACFSDIMNILASKGANTNIPELCTLRPSNLTDVSCPVKDISSFEKIVNISKLQDACSNVDPLKECCRPVCQPAIAEAAIHISSGGANMFGSSSMPGSAVGIDVVSDCKGVVHSWLSMKLSSEEANSAFRVLSGCKVNKVCPLEFDEPSSVVKACGKASSSTLSCCAALHSYIGTRQKQIFVTNLQAINCATMFGSMLQKAGVVDDIYGLCDIDLKDFSLQDFGQQGCLLRSLPTDIVFDNATGISFTCDLSDNIAAPWPSSSSVQSLSLCAPEMSLPALPVSPKSESSGPSRTGIGVLLLLVFLTTITI

SEQ ID NO: 333044 - protein, 90 aa, Zea mays
  unsure (1)..(90): unsure at all Xaa locations
  Clone ID: MRT4577_66851C.1.pep
RPFKSRGGEGEFDTKCCCAVGIGQTVRKFWFLTPPKXGPKXQIFFGWLXDXXXSFVGGVTLTHYYSNSLAGGXFFLSDGGYAYIYPYHDP

SEQ ID NO: 333045 - protein, 87 aa, Zea mays
  unsure (1)..(87): unsure at all Xaa locations
  Clone ID: MRT4577_66852C.1.pep
CTTAIDSWKGLRDKFLLNFXGYRPDTDALAELSLCKQQEKETLREYYRKFLTLKSQLPSVDDHIAIHYAISXASGWRPVHPLHQGST

SEQ ID NO: 333046 - protein, 61 aa, Zea mays
  Clone ID: MRT4577_66853C.1.pep
VRLLLSSFRMELSLVSLLTLLRRHHSCCVELHTFVERSMVSLLPSHGYTLKDLSRRSLDGA

SEQ ID NO: 333047 - protein, 103 aa, Zea mays
  Clone ID: MRT4577_66854C.1.pep
PPPPLKLKSFFLVGRTFVHPFPNYVFMGRPPPLGGPPRFFSPPVATITAADQGSAAVTYPPSSFTGGGGAPPRSGGSISAGLKLKEINERPPPGMKQTTPPHT

SEQ ID NO: 333048 - protein, 37 aa, Zea mays
  Clone ID: MRT4577_66855C.1.pep
CTILKSLEMMISGVKLLVVFLKFCLVGTLQMPNRQLS

SEQ ID NO: 333049 - protein, 88 aa, Zea mays
  Clone ID: MRT4577_66856C.1.pep
QLIPHVAVSVLLSVCDSVGAVAISVPGPYCNLDGLNKVGVVRSGSCSGTRCFVCSAAPCVLVGACSISPSPLLFGSFGAGISSMFSPP

SEQ ID NO: 333050 - protein, 126 aa, Zea mays
  unsure (1)..(126): unsure at all Xaa locations
  Clone ID: MRT4577_66857C.1.pep
QRKQKNGRKSLSCKEKPQRASRATDQEPAGSKVTSKDKMXVDSGNEKGGVVGLVPPAPDNXGGNEXVSVQEISEAQPCALKRVFLSLQEVLYSTAPGDFLDVVVAQQVRIEYFVFGKFLVHYKIAS

SEQ ID NO: 333051 - protein, 112 aa, Zea mays
  Clone ID: MRT4577_66858C.1.pep
MAASLAEGGDPIGDRERVLTLLRGLSGKFRHMVSILKMHRPFPTFAEARTHLLLEELEIDARPSTPPAPAALVAAAPRPAAPGAPAARPNAPNGGQRNGRMLWTPLDPGGSL

SEQ ID NO: 333052 - protein, 90 aa, Zea mays
  Clone ID: MRT4577_66859C.1.pep
SLNEPICASPSVRSIRCSLDDVAQLRHTASTRPEPQLPPRRAIARLRVALDTGQLPIEVFESLLETMVTLTPAVLHQRFACIALLETVFD

SEQ ID NO: 333053 - protein, 87 aa, Zea mays
  Clone ID: MRT4577_6685C.1.pep
SLLALGLGSGCGGGCGALFNASTAAGEGLHNKSAGCGGGGCGSGCGGGGGCGSGMAIEGFKANHAKSGGCGSGCGGGCGTLFSSSAA

SEQ ID NO: 333054 - protein, 62 aa, Zea mays
  Clone ID: MRT4577_66860C.1.pep
LNIFWNKAYKISGFLLQVNTLVKLQTLTMPSQATRYRTHSSRAARDGPPNASASAALAGRVG

SEQ ID NO: 333055 - protein, 192 aa, Zea mays
  unsure (1)..(192): unsure at all Xaa locations
  Clone ID: MRT4577_66861C.1.pep
GIMPGLGASNLKITNILLDQNLVAKIGSYNIPILAETAKSEGGGGGGGSKYPSDSRVPPNGDKIDIYDFGVILLEVVTGRPITSIHEVEVMKEQLQSALTSESXGGRRALVDQAVSRACSDESARTVMEICLRCLAKEAEQRPSVEDVLWNLQFAAQVQDDWRGDSRSSASEESPLSPSQIPPRRDRETSAW

SEQ ID NO: 333056 - protein, 103 aa, Zea mays
  Clone ID: MRT4577_66862C.1.pep
GRRLLFEREVLARCAVNAIACEGAGRAHHTRSYKQWQARSRRAGLRQLPLDGDVVRTLRDKVSREYHEGFVITEDQQWLLQGWKGRVLYAISTWTADDGLAGN

SEQ ID NO: 333057 - protein, 52 aa, Zea mays
  unsure (1)..(52): unsure at all Xaa locations
  Clone ID: MRT4577_66863C.1.pep
HLKTYIYFSSNQYLFLTNSXNSPSIAHINILNHLINNQNYYFIHLLQNTCIP

SEQ ID NO: 333058 - protein, 139 aa, Zea mays
  Clone ID: MRT4577_66864C.1.pep
MASTNMASATSRFMLAAGVPTASSGSGRVSFASAPNRLGRRLVVRADEESPAEPAPTAEGEGAVATKPKAEKPPPIGPKRGAKVKILRRESYWYNGIGNVVTVDQDPNTRYPVVVRFNKVNYAGVSTNNYALDEILEVK

SEQ ID NO: 333059 - protein, 79 aa, Zea mays
  unsure (1)..(79): unsure at all Xaa locations
  Clone ID: MRT4577_66865C.1.pep
SFTRXXTRXATRASNACVHAFCHAFVXXKPRTQPGPTLVVVGARARDYTTGGXTPMAGPSEDALGRALAGRKAAVDPQA

SEQ ID NO: 333060 - protein, 53 aa, Zea mays
  Clone ID: MRT4577_66866C.1.pep
KLNPFFPNMSPPMSFSFCMGSYLCPSCVYPPQAFYFSFKLLPPFPSWPQLSDK

SEQ ID NO: 333061 - protein, 91 aa, Zea mays
  Clone ID: MRT4577_66867C.1.pep
VLNDFMGDKVKNGIRGDQIIYGIRGHTRTKQQGWTPTMLSKKADPKPGGGGSQTNTSVFLCMPNPRSHSYCWPPRPPALLGDNHHHGLQGK

SEQ ID NO: 333062 - protein, 62 aa, Zea mays
  Clone ID: MRT4577_66868C.1.pep
YGERRRIRSPVLMPFACLSICFSAIGGVSSVLELCALCFQDRWVPLVVFPCMSVFWCHCPSP

SEQ ID NO: 333063 - protein, 99 aa, Zea mays
  Clone ID: MRT4577_66869C.1.pep
CHAVSGVDPRQRSIQIISMKADIVIQSKKATTSQGSHHCLTIFFQAKVLHFLIPNTKQCIPVTNWSGRPNIPGSTQIDPPQPKSKRLTTSFRMRGRTRG

SEQ ID NO: 333064 - protein, 119 aa, Zea mays
  unsure (1)..(119): unsure at all Xaa locations
  Clone ID: MRT4577_6686C.1.pep
MYPSGGPASTPIQLISTHAGSLSINLHTSAPIGIGGGSXNPTHNLQTIYLVWRYCQTKPVYTYLLIAHQTMENKIYNLHVTKEGLSSRVVDRHXVSRTISKEXILHLFQFCENELMEHN

SEQ ID NO: 333065 - protein, 121 aa, Zea mays
  Clone ID: MRT4577_66870C.1.pep
MAAYMISSSALAVAPQGLSTLGRRASFCNVVCSKKNIKTDKPYGIGGGLTVDVDANGRKGKGKGVYQFVDRYSPIYNEDDWSPTGDVYVGGTTGLLIWAVTLGGILGGGALLVYNTSALCG

SEQ ID NO: 333066 - protein, 54 aa, Zea mays
  Clone ID: MRT4577_66871C.1.pep
PLWKSGLHKPCPIKITGVTGGAPTPRFLRRGVPGVNCGPPIRDGFRGAPWVLPG

SEQ ID NO: 333067 - protein, 155 aa, Zea mays
  Clone ID: MRT4577_66872C.1.pep
MQASTRDSVRESNTHAASYRAAEAEGAMACSMISSTALAEEPHGLPPLDRRASSFADCCCKNNIKTDKPYRIEGGLTVDVYANGRKGKGKGVYQFVDKYGANVDGYRPIYNEDDWSPTGDVYFGGTTALLIWAVTLADILGDDALLVYNTRALSG

SEQ ID NO: 333068 - protein, 130 aa, Zea mays
  unsure (1)..(130): unsure at all Xaa locations
  Clone ID: MRT4577_66873C.1.pep
MVASMISSTALAVEPQALPPLGRRASSFAVVCSKKKIKTDKPYEIGGGLTVDVHAXGRKDKGKGAYQFVDKYGANVDGYSPIYNEDDWSPTGXDLYVRVTTGLLIWADTLAGILGGDGLLVYNXTSALSG

SEQ ID NO: 333069 - protein, 48 aa, Zea mays
  Clone ID: MRT4577_66874C.1.pep
LGGRLGFSAGHVSRIRRRSSEVVANIDSDIGKNWVWESPQRECVGIVK

SEQ ID NO: 333070 - protein, 355 aa, Zea mays
  Clone ID: MRT4577_66875C.1.pep
MSVLYMRNNMSNRATHWCYACRRPIRLRGQDIICPNCNDGFIQEISEMGGVLNTYGLIEPDFEERQARRFGMMDAISSLMRQRLSEIGRDSLFDIHGRQGTGTEYGRRSTAIPTLVFGGIPSPAVGSSDINVVIREGRRAGAARPNFSSLVVGPSLEALFEQLLLQNNRQGPPPAPQSAIDSMPVVKINRRHLDEDPQCAVCKDKFEVGAEAREMPCKHLYHTDCIIPWLVQHNSCPVCRHPLPSQRSGSSTSSARVPSAYYNETACPPAVARADFDPVPSAYYNETATDPPAVTRADFDPAPGNYGSESQESHDPFSFLWPFGPSSSYQYEENVDEPAVYDPNQIAYSAWHYDH

SEQ ID NO: 333071 - protein, 128 aa, Zea mays
  unsure (1)..(128): unsure at all Xaa locations
  Clone ID: MRT4577_66876C.1.pep
MAASMISSSALAVAPQVLPPLGRRASSFAVGCSKKKIKTDXPYGIGGGLTVDVDGNGRKVKGKDVYQFVDKYGANGDGYCPIYNEDDWTPTGDVYVXGTTVILIXADTLAGILSGGARLCYDNRALSG

SEQ ID NO: 333072 - protein, 44 aa, Zea mays
  Clone ID: MRT4577_66877C.1.pep
GHGRHDAFVLRSEAELDPLLLGVGRGALVAGHRELQVEEGGGVV

SEQ ID NO: 333073 - protein, 180 aa, Zea mays
  Clone ID: MRT4577_66878C.1.pep
MAASMISSSALAVASQVLPPLVRRACSFVVGCSKKKIETDKPYGIGGGLTVDVDANGRKGKGKGVYQFVYKYGAYVNRYSPIYNEDDWSPTGDVYLGGTTGLLIWAVTLAGILGGGALLFYNTSAPLRVRISNVCASCDSSCNIRVSVYNLRSMDAQPSSCNNNEGCSSLQKFDGIYIYP

SEQ ID NO: 333074 - protein, 98 aa, Zea mays
  Clone ID: MRT4577_66879C.1.pep
MRRRTTARRYPLGSLPFFASFPLPLVLRSADVGKNGAPTHPEAAGADVHVWNEWSSTWYTGLTEDHFDGSSTSVGRSVPYESAPVSRERSYIHAMDEW

SEQ ID NO: 333075 - protein, 497 aa, Zea mays
  unsure (1)..(497): unsure at all Xaa locations
  Clone ID: MRT4577_6687C.1.pep
MTKSLFTTPSVAFGLASFTATVSEIRLGTSRSCISYSKNTPDPKSSTNAKSSLRGNPKTLCSPAEVQIVPPPPPPPHPQQQIXPPHHPQAPKQEDFVDQPYRGVIHMITGGSSVDFDMKRQKRDHYHNINHVAVTGPVVQTKWSHVPLTFDARDVDLRSAPHIDAMVTNCSVAGWDLHKVLVNNGSQADIIFLHAFDRMGISHSLLKPSDNPYGFGGKGTFPVGKIELPLSFGVAPNARSEQVTFNIVDMVYPYNAIMGRGSINKFEAAIHGLYLCMKIPGPQGTIIVYGNQQAARNIERDFVPGQRNVHCLMAQCEVPESASPTAKEHDKAQLQSNDGTKTVPLDQATPKQTVTISEDLTSHDEERLLCCLSKNKGVFAWSTLDLVGVSRSIIEHSLGIDPSVRPKKQRLRKMSDEKTEAAKAEVHRLLEAKFIEPVANPTWLANVVMVQKKSDKWRMCIDFTSLNKACPKDNFPLPRIDKIVDSAXAGCEAMSLL

SEQ ID NO: 333076 - protein, 44 aa, Zea mays
  Clone ID: MRT4577_66880C.1.pep
KTFPNKKKKKKKKKKKKKKKKKKKKKKKKKKKKKKKKKKKKNSG

SEQ ID NO: 333077 - protein, 52 aa, Zea mays
  Clone ID: MRT4577_66881C.1.pep
KTCNVGTEELGILNRAATVRGGSWYYVSSVVYILPSSYVFDLSVLIFRCMII

SEQ ID NO: 333078 - protein, 75 aa, Zea mays
  Clone ID: MRT4577_66882C.1.pep
HTYLTRCREARRGRRRCIPSVVSATTSSKDGAIQGTPPATEKNFVSPTVSEFDAEITIRKNIYIHSSSVEEHTVS

SEQ ID NO: 333079 - protein, 78 aa, Zea mays
  unsure (1)..(78): unsure at all Xaa locations
  Clone ID: MRT4577_66883C.1.pep
RLMGWMGTSCAPXAINGNSLTXGLLSPASGLELAHFPTTPPVTSQFWLWLVTWHLGLFIVLTFGQIGFKGRTEDYFEK

SEQ ID NO: 333080 - protein, 101 aa, Zea mays
  Clone ID: MRT4577_66884C.1.pep
RVPASSRACGSSGSHRASSSPGACQTRSVLSPPQLSAYASPPLSALGPLLLAVLLCSAPCTCGASCFALVRLIEETSRRPCLTAVSGPGSTCSLVHMPPTP

SEQ ID NO: 333081 - protein, 108 aa, Zea mays
  unsure (1)..(108): unsure at all Xaa locations
  Clone ID: MRT4577_66885C.1.pep
LFSTNHKDIGTLYLLFGAXAGVLGTALSLLIRAELGQPGNLLGNDHIYNVIVTAHAFVIIFFIVIPTIIGGFGNXLVPLIIGAPXDMAFPPAQHRSLSFSICRLRRGQ

SEQ ID NO: 333082 - protein, 145 aa, Zea mays
  unsure (1)..(145): unsure at all Xaa locations
  Clone ID: MRT4577_66886C.1.pep
FPRLCCPLALGPCGVGFPTPFPLFXFGAPKPGQSWPLFLCVGVGFWGGLVLGFFSGGXPSNASTPVXNVVDSSRTGAPPNVLFGLALGFQPALFPFFAFGVGFFPGFPPAPLFGVVGAALGMLGPLPPAPAFLALGPPRVYGGGF

SEQ ID NO: 333083 - protein, 141 aa, Zea mays
  Clone ID: MRT4577_66887C.1.pep
MAASMISSSALAVAPQGLPPLGRRASSFAVVCSKKKIKTDKPYGIGGGLTVDVDANGRKGKGKGVYQFVDKYGANVDGYSPIYNEDDWTPTGDVYVGGTTGLLIWDVTLAAILGVVALLISTPTTSPANDIHRMRFLRFAM

SEQ ID NO: 333084 - protein, 40 aa, Zea mays
  Clone ID: MRT4577_66888C.1.pep
LSLQLILIHNRVDAFLITGRTTMGGDNKKPPPIQLVCALE

SEQ ID NO: 333085 - protein, 76 aa, Zea mays
  Clone ID: MRT4577_66889C.1.pep
TNFGPTWLVKLLNSLRIPTCFHVLGGTGFAKVSAVTYRGVYFKKKPGSQKYLPVNFCALGLMQRGSLYRGLGFRKE

SEQ ID NO: 333086 - protein, 76 aa, Zea mays
  unsure (1)..(76): unsure at all Xaa locations
  Clone ID: MRT4577_6688C.1.pep
SHLRVASARRPTRRSPPRTSGCXGPHAPPPPDASTGPSPTSTPPPHSPPRVPSPRARPRRPAGRPRAVPGPASASP

SEQ ID NO: 333087 - protein, 130 aa, Zea mays
  unsure (1)..(130): unsure at all Xaa locations
  Clone ID: MRT4577_66890C.1.pep
MAASMISSSALAVAPQGLPPLGRRASSFAVVCSKKKIKTDKPYGIXGGPAPVDVSXATGRKGKGKVVYQLAEKDGANVDGYSPIYNEDDWTPTGDVYVDGTTGLLSCPVTLDXILGRXVLLVYNTNRVSC

SEQ ID NO: 333088 - protein, 128 aa, Zea mays
  Clone ID: MRT4577_66891C.1.pep
MAASMISSSALAVAPQGLPPLGRRASSFAVVCSKKKIKTDKPYGIGGGLTVDVDANGRKGKGKGVYQFVDKYGANVDGYSPIYNEDDWSPTGDVYVGGTTGLLIWAGTLAGILGGGGLLVYNNNGLFG

SEQ ID NO: 333089 - protein, 60 aa, Zea mays
  Clone ID: MRT4577_66892C.1.pep
RTNSIRHFAYSLDSHIHSSVYLSLSWGLYPESAGLYFYTYILSLAIRISILSEYSTEFRT

SEQ ID NO: 333090 - protein, 78 aa, Zea mays
  unsure (1)..(78): unsure at all Xaa locations
  Clone ID: MRT4577_66893C.1.pep
AENSGRAGKSSGXGAGKGAVSAEQVIAGFNRLRQEQRGLASKAAELEMELHEHSLVIDTLKEVDETRKCYRMVGGVLV

SEQ ID NO: 333091 - protein, 88 aa, Zea mays
  unsure (1)..(88): unsure at all Xaa locations
  Clone ID: MRT4577_66894C.1.pep
VVCCVVLYLLLSINGKIRRSPKKKKKKKKKKKXKKKIKKKKKKKKKKKDKRKNKKKDKKKKGGCPKGSKLNTRSIQIKTASKETPKSK

SEQ ID NO: 333092 - protein, 67 aa, Zea mays
  Clone ID: MRT4577_66895C.1.pep
HEGRMLKQPSRAHEQQNREKQPHNTTQHTARRQKRPRGQGRTTGHDAAIRHHHHLGLRACRGTQLTD

SEQ ID NO: 333093 - protein, 134 aa, Zea mays
  unsure (1)..(134): unsure at all Xaa locations
  Clone ID: MRT4577_66896C.1.pep
MQENQAMEKKGGDFRKGQTGPPGPAGGARPRGEGANTGGPGPGTRGGHPTGRTGGKRGSRGEPGNPPHRHPKNKPQGRGGKPGAPKEGNNPTDPGRAQSPXPPGKPGNPPPPKKGTTRRGRGDAYWATYPLPPH

SEQ ID NO: 333094 - protein, 95 aa, Zea mays
  Clone ID: MRT4577_66897C.1.pep
ARRGLYLAGLPLRTGSIAGEDRLVVGKRPTSYYSRRDWRIGFRYRSYRLSSIVTSLGRRPGRSRGVYVPSGDFTFQLSSRFGSMVGRPGGRSSVA

SEQ ID NO: 333095 - protein, 81 aa, Zea mays
  Clone ID: MRT4577_66898C.1.pep
MMQYKWEQELINEVLAVESRRPVFGVAVDFADSDGCTEANACSSPPCGCCYDEELVRDSRSAVYGRYQITEDRTEGLDECD

SEQ ID NO: 333096 - protein, 80 aa, Zea mays
  Clone ID: MRT4577_66899C.1.pep
KIIQHNTLTSENHTIDKIILPSYNQLQYMRFLNSQYTTLDPYKYLKIYTLLPSTQHNIHLELLRLIHNLHPSDQPSYHHN

SEQ ID NO: 333097 - protein, 403 aa, Zea mays
  Clone ID: MRT4577_6689C.1.pep
MATALGGEPNPTADAMEVDPPRASADEKHVATIIAGGSDAVTGHIISTTIGGKNGEPKRTISYMAERVVGTGSFGVVFQAKCIETGETVAIKKVLQDKRYKNRELQIMRSIDHCNVISLKHCFFSTTSRDELFLNLVMEFVPESLYRVLKHYKDMKQRMPLIYVKLYMYQIFRGLAYIHTVPGICHRDIKPQNILVDPLSHQVKVCDFGSAKILIKGEANISYICSRYYRAPELIFGATEYTTSIDIWSAGCVLAELLLSQPLFPGESAVDQLVEIIKVLGTPTREEIRCMNPNYTEFKFPQIKACPWHKIFHKRMPPEAIDLVSRLLQYSPNLRCSALEACAHSFFDELRESHARLPNGRPFPPLFNFKQELANAPPELVSRLLPEHARRHSGFGSLFGSGP

SEQ ID NO: 333098 - protein, 74 aa, Zea mays
  unsure (1)..(74): unsure at all Xaa locations
  Clone ID: MRT4577_668C.1.pep
SGSSSSIHLRAVLFSKKYPDLEETSTVAQPXVVLGVAPXEKKAAPEFVEAAAESGEAAHGCSCGSGCKCDPCNC

SEQ ID NO: 333099 - protein, 90 aa, Zea mays
  unsure (1)..(90): unsure at all Xaa locations
  Clone ID: MRT4577_66900C.1.pep
SXDSFLSLYRFSERISFHESTGAMAEAGFPLRLPRLHPRQEPVDLAEDAEEHQAGNQAVGRHADAAALRGDPADEVHRAHASADAWADAW

SEQ ID NO: 333100 - protein, 79 aa, Zea mays
  Clone ID: MRT4577_66901C.1.pep
GKQPILIYRQEPWYMGLYWHSIQQLILIRGGVGGGEKAFFFPHAYWPKLKTHLLLMATQRFSGGFFMGGGGVSLGTGFL

SEQ ID NO: 333101 - protein, 39 aa, Zea mays
  Clone ID: MRT4577_66902C.1.pep
FTISLCLFGDSLCAHGGVSTYMLVDQIGLADNHILIGPG

SEQ ID NO: 333102 - protein, 146 aa, Zea mays
  Clone ID: MRT4577_66903C.1.pep
MNVDKLKKMAGAVRTGGKGSVRRKKKAVHKTTTTDDKRLQSTLKRVGVNTIPGIEEVNIFKVDVVIQFQNPKVQASIAANTWVVSGTPQTKKLQDLLPTIINQLGPDNLDNLRRLAEQFQKQMPGGEAGGASIGAAQDDDDDVPEL

SEQ ID NO: 333103 - protein, 44 aa, Zea mays
  Clone ID: MRT4577_66904C.1.pep
YHNFSIDSKQNLSFVQSAYYFTIYNFFYPTLNQFGARTFICSTH

SEQ ID NO: 333104 - protein, 128 aa, Zea mays
  Clone ID: MRT4577_66905C.1.pep
MAASMISSSALAVAPQGLPPLGRRASSFAVVCSKKKIKTDKPYGIGGGLTVDVDANGRKGKGKGVYQFVDKYGANVDGYSPIYNEDDWSPTGDVYVGGTTGLLIWAVTLAGILGGGALLVYNTSALSG

SEQ ID NO: 333105 - protein, 240 aa, Zea mays
  Clone ID: MRT4577_66906C.1.pep
RQSSSISRSSLSLSSLTSRRDSLLARAQLGASSPRSSAAPAACSSAARSTSSPWPSAPSSPRVQPAPDASPFLTAPTLGARRHGLPRCSPQPRLPSGPCCRAAMVPRSWRARRRLGISSSSPLPSCSVTCARVDLSHRGRLPSACSIHGRLQLARLSLLPCRDTLARSRLTGSSCCSPRPLPWMLPAEALVSHGRRRPSAVLPMPRPAREVPACRRSASHAGENLCSRYVVSSYSVFSSC

SEQ ID NO: 333106 - protein, 88 aa, Zea mays
  Clone ID: MRT4577_66907C.1.pep
CRDRTVLSAQAIFQAWSHSEGHPHQHLHFTRQSSPSNGGFPYCVNATYLLVNTNNLNIRSRLYNCIVPWIISYMLCQSKQACFRFNVY

SEQ ID NO: 333107 - protein, 92 aa, Zea mays
  Clone ID: MRT4577_66908C.1.pep
MANRAEGAAAGDREALQNLFLDVARVLVVFGALGATSAGEPVLAFLSLLLWLLGVWLLALVLVLAAGRFPHLALAATAMAIAILKNLLALWN

SEQ ID NO: 333108 - protein, 112 aa, Zea mays
  Clone ID: MRT4577_66909C.1.pep
GPSGKKRAWGGLKGGPKNWGRDPSGLMGIVDGGAGIVVLGFFKGWVHGKMSHLGWWSRFPRGPRAGFGTRPFGGPSMGVSSKIQGFGLRQISRGFCDPFLRGFFLGVRGPPL

SEQ ID NO: 333109 - protein, 142 aa, Zea mays
  unsure (1)..(142): unsure at all Xaa locations
  Clone ID: MRT4577_6690C.1.pep
PSPAGIRVQSPAGKLTFTYCLEACKVDINPAKGGPYLNFKAKEQDGNKVFFSIKRSTLLSILMNPYCDRHSVHINAFAFLLDGRTLRXEHTPDHLEMQDGYXIDAVLHHTGGRVPSTTLEVSFCSSYCVVVNKQDKVFLRNL

SEQ ID NO: 333110 - protein, 74 aa, Zea mays
  Clone ID: MRT4577_66910C.1.pep
KKNFWNGPFKAPQKNQFLGKSTRPGLVKRAPTPLSGGHGGKKFRGKAKKGCQEKMGGKWHHTDGKLIKPPQVPP

SEQ ID NO: 333111 - protein, 427 aa, Zea mays
  Clone ID: MRT4577_66911C.1.pep
MDIEADGRFGNKRVHNRLGPGSGGAPPSTNGKVCNYWRAGRCNRFPCPFLHSELPEAAPPKRPTGPGGNVWRNPNTGGRGGGHHNRWGKGPGGGSGIASHKPPERPCKYFLAGTECSYGERCRYPHSYCISDSIAMLTLLKGHEQGVTGIALPAGSDKLYSGSKDGTVRMWDCQTGQCAGVITMGREVGCMIIEGPWLFVGIPDAVKVWNMQTAAEMSLTGPTGQVYALAVASELLFAATQAGRILAWRFSAATNCFEPAASLDGHKLAVVSLIVGGMRLYSASMDKTIRVWDLATLQCIQTLSDHTDVVMSVLCWDQFLLSCSLDQTIKVWAATESGNLEVTYTHKEDQGALALSGMPDAQSKPVLLCSLNDNTVRLYDLPSFSDRGRLFSKKEIRAIQMGPGGLFFTGDGTGELKVWQWVDLAQT

SEQ ID NO: 333112 - protein, 39 aa, Zea mays
  Clone ID: MRT4577_66912C.1.pep
SSSSCICVSILPVRCMQSPWLACFTALKFHIRPLYKPKK

SEQ ID NO: 333113 - protein, 224 aa, Zea mays
  Clone ID: MRT4577_66913C.1.pep
HFLHPYPTDGDKQMLAKQTGLTRNQVSNWFINARVRLWKPMVEEIHNLEMRQVHKHPVLDKGQHVLHHQTQHSFESSGKPSDPSDSQLGQSSSITRNHNIPASQGFADELSEMSHSIQQGQVTFAYNGMSAPHHSLASSQHHQQAGPMSGIGGAGNGGVSLTLGLHQNNRVCIAEPLPASVPPNLAHRFGLEEVSDPYMMGSFGNQDRHFGKEIGGHLVHDFVG

SEQ ID NO: 333114 - protein, 86 aa, Zea mays
  Clone ID: MRT4577_66914C.1.pep
SVLNRLSVYTKDQRKCPKTKESLKLKPDKGQERRSRATKEVPTPVPAADKSSASRPPGPKFGASVSLAITWKWAPQVAGHAAGDQM

SEQ ID NO: 333115 - protein, 53 aa, Zea mays
  Clone ID: MRT4577_66915C.1.pep
LTQGLPSRSSSLGSPLWVPPLNRSNKSLSLLHRENRYTTVQPLATKGTRYSRH

SEQ ID NO: 333116 - protein, 121 aa, Zea mays
  Clone ID: MRT4577_66916C.1.pep
LGAFFPGNTQNMFGQNNPQFILPHVSLGKGLFGAPGFPPRGNAFLPAPGVQPADISKGRAVLRTTPPPPPRVSPAVGPVSGLDYPPPGFLANNTLPGGGLEGFTGLPPFSPWIRFFFPPLV

SEQ ID NO: 333117 - protein, 38 aa, Zea mays
  Clone ID: MRT4577_66917C.1.pep
WHRELAMGYHWQVVVTTPEIASVLAQQISLCTFRGNPI

SEQ ID NO: 333118 - protein, 106 aa, Zea mays
  Clone ID: MRT4577_66918C.1.pep
MHQLYSVHIDAKGEDLRQRVEEVLGGGRQVYVAGVGVNRALLESLKEKCIVHYLDEFEDLWGTDSKWFLEMKRLNGGVPVEFDGYMRDVVDREVFLKGKKKVEVLR

SEQ ID NO: 333119 - protein, 131 aa, Zea mays
  Clone ID: MRT4577_66919C.1.pep
MIISKKNRNEICKYLFQEGVLYAKKDYNLAKHPQIDVPNLQVIKLMQSFKSKEYVRETFSWQHYYWYLTNDGIEFLRNFLNLPSEIVPATLKKSARPPGRPLGSGPPGDRPRGPPRFEGDRPRYGDRDGYR

SEQ ID NO: 333120 - protein, 128 aa, Zea mays
  unsure (1)..(128): unsure at all Xaa locations
  Clone ID: MRT4577_6691C.1.pep
MGRVRAKTAKKTFTHAIEKYYSRMTALFHTNKKVLEEVXILPWKRLRNKVAGFSSHLMRRIQLGPFRGILLTLLEEERELRMDFYPEKITLDVLEIRVDKETMEMLADLSMADLPGVERHACVSNARG

SEQ ID NO: 333121 - protein, 66 aa, Zea mays
  Clone ID: MRT4577_66920C.1.pep
ISYDITPVNKKLNNVASVNTVTSSPAQSVNTYTRDSIVINSCLLSIEQFTYTCFLFFGRDNVCNHE

SEQ ID NO: 333122 - protein, 92 aa, Zea mays
  Clone ID: MRT4577_66921C.1.pep
PAGIRPPLLKIFLRARSYPQSPLKPPPWIPTNPAGVPLGVLLPGRELARFPGVQASSPPRSSAACSPLTSHGALLSPPQPRPFLPVVSHGAP

SEQ ID NO: 333123 - protein, 79 aa, Zea mays
  Clone ID: MRT4577_66922C.1.pep
VVPTQDLDIEVAQGNADVSVLHDIHPVARPVSAKQFLHPVANDTMESTLTSITRTFDSVVVGGPCCHCESEGTSSPTGG

SEQ ID NO: 333124 - protein, 96 aa, Zea mays
  Clone ID: MRT4577_66923C.1.pep
MERRSSSGAGSCLGLLAVAVVSTSVILVSYRLHRRLEADLRVMILGEGDGAADQGRRRTKKNKKVRFAADVAEPSSSREEYRRRRASTAAAVTRAR

SEQ ID NO: 333125 - protein, 62 aa, Zea mays
  Clone ID: MRT4577_66924C.1.pep
FVYTCQRMFEYWFYAHYMIGSITNIFYIDLTDSETLASLVRYYAHLTDIISERSAIFFSEAD

SEQ ID NO: 333126 - protein, 49 aa, Zea mays
  Clone ID: MRT4577_66925C.1.pep
SMNVLGRLSCTLRAPHVYPSSLVRMEQAFSPFPVVYWPYSFVPYSVAQS

SEQ ID NO: 333127 - protein, 39 aa, Zea mays
  Clone ID: MRT4577_66926C.1.pep
SVDMSDDVLAIYSQSLRLLQLKARDSFPVECPSAREAAD

SEQ ID NO: 333128 - protein, 103 aa, Zea mays
  Clone ID: MRT4577_66927C.1.pep
KGSSCPTRTASREAAPCRSPTSSKKGVGPGPATPYALPRRKARRGNRRAAATTASKFYLSADRLSYHGDGQRSLAASDLSLLPGEWILTAPPHPPVINFFSHA

SEQ ID NO: 333129 - protein, 763 aa, Zea mays
  Clone ID: MRT4577_66928C.1.pep
MADKVTIVPPRDPWPFSTVAVEDLEALVADGLLRPLSGGLQLEWMAPASEADPTPPPGYVVSFIPFHERGFGVPASRFMRALLHYYGVELHNFNPNSIAQAAIFVAVCEGFLGIDPHWDLWTHLFSVEFFTATTDAKKEKLQPILQALQKLRDGGLTAAGVIAAIHHWRVLPLAERRLRLTEMKPGVNLEGSQMSSVPLSDDDLHRRVASTVGRLDVGALTQLPMRPERGCMSLSRLSVRLQELGFHKPSLPPVLEDAADRAVCRLSAEKKKEKKDAEKARARERMRAREALERRRRRQARDGLPLEPSPETPDDDDDDDDDDEDDDMAARLGLSPDLRLGQGSSSQPPSGLAPSISGAGTSGSWFEEQGQVEGVLDPLAEVVEVIPGSQADPPVPQEPLPVPAAQEADPQVVVSAPGRTVPSAPRAPEAGMVPKPAAGQTLVVPARTEVRGASPQARLAVVRSGKRRHGSTSLASRKVLKTAPASVAGAAPGLAGRLASTQDAPKQGAQAAQVAVGRASEADPSVEAAVVPRETTGVAAALSPPDVLPTPAPASAEAVAVLAVEPPVAADAEMAEAPLLKAGDRKPAPLAEEVPDAPTTGGADALEEGGAEPRPALGSGDLVLARRDPNEQRGQALRFWTRGASKPLFVLDDEREEQSRDELRECAKATMGSLRSTMEVLSRDVPRILQDLTDLSTAKSSLIHREADVWGSLRFLRAALAEATERLTQRSAEVADLRLLRDELGAEAAAVRAEAQRRQLELG

SEQ ID NO: 333130 - protein, 65 aa, Zea mays
  Clone ID: MRT4577_66929C.1.pep
RVFKGFWGPQKVTNIAHNERTPLSEHLITCFYTIRWSMKTKNPTQTTNLTQNLLIHLTTVTFQGQ

SEQ ID NO: 333131 - protein, 316 aa, Zea mays
  Clone ID: MRT4577_6692C.1.pep
MSMGHCSEQRTGFEVTKDWNGADQFAIRSPRGASVRVCLHGGQVVSWRNHRGEELLFSSSKAIFKPPRATRGGIPICFPQFGNCGTLEQHGFARNKIWTIDDEAPPLNYGDNNSNKASVDLLLKPSEDDLKCWPHCFELRLRVSLSMDGDLSLISRVRNVNGKPFSFAFAYHTYLSVSDISEVRIEGLETLDYLDNLSQRERFTEQGDAITFESEVDRVYVGCPGVIAVLDHGKKRTFIVRKEGLPDIVVWNPWEKKSKTMADFGDDEYKQMLCVDAAAVERAITLKPGEEWTGKLELSAVASTNCSDHLDRPGRL

SEQ ID NO: 333132 - protein, 77 aa, Zea mays
  Clone ID: MRT4577_66930C.1.pep
QKGLDHPKFRYFTANTTRADIDFFFIGLQRAKIGAQLQFSLRLTLAAPDTMGDLPKCIYLEGSIPITGPPGEQVLFQ

SEQ ID NO: 333133 - protein, 961 aa, Zea mays
  unsure (1)..(961): unsure at all Xaa locations
  Clone ID: MRT4577_66931C.1.pep
MANKVTVVPLCDPWPFSTVAVEDLEALVTDGLLRPLSGGPQPEWMAPGSEADPTPPPGYVVSFIPFHERGFGVPASRFMRALLHYYGVELHNFNPNSIVQAAISAAVCEGFLGIDPHWDLWTHLFSAEFFXVDGREEGPYGGVGRWLHPPAEVGAGPPLHPCHPRVLAQRVAXRWFYLRNDDGRLSSFSQRVALHKLRDGGLTAAGVGAAIHRRRVLPLAERRLRLAEMKPGVDLEGSRLYSTSLSADDLLKRVAGTIGRLDAGALSQPAMRPDRGYVSLGLRIFKPARPPVPEDAADRAVRRLATEKEKEKKDTEKARARERMRAREALEKRRRRQARDGLPLESSPETPDDDDDDDDDDDDDDEDDDMAAQLGLSPDPRLGQGSPSQPPSGLAPSVPGAGTXGPGPRSRGRXEGVLDPLAKIIEVTPGSQADSPVSQEQAPVSAVQEVGPPAVVTTLGRAAPSTPRAPEAEAVPKPAVRQPSAAPAETGARGASSQARLALPQSGLAPTKALKTKPASAAGAAACHAGWLASAQGALQRGAQAARVAMGQASPADPPIGAAIMPGETADAAAVLSPPDMLPAPASTPAGAVADSPAEPPVTVNVGMVEAPPPMVIPDLPVLGHEERAAVVAESRATSDSEPLLSLNDELEERSRDNFREYTEAAMRSLRSTMEILSRDVPRVFQELADVSTAKSLFIRRESDVWDSLRSQRAALTEANERLAQRSAEVADLRLLCDELKSEAAVARIEAASARAEASLAREQVASQAEEMQQRQLELGQVISERDQSRSQATEAVSRAEALRGQLAEATERLAEASARAGTLAESPAKAVGTAPSAQAVAAQQRARAEGFEMALDEFVKNCKALAQAVEQKEADRAAMSKAISAFCQALGLDGVPSGTSPQSHLWALGGHVRSRLCGALHHDIRRAFAVLASHYDVDLERVSEGXYCLPDKEEAALAEV

SEQ ID NO: 333134 - protein, 87 aa, Zea mays
  Clone ID: MRT4577_66932C.1.pep
AAQAIHLHLRTLLRLTQLMILSIGSDEDRHEESSWRLAAMNLQQEHLLFSVSRPASRPSAATTTGFQDHGLGGFQVIATDGGAGPAA

SEQ ID NO: 333135 - protein, 88 aa, Zea mays
  Clone ID: MRT4577_66933C.1.pep
LLSVLLACSVSLFLSASLSLSQRRLGTVAASLRLVLRYSLPGTSTRGNGMDLVSAEAAPAEVKISDGEVNLFQEKESIATAKEREEAA

SEQ ID NO: 333136 - protein, 87 aa, Zea mays
  Clone ID: MRT4577_66934C.1.pep
KPGFLSSKKFRPPLKPPVNDLVFQKAPFPFSKLAFFLLKGPFLQIEFSPPLGFVEINYPPMFKPVCFFFSPPLLNSGPWFKFPLFFL

SEQ ID NO: 333137 - protein, 92 aa, Zea mays
  unsure (1)..(92): unsure at all Xaa locations
  Clone ID: MRT4577_66935C.1.pep
VFFLPLGVSRFGPCPVVLWLVAFFFFGLGGCPVWALSGFPCLGPWGCPVXPGPPGPVLVVAGCCSCLAWALCPVGGVLCFLVVPGAXPLFPR

SEQ ID NO: 333138 - protein, 44 aa, Zea mays
  Clone ID: MRT4577_66936C.1.pep
VAIHVYLYVQGSSTHVAAVSPWCGVVCTIGIMCVLGAAGYVRFG

SEQ ID NO: 333139 - protein, 219 aa, Zea mays
  Clone ID: MRT4577_66937C.1.pep
MAGKSRPPKRILESYTIKGSDRVIKPGDCVLMRASDASKPPYVARVEAIEAAGSRGTNVRVRVRWYYRPEESIGGRRPFHGSKEVFLSDHYDVQSADTIEGKCNVHSFRSYTKLDSVNAEDFFCRFEYKSATGSFVPDRIAVFCKCEMPYNPDDLMIQCEECSDWFHPACIGMTIKEAKKLEHFFCQTCTAENGKMVENSHEATAQSEEKPVESKRRRR

SEQ ID NO: 333140 - protein, 175 aa, Zea mays
  unsure (1)..(175): unsure at all Xaa locations
  Clone ID: MRT4577_66938C.1.pep
GIGSITSRETPFPLNSNPVGSGYRRGPELYTPLLPPPPWVKTRGDGSSRVSSTTHRAEPEGWLDQAYKKSHFXNEWKKPLAGSSHAKGIVLEKIGIEAKQPNSAIPKRARVQLAKNGKKIAAYEPNDGXLNYIHHNDEVLIPGYYRKGHVEGXIPGVRSKVGKASDESLLALFKE

SEQ ID NO: 333141 - protein, 60 aa, Zea mays
  Clone ID: MRT4577_66939C.1.pep
RPVRDQKFEMPKRGMKISAVFQAMEQAKSSLYIVAWGLADTTLEDVFVRVAKQTDMSTVT

SEQ ID NO: 333142 - protein, 41 aa, Zea mays
  Clone ID: MRT4577_6693C.1.pep
LFHVSDLMRTILTYWAVNQYRQAKGRNYTYLALSHSMKPSY

SEQ ID NO: 333143 - protein, 634 aa, Zea mays
  Clone ID: MRT4577_66940C.1.pep
RIWNCRSEYFFVILSRLCSTRASIVADNKQSHESRIWIVELSEVHAATRGGHHSWKVILCEVIPDVQPAMDAMEYAECEATVKSYPPFIEAMKRRGVDDMDLVMVDAWCAGYYSEADAPSRRLGKPLIFCRTESDSPMENGYARPVEGIHVVVDMQNNAVIEFEDRKLVPLPPPDHLRNYTPGETRGGVDRSDVKPLIINQPEGPSFRINGYFVEWQKWNFRIGFTPKEGLVIYSVAYVDGSRGRRPIAHRLSFVEMVVPYGDPSEPHYRKNAFDAGEDGLGKNAHSLKKGCDCLGYIKYFDAHFTNFTGGVETIENCVCLHEEDHGILWKHQDWRTGLAEVRRSRRLTVSFICTVANYEYGFYWHFYQDGKIEAEVKLTGILSLGALMPGESRKYGTTIAPGLYAPVHQHFFVARMDMAVDCKPNEAHNQVVEVNVKVESAGTHNVHNNAFYAEEKLLKSELQAMRDCDPSSARHWIVRNTRTVNRTGQPTGYRLVPGSNCLPLALPEAKFLRRAGFLKHNLWVTQYKRGEMFPGGEFPNQNPRIHEGLPTWVKNDRPLEETDIVLWYVFGLTHIPRLEDWPVMPVEHIGFMLMPHGFFNCSPAVDVPPSSSDADVKEAESPKAIQNSLISKL

SEQ ID NO: 333144 - protein, 36 aa, Zea mays
  Clone ID: MRT4577_66941C.1.pep
PHRPGCSHSSSSVTLNLRIIVLSPFSQRYSVGKMLH

SEQ ID NO: 333145 - protein, 94 aa, Zea mays
  unsure (1)..(94): unsure at all Xaa locations
  Clone ID: MRT4577_66942C.1.pep
GVVRASADFYTREPAWPFVQLASVAYGSVFLGEFMQXDWDLFHSLHTVAEYLDLASAIRRSGGERRGRTGTRRAPCLGAEERSRRGGGQVMEPG

SEQ ID NO: 333146 - protein, 86 aa, Zea mays
  Clone ID: MRT4577_66943C.1.pep
VMMPVIPVACMATQLACGLFRLVRATAGRHMDSLYCQGLFVAVVRALMHVGPSRVFWPYLKSIAIERIAQSIKNKKTKGGRRLESS

SEQ ID NO: 333147 - protein, 145 aa, Zea mays
  Clone ID: MRT4577_66944C.1.pep
LAMAMEMIEKAGRGVLVYLRGHEGRGIGLGHKLRAYNLQDDGRDTVEASEELGLPVDSREYGIGAQILRDLGVRSMKLMTNNPAKYSGLKGYGLSIAGRVPLITPITSENRRYLETKRTKMGHVYGLANAQANQANGSQSTEENH

SEQ ID NO: 333148 - protein, 522 aa, Zea mays
  unsure (1)..(522): unsure at all Xaa locations
  Clone ID: MRT4577_66945C.1.pep
MCWTSSRMRTPESELRLESSIQRFASIAHEIEDFRXGKTFVLIVXEFCENEGDLIMAASLATPEAMALYXVRHGTGIDCXSMKEDDLKRLSLPLMVTTRVNEENLCTAFTVTVDAKEGTAIGESVTFRAKTCMTLASPDSRPEXDFNHPGHIFPLKYREGGVLKRAGHTEASVDLAMLAGLPPVAVLCEIVDDADGSMARLPKLRVFAERENLKIISIADLIRYRRKRDRLVERASVARLPSQWGNGHGYCYRSAIDGIEHLAMVKGDXLGDGQDILVRVHSECLTGDIFRSARCDCGDQLAMAIEMIEKAGRGVIVYLRGHEGRGIGLGHKLRAYNLQDDGRDTVEANEELGLPVDSREYGIGAQILRDLGVRSMKLMTNSPAKYSGLKGYGLSIAGRVPLVTPITSENRKYLETKRTKMGHVYGLXLMRRLTSQVVARAQKRSIEPKKVMHSSFWEFLKSSPSIFPYILFFLYFHIFFLSHRRPFCSSTVAVGFKMVNELNKSKFNNISNCSCNELYSLS

SEQ ID NO: 333149 - protein, 93 aa, Zea mays
  Clone ID: MRT4577_66946C.1.pep
ALRLFTCSIPPEKVRSTPICTVRLHGQSSWSPTVVRSAPQRICSLQPQESLRIPPECMDGWLVGDLLQPLTGVHFSRYVERNAAWTSTSSIFT

SEQ ID NO: 333150 - protein, 304 aa, Zea mays
  unsure (1)..(304): unsure at all Xaa locations
  Clone ID: MRT4577_66947C.1.pep
PFRPPTRPPTRPRTRGIFPLKYREGGVLKRAGHTEASVDLAMQAGLSVAGIGGKETGLIERASVARLPLKWGNVHAYCYSLLMALEDKRHGNVKSLLHALPLKWGFVTITIGTSPDLTINHMXMMGGDIGDGQDILVRVHSECLTGDIFGSARCDCGDQLAMAMEMIEKAGRGVLVYLRGHEGRGIGLGHKLRAYNLQDDGRDTVEANEELGLPVDSREYGIGAQILRDLGVRSMKLMTNNPAKYSGLKGYGLSIAGRVPLITPITSENRRYLETKRTKMGHVYGLANAQANLANGSQSTEENH

SEQ ID NO: 333151 - protein, 33 aa, Zea mays
  Clone ID: MRT4577_66948C.1.pep
SSKKYANQLRIWGNIFGPFFVSTALSSGKPGRH

SEQ ID NO: 333152 - protein, 177 aa, Zea mays
  unsure (1)..(177): unsure at all Xaa locations
  Clone ID: MRT4577_66949C.1.pep
MSTAGSGSLRPAVVEDTGRHWAPHGPVLTACVVAINVLMILLVFVFFWRYFSGKRGPSASSGGGGDGDDDDASSSASLPXLSMGMVVPPAXAARTTARSRXDDVASALPVYLYSSSAGGEGGKAPECAVCILELRDGDSARLLPRCGHRFHADCVGAWLRLHTTCPLCRASVVAPRA

SEQ ID NO: 333153 - protein, 69 aa, Zea mays
  Clone ID: MRT4577_6694C.1.pep
FSILCPLPLHAVCNATLVSLFYKLLSFVSLLYFHNDCSVSESQILTYGPSAFYHATYFFTLGYQFQIFF

SEQ ID NO: 333154 - protein, 286 aa, Zea mays
  Clone ID: MRT4577_66950C.1.pep
YTCYVGDPWDDEFQLVNSIALLSYLVHVHSHPRPLRQGLVHVGPITWEGCHSLMVPGQSSHLERLHRRLHEDQERRHQERRHQEQEQQNSSPTPQQEVESGRPPYPASQLEMPPAPPQGIPAAGGDPDGDGDDDDASGSSSNGMELSKEPEPEGWIARPITSDTARGCHFHDALDTLLHRAFDRHTWSIEYCCVVYQHRRGLYSDQWEATCLVRRPDDDLWGAEAFSEHYSITKRDTVEAAMQDAARHALSQYCSLFSGVADGLDLKYYPRRSTGSAGGVIVSPVG

SEQ ID NO: 333155 - protein, 150 aa, Zea mays
  Clone ID: MRT4577_66951C.1.pep
VKPQIDTSIFNSYQQIKTFSRSTKLVLAAGGDEQIIDFEWHLSPNTSENMVRTNHGEMGTTKLLILSTRWHATEDEHAPSDGSWRKRAHDTVVESSGGALIWKGAGMTEPERVRRQVQSVTRELARCCKVSSKGADAELDCYCCSGVLRG

SEQ ID NO: 333156 - protein, 93 aa, Zea mays
  Clone ID: MRT4577_66952C.1.pep
ILILTGINRAKRGSLKSFSTLAIGTFNTTTGGEHGHGTFMGKTGYGAFYNRLRAVTSAFVLQRVMRFHLQEVAAAARAAHLEQEATPRQFNVP

SEQ ID NO: 333157 - protein, 88 aa, Zea mays
  Clone ID: MRT4577_66953C.1.pep
ISNGDGGNVSALEVEIGPDGCLAVTKSEGIETNVGLQMNMDISITRAARAALVMVVTATVALIVLFGGDNGSEAKEGGNKRCPDLHTA

SEQ ID NO: 333158 - protein, 99 aa, Zea mays
  Clone ID: MRT4577_66954C.1.pep
GPQLVLAGVELGHGGKWCPCLRQQRAKMGIRRYKSRLEKGADLEPVGGDVTREAAMGSPCSYAGKGKTPGDASMRLGRKAPCWSRTLAERRGEGERLWR

SEQ ID NO: 333159 - protein, 105 aa, Zea mays
  Clone ID: MRT4577_66955C.1.pep
GPAGPGRAAVARFPGAKGGPPGAPGAPRFSPREGRFGLSVGAAGFPVFPRAVRAAPLMGVGSLSWPPGLSTFCPRGACCVEGAAPPPPPQGTAGALTPPSSPTTH

SEQ ID NO: 333160 - protein, 132 aa, Zea mays
  unsure (1)..(132): unsure at all Xaa locations
  Clone ID: MRT4577_66956C.1.pep
TSSPYPYISRTSTSFTTLLFCTPVYLXLTVHTRPPVPLQVAPHSVNPVVLLVPRVVLPLLRFHEPNHPPGGDQHSLPALRRAGAKSYTQDAVHADHLLLVPVLDLGAFRPPLCHSIAPVLDPLVQPHYSPIT

SEQ ID NO: 333161 - protein, 61 aa, Zea mays
  Clone ID: MRT4577_66957C.1.pep
PIGRWQAHPFKKLFYGKDGRPKDPRRWGILPPFLLKTGAGGVAIVGGRPLGIRCLQTAGLD

SEQ ID NO: 333162 - protein, 154 aa, Zea mays
  Clone ID: MRT4577_66958C.1.pep
AEPLPLPLSPTSPTRRTAPLMAFEAAGRPSPLPSALCPLPHSIKLSAMPPSSGSRPHELAHSPSLFLPKLAVAGARSLSPPRPGAAVRRRRTARSRRRAPVDPPPPDDFPDRRPKPPLLGSTPPAVPQHPCAQRTEREVEDDTKSFLLPPSVYA

SEQ ID NO: 333163 - protein, 83 aa, Zea mays
  unsure (1)..(83): unsure at all Xaa locations
  Clone ID: MRT4577_66959C.1.pep
PVTRCYPGTTASAGSALLLLICSRLCYFGHRAGDDGYGSWQSAHSTLYGVRNAXRTMGRACGXGNMFRTGYGTDTAXLSTAPC

SEQ ID NO: 333164 - protein, 69 aa, Zea mays
  Clone ID: MRT4577_6695C.1.pep
MGFVVTSAIFFLAGFIACLFSLLCCNRGASTNIFHLTLVITATVCCWMMWAIVYLAQMKPLINPILSGE

SEQ ID NO: 333165 - protein, 51 aa, Zea mays
  Clone ID: MRT4577_66960C.1.pep
QTILFKLLFGLTTDFKVGQGYYLELLAHRTNIHYSLKRSLYPRFGSYNFNS

SEQ ID NO: 333166 - protein, 162 aa, Zea mays
  unsure (1)..(162): unsure at all Xaa locations
  Clone ID: MRT4577_66961C.1.pep
MARTKQTARKSTGGKAPRKQLATKAARKSAPTTGGVKKPHRYRPGTVALRWVTHDSFDCLLFITLQIIXIVLPDFXEIRKYQKSTDLLIRKLPFQRLVREIAQDFKTDLRFQSHAVLALQEAAEAYLVGLFEDTNLCAIHAKRVTIMPKDIQLARRIRGERA

SEQ ID NO: 333167 - protein, 851 aa, Zea mays
  Clone ID: MRT4577_66962C.1.pep
MSTCLHVQDPRNIAMSRPLDFAVLKYKNQKLAEQLEVHKFEFCALESRFNDLKEKQRTHNKTLVLVKSYWERLIADLGIVSVCKNESSRSSCSTGNNNIRKDFLNGLLEAGATESSGSPNCQLGNDVSSEQSTTIDILQKLFLPSSGPWHVNNEFVSAALMKLPENEHSRQLHNATSDVLSKLHVVMRTVDNLHLKHRQLAANYQKQRDSSAWNRAEQKRLKEELTSVVAKLEGSKQKLAVLKAQGDNKQATPILVPTLGNKNMTAEKVRDKQTELQDLEATHKELMELISKRLEEIRRLHTERIEILNKLATFQNILTDFKSIHSSKAFQLVNDQLQKSQAELDDHQTLLEKLQVEMDTFVWRERQFNQKVDLAEIPQKVSAYCVSRIADLEKDVQKLCNEKNMLVLKLEEASREPGRNQVISEFKALVSSLPREMGAVQSELSKHKDASLQLHSLRAEVHSLSSIQTRKEQEIEEMSFRSAHAGSDISQLQSLVRELRENTQELKLFVELYKHESTDSRQLMESRDRELAEWARVHILKYSLSESKLEQRVISANEAEAISQQRLATAEAEIAELGQKLETSRRDLVKQSDILKSKHEECEAYVVEIESIGHAYEDIMSQNQQLLQQIIERDDHNTKLFMEGVKSKQSHDALHLEVRSLQRNLQHASTLMDLCNQKTIRLEDQLRGWSERLRRLSEDGMQQSISLGNYQKKLSGMHGEAPKLRQSMDVLQAKAGSNRLEIAELLIELENERFGKKRLEDDLDLMSSKANSLREKTDNSAVLQKLLHEAKEYRGILKCGICHDRQKEVVIAKCYHLFCSQCIQKPLGSRQKRCPSCGLSFGVNDVKPIYI

SEQ ID NO: 333168 - protein, 83 aa, Zea mays
  Clone ID: MRT4577_66963C.1.pep
WYLEAAGVSFTALAPSLRSISGYSCRSVIASCVQRLSNRREDGGAGLSSSRWDPPEEQHLTSYDAIVHMSGGIDASFGNHVAA

SEQ ID NO: 333169 - protein, 94 aa, Zea mays
  Clone ID: MRT4577_66964C.1.pep
VLGTEDNLPAKKWVSLVRRTLNKNPGSCCYGGYRTPSPVPDTVVEQDADFEGSSRRLDGLSYLYRRSFTLSRSLRSEGNHMLSHQRLDRRFSVC

SEQ ID NO: 333170 - protein, 51 aa, Zea mays
  Clone ID: MRT4577_66965C.1.pep
CYNYSDTKSSLLIYLCVILALIMLQLYRLNTIFDLIDNYHNHRCTHIKLIL

SEQ ID NO: 333171 - protein, 100 aa, Zea mays
  Clone ID: MRT4577_66966C.1.pep
CLLEGTRLVSISFFGAYSVHPQACPSNSSCGQLYFTSFISYDHHLLVHGRRWGGAAELEEGNRGRRRPWGQMLLCWRRKGYRERESGTGRENEEMGLVAS

SEQ ID NO: 333172 - protein, 160 aa, Zea mays
  unsure (1)..(160): unsure at all Xaa locations
  Clone ID: MRT4577_66967C.1.pep
PPSVRPPVRPAYAPLSLLHCLIRRDKKMEPFFCMLAXTQALTDTGNILLDAXKFIHRAHTAYVIYYEYDYLHPKSIIYDAKSPSDCSETNMIIYNTQSPCDRAKPYETRATRQFGRKTIRPHVISGKWPIRQQSYMHSSVRKRGPRQPHSDKPRSASHWN

SEQ ID NO: 333173 - protein, 44 aa, Zea mays
  Clone ID: MRT4577_66968C.1.pep
WQHRIKYITCCSIKASHISSYVPHLSRLEPLNNLFEAQVSNKEK

SEQ ID NO: 333174 - protein, 110 aa, Zea mays
  Clone ID: MRT4577_66969C.1.pep
SHKKICLTIIYIIYTVWLSNLLGTKKDMWPGQPTGSCPCPCGNKRIRAGQKQQTETQITKFSTIWHQVPRRHMMIPTSISQITSLPDVQSTILFSEMIGTITQHQTSSKT

SEQ ID NO: 333175 - protein, 68 aa, Zea mays
  Clone ID: MRT4577_6696C.1.pep
DCPEDPLVQARLVVCPRVRFHQPCCLPDPPHVQVPVDLYRHRVLPPYPGSSPMAFGLCPSFVLVFPLN

SEQ ID NO: 333176 - protein, 75 aa, Zea mays
  Clone ID: MRT4577_66970C.1.pep
YFDMVLNMQAYVSILPALIVTTHSDIGLFCARLLLCTSKKVAFPLVYDDTCIITNTPFAFLHQKCILIHLTWSGS

SEQ ID NO: 333177 - protein, 105 aa, Zea mays
  Clone ID: MRT4577_66971C.1.pep
YTETSACCACRRRQLRPGLRPRRLLASGARRRGPRGRGTPTTSLSRRSSAGSAAQGRTSLPASWLHPKKKNFLFLLYFLLLNPNLRLIQKKNEILACLAVPFLQS

SEQ ID NO: 333178 - protein, 108 aa, Zea mays
  Clone ID: MRT4577_66972C.1.pep
MAAGAATLGDVRRVRLRRRRLAALAAAVSFVQVFDLDVFRRRALAAEDLVSEVRPLRLRLAGAQQGARNKVGLPFQHHGFTPKKSFLFLLYFLLLNPNLKLIQKNMKP

SEQ ID NO: 333179 - protein, 104 aa, Zea mays
  Clone ID: MRT4577_66973C.1.pep
MIFASGGMVAGAATLGDVRRVRLRRRRLAALAGAVSFVQVFDLDVFRRRALAAEDLVGEVRPLRLRLAGAQQRARNKVGLPFQHHGFTQKKKLSILALFPPPKS

SEQ ID NO: 333180 - protein, 89 aa, Zea mays
  unsure (1)..(89): unsure at all Xaa locations
  Clone ID: MRT4577_66974C.1.pep
KRKVDNINGKNKIARSIFLANNISTESGVLAMEPESSERGAGGAASGSLVTSTSTFLASSSAMLLSCGRGLAVAVECVCVCVCVXGRLV

SEQ ID NO: 333181 - protein, 123 aa, Zea mays
  Clone ID: MRT4577_66975C.1.pep
GRGESHFPKYEREREREQRSTLRYVRGEKREGGRGREAAGVAAEARSIRSGSRNQVASVDRASHLSIHLSSSTGINPHASVGGREGGRRGTGEAACQQANYRVGEDRETGGGDFSGSGGSART

SEQ ID NO: 333182 - protein, 42 aa, Zea mays
  Clone ID: MRT4577_66976C.1.pep
LKGPVAARRLKLGNARASPGLDPCNFRPSDLNLGPPIGSLLR

SEQ ID NO: 333183 - protein, 88 aa, Zea mays
  unsure (1)..(88): unsure at all Xaa locations
  Clone ID: MRT4577_66977C.1.pep
GGGGLRGIKVHGGAWGKAFSPSHLPNLKRQRQKRGGPRSKITEIKNIKRTAPTAPGKPEKTAAPTNLTNPAKRRGRGLAPWGRGWXPV

SEQ ID NO: 333184 - protein, 74 aa, Zea mays
  unsure (1)..(74): unsure at all Xaa locations
  Clone ID: MRT4577_66978C.1.pep
SRGRPGPGSTNYTSINQPSAQNSFHTPHSTASYQSXRHHIVRTDQAVVLPPPTQRKIMAGAAKASWMVAMSVGA

SEQ ID NO: 333185 - protein, 725 aa, Zea mays
  unsure (1)..(725): unsure at all Xaa locations
  Clone ID: MRT4577_66979C.1.pep
RRPGKCTSVDLSGNLFSGEGRVLRSWDGIVEVIDLSSNKLVGSYPNDVSQFQNLVSLKLRNNSLSGSLPSVLGTYQKLSVLDLSQNAIEGSVLPTFFMSPTLTVLNLSGNKFSGTIPFQSTHSTESILLSSQSALRIVDLSSNSLAGPLPPDISNLQKLEFLILMMNELSGEIPSEISKLQALEYLDLSHNHLTGRIPDMPQNGLKVFNVSYNNLEGTVPKSVEKFPLSCFRPGNDMLVFPDGLPAGNDDYTGVDQGQTSHGHKAGVRVALIIGCIGAVLLVISIALAFYLVRSQELCGRNGFRGQITIRDLKGRISPPNLFKXPPKTTVIPSKTSFSNDHLLRAATRSMSAQKELLAEASVEYGYTDPKEVAESTSLGVTETSSAIQAQESSPRSALPTSPHFADSRFLEEPVAFEVYSPDRLAGELIFMDSTLVFTAEDLSRAPAEVLGRSSHGTTYKAVLQSGHVLTVKWLRVGLVKHKKEFTKEIKRIGTIRHPNIVPWRAFYWGPKEQERLIISDYVNGDSLALYLYESTPRRYSRLSVSQRLRTPIXILHLAAXLHQQRGLPHGNLKPTNIFLTGPGLSPKLVDYGLHRFMTPSGTAEQILNLGALGYRAPELANAGKPAPTFKADVYAFGVMVMEMLTRRSAGDIISGQSGAVDLTDWVQMCSREGRGTDCFDRDIAGLEESPRIMDELLAVSLRCILPVNERPSMKTVCDDLCSITA

SEQ ID NO: 333186 - protein, 79 aa, Zea mays
  Clone ID: MRT4577_6697C.1.pep
RGSTSGGVQVHITHQGGLPVRWVFIHAICKCGSRGYVSVCCPALFFVCNQQDGPVRWPGLFLGEFQQDPPACCLIKCKS

SEQ ID NO: 333187 - protein, 134 aa, Zea mays
  Clone ID: MRT4577_66980C.1.pep
LHRFMTPSGAAEQILNLGALGYRAPELANAGKAAPTFKADVYAFGVVVMEMLTRRSAGDIISGQSGAVDLTDWVQMCSSEGRGADCFDRDIAGLEERPGVMEELLAVSLRCILPVNERPNMKTVCDDLCSIITA

SEQ ID NO: 333188 - protein, 67 aa, Zea mays
  Clone ID: MRT4577_66981C.1.pep
ARIANVICSAESSPPCSGVQWLEHSDPLHVPPCQPRTWASAYFMLSPKTATAARFLATCRWAQPCYS

SEQ ID NO: 333189 - protein, 60 aa, Zea mays
  Clone ID: MRT4577_66982C.1.pep
DDECTRARTQNSDSGRGLYPISPRHGTNGGFPNSFFSPLYQRLSHLRLYITLPSHLLIKA

SEQ ID NO: 333190 - protein, 36 aa, Zea mays
  Clone ID: MRT4577_66983C.1.pep
DCLFLRMVWLYSFNDGNFFFYSSSDLRQGRYNAKSK

SEQ ID NO: 333191 - protein, 107 aa, Zea mays
  unsure (1)..(107): unsure at all Xaa locations
  Clone ID: MRT4577_66984C.1.pep
DSQAGFLNTDQSNAYFKPFHVNFXTTLSSKTYYTATIMLINQDKNXYNTPKYKFLVPFTNNDITTQIISTNITSHILLASAYSHXFPRYXLNLXLTNYATYYYTGLL

SEQ ID NO: 333192 - protein, 210 aa, Zea mays
  Clone ID: MRT4577_66985C.1.pep
SSGKALRKDKPSQDVEGTSVKESKPSAGEDDSSKICYKCKKAGHLSRDCPESTSEVDRNDGSISRSRDDTGTNTAPAGGNSPMDEDDVQEIGDEEKEKLIDLDYLTGNPLPNDILLYAVPVCAPYNALQTYKYRVKITPGTAKKGKAAKTAMSLFLHTPDATNREKELMKACTDPELVAAIVGNAKITAPGLTQLKQKQKQKGKKSAKQN

SEQ ID NO: 333193 - protein, 59 aa, Zea mays
  Clone ID: MRT4577_66986C.1.pep
GCGRRRRQKSRIRLWKDCREDSGDSESYDVDNGDEESDARPWRPIHAVNGKSYMRENNV

SEQ ID NO: 333194 - protein, 58 aa, Zea mays
  Clone ID: MRT4577_66987C.1.pep
SLSTRKRRYSSTKCVQFNNLYNQMSLKVPKLQGTDNVLGTKLSYEYCLKHKVNARYCL

SEQ ID NO: 333195 - protein, 125 aa, Zea mays
  unsure (1)..(125): unsure at all Xaa locations
  Clone ID: MRT4577_66988C.1.pep
SSSTRHLRLHPSYPRQPINLSILHLVTLGATIKALADRHPIIVHGAXLLGAPATILGNVKLPAACKIGPXSQSLLHVPSRSTXMDNPAKLIDVNNXPTVLNEEHTRHDETLYHTYFIRHCSNYTI

SEQ ID NO: 333196 - protein, 41 aa, Zea mays
  Clone ID: MRT4577_66989C.1.pep
IRLGIDINPRVILQMLYLALAQAFNVYNLNYELFFKKPFEK

SEQ ID NO: 333197 - protein, 78 aa, Zea mays
  Clone ID: MRT4577_6698C.1.pep
CLLDDVHLAISLYSNTCSVCPSSSLSPSITMRSSPPFTSSWGRLGSYSASRDQLTYLMGCTMHIYECQYKYYNLDTAT

SEQ ID NO: 333198 - protein, 56 aa, Zea mays
  Clone ID: MRT4577_66990C.1.pep
PCWLPFPLSEGDGCCPRSHRHIRFEAVPPTRCPLRWADDDRGGGRTRREGVKKLKP

SEQ ID NO: 333199 - protein, 283 aa, Zea mays
  Clone ID: MRT4577_66991C.1.pep
MSVPAFSDIAKPANDLLNKDFYHLSATTFEFKDTAPNGVAFKVTGKSSHEKATSAAIEGKYTDKPTGLTLTQTWNTANALDTKIEVADSLAKGLKLEGLFNFLPATAAKGAKFNLHFKQPGFHGRAFFDLLKGPVANVDAVVGHEGFLAGASAGYDANKAALTAYSAAVGYAAPQYSAAITAFDNLSVFAASYYHKVNSQVEAGAKATWNSKTGNAVGLEVASKYRIDPVSFTKVKINDRGIAALAYNVLLRKGVTLGLGGSFDTQKLDQATHKLGASFTFEG

SEQ ID NO: 333200 - protein, 158 aa, Zea mays
  unsure (1)..(158): unsure at all Xaa locations
  Clone ID: MRT4577_66992C.1.pep
KIGGKGRFPPLVYPRPGFPRYKRGDFFKALFRNFGQGRGPSPGSLERAFFPGGGPPFFKGGKGVPLWGKTGFVPPKKMGFFLFEKNPFPRKIXKRLFXLGLPFFFPNLQKGFLRPVFFLKKGGFKQGPNFFAPTPGFPWGAHKKKLPFFFPPAPVCGF

SEQ ID NO: 333201 - protein, 82 aa, Zea mays
  Clone ID: MRT4577_66993C.1.pep
NEPTQGGHSKGSQLERQQQESPDGPRRPTPPRENKEQDLKTAGGTKVKRARGHPQGPDGTRGVNTGNAQAQRPGGGRDRLPP

SEQ ID NO: 333202 - protein, 61 aa, Zea mays
  unsure (1)..(61): unsure at all Xaa locations
  Clone ID: MRT4577_66994C.1.pep
QRLDMNKCYHVCYNKPAHITXIXAAPPPPMAPAEIERQRRDESDGSVQYRTRGRTRMSARY

SEQ ID NO: 333203 - protein, 99 aa, Zea mays
  Clone ID: MRT4577_66995C.1.pep
EQCLAGFGLRISLFLNPAFPGVLFIWLKKAMVGDYPSQPYDRGEGPVFPAYSPNWDKRRLKELGCPFLQKRTGLQAQGWVFVMGNPLMGFGDENLNPLG

SEQ ID NO: 333204 - protein, 91 aa, Zea mays
  Clone ID: MRT4577_66996C.1.pep
ATKVPYTMMSRFSAISSFPGRFNGQTDDGSGNNKSDHHVSGNNKSDHHVMFGGNLFQSVSCSGSGHEQPRHAIWFHQPFPYWMSRLVRFQR

SEQ ID NO: 333205 - protein, 49 aa, Zea mays
  Clone ID: MRT4577_66997C.1.pep
PAKHHSLVSTTLNVLGCITLDYRWAKSSSIIVHCRVLVVYPSDQWLTGN

SEQ ID NO: 333206 - protein, 170 aa, Zea mays
  unsure (1)..(170): unsure at all Xaa locations
  Clone ID: MRT4577_66998C.1.pep
MDLSGTQGELPMATMHAGGSPYLGLHHGHPQQHNHGANGRHMSPPDVVAEEAKNRQLAVVPVGTGGGGGAGVRYRECLKNHAAAIGGSATDGCGEFMPAGEEGSLDALRCSACGCHRXFHRKEPPGGDGRQLYGHHHHHPHXDEPAGRGAPPPPPPGAAGGGAAPGADAH

SEQ ID NO: 333207 - protein, 160 aa, Zea mays
  unsure (1)..(160): unsure at all Xaa locations
  Clone ID: MRT4577_66999C.1.pep
FGSSEAPTIYHMKKHPDGPWDLVGTDIVCRNMGLQALYQVPVALSVDFDGQRILHLLQXSRSDAQNITNTVMYYTCGFGHICNEDNARTPSAXKVCKGVTKNHLFMGIIGVATAFHILIIQPLGMFFKVLRLGWRLWLVPGAIGLVSRPLADVGKFIPVP

SEQ ID NO: 333208 - protein, 119 aa, Zea mays
  Clone ID: MRT4577_6699C.1.pep
VGVTNGKNGSWGKMGTPHKSTQQTKRKEKKEKQGGPKNEQNQNKRGELTGPLTKKKTGGPRKIKKKPPPRERPETKKKARGVCPSPAGKKKTGCPLPPGPETGGKKGASWVAPAGEKPF

SEQ ID NO: 333209 - protein, 84 aa, Zea mays
  Clone ID: MRT4577_669C.1.pep
ICIGLKDMIADQLIYGYSRRNRINQHACRHTYMSTKTDSKHAERDSKLKNSVSFFLTHTPHNTYVWQPARSRLLLFNHHHKLDR

SEQ ID NO: 333210 - protein, 65 aa, Zea mays
  Clone ID: MRT4577_67000C.1.pep
PLLPPQPVQAPPPSTSQAPPQETVQTPPRAPAPPPPPHAPLLGRWPWRALRGWRPWRRRRLPCRG

SEQ ID NO: 333211 - protein, 89 aa, Zea mays
  Clone ID: MRT4577_67001C.1.pep
FPPTLQREVCRLVPCSNGDLRGFRDFISYLVQKECAGVIRIPAVKAMWTRILFILPPTSDACGMVGIPPLPADTMIVVTLPKETTVEAS

SEQ ID NO: 333212 - protein, 52 aa, Zea mays
  Clone ID: MRT4577_67002C.1.pep
QPVRRRRNRHRTPEHQAQHRPPGLHRAPDGLSQGTKAVWQGREERGLCGRDG

SEQ ID NO: 333213 - protein, 127 aa, Zea mays
  Clone ID: MRT4577_67003C.1.pep
HASAHASAHASGTTSPNIGVRLGDTVLFAGDFFSHTTRRGTLRARARCLPSHFLSPPRLWKSPKRLCSLAGQPGGFFAERVFRARRVRIDPQRDLSYPIWFFGSQTTQSPPLRHTTASQQCRRRDES

SEQ ID NO: 333214 - protein, 150 aa, Zea mays
  Clone ID: MRT4577_67004C.1.pep
YCSSFRGYSPLRWRFLLSHYKEGNSTSSRSLPAIPLPLSTSSLEVSKAIVQSGRTTWRILRRTSFPSAEVSTTFIIVTAVLHFPPVIRSHSSTEGCASIHSVTSPTRSGSLDLKLLRYECTIGLLCTSCSFVPGKSVEELQRFWLDSVGI

SEQ ID NO: 333215 - protein, 52 aa, Zea mays
  Clone ID: MRT4577_67005C.1.pep
CIIFPLYSKFFIASLVLRPLILLSFWILHLDSLILTFTDLNVCYALKYVRHP

SEQ ID NO: 333216 - protein, 199 aa, Zea mays
  Clone ID: MRT4577_67006C.1.pep
MEKEAAAELEIPGECQYAGDPVLVRPSQPTPRHTLHLSNLDDQRFLRFSIKYLYVFGADAAVPADALRAALGRVLADYYPLAGRLRPSAEEDGKLVVDCNAEGALFAEGRLPGLAAADFLSGSDRPHKSWRKLHYRVEAQSFVAVPPLVVQVTWLACGGMVLCTAINHCLCDGIGTAQFLHAWARAARGGRDAPDAGGD

SEQ ID NO: 333217 - protein, 131 aa, Zea mays
  Clone ID: MRT4577_67007C.1.pep
LQQIGCRPRHEPPRALDPSPLRSNRWPPPSIKSMRSHNSPNDEEPKEATGAAQGDADHPPHDQGRLRLQRPSVFLTITPTYYHMQPRTATNPYKPPTAEAVTAKDDSDYEGADLPTRVPADSIFCLNKCNA

SEQ ID NO: 333218 - protein, 70 aa, Zea mays
  Clone ID: MRT4577_67008C.1.pep
CSDAHTQTRPRCGPSGWVVPPGRGILGPSRSSVRMETNSGWCDLIKPYRSGGLVESAKLVGYPIRRPIGG

SEQ ID NO: 333219 - protein, 125 aa, Zea mays
  unsure (1)..(125): unsure at all Xaa locations
  Clone ID: MRT4577_67009C.1.pep
MKRIVGFDVTMPVDKTLQVKKKLDNKMRRNRPILYXIHVRTDNTITYNAKGRHWRRTKLGFCARGSGGSCVGSLGALPSLGLYRCLLRFCRASRRIQKADVKIPMTAETIDATMLYSGLHAGWRC

SEQ ID NO: 333220 - protein, 52 aa, Zea mays
  Clone ID: MRT4577_6700C.1.pep
FFPGHFRFIITPTVHSPKFSQKKKKKKKKKKKKKKKKKKKKKKKTKKKKGGL

SEQ ID NO: 333221 - protein, 190 aa, Zea mays
  Clone ID: MRT4577_67010C.1.pep
GDGLPSIAQGGQGGQRAPGWGTAGTRITHVDLDMINKQRISAPTALRRTRMTLESLTLATPRHRNRLRRRRDAQVPRRTTYNMSGWANKICHLIAAMDVPGKDGTSPLPDCYDDHTSSIQRGQQHAGLEHPAQARIGRTAQAGGRADRSERLCHDGPLLCIESANALNDSKMWNMLTHEYPIRRYHMRRA

SEQ ID NO: 333222 - protein, 548 aa, Zea mays
  Clone ID: MRT4577_67011C.1.pep
MARPPKEAIDTFISITGADEAVAVRKLEEHGGDLNRAINSHFNDGDSILNGISQNAMPASRDDMMDLDGPLDNTFQRSLLPESFRAPFALMDPNFQDQFFDRVGSTDGVIREPLVSHPREVREIPIEVKDGDPQTGSSGQDVTGNESSNGPEVPETIIIDDVDGGLLSAPSVPHPIIPSNTSTVPTAPPLVHVNDYDEDIEEEMIRAAIEASKKDSEGLANIVEQGGQHQEEVNLRDHSSDKAGMETANGIVERQGLASEKAGTSRQPIDDESFQEEAEDVEEQPLVRRRSRRAPSEDNELPKIVHPGASPVLNNHQYSGDDFPSEWGGISSEEHDEAVMLEAAMFGGVFGGPMHPFSMPSHRTSTYYPPITHSPSPALAEQRLLREQQDDEYLASLQADQEKELKALQDAELRRLEETTTREAVLEKQKQEEEERRKKQLEEEELESSLTSKQASLPPEPSPDAEGAVTVVVRMPDGSRQGRRFLKTDKLQFLFDFLDIGRICKPGTYRLVRTYPRRTFTSSEGDVSFSDLGLTSKQEALFLEQITE

SEQ ID NO: 333223 - protein, 143 aa, Zea mays
  Clone ID: MRT4577_67012C.1.pep
EPLVSHPREVREIPIEVKDGDPQTGSSGQDVTGNESSNGPEVPETIIIDDVDGGLLSAPSVPHPIIPSNTSTVPTAPPLVHVNDYDEDIEEEMIRAAIEASKKDSEGLANIVEQGGQHQEEVNLRDHSSDKAGMETANGIVER

SEQ ID NO: 333224 - protein, 78 aa, Zea mays
  Clone ID: MRT4577_67013C.1.pep
ARGIVVQVRDGNLERALSIMERRMRSSGMERLIRARTHYHVKDSEKRVLARKGLMQRVRSQELGKKLREILIKKIRGQ

SEQ ID NO: 333225 - protein, 95 aa, Zea mays
  Clone ID: MRT4577_67014C.1.pep
SVCCRLSLLLTQLLSYLLSLHRSLLRAALAPNPPVMARPPKEAIDTFISITGADEAVAVRKLERMELGFWCDATRCHRDQVHQICMPALLTHMAF

SEQ ID NO: 333226 - protein, 108 aa, Zea mays
  unsure (1)..(108): unsure at all Xaa locations
  Clone ID: MRT4577_67015C.1.pep
YVIGLLTGCKKQVVSKTATXKKEPREYKXNKEEPIFLYKAFGRTPLEIEDICRNVHRSDPAWKXILGKDLNPGGAYPSGYIREDPCPVPDNLVPYVQEGSHGRIPHLK

SEQ ID NO: 333227 - protein, 156 aa, Zea mays
  unsure (1)..(156): unsure at all Xaa locations
  Clone ID: MRT4577_67016C.1.pep
YLASLQADQXKEVKALQEAELRRLEETAAREAVLEKQKQEEEERRKKQLEEEELESSLTSKQASLPPEPSPDAEGAVTVVVRMPDGSRQGRRFLKTDKLQFLFDFLDIGRTCKPGTYRLVRTYPRRTFTNSEGDVSFSDLGLTSKQEALFLEQITG

SEQ ID NO: 333228 - protein, 72 aa, Zea mays
  unsure (1)..(72): unsure at all Xaa locations
  Clone ID: MRT4577_67017C.1.pep
XXANXNXGISQAKXELXLPSWXAHAXAAPNRXVXSSSCRIFEXXPGXXQMVSFLRXDGXSRXXNNXXPRARR

SEQ ID NO: 333229 - protein, 90 aa, Zea mays
  unsure (1)..(90): unsure at all Xaa locations
  Clone ID: MRT4577_67018C.1.pep
RHGMXXXKAPRANFFFFSYTQHTNAPRLPTLRHRTEPTSGTRRHRSRPPDRTHRDGRTHSTGHKRNPSQKASTGNNRRRKMERRERGMTP

SEQ ID NO: 333230 - protein, 56 aa, Zea mays
  Clone ID: MRT4577_67019C.1.pep
NCLDQISWIPSLQSLHVCKLCPEFNLSCCCLSPFSNSVRQSRFCFPRSMLKRDFFK

SEQ ID NO: 333231 - protein, 83 aa, Zea mays
  Clone ID: MRT4577_6701C.1.pep
KNIHITSVYSAYTQEMGLPDQDLPKNYMHEQVLQAIGGLWEEYESFFWGGYMLLPNKVKDPLSTFFFGLNNTKNTLLREKGLN

SEQ ID NO: 333232 - protein, 68 aa, Zea mays
  Clone ID: MRT4577_67020C.1.pep
RTLKQMDPTKKASKETPEPGNQRQTLGKGPQTQTRGGSPHPRRMTTSPPPTAPGRFLKGPLASGNPPP

SEQ ID NO: 333233 - protein, 115 aa, Zea mays
  Clone ID: MRT4577_67021C.1.pep
SGIISRYPTTFIIHNSMTTSDSNNSGDPLEGMGAFFAKDVQRLNLVTNENRAHVTRLNTSGDSFWTRNNGHLYWQTPDSWDVGLSTTTSALYLRAVTYLFCHQKDSCATSDLPLP

SEQ ID NO: 333234 - protein, 45 aa, Zea mays
  Clone ID: MRT4577_67022C.1.pep
MTEMFQYMQSLGATQGFAPPPPLFPAVDPAVFHTPVSIKIVVRCW

SEQ ID NO: 333235 - protein, 222 aa, Zea mays
  unsure (1)..(222): unsure at all Xaa locations
  Clone ID: MRT4577_67023C.1.pep
RVDWVXEXVPXMGAGWCPPGMLGIGIGGTAEKAAVMAKEVLMESIDIHELKKRGPSNRIEEMRLELFEKVNQLGIGAQGLGGLTTVLDVKIMDYPTHAASLPVCMIPNCAATRHAHFVLDGSGPASLEAPPLDAYPEIVWEAGPSARRVNLDTLTPEDVQSWKPGETVLLNGKMLTGRDAAHKRMVEMLNKGETLPVDLXGRFIYYVGPVDPVREEVVGPAR

SEQ ID NO: 333236 - protein, 162 aa, Zea mays
  unsure (1)..(162): unsure at all Xaa locations
  Clone ID: MRT4577_67024C.1.pep
TKGAMTELLKLLHKSQLWAMGTLLRNTAEIMMRQAITTETERIESFNTARYCYTRTMKLLDDSIYDTIAFNEHSXMRTLSTRYMDDYFCYGLSSCLENVRXCCLHLYAIDDMTYLYNSLRELECDTFAXIMHLTLKACGARYNVWQLCHNQRDCLPARLLTY

SEQ ID NO: 333237 - protein, 136 aa, Zea mays
  Clone ID: MRT4577_67025C.1.pep
FILTTVYMYKQHSHLRLIHRPSYLEKIFSNLESLRQSIEQASKQKALESRKLAQQSVPQTIMNGIKGDRMDVDPMSVEAFDDQPSVPKRLKTHHPSPSGLENDMSVVSNYHVNSGFALQETQPEQLDHNNKTSYLK

SEQ ID NO: 333238 - protein, 219 aa, Zea mays
  unsure (1)..(219): unsure at all Xaa locations
  Clone ID: MRT4577_67026C.1.pep
MTPPGQLLPLSRLPPGLSSRRRRXPLPASRSCPSQSVASASMGPPPPWPXFMPSPHLFRSPACPPRAPTPPGLSAAAGGEAQAAAVAEFVTSERVKVAAMLGLALALCNADRVVMSVAIVPLSQAYGWTPSFAGVVQSSFLWGYLMSPIIGGALVDYYGGKRVMAYGVALWSLATFLSPWAAGRSIWLFLFTRVLLGIAEGVALPSMNNMVLRVVPRTE

SEQ ID NO: 333239 - protein, 73 aa, Zea mays
  unsure (1)..(73): unsure at all Xaa locations
  Clone ID: MRT4577_67027C.1.pep
KRQAWIILTKXGXXXGTXXEQVTXRIXXXKXTQGTPRXKXAGRRKQXHRXXADKKAXAXRPERRAPQXHGKXH

SEQ ID NO: 333240 - protein, 203 aa, Zea mays
  unsure (1)..(203): unsure at all Xaa locations
  Clone ID: MRT4577_67028C.1.pep
MAECRSLIEFLRAFEHHRRAADSSASAGACSRSRRASAAGGSFCDNTPMAVIDAVMLLAVVIAIGFLLIPYLKLLLLEMGAMLHPAASCLPAAAFFGAAVAVAAVVVAWELLGHHARKCGKPRCRGLKKAVEFDIQLETEECVRGRXAPRRDRRCLRRRGRVXELGDEQRELEAELRKMAPPXGRTVFIFPNPLGCPKGIGGW

SEQ ID NO: 333241 - protein, 123 aa, Zea mays
  unsure (1)..(123): unsure at all Xaa locations
  Clone ID: MRT4577_67029C.1.pep
WPPGAPQRGPLAAPLPAPPAVAPPPLPRLPPPPLPPPXPPPPPPPLPAPWPLPXPPPGSPGFPPXTGPSAPPPXPVPSLPLSPPPPFPFMLPARLLCAPSPPPIFPQESPMTLISPSYNSTHY

SEQ ID NO: 333242 - protein, 51 aa, Zea mays
  unsure (1)..(51): unsure at all Xaa locations
  Clone ID: MRT4577_6702C.1.pep
SSPVEATLTAEADGERQEDQCDADGYVIDSQSTQHNDXDDLIAKNKKDVEN

SEQ ID NO: 333243 - protein, 102 aa, Zea mays
  Clone ID: MRT4577_67030C.1.pep
MARSAASRLARAARAVVVATKRRQGPGVSREVLPRSLAPLAGDASAFGATTGRPAWFAAPLGRFPVGAGGAGLQVPPRRLFHSTTPAQYSAAGTSSSSQKKK

SEQ ID NO: 333244 - protein, 44 aa, Zea mays
  Clone ID: MRT4577_67031C.1.pep
IVLLTSAMIHLACNSRCLQHGGHRMWFNQNQIWGRLYGDRRQKQ

SEQ ID NO: 333245 - protein, 77 aa, Zea mays
  Clone ID: MRT4577_67032C.1.pep
TTSTQFQAQSFGAKSKLALAVYTCSKSEDRSPALAPDAGRLFSSPHNRKLAFCITAPTIAHKELVPVAGPSLLGLLL

SEQ ID NO: 333246 - protein, 147 aa, Zea mays
  Clone ID: MRT4577_67033C.1.pep
TKKMGETNYRGGKGGILFWEVFWGGPPLFFFGKYLARGPNFLVGGFKFCPSPKRGGALSLNWENKQGLFFFWGGPPKKRKKPVPGCLKTKKGSPIGKNPPPGPFFWKKFRLQKNWQSGKNGKHLGPGPGGTNGKINPGGGGGGGAPL

SEQ ID NO: 333247 - protein, 104 aa, Zea mays
  Clone ID: MRT4577_67034C.1.pep
RGVITPPAPWGGIPIGVGYFPPAREAPPGGGGSFLTSGSSPISLFLYAGFYFFPKLPIPKGGSGLLYFGYKLFAPFPFWGPPGAMGFYPCFCFPKLFFFFVKIA

SEQ ID NO: 333248 - protein, 122 aa, Zea mays
  Clone ID: MRT4577_67035C.1.pep
HDVRPRVRKVNNLPETEKPSLGLRRRRCSLDINVLNAMVSIYGKNKMVKKVEEVLSLMMENSINHSAATYNSLMHMYSRLGDCEKCESILTEIKSSGMRPDRYSYNTVIYAYGRKGQMKEAS

SEQ ID NO: 333249 - protein, 78 aa, Zea mays
  Clone ID: MRT4577_67036C.1.pep
SRVRGRVGDRGRDAWALLCYLNPELRVLLYRAVCMFFFLPSCLLQGKRDGRFSRETRRGQTIHSPHVSAHPRQLKTCS

SEQ ID NO: 333250 - protein, 83 aa, Zea mays
  Clone ID: MRT4577_67037C.1.pep
SGGWCCWPLGWCYSPLSSLDRFKPPPVLVVVAWSPSQSIPWSPHPDAGASPQSCHAIVFSAGTNVACYESVPLQCSRNLVCKR

SEQ ID NO: 333251 - protein, 40 aa, Zea mays
  unsure (1)..(40): unsure at all Xaa locations
  Clone ID: MRT4577_67038C.1.pep
LVAEQIKKRQEXWHFPTYVSLYSSGPWSHFLCLFCQQYLP

SEQ ID NO: 333252 - protein, 49 aa, Zea mays
  unsure (1)..(49): unsure at all Xaa locations
  Clone ID: MRT4577_67039C.1.pep
KRIEKSEGXRATRVYXLWTIAHFKGRDGQGGRSLWASGIILIRTRKGIG

SEQ ID NO: 333253 - protein, 89 aa, Zea mays
  unsure (1)..(89): unsure at all Xaa locations
  Clone ID: MRT4577_6703C.1.pep
MARIIHTALKSTGGKVPXKQLAHFAVMNSAPTTGGVKNPHMYMSIALALREMCTVYNITELLIGMLPFHRLFPEISHDFITDLWFHSHA

SEQ ID NO: 333254 - protein, 140 aa, Zea mays
  unsure (1)..(140): unsure at all Xaa locations
  Clone ID: MRT4577_67040C.1.pep
HXQTQQLLDPKPQHVRHMSNLVIYYCRSFTKEPGDTGRGRSMHSCCAADSGGREVVRDGGTDEPEGEVAGPCAGGGGASASTRAAGHMSRTRRRLLTSHPSAPRHPCISGSLHLPQRRRRTLLLAELRRRVAPPSPDHRH

SEQ ID NO: 333255 - protein, 32 aa, Zea mays
  Clone ID: MRT4577_67041C.1.pep
KCRVSSPTSDPLKENQQFNKISGGCGVDSQAA

SEQ ID NO: 333256 - protein, 66 aa, Zea mays
  Clone ID: MRT4577_67042C.1.pep
SQRTAAPKSAKALGWYQAASPGEPARALAKDEGAQRPAGPGAAAAAPADDAQEDHDLDRIGEETDE

SEQ ID NO: 333257 - protein, 106 aa, Zea mays
  unsure (1)..(106): unsure at all Xaa locations
  Clone ID: MRT4577_67043C.1.pep
GRAGHGHGQGHQLPTVPHCGAALHLSELSSSSPVEEGWVDTTAVCFNCRNTGMRLHGVQNPPHAVFRAVTFGWNEGEKLAILPAEFSYKINIYVVPIGEKENHXMQ

SEQ ID NO: 333258 - protein, 81 aa, Zea mays
  Clone ID: MRT4577_67044C.1.pep
DRGSAALLSTFSRPAPCTSRLYIHPRSPMPSPPPSNTSLSDSLALTDSNNSSNDNLLFPCLQPYCNILNLSLDFSPTYISA

SEQ ID NO: 333259 - protein, 72 aa, Zea mays
  Clone ID: MRT4577_67045C.1.pep
MELPVAEPGTERGEGPLIQCPYCDSEAMHKLAQILLPGLAAVCVDGTTGDPFHSPAVVAVDLRREMVDYITQ

SEQ ID NO: 333260 - protein, 335 aa, Zea mays
  Clone ID: MRT4577_67046C.1.pep
MYISSEKLENAAELLGTAPSRVQVPGLITKQAATARMELPVAEPGTERGEGPLIQCPYCDSEAMHKLAQILLPGLAAVCVDGTTGDPFHSPSVVAVDLRREMVDYITQRSESFIADALIESEANQEGPDAAVPDDPFEAVSVFMDDFGSTKRNIIGHVSGWLLSDSRDDKIDDLVQEMEATRFWPLERREAVAETLLKNVDLRTRFHCPEKYESEARLADHKQQCSFRPVACPYKPLQCEQGCEKRLLRRDMDRHCVTVCPMRPMKCPFGCDSSFPDRDLEKHCAQFLRPHLIKVLKAIHKKARSEDELKDLALKLEKVRLLTHTFVNELNIHCF

SEQ ID NO: 333261 - protein, 65 aa, Zea mays
  Clone ID: MRT4577_67047C.1.pep
SLINSFLGATVQKSGFSSVPKKVVGVNGPTVTRISGMNKLDNNGVKEVFVFLTTALTGVACTNIF

SEQ ID NO: 333262 - protein, 134 aa, Zea mays
  unsure (1)..(134): unsure at all Xaa locations
  Clone ID: MRT4577_67048C.1.pep
MGSSASLDPRARTQPRPRKTDSASPDPRARTLPRPRKMDSASPDPRARTLPRPRKTNSASPDPRARTQPRPRKTNSASPDPRARTQPRPRKTDSASPDPRARTQPRHRRSLRLARPXGSDPPHHREGHHYPTPS

SEQ ID NO: 333263 - protein, 66 aa, Zea mays
  Clone ID: MRT4577_67049C.1.pep
LELTLIKCGADLSKALSRNLALFADATIITRTANPMNELNIDHSIRSIMSHELATPYGSFKSLDHT

SEQ ID NO: 333264 - protein, 145 aa, Zea mays
  unsure (1)..(145): unsure at all Xaa locations
  Clone ID: MRT4577_6704C.1.pep
RQCKTXSLRFKCQEEHRAHMDWHVTKNRNSKNRKKSSRKYFVTAVEWLRAAETVGNDGVPAFVLSDPVPDRQEEKEIAVPADEEQTSCALCQEPFEDFYSDETDEWMYRGAVYMNAPDGNIDGLEWSQLGPIVHAKCRSGPGNTS

SEQ ID NO: 333265 - protein, 204 aa, Zea mays
  unsure (1)..(204): unsure at all Xaa locations
  Clone ID: MRT4577_67050C.1.pep
KCTPPHGKYMACCLMSRGDVVPKHVNAAVATIKPKRTTQFVXWSPPGFKCGIXSPPPSVVPAGALPKVQRPVRMISTSPSVVEVFSRIPHKXHLMYPKRAFVHWYVGEGMEEGEFSEAREDLPALEKDYEEVGPEFHEGEHPPQGHEXYTSHWRGVGLVSHCSPVISPEWLLSCYVSVGSYLSVVVWFTPPVVTLYSPPPPLPY

SEQ ID NO: 333266 - protein, 120 aa, Zea mays
  Clone ID: MRT4577_67051C.1.pep
IDKHAKVGRGRGSSEVEVESGPWGRARRSSSSDVEAESEPWGRARRSPSSEAEAESEPWVGRGGVRLPMSRLSPSPGVGRGGVRLSGSRLSPSPGVGRGGVRLPMLRLGPSPGSGEAELP

SEQ ID NO: 333267 - protein, 164 aa, Zea mays
  unsure (1)..(164): unsure at all Xaa locations
  Clone ID: MRT4577_67052C.1.pep
CPPRHGKYMACPLMYRGDVVPKHVNAAVATIKTKRPIQFVXWCPPGFKSGIXSQPPSVVPAGDLPKVQRAVRMISPPPSVVEVFSRIAHKFHLMYPKRAFVHWYVGEGMEEAEFSEAREDLPALEKDYEEVGXEFHEGEDXDPPTSITRFTGAASSGLCPPAIL

SEQ ID NO: 333268 - protein, 30 aa, Zea mays
  Clone ID: MRT4577_67054C.1.pep
DASHLDTTKRFPRHSEPTLLLLAHHHPTYH

SEQ ID NO: 333269 - protein, 84 aa, Zea mays
  Clone ID: MRT4577_67055C.1.pep
KDQAERGMNLGYSDARGSDDSVQRLLVMMRLKTIMRKSSMNHVWHEELTVTVTDTIITLKMEVLYKDTFITDDTTMDSDIDMTP

SEQ ID NO: 333270 - protein, 72 aa, Zea mays
  Clone ID: MRT4577_67056C.1.pep
VGVALLIKGFAIKGFGFENLAVSARQLILVRSLILPPRLHTLCLPALYVVWGCDRRKVLDIKGYAHDSPRCP

SEQ ID NO: 333271 - protein, 124 aa, Zea mays
  Clone ID: MRT4577_67057C.1.pep
NWHARRPKYLDVSLSQVLATSPVSFAPPANTRVVFQASRVSSTVTSSTHELFSIISTYCIPGRSALCGHKILSSRWVNTSSVGGIVVVAITSSQSNVVEAFTVIAWKSTKPTRYCALVIKKALE

SEQ ID NO: 333272 - protein, 95 aa, Zea mays
  Clone ID: MRT4577_67058C.1.pep
PHIRPLLLLFLVRQRPPLSLCSLILSFVKGFLYISSYTYTFSFHSYINPLLSLIINTFYSNTDIFLRELITNYSYAFPQIIPSSTTNTFKPNTHK

SEQ ID NO: 333273 - protein, 127 aa, Zea mays
  Clone ID: MRT4577_67059C.1.pep
PSRLAGATLRSAEPKPPRALAPRAQFGDPPPHRIRSPAPAPATCDPSLMATTSARRPSGPVLSAAHYRSASPTRVSLAGQPVSVSVSSSSRGRRTCMCSPTNHPGSFRCSLHKERVKYLTHKFRTNN

SEQ ID NO: 333274 - protein, 113 aa, Zea mays
  unsure (1)..(113): unsure at all Xaa locations
  Clone ID: MRT4577_6705C.1.pep
PGQFIHLPPVXHGEXISMLDIPKCLYYAIARSERAAGKGKPIAGAVEGPAQHWGTSVSGPNNFIGTLXERMFRPSLPTIISXNSKVVIIFLYQMKGPPGHSYNLRGQLKQPNA

SEQ ID NO: 333275 - protein, 133 aa, Zea mays
  Clone ID: MRT4577_67060C.1.pep
MAVPLLTQKIVKKRVKQFKRPHLDRYKCLKPSWRRPKGIDSRVRRKFKGCTLMPNIGYGSDKKTRHYLPNKFKKFVVHNVSELELLMMHNRTYCAEIAHNVSTKKRKEIVERAAQLDIVVTNKLARLRSQEDE

SEQ ID NO: 333276 - protein, 114 aa, Zea mays
  unsure (1)..(114): unsure at all Xaa locations
  Clone ID: MRT4577_67061C.1.pep
RTAGGGTGSXGPHGRRGGPXEKKGNHQPADSGTNPANEDNTSTEDNAXPPXXKAXRGGGADXAHXXQKXRXKXADTAXEXKKEARREXPEATAHRAQADSRDEPQASRPNGAED

SEQ ID NO: 333277 - protein, 66 aa, Zea mays
  Clone ID: MRT4577_67062C.1.pep
PGTKNWPKNQTFWSVIQNMHAYHRRDQNSCVPPLFHHSCSQNSAFPRGRRLRLYTCSINWGIRRRG

SEQ ID NO: 333278 - protein, 60 aa, Zea mays
  Clone ID: MRT4577_67063C.1.pep
KWILNLKNPGGGTSPFCLKSSPRGWADFFNTRAQKVNGKTHPLSPPGVGFGPLLPLFFPP

SEQ ID NO: 333279 - protein, 45 aa, Zea mays
  Clone ID: MRT4577_67064C.1.pep
RPRTRGKRKNKKKKKKKKKKKKKKKKKKKKKKKKKKNKKKKGRTF

SEQ ID NO: 333280 - protein, 105 aa, Zea mays
  Clone ID: MRT4577_67065C.1.pep
LRHDFVRKHADVDGIATYASAWTAHASLPADVECEFAFLQVRRAMLVCRVVAGRVARGPANDKAAYDSMVPVRGGVGGGTGDDVELLVYNPKAVLPCFVILYSIS

SEQ ID NO: 333281 - protein, 60 aa, Zea mays
  Clone ID: MRT4577_67066C.1.pep
RYIFLVSDCHRHQWGDTFSIVDLSRSRIVIGVNLSLNIHALISIYIGPEDLDGCISVREP

SEQ ID NO: 333282 - protein, 69 aa, Zea mays
  Clone ID: MRT4577_67067C.1.pep
MRVCGKGDGCGSDARRVRRQQSEAKPFVVLFVCLGKMCADPAAEAVVRTLVRKHGRDSGFLIESAGTIG

SEQ ID NO: 333283 - protein, 130 aa, Zea mays
  Clone ID: MRT4577_67068C.1.pep
EADGVEVRVRQVSNSFPLGACIMRTNMDNEDFVDFFTKNFNWAVFGNELKWYWTEPQRGQFNYSDADDLLRLCSDHGMCVRGHCIFWEVDNAVQQWVKTLSTDDLSAAVSNRINGLLTRYKGKFKHYDVN

SEQ ID NO: 333284 - protein, 39 aa, Zea mays
  unsure (1)..(39): unsure at all Xaa locations
  Clone ID: MRT4577_67069C.1.pep
PSPMRSPALGDPERPRETGSFHRQGAVVVSXQCRTTSAS

SEQ ID NO: 333285 - protein, 122 aa, Zea mays
  unsure (1)..(122): unsure at all Xaa locations
  Clone ID: MRT4577_6706C.1.pep
FTDFVQKAFFFFPQIVGRFKKKGPNVPLVLXINGKGGFLEGIKNPGVYVFGLDWPVDMTYGRRPLGNGLSVQGNVGPAFLFSPFPGLADEIHRLVKAQKFPFNLRYFGFLLKAHGQFINEIP

SEQ ID NO: 333286 - protein, 66 aa, Zea mays
  unsure (1)..(66): unsure at all Xaa locations
  Clone ID: MRT4577_67070C.1.pep
MHDKVALSPHXXTVSGSLWILSKSTLVQSCAICFYPAWAVYVGLWELRPSRQYSLRLMPFHKFCPE

SEQ ID NO: 333287 - protein, 133 aa, Zea mays
  Clone ID: MRT4577_67071C.1.pep
LGPSRPAGTALRVICRRELTTRPGLSRDPMGHRDLDALALALPLALCCDSRSHGRAQRRGKPALRCARTSWRTPTPTMQSCDLHSTMRTCICLHISLSSSSDDVVRHGLCINSEPTACLTYGACSIPPAYQST

SEQ ID NO: 333288 - protein, 51 aa, Zea mays
  Clone ID: MRT4577_67072C.1.pep
KNTRFMWLLLSRVYSTTTSGGLIACLRRSHFTLPTPHDNIRDDRAHPYNCS

SEQ ID NO: 333289 - protein, 58 aa, Zea mays
  Clone ID: MRT4577_67073C.1.pep
DNHPFFFFVFFFFFFFAEWCVDSAKRGNPRGSVRAYSLANCLNSGSLKSNAFADLTDF

SEQ ID NO: 333290 - protein, 82 aa, Zea mays
  Clone ID: MRT4577_67074C.1.pep
VFFFFPAPSKMVPCKLVLPGVRKRHSHFPKVVSNFDGLKMPPGLVKIFRINYHFIKAERKGLFCLFSSKNVGWTREKFNVFY

SEQ ID NO: 333291 - protein, 94 aa, Zea mays
  Clone ID: MRT4577_67075C.1.pep
GPPAHPPRGRNGGPSQIDTATAASNDDNYNTLLPHADPRNSSNYHLGRALVTRATHHTCNYCATIPDYYSATAQYLISITNNLILYYWVGRRSI

SEQ ID NO: 333292 - protein, 44 aa, Zea mays
  Clone ID: MRT4577_67076C.1.pep
HLIPRRNSQPSKHFKQGGMGGVTHQRERVQDCSRRRELRSPDPC

SEQ ID NO: 333293 - protein, 84 aa, Zea mays
  Clone ID: MRT4577_67077C.1.pep
QYALHLSVRHIHPSVVLSSSLIHILLHQGQPSSVRPRFHAPACAPLICSRCASVNPFKNPWLYSSTPDSSPPIRPRSTTLSEKT

SEQ ID NO: 333294 - protein, 473 aa, Zea mays
  Clone ID: MRT4577_67078C.1.pep
MHMMRRLKSIASGRSSVSDPGGDSGSKRPKFEQDGAGDIVMEPHLTKDKPVRIDQESSSSSNRDAEASTSTSMKPVKTEEAGADLLPKEMNIMTISDDKADGHNDKEGEGVTLDGTGTETGQIIVTTIGGHNGKPKQKVSYMAELVVGTGSFGIVFQAKCLETDETVAIKKVLQDKRYKNRELQTMQLHDHPNVVQLKHHFFSTTQKGEVYLNLVLEFVSETVYRVAKYYNRMNQRVPIIYVKLYAYQMCRALAYIHRVVGVCHRDIKPQNLLVNPHTHQLKICDFGSAKKLVPGEPNISYICSRYYRAPELIFGATEYTTAIDIWSVGCVVAELLIGQPLFPGESGVDQLVEIIKILGTPTREEIRCMNPNYSEFKFPQIKAHPWHKLFGKRMPPEAVDLVSRLLQYSPNLRCTAVDACAHPFFDELRDPKACLPNGRPMPPLFDFTAAELEGLPAELVHRIVPEHMRKEVN

SEQ ID NO: 333295 - protein, 60 aa, Zea mays
  Clone ID: MRT4577_67079C.1.pep
DLEIKWVAVPERQPMRLYSSLWNADDWATQGGGVETDWSHGRFCASYRCFNAWACDAVAG

SEQ ID NO: 333296 - protein, 113 aa, Zea mays
  Clone ID: MRT4577_6707C.1.pep
LSHPYGLGLSHHQRSDIAHPYGLGFSHHQRSDKLNTASYVERIRMRPDVGNSVNFFDLSSYARLLNSPFLSSQSDTYKSIDEVMGRVCMLSKDQDACRFLQKLLSDGTQEDIC

SEQ ID NO: 333297 - protein, 225 aa, Zea mays
  Clone ID: MRT4577_67080C.1.pep
MQMPPHQPYGCISYQVEGDNHYMVTSFSLNNNKVPTTASGMEEIMASCKHDFALNIVKNGTQVSEIKTYKKEGSRWTHWEELRNIEGFVAMGDSVVSGNPIFGQGMSMASEASLVLDDLLREQGYNATFCSEFQQRLSHVLTAPWILANTSDLQFKGTTGGSSVLRAFIPILKRGMDHQFLMGAKDQDYAIDFNHVMHMTKGWLKRLLIPLPIRNALGYKVSETL

SEQ ID NO: 333298 - protein, 195 aa, Zea mays
  Clone ID: MRT4577_67081C.1.pep
QSTVDRRRRAIEELIRVVRRGGLVLITVWAREQEDKSLLNKWTPLCEKYTEEWVEQSSPPVRSKSGTLLESIAETDEDAGFTKQTDDRLKNCHGEVEDKTIDCSNSKTDENEKNQQEYFVPWHLPFHRAEIGGASAALENGFAKKDEKKGTVVYNRYYHVFVEGELQRLVSGIKNAAIIDQFYDKSNWCIVLEKL

SEQ ID NO: 333299 - protein, 80 aa, Zea mays
  Clone ID: MRT4577_67082C.1.pep
FRSNCRDGFLLISIQVTEQQTYTCHLLWGTIAGLVGTITISCENAQCIGIPNIKGPISYGYRTRGQASTTVRIDWLKPHS

SEQ ID NO: 333300 - protein, 112 aa, Zea mays
  Clone ID: MRT4577_67083C.1.pep
IFSPPKLFFLNKGSGLGSFGALLFPELLRNLWVFLLCAPGWAAPVYPRVGFFFGETCAQISLFAGPHSFWNFFVLSPPFFFAPCIFFDGPLLGGPPPKSPKTLFSFIPRVSC

SEQ ID NO: 333301 - protein, 307 aa, Zea mays
  Clone ID: MRT4577_67084C.1.pep
RIPGSTHDVRPRVRPRVRLRALGAPPIIVALAAQGAFRGFLDTRTPLYAVGAGNLLNALLDVVLIFPLGLGVSGAALATVTSEYLTAIILLWKLNDEVDLLSWNIIEDGVIRYLKSGGLLIGRTIAVFLTLTLATSLAAREGPVPMAGYEICLQVWLTISLLNDALALAGQALLASEYAKGNYKQARTVLYRVLQVGGVTGFVLAASLFVGFGSLSLLFTDDPAVLDVARSGVWFVTISQPVNAIAFVADGLYYGVSDFAYAAYSTFFAGAVSSIFLLLAAPNYGLGGIWAGLTLFMSLRAVAGFWR

SEQ ID NO: 333302 - protein, 37 aa, Zea mays
  Clone ID: MRT4577_67085C.1.pep
WLEKPRPAMAYMTHSEKVLSATRPATRHRWPGATCRS

SEQ ID NO: 333303 - protein, 93 aa, Zea mays
  Clone ID: MRT4577_67086C.1.pep
LYHWRQPPRAQPRAGEARGRRPRAAPSKPTAEAGPHFGSKPSAVPSSRAGIRNNRLPTETRRQRACPPGRVRGLNRTDKVQPPRAGTQGRGSQ

SEQ ID NO: 333304 - protein, 109 aa, Zea mays
  unsure (1)..(109): unsure at all Xaa locations
  Clone ID: MRT4577_67087C.1.pep
PQQLDTNSXPGLGQLYQGXTMLTFQGPKTTPPSAIARNIRSLPFQTCNYHIPTVHRQTTSSEGRMLPIVSGSIPSAPEXHHIKYSHRIXLLAPTGTFFVTTDMCRLNYR

SEQ ID NO: 333305 - protein, 77 aa, Zea mays
  Clone ID: MRT4577_67088C.1.pep
IDPKRAKALKGKEPPKKVFVGGLSPDTSEEQIKEYFGAFGEIENIELPMDTKTNERRGFCFITYTDEEPVKKLLESR

SEQ ID NO: 333306 - protein, 99 aa, Zea mays
  Clone ID: MRT4577_67089C.1.pep
FFPVAAILFFFRRSQGLKISIQQIKARIYMCYGQGRSSQSRTTRRPIFKQKTLDGRTFLSTLIYTADRLTAPIHVRYPRLDGRMPLNLKRRGNMLRPWA

SEQ ID NO: 333307 - protein, 69 aa, Zea mays
  Clone ID: MRT4577_6708C.1.pep
DKLWHHEFKTQFRQDFAHGIGSSIFGAITFTARKNSDVLRKRARSNHRNRISNSGADPSQQVCRIQYEP

SEQ ID NO: 333308 - protein, 495 aa, Zea mays
  Clone ID: MRT4577_67090C.1.pep
MTTPCLGAAALSASWTARSLTGAFLDLTLAWACLCLAALAAAAARLLTLLGLPLPCTCARPHLPCLLAFLARYPPRAVGSLHAALRARFPFAGPTDDEARLQKGVEEEGEEEAIDVRKEEGDFRRRVEARAELQMELEKERSAAASAAEEAMSMILRLQKEKSALEIEARQQRRTADERCAFYEDEVEELRDIVLVREREVRALRKEVDAYRRLLGFSATEEDEEEDDEQEMVTPHSFPMYEGEPSSSKSVDANRMQHFGNDSGFSFKTPSPREQPTVPPLTAGQINVGSDDCVAVQTPAKVPVVQSRLELDSSEDEDEDEDDGAETVEILPLSARSQDLDQGSHFHADTAQGMESTCTKEQTAHAFQEVECPGIDKIVNDQIGSKNDANVYDVHVVDDMRFSTEVKGLIGRSFSEATMQAERLQSRAVADDLLEKSLNAIKGAQDKIRNAANERRQSLQLQLLEDIADQLQGIKDAAEAGRQVFCAAPKSSKRS

SEQ ID NO: 333309 - protein, 31 aa, Zea mays
  Clone ID: MRT4577_67091C.1.pep
RCDVGASCEQYLVLSAGVWRQAITPNIIPTL

SEQ ID NO: 333310 - protein, 213 aa, Zea mays
  unsure (1)..(213): unsure at all Xaa locations
  Clone ID: MRT4577_67092C.1.pep
MPHSRLKWRKRKLNPDASPSKPSISTAAADHSSESGSAALNDDEDPSALGATGDGATDNDADAAASEDPAVDLREAEVLPSADAISSFPAAKRRVVNRPHASILALLEAERSACSGDVPTVALPALENISHGQLQVLSGVLPDHPSLATDPDKPSLYVCTPPPLMEGHGVPKQFQGRLHVVPKHSDWFSPGTVHRLERQVVPHFFXGKSPGHT

SEQ ID NO: 333311 - protein, 185 aa, Zea mays
  unsure (1)..(185): unsure at all Xaa locations
  Clone ID: MRT4577_67093C.1.pep
LVNRSFDDIKLRQLLLQDKLVIFLHLLGCDTNGHAHRPYSSIYLNNVKVVDQIAESVYNLMENYFNDNQTAYVFTADHGMSDKGSHGDGHPSNTDTPLVAWGAGIRSPKFLAYTEKPDDGFRFVDNHKHDTPTPKDWALEGFERVDVNQADIAPLMATLXGLPCPMNSVGSLPTPYLKLXEADEV

SEQ ID NO: 333312 - protein, 115 aa, Zea mays
  Clone ID: MRT4577_67094C.1.pep
PPKKHAHFIFLGVHNSRLNNGGPIKRGHKGGNRDFDPNPWVPIGGFALSNNPHEKKKSGFDLTGEGRLGQPDVLRRGGGFPFGRGKGGSHRGIKRVKYSGEPSQGLGQQANKKLF

SEQ ID NO: 333313 - protein, 107 aa, Zea mays
  Clone ID: MRT4577_67095C.1.pep
LSLDLFSVSLSSCSSSLDLPHIKSISVFWLLASFPAYACISCNVNVLIVHRRCRSWTSLAFGSCYVITVPRSLLRGVRYQKVYRFPCTRPDCEIGIIGYNAVLSACA

SEQ ID NO: 333314 - protein, 94 aa, Zea mays
  Clone ID: MRT4577_67096C.1.pep
MDPKGKGIVINDKEKESFVNEPKDDKPTDSGLGHKRKDGKKKKTRRIKEIVYYDDSDESSSSQKDNDDNDYEKKKTINSNFSFDYSYKSYKIAL

SEQ ID NO: 333315 - protein, 55 aa, Zea mays
  unsure (1)..(55): unsure at all Xaa locations
  Clone ID: MRT4577_67097C.1.pep
LNSMALANKGGNVLIVLNEPQHGTKRRSQIQTLLDHHGGPGVHXHCALASYDVLT

SEQ ID NO: 333316 - protein, 96 aa, Zea mays
  Clone ID: MRT4577_67098C.1.pep
SYPCSLMTGGHTDASWCRILKTSAGRRCQHIGPTAIARRRTKDTRSLKTRGNSSPLSASGGTTEDQRALVVREAAGEAAAALLFIPEREGLRSAHG

SEQ ID NO: 333317 - protein, 66 aa, Zea mays
  Clone ID: MRT4577_67099C.1.pep
FPFNQLIMWNFVGGLQQGQQFFNPLAGGNPLVGAFLQQQKLLPNNRFFLKKPVLLRQQPLVGGAIF

SEQ ID NO: 333318 - protein, 35 aa, Zea mays
  Clone ID: MRT4577_6709C.1.pep
SLATMRYLQHLPLYEASCLTLTLPLPGRGCQRTRK

SEQ ID NO: 333319 - protein, 61 aa, Zea mays
  Clone ID: MRT4577_670C.1.pep
KCGNKYPNLKETSTAAKATVVLGVAPDKKTAPEFVEATAESVETANGCTSGGNCKFDPCNC

SEQ ID NO: 333320 - protein, 110 aa, Zea mays
  Clone ID: MRT4577_67100C.1.pep
GPGKKKIKKKKKTSLRPAHHISDLDLHGCSDQKYSSLNKKQCNRDLGYLAILCLAMHPIVAVPGPDLNSPLHYTGPTQRAPHRRARRCPVMTPHPRTVRAKLRSARPTAM

SEQ ID NO: 333321 - protein, 264 aa, Zea mays
  Clone ID: MRT4577_67101C.1.pep
TVRVKETRLKLFKDFFLEERKKLASTKATDSNGLKCAIDHILEAQQKGEINEDNVLFIVENINVAAIETTLWSIEWAVAELVNHPEIQQKLRQELDTVLGPGHQITEPDTHNLPYLQAVIKETLRLRMAIPLLVPHMNLHDAKLGGYDIPAESKILVNAWYLANNPDSWRRPEEFRPERFLEEEKHVEANGNDFRYLPFGVGRRSCPGIILALPILGITIGRLVQNFELLPPPGQDKVDTTEKGGQFSLHILKHSTIVCKPRTL

SEQ ID NO: 333322 - protein, 69 aa, Zea mays
  Clone ID: MRT4577_67102C.1.pep
KTFIIIYSLDIAYNSFFCLFNFEHFLPCMTNKHIFIHQAVPVLLRFNTSKHDFLIVDSYVTLCPNACKL

SEQ ID NO: 333323 - protein, 91 aa, Zea mays
  Clone ID: MRT4577_67103C.1.pep
SVDVYGAAAVSENNLVGRVELDYFSFTLKWSKVSKLHTILVQVVLLNYFFDCFFFAFFLFCILGAGPSIACGTPLGHNSMLRSLRLCLFTL

SEQ ID NO: 333324 - protein, 71 aa, Zea mays
  Clone ID: MRT4577_67104C.1.pep
MGQIQNIIHFLMPMHSYMLTDFSLNPSPHYYPYPNACAWMPMLPMAVGIGGDCRCPAPERGCTACTALAPP

SEQ ID NO: 333325 - protein, 113 aa, Zea mays
  Clone ID: MRT4577_67105C.1.pep
MAQPTTSAMVPHAFVAFPDFDVEEKDLDEVPVNNDIFKKDVMVVSPTFAIELGGQDGAAFVSEVDGEAIKFIGKYSVKIELTKSMYIRGGNIQLNRAFELNGLEYGPYPEDVE

SEQ ID NO: 333326 - protein, 171 aa, Zea mays
  Clone ID: MRT4577_67106C.1.pep
RPGHECYCKTLSEQKKKKKKKKKKKKKKKKIFHSHPSLFPSRHNTSPSPPSSQHTHPPCLLLPRCSRHQQQPAQDLQGRQQPPMAAQQPSAQLIPSPASPLFHGRGPPPPCLDVGRAPLEQALRSHGVDSIFPGAAASSLPWGLHLPARPLTHGAGHSPLTEPPGTSMDAP

SEQ ID NO: 333327 - protein, 126 aa, Zea mays
  unsure (1)..(126): unsure at all Xaa locations
  Clone ID: MRT4577_67107C.1.pep
EALVAAGTALPARHSWARSVPVGLDAPTAPKDAHAPDVEIREVWASNLHEEFEVIRDIDDAYTYVGMDTEFPVYVEQPIAXYRFTCDRIYAGLHGNANVLKLIQLGLTFSNEACTLPPCGTLGQCC

SEQ ID NO: 333328 - protein, 97 aa, Zea mays
  Clone ID: MRT4577_67108C.1.pep
MGRPKGGAASSSKKPKAKQKQRGGVDFKKYKHKVGRKLPPPKNATNTEIKSKTIVLPEQSMASERTGMAVNKRGLTLRELLQQTGHYNANVRRAALN

SEQ ID NO: 333329 - protein, 113 aa, Zea mays
  unsure (1)..(113): unsure at all Xaa locations
  Clone ID: MRT4577_67109C.1.pep
NSNRGGEXKQXAPXXKGXXRRSXXAXRGXXENXXRXPEGXXXXRPXKXNXXTXXXXXXXXPDXXEGEATRKXGXSAENXXSTSXXXXXXRXRXXXXXXHKGQKQEEXXAERXH

SEQ ID NO: 333330 - protein, 43 aa, Zea mays
  Clone ID: MRT4577_6710C.1.pep
LWSSNKRRRIYYEELRIRFMVGPTSGMETCTSSFNTYDSFSQA

SEQ ID NO: 333331 - protein, 70 aa, Zea mays
  Clone ID: MRT4577_67110C.1.pep
GAHDCTLPTKQEIQASVFDYLGIAGLRYGCLILSEGRFFVTVLDRFGHDGNINIDTYHHGSKLAVIFINL

SEQ ID NO: 333332 - protein, 237 aa, Zea mays
  Clone ID: MRT4577_67112C.1.pep
HASDFEKASTICAESEVEALGGVEGSTLEQLSARIKKLKQKFQQESRRYTETIDDLRALHDKKGQKILRKQQMYSGFRDKLNACQKALDLRWKKFQRNAGLLKRQLTWLFNEHLGKKGISGHINVDYKNEVLSVELTMPQDASRDTIRDTRGLSGGERSFSTLCFTLSLHGMAEAPFRAMDEFDVFMDAVSRKISLDTLVDFAVAQGSQWIFITPHDISMVKAGDRIKKQQMAAPRG

SEQ ID NO: 333333 - protein, 46 aa, Zea mays
  Clone ID: MRT4577_67113C.1.pep
FVYIRDSPHERSAPLETGPLIKTVFDYCIHHEYTNIIPSQENKSIY

SEQ ID NO: 333334 - protein, 283 aa, Zea mays
  Clone ID: MRT4577_67114C.1.pep
MAATAVTLPSSGTPFAVATTASSSSARRCLLLPSAAPRRALRVVASAATEAPPKPTQPPTSPSGIVLVDPSEAQRVHRLKAVYDQKVVPLITEEFGYTNVHQVPKLEKIVVNCGLGAEAGNSKGLDAAMKDLAMITGQWPVKTKARKSVASFKIREGNTIGIAVTLRGRIMYNFLDRLINLGLPRTMDFLGVNPNSFDGHGNYSLGLRDQGVFPEIPYEVGGKKNGMDVSIVTSAKTDNEAFRLLVLLGMPFSENIKTDVVIRKKRLKRHHFLSKGKGKGGRR

SEQ ID NO: 333335 - protein, 199 aa, Zea mays
  Clone ID: MRT4577_67115C.1.pep
PAGVKALVDIGFLSTDEQDFFKQSIPWKDALQKFIGANSSSEEDLTKAILSKTSFKDESVKNQVLAGLKWIGVFSDVKTTPRGTALDTLCASLEQKMAYEKGERDIVFLQHTFEVINKDGSQNTWTSTLVEYGAPEGSGGFSAMSRLVGVPCGVATKMVLDGTITDKGVVAPVYPSLARTLMNELKNNYGIECKEKIIA

SEQ ID NO: 333336 - protein, 75 aa, Zea mays
  Clone ID: MRT4577_67116C.1.pep
FGSSWSRLVFLRADGHVGFQSRPKTTTPIKWLEQKLAPRYLYNMSQDRKILMMSMLPNITARKCYMCPLVCYQMN

SEQ ID NO: 333337 - protein, 37 aa, Zea mays
  Clone ID: MRT4577_67117C.1.pep
SFRGLLFSEHSAMAETIQSVNARHIFYTCRDPTCGVD

SEQ ID NO: 333338 - protein, 56 aa, Zea mays
  Clone ID: MRT4577_67118C.1.pep
GMNVISCSLCCVSFYVALGCQCGANEHRFHSAGLKNNRLMNRPCRVELSYFLWWKN

SEQ ID NO: 333339 - protein, 71 aa, Zea mays
  Clone ID: MRT4577_67119C.1.pep
LQVIIQGMHSSHSSDKSTTKIIKKKSREGHCLLKTKDWTKKVKITVGRSSASSVLCDSEGHGGMGAQGCAI

SEQ ID NO: 333340 - protein, 176 aa, Zea mays
  unsure (1)..(176): unsure at all Xaa locations
  Clone ID: MRT4577_6711C.1.pep
QECIPIHIXQAGIHRINSRWELYWLEHDIQXDGHMXPCDKTIXGRGDDAFITFFRDTEAGKHVPRXIFVDRELNVLHELRTETYRQLFHPDHLILEKDDDCNQFARGQYTIVKEIVDLXLDRIRKLVENWTVLQGFLAINAVGVETSSGTXSLLLERLYVDYGKKSQLXVHCVPFP

SEQ ID NO: 333341 - protein, 239 aa, Zea mays
  Clone ID: MRT4577_67120C.1.pep
MASGELPPSKKKSAPTTISSLGEDLLCEVFLRLPSLPTLVRAALTCPAFLRVVRSSPKFRRRFRDLHPAPLLGVFLDIYDPGMPAFVPIRRRSDPDHAAAVRGADVFLTRVPDLEAEEEGGAEDEGEGEDEDENIGWSMTECRDGYVVLVNRTVGRIIKRVAVYDPLTRGLHLLPAPPGDPEETEVEFHVVTSDEDRRSLRVICICKERKKVRVVVFSPDSKEWQISPKAPRLKLQADD

SEQ ID NO: 333342 - protein, 75 aa, Zea mays
  Clone ID: MRT4577_67121C.1.pep
SHSPCPLLCDPASPGPAACRGLASAVPGGRARVRVGQQDGGRASGRGIWAGPYWVSRQRRRVRTRQHPFREKVNL

SEQ ID NO: 333343 - protein, 122 aa, Zea mays
  Clone ID: MRT4577_67122C.1.pep
RHWPPLYSFLFDFALPRLPRSPPPRCPSAPPAPSRPVPRPPRPASPSAGGASVPSSPRSIARSFHWSQRSNCAICSPVITSAAIGGSSAILMHSRVIRHNSVRRRCRLHIHFLYVVLIPDAV

SEQ ID NO: 333344 - protein, 170 aa, Zea mays
  unsure (1)..(170): unsure at all Xaa locations
  Clone ID: MRT4577_67123C.1.pep
FNVGKCNKIXDELLKNVXLKKNHTVPSGDELKRRAYCKWHNSFSHATNDFNVFRRXIQSAINEGRLKFQEMQVDTEPFPVNVIDFEDKKVLIQPDMANKGKAKEVIIGDARKVDENNKISCRKVVAEKSPNGGETLKVTITTSNAGGQEQARNQARAPILRIADDPMHRR

SEQ ID NO: 333345 - protein, 53 aa, Zea mays
  Clone ID: MRT4577_67124C.1.pep
SLSKFLSNGPSLCKTDSDKLSTLLRWVLPPLAAPPKVLLTRAQNPVCQAVTSV

SEQ ID NO: 333346 - protein, 45 aa, Zea mays
  Clone ID: MRT4577_67125C.1.pep
FPDRDQRHTVACVPLKLLVQSSVSQHTWHLKGTHGTVCRWPRSGF

SEQ ID NO: 333347 - protein, 53 aa, Zea mays
  Clone ID: MRT4577_67126C.1.pep
RLVIIIVQIPLLVPFINVILMVSLKVRDHFLIVSDELIKMYSSLEWLHRKLLA

SEQ ID NO: 333348 - protein, 91 aa, Zea mays
  Clone ID: MRT4577_67127C.1.pep
PPPGTTFFSPPLLILTIYVWRQTKAWVYSAGWFFFGTAFPGLVSLGFFSFFFFFFFFFFLSFFFLSLSLSLSHLCCYALRTYINNISPFIC

SEQ ID NO: 333349 - protein, 124 aa, Zea mays
  Clone ID: MRT4577_67128C.1.pep
FALTFCFKHSMFNKTNHINLTQEKKKNGLLSADEQTQKKGGENLNTTRAPGGTKYRGEKMLPFQKKVLTRVFKPPRGKTKNPNPPLKKTKKKSPPPTKRGTSKGIHKHKGAPWTLNGGPPKKKT

SEQ ID NO: 333350 - protein, 44 aa, Zea mays
  unsure (1)..(44): unsure at all Xaa locations
  Clone ID: MRT4577_67129C.1.pep
RPXPXXXXACLXGXRRLXRWXLSARCPPXRXCRRAPXGXXXSXP

SEQ ID NO: 333351 - protein, 142 aa, Zea mays
  Clone ID: MRT4577_6712C.1.pep
GHAAVTGTPFQTPWARLVVSSSSAPGDQATPASSGAAYATPQGETATPSVILASPLPPPQMVVVALDATRDHRDDEIKTAFRNLVERGDILRARDSLLVLGVLHSITHPSEDHLWNITTCPYFTTQHIQIYSYISSHHGFLK

SEQ ID NO: 333352 - protein, 1252 aa, Zea mays
  unsure (1)..(1252): unsure at all Xaa locations
  Clone ID: MRT4577_67130C.1.pep
MASNKTTPTASGIGAGFPLRAESEVGGEGSETHLPAPLELPLDLAQVLANQTRPIEVLTRSLENQRPNGGRPQDRMGDFLRLKPPTFAGSSNPLDANDWLRTIKRNLEAIGCPENQRVQLAAHQLSGMALAWWDTFNAAIRDATWTEFETAFREHHVPQGIVQLNEDEFRELTQDGRSVSEYVHKFKELARYAPDDISTENTLALTPKAPSSISQQNKTQYQGRARVNHIDAQEAQQAPGVVLRASHSFIATSFVEKHGILSTPLEIPLVTRTPGLDLLCQLKCSQVRILLSGVVFSADLTVLPSQGIGVILGMDWLTKHKGIISCANKTILLADHQGKSVSCQAQPPANDPMMFNLATESISVVEEFMDVFPEELPGMPPEREVEFYIDLIPGTAPIAKRPYRMAPTELAELKLQIADLQQKGYIRPNSSPWGAPVLFITKKDRSLRMCIDYRSLNEVTIKNKYPFPRIDDLFDQLQGAKYFSKIDLRSGYHKLRIKEADIQKTAFVTRYRQYEFTVMPFGLTNAPAFFMNLMNKVFMEELDKFVVVFIDDILIYSKNREDHKRHLRTILGRLRAHQLYAKLSKCEFWLEKIAFLGHILTAEGIEVDPSKVEAVSKWRQPSNVSEVQSFLGMAGYYRRFIKGFSSIARPMTELLKKDNKFVWTSKCEESFQIIKDKLTTAPILTLPDIHQDFVVFCDASRQGLGXIVHALKIWRHYLIGNKCHXHRSQGSVFTDHKSLKYIFTQPDLNLCQRRWLELIKDYDLKIHYHNRKANVVADALSRKPFGIKGTNFLEDWKKESAQLNACLGNNGSLEVKPMLEDLICKAQRLDSETARLMEKARKEQLSDLRTDEQGVLWFKNRLCVPKGEAREVLLDEAHNSAYSIHPGTTKMYLDLKTIYWWRGMKKEIAQYVARCDTCQRMKAEHQKPVGLLQPLPVPEWKWEEIGMDFVTGLPRTQKGNDSIWVIIDRLTKVAHFIPVKTTFGGATLARIYLKEIVRLHGIPRKIVSDRGTQFTSKFWTSLQKAMGTKLDFSTAYHPQTDGQTERVNKVLEDLLRAYVLTFDRSWESSLPYAEFSYNNSHQASIKMSSFEALYGRKCQTPLMWSNVGEKTLEGPAFIKEAEEKVALIHKRLLEAQSRQKSYADNRQRELRFEEGDFVYLKVSPMRGVRRFQLHKCLQVPESLIEEEAIQIQKDLQYREKPIKILDSAVRKTRNSEVRLCKVQWSREGEEEATWESEDSLRREYPYLFSSPV

SEQ ID NO: 333353 - protein, 214 aa, Zea mays
  Clone ID: MRT4577_67131C.1.pep
TPSFLQATLAPPAAGKMMKALVLCYSVIVFTFFLSSITGYWAFGSNVQSNVLKSLMPDSGPALAPTWLLGVAVLFVLLQLLAIGLVYSQVAYEIMEKGSADAARGRFSRRNLVPRLLLRTLYLAFCALMAAMLPFFGDIVGVVGAVGFVPLDFVLPVLMYNMALAPPRRSPVFIANAAVMVVFAGVGAIGAFATIRKLVLDADKFKLFSNNVVD

SEQ ID NO: 333354 - protein, 59 aa, Zea mays
  Clone ID: MRT4577_67132C.1.pep
VPNCDWAHRTEIPCIYTCMHLNLHVTYTLHAHPVAYSHFSFLSSASTTLPAPSISGAAT

SEQ ID NO: 333355 - protein, 717 aa, Zea mays
  Clone ID: MRT4577_67133C.1.pep
MMFNLAAESISVIEEFMDVFPEELPGMMPERGVEFYIDLIPGTAPIAKRPYRMAPTELAELKLQITELQQKGYIRPSSSPWGAPILFVTKKDGSMRMCIDYRSLNEVFMEELDKFVVVFIDDILIYSKNRKDHERHLWIVLGRLRAHQLYAKLSKCEFWLEKIAFLGHILTAEGIEVDPSKVEAISKWKQPSNVSEVRSFLGMAGYYRRFIKGFSSIARPMIELLKKDNKFVWTPKSIVYALKIWRHYLIGNKCHIFTDHKSLKYIFTQPDLNLRQRRCLELIKDYDLEVHYHPGKANVVADALSRKPFEIKGTNFLEDWKKESAQLNACMGNNDSLEVKPMLEDLIRKAQRLDTETARLMAKALKEQLPDLRTDEQGVLWFKNRLCVPKGEAREVLLNEAHNSAYSIHPGTTKMYLDLKTRYWWRGMKKEIAQYLRTRIRTTISRSTKNAKHLRTSPQHRLTKVAHFIPVKTTFGGATLARIYLKEIVRLHGIPRKIVSDRGTQFTSKFWKSLQQAMGTKLDFSTAYHPQSDGQTERVNKVLEDLLRAWEKTLEGPAFVKEAEEKVALIRKKLLEAQSRQKSYAHNRRRELRFEEGDFVYLKVSPMHGVKRVGPAAYRLELPESMSDIHKVFHVSQLRKCLQVPENHIEVETIQIQKDLQYREKPMKILDSAVRKTRNSKVRLCRVQWSREGEEEATWESEDSLRREYSYLFSNPV

SEQ ID NO: 333356 - protein, 829 aa, Zea mays
  unsure (1)..(829): unsure at all Xaa locations
  Clone ID: MRT4577_67134C.1.pep
MMFNLAAESISVIEEFMDVFPEELPGMMPERGVEFYIDLIPGTAPIAKRPYRMAPTELAELKLQITELQQKGYIRPSSSPWGAPILFVTKKDGSMRMCIDYRSLNEVFMEELDKFVVVFIDDILIYSKNRKDHERHLWIVLGRLRAHQLYAKLSKCEFWLEKIAFLGHILTAEGIEVDPSKVEAISKWKQPSNVSEVRSFLGMAGYYRRFIKGFSSIARPMIELLKKDNKFVWTPKSIVYALKIXALPNWEQMPHLHRPQESKVYLHSTRSQPPSEKMSGTDXDYDLEVHYHPGKANVVADALSRKPFEIKGTNFLEDWKKESAQLNACMGNNDSLEVKPMLEDLIRKAQRLDTETARLMAKALKEQLPDLRTDEQGVLWFKNRLCVPKGEAREVLLNEAHNSAYSIHPGTTKMYLDLKTRYWWRGMKKEIAQYVARCDTCQRTKAEHQKPAGLLQPLPVPEWKWEEIGMDFVTGLPRTQKGNDSIWVPSDSDQTHNMKKYKECEGTFELVSEPQYQEVQRMRRLAQSRSYEQGTFGVISERGTDLKGKRLFRPRWITIESLANHLRTSPQHRLTKVAHFIPVKTTFGGATLARIYLKEIVRLHGIPRKIVSDRGTQFTSKFWKSLQQAMGTKLDFSTAYHPQSDGQTERVNKVLEDLLRAWEKTLEGPAFVKEAEEKVALIRKKLLEAQSRQKSYAHNRRRELRFEEGDFVYLKVSPMHGVKRVGPAAYRLELPESMSDIHKVFHVSQLRKCLQVPENHIEVETIQIQKDLQYREKPMKILDSAVRKTRNSKVRLCRVQWSREGEEEATWESEDSLRREYSYLFSNPV

SEQ ID NO: 333357 - protein, 125 aa, Zea mays
  unsure (1)..(125): unsure at all Xaa locations
  Clone ID: MRT4577_67135C.1.pep
MVTVSAAVGTTLADRAVIARTNVLWLPALRARSERVRGNYTKDANNAVPLTTKGAGATLLSSPAAGTASEWAALELLGERMCTEGTGXLTNSLINNLLRRNILLAFGLIWPLYIIYRSDLNEEDE

SEQ ID NO: 333358 - protein, 25 aa, Zea mays
  Clone ID: MRT4577_67136C.1.pep
MAAAGKLLLLAAAMLSATFYGDAPP

SEQ ID NO: 333359 - protein, 119 aa, Zea mays
  Clone ID: MRT4577_67137C.1.pep
PPPNSSCSHVHPIGRHQGCLELKQQQEEVQCSASISSPSSTTMRRPCRAGSRREMLWRRRRRHAWRCLFLLWFSILPWNNRNRSRRARAASDRSSVCAVQGKLNPLACTPILTMNVHDR

SEQ ID NO: 333360 - protein, 101 aa, Zea mays
  Clone ID: MRT4577_67138C.1.pep
SETPCLEIGPAQLETPAQAAATGRTFTSPISNSRSHQPPHSRARSSLQAAAAPTLRRPSGAARPASACRCSRPPPLQAAALQAVLPPGRCSPGRSRPLPRG

SEQ ID NO: 333361 - protein, 62 aa, Zea mays
  unsure (1)..(62): unsure at all Xaa locations
  Clone ID: MRT4577_67139C.1.pep
XXXFFFFFFFFWVLVLLADGFFSSLPLKFYWIMVPFVRSCKWVCRFSGLLGPVRKKETRATR

SEQ ID NO: 333362 - protein, 218 aa, Zea mays
  unsure (1)..(218): unsure at all Xaa locations
  Clone ID: MRT4577_6713C.1.pep
GIKEGSISRDGIKCMCCNELFTVENFEVHAGSSTPLPSSHMFLKDGRSLSQCLVEFMGGNKPRDPLHVRLKGSSSDLESDSICSVCHDGGDLLLCDNCPSSYHHDCVGLEVEAIPEGSWYCPSCRCGICNLSDYDPDTSQFTEKTIVYCDQCEREYHVGCTRNSDHQLICRPEGCWXCSRGCSNVFQHLQEVIGKQVPTPIEGLSCTILKFCRANGGD

SEQ ID NO: 333363 - protein, 54 aa, Zea mays
  Clone ID: MRT4577_67140C.1.pep
HPSIPSELVGFLTPHVLCIRHTFVCCSDVVRDGHLVAVILGSKVVCCAIGPSAC

SEQ ID NO: 333364 - protein, 66 aa, Zea mays
  Clone ID: MRT4577_67141C.1.pep
HHDHDAVEEYAGCPSIAELAAILGVAGYDEKAAAAGGDVGWWSTWEEPQVVCLEDVVVPTTSFHAS

SEQ ID NO: 333365 - protein, 87 aa, Zea mays
  Clone ID: MRT4577_67142C.1.pep
LLLLGLILLIHSCIHNLIHLILHINDHWTTSGSLSHLDIPNPLGLSIAMCLRIQIPCDLCRIHLVCNTMITIALLCDHTMCHIATFT

SEQ ID NO: 333366 - protein, 110 aa, Zea mays
  Clone ID: MRT4577_67143C.1.pep
STNTVHKQAGLPEVAPHCHSLRDTAPSIVCSSSHHHHFKCKASHTLSQSSAPHHSASCSLGTCIGFAAHSHIPIDPQARKMKIFSWMANKISGKQEASRFPASSSGPSRS

SEQ ID NO: 333367 - protein, 103 aa, Zea mays
  Clone ID: MRT4577_67144C.1.pep
SAVIVRQGRRQVLFARITRSILIRHSVVQDAPSLANERARVRPPVAKAARTEYNWRERDTRRAATAHGWCGGGGARAAETSPLLVLCDLSVAGDLAARASSAR

SEQ ID NO: 333368 - protein, 172 aa, Zea mays
  Clone ID: MRT4577_67145C.1.pep
LGCSTCMLLTCMLLPAHRRRPTVHQHVAQCLPVHRRQPTGAGAQLYMYRTALQLGEMMREQTKFGLSNVPRRRSHGVGLGSSNQWRWSQAARIERQTAIDIDGDLRGKLERRTVVQRAVGWVPAARAGEATGERGGPAVMQGAANSGATCVFFSIYPTPLKSFTKPAGSRYQ

SEQ ID NO: 333369 - protein, 70 aa, Zea mays
  Clone ID: MRT4577_67146C.1.pep
GRGGRHGPERAGGEGRPPGGHAIRRLPQTHEDALSPGRGRCHSGETIWAYIRRSVLYAAPARCRPEGMMS

SEQ ID NO: 333370 - protein, 40 aa, Zea mays
  Clone ID: MRT4577_67147C.1.pep
KKKKKKKKKKKKKKKKKKKKKKKKKLKEKNEKITPGRGPP

SEQ ID NO: 333371 - protein, 204 aa, Zea mays
  Clone ID: MRT4577_67148C.1.pep
MAAPASSVTSRGLALCSASVGFHRPRGNNPVISPASSRRRRSLTGGSTMNSSGMNGAFPPIKGSTRIPAVGPGPANSPSGGNLPIPNMPPWAKWLVGAAIVVAIPIYRRFRTLEDKIEKTAEVAIEVVDTVAEAAEKVAGEVAGAFPGNESLREAASRIKAVTDEIEEDAERAEALIEKVDEIKEQVDSIVDPLIDKVVKDKET

SEQ ID NO: 333372 - protein, 107 aa, Zea mays
  Clone ID: MRT4577_67149C.1.pep
MMPVLTFDNFVFCGRVADKIEKTAEVAIEVVDTVAEAAEKVAGEVAGAFPGNESLREAASRIKAVTDEIEEDAERAEALIEKVDEIKEQVDSIVDPLIDKVVKDKET

SEQ ID NO: 333373 - protein, 49 aa, Zea mays
  Clone ID: MRT4577_6714C.1.pep
MFSPMLFVQSILPKMILLYSLFLFLKDYYLSYFTIFILPLLFFYFLKFL

SEQ ID NO: 333374 - protein, 43 aa, Zea mays
  Clone ID: MRT4577_67150C.1.pep
QCAYPHAVYFLTMTVVIIEAFVGTVTLMNVHDWVRLHGSPPHC

SEQ ID NO: 333375 - protein, 61 aa, Zea mays
  Clone ID: MRT4577_67151C.1.pep
PLAGGLIFFYKRGARGKKKKKKKKKKKKKKKKKKKKKKKKKKKKKEKKKKEKKKKKRPSSS

SEQ ID NO: 333376 - protein, 68 aa, Zea mays
  Clone ID: MRT4577_67152C.1.pep
PVGTFVPFFFIRNIYWLWIGLIPYSWGSLGHEKTKPGAARKTGSLWGGGRPTRLSRAIRIAKSGGTLL

SEQ ID NO: 333377 - protein, 65 aa, Zea mays
  Clone ID: MRT4577_67153C.1.pep
LRFLFYDAVFFAFFFFFFFFFGGEPGIPSLQRGSTWFKSFDQWGPFHCKKGYNSVPFKDSQECLG

SEQ ID NO: 333378 - protein, 224 aa, Zea mays
  unsure (1)..(224): unsure at all Xaa locations
  Clone ID: MRT4577_67154C.1.pep
AQKKQSMKFQEQEVSLSGQLASATVTLTXLSEEFRKEKKLAEELRDEIQRLESSITQAGIDNDVLETKLEEKLGEINFLQEKISLLNQEIDDKEKHIRELSASLSSKEVDYQKLTAFTNQTKKSLELANSRVQQLEEELSTTKNALVSKISSIDSLNAKLETLNSEKEEADKKINELIQEYTDLKVASETRASHDFKLLSDRDDLIKQLEXKLSVALTDSSKDQ

SEQ ID NO: 333379 - protein, 67 aa, Zea mays
  Clone ID: MRT4577_67155C.1.pep
ELLLKEALSNLIAKHSVTVIIIAHRQEMVLMADRIISLERGELREMSKQAFLSQDGHFSLPMIRSPN

SEQ ID NO: 333380 - protein, 38 aa, Zea mays
  Clone ID: MRT4577_67156C.1.pep
RPCDGVSRTLFRPTLLFVSSDIAVSVFVYEFVAIDQVI

SEQ ID NO: 333381 - protein, 99 aa, Zea mays
  unsure (1)..(99): unsure at all Xaa locations
  Clone ID: MRT4577_67157C.1.pep
SLPALALLLNMAPLYRPNGRGLKKSVEGLKAPLKVKLFGTITLTRLQXPYMLDRGMGHFVXISTPTGKVPVPDKAINFASKQPVKGNLVFFQSKFFTKG

SEQ ID NO: 333382 - protein, 90 aa, Zea mays
  Clone ID: MRT4577_67158C.1.pep
KRGRAGILFPTKRTQALASPYSKPSIDSDPRFLPPTDRHDRTLQAPTLGASTLAVEPMASISAVHVVYESIKVSVLHATKPKKEYVHDHD

SEQ ID NO: 333383 - protein, 546 aa, Zea mays
  Clone ID: MRT4577_67159C.1.pep
MAVTLLRGMRTPIPFRSNSGFFSTVLRPRLSRFTTRAESAQATEPKAAPRSIQLATKEAAEQKTQGFEAIIGIETHVQLSTVTKAFCSCPYSYGSQPNSTICPTCMGHPGTLPVLNEKVVECAVKLGLALNCEISMTSKFDRKQYFYPDLPKGYQISQFDIPIAKKGCVDLDLPVEFGGGHRKFGVTRVHMEEDAGKLLHSESSSYSQVDLNRAGVPLLEIVSEPDMRTGIEAAEYGAELQRIVRYLGVSNGNMQEGSLRCDVNVSVRPVGQSEFGTKVEIKNMNSFSAINRAIDYEISRQILLHKEGQADQIVQETRLWDESSQKTFTMRKKEGLADYRYFPEPDLPEVVITSDYINEISKSMPELPEAKRRRYENMGLSMQDVLFLANDDNIGHFFDSTLEHGADAKLAANWIMGDIAAYLKDEKVSIDEIKLTPLELSELIASIKNGTISGKIGKEILAELIAKGGTVKAVIEEKDLVQIADPAAIEAMVDKVIADNPKQLEQYRAGKTKLQGFFAGQVMKASKGKANPVLLNKILGEKLNAK

SEQ ID NO: 333384 - protein, 110 aa, Zea mays
  Clone ID: MRT4577_6715C.1.pep
MQAGMMPDYQREQPEPEQQVAILAGRRERDDGARRLFLDAGRVLMLLGWSALASAAGPKNDDNRPGNSGAAHAHALILALDLWLLGVSLVALLHVERRFPRAAGVGGAAA

SEQ ID NO: 333385 - protein, 47 aa, Zea mays
  Clone ID: MRT4577_67160C.1.pep
GARTSMLARRLRRSGSIRPGPWACEVCWRSPSRPAGGQITAWSFPRQ

SEQ ID NO: 333386 - protein, 81 aa, Zea mays
  unsure (1)..(81): unsure at all Xaa locations
  Clone ID: MRT4577_67161C.1.pep
IYAPTKGKQRADAIVRNLAXTEPAPRKARSENEEKQAVSLENDVRISTDADEELSVSEDDPETLLKKLQELADENYSTGNN

SEQ ID NO: 333387 - protein, 264 aa, Zea mays
  Clone ID: MRT4577_67162C.1.pep
QASAHASAHASAHASGRRRKGTFRPHAWADAWAEAWVYDDGTAKGELPETVYCFDGVFYNYFSIGMDAQVAYGFHQLRDEKPFLASGPLSTRLIYAGYTCKQGWFFTQCISDPELRGLRNIICLSIKRMDSSEWENIPVPSSVRAIVALNLHNYASGRNPWGNLKPEYLEKRGFVEAQSDDGLLEIFGLKQGWHASLVMVELISAKHIAQAAAIRIEIKGGYWHDAFMQMDGEPWKQPLSSEYSTFVDIKKVPYPSLIINGGDR

SEQ ID NO: 333388 - protein, 150 aa, Zea mays
  unsure (1)..(150): unsure at all Xaa locations
  Clone ID: MRT4577_67163C.1.pep
MFSLAAVFVKPVDITGLAGMSISGKKLDDAKASCRSIRKXPTSADGVDKNCYWSVYFXDVDDFRKTTRXRWATYYGFWTLPYVATHPLHSEYCKTXAALCVTKRCLLLXILLMDDGSLVAYVSAADAADXLLPIEKGPHETAHAVPLVKI

SEQ ID NO: 333389 - protein, 44 aa, Zea mays
  Clone ID: MRT4577_67164C.1.pep
LTNYIYPSGPNEPRESWSGRRMLRRSARAPSVVLRGRAVTCAKA

SEQ ID NO: 333390 - protein, 58 aa, Zea mays
  Clone ID: MRT4577_67165C.1.pep
KNIHKNRQNTIDDFPSEIDDFSLIFLIGTSLSNIANIAARNISTTNRLSEFNTTRADT

SEQ ID NO: 333391 - protein, 53 aa, Zea mays
  Clone ID: MRT4577_67167C.1.pep
GKTTNFFYFCLKGGFSLSCFRGNPILNRPKLLGLSKGGFFSGNNNGFTNGPFQ

SEQ ID NO: 333392 - protein, 104 aa, Zea mays
  unsure (1)..(104): unsure at all Xaa locations
  Clone ID: MRT4577_67168C.1.pep
MGMGTSSNLTNCYVEPETSLLAQSSRSARLWHYCANATXTSGYVTMSPECMHVQPCPGHLDGYSLWDFGFDQLGLANVAENFERDKEYYEHHCHWCMLGDPGIL

SEQ ID NO: 333393 - protein, 108 aa, Zea mays
  unsure (1)..(108): unsure at all Xaa locations
  Clone ID: MRT4577_67169C.1.pep
WVGFFFFFFEGGPFSFSVAQHWRAVRPSSVPLTLNWPPSVFSFVWPAFLCLGSRGAFASSXFGFCSMVSWAPPWGPLGVANGSTRHVAGLGAGLALRPVVGGVLPARG

SEQ ID NO: 333394 - protein, 75 aa, Zea mays
  Clone ID: MRT4577_6716C.1.pep
KSSASARNIVMDLCNMSKSANLIVLPFCSKLHFQAPISTFLDLKPSNCLHVDLCSYSYETSYFMMMYWTLNHQNR

SEQ ID NO: 333395 - protein, 73 aa, Zea mays
  Clone ID: MRT4577_67170C.1.pep
TVGVTRVYVDIYSAVRVEIGVIVPAWLLSVYASVEGSVGQHRGQLEAVSPRVLDLYPDVLEDLAEPKPSGAEE

SEQ ID NO: 333396 - protein, 83 aa, Zea mays
  Clone ID: MRT4577_67171C.1.pep
TFYIRSNTPAAVPVPLTVRRTSLLSHGLIRSTLYTPRRLVRPAKLQPNCPAAGLKALIRSVPSPSIFASQLIRREATPPIGRR

SEQ ID NO: 333397 - protein, 208 aa, Zea mays
  Clone ID: MRT4577_67172C.1.pep
MPQAQAMSVLPVVLLGCGGVGRHLLRHIVSCRPLHANQGVSIRVVGVADSSSLLVADDVRASGLDDALLNDLCSAKSAGSPLSSLLARGHCQVFNKPEAMGKVIDAATMLGRTTGLVIVDCSATYDTVGVLKDAVNHGCCVVLANKKPLTCAYEDFKKLTSHFRQIRFESTVGAGLPVIASVTRIIASGDPVSRIVGSLSGTLGYVMS

SEQ ID NO: 333398 - protein, 37 aa, Zea mays
  Clone ID: MRT4577_67173C.1.pep
STISSSRRVDIIIYERGDTRPRGPYLKIEKKKKKRPL

SEQ ID NO: 333399 - protein, 82 aa, Zea mays
  unsure (1)..(82): unsure at all Xaa locations
  Clone ID: MRT4577_67174C.1.pep
SFATSQMGGLSLSGGDATPTDGDLLPKRQQLQPIVAQRVCPCTDKKTNRANKESLSNHRDEEAXXENLQHKKLLREAGKRSD

SEQ ID NO: 333400 - protein, 132 aa, Zea mays
  unsure (1)..(132): unsure at all Xaa locations
  Clone ID: MRT4577_67175C.1.pep
FDYYERDVAXVALGVGLGKTXLREKELHSVYHMDGHAHIKTLATFVTLFPNKNRPGLGFDDVPVLNFDAGLVLYGQQFIYIYWTIPSYASGVNRLEVAXLDDTGKATILDIXTTTSLRESGESTCMNRSSIY

SEQ ID NO: 333401 - protein, 103 aa, Zea mays
  Clone ID: MRT4577_67176C.1.pep
TPDNAPLNYLPPKRLILACQLIQLLLPAIPATILRGHAVSTHGRATYTLSMFTLRDACGMVASFLSSYNSCSPGEDDSDPSAQSRATKMVDTASKVAEVFTGR

SEQ ID NO: 333402 - protein, 38 aa, Zea mays
  Clone ID: MRT4577_67177C.1.pep
SCIVAELRHRPMFTARAFTLARDSESAYIYREGYAATD

SEQ ID NO: 333403 - protein, 53 aa, Zea mays
  unsure (1)..(53): unsure at all Xaa locations
  Clone ID: MRT4577_67178C.1.pep
LTPFIPLHHLIHHYHLFSPLPNNLIPYYSLLIPSTNPHKYHFHQXILKTPFPP

SEQ ID NO: 333404 - protein, 107 aa, Zea mays
  Clone ID: MRT4577_67179C.1.pep
PAGSRQPQHTKESTWRSSHGFIGGRRGEHIPGHPPGGPGATERAHRGPVRVRVGQLAEIKHARLAMVAFLGFAVQAAATGKGPLNNWATHLSDPLHTTIFDTFGGSS

SEQ ID NO: 333405 - protein, 50 aa, Zea mays
  Clone ID: MRT4577_6717C.1.pep
FGANDKPAEMPSGEQMFMIPCRNFQLAHNSRGDLEPHHSQVPIEIQNQPD

SEQ ID NO: 333406 - protein, 70 aa, Zea mays
  Clone ID: MRT4577_67180C.1.pep
HISIHTQMAAKKRLCGCDTGTLENFGPSHYLYICQYVTISISAFNQGTINTPILCLAEKQLLAVDYSFEL

SEQ ID NO: 333407 - protein, 149 aa, Zea mays
  Clone ID: MRT4577_67181C.1.pep
MASSVAAAASTFLGTRLADPAPQNGRIVARFGFGSSYLGQPLPFSISTLIWIEVLVIGYIEFQRNAELDPEKRLYPGGSYFDPLGLAADPEKKERLQLAEIKHARLAMVAFLGFAVQAAATGKGPLNNWATHLSDPLHTTIFDTFGGSS

SEQ ID NO: 333408 - protein, 88 aa, Zea mays
  Clone ID: MRT4577_67182C.1.pep
FQRNAELDPKKSLYPAGSYFDPLGLAADPEKKERLQLAEIKHARLAMVAFLGFAVQAAATGKGPLNNWATHLSDPLHTTIFDTFGGSS

SEQ ID NO: 333409 - protein, 62 aa, Zea mays
  Clone ID: MRT4577_67183C.1.pep
ESYRSDLVICNTTTSDEQLHSHVHIHLEVTEDIRRTKVRTNNRRLTRQCPAPSYLQTKRGAA

SEQ ID NO: 333410 - protein, 58 aa, Zea mays
  Clone ID: MRT4577_67184C.1.pep
KKNRLHLGEFKHAPLPMVPFLGFPVQAPPPGKGPFNNWAPPLRDPFPTPFFDRLGGSF

SEQ ID NO: 333411 - protein, 291 aa, Zea mays
  Clone ID: MRT4577_67185C.1.pep
MASSVAAAASTFLGTRLADPAPQNGRIVARFGFGGGKPKAAVPKKVAKTSISSDRPLWFPGAVAPDYLDGSLVGDYGFDPFGLGKPVEYLQFELDSLDQNLAKNEAGGIIGTRFESSDVKSTPLQPYSEVFGLQRFRECELIHGRWAMLATLGALSVEWLTGVTWQDAGKVELVDGSSYLGQPLPFSISTLIWIEVLVIGYIEFQRNAELDPEKRLYPGGSYFDPLGLAADPEKKERLQLAEIKHARLAMVAFLGFAVQAAATGKGPLNNWATHLSDPLHTTIFDTFGGSS

SEQ ID NO: 333412 - protein, 78 aa, Zea mays
  Clone ID: MRT4577_67186C.1.pep
LKMKIQARDRSVVLDTDYTILQNVKFIAEKSCHPHKASRVGTSHDMSTVVRHSDIARYAVEGSDNFSRSHQHRSSVAH

SEQ ID NO: 333413 - protein, 293 aa, Zea mays
  unsure (1)..(293): unsure at all Xaa locations
  Clone ID: MRT4577_67187C.1.pep
MASSVAAAASTFLGTRLADPAPQNGRIVARFGFGLGGKAKPAPKKVAKTSTSSDRPLWFPGAVAPDYLDGSLVGDYGFDPFGLGKPVEYLQFELDSLDQNLAKNEAGGIIGTRFESSEVKSTPLQPYSEVFGLQRFRECELIHGRWAMLATLGALSVEWLTGVTWQDAGKVELVDGSSYXLGQPLPFSISTLIWIEVLVIGYIEFQRNAELDPEKRLYPGGSYFDPXLGLAADPEKKERLQLAEIKHARLAMVAFLGFAVQAAATGKGPLNNWATHLSDPLHTTIFDTFGGSS

SEQ ID NO: 333414 - protein, 69 aa, Zea mays
  Clone ID: MRT4577_67188C.1.pep
AALRASEINADVVLKGIVGDDEYGCPPRSNSNASFEHISFRELAARGITKMDMTAVTCCEENNIPGQRY

SEQ ID NO: 333415 - protein, 238 aa, Zea mays
  unsure (1)..(238): unsure at all Xaa locations
  Clone ID: MRT4577_67189C.1.pep
MAHQGPGVPKFGSWEDEGDHPYTQYFENARKGKSPGRSATQNEHRTGDPEALFKEDTTPSAKASPXGLGRRILWRQSPRTRPLLEASRMLSQQPINTVLIPAMKEXRHGEIASASSPPSKARKQRRXSSPSWERRGSSEGNRGAAPTTPGRSSKMRPGGRGDETPERGSAVPKFGEWDEKDPSTGEGFTDIFNKVREEKQSGDAPVITSGNAGGGYSRSNQGRKYESSACSCFSWFRN

SEQ ID NO: 333416 - protein, 81 aa, Zea mays
  Clone ID: MRT4577_6718C.1.pep
LVSMLSLGMALSGQRTLGVYPISASARHLKLFFSSGLGVGPFSPFLWAPLMLPVRHDEFGSVLLAYSWSVASFLFGFWGSR

SEQ ID NO: 333417 - protein, 99 aa, Zea mays
  Clone ID: MRT4577_67190C.1.pep
NPPGGEGPDKLPQVCKGNKAPVKKAPRFKTSSPPKGRHKSGFGNPPLWGGFYPHPWGKGKNRLFSPKGFSQGGNLGQNRPRKKNIWVFLGQRPCFFFSW

SEQ ID NO: 333418 - protein, 90 aa, Zea mays
  Clone ID: MRT4577_67191C.1.pep
RKETDDSKARKEPKPNQSFSIVDAASASVHGRSAAAAKATSAEKTAARIDLHMAGERAPVNAILVKSRYTTGAASRSFTSTSYDPVTKNE

SEQ ID NO: 333419 - protein, 125 aa, Zea mays
  Clone ID: MRT4577_67192C.1.pep
GGYGAHYGGGAAVAIQKHGYRKDVYGSETESEDDESDCEEAFSPRGGRMQGGVQVQHGYGGGVQVQHGYGADNLGGVRRYESYESREEHGDGRRYESYKSTVQYNGGGNATCSPIKNRHLLGYGA

SEQ ID NO: 333420 - protein, 119 aa, Zea mays
  unsure (1)..(119): unsure at all Xaa locations
  Clone ID: MRT4577_67193C.1.pep
IISDFNKPFGGGGGGGGLSRFPKKRFHKTPGKTKVGTTSSLGGGXGGKKRGGEREVPVPPNGDALKKRGAPGDGAFLGGEKRLGRAPERRFLLPGLEKAPRGSLVLLMGMLLVFGFGDP

SEQ ID NO: 333421 - protein, 86 aa, Zea mays
  unsure (1)..(86): unsure at all Xaa locations
  Clone ID: MRT4577_67194C.1.pep
MWHLGRLCSLRRHFILWKRTPFYTKLEEKHKALEAEKDEADARKKEEQDVALKQLTKSLVIRAKPMPSFYHEGPXPKAELKKVPPT

SEQ ID NO: 333422 - protein, 47 aa, Zea mays
  Clone ID: MRT4577_67195C.1.pep
SATEDAECDIASPTGKTRLKTIRQLVMIHRWLDAQLSTHVSLIEVRM

SEQ ID NO: 333423 - protein, 73 aa, Zea mays
  Clone ID: MRT4577_67196C.1.pep
QNILGLINHDTYRKKKQLIKKLQKKSMHFRATSTRCFLHLVHGEYAKTLKKNPPQKNTPIQKHGTSKRRCCPY

SEQ ID NO: 333424 - protein, 368 aa, Zea mays
  unsure (1)..(368): unsure at all Xaa locations
  Clone ID: MRT4577_67197C.1.pep
MSATAESGGDLSAARRRWDLTNKGAESTPILKDAVEISTDEESDGVVTCHPNGNTDGCDETISGSHDDDSPEGQETSSIKEPDVEGDTQEDKCVNQDSLKLIDEESAPPKSPAKSATASSRSERPKRVVPRPFSLSNQRSLFGVNGGVTNPLANKDKSGDKSSISPASMTKKSTPLAPRKTLQPEQAFHPLEEDSCSVTSXATTSSRAGRTKTTVPVAPSFVCANRADKRKEFYTKLEEKHKALEAEKDEAEARKKEEQDVAIKQLRKSLVIRAKPMPSFYQEGPPPKAELKKVPPTRAKSPKFTSSRRKSCNDTPQTPEGKNTNATSTTRPHRHSIGASKDASRVQCSPKSGVATKTRSVKPELKAL

SEQ ID NO: 333425 - protein, 107 aa, Zea mays
  unsure (1)..(107): unsure at all Xaa locations
  Clone ID: MRT4577_67198C.1.pep
SPRIAPYEWRPKADKSSALNKPVEDELESXKAPNDKKPYADNCFPSGTYSRKEGGEGKRGQRKDWNSVDTYKIYILKALKQAHLCIGISYKAMSIMNSFMNDMFEKL

SEQ ID NO: 333426 - protein, 106 aa, Zea mays
  Clone ID: MRT4577_67199C.1.pep
LGLASPGCTCSARPCVLRAHTGSTIRLRISPGMSAFFSRVVTRDSKEYLFVSMILSLFSQQFADQVSEIYVMFWFVRRPCSRSAKGSRLWTCLVWSSFLINSQAGA

SEQ ID NO: 333427 - protein, 106 aa, Zea mays
  Clone ID: MRT4577_6719C.1.pep
MGDWPGRGGPAFDIKKTLPNPSPPPVARSPCLPHADPQPPPFAMGFLDALYRVVMRRNAVYVTFVVAGAFAGERAVDYGVHKIWEMNNLGKRYEDISVLGQRPAEE

SEQ ID NO: 333428 - protein, 183 aa, Zea mays
  unsure (1)..(183): unsure at all Xaa locations
  Clone ID: MRT4577_671C.1.pep
MAPMRSDDWPSWLPDGMDPKTSFNLEFRIFATKSRFPWFLHTELVDSDIMNYKDLLDEIMRKYPCSYGEVVKMYYYCAESKSNIEVCCDEDLVNMFQKNASTKTCHISIAHYDPSTEPPAIPLWDVTYAKAVEIPCTSSMPAPTQSLDEPSQQPEDDDKYLQNPXDQXNEYGGVDERSVYSGA

SEQ ID NO: 333429 - protein, 36 aa, Zea mays
  Clone ID: MRT4577_67200C.1.pep
TLETILMDFPSKWEATNLGSWREIQTKWIPVAMGKG

SEQ ID NO: 333430 - protein, 214 aa, Zea mays
  Clone ID: MRT4577_67201C.1.pep
MREIVHVQVGQCGNQVGSSFWSTVSKEHGIDGSGAYHGTSDQQRERINVYFAEGGNDKYVPRAVLVDLESGPQDAIRAGPLGQLFRPDNFVAGEASAGNNWAKGHYTEGAELVEEAIDVVRREVENCDHLQGFQLTHSLGGGTGSGMGTLLLSKIREEFPDRMMATFSVMPSPKVSDTVVEPYNATLSLNQLVENSDETFCIDNEALYDIYERT

SEQ ID NO: 333431 - protein, 87 aa, Zea mays
  Clone ID: MRT4577_67202C.1.pep
PPFTSPFFHLVRYRPGPLSLPFPTFVQPEWPLYPPFYCALCAGVVSVTRYISLPLFTTLSPVLFFFFRPFLGIFLGFSHLDVHLGFP

SEQ ID NO: 333432 - protein, 106 aa, Zea mays
  Clone ID: MRT4577_67203C.1.pep
LGEACTSTCTRDSTCRGQGRATRPSNNVRTRRRTERTKASAPHANQVIMRIARGPEAATPANPLGSFLAVPASSFDTGEALSGCTQCFRPQDRSRCPRTRPGPVGG

SEQ ID NO: 333433 - protein, 57 aa, Zea mays
  Clone ID: MRT4577_67204C.1.pep
MKLDGGSIMAMIDSTSEKMYLCQKSLGVVSPSESIKDLVDVGLMTEDPLTGHVPRHG

SEQ ID NO: 333434 - protein, 105 aa, Zea mays
  unsure (1)..(105): unsure at all Xaa locations
  Clone ID: MRT4577_67205C.1.pep
MQQQHQGGGGGGGGGSQFGAPPPDMGPFSPTPAATGPMPLSSRPPSAQPQQQPRTSYEELAPMVPGAAAASGFDDETMGSXGGGGGGSSGASSNRWPREETQALI

SEQ ID NO: 333435 - protein, 83 aa, Zea mays
  Clone ID: MRT4577_67206C.1.pep
PGTPCFVGSARGTFSGQAPAVACPAKPGSGRAGSVCRRWRLPRRSQHPQQLYKKSPSLVALHGGKIALPHQPNYELTRACVFV

SEQ ID NO: 333436 - protein, 91 aa, Zea mays
  unsure (1)..(91): unsure at all Xaa locations
  Clone ID: MRT4577_67207C.1.pep
MEIDXEPWKQPLLKKGDIMVVEISNLYQVAMLVNDLCRSKSMNGLSSPSCQTHKDDDNNNLEDEDEWQDGKKFDAVATFKILGEVDIAHLN

SEQ ID NO: 333437 - protein, 102 aa, Zea mays
  Clone ID: MRT4577_67208C.1.pep
YSSDAASHRTANAREISPVCRYRPGADGGVRGGGEPEGSISEVDRTLLGCRERQRGPKIGLSYVRPEKEWVTVDPQESRQICPFPASLFKVCSITARRSQTP

SEQ ID NO: 333438 - protein, 61 aa, Zea mays
  Clone ID: MRT4577_67209C.1.pep
KMLWIPKKVYPKEWPKKSWWGLLHIVSYKPNRQQTKHTNGSSKEIDIHHAEVNIQIEKDLD

SEQ ID NO: 333439 - protein, 224 aa, Zea mays
  unsure (1)..(224): unsure at all Xaa locations
  Clone ID: MRT4577_6720C.1.pep
GIDGKSRKANVAAEKVLSVSANLAKLLPSGAVLVFQTLSANFTNQGSCNTANRWLSGLLVAFLTAACIFLTFTDSILHKGKIYYGVALPERLNVFGLTKKEEXAAQGDRAXLRERRLKTLDWVHAFFTAIVFISIAMGDVGLQQCFVPNLDRPDMVNVKELLRNAPLGLALLSSFVFMIFPTRRRGVGFDNGERGDVDTSPAEANKTAAPPQPTKVALSNFRIT

SEQ ID NO: 333440 - protein, 150 aa, Zea mays
  unsure (1)..(150): unsure at all Xaa locations
  Clone ID: MRT4577_67210C.1.pep
GDPSGFAHPGSHGGRGRAPAPVPPPPLPPPPSPLVGAPPRPLSPPRRVLRSGRGPRPXPPSSTSCPPSLPXGRPRDRAGGXSRSLTPTHARTPTPPXAVSWRGGGRRSQGVEGGDDQEVPPRHPLPPPSPSSPPPRGGRGGARRPRAGQG

SEQ ID NO: 333441 - protein, 108 aa, Zea mays
  Clone ID: MRT4577_67211C.1.pep
KLPGGDYIGMDWEQLIIFEVSRVFVTGYDFHVWPSTESHPLFGARNPYVCMFLGNLRCLPDWNMGSLLFANPLDVQAPFFPSRLLNNVFVQVPALAVQLGGLGFPLFS

SEQ ID NO: 333442 - protein, 87 aa, Zea mays
  Clone ID: MRT4577_67212C.1.pep
VNVTPYFANVSRVSNRKYGERLLKTRRQASEECTKLVLVSGSVSQVICFREGMQGSLRIFLFVLIRDVCKHGIFQDVKLEQCNVGLC

SEQ ID NO: 333443 - protein, 146 aa, Zea mays
  Clone ID: MRT4577_67213C.1.pep
EPYGHLSVQEQSQKHHPPRQERRQTKANPSQRVRLAPRASSPRSGRSVVAMALRALAGKLRVLPSRAAASRSFASQMEKKCSKCALEEQAGSFSQWLDERKRRDMEELARFRRKSYVHNVLVLAGSVGFVAFTLSCVADVIADEMN

SEQ ID NO: 333444 - protein, 131 aa, Zea mays
  Clone ID: MRT4577_67214C.1.pep
HVLLTAMAKTTAGSGSMSRLVRLLRCARAGLLAMVCGRWCCDCDPQARTLEMASGMVSSGGSASCSATRLLASLHKARPCMAMAKTTAGSGSMSRLVRLLRCARAGLLAMVCGRWCCDCDPQARTLEMASG

SEQ ID NO: 333445 - protein, 63 aa, Zea mays
  Clone ID: MRT4577_67215C.1.pep
RRTQRQQQQLSCAIYDLHPSMTGQRALRDRHKKKVLCLLAVISTYRIWRLCCVSLAPFKDRKS

SEQ ID NO: 333446 - protein, 87 aa, Zea mays
  Clone ID: MRT4577_67216C.1.pep
SPHVPSRLRALAPTLIARDDGPARSGHLTRTTWVTAMTIHGEAGSRTSHCERCELALVPVALSFYYAQRLWRCGDRTPDVETCSRAI

SEQ ID NO: 333447 - protein, 99 aa, Zea mays
  Clone ID: MRT4577_67217C.1.pep
GAASAQNEAIDRRERLRRLALETIDLAKDPYLMPNHLGSYKCKLGLTLPNNKGNYLPPTQGKRPQTNFSKPPAQKAKDAPRQPQPKKGKFAPRKFFKIG

SEQ ID NO: 333448 - protein, 82 aa, Zea mays
  Clone ID: MRT4577_67218C.1.pep
GRSCGKIARCQNKRRRNPAPTLVQRSCRLLGRRRARPLEQLACPPAPTPCPSLSLRCLALLAPLARPEPLFFHRACQLPPLL

SEQ ID NO: 333449 - protein, 49 aa, Zea mays
  Clone ID: MRT4577_67219C.1.pep
INCLIFSTRSCGWSCMLILLRNLVSGVLFTNCSTTCFFYVGSGTYAVNL

SEQ ID NO: 333450 - protein, 142 aa, Zea mays
  Clone ID: MRT4577_6721C.1.pep
KPPGDRTRKNPGSERLFCRRRPKKGGNHGGKRPQNPKEGTQTRHPPAGKDNPDRPGEEQARHRPPPGNTTGTPKRQSNPRQKTKTGPQAQGRGQRPGQAPATQPQGTGEGGTQAPPGTWTPPPQGSQPAPGRVPPVHQPPAG

SEQ ID NO: 333451 - protein, 61 aa, Zea mays
  Clone ID: MRT4577_67220C.1.pep
TEGIVTFRIKRSLENCGVSRFIVLSPSDNSLLLSRVFTTGLKIQFGLCDVAWPTVCCSLIL

SEQ ID NO: 333452 - protein, 52 aa, Zea mays
  Clone ID: MRT4577_67221C.1.pep
WDTPGIYIVISVIAASGPGYSIFMLGNRPQLMYFFFYLALFAIRGLVFCGCP

SEQ ID NO: 333453 - protein, 81 aa, Zea mays
  Clone ID: MRT4577_67222C.1.pep
VGCPMLSYQEKLTIQKKTRSGSERPPSQDYIKKRLKHGPDGENLQNPDPITNGSINYPLCNGPARIPLSESGRGTTAGEAQ

SEQ ID NO: 333454 - protein, 81 aa, Zea mays
  Clone ID: MRT4577_67223C.1.pep
GQMMRTGDHFPRKGSKVSQQYGATLTATHKNYDALLLIWMAELTDKAGACNVKRTLPHSYLAAAVGYSLRMHIEAAAPPLY

SEQ ID NO: 333455 - protein, 42 aa, Zea mays
  Clone ID: MRT4577_67224C.1.pep
QFVMLTLLLTIILFSDLTPVGYYPLSIKYQMVLGGINVDMVH

SEQ ID NO: 333456 - protein, 209 aa, Zea mays
  Clone ID: MRT4577_67225C.1.pep
MAAASSSMDRIAQWVSSQEVPTDLTVRIADSVFSLHKAVMVPKCGYIRRAVAASQTQGPGGGAVELDLSALPGGADAFQKAARCCYGDSLEITARDAAALRCAAEFLDAPDLARRADDFLAQAALRALPGAAAVLRSCEALLPAADELGVARRAADAVALGVCNEALFPTPRAPPGWWAAELAALSPASFRRVVAALRCRRAGPEVVAA

SEQ ID NO: 333457 - protein, 158 aa, Zea mays
  unsure (1)..(158): unsure at all Xaa locations
  Clone ID: MRT4577_67226C.1.pep
APPPAPPRPPPPPPPPPPRPPPPPPRXPPPPRPRPRXPARVPRPAPCFPPPFRWPRPFPXXLGFAVSPFPVAPFALFFALLLLRGVSFRPCPSVWWCLWGLGRPFSWAALPAPLFSALLLSGRFLWCVPRLLCLCCPALVCLGSCRCPVWSFLRRWAA

SEQ ID NO: 333458 - protein, 98 aa, Zea mays
  Clone ID: MRT4577_67227C.1.pep
MAGRKETALDLAKFVDKGVQVKLTGGRQVTGTLKGYDQLLNLVLDEAVEYEREQDDPLKLSGKTRQLGLIVCRGTAVMLVSPTDGTDEIANPFLAEGA

SEQ ID NO: 333459 - protein, 93 aa, Zea mays
  unsure (1)..(93): unsure at all Xaa locations
  Clone ID: MRT4577_67228C.1.pep
SSELLISFCRATVHKPKTIIFYRDXVSDGQFYQVLLNELDANTKACALLQTHYHFYIYFISLVHXRHHTLLFAYNLNHHRAVNKSFNILPFTF

SEQ ID NO: 333460 - protein, 199 aa, Zea mays
  Clone ID: MRT4577_67229C.1.pep
MAAMPPAFTGNLKKALAGLRRINLDGLRWRVFDAKGQVLGRLASQIAVVLQGKDKPTYAPHVENGDMCIVLNAQDISVTGRKMTDKIYYWHTGYVGHLKERRLKDQMEKDPTEVIRKAVLRMLPRNKLRDDRDRKLRIFSGIEHPFHDRPLEAFVMPPRQVREMRPRARRAMLRAQKKEHSNRAKEEEDAKNATAEVTA

SEQ ID NO: 333461 - protein, 62 aa, Zea mays
  Clone ID: MRT4577_6722C.1.pep
MKRAMSWIFVGTFERVLECWDRETHEYVAIKVVRSIHKYSDATMIEIDVLNRLVENEKYRSL

SEQ ID NO: 333462 - protein, 122 aa, Zea mays
  unsure (1)..(122): unsure at all Xaa locations
  Clone ID: MRT4577_67230C.1.pep
RNFSLGALRDKDAQHGGSREQSIKEENEQEGDGDHGARVGGEDPGLVGGGCGEPDLASLSVEVDAFLAGQDEDAAPVSITETTLERFAXXVELLVARYEGVEDRWASEAGSEPTALLAAITR

SEQ ID NO: 333463 - protein, 251 aa, Zea mays
  unsure (1)..(251): unsure at all Xaa locations
  Clone ID: MRT4577_67231C.1.pep
MYLTAVSFPPAAAFSSSSQKLLPRSAGVGRRLVVRADVKVISTGEACRRGLAAGIDKLADAVSVTLGPKGRNVVIDQDDVPKVINDGVTIAKAIELPNALEHAGATLLQEIASKTNSAVGDGTTTAIVLAREIINLGLLAVATGANPVALRRGIDKAVHELIKILKSKCIPVSTKEDIKAVASISSGNDEXVGNLIADALEKIGPDGIIKIESSSSIYTTVEVQEGMKIXKGYISPXFIPNPINCWNSENT

SEQ ID NO: 333464 - protein, 55 aa, Zea mays
  Clone ID: MRT4577_67232C.1.pep
KKKKKKKKKKKKKKKKKKKKKKQKKKKNKKRNQYTKTKGALPLKNQTISPFVWNK

SEQ ID NO: 333465 - protein, 81 aa, Zea mays
  Clone ID: MRT4577_67233C.1.pep
SAVHYKPYRAACLKSASLVITFLSKIWWLPFLYSSCQGLCVPPLLCFVSLYLLLFGLLIPFNFFLLHFSFKKKYYLFVLFY

SEQ ID NO: 333466 - protein, 86 aa, Zea mays
  Clone ID: MRT4577_67234C.1.pep
VYQYILLKGFLILMDLSNTWGAPFNPPSSAGGGGFTPTLNTPFFLTPIGPPFVPKRGSLTPLFSIKKGGAFPSFILPGFFGPVPGG

SEQ ID NO: 333467 - protein, 87 aa, Zea mays
  Clone ID: MRT4577_67235C.1.pep
KTNRKTGPNSKHHQMLYGGGTIDTNREHFGTTGGTCTTWFFSSPHWATQGLPEAQKRGHQRGGLPGPFGLGKGPLKALTPTPGMDRT

SEQ ID NO: 333468 - protein, 91 aa, Zea mays
  unsure (1)..(91): unsure at all Xaa locations
  Clone ID: MRT4577_67236C.1.pep
TKSIHRIISXFITTNSXYPYPDTHXHKQLXPXSXSRAMGGSXVXVXTVXXLSQLRAPXXLINGXVVPXNXVTVXXKERVXKXXTPXFXGRX

SEQ ID NO: 333469 - protein, 50 aa, Zea mays
  Clone ID: MRT4577_67237C.1.pep
HDIWKNHSLQCTTWTTIFFIKLQYLNTESTSKDESRYNYLSLFVCVFFTY

SEQ ID NO: 333470 - protein, 74 aa, Zea mays
  Clone ID: MRT4577_67238C.1.pep
ALEFYVGLFRHNQRLGDILGLRRCIMTYVFICSDSAHWAGFEQAIQSYADSWTFLDIPERSKALFLEREDAIPG

SEQ ID NO: 333471 - protein, 101 aa, Zea mays
  Clone ID: MRT4577_67239C.1.pep
NGFIFTLQPPEQFHLLLACLPRSSARIRRARLPPPCPSRTWSALPSPQPPVSRLSFFYLASFSLLLDSCSSNRSVRIQRPGRTASSPCQAEQTKPRTRSPR

SEQ ID NO: 333472 - protein, 101 aa, Zea mays
  Clone ID: MRT4577_6723C.1.pep
TENFQRKKKSNQRQGKQGKDPDPPRRAIKPNGTGAPGAQRALAGGAGGPPRNGMPPPPLGNRGGPGRAPLGPGPGGPGPKGMNPGTRPAGQTQKIRPGPPP

SEQ ID NO: 333473 - protein, 81 aa, Zea mays
  Clone ID: MRT4577_67240C.1.pep
GRKFFFFFFPMRITLVKIIQNKHRHRIGQVIAIVEIHDCLNPKPSELYLPQHVIHMILRLFLQPDSTHSQRVNLQLHKECK

SEQ ID NO: 333474 - protein, 543 aa, Zea mays
  Clone ID: MRT4577_67241C.1.pep
SVVKKRRPRSSELVRVSSLGVQDQIYFRDLVRRARITFECPRGLLLRDDERAESLGLAGAAGFGVARDRRRARADMRAAALMADHDLWLNRDRRIVGPMPGISVGDAFFFRMELCVLGLHGQVQAGIDYVSAGRSASGEPIATSIIVSGGYEDDDDHGDVHSARGHGGRDPNLHKHCVDQKLEGGNLALERSMAYGIEIRVIRAVKSRRSPVGKVYFYDGLYKVVDYWLDRGKSGFGVYKYRLLRIEGQEPMGSVNYRVAEQLKVDVFAIRPTGYLSFDISMGRDTLPVALYNDVDDDQDPLLFEYLTRPIFPTSAVQGKFAEGGGGGGCDCAEICSIGCNCAGRNGGEFAYNKTGTLLRGKPLVYECGPYCRCPPSCPNRVSQKGLQHRLEVFRSRETGWGVRSLDLIKAGTFICEFSGIVLTHQQSEVMAANGDCLVRPNRFPPRWLDWGDISDVYPDYVAPDHPVIPELNFAIDVSRARNVACYFSHSCSPNVFIQFVLFDHYNVSYPHLMIFAMENIPPLRELSIDYGMVDEWTGQLTM

SEQ ID NO: 333475 - protein, 188 aa, Zea mays
  Clone ID: MRT4577_67242C.1.pep
MRRLSHFPLLAAVLLAAVPRPAHPLTELETSQIRRFQDYLRICTAHPAPDYAGAAAFLLPYAASLGLRTATLHFSPCKSKPLLLLTWPGTDPSLPSILLNSHLDSVPAEPEHWIHPPYAAHRDPATGRVYARGAQDDKCLPVQYLEDIRGLQVVGFAPARTVHVSLVPDEEIGGEDGHEEVRFSWREF

SEQ ID NO: 333476 - protein, 112 aa, Zea mays
  Clone ID: MRT4577_67243C.1.pep
PAFPFSRSCLNLARVKATLAARVSCSCGCCLGLAVDPLLRPGLSVPSRVSPPVFLGQSARPASVTVRRTSPPARGRTPPGALRQPERGACGARAETRRTRAMDARWVAGIGG

SEQ ID NO: 333477 - protein, 127 aa, Zea mays
  Clone ID: MRT4577_67244C.1.pep
PPSSPPHASHSAVFAGGTRPSCAWLAPLFASRGRATRMGAPGSGQSSKIANQVAVAGAVVGLGEAVSFAREFASGGSVRYIVKDLGMALEVGDGGEEEVNVLPGAALYRQMFSAMVANGDGDLSLQG

SEQ ID NO: 333478 - protein, 47 aa, Zea mays
  Clone ID: MRT4577_67245C.1.pep
MWEHTLLCMCQYTSHHSVMKTMSKITVAHSVSVAYVVTMTRYSYSCV

SEQ ID NO: 333479 - protein, 51 aa, Zea mays
  Clone ID: MRT4577_67246C.1.pep
RPHLLLRRPTFVPCKLLPRMWMVPVENPWDYFGGRTSRRDRRGLPPRRWGA

SEQ ID NO: 333480 - protein, 55 aa, Zea mays
  Clone ID: MRT4577_67247C.1.pep
HRLVESQNHSSYAWLIEVFFFLGYRFYNRKFILEMKTQCKHACTHRVCARTPAHG

SEQ ID NO: 333481 - protein, 48 aa, Zea mays
  Clone ID: MRT4577_67248C.1.pep
THKPSLAFIPRMAAMNSSVFACSYAISGAACSELNGKVTSVAYVACSG

SEQ ID NO: 333482 - protein, 58 aa, Zea mays
  Clone ID: MRT4577_67249C.1.pep
GFFFRVLGPQQHQEIRASKRPASMTHAIHPDEQEDTTTVSLDRPSGDANAWGSLITTH

SEQ ID NO: 333483 - protein, 93 aa, Zea mays
  unsure (1)..(93): unsure at all Xaa locations
  Clone ID: MRT4577_6724C.1.pep
MGAYKYVXLLWRRMQSHVMGFVXHMRCCMYRRHTAIVRFTRPTRPDXARRLGLKAKQGCVDYRVRGTRVGRTRTGPYRYCLLLGEVRSFTPLK

SEQ ID NO: 333484 - protein, 117 aa, Zea mays
  Clone ID: MRT4577_67250C.1.pep
GGYTPASADLVFFAAMDPFTGSIDHRFPLKVRARSHFYFILLVQHTVGGGPPSSPLDWICTPTPTCSFCPQAHESLAGARSGAVDLTCWPPLPGSFRTMRSLIPISGSPPASLAFFS

SEQ ID NO: 333485 - protein, 101 aa, Zea mays
  Clone ID: MRT4577_67251C.1.pep
RRKGGKKERRPSCSFWPNAYVPVPTTATIHNQEGETVYLYVPRKCSSTNRIITAKDHASVQINIGHFDANGLYDCHLTTFALSGFVRAQGDTYSFLDSLFQ

SEQ ID NO: 333486 - protein, 112 aa, Zea mays
  unsure (1)..(112): unsure at all Xaa locations
  Clone ID: MRT4577_67252C.1.pep
LFSYPPLDVASLLKIWNLNKCCGVVGVFNCQGAVWCRVTNRTSVHDXSPGTLTGTVRADDLHPLARVPGDGGGWDGETAVYAYRTQDLVXMPRGVALPVTLGPLQYELFHVC

SEQ ID NO: 333487 - protein, 94 aa, Zea mays
  Clone ID: MRT4577_67253C.1.pep
GPMVCISEPCLPFLCIVVAFVFLYMPCALLLFPTTLSALDRPIKPAGAFSNIQLCLHEQAHRRFWFPSHASNSQQMRVSSRTHKLNPPPGYQPR

SEQ ID NO: 333488 - protein, 37 aa, Zea mays
  Clone ID: MRT4577_67254C.1.pep
RIDHLQIKAYRNGVCLNNHCHILHPKLGGFLVNTALN

SEQ ID NO: 333489 - protein, 57 aa, Zea mays
  Clone ID: MRT4577_67255C.1.pep
NYKSNMQQVIKMKDKARRSEITISTGYAKEEYRPLAVLLFFPLKTTMLQFRVTKFGP

SEQ ID NO: 333490 - protein, 58 aa, Zea mays
  Clone ID: MRT4577_67256C.1.pep
VSQPPLNKKKMVVVGVGVPGPLFFHSVVQGGGRLKICPVSRPLTPIFFKKKELLFFGF

SEQ ID NO: 333491 - protein, 329 aa, Zea mays
  Clone ID: MRT4577_67257C.1.pep
MAKQSCCHKKKLRRGLWSPEEDEKLMNHIAKYGHGCWSSVPKLAGLDRCGKSCRLRWINYLRPDLKRGTFSQEEEDLIIHLHSLLGNKWSQIAAQLPGRTDNEVKNFWNSYIKKRLRERGIDPATHQPLAEPAAAATATTTTTVSRRAVFGDVDLIPTTTTTTIQVPPPSFEGGPMLESVKLAVELDWPVAGDGVTSRPCYLQGGCFDMDALQQHCGPIPPAPVVPSASASASSSTLTSMAEAEHCSTNNVAAGGNLPWLELGANAVADAGGHVVGSCYAGALDELRWSEYFDSAFQAAESQQGALQPGQCVYGGKDDVPGALRVSMAG

SEQ ID NO: 333492 - protein, 90 aa, Zea mays
  Clone ID: MRT4577_67258C.1.pep
RCCRVDKLSQDTVYYDPQRDVSDSGGNQNVESSVPHVAQSSRGMADVAHSHMPYSSSDQHVYNPVEYANYYYSYPQATNDSSVQQGADSN

SEQ ID NO: 333493 - protein, 64 aa, Zea mays
  Clone ID: MRT4577_67259C.1.pep
NFQFDRRVTQPTESPVISLCNPSQHNIQGVRPKFKPKNAVHISHRQHLYGDRTRYYSQLQEIHQ

SEQ ID NO: 333494 - protein, 64 aa, Zea mays
  Clone ID: MRT4577_6725C.1.pep
ICGNFLKRSRVYSYCPPPIRLHTFSCGVFPIIYAWCIRKFGYNKSHRGLLCIMAKRTCQKERSL

SEQ ID NO: 333495 - protein, 88 aa, Zea mays
  Clone ID: MRT4577_67260C.1.pep
ANAKVKFRTDTVTQANQTRRLKRHSACWAGRRFTFTSLAWEYPSPSSSISLPSGCAVQRTQEQQTRCRCHGIFFQFTYHGFRSPRGPS

SEQ ID NO: 333496 - protein, 75 aa, Zea mays
  Clone ID: MRT4577_67261C.1.pep
TSIPMEVILRKQRLLANPSMKQAMLFPQPAQAGDAFHQILNGLARKLPHGEDVFLKPGQKVLNWTEGPRGDLKPW

SEQ ID NO: 333497 - protein, 426 aa, Zea mays
  unsure (1)..(426): unsure at all Xaa locations
  Clone ID: MRT4577_67262C.1.pep
WGRGRGARGLWPWRSPSRFSPALAPSLSPGRRTPSGSKVLDLAWPGSAGDVLEDDPVGRLKVYVYELPTKYNKKMVAKDSRCLSHMFAAEIFMHRFLLSSAIRTLNPEEADWFYTPVYTTCDLTPXGHPLPFKSPRIMRSAIQFISNRWPYWNRTEGADHFFVVPHDFGACFHYQEEKAIERGVLPLLRRATLVQTFGQKDHVCLKEGSITIPPYAPPQKMKTHLVPPGTPRSIFVYFRGLFYDTANDPEGGYYARGARASVWENFKNNPLFDISTDHPPTYYEDMQRAVFCLCPLGWAPWSPRLVEAVVFGCIPVIIADDIVLPFADAIPWEEIGVFVAEDDVPRLDTILTSIPMEVILRKQRLLANPSMKQAMLFPQPAQAGDAFHQILNGLARKLPHGEDVFLKPGQKVLNWTEGPRGDLKPW

SEQ ID NO: 333498 - protein, 93 aa, Zea mays
  Clone ID: MRT4577_67263C.1.pep
QERANEPPTKKGVAASQRQGNGPKRAPILVYWATRQRPVNAVGKKKTQYLSREKKKKKKKKKKKKRHQKKEKKKKKKKKKNKKKKKKAALELQ

SEQ ID NO: 333499 - protein, 72 aa, Zea mays
  Clone ID: MRT4577_67264C.1.pep
PRGSTHPEFWKTKLIQTPTTLHHITPHTKLHHTPRYTLHITHYTFTYFTFHITHYTLHINYLKNTQSLQFLI

SEQ ID NO: 333500 - protein, 87 aa, Zea mays
  Clone ID: MRT4577_67265C.1.pep
SLQSLRPPAGQAGKELAGKECEHKRSSPHCELHTCPAPTAGNLMLPHLPPWPSLALPQEEGRGCTSSPVLLIGLAVGGGEERTYMVE

SEQ ID NO: 333501 - protein, 249 aa, Zea mays
  unsure (1)..(249): unsure at all Xaa locations
  Clone ID: MRT4577_67266C.1.pep
MATLTSLASNPNPNKSFEVLPNPGDSLSSLSFSPKSNLLVATSWDNQVRCWEIGNGNSQPKASISHDQPVLCSAWKDDGTTVFSGGCDKQVKMWPLLSGGQAQTVAMHDAPVKEVSWISQMNLLVSGSWDKTLRYWDTRQPNPAHVQQLPDRCYALAVNYPLMIVGTADRNIVIFNLQNPQTEFKRIQSPLKYQTRCVAAFPDQQGFLVGSIEXGRVGVHHIDDXQQSXNFTFXCHREXNDIFSVIRSL

SEQ ID NO: 333502 - protein, 75 aa, Zea mays
  Clone ID: MRT4577_67267C.1.pep
MKPPLERNPSRKRHSWWWDSHISPKNSKWLAENLEEMDKQVKEMVQLIEEDGDSFAKKAQMYYQRRPVLVTHVEN

SEQ ID NO: 333503 - protein, 74 aa, Zea mays
  Clone ID: MRT4577_67268C.1.pep
NPLKLGGGDRAQGGPQVKKLNQAASVPCKNIQRWAEKKMRDTLSIIQMLYIDMPQGATLVTGDRPQKSGTKEPI

SEQ ID NO: 333504 - protein, 71 aa, Zea mays
  Clone ID: MRT4577_67269C.1.pep
NPMNMSMQYISNHSDLLKRSDGTLKEQVMVHGVLDGFSGQWLQTSDRQATGSAGPSSKVDQRRMETQEKEG

SEQ ID NO: 333505 - protein, 61 aa, Zea mays
  Clone ID: MRT4577_6726C.1.pep
PRVRPLIRPRFHKDLARRPMGRVLHGGPSRLLWTFIQSQCAGPMRHLTSLWIFGATVHYVT

SEQ ID NO: 333506 - protein, 84 aa, Zea mays
  Clone ID: MRT4577_67270C.1.pep
GGVVSVLGLRGPLFLGPPPRVVFLGVVVGRFSPHFFWPLSGRVSGWSPFLPLGSSPLGGPWLVPFWPFGPSLGGAGSWVPLLGG

SEQ ID NO: 333507 - protein, 47 aa, Zea mays
  Clone ID: MRT4577_67271C.1.pep
VLTRSPATGCTAFYYWNGGAITPFIFNADLKVENFNETAIVGASLSS

SEQ ID NO: 333508 - protein, 69 aa, Zea mays
  Clone ID: MRT4577_67272C.1.pep
TPPVGKGASRRPAAARRPGRVRQWHGPLGPKHPNVTQCGRRADAPPASLDYDLQAFHHNPSQRRYPPLA

SEQ ID NO: 333509 - protein, 37 aa, Zea mays
  Clone ID: MRT4577_67273C.1.pep
APVDHTIRYDSSLRRLTPVHYGTQWCAYRGKEVTTLL

SEQ ID NO: 333510 - protein, 109 aa, Zea mays
  unsure (1)..(109): unsure at all Xaa locations
  Clone ID: MRT4577_67274C.1.pep
MDRLSLTLGATLATTRAELMTSSSINSHRRLILAGGVVKGPLLTASASDGTSFVSGYPIPNNRLPIYTSYMTKPSCDISSILSRTXLFRRCCQXLTDIHAYCLRTVLNI

SEQ ID NO: 333511 - protein, 78 aa, Zea mays
  Clone ID: MRT4577_67275C.1.pep
MASRQHNAQFHKSKTLDNKYMLGDEIGKGAYGRVYKGLDLENGDFVAIKQVSLENIPQEDLNIIMVTFFLTYHIMHRK

SEQ ID NO: 333512 - protein, 365 aa, Zea mays
  Clone ID: MRT4577_67276C.1.pep
VGLTLMFLGLAIWVKLTPIFRITEFVSDTLGFLTNLLPNYVSGPLILALGLFFVFWGQSRTVGSISEVLQPDNDQELVDVLLAHRRLNKGAKIVVVGGGTGLSTLLRGLKHYSANITAIVTVADDGGSSGRLRREMGMLPPGDIRNCIGALADEEKLLTELFQYRFKAGDGLSGHSFGNLFLTAMAEITGDLEMAAIACSKVLAVRGKVLPATLDDVKLWAEMEDGRYVEGESNIPEAQGRIRRIGCLPESPKALPAVLKAIKAADYIIIGPGSLYTSILPNLLIPEIQTAIAKAKVPRIYICNVMTQPGETDNYTVSDHLTAIAKLPITNNRWGKSRRKLARVNSSFCTFNRKNPSITPKPCPS

SEQ ID NO: 333513 - protein, 58 aa, Zea mays
  Clone ID: MRT4577_67277C.1.pep
MLGDEIGKGAYGRVYKGLDLENGDFVAIKQVSLENIPQEDLNIIMVTFFLTYHIMHRK

SEQ ID NO: 333514 - protein, 82 aa, Zea mays
  Clone ID: MRT4577_67278C.1.pep
MSHQVNGDVSAAQYSAFVQHLLNYPVISDGVHTFKSNEFGQRSIKLTDAAYQTFAAPVVPYFAKPYQYVSPYVQKVDSLCDK

SEQ ID NO: 333515 - protein, 84 aa, Zea mays
  Clone ID: MRT4577_67279C.1.pep
GRPFFFFLFLFNKRRGIYTRGASHQFFFLLISSYIPADSGLKLAGHSRPHPHKFAATLSAHPGLARRWCFARQHTTLELFWALI

SEQ ID NO: 333516 - protein, 99 aa, Zea mays
  Clone ID: MRT4577_6727C.1.pep
VAVRVAFSLVPLFGFPVAPSPCVAVLSFLFVASFRSSVSPLCFVVCLCVPPFSPRVALLVFPCGSVPGLVSSLPSPLAAARASEVAWVGPAGPFRARPA

SEQ ID NO: 333517 - protein, 103 aa, Zea mays
  Clone ID: MRT4577_67280C.1.pep
GDCNFPPDPAMALLSPSLGPGWGPLVSPPRGLGLALRVAGAGAPILGYLVWALGGWVGNKLIGLEFFRNKLIGLEKKKKKKKKKKKKKKKKKKKKKHLPGRPL

SEQ ID NO: 333518 - protein, 48 aa, Zea mays
  Clone ID: MRT4577_67281C.1.pep
SGTNIFELRAIRKIVLTVASSGVASLLLPNGRTAHSRFRIPVGRAGNV

SEQ ID NO: 333519 - protein, 69 aa, Zea mays
  Clone ID: MRT4577_67282C.1.pep
SCPSWDCSPMQTLFPRCLPLPLDGQGPGLPWPPTFYVVPSVINSPAQCLSSPRASDTPKLNPAVLCTTP

SEQ ID NO: 333520 - protein, 190 aa, Zea mays
  unsure (1)..(190): unsure at all Xaa locations
  Clone ID: MRT4577_67283C.1.pep
LDILQLFADASVLKNNSQKSNAYPIRCSGEILLEAQNLLPCEMASFPCCYLGLPLSLQPRQQFPSFVDKIADQLPNWKAGLLTRAGRRVQVQHVLTSMTVYLAMAIDIPKWALDAIDKXRKGFLWRGRKEARVGXGHCLVAWGKVCRPMQLGGLGISSFTELCWAVXMRWLWLQKTDSSCPWTSLPIHVP

SEQ ID NO: 333521 - protein, 74 aa, Zea mays
  Clone ID: MRT4577_67284C.1.pep
KKKPPFAGPKNKRNRGSLPYPLKAQGLKESKGKINETPGNEGIQIGDHDCKNGRGPLGRKDQQPNPRPRFILSS

SEQ ID NO: 333522 - protein, 32 aa, Zea mays
  Clone ID: MRT4577_67285C.1.pep
QVRRKRISQRMKVFQDLVPVCNKVGIHRWFGS

SEQ ID NO: 333523 - protein, 62 aa, Zea mays
  unsure (1)..(62): unsure at all Xaa locations
  Clone ID: MRT4577_67286C.1.pep
MALLITRGKGAEPNVLERALLXKKKKKKKKKKEKKKKKKKKKKXXKXKXKKKKKKKKKKRGG

SEQ ID NO: 333524 - protein, 72 aa, Zea mays
  Clone ID: MRT4577_67287C.1.pep
VRILYTITPLFPTEIDFRSTLADEGVYFLAYLPESATSFDESHPSFLSSSAKTSLTYYALTYLVLGLIVEIP

SEQ ID NO: 333525 - protein, 129 aa, Zea mays
  unsure (1)..(129): unsure at all Xaa locations
  Clone ID: MRT4577_67288C.1.pep
ANSGAWSRGGGTRRAASSPAPRRHRLTPTPSPPPPATRAARRSTARTXAPKGLHAVYVGRSRRRYLVAQELVGHPLFQTLVHRAGGAGGPAGTVIVGCEVVLFEHLLWMLEHADPQPESLDELVDYYAC

SEQ ID NO: 333526 - protein, 65 aa, Zea mays
  unsure (1)..(65): unsure at all Xaa locations
  Clone ID: MRT4577_67289C.1.pep
FLCVLLRLPVXGLSVPXCCXLFXWGXAVXXXFCVVLSARCVQINPPLPXXLCGRXFNRVGRNGNS

SEQ ID NO: 333527 - protein, 190 aa, Zea mays
  unsure (1)..(190): unsure at all Xaa locations
  Clone ID: MRT4577_6728C.1.pep
GAPPPRPXSSQAPPSCLGCPRGPPKSFWTKCLPQXDPPPGGWGGAPPXPSRKVRAGTRKAPPLKNPPVKGXKEEIGLGGGSPEPPPRWFGGYXPKFLSGTRVFIPPPSPPYTGGPGIPPMSPSLGLGLGIGPRXFVPPPPPGCGPNPPPPQIQFCSLVFKKKKKKKKKKKKKKKKKKKKKKKKKKHPHTP

SEQ ID NO: 333528 - protein, 80 aa, Zea mays
  unsure (1)..(80): unsure at all Xaa locations
  Clone ID: MRT4577_67290C.1.pep
HAEVVDHMSHYLDKTILLNYHLYKNTTDHKSRVDNHSHNTDIRKLTXQVVFSHPYRAXTXFNRXTSPYLDKHAEALPEDD

SEQ ID NO: 333529 - protein, 111 aa, Zea mays
  Clone ID: MRT4577_67291C.1.pep
NARRQANTLFSSVIPGSVTDALDPANHHVIHNVVTADIKSCLAVHSVENSQNSSKFPSLKTVIYIVTHNGYFREYLIGTTKSNESSWLLEREFNLLDAYSGSPKQNELHID

SEQ ID NO: 333530 - protein, 98 aa, Zea mays
  Clone ID: MRT4577_67292C.1.pep
MGSEEEALIVVAWLVAHAKDIIQEGSPLPIIDYCRREDYGCSDIVTEGSLFMNIDCSRDVDCGGYGCAAMPSADMGPADSCRIASMTVLNEDLRRPFI

SEQ ID NO: 333531 - protein, 45 aa, Zea mays
  Clone ID: MRT4577_67293C.1.pep
PFFWGGFFLKKKKKKKKKKKKKKKKKKKKKKKKKKKKKKKKKKKK

SEQ ID NO: 333532 - protein, 70 aa, Zea mays
  Clone ID: MRT4577_67294C.1.pep
DSWLYIYAPVVASISPNIGRMDHLDRNSPAKPSPILNGGDTASRSIDIKPRIWEGEPDKAKPWELMEVLN

SEQ ID NO: 333533 - protein, 54 aa, Zea mays
  Clone ID: MRT4577_67295C.1.pep
PQSFLGKNPQEILEERTQSRGKLEPSSVPVFFQVITKNWPPEVIFPFKKRPTKL

SEQ ID NO: 333534 - protein, 100 aa, Zea mays
  Clone ID: MRT4577_67296C.1.pep
HRGQWRQCRQRFPRQHEVDGLAFNGAAHAVLAEPVVHVAPALGTLAEIKYRNMTPEAALDHVRSIRPRVLLAPSQWHAISSFGALTGGQLPVWSTNLACF

SEQ ID NO: 333535 - protein, 24 aa, Zea mays
  unsure (1)..(24): unsure at all Xaa locations
  Clone ID: MRT4577_67297C.1.pep
FNVLKICXNEKVMPTYNLDGYRYP

SEQ ID NO: 333536 - protein, 64 aa, Zea mays
  Clone ID: MRT4577_67298C.1.pep
MPALVDCNDSNIDYSGVEFCYYEGDDCRTDVVDEVTLLVGDAIAAPAVELPAEAPARSAEINSS

SEQ ID NO: 333537 - protein, 72 aa, Zea mays
  Clone ID: MRT4577_67299C.1.pep
KVYNVDSDPYGLKDHSIFKSVRPFTFEYAVIPKLHEWYLRHHVQAASAEAVSFRRTFGDEAWSQQLPCFGPL

SEQ ID NO: 333538 - protein, 82 aa, Zea mays
  Clone ID: MRT4577_6729C.1.pep
RIVVQQPCNYSGLFRHASVGIWGLDWQTEKRGKLLALETGVLFHGLKKAGWGPPVPWKGGFLGGSGAWTNQGGLASHRIFLG

SEQ ID NO: 333539 - protein, 109 aa, Zea mays
  Clone ID: MRT4577_672C.1.pep
SAKGFTTPQVWKTESPKRPTDQHSTWLASFLGLVLVCFASSSFFLTCWEVGSRSRCKNQGAPSSAVGFSFHRRRHDQTTAAELLSEGRAGMAAVTRLTDRAGCAAPHMT

SEQ ID NO: 333540 - protein, 76 aa, Zea mays
  Clone ID: MRT4577_67300C.1.pep
RAGARPRAAPRRHPLQHPFGHYYYYYGARSLRSPRQREAKERGSEGCAGGGVQLEREAAIWGGQESQIEEGNGGKR

SEQ ID NO: 333541 - protein, 107 aa, Zea mays
  unsure (1)..(107): unsure at all Xaa locations
  Clone ID: MRT4577_67301C.1.pep
MGNAQEANGALCETQTWYQEMLNLRALFXVLTRTHRHXIGLELGPLSAKELHQLEKQLECAKSHARHIKTLLIMDQVKXLRIKERHLGEINTQLTHNLEAAGCSNYG

SEQ ID NO: 333542 - protein, 146 aa, Zea mays
  Clone ID: MRT4577_67302C.1.pep
LSKGLTLSSVILYLLTSLCQRCILCMLGCALHCEDHRFIALALTRNGCTSLVCMIIYKKLVKTLRSKSPCCFSFQRPSCTLCPRLLDTGLLEEVGSPSLFLPNTPRNPRWMRLRLLTSCACSHSCACAHCPLSCLWTVAPSCITSS

SEQ ID NO: 333543 - protein, 56 aa, Zea mays
  unsure (1)..(56): unsure at all Xaa locations
  Clone ID: MRT4577_67303C.1.pep
HRLGVHFTSYIPXXRDXXXXSXGERWGSIPMRLRGPRFFXPMGXDXMSRVWGHYLP

SEQ ID NO: 333544 - protein, 92 aa, Zea mays
  Clone ID: MRT4577_67304C.1.pep
RPRVPPTLPLRRPVNLQRRFNVPPPVNLPPPPCHYLTKPPRPKPNPKPHPCPCQQPNPSPCQLKGTCGVGSTPILGQRVEFLRHKCSPTGTP

SEQ ID NO: 333545 - protein, 82 aa, Zea mays
  Clone ID: MRT4577_67305C.1.pep
LFFIGAGFKLGESGGLGFFCLRLQFPPNSPPRTRRAHPGGGKGGPICDLIQSACWGVFGGVSWGGPCLKQSLNTRATGVWGW

SEQ ID NO: 333546 - protein, 77 aa, Zea mays
  unsure (1)..(77): unsure at all Xaa locations
  Clone ID: MRT4577_67306C.1.pep
QSVFTSXXVRAPVELGVSXXYAVLYENILAAQAKAKXGVLYNRXSALXLCQLATCMYSLNEDPMELMVTKKKKKKRP

SEQ ID NO: 333547 - protein, 102 aa, Zea mays
  unsure (1)..(102): unsure at all Xaa locations
  Clone ID: MRT4577_67307C.1.pep
DGRTLPGFNFQKESPPPLVLPFRGGFQIFFKTFSGKTITLGVXRSAPLGNVKAKIPGKKGFPPNQQGFFFXGKQLEDGCPLTGFNIPKESPFPLVVPPRGGQ

SEQ ID NO: 333548 - protein, 137 aa, Zea mays
  unsure (1)..(137): unsure at all Xaa locations
  Clone ID: MRT4577_67308C.1.pep
KRKPKGTPPTPGHTPXLFKVNQRGPGKILYPGPAPPKGESQPPGGRYQGDPAGPQPGQKKGQRGSPGEKAGRPKVPPXPPGGQKGQPGGPQGGPPPNLIGGPPPPPSQRGNPXSPPPKKNRPPPGGGGLPIGPPSPS

SEQ ID NO: 333549 - protein, 75 aa, Zea mays
  Clone ID: MRT4577_67309C.1.pep
IPTMLSIETPQSLANKKVPWVNWFKNTGQPTKFGRGDIPEEFFKEIQKGQTRLDKKQKSTVGFLFAPNAPEPMLK

SEQ ID NO: 333550 - protein, 64 aa, Zea mays
  Clone ID: MRT4577_6730C.1.pep
SIICMPAVCSTKISFFGLGIDIVHRSKGRAMVILSLSVLLTFECKKSMFFVDCHHCLRLHKIIF

SEQ ID NO: 333551 - protein, 93 aa, Zea mays
  Clone ID: MRT4577_67310C.1.pep
LPLFYEVRIGKAPHSQNPFSRGVADSFNPLAPQIFSLENGPLAPPQLMGFGPPIGPPRFSLFFFGFFFFWKFDRVTIFPREQLWPLFSPGRNF

SEQ ID NO: 333552 - protein, 48 aa, Zea mays
  Clone ID: MRT4577_67311C.1.pep
FYILFFFQYLIIFFLIKFFNNPPPPYFHKNFLPFFLYYPNNPSFFIFQ

SEQ ID NO: 333553 - protein, 676 aa, Zea mays
  unsure (1)..(676): unsure at all Xaa locations
  Clone ID: MRT4577_67312C.1.pep
MPSGSTTENLLKQIYKKAGGGGQRRHQPCECDDDGIEDVLRRHLLANKKYLLILVGISSKTMLNCVRASLPDDNNGSRVVLVLDIENEEVAWHANAMNKTTGISHGLIHHLNRLDQDKSVELFCMRALRTNLSDETTVNSMMSKYREVVYNITSGYPLAIVVLAGLLRFKEKPGQWNAVLQQLRTTSSGPAAADQEAHQQDDQGGHTEEKTMSAPTSTTQAANNQLSTRTSIERVFWASFEDLPNALKSCFLYLAAFPKGTFLSTGSIVRLWMAEGFIRPQKGKTIEELGHDYFKELALRCLVQVSGMNEVGGITNVIVHGRLHGFLHSEAREAGFIDVHDMNDVFVPPSVRRLSFMSFQDGYTTFTNRFCKLRSFICXRKDSDNSIGSRGRVNNEEERWHDLNFLHGSDLLRVLYISGLRIKELPNEIGNKIHLRYLRVNTEHLKELPASIARLPNLQTLDIRDTEVEEIHPSFWEIKTLRHVIAKKLTLPPSIKEEMGELQTLRGVKPSEEEWDQDNCPLLKMSKLRSLELHGLIGARHGAALITALGQMHLLGHLKLKGDKISCCVFTGERLRYLQTVELDGTVQWPPVAEFNDLRFVRPNLVQLSLTNTNDAPEGIQQELRNAGFVRSYQQLQPVYRLSYRQGGALATKPEQQGEAGSNKMEQQHQGEEAEE

SEQ ID NO: 333554 - protein, 82 aa, Zea mays
  unsure (1)..(82): unsure at all Xaa locations
  Clone ID: MRT4577_67313C.1.pep
TWAMDRVLLHLHKLSEPASRCPVCYYHRTRQDAYPNYIYLTDGAITRRKQRCPHGGLLAERAQPRHLEPIGDLGARXHTRAR

SEQ ID NO: 333555 - protein, 53 aa, Zea mays
  Clone ID: MRT4577_67314C.1.pep
PSQVIEAQIEACAPSPPSSHSEHMIQAFWYSSHISTPSVSAVTSTKVIFARFP

SEQ ID NO: 333556 - protein, 62 aa, Zea mays
  Clone ID: MRT4577_67315C.1.pep
SVAPLGKQRHLPSSCIIRVRLSSDFRVESRQSGVTDRPVAAVVCCTRCSSGLERCLCYPWRP

SEQ ID NO: 333557 - protein, 144 aa, Zea mays
  Clone ID: MRT4577_67316C.1.pep
LGFFFFFFFFFFFFFFFFFFFFFKYYILLFFVFGFYRSWLQQHPSSITKTFLVAGGGGQNKKKKPTQKKKKERERTPTPRPAAESNGGTRGETPAGAERTQRAPPPPKRERKTKPTITEPPPRGTGPRTQTPGAPKAPTGEGGN

SEQ ID NO: 333558 - protein, 100 aa, Zea mays
  Clone ID: MRT4577_67317C.1.pep
PGGLKKGFSRPFPPPLLFPGGTLGPFLPRALLNVGALHLVPPPPCGGTCFWPPAKWKVTGFYPPKTPPGVVLFPGGLLPAFYFIPGPFKTDFGRAPPPRA

SEQ ID NO: 333559 - protein, 104 aa, Zea mays
  unsure (1)..(104): unsure at all Xaa locations
  Clone ID: MRT4577_67318C.1.pep
YPNRKTCSGGTFPLASRNSFINYTGXWKSAAAATKALAIEGYSMXCLSXKIQSPELTMLESAKHASPNGCDPSPXASCIEDYATHHTISDTDGGKDIVCIRQHL

SEQ ID NO: 333560 - protein, 181 aa, Zea mays
  Clone ID: MRT4577_67319C.1.pep
MDPSSAPRRCSFLLRLLLLAVAALALRLLYGAFLAVSAGPAGWPLYRPAATVATTTRTHVVQADVPSPEVWRTRRWRRAVDYHAAVLAPHIAAGALAPGSRAVCLGGAQEALAMRELGVARAVAVARKRAPPLVVAGHDRRLPFDASSVDFVFAERALDAAKRPGDLAAEGPRILKPEGPP

SEQ ID NO: 333561 - protein, 79 aa, Zea mays
  Clone ID: MRT4577_6731C.1.pep
PAGSCPFSPPATNSDDGLTHSRNSTGRRHADVSRVPDTHRDLTIAPEGQGAGSIDDQRGTRHDIENGLPSDTSESGSTG

SEQ ID NO: 333562 - protein, 80 aa, Zea mays
  Clone ID: MRT4577_67320C.1.pep
TIFCDLGTLADLCIQAGQAISFLRTVRRLWFVSSFSRPVFLVCPSMTGWVVISGHPNCFLRKKKKRGPSQNPSYVACTDV

SEQ ID NO: 333563 - protein, 98 aa, Zea mays
  Clone ID: MRT4577_67321C.1.pep
TPMGDPEKKKKKGSNPVEPHPFPLYLTRAFPSSITWPETAAAGESTDLVMSGPLGWPRTSLSPMGDDYVLMGEVLWLDNQGFLTGAPSLLRIRRLYLL

SEQ ID NO: 333564 - protein, 290 aa, Zea mays
  Clone ID: MRT4577_67322C.1.pep
METLLSPSTLFTLPLRGSSRRPSLAASVSSRPTVSCSSALKRPQAGAVAASSHGDGVGRNWMSFLHHGLAAAALSLAIGLTPAPAPAVASEFDVLNDGAPVDSYVVDDAGVLSRVTKSDVKRLARDLEARKNIRLNFITVRKLTSKADAFEYADQVLEKWYPTIEEGNNKGIVVLVTSQKEGAVTGGPAFIQAVGDQILDATVSENLPVLATDEKYNEAILSTAKRLAAAIDGLPDTGGPSFKENKRESNFKTKEETEEKRGQFTLVVGGLLVIAVVVPMAQYYAYVSKK

SEQ ID NO: 333565 - protein, 122 aa, Zea mays
  Clone ID: MRT4577_67323C.1.pep
MQDPVLLRLDSLGFSLALEWQTDTESDSCRPHQYGEESFQAWTRSRHVRIRVLERITHKLMEDSDCNYRDTKHEADPSTFLQCSQYDADKVMSGKAGQGNIALLRGGKRESISDKEGKRNGH

SEQ ID NO: 333566 - protein, 75 aa, Zea mays
  Clone ID: MRT4577_67324C.1.pep
RHAIKSRPRIQRNYVASRERVRWEPIGRTNPPNDQMTKRNKSHQIQSNKHDVKAATGADREAWVDRSGYRVGKGG

SEQ ID NO: 333567 - protein, 312 aa, Zea mays
  Clone ID: MRT4577_67325C.1.pep
MGKGDRSSWKATYFMKLAQYFTDYPKCFLVCVDNVGSKQMQEVRRSLRGDALILMGKNTMMRKAIKGALENNPALEKILPHIRGNVGFVFTREDLVEIRDRILDNKVQAPARAGAIAPLDVKIQPQNTGLGPEKTSFFQALQIPTKIAKGTIEILNEVHLIKKDDKVGASEATLLNMLNVSPFTYGLKILQVYDSGTIFSPQILDITPEDLRAKFLAGVRNISSVCLAIGYPTVASVPHSIVNGVKNLIAIAVETEITFKEAEMAKEYLKDPSKFAAAAPVASATPAASSAAAPAVEEEEEEDDDMGFGLFD

SEQ ID NO: 333568 - protein, 69 aa, Zea mays
  Clone ID: MRT4577_67326C.1.pep
RGCAACRPARCSQMQHACTTCGWLAFASLRTCLWELALPGRTLRRWASFGCVPIGTNSDVHSGRFVRRS

SEQ ID NO: 333569 - protein, 57 aa, Zea mays
  Clone ID: MRT4577_67327C.1.pep
KLTIFVAGLGIDCFFLNHIVRAQHPFQKRQNMHEIGIWLKQVLGLLGRGQTVLTFKY

SEQ ID NO: 333570 - protein, 42 aa, Zea mays
  Clone ID: MRT4577_67328C.1.pep
FRHMSGLLSLKGSSRSAKLIIFEYLIVEIRKDHLCVAIAKCY

SEQ ID NO: 333571 - protein, 154 aa, Zea mays
  Clone ID: MRT4577_67329C.1.pep
LGTSRPAAIPYLPIPCLHGSRARPAAHPTLPRFPPRIQPPCRSRSPAVVIPYLLIPYSRGSRVRPSAKHPPRLHPRNISAAGRKVADADALLARLESSLLVDALPPAAAGPAAGTPTLLELVGADRPGLLSEVFAVLHDLLCDIADARAWTHGG

SEQ ID NO: 333572 - protein, 71 aa, Zea mays
  unsure (1)..(71): unsure at all Xaa locations
  Clone ID: MRT4577_6732C.1.pep
MVLWVXGYGFFIWXXGXXXXDKIFGXIKGXKXXFNFVXIXXRXXXEXLXRTCLFEIXDEVIWWGIVYCVLG

SEQ ID NO: 333573 - protein, 98 aa, Zea mays
  Clone ID: MRT4577_67330C.1.pep
LQNRKSFRKLVALKLYKIVKIIAPGDDLKRMRITDFFALKGKSDHHCLELYRGTQNRGGVFPPTDRKKQSILIVPQKGKRAPKLTFEAGIQASNQIIW

SEQ ID NO: 333574 - protein, 37 aa, Zea mays
  Clone ID: MRT4577_67331C.1.pep
SICYLNEEWARIPCESRPSRLDSVLGSLVFSAFSHFR

SEQ ID NO: 333575 - protein, 93 aa, Zea mays
  unsure (1)..(93): unsure at all Xaa locations
  Clone ID: MRT4577_67332C.1.pep
PPSPSSPPPVGPSLGPGPSGSLPSSLRXLRPRSWPGLSFRSSGGRCWGPCPPPPPCRASPSAACSFPLPARLLRSLRPPSWLSVLGPVVSGPS

SEQ ID NO: 333576 - protein, 40 aa, Zea mays
  Clone ID: MRT4577_67333C.1.pep
MGVCGRCSCDTDPRFSLDAGRMSVSDMGFSWDEPCASWDG

SEQ ID NO: 333577 - protein, 83 aa, Zea mays
  Clone ID: MRT4577_67334C.1.pep
ARMVRPKECNSSWYILSPSIIIHRSLCRYVFTLVFREVLSTTAYRHAAQDSATHDSPSLNVRMRPPSAVVHIRLARENSALSP

SEQ ID NO: 333578 - protein, 83 aa, Zea mays
  Clone ID: MRT4577_67335C.1.pep
ILKKKKKKKKKKKKKKKKKKKKKKKKKKKKKKKKKKKKKKKKKKKRVGLGPKQPKGKIFKFSTKLGGVWDYFKGPKLPLMGGE

SEQ ID NO: 333579 - protein, 55 aa, Zea mays
  Clone ID: MRT4577_67336C.1.pep
MATTAASSLLKSSFAGSRLPSGTRTTTPSSVAVGTPRAGVGPIRASICCSPTPPY

SEQ ID NO: 333580 - protein, 75 aa, Zea mays
  Clone ID: MRT4577_67337C.1.pep
SPGWPFFSWPRFPAERLWAPLFIVLLAPASFSSVECGIGGSLSRPACLFARLGPLVPLGAAVCGFALRRPAVIFR

SEQ ID NO: 333581 - protein, 103 aa, Zea mays
  Clone ID: MRT4577_67338C.1.pep
CLSARCTCPCTGSGCTAPGWSAVRGRRTPCTPPGQSPSCPRTAWSRSCPAPYSLQRRRAATLFFFAFAIRGAQTSVRDSSTRSPDDDATLLIYINLSIAIGDC

SEQ ID NO: 333582 - protein, 156 aa, Zea mays
  Clone ID: MRT4577_67339C.1.pep
LRRNLQRLIVPPDLPITDTLIVTQSNRTQTPRRLTRSPNPHDASHGLRICDDNSILARAAEAPATGRWPRGREGDGARGRVRCHGGRGGGGAGGERGRGALFVVFPPRPPARSGASGSPSESRDQRDWSSSRSIVDAQTPPTGLLRRTLTLPPTAK

SEQ ID NO: 333583 - protein, 164 aa, Zea mays
  unsure (1)..(164): unsure at all Xaa locations
  Clone ID: MRT4577_6733C.1.pep
MVKEEDLANMXPYLRAVIKETLRLYPPTPLLLPHFCMEDCEVGGYTIAAGTRVIVNAWALGRDASAWEKPDEFAPERFLDGGSSADADFRGRDFKFVPFGAGRRMCPGINFGMAVVELMLANLLYCFRWELPPGMTPQDVDMSVRYGLTSRRKEKLLLVPRLAV

SEQ ID NO: 333584 - protein, 85 aa, Zea mays
  unsure (1)..(85): unsure at all Xaa locations
  Clone ID: MRT4577_67340C.1.pep
PDAAVAYGAAVQGSISHGEGGEETKDILILDTDPLTLXIETYGGVMTKLIPRNTVIPTKKSQVFTTYQDQQTTVSIQVFEGERSL

SEQ ID NO: 333585 - protein, 80 aa, Zea mays
  unsure (1)..(80): unsure at all Xaa locations
  Clone ID: MRT4577_67341C.1.pep
FXFFFFFFFFFFFFFFFFFFTPRGGSIHGNKSGGDLVSFTPRKTSFLGGYSYLFRFLNFSFPSSIFIKNGFFGNPFDELP

SEQ ID NO: 333586 - protein, 98 aa, Zea mays
  Clone ID: MRT4577_67342C.1.pep
GKKELGQMGAPPGLPGPWGPPKIKVLKRGAFKGVLLNGLKIFFKKWFFGGNLFKTWPPFFFFGSPGVGSQPFPKPFMPLPRFWAGLNWSPKPFLFFVP

SEQ ID NO: 333587 - protein, 202 aa, Zea mays
  Clone ID: MRT4577_67343C.1.pep
SWPEAAPAGNAGADRPDGNGAPAEEPEDHDMPQLVEADVEKALWAQIGILHGGGGLFGDSRYGAQEELDEEEVKEIDSARARRRKAAYEMAIASGGASSLILSNYAQLLYEFDKDIERAEMYFKQAVAAEPADGEAMRRYGMFLWHARGDTGGAEDMFTGAIDAEPESSHHRSSYAWFLWMTGGVETCLMDTGRQSDGNDAD

SEQ ID NO: 333588 - protein, 52 aa, Zea mays
  Clone ID: MRT4577_67344C.1.pep
MKTNLHCFSVPSSLEAITYTIGNDSLYCNFNVANQKQRSCCTWNMCCKNSPG

SEQ ID NO: 333589 - protein, 69 aa, Zea mays
  Clone ID: MRT4577_67345C.1.pep
RRLYIYKSLQLPATYSLERRKCLRRVNGPSRRAEAIVGRALGHSVVLIVASLSSMWTTRSIQRSGQEDL

SEQ ID NO: 333590 - protein, 60 aa, Zea mays
  Clone ID: MRT4577_67346C.1.pep
WVLVVNSSRQLGAVLWSIALSPSTKESTPLSLLCHGVRCSVDSLVVRSPRHIPFGYVITS

SEQ ID NO: 333591 - protein, 125 aa, Zea mays
  Clone ID: MRT4577_67347C.1.pep
GDLRAQLDAEKARQERADEAIRKEREAGSPAMAWIDADLGAMGHDDLVAFWAALAGVQAAVAASADQLLRDALLVGRRGRQQQQPAAQLGGGGVAFDVGAFGIAGVGLQGFGGQAAAILGAGGPS

SEQ ID NO: 333592 - protein, 119 aa, Zea mays
  Clone ID: MRT4577_67348C.1.pep
APPCRRPCFRTSRRVVSSSHGARTSARVQDLCARASARPVSPFARAAPCWPAQFPGCRARISSSVPSLDFCLVACYFLVPWSRSDASCQGYSYTCVLVPLLAVGPTVSSFPASVALGSK

SEQ ID NO: 333593 - protein, 225 aa, Zea mays
  Clone ID: MRT4577_67349C.1.pep
MVSKYLEMESLDSENPIEVENGMLLHSGNNDDVPSRLGKVEFTDSENPAKAEDGKLTRFGVAVPDTAGKAEGHHNESPLSCVSTTGSFTTLYATTQSFSEPNSEPSETNVEASPRQCHREKSQDVTDGEADSSETPPKDEVIKPVISVNLQPEQSVVQQDIVDMYMKSMQQFTESLAKMKLPLDAENRSPSDEGSYSSTIEKASPSPPSSASKGSRVFYGSRAFF

SEQ ID NO: 333594 - protein, 50 aa, Zea mays
  Clone ID: MRT4577_6734C.1.pep
METFFFGETLKYLYLLFDENKTLPLNKYVFNTKAHPFPVMGFAKKASHFG

SEQ ID NO: 333595 - protein, 138 aa, Zea mays
  unsure (1)..(138): unsure at all Xaa locations
  Clone ID: MRT4577_67350C.1.pep
SSAERGRAPNLKKLKISEERVLPSEKTWXFPARFPVVGFXGTALGLRTKVFLWKTYPSSSQTXFLAIPQWGLMSGGTTLLLMYMSNIVYFHKLTLFFYGVRRRXTNQXRVEVFFAPWIACLFLAIGVPPSVATEPLPQ

SEQ ID NO: 333596 - protein, 107 aa, Zea mays
  Clone ID: MRT4577_67351C.1.pep
GGRGAPRPEPRPASSAFCADVLLPEQRRDVGDVLGSCLRGVRWRRRSRAARRPRCNRAALGRTGWSVHAPHHGNISATRCRAPRRPLPPPPPPPPPPPPPPPPPPPP

SEQ ID NO: 333597 - protein, 50 aa, Zea mays
  unsure (1)..(50): unsure at all Xaa locations
  Clone ID: MRT4577_67352C.1.pep
TAXIYIYIYMGYKRPLKTYNMITVTHLIGGAFPKAGGSTSTNSGPHFCKT

SEQ ID NO: 333598 - protein, 79 aa, Zea mays
  unsure (1)..(79): unsure at all Xaa locations
  Clone ID: MRT4577_67353C.1.pep
ILDTVKFNNRSTHQPKLQPNKSSILIIPPKPNLLAKNTFIAQLTIHHITKISIKIXLLHLHPQTPTYPTPLKSFHKIVL

SEQ ID NO: 333599 - protein, 47 aa, Zea mays
  Clone ID: MRT4577_67354C.1.pep
MGGRTRTNTARSLLVMYHNTTVEMHHVLCYTSQITAELEIALMLFLV

SEQ ID NO: 333600 - protein, 55 aa, Zea mays
  unsure (1)..(55): unsure at all Xaa locations
  Clone ID: MRT4577_67355C.1.pep
FLXQLHRRXXKXXIVLXVHWMXGSVQHLQQXXPRXXNXRRGXHQDXKLCSXXRXX

SEQ ID NO: 333601 - protein, 483 aa, Zea mays
  unsure (1)..(483): unsure at all Xaa locations
  Clone ID: MRT4577_67356C.1.pep
MIYTIGHLESYVIQKFLDAKRIYNLTNYLEKLHDRGLXSKDHXTLLLNCYTKLKDVEKLNHFIKDEDGVGEIKFDVETAIRVCRAAGYHEHAMFVARKGDNAEYAGKILLEDLGRYDGALQYISGLEANQAGLTVKEYGKILVEHRPAETVEILLRLCTDVGDPTSRRGSNSMHLLMIPSPMDFVNIFVHSPQYLMGFLENYIKTVTDSPAQTEIHNTLLELYISNDLSFPSISQENEYENHYIKETKGKETANVYRSGIKEKTGLGKEDPKVAKNIVDRRRKGLALLKSAWTSEMEDPLYDVDLALILCNTNAFKDGLLFLYEKLKLYKEVISCYKQAHDHQGLIACCKKLGDSSQGGDPSLWGDLLKYFGELGEDCSKEVKEVLTYIEKEDVVPPIVVLQTLSKNPCLTLSVVKDYIARKLEQESKLIEDDRKSIDKYQAETELMKREIQDLDTLTELHGHFNVVMSACIWSCCGGDVHAK

SEQ ID NO: 333602 - protein, 144 aa, Zea mays
  Clone ID: MRT4577_67357C.1.pep
NGVIIGPNNICINLLKDYRKSIDKYQAETELMKREIQDLKTNAKVFQLSKCSACTFTLDLPAVHFLCMHSFHLRCLGDNEKECPECAPEYRSVMEAKQKLEQNARDHDLFFRQLRGSKDGFSVIADYFSKGIVSKTTLPPENGR

SEQ ID NO: 333603 - protein, 95 aa, Zea mays
  unsure (1)..(95): unsure at all Xaa locations
  Clone ID: MRT4577_67358C.1.pep
RPQTGAHTRSPGRGGGTSRQQAPPPXXXGXKKKKHPPPTSGATKKKTTTPAXRASNEAGATKAGGRRAAPRRSXGTPLPPLXXRPPHHTCFYAAP

SEQ ID NO: 333604 - protein, 352 aa, Zea mays
  unsure (1)..(352): unsure at all Xaa locations
  Clone ID: MRT4577_67359C.1.pep
MATITTPLRSALFSPAASSAGRHRGGRRRAPSSVRCDASPPSHAAAASLDPDFDKKAFRHNLTRSDNYNRKGFGHKKETLELMSQEYTSNVIKTLKENGNQYTWGPVTVKLAEAYGFCWGVERAVQIAYEARKQFPEERIWLTNEIIHNPTVNKRLDEMGVEIIPVDAGIKDFNVVEQGKYIIVKNMAEGDRQPXNHSTMLTGETEEIGRLNATAMMQKYGVENVNDHFMAFNTICDATQERQDAMYQLVKEKVDLILVVGGWNSSNTSHLQEIGELSGIPSYWIDSEQRIGPGNRISYKLNHGELVEKNNWLPEGPITIGVTSGASTPDKVVEDALQKVFEIKRQEILQVA

SEQ ID NO: 333605 - protein, 69 aa, Zea mays
  unsure (1)..(69): unsure at all Xaa locations
  Clone ID: MRT4577_6735C.1.pep
NTNRPDKAKATTHHKDPIXPHQQPPIYPGKQLADSHTLADYNTQKEPTQHLLHRLHAGAKKPTKNTDTK

SEQ ID NO: 333606 - protein, 96 aa, Zea mays
  unsure (1)..(96): unsure at all Xaa locations
  Clone ID: MRT4577_67360C.1.pep
MAASPDEVQLMHLLNEILGAKNSMQVGVLTAYSLLCTXLLLPDDGHIVAIHVTRESYDQIGSTIIQKAGVAHNIHYRVGLALPVLDQMDSNEWNKG

SEQ ID NO: 333607 - protein, 230 aa, Zea mays
  unsure (1)..(230): unsure at all Xaa locations
  Clone ID: MRT4577_67361C.1.pep
MARALTMGVVAAAAVLVFLCATAVPAAAQGKKGLPKNSHVIHPKQFGRREQVLSCDDTADGNTPCVATCDKRCPNECVVLCPGCKTYCICDFYPGVSCGDPRFTGADGNNFYFHGKKDQDFCVVSDTDLHINAHFIGKRNPTMSRDFTWIQALGIRFADHRLYMGAQKTVKWDSNVDHLELAFDDMPIEIPTAIDAQWQSTTVPALTITRSATTNGIRVQTXGVFDILAN

SEQ ID NO: 333608 - protein, 74 aa, Zea mays
  Clone ID: MRT4577_67362C.1.pep
IDEPYVREMAEAHLHNWLVASLEGPAPESSRATTSCSFSSSISYSSESLSTLRRSCRTAAPFTCTTLPTGWRCF

SEQ ID NO: 333609 - protein, 35 aa, Zea mays
  Clone ID: MRT4577_67363C.1.pep
YAYASLQQLRHHSLGWCKLTYAYYNELKFISEEKL

SEQ ID NO: 333610 - protein, 175 aa, Zea mays
  unsure (1)..(175): unsure at all Xaa locations
  Clone ID: MRT4577_67364C.1.pep
EAGRAGNSRYSSSLQLPAGRPRPACPAVRRLHPARPALHSGQRAPPRPVVRPACPATPCSPAFPAPPLAKSVRHNFSRGIESYHMYGGDDHFRLVKRMXVQIYLXGHRGSDPANPDVLCSQKATDHLVTYGEEMSSQHGPDYDWRTSPIDPQAVYASGEKAHGRYTMFTNVIDSS

SEQ ID NO: 333611 - protein, 26 aa, Zea mays
  Clone ID: MRT4577_67365C.1.pep
SKTSIDTDSSDTVHVNLQHIQAANIV

SEQ ID NO: 333612 - protein, 109 aa, Zea mays
  Clone ID: MRT4577_67366C.1.pep
ATPKPMLGHLLPKSASGATSAAWPPRRTPTALTSGSRLDPRVAKFQCRRPRNRRHVKQVQLRLQLLLYYLHGSLPLDFRLYPTDLGVPGGNRALVCLHWLLHCWVVIPR

SEQ ID NO: 333613 - protein, 68 aa, Zea mays
  Clone ID: MRT4577_67367C.1.pep
CTPRLGFESEGIDIAASDVEYSSFDGGIAWGTDEHSLQNAFSMLRRVPRVQDYPQIVQRRGLAASRSS

SEQ ID NO: 333614 - protein, 84 aa, Zea mays
  Clone ID: MRT4577_67368C.1.pep
HRLSHKDHSCTCLSHRLTHMIGHTYGHVAEAAAHWYCPPVPRACEKSLPTSGLCAALGRAVPVPLATGRVSPTPASTCPPAGAT

SEQ ID NO: 333615 - protein, 208 aa, Zea mays
  Clone ID: MRT4577_67369C.1.pep
ASERWTAAQLLEHPFLASAGEAEDDAKPRWVSPKSTLDAAFWELDEEEEEEEMSESATDRIRALAGPCSALPDWESDDDGWIEVSSGYSELPNAAAAAVAGQEVRFPSTQCEIPSTAVATSSEQAPVAAPASETTSYGIFGGGDESESELFDADSDVGDDPVHNVGAADAYYAHRQQLDVYANFTGDPIVLHLDIYAEEIVKKYFFTA

SEQ ID NO: 333616 - protein, 136 aa, Zea mays
  unsure (1)..(136): unsure at all Xaa locations
  Clone ID: MRT4577_6736C.1.pep
PPIAQSTRSPHRNERNTRGHKRRERTCRLWGACGYIGTVADHPNIPTAKPECGYRLEAGREDYPDQHNCLDDDQNHVMSSLQNGAPEKCTLENAHGTDEELPSDDEMGDRDSGHNALGAVRXISRQDAKMVYQAPA

SEQ ID NO: 333617 - protein, 71 aa, Zea mays
  Clone ID: MRT4577_67370C.1.pep
MGRSRVRAIKGKTLGGFFFSRIGQKLAHFPRPPPVTSHFCFWLVTWHLGFFFVLPLGQMGFKGGSRASFEN

SEQ ID NO: 333618 - protein, 407 aa, Zea mays
  Clone ID: MRT4577_67371C.1.pep
WRTKFRMAMNKADNASSTVAVDSLLNYETVKYFNNEQFEVEKYDKYLRNYEDAALKTQSSLAYLNFGQNVIFSSALSTAMVLSSYGIMSGALTVGDLVMVNGLLFQLSLPLNFLGSVYRESRQSLIDMKSMFQLLEEKPAIKDEPHAQPLQFKGGCIEFENVHFGYVPERKILDGATFTVPAGKSVAIVGTSGSGKSTILRLLFRFFDSTSGSIRIDGQDIRGVTLESLRKCLGVVPQDTVLFNDTIKHNIQYGRLSAKDEEVFDAARRAAIHDTITNFPDKYDTIVGERGLKLSGGEKQRVSIARVFLKEPSILLCDEATSALDRTTEASILNSLKSLSSDRTSIFIAHRLTTAMQCDQIIVLEDGKVVEQGPHDFLLSQGGRYAELWYQQNSTDAMDSAAASVEV

SEQ ID NO: 333619 - protein, 483 aa, Zea mays
  Clone ID: MRT4577_67372C.1.pep
MVFNVVPTILEIGMVSSILAYKFGSTFAWITSVSVATYIAFTLAVTQTVKYFNNEQFEVEKYDKYLRNYEDAALKTQSSLAYLNFGQNVIFSSALSTAMVLSSYGIMSGALTVGDLPEALFLEKRRRTASRYIKKKEKVMVNGLLFQLSLPLNFLGSVYRESRQSLIDMKSMFQLLEEKPAIKDEPHAQPLQFKGGCIEFENVHFGYVPERKILDGATFTVPAGKSVAIVGTSGSGKSTILRLLFRFFDSTSGSIRIDGQDIRGVTLGSLRKCLGVVPQDTVLFNDTIKHNIQYGRLSAKDEEVFDAARRAAIHDTIMNFPDKYDTVVGERGLKLSGGEKQRVSIARVFLKEPSILLCDEATSALDSTTEASILNSLKSLSSDRTSIFIAHRLTTAMQCDQIIVLEDGKVVEQGPHDFLLSQGGRYAELWYQQNSTDAMDSAAASVEKLYRCQKKTSDFPRSLQGLLAVPGSWSTLTIVDRVK

SEQ ID NO: 333620 - protein, 108 aa, Zea mays
  unsure (1)..(108): unsure at all Xaa locations
  Clone ID: MRT4577_67373C.1.pep
TKRKDCCAGPTEMRQQRAAXXQXXDQRGQNXRXTGTSXXARXTPRALKETPQXEVASSGTDAETGSRXXGRAXPXGIXGPXAEDAAXPGRXDEDESGRHRGGAPASEA

SEQ ID NO: 333621 - protein, 63 aa, Zea mays; identical to SEQ ID NO: 312667
  Clone ID: MRT4577_67374C.1.pep

SEQ ID NO: 333622 - protein, 91 aa, Zea mays
  Clone ID: MRT4577_67375C.1.pep
VYFNDLLIGGLIELRKMEDSGILDENIDVLFNEESPYSAPLPPLLGEDDESGSGKIDELATIVKKMRESITPKDRFYKMRRFSNCFLGSEA

SEQ ID NO: 333623 - protein, 101 aa, Zea mays
  Clone ID: MRT4577_67376C.1.pep
CYFSKKNGRMTAVFCHGKGKLYKKKKHSTTDHHLVPCAICTSVWGTSSVLFRRPPRRFFFLFALVCPSRSPVECCCAPATYTRVPPLRPPLCAPSRLLLIP

SEQ ID NO: 333624 - protein, 72 aa, Zea mays
  Clone ID: MRT4577_67377C.1.pep
LKNLPPSQKKKKKKPNKKKKKKKKKKKKKKKKKKKKKKKKKKKKKKKKKKKKKKNKKKKKKKKKKYSALLPL

SEQ ID NO: 333625 - protein, 95 aa, Zea mays
  unsure (1)..(95): unsure at all Xaa locations
  Clone ID: MRT4577_67378C.1.pep
RGPVLAGAALLAGAAGAGAQXGVWSIITRPMFQSMXLSHRGDSGCQGAFYTYDAFIVAASEGPRXFCSTGDEQTRKRXLADFLRPTFLNTTGGCS

SEQ ID NO: 333626 - protein, 49 aa, Zea mays
  Clone ID: MRT4577_67379C.1.pep
SGLYLLSAQVLNIRSHTWIDDHISSLPNNRNSKCSRLFKNGVNEGWVCT

SEQ ID NO: 333627 - protein, 115 aa, Zea mays
  Clone ID: MRT4577_6737C.1.pep
NGEKRFNQLSIEERGKFDEETLVNVNSIKRNKGGSQRSSGFSNEYIVITILVAAEGVHKVPVINSSNDLKTALQKMGAIPSRKILAVEVLWTPQNENDTLSERELLEDYPLLRPL

SEQ ID NO: 333628 - protein, 491 aa, Zea mays
  Clone ID: MRT4577_67380C.1.pep
MGDYGHGGGQMRGNPDSRPRGQGQRPNVQQLKLMGQIHPTGLTPNLLKLFEPRPPLEYKPPLEKRKLPAYTGMAQFVSHFAEPEDPEYAPPVPKCETRAEKKARIRNNKLEQGAAKVAEELQKYDPQSDPNATGDPYKTLFVARLNYETSEQRIKREFEGYGPIKRVRLVTEKDTSKPRGYAFIEYVHTRDMKNAYKQADGRKVDNRRVLVDVERGRTVPNWRPRRLGGGLGSSRMGGTDTDKKDSTREQQQGGRPRSEEPRRDDRRADRDREKSRERVRERDREERTRERSHDRTRDRDLRDEKHHHRDRERTRDRERGKDRERDHGRDRERDRRDRDKDRGRDYDRERDRGRSHDRHRERGRDRGERDYERTSHERDRGHMHERDADYGNGGTKHDKNLSSYGQDYGYGQYEQHKGHDAYGYSQDVRGHETEHSKRHEHEYYRVDSYGKMEANYQMPPNNAEPEGPEEGEAYEEGDYQYHRSGEHMKEA

SEQ ID NO: 333629 - protein, 72 aa, Zea mays
  Clone ID: MRT4577_67381C.1.pep
VVLHAVELFHVGTALAWPFRVLIIPCDGGPFISAFIALFQDAVPALDARRCALMVLYILKLHGLTASSRESM

SEQ ID NO: 333630 - protein, 328 aa, Zea mays
  Clone ID: MRT4577_67382C.1.pep
MCKVRLVTEKDTSKPRGYAFIEYVHTRDMKNAYKQADGRKVDNRRVLVDVERGRTVPNWRPRRLGGGLGSSRMGGTDTDKKDSTREQQQGGRPRSEEPRRDDRRADRDREKSRERVRERDREERTRERSHDRTRDRDLRDEKHHHRDRERTRDRERGKDRERDHGRDRERDRRDRDKDRGRDYDRERDRGRSHDRHRERGRDRGERDYERTSHERDRGHMHERDADYGNGGTKHDKNLSSYGQDYGYGQYEQHKGHDAYGYSQDVRGHETEHSKRHEHEYYRVDSYGKMEANYQMPPNNAEPEGPEEGEAYEEGDYQYHRSGEHMKEA

SEQ ID NO: 333631 - protein, 43 aa, Zea mays
  Clone ID: MRT4577_67383C.1.pep
TLDDRGVRPTPISRLGGRPSYSSTHLQAPPHLPHESLAAQCSS

SEQ ID NO: 333632 - protein, 328 aa, Zea mays
  Clone ID: MRT4577_67384C.1.pep
SFQVRLVTEKDTSKPRGYAFIEYVHTRDMKNAYKQADGRKVDNRRVLVDVERGRTVPNWRPRRLGGGLGSSRMGGTDTDKKDSTREQQQGGRPRSEEPRRDDRRADRDREKSRERVRERDREERTRERSHDRTRDRDLRDEKHHHRDRERTRDRERGKDRERDHGRDRERDRRDRDKDRGRDYDRERDRGRSHDRHRERGRDRGERDYERTSHERDRGHMHERDADYGNGGTKHDKNLSSYGQDYGYGQYEQHKGHDAYGYSQDVRGHETEHSKRHEHEYYRVDSYGKMEANYQMPPNNAEPEGPEEGEAYEEGDYQYHRSGEHMKEA

SEQ ID NO: 333633 - protein, 110 aa, Zea mays
  Clone ID: MRT4577_67385C.1.pep
GTASAETESEAGSETVDTSALASVTSALAEASESVQDKLDSLSSAAETATGTASQAIEDQIASLTSKAGAISSSDGAAASSATDDNAGAMPTAAVAMGALMGGAALFVNM

SEQ ID NO: 333634 - protein, 252 aa, Zea mays
  Clone ID: MRT4577_67386C.1.pep
PAGIGRGCCSQQASSQEGLWCTYAYSQETVTHLLSKLIARLNETKASDPISKLVIRLDQQYPGGDVGVFSCLMLNYIVMEPGQAIFLGANEPHAYLSGDCVECMATSDNVVRAGLTPKFKDVDVLVNMLTYRYGSAESQKMTPIKFGEHSLLYDPPIDEFSVVWTKLGAEETENQKPIEGPSVLIVTSGSGKLTGEALKTESDYELKEGYVYFVGANTPIVTQSGNSGLQFYRAFGVVANHIISIILPYNLQ

SEQ ID NO: 333635 - protein, 89 aa, Zea mays
  unsure (1)..(89): unsure at all Xaa locations
  Clone ID: MRT4577_67387C.1.pep
KKLPKLCLRDFFAFLYXTTQFPSCINSSAKITHQQNPSDLKHTTYYTLMITHALPSPTRSATASRCLCRPQPAQHRRGTASCARTTRPA

SEQ ID NO: 333636 - protein, 70 aa, Zea mays
  Clone ID: MRT4577_67388C.1.pep
MEYGQQVQHGHGATRHVHQYGNPFGGVELGTGGMSHGTGTGGMGQLGEHGGAGMGGGQFQPESEEHNTVG

SEQ ID NO: 333637 - protein, 102 aa, Zea mays
  Clone ID: MRT4577_67389C.1.pep
MPMAVILHFAGSCALLVASVLSLPPAVFKVGDERGWTVPANGTETYNHWAKRNRFQGGDVLNFKYANDDSVLLVAHDDYKQCGTAIPLSRVTGRDTNFTPDR

SEQ ID NO: 333638 - protein, 59 aa, Zea mays
  Clone ID: MRT4577_6738C.1.pep
YHCLSRCNFSPACTYIHYTRIVNDSHANIRHIYIPDRHGYTHIIDMRDHMVHACTDDDY

SEQ ID NO: 333639 - protein, 80 aa, Zea mays
  Clone ID: MRT4577_67390C.1.pep
HCQLDSTRPTSDHMLLWCPSLEQKIQNHWKQAVLNLAVNVKKICSEMDGGPFLVVPSQVQGGRRQTSVARNERITYPGEA

SEQ ID NO: 333640 - protein, 58 aa, Zea mays
  Clone ID: MRT4577_67391C.1.pep
GVIVVEHGRCLGRMLGMQPRGDKLSTSLDLGVKDWCNFGVSNWMKRELLCLALMIATY

SEQ ID NO: 333641 - protein, 318 aa, Zea mays
  Clone ID: MRT4577_67393C.1.pep
MATSSSFSGPGGSPAHASPGGGGGGGGGGGVGSYHHHRSRFGDTTLTKVFVGGLAWETPSEGLRQHFDVYGEILEAVVITDRETGRSKGYGFVIFRDPDAAARAVQNPNPVIAGRRANCNIAAFGPPSAAQPRERGGGGGGRGPHVPDQPPQGSPSPYRVPSQMTPPHQAATLFYNPQFGYWYPPDYPYQQALYNSQVLQHYYPQMYGPASPSGPAYQYMGYMPGGPSPRTGFSPMQQPMRQPFFQQPTTQMDGSFPSVPSLPPNFRLQLPPRAVSRESDDASGSQSAQPVSSTPATVTNNEEDSRPVVSDSDPNTPN

SEQ ID NO: 333642 - protein, 120 aa, Zea mays
  unsure (1)..(120): unsure at all Xaa locations
  Clone ID: MRT4577_67394C.1.pep
NRPTDASEANIXANLKXXPXLALLXXGAVIDGTTSPGNIAVYWGQNGNXCSLADACNSGLYAYVNIAFLTTFGNRQTPFFNLDGHYYSNYGMYNEQNIDIQTLLVLXIKVLLSIGRTSCI

SEQ ID NO: 333643 - protein, 67 aa, Zea mays
  Clone ID: MRT4577_67395C.1.pep
RSRPIVHTHASLFVLPACAPFLYLLATTPSPPPIYIVTPTSSTTTSHRFREDEIATETMAVDSRSRR

SEQ ID NO: 333644 - protein, 128 aa, Zea mays
  unsure (1)..(128): unsure at all Xaa locations
  Clone ID: MRT4577_67396C.1.pep
MARTKQTARKSTGGKAPRKQLATKAARKSAPTTGGVKKPHRYRPGTVALREIRKYQKSTELLIRKLPFQRLVREIAQDFKTDLRFQSHAVLALQEAAEAYLVGLFXGPXLCALLAXRVAFLPLGLLLA

SEQ ID NO: 333645 - protein, 120 aa, Zea mays
  unsure (1)..(120): unsure at all Xaa locations
  Clone ID: MRT4577_67397C.1.pep
LSPTDTKILALLALISLXLSSTNDAIITQRSIXTSASCSHLLRSLTSMRLHHSDMHGYRLQLELEVSSLQQTLVHTLTQLLAYITLLTXIDSDQHLQQXLPLLIHLAVANPVTYLLLQLL

SEQ ID NO: 333646 - protein, 136 aa, Zea mays
  Clone ID: MRT4577_67398C.1.pep
MARTKQTARKSTGGKAPRKQLATKAARKSAPTTGGVKKPHRYRPGTVALREIRKYQKSTELLIRKLPLQRLVREIAQDFKTDLRFQSHAVLALQEAAEAYLVGLFEDTNLCAIHAKRVTIMPKDIQLARRIRGERA

SEQ ID NO: 333647 - protein, 98 aa, Zea mays
  unsure (1)..(98): unsure at all Xaa locations
  Clone ID: MRT4577_67399C.1.pep
MARTKQTARMSTGGKAPRKQLATKAVRKSAPTTVGVKKPHRYRPVTVALREIRKYQKSTELLMRKLPFQRLVREIAHDLKTDLRLQSHAXVLILHEAV

SEQ ID NO: 333648 - protein, 377 aa, Zea mays
  Clone ID: MRT4577_6739C.1.pep
MATASLLEATRLLSTPRPPRRSLHTHLLRTPRLSALRAHLHRPATLDAQEPTARPGALLVLDALRRSVVDSLAALKRPALALLLAGALLAAASMGGPHAAALAASGGRVGGSAFSSRSSSPPSYGYSAPAPRGGYTAAPYYSPSPFVSFGPAVGIGFGGSGFLVTLIGFAAFLYLAGFLSDSSGGTSVLTETDKTTVLKLQVGLLGMARSFQKELDQIAEKADTSTPAGLSYVLTETTLALLRHPDCCISAYSSVDVKRSVDDGEKRFNQLSIEERGKFDEETLVNVNSIKRNKGGSQRSSGFSNEYIVITILVAAEGVHKLPVINSSNDLKTALQKMGAIPSSKILAVEVLWTPQNENDTLSERELLEDYPLLRPL

SEQ ID NO: 333649 - protein, 263 aa, Zea mays
  Clone ID: MRT4577_673C.1.pep
MCWILASHRAGYVSIWNYNTQGRVTALKVTKEAGDGYGYICIYAYTMDKVKKFEAYHGKPVSLLAVHSTYPFLLSSSSCDRSIKLWAWDQQWACTRTFDAHTSGVQHVRFNPADVNTFVSVSCGGACVKVWEIHSSTPITTLFGPNNVDYFTDADRQFLLNIWSQKATILDLQTQKTVHRLLVHQREMRDVACHPTLPILATRLDDGTVCLWDATTYRLERIIRLESSIQHTAFKDTADSIWLVVACEDGMEILKINMPTSTK

SEQ ID NO: 333650 - protein, 58 aa, Zea mays
  Clone ID: MRT4577_67400C.1.pep
GGPGHNFGGPKKKSPQKLGRFTPAIVEEGVYFPPSQFKGGFPNLGPPPQDIKKTFKPP

SEQ ID NO: 333651 - protein, 95 aa, Zea mays
  Clone ID: MRT4577_67401C.1.pep
EEVNMFTNQGTVIHFNNPKVQASLAANTFTITGHAETKQLTEMLPSILNQLGADSLTSLRRLAEALPKQSVDGKAPLATGEDDDDEVPDLVENLM

SEQ ID NO: 333652 - protein, 58 aa, Zea mays
  Clone ID: MRT4577_67402C.1.pep
VNLINIYIKHKSPFLTSTLKLFKDAKLELGPNKKTLRALFPRYFYFAMESTTKPFFIN

SEQ ID NO: 333653 - protein, 76 aa, Zea mays
  Clone ID: MRT4577_67403C.1.pep
TRGRLSAPKFATPNPFFCLGKIAFKLVKAQRDHWHRFKWGLLRPVKGGFSKLWGGGPPGLQKEIFEWVGPFPFQNF

SEQ ID NO: 333654 - protein, 130 aa, Zea mays
  Clone ID: MRT4577_67404C.1.pep
YLQLYRLKSYNTIKSHDNMLRCKTGQQMTRAICAHGPSIALNRHHLLFQDHSELNRCRRRILIQKACIYSCLYSEARNDNQGATYTPSNSRIERPGQCHSTREELQQNDAIAKHGPLCRDLQAGWWTNSD

SEQ ID NO: 333655 - protein, 61 aa, Zea mays
  Clone ID: MRT4577_67405C.1.pep
PSARGRRAPSSLVSFMPPWSCGGRLSPWNTSRCPPFHLVATQVWYPCSSVKKLKTPLSVCE

SEQ ID NO: 333656 - protein, 71 aa, Zea mays
  Clone ID: MRT4577_67406C.1.pep
VLGPPLFQRKWIKFANGSHQIWGGALSLFFWKIMRKNPAGGGAKKNRDFFPGGNGLKTNLGLGKRPCSSFF

SEQ ID NO: 333657 - protein, 87 aa, Zea mays
  unsure (1)..(87): unsure at all Xaa locations
  Clone ID: MRT4577_67407C.1.pep
MLSPVRAMQLATAHTLVLVLHETPDQQLGLRRFGWDTYVLEHLQCEIRGHRHVTXAAIAGHDGNEWGQCTAFPPVXPQETDNITQDF

SEQ ID NO: 333658 - protein, 50 aa, Zea mays
  Clone ID: MRT4577_67408C.1.pep
TPNSINCFSPKIILPVHNYLEFFFPNINLISMRGGNPFVLYCSKIIQTFG

SEQ ID NO: 333659 - protein, 491 aa, Zea mays
  unsure (1)..(491): unsure at all Xaa locations
  Clone ID: MRT4577_67409C.1.pep
MVQHRRNHGAKPREGKRLSFSSGVTRAATARMAATAAALRCCFPGSSGVSSGFVKPNSSRRGWCAAAVAAPSREAEPVSSLGHRTRVDFPILHQEFDDAKLVYFDNGATSQKPCSVMKTLDEYYRSYNSNVHRGIHALSAKATHAYEDARRKVANFINAADSREIVFTRNATEAINLVAYSWGLSNLKEGDEIVLTVAEHHSAIVPWQLVSQKTGATLKYVGLTKENVPDIEQLKGFLSNKTKIVVVHHVSNVLGSMLPIEEIVTWSNRVGAKVLVDACQSVPHMPVDVQKLGADFLVASSHKMCGPTGVGFLHGKFEILXSMXPFLGGGEMIXDVFXDKSTYAEPPSRFEAGTPAIGEAIGLGAAIDYLSCIGMEQIHEYEKELGTYLYESLLSVPNVQIYGPAPSQTVHRAPLCSFNIENVHPTDIAEILDLQHSVAIRSGHHCAQILHRTLGINASARASLHFYNTKDEVDTFVDALKATVDFLTDRY

SEQ ID NO: 333660 - protein, 88 aa, Zea mays
  Clone ID: MRT4577_6740C.1.pep
AKGPNQGNKTGGKALRYPSQGTRNFTNIPGWVNIGNLINFLWEEYNCRETSPRSYQARQITVINGFSSLNFFCQGRVVYRPSFKKSPR

SEQ ID NO: 333661 - protein, 56 aa, Zea mays
  Clone ID: MRT4577_67410C.1.pep
FWGHVQFQSRAPARIGLRSSCPPARPACLAIITQPRTRKRTRPRTRGVQPGIRNRV

SEQ ID NO: 333662 - protein, 139 aa, Zea mays
  unsure (1)..(139): unsure at all Xaa locations
  Clone ID: MRT4577_67411C.1.pep
MSPRTVSLXXPLXXRPPCVFFVFFXFFFFGVFFXFFFXANCFQSITLVNHNIIAGVILPTSINLLMEAGFLEYPHWLINKKQKKIHEPIGEPVPSWIWPRHAAHRNLRLHRATHRNKDVDRHHRWMPRSRHIRPPPRWI

SEQ ID NO: 333663 - protein, 156 aa, Zea mays
  unsure (1)..(156): unsure at all Xaa locations
  Clone ID: MRT4577_67412C.1.pep
TNTCQTPYNQRDHQFTTXXFANRHVPVRKKKSVISFQSSFCDNHSTKQHRLCTEQPSNTIRRVSRSGRHHFLKFCHLLRLLLRGDGKAFFSSTYSVNLTLGLGILQWEFRSTNICWQLFLATSSTREACLQAACVDSWPAGFSSSGNSYWPPPSVS

SEQ ID NO: 333664 - protein, 94 aa, Zea mays
  unsure (1)..(94): unsure at all Xaa locations
  Clone ID: MRT4577_67413C.1.pep
FSPFSFHSKXXXAKXRVXASXXXXXPLPRRXARFXXRRXRRIAAXPPSXSXIVILPXISXPXXRPXXPVLGQXASVPVFLEXXXXLEERGRRXR

SEQ ID NO: 333665 - protein, 69 aa, Zea mays
  Clone ID: MRT4577_67414C.1.pep
ISAGKYSFKHWKLHPVGTIFCQIRENKLDMLLKGKTPGLYANLGKPILFSPKKKTGWGGPIKTLPSFPG

SEQ ID NO: 333666 - protein, 81 aa, Zea mays
  unsure (1)..(81): unsure at all Xaa locations
  Clone ID: MRT4577_67415C.1.pep
ASGRIFEALMSDDLNTYVTTGCNAEECRWGTYXTXMEPPSPCECICCLGDRCSGSXGKTHETNYLRQATSHRPYEGVTHRP

SEQ ID NO: 333667 - protein, 71 aa, Zea mays
  unsure (1)..(71): unsure at all Xaa locations
  Clone ID: MRT4577_67416C.1.pep
DEHDRSGRTTGPPTPGARDFVFXRTHGSNSSKKTKSKKPREQWSAPTSTSSYIPLTTRQIFFPELQTESMT

SEQ ID NO: 333668 - protein, 130 aa, Zea mays
  Clone ID: MRT4577_67417C.1.pep
RHHQFITHGSCMVANTPNIRSNPVAPSEDMKVHLDVRCQPRWTERCLASRGLYTPGRSSERGSSLSASGRASLLTAPRAGIYPGDVHVETHLVQDSAASRGGVVADAPRPAEPASSGGDHAVACERAAAD

SEQ ID NO: 333669 - protein, 70 aa, Zea mays
  Clone ID: MRT4577_67418C.1.pep
KTAFGGSAPRATRDSRPRCSMACFPYEIFFKARAFHGFVSLLQVLRFRLFLFVPNKNFSLCLKPSKSPFV

SEQ ID NO: 333670 - protein, 85 aa, Zea mays
  Clone ID: MRT4577_67419C.1.pep
MAPSLLAAVSASPFLLPGSSGISRRPLGAAPTRRAGLRVAALKYDPAKVAPQNDRVLVRLQQIPEVSPLSTAFLCCTFVLLFCFI

SEQ ID NO: 333671 - protein, 55 aa, Zea mays
  Clone ID: MRT4577_6741C.1.pep
NRLNFNPLFLPYIFQILRPLPFIGSNLRHTYQPSRSYDNSIDRATRPQQRSNPLL

SEQ ID NO: 333672 - protein, 85 aa, Zea mays
  Clone ID: MRT4577_67420C.1.pep
DSPLVWASVSWQLASLGVVGLVFEVSALFSNVVSTFALPIVPLFGVMAFHDKMNGVKVIAMLISIWGFGSYLCQNYLDAKKAGSA

SEQ ID NO: 333673 - protein, 40 aa, Zea mays
  Clone ID: MRT4577_67421C.1.pep
ARERSYIKRNCKQLSCSRKFHEKEFRKRKAKYFFCVGTID

SEQ ID NO: 333674 - protein, 49 aa, Zea mays
  Clone ID: MRT4577_67422C.1.pep
FGQRPVLLPEEHDVDHRAAREILDTPYKSWFLSTTVYVTQYQRDRSVVF

SEQ ID NO: 333675 - protein, 64 aa, Zea mays
  Clone ID: MRT4577_67423C.1.pep
RKLGIRLEAKLHAGSYARRAAIRRPASCPVACAGRDAQIQPLATSAYLYGHAGVHGQTQAPTQQ

SEQ ID NO: 333676 - protein, 42 aa, Zea mays
  Clone ID: MRT4577_67424C.1.pep
QASSIYYYYYLVHILSSLSGYCGGTDRDYLLYSDSLIPITGV

SEQ ID NO: 333677 - protein, 82 aa, Zea mays
  Clone ID: MRT4577_67425C.1.pep
TRKPTTQPDCALSNTRRWQAEGAGTNRTARQELLQAMGNTLERKLTYIPHFKIHRRVAGLYNYRPPGRTLKANVLSIMHQHY

SEQ ID NO: 333678 - protein, 72 aa, Zea mays
  Clone ID: MRT4577_67426C.1.pep
LVAVTETPIVYPAMSWFSMVTKSVDRVSDVDSTSCRHGVRSTCHVVPIVLGSAELLLRSCAQRISLRSRHSD

SEQ ID NO: 333679 - protein, 63 aa, Zea mays
  Clone ID: MRT4577_67427C.1.pep
IPNLRLKKTKDKTPWSTAIGFRQVPCTTYSIDSHMYVDDGKGVTYFASHGRASGCHLTTPSHD

SEQ ID NO: 333680 - protein, 98 aa, Zea mays
  Clone ID: MRT4577_67428C.1.pep
RPGPLCCSGPGSSERSSPSSARPRVPPSDCFGADILDAAENGVRYSCAEGGLFLPPIFFWRGYTRYCWRPLLSWRIGYRSVFFAADRLTSTISISISI

SEQ ID NO: 333681 - protein, 187 aa, Zea mays
  unsure (1)..(187): unsure at all Xaa locations
  Clone ID: MRT4577_67429C.1.pep
MMASNSPAAAFFGVRDGDQQDHQIKPLISPQQQQQLAAALPSVASGQGAPTAAAAQPPPKKKRTMPDPDAEVIALSPKTLMATNRFVCEVCSKGFQREQNLQLHRRGHNLPWKLKQKDPLQAXRRRVYLCPXEPTCAHHDPARALXELXTGIKKHFSRXHGRKKWKCDKCSKRYAVQXDWKGALQIC

SEQ ID NO: 333682 - protein, 266 aa, Zea mays
  Clone ID: MRT4577_6742C.1.pep
MRAGGGEEEEEEEVFYESRDRVLSSSCSSTSASDDDDNDHPRRRRDGAASAAAAALDVWTSEPAPVQERRRKLLQMMGLAGDPALARLEMGRSVSYDGPVRPAPASPIPRSRSDGAVPVSSTKPPLGGRSRQASSGSSEATPEGEDAGPRCLIRNLDDGTEFVVKEEFQLREVGTGRHFTMEEFVDLCVGCSPIVQELMRRDNVGSSGSNNGASTPIQRSNSDSSNGATRHRRHSSWLRSLRNVAGSMAVTSRDRRSSDEKDTSSE

SEQ ID NO: 333683 - protein, 97 aa, Zea mays
  Clone ID: MRT4577_67430C.1.pep
GRQCSSSFPFFASHMYVLGTDLKQETNPQGAEKNSKLRHRPLRTLPRLTKEQREQGNPSKQLHSNQVKKQNNKSSQTPTPAESYMSVRRSRELRFGT

SEQ ID NO: 333684 - protein, 60 aa, Zea mays
  Clone ID: MRT4577_67431C.1.pep
MASRRALVILAKGAEEMETVIPVDVMRRAGIKVTVAGLAGKDPVQCSRDVVICPDASLED

SEQ ID NO: 333685 - protein, 196 aa, Zea mays
  Clone ID: MRT4577_67432C.1.pep
MMASNSPAAAFFGVRDGDQQDHQIKPLISPQQQQQLAAALPSVASGQGAPTAAAQPPPKKKRTMPDPDAEVIALSPKTLMATNRFVCEVCSKGFQREQNLQLHRRGHNLPWKLKQKDPLQAQRRRVYLCPEPTCAHHDPARALGDLTGIKKHFSRKHGEKKWKCDKCSKRYAVQSDWKAHSQICGTREYRCDCGTL

SEQ ID NO: 333686 - protein, 71 aa, Zea mays
  Clone ID: MRT4577_67433C.1.pep
MAAHSTRMVALALVCLLVVATVVEPTATGYGCYDHCYERGANGMKDDPPCTKMCIQACGSTDNGAVACAPA

SEQ ID NO: 333687 - protein, 236 aa, Zea mays
  Clone ID: MRT4577_67434C.1.pep
MASNSSAAFFGVRDGDQQDQIKPLISPQQQLAAALPGLAGGVPAASGQGAPPAQPPPKKKRTMPDPDAEVIALSPKTLMATNRFVCEVCNKGFQREQNLQLHRRGHNLPWKLKQKNPLQAQRRRVYLCPEPTCVHHDPARALGDLTGIKKHFCRKHGEKKWKCDKCSKRYAVQSDWKAHSKICGTREYRCDCGTLFSRRDSFITHRAFCDALAQESARLPPTSLSSLTSHYGATST

SEQ ID NO: 333688 - protein, 102 aa, Zea mays
  Clone ID: MRT4577_67435C.1.pep
APPLNPKMDSNYLKPPQKALPKTNWGKQCFVTLQHPPKSHMVPIPPCGPNLSKNSMQWVLLTCPRHNGHQVKPNSWPPIPQNNFTRLICRHLQTQCRSLLAC

SEQ ID NO: 333689 - protein, 154 aa, Zea mays
  unsure (1)..(154): unsure at all Xaa locations
  Clone ID: MRT4577_67436C.1.pep
MALIIKSFRQILKQRKRKDYKPXSKRVCYRCXDRDRDGNKKWKKNKIEKRRYYKKKGGDAHMGRKWDSDKSSIDSSSDEDAANIAIKKGLLFPNVNHKSLMAKDNKKKKVEKCENLSKELNMCNDSISCLRIENDNLTTKIEELNVCKNIYIYY

SEQ ID NO: 333690 - protein, 138 aa, Zea mays
  Clone ID: MRT4577_67437C.1.pep
STPISTALCALCLASTMLLPRTCLAFFVVSLTQCTVPLCTPVIGSVAHAACETSASGSLGRLAVSWRLAPNWYGCLFSYRLAEGSECITGSGWCTPPAWCVEPPLRSPLAYVLRSSSVCNELSQRRSLTLSLVRGRRR

SEQ ID NO: 333691 - protein, 43 aa, Zea mays
  unsure (1)..(43): unsure at all Xaa locations
  Clone ID: MRT4577_67438C.1.pep
PAGPXSTSAPSHRRICRTTMGSPLLKPHSQFVAFAALNCVRRA

SEQ ID NO: 333692 - protein, 45 aa, Zea mays
  Clone ID: MRT4577_67439C.1.pep
SSGYILSQNWLSFLISVTLTGILQASTAHRANAFVPLVLYSLLCL

SEQ ID NO: 333693 - protein, 123 aa, Zea mays
  unsure (1)..(123): unsure at all Xaa locations
  Clone ID: MRT4577_6743C.1.pep
PRVRHKKHIYVPFSSPKIFCLGMGLVLYLRATTTTIFPQCLQASIASFFPPYLXTCILNLIXNPILQPYMIQHAYLIXILPLSPXLFLQQPXILSHQLPSMHLXAQNIKAQQLQQLVLRNLAA

SEQ ID NO: 333694 - protein, 78 aa, Zea mays
  Clone ID: MRT4577_67440C.1.pep
GFGSRLFWSKLEFGSYNHQLLAQPSRLLTPNETFSTHAMVPGMFLVGHSYTHISYQLLVFTGFSNHACIIFYKKQCRY

SEQ ID NO: 333695 - protein, 99 aa, Zea mays
  Clone ID: MRT4577_67441C.1.pep
PQNGTTFGEYMHAERVKLEQQARACATDTWRCSEKCTSPGEEAQTESRTWATKAKIVMQCKAAMRPRNRANPAMQSPLAAIPKSVKKLSRKNRGKRKCR

SEQ ID NO: 333696 - protein, 136 aa, Zea mays
  unsure (1)..(136): unsure at all Xaa locations
  Clone ID: MRT4577_67442C.1.pep
AFIEKDMGCSIDAVYTEFTERGXGGPXLTQAHPTTLHNGERTSSNVXRLALKXLFDIDLENLKLAPESLKNNETFGGLSRDWIVLYEECTTIVYEKIDYINEXRRCDKSPRDXQNIKRVPGPLIMXDYTTXKVLTL

SEQ ID NO: 333697 - protein, 105 aa, Zea mays
  unsure (1)..(105): unsure at all Xaa locations
  Clone ID: MRT4577_67443C.1.pep
TRSFSVGQRXLLCLARAILKSSKVLCLDECTANVDNQTASLLQNTISAECKGMTVLTIAHRISTVMKMDNILVLDQGKLVEEGNPEALMNHRHSRFAQHVKASQM

SEQ ID NO: 333698 - protein, 324 aa, Zea mays
  Clone ID: MRT4577_67444C.1.pep
QACLYVPRMMSTASQVSLLFGGGDWRATEFVVERSVNNLNIMARLQGTTPAIADMGAPSSSQLAEVEGPSSSVHMVPPLGSTSLSGEHKDLAPENVGASVYGVQITEVPGSSSKQNKTHHTSTVGHSVEAQVELHVAVQACQPSNEMKDGGEAPPNATGPSNAQLVEARMGVNGNNNGSKRKPTGAGRGGKKLRVSEAPRQRPERVREQPLVCTICNAICDTRAVFDIHLVGKKHQSRLKRSQGPDVLFGPLVGHIPPNQSAAHMTGAPEPLYFGFKSMGASLVEQEAYLAGAMQHVLPVLPQAGPTIMAADYPAQPVASNRCC

SEQ ID NO: 333699 - protein, 204 aa, Zea mays
  Clone ID: MRT4577_67445C.1.pep
KSVLQTYTQVYVNQIVPSYDHSTTSHSVEVERMSVKTEALCILQTGRRVLWFHLRFRLFSTTTTTNSVALQSPPPKSNETCEAVDIMRGTCRHACHILTSASPTAVHSDAVTGLPLLAAPVASHRLCRIISSHDGWTSLWKNGQHVPHRASQICLLLNQRSSHTLKAKIQWLRGSCHVSCGLVWRNMPNQRTEQHVWALRTLES

SEQ ID NO: 333700 - protein, 188 aa, Zea mays
  unsure (1)..(188): unsure at all Xaa locations
  Clone ID: MRT4577_67446C.1.pep
GAPPRGPPAKFGTQFPLAPPRVGXLEGMXVPPKPGLDRPKGGGALSPGPPGSKSLGLFGNGLPERDMGGGFFFRPFFKAPGFSPLESPPLGLSLPGVPPPPQLFVSLFPPAEGGPGPPALFLAVEGGAPPPPQKKGELKAPGFSFYNLWGNFSWALGASIQKRGACLVFFQSFPGVPFCGGKFFFPLA

SEQ ID NO: 333701 - protein, 68 aa, Zea mays
  Clone ID: MRT4577_67447C.1.pep
PHYSFLGSFLLSFLVSKTIFILILYRPKTKSCLKPHMNPHNFIKHNVPHREAKTPLPHQYFKPPTHPF

SEQ ID NO: 333702 - protein, 81 aa, Zea mays
  Clone ID: MRT4577_67448C.1.pep
KKKKKKKKKKKKKKKKKKKKETIRKICKLTSSFLLPHSSFLISPNFNSLSLILQLPYFKNPIFTQLNHLSKLSLFTITLYR

SEQ ID NO: 333703 - protein, 103 aa, Zea mays
  Clone ID: MRT4577_67449C.1.pep
SLSRLGHSVAPDYVFIYSYHLFVMQELALGRESSKMMVFWGVVDLFMECGTHDGRTIWGSGIWGRRLSMTGFQMSRETFQRMESEFSMVCLSNSVSQLISMVV

SEQ ID NO: 333704 - protein, 97 aa, Zea mays
  Clone ID: MRT4577_6744C.1.pep
VSCVFPLGSAFRSVLFPSVCSFSLACRRSFWAGSSLGGSVFPVVLSPPAPCALLRSVWSSARSPVPPRLAGWGWSSNWPGAWVVPVVPVRCLRVFPL

SEQ ID NO: 333705 - protein, 66 aa, Zea mays
  Clone ID: MRT4577_67450C.1.pep
IARRTRAVSNPTKSQIMGSWEGNVRQFLLEEEEDDDELFFVILPAIIPYLSEEKRPIHTFLPYRCL

SEQ ID NO: 333706 - protein, 46 aa, Zea mays
  Clone ID: MRT4577_67451C.1.pep
GHIIIMHNPSQSRNLGMKYDLPICCSSYFKNIYIFFKAIVWPWESN

SEQ ID NO: 333707 - protein, 425 aa, Zea mays
  Clone ID: MRT4577_67452C.1.pep
MASCGSFYFVPLLLLMLLLASPATAALVTSSQPGGNATAARPRPGMEQLKRKRIRALLTKLNKPALKTIQSSDGDIIDCVPSHLQPAFDHPKLRGEKILDPPERPKNRNFTFGGSGRSRVGEVVVQAWHATGEACPEGTVPIRRTTEKDLLRASSLRRYGRKPARRGVRRDSTSSGHEHAVGYVNSEQYYGAKASVNVWSPRIGDPSEFSLSQIWVLSGSFGNDLNTIEAGWQVSPELYGDSNPRFFTYWTTDAYQETGCYNHNCRGFVQTTNKIAIGAAITPESVYNGRQFDITLMLWKDPKHGHWWLELGPGLVVGYWPSHLFSHLARHANMVQFGGEVVNTRPSGSHTATQMGSGHFPREGFDRAAYFRNLQVVDWDNNLIPAANLKLLADHPGCYDIQGGTNSYWGSYFYYGGPGRNAKCP

SEQ ID NO: 333708 - protein, 91 aa, Zea mays
  Clone ID: MRT4577_67453C.1.pep
SHAQPFLMMAAVPTPSYGTALCLSHGRARPAPHILHHGAPCILVGRPYPLLLPTVRSPDVVAVFSHERKISGFWMEKKRGQCDARYVLDVR

SEQ ID NO: 333709 - protein, 102 aa, Zea mays
  Clone ID: MRT4577_67454C.1.pep
SREMGSSITAALLFPRCALLCHSSRGPHAHRWRWNGTVAVEGSSSSTSSSPRRIVRVSVMPGRPVAAADSFDRPPGPSYSFLMIRSWGKAATRPACMKAIAL

SEQ ID NO: 333710 - protein, 58 aa, Zea mays
  Clone ID: MRT4577_67455C.1.pep
WGASLVLVLDQIIQASGSFTSIILGSTRLLSSASRDQLTNHGSSRGGRPPETREGQRP

SEQ ID NO: 333711 - protein, 68 aa, Zea mays
  Clone ID: MRT4577_67456C.1.pep
GGRITLMVFWLGAYVIITPRLCQIVFDYGAVMYSHTSHMVIEFGEQILSFYGVFSGACYGVKVHKLRW

SEQ ID NO: 333712 - protein, 127 aa, Zea mays
  Clone ID: MRT4577_67457C.1.pep
APILQSLAGHPCSLDVSPMAPSPSCHGRPSLLQLDAPPWSSPLPSVQRPPCCPWYGRQLPLLLPWIAPLPSPSPSTSPMVAQPSSPSHLCYSHGTLDNYANWRAWIRMDHKVALMDPSRYGRLEEVL

SEQ ID NO: 333713 - protein, 53 aa, Zea mays
  Clone ID: MRT4577_67458C.1.pep
KPSEVQVTLARHPIGGPNQKSSSISWCQVGIDYGYNFVLLWMLLSAGGLGLLI

SEQ ID NO: 333714 - protein, 83 aa, Zea mays
  Clone ID: MRT4577_67459C.1.pep
SIHLSYISFILASLVSLIIYAEGRRSSLHIQQVRRSESMNTQLGISNHTTYVALNPCICQLAHGFLKTRTGPRQPSPAGLEVP

SEQ ID NO: 333715 - protein, 37 aa, Zea mays
  Clone ID: MRT4577_67460C.1.pep
VLLSNCILRVLFPVVFQDYKFVLLWMVLSAGGLGLLI

SEQ ID NO: 333716 - protein, 80 aa, Zea mays
  Clone ID: MRT4577_67461C.1.pep
VFILFSIDYLFCVLAHAHMHYASPIGMLDDYVNWRARIRMDHKVALMDPSRYGRLDQVSGLLMLTKRTSSNHTNLVYPRS

SEQ ID NO: 333717 - protein, 66 aa, Zea mays
  Clone ID: MRT4577_67462C.1.pep
RRSESINTQLGISNHTTYVALNPCICQLATGFLKTRTGSRDPRAQYSTVQPLAWLVHVTGRWADAG

SEQ ID NO: 333718 - protein, 113 aa, Zea mays
  Clone ID: MRT4577_67463C.1.pep
PGFFFSLGHYRSFLSVYARKRLLVSSPVLSPSSPAHRKPAPSRRLLPRRRSYRASPVIPAPSAFLPWRPPLPAMAAPPCCSSTLLPGARPCPLSSALPAAHGMDASPLSCCHG

SEQ ID NO: 333719 - protein, 97 aa, Zea mays
  Clone ID: MRT4577_67464C.1.pep
MGKIKIGINGFGRSGRLVARVDLHSEDVELLAVNDPFITTDNMTYMCKYDTVHGQWKHRDMTLKDSKTTFLGKKPVTDFGIKNHHEIPRGEAGADYV

SEQ ID NO: 333720 - protein, 71 aa, Zea mays
  Clone ID: MRT4577_67465C.1.pep
LLAAEQATYSSKTVQSIHIYSSEESPYYMMIGKRILITYVSRLTCQTAALYRSEHSACISILHSPCRVSRD

SEQ ID NO: 333721 - protein, 109 aa, Zea mays
  Clone ID: MRT4577_67466C.1.pep
GPPPSGPLWIIGEVFLGAYPPGVVFGQHRVGFPEICQSGEGPLLFMHKDPLCIRGGFTGRCQLIGGPEFFNPKRGQGFFCFWKRANGCFQTCKSGVYLKIEPWAGPHPP

SEQ ID NO: 333722 - protein, 610 aa, Zea mays
  Clone ID: MRT4577_67467C.1.pep
ERRSTYKETQEPQGEKVEEEVEEGCEDGEENEIGVDSEVEEEAVKEKKEKEETVKEKKEKKDMKQEGKKAKKQEEKKAKKDKKEEEKKVMEDKKEEEKKAKKKSEGSGILSNKLFSELPLSELTAKAMREMNYTHLTQIQARSIPHLLEGNDVMGAAKTGSGKTLAFLIPAIEMLYHTHFSPRNGTGAIVVCPTRELAIQTHNVAKELMKYHSQTLGYVIGGNNRRSEADQLAKGINLLVATPGRLLDHLQNTKSFIYRRLKCLVIDEADRILEQNFEEDMKQIFKRLPQNRQTVLFSATQTPEVEKFAKLSFEKNEESKKKPVYVGVDDDKSKATVEGLQQGYCVISSDKRFLVLYAFLRKKRNKKIMVFFSSCNSVKFHAELLNFLGIECSDIHGKQKQQKRTTTFFSFCKAEKGILLCTNVAARGLDIPDVDYILQYDPPDEPKDYIHRVGRTARGEKGKGSALLFLLPEELKFLIYLKAAKVTLTEYEFNQKNVPNLQSQLENIVGENYFLNQSAKEAYRSYVLAYDSHSMKDIFNVHQLDLQKVAASFGFKNPPKVNLDLDSSAAKHRKKMRRVDGGKRHGISASNPYGRKDKGGAGDKRQLARF

SEQ ID NO: 333723 - protein, 82 aa, Zea mays
  Clone ID: MRT4577_67468C.1.pep
TGSKTNKSVTAPQMDGRTGKAYSAQDQNIIARAARVFERSKPPQSKTAGLYQRPYGHRKGKKQQHTEAGVSNATAWNSMDPP

SEQ ID NO: 333724 - protein, 52 aa, Zea mays
  Clone ID: MRT4577_67469C.1.pep
TVWHSSHLGTRLTLAHKHSCYLETQEPRTIQSLGVDFALYSCILWQSKSPTP

SEQ ID NO: 333725 - protein, 70 aa, Zea mays
  Clone ID: MRT4577_6746C.1.pep
CFTVGTNLVLTLVSKNSKPPPNSSLVVRALVNNFQSQLWGKTNLKKEKIFWYRQNLLYNFQFANLTGPGM

SEQ ID NO: 333726 - protein, 105 aa, Zea mays
  unsure (1)..(105): unsure at all Xaa locations
  Clone ID: MRT4577_67470C.1.pep
DPEXRXAXXXGGNXTTLGAXHXXXKPPXXXAHXXPXEPPEXXXXXGSRGXEKXAXDXXGEXXAXXXRXGNEXXXGXXAXXDXRRXPXXXXXXGGXNRGXGEGAKP

SEQ ID NO: 333727 - protein, 86 aa, Zea mays
  Clone ID: MRT4577_67471C.1.pep
YYTCHRQKMCAENKMQRSMPIFCLLIDMVKTDQKWKGIFLAHILTNWSKGFIHYSWRKLHMLAQCIITLSTIATTLLTFLISKPAP

SEQ ID NO: 333728 - protein, 208 aa, Zea mays
  unsure (1)..(208): unsure at all Xaa locations
  Clone ID: MRT4577_67472C.1.pep
MADKVTIIPPRDPWPFSTVTVEDLETLIADGLLRPLFVVLQPEWMAPSSEADPTPPPGYVLSLIPFHERGFGVPASRFMRALLHHYGVELHNLNPNSIAVFLGIDPHWDLWTHLFSVEFFAATTEVKKVRMAVWADGCTLQLRPGRAQQYIPATLASSNKGWQNQWFYLRNDGGMLPPFSQRVVTAAGTNWRWGXPRARSRRSSSLSY

SEQ ID NO: 333729 - protein, 1016 aa, Zea mays
  unsure (1)..(1016): unsure at all Xaa locations
  Clone ID: MRT4577_67473C.1.pep
MADKVTVIPPRDPWPFSTVAMEDLETLIADGLLRPLSGEPQPEWMAPASEADRTPPSGYVVSFIPFHERGFGVPASHFMRALLHHYGVELHNFNPNSIAQAAIFAAVCEGFLGIDPHWDLWTHLFSAEFFAATTEAKKVCMAVRAGGCTLQLRPGRAQQYIPATLASSNKGWQNRWFYLQNDGGMLPPFSQRVETAAGTNWRWGATREKQEKLQHILQALQKLRDASLTAAGVVAAIHRRRVLPLVERRLLLAEMRPGVDSEDSRMSSTSLSAEDLLKRVTNTVGRLHAGALSQLAMRPDRGYVSLGLRIYRPVRPPVLEDATDRAMRRLATEKEKEKKDTKKAQARKRMLAREALEKCRRRQARDGLPRESSPETPDDDDDDDDDDEDDDMAARLGLSPDPRLGQGSPSQPPSGLAPSVPGAGTPRSQSEERRQAEGVLDPLAEVIVVTPGGQADLPVPQEQVPALAAQEAGPSAVVTTPGQAAPSVPRASEAETVSKPAVGQPSAARAGVGARGASPQARLAVVRSRRPQRGAQAARVAMGQASLADLPVGAAIVPGEVADAAAASSPPDLLSAPASTPAGAITDSPAEPPVAADVGMVEAXARGHSRPPRSRPRGGGGRXAEVGDRRLATLAEERPSTSTAVSRATSDPEPLLSLNDELEKRSRDSFREYTEAAMRSLRSTMEILSRDVPRVFQELADVSTAKSLFLRRERDVWDSLRSQRAMLTEANERLAQQSTEVADLRVLCDELKSEAALARAEALSAQEQVASQTEEMRRRQLELGQVIGERDQSRSQAAEAVSRAEALRGQLAEATERLAEASARAGTLAESLAEAVGSVESAQAEASQQRARAEGSETALSEAVKNCKTLAEAAEQKEADRVAMSEAISAFCQAFGLDNVSSGSSPQSHLRALGGHVRDRLRGALHHGVRRAFTVLASHFDVDLERVSEGYFLPDEEEATLAEVQRLDEAVEGPSAALASSFEVEILPLVSPSEARPVSAEGGNDAERAAPPPADV

SEQ ID NO: 333730 - protein, 69 aa, Zea mays
  Clone ID: MRT4577_67474C.1.pep
LLGMELYLLPACQAHKKLTRCHGYLCVCAYAPPYPSSDRWRNPVYVLCVQDFNQVMCRDVGLMSTSSSL

SEQ ID NO: 333731 - protein, 126 aa, Zea mays
  Clone ID: MRT4577_67475C.1.pep
SLKCAIIDNTENVYVFSVQTCPTIEIIEDTCQNIKCLTPELYDTLSSREEGATGDRRTPRREEGAPEFAVHRAKRKDPETERAGSRRSSPCTAPGGGSRRAAKRRYPETERAESSGEEPRSGCAAR

SEQ ID NO: 333732 - protein, 96 aa, Zea mays
  Clone ID: MRT4577_67476C.1.pep
TPGGSPSFFFFLLWFFDFCFLFRSLFFLRIINCRINWDRGGTKHSFWGKTETHLIVKIQLSRLSSSILRKYNMLRAVQVPSFRNLQHLYKNHRTQR

SEQ ID NO: 333733 - protein, 133 aa, Zea mays
  Clone ID: MRT4577_67477C.1.pep
MEVRLGFSPEAVLWSEPALAGLSGDADVPAEGPTAPLFKAQVSAEPRPISHGCRGGGLLVTFILPCFSAKRRARKPAFTATKAVKRGVGTSARAMPLPPRVARRHLGGHPTGRRGSLVPPVYYWVDLLIAYYE

SEQ ID NO: 333734 - protein, 126 aa, Zea mays
  unsure (1)..(126): unsure at all Xaa locations
  Clone ID: MRT4577_67478C.1.pep
MIMEPHLVEADVVAGGYDKRTILLYSVPGVXLDALLDVGKDELRHIFPDRSRRRCETRLKKKGVLLIPTELKVRQEDADDEIPHAVKTRLPIIXLPHDMIDSIAGRYNVQTFIQGDITPEMIGHYL

SEQ ID NO: 333735 - protein, 131 aa, Zea mays
  unsure (1)..(131): unsure at all Xaa locations
  Clone ID: MRT4577_67479C.1.pep
VIKLMQLAGFQMEVVKTTHALFVXSLDGSYYISLGIIMLFASSLFXSTGAQMLNGLLIRSDRAEVVSIPVGIIPAWSANSLVWAVLGVRDPISASLLIVKGGFTALDVLVVEWPKPLKKHLKAFILMTLRA

SEQ ID NO: 333736 - protein, 57 aa, Zea mays
  Clone ID: MRT4577_6747C.1.pep
HQGPSRPVHGPDLSEPLLGRPIANIDHLQCYERMLDTGTNQAFMSELGLQIPTGCNP

SEQ ID NO: 333737 - protein, 144 aa, Zea mays
  Clone ID: MRT4577_67480C.1.pep
MPSSAMSSGLEPVLCAPRPRRVQQLHPCSADLILGAPPFPRNANSKASGSSSREGGRKTTRPAAEDEDCRWAAFGGSPPARADNPLVHDPRFLRNQRHPAPLELGSPNHRRPTYSSGGDGSGFASSSFAPAVRIQGFDVAACRA

SEQ ID NO: 333738 - protein, 169 aa, Zea mays
  unsure (1)..(169): unsure at all Xaa locations
  Clone ID: MRT4577_67481C.1.pep
SRPALPLCRSPFPAVEEPLHKWQNGSHRDGPTSCLAAPTPGLGYLMDLMTALHLEMKKPCAHDLLANGLREADKAIEKNASLLCVLAEDCDQSDSLQAAEXYCAVHYVHLSXSYPVDNTLXECYTLCRIDSEVLARKXVSCSCVPLDDYCEQSEGLNIVHEYVTVALDV

SEQ ID NO: 333739 - protein, 48 aa, Zea mays
  Clone ID: MRT4577_67482C.1.pep
TMVMLRIIGTCYDNVDRTKLLQKHELYFESFVRIVSGAGTANVSSNSL

SEQ ID NO: 333740 - protein, 111 aa, Zea mays
  Clone ID: MRT4577_67483C.1.pep
VLREYTGTQGEPNTIHVHKGIASRTDYVKGNLVRGTPTVQTIGHTERITAGGCRALRHGRFSARSALEAAVLRHWGCYRGAADQHNMQACTTKYLALPATGRIERLNNMSW

SEQ ID NO: 333741 - protein, 134 aa, Zea mays
  Clone ID: MRT4577_67484C.1.pep
ATPRNCNGSTGVWNWGTKEDIQLALAGKAEGLLPARNLHGTLRGTTSLGYTNPGKVAGPSAAGFSMPGNPICSVPAGTPHLQLSLYWMESKKAEANASAGLIQARGKWSKVILPAGPGWRNDGGRSSRACAAAA

SEQ ID NO: 333742 - protein, 72 aa, Zea mays
  Clone ID: MRT4577_67485C.1.pep
AHNNAGCCLGKLYPISKLAWHGLQLQRRIDRALFHHLFSPFIFYWSSSHSLILTHFSSITQCSQVSSRAIVR

SEQ ID NO: 333743 - protein, 213 aa, Zea mays
  unsure (1)..(213): unsure at all Xaa locations
  Clone ID: MRT4577_67486C.1.pep
KKKKKKKKKKKIKKKKKKKKKKKKKKKKKKKKGLLNILVGNFSPKATEPPLLAFFFGTFTCXKPRVLGTQKTGQPKGLGFVFFRTHQDAQRAKKDLKGKGFGTRKILCNGPTKGPNAGKKKQILDTKVDLPKGSSKSGKENPNDEGPKKTPQLTTVNVANFPHEAPIKEGPLFFHSLGAGSIEEARETRKKGFGFGRSTPHEGAALAIQRGKA

SEQ ID NO: 333744 - protein, 77 aa, Zea mays
  Clone ID: MRT4577_67487C.1.pep
YLYLWQPVGEGPSGIQIDRERNCDSSNLCAHMAYPAYSISTIAPVPSTLTTPHLTPLYLFPLIVGSSLSTPSQLSAR

SEQ ID NO: 333745 - protein, 75 aa, Zea mays
  unsure (1)..(75): unsure at all Xaa locations
  Clone ID: MRT4577_67488C.1.pep
ELHYVWRLQQDCWKTTIDYYQLRRPPLFFFSRYPYAREKKFCHVEKKTPLSTLFFFLCAPEKKKGKRGGXXNISL

SEQ ID NO: 333746 - protein, 93 aa, Zea mays
  Clone ID: MRT4577_67489C.1.pep
RLRPITSGFLLFVAAKLERVLHVFRAAYATPVLHATCTAAPTCHDLLLCSHDTAGVLLQAGAESASSILINARRLYLFMRYPHAHAAPDLYYY

SEQ ID NO: 333747 - protein, 331 aa, Zea mays
  unsure (1)..(331): unsure at all Xaa locations
  Clone ID: MRT4577_6748C.1.pep
MRAGARLIETEEQEHHARPAGSATLQRAPVEKPPFTLGQIKKAIPPHCFERSVLKSFSYVLRDLITAAALLYLALVTIPALPSPLQYAAWPLYWIAQGCVCTGLWVIGHECGHNAFSEYPLLDDIVGLVLHSSLMVPYFSWKYSHRRHHSNIGSLERDEVFVPKKKEALPWYTPYVCNSPVGRLLQIVVQLXTLGWPLYLATNASGRPYPRFACHYDPYGPIYSDRERAQVFVSDAGVVAAWFGLYKLAATFGFXWVVRVYAVPLVIVNAWLVIVTFLQHTHPALPRYDSXXEWXDWLXRGALATXDRDYGXLNRVFHNITDTHVVHHLLP

SEQ ID NO: 333748 - protein, 116 aa, Zea mays
  unsure (1)..(116): unsure at all Xaa locations
  Clone ID: MRT4577_67490C.1.pep
MVTVSAAEVTTIVGRAANARSNALGXCVAGEEREGAEHLRPGCQERGPSQXKGAGRVAACRRGRGDRFGGARAGARGLAHVHGGHRAEPLAQQQPAGVDSSEGFWPHVVXLHHLLL

SEQ ID NO: 333749 - protein, 40 aa, Zea mays
  Clone ID: MRT4577_67491C.1.pep
FQTCPDVVTWGSNEVQEAVPLRAAIAQFHALCSPSPNWTK

SEQ ID NO: 333750 - protein, 61 aa, Zea mays
  Clone ID: MRT4577_67492C.1.pep
VAAVVSGKFLFPAGPAAQSGHLPKARFPVPADGCDATAAGHSEDRVSGLTQVCGVLGPKRC

SEQ ID NO: 333751 - protein, 321 aa, Zea mays
  unsure (1)..(321): unsure at all Xaa locations
  Clone ID: MRT4577_67493C.1.pep
LWGRGSGALRPAMAAAANTPQRHRPWQLVVPARASASASASRRTSRPAAAAGVGAGGAPNAWTWMPPPPAARRTVRAKAGAAEARPSSPPDAVTYSASISTDTPLHEPPGVSFDEYIQDRARVFRAMFPDESRSQRVGDGEWQVHMLPLQFLLLTVRPVVVMQLRHRAGGLDLRVTEWELRGLDVSYAPSSFDLGVSGSLYADRSRSRGCRMRGHLEIAITCVLPPPLRLVPETVLRGVAESVXALARHPKYVVLVRFLENXPSNAVQVLSTLAEKMKRDVDVGLVADFRRFRREKAAASRATPTLGATASDRDEASESES

SEQ ID NO: 333752 - protein, 286 aa, Zea mays
  Clone ID: MRT4577_67494C.1.pep
LVPNGAGKTSFINMMIGLIKPTSGTAYVHGMDINMDMGDIYTNMGVCPQQNLLWETLTGKEHLFFYGRLKNLKGSALMKAVDHSLKSVNLSHGNVGDKQVKKYSGGMKRRLSVAISLIGDPKVVFMDEPSTGMDPASRNNLWNVVKEAKKNRAIILTTHSMEEAEVLCDRLGIFVDGDFQCLGNPKELKARYGGTYIFTVTTPPDQEMEVEHLVRQFSPSANKIYHLSGTQKFELPKQEVKIAHVFDMVEKAKRRLSIHAWGLVDTTLEDVFIKVARGAQVFNEFA

SEQ ID NO: 333753 - protein, 32 aa, Zea mays
  Clone ID: MRT4577_67495C.1.pep
VDGHWGVKGKGLNQEPSFVGHKKILYKHAICN

SEQ ID NO: 333754 - protein, 202 aa, Zea mays
  Clone ID: MRT4577_67496C.1.pep
CKESKPTGGKDGSKLDVNTKQQPNVRPSGGDYDYLFKLLLIGDSGVGKSSLLLRFADNTFTESFISTIGVDFKIRTINIGGANVKLQIWDTAGQERFRTITSSYYRGAHGIIIVYDVTNSDSFTNVQKWVQEIERYATDSVQKLLVGNKSDLVSERKVDAAEARDFAQQLGLEFLEASAKNSTGVEEAFVKLANAIKRKEDD

SEQ ID NO: 333755 - protein, 44 aa, Zea mays
  Clone ID: MRT4577_67497C.1.pep
KHLRWHSITKILRNSPRAHFPFSMKYTFASLTRLRKNILKDMLG

SEQ ID NO: 333756 - protein, 96 aa, Zea mays
  Clone ID: MRT4577_67498C.1.pep
MGQGCGDLVLTLLVRKLQNALTSLDNFPVIMSHHFKLRSSIADIYKALNNYSMYPIRPRVAIIMGSQSNLPMMKVAERVSKEFNIHCEDVVFEENL

SEQ ID NO: 333757 - protein, 84 aa, Zea mays
  Clone ID: MRT4577_67499C.1.pep
ALYLQEDGCGLRRGEPQAHVGEDLCRCRTLDGTAAAKRSCLTTVWGLGRRRRPRGLDHDSSGVMTGGRGSPLRSSTGVGSVTRP

SEQ ID NO: 333758 - protein, 60 aa, Zea mays
  Clone ID: MRT4577_6749C.1.pep
QQARLVSFYLERNGLFFTRKSTKSLKKKEKGLREHGFLSLAEAWIYSTTPPNNCAGDNGC

SEQ ID NO: 333759 - protein, 159 aa, Zea mays
  unsure (1)..(159): unsure at all Xaa locations
  Clone ID: MRT4577_674C.1.pep
NSARGSRVFLSPTETSTRRFVSPHLHSRFQEPTVFSILALSGTGWAATFRWPARVPHTNHDVPLNLCQHLRLVQLACVPKFPCGGRHHHGLPSCGSGLIVVTIMGREECDDLXFTVSPLAXVQSSLPAHRRPRYDSVEAYIVQPGLHPLHRLQQYLISS

SEQ ID NO: 333760 - protein, 61 aa, Zea mays
  Clone ID: MRT4577_67500C.1.pep
PLILLKSILIKKIGRSIPSPLNAKLVLAPFPNLGKKITLHFLLPPVIPILFCPCFLKLFPP

SEQ ID NO: 333761 - protein, 56 aa, Zea mays
  unsure (1)..(56): unsure at all Xaa locations
  Clone ID: MRT4577_67501C.1.pep
RWPLXSXGGSARXRRPXARALSAXAFPXGXXWXAXXXFGCRANTXARCPLVASSGL

SEQ ID NO: 333762 - protein, 58 aa, Zea mays
  Clone ID: MRT4577_67502C.1.pep
TETASASASAAAAAAFNCLRLAFLEAELSTAMGSTPTAKAGNIPGNRRWQLVRTFKGG

SEQ ID NO: 333763 - protein, 37 aa, Zea mays
  Clone ID: MRT4577_67503C.1.pep
FYHNYSLVWFFFSKREGRSQNPRMFNLPCRMICYSYY

SEQ ID NO: 333764 - protein, 108 aa, Zea mays
  Clone ID: MRT4577_67504C.1.pep
IKPTKMVLLWSTILGTEMQACVICLMSAKEKQKYKTSPHPHSLRTIDSAFCTTLVFNLQCADFVFLFPPACSSSLSLATFHIQMHICMCVREPHTYVHVHADYPNCAR

SEQ ID NO: 333765 - protein, 109 aa, Zea mays
  Clone ID: MRT4577_67505C.1.pep
SVDVCQGKQKYKTSPHPHSLRTIDSAFCTTLVFNLQCADFVFLFPPACSSSLSLATFHIQMHICMCVREPHTYVHVHADYHNCARYIPQPVDHQPHCSFLSSAILYCSL

SEQ ID NO: 333766 - protein, 34 aa, Zea mays
  Clone ID: MRT4577_67506C.1.pep
SMVASCTSLTHLMSQIKVTGKLFVTIQYDLHVLL

SEQ ID NO: 333767 - protein, 103 aa, Zea mays
  unsure (1)..(103): unsure at all Xaa locations
  Clone ID: MRT4577_67507C.1.pep
QQQLPFNQLAAAYPQQFFTFNHLAXLELSAXLQEQDVVAVVQLCCVTINAFKGNRRIGRMTREVRGSXGGLMPVRQVFAFXGLLLTGSAVLYPPPIIGGAYYR

SEQ ID NO: 333768 - protein, 227 aa, Zea mays
  unsure (1)..(227): unsure at all Xaa locations
  Clone ID: MRT4577_67508C.1.pep
MPSHGDLDRQIAQLRDCKYLPEAEVKVLCEQAKAILMEEWNVQPVRCPVTVCGDIHGQFYDLIELFRIGGDSPDTNYLFMGDYVDRGYYSVETVSLLVALKVRYRDRITILRGNHESRQITQVYGFYDECLRKYGNANVWKYFTDLFDYLPLTALIENQVFCLHGGLSPSLDTLDNIRSLDRIQEVPHEGPMCDLLXADPHDRWGSGIGGGGGRRRTVTFEREMDEI

SEQ ID NO: 333769 - protein, 123 aa, Zea mays
  unsure (1)..(123): unsure at all Xaa locations
  Clone ID: MRT4577_67509C.1.pep
THASERLQDRPSIICVFLHLICHMHVYVSELRVGKHSLPLYELPTHATRCYYLGMFLRGAYHDALSRLHNLFGLPSMVRVSQCDXPHCFSVTLADKIPSCANMLQAIQYEPLVMYYVLKHYTY

SEQ ID NO: 333770 - protein, 100 aa, Zea mays
  Clone ID: MRT4577_6750C.1.pep
APQGGGFCSLGAQKAHQVSPCAPRGGGQGPGPRGSACARAGVFFRGGTWQYYPGFFCSVRYGYGGPPGGVGVCFERSPVRSYQCLSRERVRSGLQVTWAK

SEQ ID NO: 333771 - protein, 66 aa, Zea mays
  Clone ID: MRT4577_67510C.1.pep
QGKKPPRKRCVFCQMEYRKGIFQMTFPCKHVYHASWVTKWLGINKVCPVCFAEVPGEDLEAMSHQL

SEQ ID NO: 333772 - protein, 370 aa, Zea mays
  unsure (1)..(370): unsure at all Xaa locations
  Clone ID: MRT4577_67511C.1.pep
MPSHGDLDRQIAQLRDCKYLPEAEVKALCEQAKAILMEEWNVQPVRCPVTVCGDIHGQFYDLIELFRIGGDSPDTNYLFMGDYVDRCYYSSGTVSMLVLLXHLRPRRYHPSPALLLAGGLAGSRDRPPPRLCLLGRRRQELGKWRQGKGRFEVERSRSGNAXTRIWXQISQLRDCKFLPEVEVKTLCEKAKAIXHGGVXYSPCAAPSLCAATSTASSTTSSSSSASAGMRQTPTTSLWGIRLTEPTTLWRHCRPMCDLLWSDPDDDXRWGISXPXGAGYTFGQDIAQQFNHTNGLSLISRAHQLVMEGFNWCQDKNVVTVFSAPNYCYRCGNMAAILEIGENMDQNFLQFDPAPRQIEPDTTRKTPDYFL

SEQ ID NO: 333773 - protein, 396 aa, Zea mays
  unsure (1)..(396): unsure at all Xaa locations
  Clone ID: MRT4577_67512C.1.pep
MPSHGDLDRQIAQLRDCKYLPEAEVKALCEQAKAILMEEWNVQPVRCPVTVCGDIHGQFYDLIELFRIGGDAPDTNYLFMGDYVDRGYYSVETVSLLVALKVRYRDRITILRGNHESRQITQVYGFYDECLRKYGNANVWKYFTDLFDFLPLTALIENQVFCLHGGLSPSLDTLDNIRSLDRVQEVFIRAMSGNCRILPNXSQIQDMFNPIQKLDNIEIIARQPYKNDSVVSVERYPVLLVFFSHSSFLLGWGVGSLRLDISPLVKXQPVVICNEVPHEGPMCDLLWSDPDDRCGWGISPRGAGYTFGQDIAQQFNHTNGLSLISRAHQLVMEGFNWCQDKNVVTVFSAPNYCYRCGNMAAILEIGENMDQNFLQFDPAPRQIEPDTTRKTPDYFL

SEQ ID NO: 333774 - protein, 81 aa, Zea mays
  Clone ID: MRT4577_67513C.1.pep
GTTPLPPLPPPSTASACSPSSVIMWGGSGKCNCGSSCSCGNSCNCMSPDVETAAASIIKTMVLAAPTTIASSGRFYAATQG

SEQ ID NO: 333775 - protein, 130 aa, Zea mays
  unsure (1)..(130): unsure at all Xaa locations
  Clone ID: MRT4577_67514C.1.pep
GRHSYESVSSIPQKSLYLNEQYLNVKKAMVDAFFGPPERSVYSASVQSTLLQMAKAVLGRFSDISSVKLKMPNIHFLPVNISSKDHGSIGKFDDDVYLPTEXIPKGSIESSLSWFRTKYKTNVVYGGRRV

SEQ ID NO: 333776 - protein, 308 aa, Zea mays
  unsure (1)..(308): unsure at all Xaa locations
  Clone ID: MRT4577_67515C.1.pep
MPSHGDLDRQIAQLRDCKYLPEAEVKALCEQAKAILMEEWNVQPVRCPVTVCGDIHGQFYDLIELFRIGGDSPDTNYLFMGDYVDRGYYSVETVSLLVALKVRYRDRITILRGNHESRQITQVYGFYDECLRKYGNANVWKYFTDLFDFLPLTALIENQVFCLHGGLSPSLDTLDNIRSLDRVQEVPXHEGPMCDLLWSDPDDRCGWGISPRGAGYTFGQDIAQQFNHTNGLSLISRAHQLVMEGFNWCQDKNVVTVFSAPNYCYRCGNMAAILEIGENMDQNFLQFNPAPRXQIEPDTTRKTPDYFL

SEQ ID NO: 333777 - protein, 107 aa, Zea mays
  Clone ID: MRT4577_67516C.1.pep
RFPPVRASPETMAPEKLGLKVERNPPEFPLFELGVPQWPKWGCEKNKFPWAYSPKETCFLFQGKVKVFPQGPGEEFLEIGAGDLFVFPKGINCPWGVTKAVAKPSHF

SEQ ID NO: 333778 - protein, 180 aa, Zea mays
  unsure (1)..(180): unsure at all Xaa locations
  Clone ID: MRT4577_67517C.1.pep
SISILLGFAAFRTGFSSSLARPLDLLKSSSNVFLLALRGLATATSIAVVEEMVFRSWLSEEIAVDLGYYNAILISGLEFSLIHRSLPXVPGFLLLSLILFGLRQRTQGKLAAPIGLRSGIMTASYLIQSSGVLTSKPETPLWMISTYHLHPCDGVIGLSICSLLAIFFFPQKPVQKDTSV

SEQ ID NO: 333779 - protein, 232 aa, Zea mays
  Clone ID: MRT4577_67518C.1.pep
MEDWDSEEFQPVVPVVKAEPLKNQWADEDVEEDDVKESWEEEEEEEKPKPAPVEKVAAKPSTKAPAKKGKQQALTSAEEPDEPPLSPTSQKIRQQRLVEEADFKSTTELFAKKGSEQKSLDTFIPKSESDFAEYAELIANKLRPYEKSFHYMALLKNVMRLSMTSLKGADAKDISSSVTAIANEKIKAEKEAAAGKKKQGAKKKQLHIEKGDDDFIPGRGGGYDDPDEYDFM

SEQ ID NO: 333780 - protein, 72 aa, Zea mays
  Clone ID: MRT4577_67519C.1.pep
IPWSMGLLVCGRPSSFFFFFFTPDGSILNPGTSFLNQLLLSLGGLHIHRGALSTYISISTKKKMGADYPTDG

SEQ ID NO: 333781 - protein, 69 aa, Zea mays
  unsure (1)..(69): unsure at all Xaa locations
  Clone ID: MRT4577_6751C.1.pep
PPQDVAQKTKELGIFALPIKPRGPGGNKPKTPGPGAQFAFKAFARFGIKIARFXVFSPVPPDSPPKKGG

SEQ ID NO: 333782 - protein, 133 aa, Zea mays
  unsure (1)..(133): unsure at all Xaa locations
  Clone ID: MRT4577_67520C.1.pep
MGISRDSMHKRRATLGKQNFWRQKRKYEFDRQPSNSKLXSNKTARRVRVRGRNVKWSDLRLDTGNYXRGRESVTRKSRILDVVYYASNNELVRTQTLEKRAVAQVDAAPFKQRYLTHYGVDIGSEEKNPCCQE

SEQ ID NO: 333783 - protein, 125 aa, Zea mays
  unsure (1)..(125): unsure at all Xaa locations
  Clone ID: MRT4577_67521C.1.pep
WLWNLWADLCACGCAGPGESGTPSGVAYGTAEVSPRRHIEXGTDEELVHKNIAEGTIGTTLKITLKKGTSEAHNLPSEEGKKEPNKVHSVLPHLRTDTSHERHEDAVLGSETWSAAPVGWMPHEK

SEQ ID NO: 333784 - protein, 102 aa, Zea mays
  unsure (1)..(102): unsure at all Xaa locations
  Clone ID: MRT4577_67522C.1.pep
GGQQRPRGAFSRVFFFPAGGQGVQCPPRWAPLGKSPPLFWPDKPWVTRGQVPVFWSKSLRLGGLAPPVFFFLPSSPRVKNEGXSFKNPPVRLRCPGGYIQRD

SEQ ID NO: 333785 - protein, 157 aa, Zea mays
  Clone ID: MRT4577_67523C.1.pep
PNVQLFSSDCLPIQFVLILYCLCMLLLPAFWSSRRVQAHQKRKDLHVQSYKKIKLGCGCCCVASSCWTEEREERSSWRADFYSGGLLFSMGLLGYIFSRSTISLVLGITPGLATLLLGTLSLKFWRSARSSFLLILAQAGICLASKWFVGPKIVRIT

SEQ ID NO: 333786 - protein, 228 aa, Zea mays
  Clone ID: MRT4577_67524C.1.pep
QPGRSASVQASGSSLSRRHPHRRRRGCRTTSSSTRGTVLSASSLGSDPPTTATRGLGLSGELAASSLYRVRGLVALSLASNGFEGRVPVGLAALGGILQVLDLGENMLSGVLHPALFGNLTSLLNCGLLFSMGLLGYIFSRSTISLVLGITPGLATLLLGTLSLKFWRSGRSSFLLILAQAEVMLMCKHLHFEFCLARMNQVYFPILLHLRQIEQGFVWLPNGLLVLK

SEQ ID NO: 333787 - protein, 143 aa, Zea mays
  Clone ID: MRT4577_67525C.1.pep
LNMHKAARQHLIFYSHCFYFVNSLTHVSVLVYSGDKSPRPELQEDQAWLWLQLCCLLLLDRREGGEKQLACRLLLRWSFILYGASRIHLLQKHHKSCLGHYTRASHSATWHSQSEVLEERQIQLPAYLGSGRDLFGFQMVCWS

SEQ ID NO: 333788 - protein, 68 aa, Zea mays
  Clone ID: MRT4577_67526C.1.pep
LRVPFPKNPWDKKTQTKGVITKPPSFMKADPNYFFFSPTLCAHGIPLLGYCTGPVGPQPPTLGGAVPL

SEQ ID NO: 333789 - protein, 85 aa, Zea mays
  Clone ID: MRT4577_67527C.1.pep
HPTLELFCMVHRITMSRNDVIMADPRCVLVQTAYRTLSKGWGQRRLSEEELDRGLRAHTQVAHTWQIERLDRPTHFDTGWVSDKE

SEQ ID NO: 333790 - protein, 61 aa, Zea mays
  Clone ID: MRT4577_67528C.1.pep
KKIGPRRGHSNVKNRSSQERKPFTFCPTQEFYIPHPRQAPGRSTRTNTRPEPNTKALTRRA

SEQ ID NO: 333791 - protein, 145 aa, Zea mays
  Clone ID: MRT4577_67529C.1.pep
MFVSTGRVGSGFANSSNGRQIGSYFNSSSNRLGSPIGYVGLNDEISWGNLTSVHGMGNISSLGPGNLGRGAGDNNFGLPSGTYGRSNSTGTIGEPFSAAGNTYDVNNPDTYGGSSIYGGTAWRFTSSEVDMPFGHDIGNFDPTIK

SEQ ID NO: 333792 - protein, 62 aa, Zea mays
  Clone ID: MRT4577_6752C.1.pep
CGSHNYSSRTQCKECGAPVPSGIPSATMKATSDASSSIYAMLYTVLNIWQVVHWWTHLQVRA

SEQ ID NO: 333793 - protein, 130 aa, Zea mays
  Clone ID: MRT4577_67530C.1.pep
RCIDVAFDIVYAGDTSVIHQSLTERHQILQKVVKQLKGHLEILIPRGGLNVPRPSDEPCWSIIAHNAEDVDKFFKETIENRDEGIVLKDLDSKWEPGDRNGKWLKLKPDYIHAGADLDVIIIGGYYGSGR

SEQ ID NO: 333794 - protein, 54 aa, Zea mays
  unsure (1)..(54): unsure at all Xaa locations
  Clone ID: MRT4577_67531C.1.pep
MAWKQMEEIQRKLYLLEYPRANAPVQSLLFAGVXRYRLLEWLFLRLLGDRSALT

SEQ ID NO: 333795 - protein, 101 aa, Zea mays
  unsure (1)..(101): unsure at all Xaa locations
  Clone ID: MRT4577_67532C.1.pep
MATIKIGMNGLLTIGTVVDWEPLPSDDIKLAGLNDRLISTDYMTYMLKINTGHILWKHHEVKVMDSNTFMYRAKDVDMFLCXNPQKTPMGSAGAQYTAECT

SEQ ID NO: 333796 - protein, 51 aa, Zea mays
  Clone ID: MRT4577_67533C.1.pep
TCQKKKSLRPECVPKGGMQVHVVKQCWSTRAGSECCIASDCPDEQPIKRLH

SEQ ID NO: 333797 - protein, 166 aa, Zea mays
  unsure (1)..(166): unsure at all Xaa locations
  Clone ID: MRT4577_67534C.1.pep
WLSPWQDVLLPFTYLLFIVNCLEEIATVKYSLFCSSSVKKDEVVITVQFQQCIKILANKVYLLTQQSVELLERYSAMQAVHGGITKELDLKKVLISNLYNKXLTRKXTSKEKISFGRFEVYELAVFFXNSAGHYVAINRNCSNYYLSEESIAMFTEHHRQHPIRGL

SEQ ID NO: 333798 - protein, 170 aa, Zea mays
  unsure (1)..(170): unsure at all Xaa locations
  Clone ID: MRT4577_67535C.1.pep
MAEKMSTLIIVVDLDCRKCYHKIRKILCQLQDHERIRTISFDDKSKTVTMVGPFDPQRLACKLRCKGGKVVRDVYIVDANGGGGGGGKPPPPQNVPDDGPPAPAPAPXERREEQEQEQEQGQAAXQPPPTERPPSPPPPPPPETAPGPPPPEAMMPPSPXPRPPPPASSA

SEQ ID NO: 333799 - protein, 89 aa, Zea mays
  Clone ID: MRT4577_67536C.1.pep
GKCSWNYCSTPCCWKCIFQSEFSVLELVDIVVYPSFLEPVKETILRVHRGEGLIKWPNWTNGAPFALWSFCFWEATSCNGTDRCFRNPP

SEQ ID NO: 333800 - protein, 157 aa, Zea mays
  Clone ID: MRT4577_67537C.1.pep
DFEASSELSIMSLRRHVNLLLENHKKCAYSLHLLKRDHLFYPTEEAAKVRDLPRLRKVPPYSPFGTKVNGQKKKNQAALSDKLESIKLSPADFTVRPSMACNGEDRLSCFSLSGSKIFFTDSVARTTLYDTEERCMITSPSLHSPKCYPIGVSVPIP

SEQ ID NO: 333801 - protein, 76 aa, Zea mays
  Clone ID: MRT4577_67538C.1.pep
PPDRGMSAVVPQPQYVEERPPRAELEPQPPMSPPPPKEMRPPMDLPPSPQHQHHPPPPMPMPMPGNERPPPPPMRC

SEQ ID NO: 333802 - protein, 108 aa, Zea mays
  Clone ID: MRT4577_67539C.1.pep
VHMMIHPCRWHDVTYGDDSASFTCRVLKLVDVVGYPSFLEPVKETILRVHRGKHWGSHPQAYLATTRWELRRVSIIENFSSMLGQLSHSKGLPMGYIKFVAAHELFEG

SEQ ID NO: 333803 - protein, 279 aa, Zea mays
  unsure (1)..(279): unsure at all Xaa locations
  Clone ID: MRT4577_6753C.1.pep
PPPHGWRRRRRRRLVVRRRRRGGREGDWDCGSCGNRNYAFRSLCNRCKHPRLLVDPNTPRDSKWLPRAGDWICTAATTCKCKLALXGMAGRYGMQSSGWPFGNGNPNQFLGVPKDWRNGDWFCSCGSHNYSSRTQCKECGAPVPSGIPSTTMKATSDASSTLGTKRLASEDLANDWDNKRLNPGNDNYPLSTGAANNLFLGIEQGAGSSNGQSAFPKFDNGSSVALPSGQGMSGLMGKGAKWRDGDWLCNNCNNHNYASRAFCNRCKTQKESAVHPGVL

SEQ ID NO: 333804 - protein, 403 aa, Zea mays
  unsure (1)..(403): unsure at all Xaa locations
  Clone ID: MRT4577_67540C.1.pep
RGRPGRASGAALCSGSDASAGTLPRDLFGYGLAVGDSHACALRRPDHTAVCWILGGPTTTLYEPALGISFGFLVAGGNFTCGVASSDFSVYCWSAGAVAAPVSLPRIRPGVCVSDDSSFLLQRSFSSVIDGTAYVGFSSATGILFCRHYVLGWSFRMNGAAPPLNVSSLPTLPVTGPRPRSRALEIVLSIASAALVFAAAAAVFAFLRRRRMYAEVREDWEASFGPHRFSYKDLFHATDGFSDKRLLGIGGFGRVYRGALXRPRRRXAVKKVAHGSRQGMREFVAEVVSIGRLWHCNLVQLLGYCRRKGELLLVYDYMPNGSLDRCLYDWSRTALGWGQRFRIIKGVASGLLYLHEDWEQVVVHRDIKASNVLLDKEMNARLGDFGLARLYDMGVEVTVQNNV

SEQ ID NO: 333805 - protein, 93 aa, Zea mays
  Clone ID: MRT4577_67541C.1.pep
GAKIDFYTDVYTTDERFGEGTRQGGKLHAGTKKTTRGCWDCQEVSINCLSLFLFFIKASLDMTSILTLNLIGVPAQIHSPSDMMQCYIHCRFN

SEQ ID NO: 333806 - protein, 51 aa, Zea mays
  Clone ID: MRT4577_67542C.1.pep
GWEIWVLPPIQLFRCGPSGVTWINKNFVPELKLVGFFPRKVRGWVPNLLPL

SEQ ID NO: 333807 - protein, 91 aa, Zea mays
  Clone ID: MRT4577_67543C.1.pep
SLNRWLWLLFPSVIWAVILIPSPLLAYSRCGPVQFGLGMIFSLIPRMVIALLLHLVSRLCCVKRRVDSNVSELPLPVVGGEFAERGGRSRL

SEQ ID NO: 333808 - protein, 668 aa, Zea mays
  unsure (1)..(668): unsure at all Xaa locations
  Clone ID: MRT4577_67544C.1.pep
MIGDAIAAQTTYDRENPKIVVGSTFVDKDAFMLLIKQYAIINEFETFVVHSDRSRYRAKCADTSCDWKIHAKKLLGCPTFMVKSISEHHTCASTSKVLGKEATKGWIANKASEILKSNPTIGAKKLQVQLEQQYPINMSYSKVWEGMQCAKKELHGTWDNSFKMLWSFKAQLEETCPGSIVEIDCKKIKGRMHFNRMFVAIRACVNGFLVGCRPYLGVDSTHLTGKYSGQLAAATAIDGHNWMYPVAYGIFDKENDSNWIWFMMQLKIAIGTPHGLTIHTDACKGLANAVLRVFQGAAEHRECFRHLMKNFRKKYQGDVLKYMWPCAWACTPRRHQVLWEKIRESSPEAIVYLETNHKQIWSXAKFSADCMVDYVNNNISECFNNWIKDYKSFLVDILMDAIRGKIMEKIATRQKVAARLTGRVLPSVINELNIKSRSLKYTITGSGGLKAEVSGLTRDNTPWRHGVDLDKKTCSCGQWKISGKPCTHVIAFITSRRQVRIEDYVHEYYSVERFKATYXSXINPMVDKAQWPVVDPGFVMVPPKLERPAGRPRVRRIRSSGEAGKRGPYQCKRCFQFGHIEKTCREPPAELGDELPSPPKTQKRNGDAVPHTPKRSNTAKTTASTPPSTGPITRSMAASPSTSTGEGPVTRGMTNISPGGIARRVIIS

SEQ ID NO: 333809 - protein, 97 aa, Zea mays
  Clone ID: MRT4577_67545C.1.pep
YTALSAKLNAGLHLTMHTANTTSFLHLTLTTTTSTTTNKPTAISRVKDHSQSLNTYVPYIPQNHPHHKARDSHRHPIHHQQCTQPTQHHTQPIPIHH

SEQ ID NO: 333810 - protein, 73 aa, Zea mays
  Clone ID: MRT4577_67546C.1.pep
SECHMRAPSSRPTSALDVRYHHCRDSLSPCRRSQGAPVDGACRLAPGCGHHRDWSACAAASPTPSAPWLSDPI

SEQ ID NO: 333811 - protein, 55 aa, Zea mays
  Clone ID: MRT4577_67547C.1.pep
GAKKNGPKLPKILTGFHTRRALYTFTGGKRNRGDPYGVQVTTSNTGWGPYYHPPT

SEQ ID NO: 333812 - protein, 113 aa, Zea mays
  unsure (1)..(113): unsure at all Xaa locations
  Clone ID: MRT4577_67548C.1.pep
RCFAVDLVGPLLRRFWVNCAVSHLIRLGENLPFPSWLTWEEVRLYPPCQLVNRLNGKWXSPCFGTLIAEGAVVAPTLSAPLVRGLPPARSVYFPSFLATFVGFSCLALIRGLP

SEQ ID NO: 333813 - protein, 93 aa, Zea mays
  unsure (1)..(93): unsure at all Xaa locations
  Clone ID: MRT4577_67549C.1.pep
RRQFKQQDFYPRCKPRGPAPQSCDSPPKRDTGIASEKEWGINXLDEAVKESGINEDGSTWYRESGEDTGENGXPCSWARMGGQNHDGPTKSLS

SEQ ID NO: 333814 - protein, 64 aa, Zea mays
  Clone ID: MRT4577_6754C.1.pep
NPSLAPESQLGDATYIKSNSSMWLLLNHLFFSWHLRLQVPLSLQVTRNLATSHSNITHASADAW

SEQ ID NO: 333815 - protein, 271 aa, Zea mays
  unsure (1)..(271): unsure at all Xaa locations
  Clone ID: MRT4577_67550C.1.pep
MTSASELFTARRAARGARLSDLDLDPHADALRDQHGLGARHRRRGCRPRRQLDAAGDVRQHLHTGAPPPRRRGSYTDQILSYIDNNNLGVGDSAARRNRLDRLMFRTNERLPGAVLQAQARVLERLRGISLGSSASRPSISLDEXQLAMYSESSTSETGKHGMKQIGTTHRRSTQAVNQMKKDQXSSTHSNRSTGLTKAAFLRLQVEIFEASKDDSREASPECSICLDGFYDGDELIRLRCGHRFHSTCLEPWARKCADCPYCRTNIRSRS

SEQ ID NO: 333816 - protein, 177 aa, Zea mays
  unsure (1)..(177): unsure at all Xaa locations
  Clone ID: MRT4577_67551C.1.pep
GRAFSIHIGQAGXHVENACWKLYCLVYGIHXTDAGCPADKTIGGXEDGCPAVLQDIGAVNLLHQAVYHNLXEPTVHXTMELRTYRQLFHPEQLISANEDAANNFARAHYTIDNEIVDLRLDRITKLADNCTGLQGFLVFNTVDGLTLSGLVSLLLDRLSADYGKKSNLVFTVYPSPQ

SEQ ID NO: 333817 - protein, 62 aa, Zea mays
  Clone ID: MRT4577_67552C.1.pep
ASALLVPPFLSFRSWPGCLFLFCLLPVGPRACPWTVRGRGGCRLRAPSRPRSRGSPRVSRSG

SEQ ID NO: 333818 - protein, 55 aa, Zea mays
  unsure (1)..(55): unsure at all Xaa locations
  Clone ID: MRT4577_67553C.1.pep
GSFLVPFFLWSVPCFWVFLWLPCVGCXXCPCLSRWVVAVVXAVGLGLSXPCSVVP

SEQ ID NO: 333819 - protein, 152 aa, Zea mays
  Clone ID: MRT4577_67554C.1.pep
MEFTSSYFHAFGNPDLAAVVSGDGGSAQAHRPRRSTDGAKAEDGRSPTTTTARRAPSMFCVPDTEAEEPNGFLDECTLCRKALCGDIFMYRGDTPFCSDDCRREQIDMDRIRHRRKKQQALIAQQQQQQQAAAAAAMAQRDRRTQRQLQPQH

SEQ ID NO: 333820 - protein, 145 aa, Zea mays
  Clone ID: MRT4577_67555C.1.pep
PGRQKFGPRNKHWLGFFFFCGEGWGAPGGPRLKAPILGPSPGSGPPQRIMDWLGQKGPKILIQVLRGGSPGRGFRVGKGGGDFQPMWLVNPGGLGFQGLVPVPNGPFFTGNPPKGLNPPKAKAHPGPQVRPGRPPGEKKKPGKTK

SEQ ID NO: 333821 - protein, 152 aa, Zea mays
  unsure (1)..(152): unsure at all Xaa locations
  Clone ID: MRT4577_67556C.1.pep
MISTKRISQMVKKWQRMAVLGRKRLSWRVEREVEDRSCASVASKDHCMMYSLDGRRFEVPLAYLGTLVFXELLWMSYEEFGFVSHGRITLPCDAAAVEYAMCLLRKGSSADVEKAFLSTMAVSCHYASCIAIAPFVGVSHQAVICSSWLTVK

SEQ ID NO: 333822 - protein, 59 aa, Zea mays
  Clone ID: MRT4577_67557C.1.pep
NQYKQRPAWGYLQDTEKLFIQIQSFNPNLSTFFVRWPGKIAHKGNGRNVVPRRNIFGTL

SEQ ID NO: 333823 - protein, 193 aa, Zea mays
  Clone ID: MRT4577_67558C.1.pep
EFGTSSVALVAFSGRRDYARVNDDMTSAEMINAMAQDVTDAIADAVEHLTGLGVEKVLVTTLPPIGCTPWLSRSSDYSSCDGQMVASVHNAYLEEKVFKDAAVLNLDLNTMFRRLTSGSGSSQSSKRFNKHRLEPCCEVFDRTDYCGRMDDGAAAYSLCSAPDKYFYWDEINPTHAGWKAVVNELEESIKNFL

SEQ ID NO: 333824 - protein, 98 aa, Zea mays
  unsure (1)..(98): unsure at all Xaa locations
  Clone ID: MRT4577_67559C.1.pep
PRXTSSGAGGGVWVCTIDCGVHLPKHLASSGSITFCWERMGLQEHSGIGTHFTVXVREVXSHWGEKSLSSAXPWNXMELYLWMRLKSYTTRNGVKCLH

SEQ ID NO: 333825 - protein, 343 aa, Zea mays
  Clone ID: MRT4577_6755C.1.pep
MAGGGGAGAGSSSGGGGGGGREGDWDCGSCGNRNYAFRSLCNRCKQPRLLVDPNTPRDSKWLPRAGDWICTGCSNNNYASRKNCKKCGLPKEEAAMPALQMAGMTMPAYATYIARLQSLAASASAYKMNFGMAANSPLQQQLLANANWPYGMAGRYGMQSSGWPFGNSNPNQFLGVPKDWRNGDWLCSCGFHNYSSRTQCKECGAPVPSGIPSTTMKATSDASSTLGTKRLASEDLANDWDNKRLNPGNDNYPLSTGAANNLFLGIEQGAGSSNGQSAFPKFDNGSSMALPSGQGMSGLMGKGAKWRDGDWLCNNCNNHNYASRAFCNRCKTQKESAVHPGVL

SEQ ID NO: 333826 - protein, 71 aa, Zea mays
  unsure (1)..(71): unsure at all Xaa locations
  Clone ID: MRT4577_67560C.1.pep
LFLFLIKXLIYPFLAKTVDHITLVRAVALLTLPVLASYPFFPSLSGFGLMVVVNCASFLKNTFSVSAPLSV

SEQ ID NO: 333827 - protein, 94 aa, Zea mays
  unsure (1)..(94): unsure at all Xaa locations
  Clone ID: MRT4577_67561C.1.pep
ASDAARVFFFFFFFXXXPTHRRVLIGGGKISYTTFAGPRHYPIWPGREHPTKLAKHRQDLPYGFFPAGNRPAGRRTLKGPIGCPVGNDSRASDN

SEQ ID NO: 333828 - protein, 110 aa, Zea mays
  Clone ID: MRT4577_67562C.1.pep
PRAPPWVLPGGGAKRVKTTSGASSPGGGCPVYNRAPGGRAACKGLIGPVGQLYIFGGFPSSPVGEKMVMEGGGMYVYAQGGGGGLWASPSKDAISWIRVFFPPPPVGNFL

SEQ ID NO: 333829 - protein, 129 aa, Zea mays
  Clone ID: MRT4577_67563C.1.pep
MRFCYVGLLTKVCFPLKVKRQNIHISFFQLILIENNIIIQVTFSNTRSFLLNKSNDISDLCDAHVALIVFSNKGKLYEFSSDPIMDRILERYQRQIYAPTGSESHANLSLESSKLMSTIEVFQKNFKNF

SEQ ID NO: 333830 - protein, 159 aa, Zea mays
  unsure (1)..(159): unsure at all Xaa locations
  Clone ID: MRT4577_67564C.1.pep
ECQNFGSVAVICTHIYGSGACVLADSTFKVTRYSXAVSLKTRETVHNIIAHGIHYFVHRQLIYIFPEGVFVYAGILAIEHAEIEGTEWLAPVSGGVIASAFDNTKSVEPGLCKVTXEITIGEHMLILLAVPSGRMVLDSASWGCEEIGAGGRRDPTATE

SEQ ID NO: 333831 - protein, 93 aa, Zea mays
  Clone ID: MRT4577_67565C.1.pep
KPIKPSLIKEGVCAPISFYHIFLFMQKNAGRFYDLILVSAPEILRMSSAPVYSFILVSVAIPGIFIWQPAKFLYFFPGLPVFLILKKYPIKNK

SEQ ID NO: 333832 - protein, 67 aa, Zea mays
  Clone ID: MRT4577_67566C.1.pep
LLYMPQCYRVMSYYVPCFLRSSSEQTVCHWQWHPVFFFDGAPLAPRVGIPVCAIKYSKHGGGPVAWV

SEQ ID NO: 333833 - protein, 70 aa, Zea mays
  Clone ID: MRT4577_67567C.1.pep
SSCDFPSSVSNRNGSYESEVCADMRPRGTTTQPSAPNTSRPSKRPRASYYPLSQIRAVHPSCSFSPDTPS

SEQ ID NO: 333834 - protein, 77 aa, Zea mays
  Clone ID: MRT4577_67568C.1.pep
TVQVWAWLLAVVLVERAALCALGHKDLLVRPPGSRGDPLSSDAISARTDLIPDGEEEGETIPNFCFPFACGLAAPPA

SEQ ID NO: 333835 - protein, 93 aa, Zea mays
  Clone ID: MRT4577_67569C.1.pep
PSSPAGTVPAVRPVTPTVPRPAPPRPAHAAVATPWGSDPAAGSCRSSPDPARPGPSGIAPPAVCLACRSRTTRQGLLSPYRYADSPTVTPESG

SEQ ID NO: 333836 - protein, 125 aa, Zea mays
  unsure (1)..(125): unsure at all Xaa locations
  Clone ID: MRT4577_6756C.1.pep
KEATDSIGGTVTCVIRGLPADVGEPVFDKFHAKLAHDMLSISATKAFEIGSGYAETEIPGSRHNDPFVLKENGGMTTSTNXNGGVQGGITNGEDVYFKVGFKSPVTISQAQTTAPSDGTPGSLAA

SEQ ID NO: 333837 - protein, 118 aa, Zea mays
  unsure (1)..(118): unsure at all Xaa locations
  Clone ID: MRT4577_67570C.1.pep
AHTNRRPPKTKAGGGGDQRRRGGEERRRGKAASEGPGKGNPXXDNXAXXEDAXXAKXDRGGNXAXXXEEKHXPXXEEXASNSNAEQNAGGATQNPSRXAQRTXQXPXATSDTGRNGKD

SEQ ID NO: 333838 - protein, 72 aa, Zea mays
  Clone ID: MRT4577_67571C.1.pep
IIGFQRLKSSCFFYKNCLEKGEKPFFFFSPPCWGEHSKITPLKLQRLLMVKGTLHFWENFLGVFSRILMGPF

SEQ ID NO: 333839 - protein, 118 aa, Zea mays
  Clone ID: MRT4577_67572C.1.pep
VVFFFFFFFFCFFFFFFFFTSAASQHIRNSKSWRGNAKSTTPWGGKRAVSRGRGGASTARKSRIRIHRPAGGPDLPRGPRGRAVVAGPALGPGDFRREGAGVGAVGAPGRVGRPAPEG

SEQ ID NO: 333840 - protein, 40 aa, Zea mays
  Clone ID: MRT4577_67573C.1.pep
ACSDPVLSLSWVGIHLTEAAYSKIAYGWVRGAFCHPAILA

SEQ ID NO: 333841 - protein, 166 aa, Zea mays
  unsure (1)..(166): unsure at all Xaa locations
  Clone ID: MRT4577_67574C.1.pep
RKRRVVTRFRNTVGLAGRMSVRLQPNHPTDDVKGIAASMLDGLMYGCGDAMIGINPATDSLAAIVKLLAMIDGFRERYGVPTQSCVLTHVTNTIAAVEKGAPVDLVFQSIAGTEKANASLXISLALLGEAREAALSLKRGTVGNNLMYFETGQGSALSANAHHGDD

SEQ ID NO: 333842 - protein, 102 aa, Zea mays
  unsure (1)..(102): unsure at all Xaa locations
  Clone ID: MRT4577_67575C.1.pep
MASKTLSLLALLALFASATHACMIPQCSLAPSAIIPQFLPRATSLGSEHLAVQAYMLHPSLAXSVLIAPSRHLHHPCLTQLSLQAIYLHHPRALINSMPLIR

SEQ ID NO: 333843 - protein, 140 aa, Zea mays
  unsure (1)..(140): unsure at all Xaa locations
  Clone ID: MRT4577_67576C.1.pep
TXXRCGRKSPASWWRSAGSGWHLSRQQRSAQARAASSEEMQNVSRQHTQRLLHSSGRGGTATPLVVGRERIADGAEDVEAPRRRRDGLYSRGRESLLCRRRGLFSLSLLLFVKRKHQMEKKFIHKLHVEHKYSVKKSDHS

SEQ ID NO: 333844 - protein, 132 aa, Zea mays
  Clone ID: MRT4577_67577C.1.pep
KRLLYGSSGPPHSTLIALHAIDTRLACTLLPPSAHVIEVPNTRSALQRRNTICRHDPPMTNSFLINSCTKHLHHYHAYVECWIYAHTLAVTRTRILRSHLALYRSRLQRACSTICIHKLCEMPAVSAHRLLG

SEQ ID NO: 333845 - protein, 329 aa, Zea mays
  Clone ID: MRT4577_67578C.1.pep
LTSGHLSSRASANSLLRVAPCSSACALILRLLLLHRLRPDHISLSFSLHACARVVPTTSRYPLTVTGLLHSLALRLGHARDVYVANAAVSSYFAASDVASADRLFAEVSTDVADVVTWTTMVTGHASAGGLGRARHFFDAMSERNVVSWNAMLSAYARAGMLTEARDLFDAMPTRNAATWSCMISGLVLSGRCWEALHDQGLFGDMVHSSGIVPNEPALVSVVSACAQMRSLEHGAWVHAYAEQELQGAMSVVLASAIIDMYGKCGGIHSAIRVFAAMPMRNIYSWNAMITGLAMNGGERQALSLLWKMQMVGVQPNDITFIGLLSACT

SEQ ID NO: 333846 - protein, 247 aa, Zea mays
  Clone ID: MRT4577_67579C.1.pep
IGYLEAGREGPIAHVWGVMDGVVRTDFPDIKMKCTIHSDAGSIMVIPRENNMVRLYIQIASSTVPDFNPRKTATTEEVQKHAQEILRPYMITWDRVEWFSVYPIGQGIAERYTLDERVFMGGDVCHTHSPKAGQGMNTAFLDAVNLAWKIHHVESGFADRDILTTYESERKKVAENLLDFDARYAKLFSTRIPSAGEVAGAHDSSDQQEENEFVKTFKASCEFTSGYGVAYNPKSHNGSNEHPAKHP

SEQ ID NO: 333847 - protein, 70 aa, Zea mays
  Clone ID: MRT4577_6757C.1.pep
LFVPNLLLLLFIALFILIPIRIALFLSMSLLHTTGIFIFLSNRSLTIYFPLSILFVLLFLSCFLMISFLL

SEQ ID NO: 333848 - protein, 49 aa, Zea mays
  Clone ID: MRT4577_67580C.1.pep
TTSIWRASHILALDPITKSSSSPTSITMRSSPPVTSSWGRLGSSSASRD

SEQ ID NO: 333849 - protein, 84 aa, Zea mays
  unsure (1)..(84): unsure at all Xaa locations
  Clone ID: MRT4577_67581C.1.pep
LVSGFSSPSDQVLLVLRVPXHFXDRPWLLLMLITVASSAGLPFPPSTSRLIMPSPSTSRSSTPKSSPTHIQLSPSLFHLFFLFL

SEQ ID NO: 333850 - protein, 45 aa, Zea mays
  Clone ID: MRT4577_67582C.1.pep
GVPPGCIFLARGARGSTRIPCKPKPRLSYCISTYNVRLGYSYSLV

SEQ ID NO: 333851 - protein, 168 aa, Zea mays
  Clone ID: MRT4577_67583C.1.pep
RVERGVQRHGCCVLQKCISTARGRYQANLIVKICAHGFELAQDIFGNYVVQHVLKQKIPYANARLASLFEGKYIYLSKQKVSSNVVQRCIEFFPDDAKAVIVHEFLLLRGSHFEQLVTDPYANYVINTALNNTRGHLLNALVEAIRPHEDAIRTHPCCKRICRFLSRW

SEQ ID NO: 333852 - protein, 192 aa, Zea mays
  unsure (1)..(192): unsure at all Xaa locations
  Clone ID: MRT4577_67584C.1.pep
RPQRGLPXRSVNILRSWLFEHFLHPYPSDADKHLLARQTGLSRNQVSNWFINARVRLWKPMIEEMYQQECRELDGSSAGGGGPESVNDPSGADDSHSPTTTGAAQLPQQQHHLGTVPGVMPHKPDPGAAGPSAADAAFVGIDPVELLGGGADDLYGRFEPGVRVRYGPAAAGAAAGDVSLTLGLQHAGAGNA

SEQ ID NO: 333853 - protein, 136 aa, Zea mays
  unsure (1)..(136): unsure at all Xaa locations
  Clone ID: MRT4577_67585C.1.pep
CIRQHTSASCSTTPAPAAVTLAGLLLWRPRMTXDPCSEEVVEVFQGSAGSLPNGIPSYSVTITNTCLDCTVCDVHVSCGEFASTEVVDPSDFRRLSYGDCLVRNGAPIGPGETISFQYSNSFVYKMDVAAVSCVDV

SEQ ID NO: 333854 - protein, 191 aa, Zea mays
  Clone ID: MRT4577_67586C.1.pep
INIAAISAAAATRAATAASMSHSQGFHQGSAGVYGYSSDGFDRPDDSGHQDHHQQQQQHVAQQSRRDKLRVQGFDPAAAGGHGLLPIEGDELLASQMGGNYRFGGLRQQQQGPGGVVAGLSGDGGWFVGAGAAGRAAGLVLGGGANMGSLGETSSPKQQGSMAGLATDPAAAMQLFLMNPQQQSRSSPPSP

SEQ ID NO: 333855 - protein, 766 aa, Zea mays
  unsure (1)..(766): unsure at all Xaa locations
  Clone ID: MRT4577_67587C.1.pep
MGVAAPPYETTTYXANAPRSXAAISAAAATRAATAASMSHSQGFHQGSAGVYGYSSDGFDRPDDSGHQDHHQQQQHVAQQSRRDKLRVQGFDPAAGGGHGLLPIEGDEHGGPGSMYEHAAAAAGASNMLSEMFNFPAPPSGPSATELLASQMGGNYRFGGLRQQQQGPGGVVAGLSGDGGWFVGAGAAGRAAGLVLGGGANMGSLGETSSPKQQGSMAGLATDPAAAMQLFLMNPQQQQQSRSSPPSPSDVQVQHHEAAFQAFGNAGAPFGGGAGTGVVEGQGLSLSLSPSLQQLEMAKQAEELRVRDGVLYFNRQQQQQQQQLPMALHGQVGALGQQLHVGYGPAGVAGVLRNSKYTRAAQELLEEFCSVGRGQIKGGGRGASASNPNNNPGNKGGASSSGAAAQSPSSAPNKEPPQLSPADRFEQQRKKAKLISMLDEVDRRYNHYCDQMQMVVNFFDSVMGFGAATPYTALAQKAMSRHFRCLKDAIAAQLRATCELLGEKDAGTSSGLTKGETPRLRAIDQSLRQQRAFHHMGMMEQEAWRPQRGLPERSVNILRSWLFEHFLHPYPSDADKHLLARQTGLSRNQAYIIMLQLRTYIVVSNWFINARVRLWKPMIEEMYQQECRELDGSSAGGGGPESVNDPSGADDSHSPTTTGAAQLPQQQHHLGTVPGVMPHKPDPGAAGPSAADAAFVGIDPVELLGGGADDLYGRFEPGVRVRYGPAAAGAAAGDVSLTLGLQHAGAGNAAGPDSTGRFSLRDYSGC

SEQ ID NO: 333856 - protein, 121 aa, Zea mays
  unsure (1)..(121): unsure at all Xaa locations
  Clone ID: MRT4577_67588C.1.pep
GNFFAEXNEQXAFCPAFXVPGVXYSDDKLLQTRVFSYADPQRHRLGPNYLMLPVNAPXCARHPSHPDGFMNFMLGADQVNCFPSRFVPARPAGRRPLPPRGSPGRRVARLLPPAFVSSQAG

SEQ ID NO: 333857 - protein, 98 aa, Zea mays
  Clone ID: MRT4577_67589C.1.pep
FTRRRTFRRDINDADPSGMTASASLLKVDRNSSFLTAQAAALGPKKALEAAQPPREILLEVHNAQTIVAAAHGPEAAPTAAHAPEAMLAADSTLMAGF

SEQ ID NO: 333858 - protein, 150 aa, Zea mays
  Clone ID: MRT4577_6758C.1.pep
RAARFRAGRAVLPKWLMEDVAAEGFQAVRAAGSRAVCVTAMPRVMVDGFLREYLGVHAVVAREMKVVWGFYTGIMEDARPAEGAEMVKKAAEEQTVVVGYSASMEFLNHPLSRCCKELISPIGRTVPPDADRDSDGAVMARLLDRATSSS

SEQ ID NO: 333859 - protein, 303 aa, Zea mays
  Clone ID: MRT4577_67590C.1.pep
MRPRCDLWLSTLGCLIFSVLQRPGLCYGTSDPPRRPHGGVAPDGSRRSPADFTTTVKFLYQLMRRTLLPWMGYREAATHIQLWLLGALVSHSEFDVVDFLICEIEDTVLDGLCARRQLPYAHYLCHIFAQLIRPPLFQGTLEASRLLFGSYRPVPEDPVSAPALVIDTQAKDTAFHQFETQGVVVPDDDDDDDFGVPPPPPPPMPPHSHDHEARSSSAAPPAIDPALATILQTLTQQQAHLAAVQQQMSERMLPMFQTIQDRQDTLQQQLLADRAENRAFMTLMLQHTGVPIPLVQSAPPPPL

SEQ ID NO: 333860 - protein, 183 aa, Zea mays
  unsure (1)..(183): unsure at all Xaa locations
  Clone ID: MRT4577_67591C.1.pep
RAAPXEPGAAGQTEAGGHTGSRGTDGEQSXSGEGGRGGXPGGXAAGRAGXTRSTPPAPRAGXRPRRRPAPPRPQPRRXPDGAATDEGXPSATDGPPATPRPKRTRGRAAAXTATARTGRATPTGGPDQSKQARNEPGXSPGAGPXAGTPGEHXSPQKGDRHEGPPGTGKTRHAKDRNRAGRQP

SEQ ID NO: 333861 - protein, 121 aa, Zea mays
  Clone ID: MRT4577_67592C.1.pep
IGTSSRRERVDAGGLAEPVRRRLYLLLTVRRRLRGPSPAPWYHFRTHFISSRPPPSTTLTHGSDEQLTCPPRGRPSGRLTERPAGTSSGLEARGGLSQMKLLKSPWETPARISGSGIRTGF

SEQ ID NO: 333862 - protein, 122 aa, Zea mays
  Clone ID: MRT4577_67593C.1.pep
MTKQKAVIRLGVTNDKNRSKAMQLASRFHGKDQLEVVGEGIDIPCLVNSLRKKVCRSASIVVVEEVKDKAKVEEEKKKKEEEEKKKKAKELQEAIQKHCPPPPFYGGPPFLCEEQPTGCHIT

SEQ ID NO: 333863 - protein, 38 aa, Zea mays
  Clone ID: MRT4577_67594C.1.pep
SISPCYRCKMNHVFNDTVLYALLPINLFPTSLRQSNNT

SEQ ID NO: 333864 - protein, 122 aa, Zea mays
  unsure (1)..(122): unsure at all Xaa locations
  Clone ID: MRT4577_67595C.1.pep
ILHNSLGMDFVNNRDVSRVTLRNSKFFQINMYRFKDMLIKEVTVTAPGDNPNTDGIHMGDSSGITSINNVIVVSDDCISIRPGISNVNITGVTCRPDHCISIGSLRRYNDEXDITDININDC

SEQ ID NO: 333865 - protein, 132 aa, Zea mays
  Clone ID: MRT4577_67596C.1.pep
MTKQKAVIRLGVTNDKNRSKAMQLASRFHEVTLVSITGAGKDQLEVVGEGIDIPCLVNSLRKKVCRSASIVVVEEVKDKAKVEEEKKKKEEEEKKKKAKELQEAIQKHCPPPPFYGGPPFLCEEQPTGCHIM

SEQ ID NO: 333866 - protein, 142 aa, Zea mays
  Clone ID: MRT4577_67597C.1.pep
MTKQKAVIRLGVTNDQNRSKAMQLASRFHGVTLVSITGAGKDQLEVVGEDIDIPCLVNSLRKKVCRSAGIVVVEEVKDKAKVEEEKKKKEEEEKKKKAKELQEAIQKHCPPPPFYGGPRRFSARNRPQAATSCEAERFFLDV

SEQ ID NO: 333867 - protein, 183 aa, Zea mays
  unsure (1)..(183): unsure at all Xaa locations
  Clone ID: MRT4577_67598C.1.pep
RLSVQPLKAILRGPCTSVYGKLRHSRRLDAVQSDCTTLSIVKQGDLMIVANADDSRIVLGIATDGGAIXAVQLIIHLKPNLPRXATDRPRILVRLDDDHCCCCVSVLEQDVCRGXHIRWCNDQMYYLADEPRVHFIWXPSQESSVLTMSRVFDDYYINDCGVISAPEVTQRRTDNNDHSPPSG

SEQ ID NO: 333868 - protein, 120 aa, Zea mays
  unsure (1)..(120): unsure at all Xaa locations
  Clone ID: MRT4577_67599C.1.pep
NFVFDKGXKKKKKNGKKKGQPAPTQIPLYPLARFFFTTHGPPQQKKFWQTNNDYHLSIGFGDDPNTFELSSLENPFLNSSIPGNTLGFFFFTAPGNWPPELAMVPFFILATFLQTWSTPP

SEQ ID NO: 333869 - protein, 177 aa, Zea mays
  unsure (1)..(177): unsure at all Xaa locations
  Clone ID: MRT4577_6759C.1.pep
MIISKKNRREIXKYIFHEEVLYAKNDYNLXKHPXLTCTNLKEINIMHSFXSKXYVRETFACQDYXYWHLSNDGIEHLRRFLNLPPEVVPNTLKKSSEAXARPFXSGAAGDRXSRGPPRXAKTVPMFEHRDAYGRXTRSDGXFGGDNDIAPAYCQTSVNCNRTGIPQYCEYLLLSVIE

SEQ ID NO: 333870 - protein, 230 aa, Zea mays
  Clone ID: MRT4577_675C.1.pep
MVSYHPSLLRPSVLIAQASGIGRCPTLNAFLSTPVVSAVPLRLRPLRAAAGGAASPVSGDGGKRAVPPPAALLVFARSNFLPLALVSGVIFGLLDPTLGCLAHKYSLSKFSTFGIFIMSGLTLRTKELGTALEAWPAGLYGLGSVLLFTPFLSQFIMQVQFSPREFITGLAIFCCMPTTLSSGVILTQLVGGNSALALAMTVASNLLGIIIVPLSLARYIGTGAGGVFAY

SEQ ID NO: 333871 - protein, 137 aa, Zea mays
  Clone ID: MRT4577_67600C.1.pep
MTKQKAVIRLGVTNDKNRSKAMQLASRFHEVTLVSITGAGRDQLEVVGEDIDIPCLVNSLRKKVCRSAGIVVVEEVKDKAKVEEEKKKKEEEEKKKKAKELQEAFQKLCASSPCPPPPFYGGPTFLCEEQPTGCHIM

SEQ ID NO: 333872 - protein, 72 aa, Zea mays
  Clone ID: MRT4577_67601C.1.pep
GTEQRRMCLYTITAYDFRTQLLDNMKCTFSRRHVGYTHAEGAVLRTHRHIRSDDFGQKTTCIQRSAYTAIWT

SEQ ID NO: 333873 - protein, 73 aa, Zea mays
  Clone ID: MRT4577_67602C.1.pep
MLYNESLAYNGGGVGAQSITNHSSSREREFLPHKNTYLVDEEEEEVNLDEWDATTRIRHEGVRDRFDYDRGPS

SEQ ID NO: 333874 - protein, 175 aa, Zea mays
  Clone ID: MRT4577_67603C.1.pep
MEFASSSSRFSREEDEEEEQEEEEEEEEASPREIPFMTAAATADTGAAASSSSPSAAASSGPAAAPRSSDGAGASGSGGGGSDDVQVIEKEHMFDKVVTPSDVGKLNRLVIPKQHAEKYFPLDAAANEKGQLLSFEDRAGKLWRFRYSYWNSSQSYVMTKGWSRFVKEKRLDAGD

SEQ ID NO: 333875 - protein, 71 aa, Zea mays
  Clone ID: MRT4577_67604C.1.pep
YVDFKKVPFLMENGWVKRFFPLKLPVACTFYLIRTLLKKKPIKEETNTHLSAIECVVYVELQNQDLFFVKP

SEQ ID NO: 333876 - protein, 71 aa, Zea mays
  Clone ID: MRT4577_67605C.1.pep
EDGVGAAGAVEATAEGDVVDLAPDEDVHRLGELGTVVRGIVVLPSGDYPSLGANARNVTDAMAAEGVRVCL

SEQ ID NO: 333877 - protein, 147 aa, Zea mays
  Clone ID: MRT4577_67606C.1.pep
HACGHACVHASAHAFCYACVHSSVHASSHAYEHTCSHLLHQDQRVQQQTDRDYYDEPQDGIIGRTVGASPSASGGHRPTRSGGNDDESGGERRGGLCQDDPGRLLLNAVRRQDGDRPGRVLGVLRSLPAVQPGAVRQDPVQGQVHRA

SEQ ID NO: 333878 - protein, 67 aa, Zea mays
  Clone ID: MRT4577_67607C.1.pep
GGPFASYDADQEYSNSQNAPPAGPARNKKKVDKFEPRAPPCEEETQELGSGSAPKREVFFVKEKGTA

SEQ ID NO: 333879 - protein, 106 aa, Zea mays
  unsure (1)..(106): unsure at all Xaa locations
  Clone ID: MRT4577_67608C.1.pep
RQKYLTXISINKSVLGSPLKIQIRVVQRCRNKGLLLDKKYELLASPSSNAKREPYEVSLLQLWXPEAKEVDKGPRARLGQIPSQCLTTSSPSKVPNTFRTCDXDKG

SEQ ID NO: 333880 - protein, 116 aa, Zea mays
  Clone ID: MRT4577_67609C.1.pep
SADPCSHTTHSQARIYLTSSYSHSLCTCPCPCACQHHLMSPILAFILHSGTSRTSRSQLAAPCPQAVPPLEQIMIRRRHPHLSMLFHILHKPSRIEAHLAGDPALACKECFTGGHP

SEQ ID NO: 333881 - protein, 48 aa, Zea mays
  Clone ID: MRT4577_6760C.1.pep
IFILFFLIFFYFNIIYIIFKFSFFFITLFYITHSNILIFFLYFKLLTS

SEQ ID NO: 333882 - protein, 80 aa, Zea mays
  Clone ID: MRT4577_67610C.1.pep
NSLPKINDGVLTKWGPFFFGERENNMLLKKKMSYTWGQKGKQQVFTKKNVPPSPDGLLKPQILQLFHRRGILGQKLQRGF

SEQ ID NO: 333883 - protein, 77 aa, Zea mays
  unsure (1)..(77): unsure at all Xaa locations
  Clone ID: MRT4577_67611C.1.pep
MCXAPPDSHRAAQSATREGVLPRSNRSRVNHIQRLETRPPNLHPGLPGXDALPPDRPPSRPDFRVXTPCRPIDHPRG

SEQ ID NO: 333884 - protein, 85 aa, Zea mays
  Clone ID: MRT4577_67612C.1.pep
QDDQVALLRRRGGRGRGDGRVPRRAGGAGGGKLRRWMLMDSQLPEARLLLLACGCPDCRYRSGERDQEVWDDTERRADDWKKQMG

SEQ ID NO: 333885 - protein, 130 aa, Zea mays
  unsure (1)..(130): unsure at all Xaa locations
  Clone ID: MRT4577_67613C.1.pep
SARELPMKWRFPWPLRLTPWCISQGXATCSGRPAVETDPSSSMVPFKFQRMWYESDELRFLHGLLGXGTQGLVWQRDLNVVYDRLXEYMPHSYTSAQVWEKLRRLTNKFRRMSSRVVGGIDRARLAPHDT

SEQ ID NO: 333886 - protein, 128 aa, Zea mays
  unsure (1)..(128): unsure at all Xaa locations
  Clone ID: MRT4577_67614C.1.pep
FGGCAIVYAPFDSYGRWAGDLSXRDQGPLVAVEDRGSTCYALLTAHERGVVIVQPGLDGDTGHFVWLHNKPDELXLGAXEKNVATCVRSNNETTVVVDEPXSYNXDDCIVGIQDDEIEWDTPASMRMC

SEQ ID NO: 333887 - protein, 259 aa, Zea mays
  unsure (1)..(259): unsure at all Xaa locations
  Clone ID: MRT4577_67615C.1.pep
SWANEPVIGLRGNPYICVNDKHLELSWTYWXLFFSMIVTSGSGLTVIDNLGQMSQSLGYKETHIFVSMISIWNFLGRIGGGCFSELIVKDYAYPRAIALAIAQVLMAIGHFNFAMAWPGTMYIGTLLVGVGYGAHWAIVPAAASELFGVKNFGALYNFLTVANPAGSLVFSGVIASGIYDSEAAKQAQQRHNSTSLAMSGRVAGMVSGAAPSLKCEGAVCFFLSSLIMSGFCIIAFGLSLILVYRTKIVYTSLYGKPRT

SEQ ID NO: 333888 - protein, 107 aa, Zea mays
  unsure (1)..(107): unsure at all Xaa locations
  Clone ID: MRT4577_67616C.1.pep
DAWVRFLMVGXLDAAGXTTILYKLKLGEIVTTIPTIVLNAETAEFKNISFTVWDVGGLDKIRPLWRHYLQNTEGLIFGVDSTDRDRVVVARDELHRMLNEDDLLECC

SEQ ID NO: 333889 - protein, 66 aa, Zea mays
  Clone ID: MRT4577_67617C.1.pep
PVRANTTAGSFSQHLSYISTSQAGIESSVPSHSEVRRRETVTSQGMGRGRGVHEEPTEESAPRPLH

SEQ ID NO: 333890 - protein, 53 aa, Zea mays
  Clone ID: MRT4577_67618C.1.pep
LEETSTPGQAPVVLGVAPEKKAAPEFVQPPAESGEPAHACGCGSNCKCDPCNC

SEQ ID NO: 333891 - protein, 132 aa, Zea mays
  unsure (1)..(132): unsure at all Xaa locations
  Clone ID: MRT4577_67619C.1.pep
MRALLYDALFMVGMAPEGSQFDATDYHSKMQELMRTGGTGEGFTLYDXLLEVLDDMGLHERLLRGMDAYGXEEPSAIQQSGNASYLERPDGSQNAHNGTGKTRAWCTVIVQKRDYGLTRGECLDFASALGLV

SEQ ID NO: 333892 - protein, 83 aa, Zea mays
  Clone ID: MRT4577_6761C.1.pep
VLSILTLAGFASYKKNLVLEDAFNENMLGSFLLANILTGLVNLSVNTLSASSFTAFMILSVYAFTLCMVTGLTHFCGVRMKFW

SEQ ID NO: 333893 - protein, 61 aa, Zea mays
  Clone ID: MRT4577_67620C.1.pep
NDARRSASRQSLPIPYVHVDDSLCTSRRAQAKICLRASIDTMMVLPLRARSSGHERPRTET

SEQ ID NO: 333894 - protein, 181 aa, Zea mays
  Clone ID: MRT4577_67621C.1.pep
MATVNNWLGFSLSPQELPPSAAASGDVSGADVCYNIPQDWNMRGSELSALVAEPKLEDFLGGISYSDHHHHQHKQPGGNNMVVPAGSASGGAACYASSGGSSVGYLYHPSSASLQFADSVMVASSGGGVHHDGAGIMANTTANGDLNGGGGGGIGLSMIKSWLRSQPSPAQAQPPEQQRAE

SEQ ID NO: 333895 - protein, 54 aa, Zea mays
  Clone ID: MRT4577_67622C.1.pep
IKKKLQNYLELAGAARTSTPSTTNYDVHSPTWGDGKPTHPPSAMWAIDLGHGPS

SEQ ID NO: 333896 - protein, 85 aa, Zea mays
  Clone ID: MRT4577_67623C.1.pep
FPFNQLAALNPAAYLQQQILLPFSELAAASRASFLTQQQLLPFYKQFGASPATLLPIPPLLPFVGLCLTNPAASGLRPLRGGALS

SEQ ID NO: 333897 - protein, 163 aa, Zea mays
  Clone ID: MRT4577_67624C.1.pep
MGSQTIASQAGGGGRGMGSSGGAGAAQRGQMQSLARQGSLYNLTLDEVQSHLGEPLHSMNLEELLKSVFPDDLDPDGGTTSQYEQSSGLLRQGSITMPPELSRRTVDEVWKDIQDAPNRNVGESGRRKRERQPTLGEMTLEDFLVKAGVVAEGYLKGLNGIGS

SEQ ID NO: 333898 - protein, 109 aa, Zea mays
  Clone ID: MRT4577_67625C.1.pep
MSSRPGVQNWPNIYQLAICFIHSPVLCGCARLLFSRNIRLFGWECAGVHPHAHGPHLCSADHRSRCYLIGFPSPTGCMDGKRETRPGSTGTQPKGISVRAGAATKQEYF

SEQ ID NO: 333899 - protein, 89 aa, Zea mays
  Clone ID: MRT4577_67626C.1.pep
LKTKFRCSPPKPGNVPPLFVSPGSVPFFFCWAGSQTKITMVLVAPCNNFYNSLLPSGGGPSCNGWWPPGLVLLKEKKKKKKKKKKKKPK

SEQ ID NO: 333900 - protein, 106 aa, Zea mays
  unsure (1)..(106): unsure at all Xaa locations
  Clone ID: MRT4577_67627C.1.pep
GKRGNNKGKKSVETCKRYIVQVLNQXVHPXIGISSKTMSXIMNSFIVEMLNKLPAAGXKLARYNNKPAIXSRKIPXTSVGLVLPGELAKHAYTEGNKTVTMLKKKK

SEQ ID NO: 333901 - protein, 34 aa, Zea mays
  Clone ID: MRT4577_67628C.1.pep
GIEILGNNYLKKLKEKNTGLWSRTESQQLKKHGF

SEQ ID NO: 333902 - protein, 97 aa, Zea mays
  Clone ID: MRT4577_67629C.1.pep
FLQPAGVIQCGHGVVAPSPALCWAFFHVPVPVVCPTPIVVRLLLINRLLRSEPSLSSVLSLASHACDVSPCPREGHISGGPVPSHVFEIVGNKGLKW

SEQ ID NO: 333903 - protein, 39 aa, Zea mays
  Clone ID: MRT4577_6762C.1.pep
HDQLLGIGIVDDASFGRSSRTRSERGEGRREKGFDPRVR

SEQ ID NO: 333904 - protein, 56 aa, Zea mays
  unsure (1)..(56): unsure at all Xaa locations
  Clone ID: MRT4577_67630C.1.pep
RRCRVVACLWRRLXXFFREXXXXXXKXRDXEHTQKXDIQNETIRSTLYICIRQKQC

SEQ ID NO: 333905 - protein, 69 aa, Zea mays
  Clone ID: MRT4577_67631C.1.pep
MMNYLLGRGLAIKDLCSMIFRFFPLLGYIIELVIKPKLEFLLRTLKKPLKAVFEYPKDFRDSHQGKNKP

SEQ ID NO: 333906 - protein, 149 aa, Zea mays
  unsure (1)..(149): unsure at all Xaa locations
  Clone ID: MRT4577_67632C.1.pep
GRDXPKPFSSNFLVKTPPHVIGRFVLIKHFLLRESFWTPYIQALPQPNDVDSWSLPPFWPXEDAELFEGTNIEVGVANIKANVMRZFRAGCDLLDRDDWEPQLLKQFTLPLYQXAYSIFSSRSFRPSLVLGPEDQQRLPEASNWTTFLF

SEQ ID NO: 333907 - protein, 67 aa, Zea mays
  Clone ID: MRT4577_67633C.1.pep
PTHLFFLNLRQATISLIRSHSIANQGTGETAILTGSVVYNASASASGTLYAMTIAIRIGGGEKKREK

SEQ ID NO: 333908 - protein, 97 aa, Zea mays
  Clone ID: MRT4577_67634C.1.pep
GGKSSFKSSGALILPPREGQNPGVHARPLQVKPPLEVLDIATQEIKKFFGGNNPGRAFFVEPPPLPGIRLFNFLPQKTLGCPLNMPCLWKHIEPHIF

SEQ ID NO: 333909 - protein, 47 aa, Zea mays
  Clone ID: MRT4577_67635C.1.pep
FFLIFIEYVGLCVRICFGGLCFLIRRIRVPKSMRAQFLGILQFLFFK

SEQ ID NO: 333910 - protein, 65 aa, Zea mays
  unsure (1)..(65): unsure at all Xaa locations
  Clone ID: MRT4577_67636C.1.pep
ASLRQTESDPDADRTTLNHADHSSKIVQHRLLSRQEELKERARVLLEQARXDAALKAGNKHNTNT

SEQ ID NO: 333911 - protein, 91 aa, Zea mays
  Clone ID: MRT4577_67637C.1.pep
GYATYRLTNRPIRGAIPMGSVSPHPSTPGQEGSAPYGLPLALQLLPGRVPGGHPAVVQLHARHRSNHGGWRERMLHVSRLDAAPATWRSGR

SEQ ID NO: 333912 - protein, 196 aa, Zea mays
  unsure (1)..(196): unsure at all Xaa locations
  Clone ID: MRT4577_67638C.1.pep
MRGLLVVLVVLGVAASATCRHTXSGGXGWQPQPPAHVPPPAHVPPPAHLPPPAHVQPPAQVPPPAHLPAPAHVPPPAHLWPSPCQYPTQPPRPQPHPXPHPCPCQQPRPMPGHLQGTCGVGMTQSLGQCVQFLRHEGRPSGTPYCXPQCQSWRQQCRQQVTQVEPQHRYQAIFGLILQYMLQHEPQSGHVAALMAE

SEQ ID NO: 333913 - protein, 58 aa, Zea mays
  Clone ID: MRT4577_67639C.1.pep
IHMPSTLVPFTMAPAIWEIELPAVRRLGLPRRMRPVCVQHPFQLLSAGTSLRCAPGSP

SEQ ID NO: 333914 - protein, 103 aa, Zea mays
  unsure (1)..(103): unsure at all Xaa locations
  Clone ID: MRT4577_6763C.1.pep
INLCDGVEQPSTHCDSDSSKKDETAAVDHDLIIASLINTAEMLKKEKSSNWLCEFKEWMDDNTEKTEGDNLSVGLTNGNGKYIKQXXRQKAHKETSNNMSDLV

SEQ ID NO: 333915 - protein, 52 aa, Zea mays
  unsure (1)..(52): unsure at all Xaa locations
  Clone ID: MRT4577_67640C.1.pep
KGPPLFLFFLFIKNLXFIFFIFXKFLFFFFFFFIFFIYIFFFVFFFFLAQTN

SEQ ID NO: 333916 - protein, 52 aa, Zea mays
  Clone ID: MRT4577_67641C.1.pep
LYMVHSVMQAPRMSSEFDGYFGTQSDLATARKVAWSRATAMIMFRAISIVSI

SEQ ID NO: 333917 - protein, 51 aa, Zea mays
  Clone ID: MRT4577_67642C.1.pep
HLPLYPQPWTNTIFGLKFQAASFWPRNQTLLVPGTSGLTGVPSPKPPNPPP

SEQ ID NO: 333918 - protein, 60 aa, Zea mays
  Clone ID: MRT4577_67643C.1.pep
DLFKPKFSRGLDLLAQPWVFGYTKAYLGLWVVRGPPFSPNLFGGSPRKKKKKKKKKPRMI

SEQ ID NO: 333919 - protein, 234 aa, Zea mays
  Clone ID: MRT4577_67644C.1.pep
PASSSPPRLLPGRGSASSSPSPATGDKAARPISLVPSFFFPTSRRPCVIPWKIRARLGRPPPPSSDCALLPAPGVPTMVVPPLSLELASASTSPVFSPSRHDAWPHPARRSNLTVHVHHALKIASPARRTSLLLRQPRRRLGHRIALVHQQDVRAAPMSLPRRSALHHRRVFFLGRSCVPQQVVLSFTWSSSSSARLPANEFARLRAAGPQPPLLGLPLCERAEYIFESFSLDG

SEQ ID NO: 333920 - protein, 107 aa, Zea mays
  Clone ID: MRT4577_67645C.1.pep
KQNLRPAKTNKEKAQSIQGKNPFPNNNPPLPNLNPTLKNSTPALITISKTFSKNYPQTYPPSKKNFTNLHQAQNKNIYSEKKLAHFIIPLNQKKYLIHRKIDKISKI

SEQ ID NO: 333921 - protein, 607 aa, Zea mays
  Clone ID: MRT4577_67646C.1.pep
RAELVNVGLDAEHSYAYVRSLARFAGSLGTQGWRIASDRIRQALPADVNYGRGWVGEYEPPLPSILVVNDQPRYPKSSETNRRRNAPLPRDNERFRSTETNNPKDMRRVATCNNVVGVAGPLESPEIKPRLFGVTTEPQHRSTDALSLHENHRVSGNVAKTKRTTNEQTRKGNSSSSARPLEMQLQKGASSGALDIPAPNKMAGQPRPFLQPPESTRAQQMKKIDSSKSKIPIEMAPQQVECAKDADSSVHDTPSSNGQPKHFFQSQAAASSGVHDMHSSNGQSKHYQSQAAASSGMHAMSSSNGHPKHYFKSQAAPSSGVHDMSSSNGQPKHFFQSQAVASGVHDMASNGQSKPLFQSQEATVLQPKNEATWVYHGRPGDGKVGTSKKSRPSTSIGFITKNQSINAAKFAMNLNGQSIVSDHTKSAGATAMPAQANIPNRGLDAPRNIVSAFPANVRENQSIPSAPVAQSWISFGAATENKPTIVSPAFVDNNCGWKMPFANVQPCDDTKLSVVPQFFRHPVQVVRENSVQNKGLVIFPQLVQPDFARSQGQPQWQGLFPHMQQKPGKDVLRPDLNIGFPSPGSPPARQSSGINLEAQQPDLALQL

SEQ ID NO: 333922 - protein, 104 aa, Zea mays
  Clone ID: MRT4577_67647C.1.pep
SSGNNAEYFFFFFFFFFYFFFFFFFFFFFFFLAAKKITLHSKPPASQLDFKNVPEGIHGGQIELSLAGAFPVSDPRGIAPKFNGTARLNLKQGASHPFLQGGGP

SEQ ID NO: 333923 - protein, 95 aa, Zea mays
  unsure (1)..(95): unsure at all Xaa locations
  Clone ID: MRT4577_67648C.1.pep
TLRSYLQQXQQLRILARLPCCPTPQQXLPFXNNVAAVXNSAAYLQHQHLLPTSQLAGVSPATFLIQPQLVSFYQHAAPNAGTLLQLQHLLPFNQL

SEQ ID NO: 333924 - protein, 328 aa, Zea mays
  Clone ID: MRT4577_67649C.1.pep
MAAAVPNGHTAAAGDDDAPPAASSSLVFLGTGCSSAVPNARCLIQPPDPPCPVCSQSLSVPPELNPNYRCNTSLLIDYCQDERAHKYIIIDVGKTFREQVLRWFVRHKIPCVDSILLTHEHADAILGLDDVRVVQPFSPTNDIDPTPIYLSQFAMDSICQKFPYLVKKKLKEGEEVRRVAQLEWKIIESDIQKPFTTSGLEFVPLPVIHGEDYICLGFLFGRKSKVAYISDVSRFPPSTEYAISKSGGGQLDLLILDCLYRTGSHNVHLCWDQTLDAVRRICPKRALLIGMTHEMDHHKDNQTLEEWSRREGIDVQLARDGLRVYIDL

SEQ ID NO: 333925 - protein, 90 aa, Zea mays
  unsure (1)..(90): unsure at all Xaa locations
  Clone ID: MRT4577_6764C.1.pep
SKEENDRNHEQHLGEAGXAIVAGALGLYXEKHDANKDXPEHAHRHKIYEEGTTWASVVSGGLAFHEHPEKKKDHLDDEDAGGDDKHHFFG

SEQ ID NO: 333926 - protein, 103 aa, Zea mays
  Clone ID: MRT4577_67650C.1.pep
LAEPPAYLYYSDTRVNDSLASMEMVSMQDTPMRVTTLRLLHFADNYDDERRPCSCRREPAPPLVLYVRRQGSLSIQPRGIASREETWALPPCVVLITDGHVNA

SEQ ID NO: 333927 - protein, 88 aa, Zea mays
  unsure (1)..(88): unsure at all Xaa locations
  Clone ID: MRT4577_67651C.1.pep
MRVRLGALALLAFAASATSTHTSGGCGCQPPTAGNLPSPAHMPPXGDLPPPVHLPPPGHLPSPVHLTPAEHVPTIADLPSAPCHYPTQ

SEQ ID NO: 333928 - protein, 106 aa, Zea mays
  Clone ID: MRT4577_67652C.1.pep
MLRRQRRQSWGRSRAITEILVSSQCAGNRNLNKMALQSFDCCTSGELCIKNECISSPYVESTARQVARDILELREDNRAFNCYAVSVKYKVLLVAGSSHQSLCNAN

SEQ ID NO: 333929 - protein, 199 aa, Zea mays
  unsure (1)..(199): unsure at all Xaa locations
  Clone ID: MRT4577_67653C.1.pep
MNLLVSIFISRLMFCSMLSHRAHTSCQAAFXKHNTPSSRPPXFPGFPTTANQQTHRRKLTAFFGQTTHKTTAAWATAPYGPFAWGYCRXMYRNRRTHPYYGRGPIQLTHKYNYTFSAKALNLNLXLREPDLWATYPAACFKTAIWYWMTSQSAQPSCHAVMTGDCRSSATERSAKRLPGYGLTTNIILEVSRFAAMTAP

SEQ ID NO: 333930 - protein, 76 aa, Zea mays
  Clone ID: MRT4577_67654C.1.pep
MKFSGRCWRQPKELRKGFNSVVVLVSWELWKHRNACFFDRVRPDAHVVVQSVAADGHLWCLAGARALQDLVVSVAP

SEQ ID NO: 333931 - protein, 238 aa, Zea mays
  unsure (1)..(238): unsure at all Xaa locations
  Clone ID: MRT4577_67655C.1.pep
MALSKSMHARNRYKDKPPDFAYLASKYPDFKQHIQINLNGRVSLNFKDPEAVRALTCTLLREDFGLSIDIPLERLIPTVPLRLNYIHWVEDLIGHQDSDKTTLRRGIDIGTGASCIYPLLGATLNGWYFLATEVDDMCFNYAKKNVEQNNLSDLIKVVKVPQKTLLMDALKEESEIVYDFCMCNPPFFANQLEAKGVNSRNSRRPSPXXSXNTXGITEIMAEGGELEFVXGIIHDSLQ

SEQ ID NO: 333932 - protein, 65 aa, Zea mays
  Clone ID: MRT4577_67656C.1.pep
LANGQLISSCMSDDYTCMHGKAKPLSGVNQLRCITHVSPVGWDELILAQPCKYGIETTERGILKL

SEQ ID NO: 333933 - protein, 89 aa, Zea mays
  unsure (1)..(89): unsure at all Xaa locations
  Clone ID: MRT4577_67657C.1.pep
GKNFDIVEGWSSKASSYKKVGEDKKAIPVCSKVLDQNKENVSVLGQRAFLYXSPQKNRLGPQDLRLVFKIDPPNRLARRTIPPLNKLVD

SEQ ID NO: 333934 - protein, 189 aa, Zea mays
  Clone ID: MRT4577_67658C.1.pep
VHHRGLRDLARLRVLNLSYNRISRIGHGLSSCTAIRELYLAGNKIGDVEGLHRLLKLAVLDVSFNKIGTAKSLGQLVANYGSLRAINLLGNPVQANAGDDTLRRAVSGLLPRIEYLNKQAVKPQRAREVAKDSVAQAALGNAAGANSRRRPARRLGQSPAGSSAAKGRRGSRGRSVTRPQSSSLPLPRR

SEQ ID NO: 333935 - protein, 74 aa, Zea mays
  unsure (1)..(74): unsure at all Xaa locations
  Clone ID: MRT4577_67659C.1.pep
STIFYFTIAVKILSFLMLLALSVNAATLTILPQCSQTPIASFLPPYLSTTVTPLCSKPILXPYSIQHSIPASIL

SEQ ID NO: 333936 - protein, 29 aa, Zea mays
  Clone ID: MRT4577_6765C.1.pep
MGVTKKPDLNDPVLRAKLAKGMGHNYYGE

SEQ ID NO: 333937 - protein, 62 aa, Zea mays
  Clone ID: MRT4577_67660C.1.pep
VMPSMLQRIQKESVNNNPFENKIKLRTSPISSAMVEYSHYHTGKTLNPQQSAATDGIVHSII

SEQ ID NO: 333938 - protein, 61 aa, Zea mays
  Clone ID: MRT4577_67661C.1.pep
EVYGCCVFTQLRVLKPHLYPPIPVNLIWCMLCPAEIRPRYINQTQGCSFGLALLERLVPLQ

SEQ ID NO: 333939 - protein, 161 aa, Zea mays
  unsure (1)..(161): unsure at all Xaa locations
  Clone ID: MRT4577_67662C.1.pep
MISLTKLLSSALHGYHSCSIRRFSWFAALGEHQFAVANFSKFVTRLIRNIARFGVASVAGKLYVIGGGSDRVDPLTGDHDRIFASNEVWSYDPLHRVWSQRAPMLVARAMFACCALDGKIIVAGGLTNCRKSISKAEIYDPXXAGIWEPLPDLRLAHSSAC

SEQ ID NO: 333940 - protein, 116 aa, Zea mays
  Clone ID: MRT4577_67663C.1.pep
ARPEPHLRVLSLGRLLRLWQVQRLQYRPRPLRTLLKVLRLRNLSGTWAVELGMDEQEPTWRYEMGRLRYNHCWERADFVSFITHSLTWELALASTPGTKAIKHNAESGDPEKKWNI

SEQ ID NO: 333941 - protein, 118 aa, Zea mays
  unsure (1)..(118): unsure at all Xaa locations
  Clone ID: MRT4577_67664C.1.pep
MWQLYDPLRDKWITLPVMPSQIRNIXXRFGVASVAGKLYVIGGGSDRVDPLTGDHDRIFASNEVWSYDPLHRVWSQRAPMLVARAMFXACCALDGKIIVAGSFTNCRKSISKAEIYDP

SEQ ID NO: 333942 - protein, 84 aa, Zea mays
  Clone ID: MRT4577_67665C.1.pep
KNESAFIFFLSVNNFHMHYRVNKLSDSVDSCYRPFSMRSQGTIQQRNMSSRFTLLLDRLYCDVNSRSTYGDKSNKNLWRLCTKY

SEQ ID NO: 333943 - protein, 64 aa, Zea mays
  unsure (1)..(64): unsure at all Xaa locations
  Clone ID: MRT4577_67666C.1.pep
MADHHRPATGGGGGYXDLQRRGGMHXEAQQQQKHGAMMTALKAATAATFRRSMLQLYGLILACT

SEQ ID NO: 333944 - protein, 47 aa, Zea mays
  Clone ID: MRT4577_67668C.1.pep
KIRHLSSRFRTKFVRRAVSMFAIKEQETLERTDYLTSIEVVASLIRL

SEQ ID NO: 333945 - protein, 160 aa, Zea mays
  unsure (1)..(160): unsure at all Xaa locations
  Clone ID: MRT4577_67669C.1.pep
MELLNDDLIKKDFTKVGSAEELPQASYSSAGMLEDVNNVMVLTRDCEKTKVAGFTKLDEEVIKLIEIEKPILNEAITIIRKAAPMMDKVELTVDAASRLSEPFLLVIVGEFNSGKSTFINALLGKXYLQEGVVPTTNEITLLSYSEVESENFERCXRHPD

SEQ ID NO: 333946 - protein, 158 aa, Zea mays
  Clone ID: MRT4577_6766C.1.pep
MHSKSPEKQSLLDEGSRRNPANNGSTEDEKGDGGIPWLTFLGFVFLTFNSGMAIYRSDRDPGSIAFVSGSYVDLLLLFLCLRLFERTPPDSPRRGWIKACVWGLTTLLTVMFSQKVAAIMPPLLALVVWAMAFATIGGGFYAFFIHKDKAALVEAENP

SEQ ID NO: 333947 - protein, 210 aa, Zea mays
  unsure (1)..(210): unsure at all Xaa locations
  Clone ID: MRT4577_67671C.1.pep
MISLTKLLSSALHGYHSCSIRRFSWFAALGEHQFAVXLLKIRNQIGTTEELLCVLAFEPENMWQLYDPLRDKWITLPVMPSQIRNIARFGVASVAGKLYVIGGGSDRVDPLTGDHDRIFASNEVWSYDPLHRVWSQRAPMLVARAMFACCALDGKIIVAGGFTNCRKSISKAEIYDPEAGIWEPLPDLRLAHSSACTGLVIRXKMHVLHK

SEQ ID NO: 333948 - protein, 54 aa, Zea mays
  Clone ID: MRT4577_67672C.1.pep
ACNCSTPSVGWDVGVLGFKTCDRYMRVGAHAGRERSRLVVSRNHSSATGGLVLW

SEQ ID NO: 333949 - protein, 48 aa, Zea mays
  Clone ID: MRT4577_67673C.1.pep
PVLFFRKMDCTLLCLYANQVRESFLGDEWDLFLEDEQVGILFSGWTVF

SEQ ID NO: 333950 - protein, 74 aa, Zea mays
  unsure (1)..(74): unsure at all Xaa locations
  Clone ID: MRT4577_67674C.1.pep
DLIYDVICTTSAVXSQLNNARGIQDTDWNRLLQDHRWVLSXQTLVGKPDQLIKRRGKLDLDGXNLTLDXVKFWL

SEQ ID NO: 333951 - protein, 130 aa, Zea mays
  Clone ID: MRT4577_67675C.1.pep
GKLMAERHITVEAVFQATMILVTTGRVIADACSMTTDIAKGAEAVSSVFAILDRQTKIDPDSPEGYKPEKLIGEVEAVGVDFAYPSRPDVIIFRGFSLSMVAGKSTALVGQSGSGKSTIIALIERFYDPL

SEQ ID NO: 333952 - protein, 62 aa, Zea mays
  unsure (1)..(62): unsure at all Xaa locations
  Clone ID: MRT4577_67677C.1.pep
DPRSGRFDRALNDEGRTQRGRXAPPSTLTRQGCSSAGRWEWRSPTTPRSGCGSPPARGTSYT

SEQ ID NO: 333953 - protein, 340 aa, Zea mays
  Clone ID: MRT4577_67678C.1.pep
MNQKLIEELQITNSKLKEVCAKSEVEKALLSEKLQEVEKLSEKCSLLENSLSDANAEMDALRDKIKALEALESSLKDIISCHVSEKAVLVSELEILGKRLSDASEKNSIMDSSLFDMKMDLEDLRTKLKDSEESCQALLANNSALSGEVDALREKIKALQDSENSLKDVISCHVSEKAVLASELEILGKSLSEVSEKNSILDISLCDMKTELDELRTMLKDSEESCQAHLTNNSALSAEKNNLFSQLESITLAMKALEGMHANLEQKHSSVSREKDFAYDQVRELQDQLRIKNEEFEVSAKSHQLQANSYEKQIFSLQEKNHYMEEVLQQEQQKNINASI

SEQ ID NO: 333954 - protein, 97 aa, Zea mays
  Clone ID: MRT4577_67679C.1.pep
LLRKFGLDNLAPQPGLTSFLEWWETASETVHGMIKNGLSSLISLGAWMIWNHRNRCVFDGQTPSLPSILRQADDERRLWELAGAKGLSFLAAPLPDG

SEQ ID NO: 333955 - protein, 156 aa, Zea mays
  Clone ID: MRT4577_6767C.1.pep
MHSKSPEKQSLLGSRRNPANNGSTEDEKGDGGIPWLTFLGFVFLTFNSGMAIYRSDRDPGSIAFVSGSYVDLLLLFLCLRLFERTPPDSPRRGWIKACVWGLTTLLTVMFSQKVAAIMPPLLALVVWAMAFATIGGGFYAFFIHKDKAALVEAENP

SEQ ID NO: 333956 - protein, 94 aa, Zea mays
  Clone ID: MRT4577_67680C.1.pep
RRRRRLFVLLLLLLFMVLRLLLMRFWCLCLLVFVWSCLWMLVLRRVFLRLFLLIIIRSITNGGLEGEVVGRYRSHLAGLCPHTHTHTQASQPVL

SEQ ID NO: 333957 - protein, 75 aa, Zea mays
  Clone ID: MRT4577_67681C.1.pep
RRPLGSTSPSPPALAKPLIILTNYHTRSYYPHKDMTEPTCPSHQVGPMPRTECFPIMTEPPTAHEHFPVETTNPI

SEQ ID NO: 333958 - protein, 105 aa, Zea mays
  unsure (1)..(105): unsure at all Xaa locations
  Clone ID: MRT4577_67682C.1.pep
LPKVREGVLFKGRAPIFLEGXGLNYLGNPNLLHPQRFLAFWPCKGWLMAFSKGYRFGGGRFGEGFDKVYPGGAFDPLGLATXPDTRATQGKSSERRLHVSCRFRQ

SEQ ID NO: 333959 - protein, 43 aa, Zea mays
  Clone ID: MRT4577_67683C.1.pep
HSAELNSNFPIWLCVEWNFYLNLPKQELNLKISMVRFSLFSIC

SEQ ID NO: 333960 - protein, 120 aa, Zea mays
  unsure (1)..(120): unsure at all Xaa locations
  Clone ID: MRT4577_67684C.1.pep
GGEKNKKPPLKILPPPPRPILVSFPFPKTNLKTPGKGFGVLTPPILKNWGLPPPTPYYKMGGGGGGLLLNGXSPPTQLFKHRGAKGPPPLLLGPPRVGGAQIFFYPPLSGEQKHRGVPFP

SEQ ID NO: 333961 - protein, 78 aa, Zea mays
  unsure (1)..(78): unsure at all Xaa locations
  Clone ID: MRT4577_67685C.1.pep
DEDLTPVSRTIHNSAVIYLVGITEAPAFNTMYELYDPSTGHVCFRNXHIMIDLGTGTXNKINWXFKDKQXFIDMVRPL

SEQ ID NO: 333962 - protein, 56 aa, Zea mays
  Clone ID: MRT4577_67686C.1.pep
DVPVLEDGEQNGQGDLQQAGHGRHGVCHLTKRLRDSLRASASFTIKSISRCQPTSP

SEQ ID NO: 333963 - protein, 93 aa, Zea mays
  Clone ID: MRT4577_67687C.1.pep
VESGVAERPIADLDAYRDSLTRYVYQTGMFMRPVFAAAKRNPARVVYAEVESERVLRAVQAVLAEGMARPILVGRPGVIASRIERAGIRKKPG

SEQ ID NO: 333964 - protein, 77 aa, Zea mays
  Clone ID: MRT4577_67688C.1.pep
MASSSSQHTVCGLVTFRDVAVDFSQEEWACLDATQKVLYRDTMLETYSHLVTVVGSCLSKPHLITLLEQEKEPWMAV

SEQ ID NO: 333965 - protein, 237 aa, Zea mays
  unsure (1)..(237): unsure at all Xaa locations
  Clone ID: MRT4577_67689C.1.pep
MAGRREGEHQASPWRSGTPAAEEDSGAFPSAIIFFALVGATATTAAVGQLRRTVSWFYTQLSRSEPXFLGRHTSSTKSSSXGEAWERYHQRMRDRTEDQRERVERIRHMQDVFKKERSKCRDYRNWDSHNPNYYQHHQRDDWYWNAEAFYANQRTNFRAMTREAMTYTMSHHYSVLGLDRSRSEPFSDAEIKNAFRRKAMEYHPDQNQNNKEVAEAKFKEVMDSYEAIKRERRDRSC

SEQ ID NO: 333966 - protein, 144 aa, Zea mays
  Clone ID: MRT4577_6768C.1.pep
YHVLVLQFHSQYCCPFCSALCISPSQVCLSTPISHLTSSQSLSVLIPMYASQKGKTGVMQWGIKDTSPPAHDSSKREFTSLSFYAQQRPYLFSLVPIRDPLYLLMALHAPYQNQTKSHDDYRPIHYSSHVVFHNHQLGRSYHLL

SEQ ID NO: 333967 - protein, 269 aa, Zea mays
  unsure (1)..(269): unsure at all Xaa locations
  Clone ID: MRT4577_67690C.1.pep
HLLGEPWPVVAKASTRRARGVSVTPAAEEDSGAFPSAIIFFALVGATATTAAVGQLRRTVSWFYTQLSRSEPXFLGRHTSSTKSSSXGEAWERYHQRMRDRTEDQRERVVAIALESSQSTPTTVLDELVNIDPNTERIRHMQDVFKKERSKCRDYRNWDSHNPNYYQHHQRDDWYWNAEAFYANQRTNFRAMTREAMTYTMSHHYSVLGLDRSRSEPFSDAEIKNAFRRKAMEYHPDQNQNNKEVAEAKFKEVMDSYEAIKRERRDRSC

SEQ ID NO: 333968 - protein, 57 aa, Zea mays
  Clone ID: MRT4577_67691C.1.pep
MHLHPRRVNPQCELQNDQEPLTGCLEHRESSTGPSLSSRTDRRKNAREPTRPRTRGR

SEQ ID NO: 333969 - protein, 52 aa, Zea mays
  Clone ID: MRT4577_67692C.1.pep
MFEIVISIPEILLLVLLALGCYLLGRKRGRAEAAAAPQQFAPPAPPPGLSPK

SEQ ID NO: 333970 - protein, 106 aa, Zea mays
  Clone ID: MRT4577_67693C.1.pep
KMQVQGVMYAGEIFGEIGALCSVPQPFTICTTKISQLLRVSTTVLKNIIEENKDDEQTVLNNIFQVFTVLYKMIFCYIMYLLYVERGTNFSINYLAENSPRSKILH

SEQ ID NO: 333971 - protein, 48 aa, Zea mays
  unsure (1)..(48): unsure at all Xaa locations
  Clone ID: MRT4577_67694C.1.pep
MSYAXLFKYIIIGDTCVGKSCLLLQFTDQRFQPVHDLIICVEFGXRMI

SEQ ID NO: 333972 - protein, 238 aa, Zea mays
  unsure (1)..(238): unsure at all Xaa locations
  Clone ID: MRT4577_67695C.1.pep
MGTISIRKFIRWLPDEPSEPTTTLVITSPRLKRFVDLRILLPDNGSTDQNDILPFSRLDWAIAGTTVSTQKPDPSGALTSHSTFIQWISSRELGNDAGFMYPQPGEDLTLEKGSMVNPDTGIDTAYEELWHDATPTAVPGEPDVRALVLQTEDEEKGVRGCVVRLGRYAQGLIRVGEEIALERWEWTEGGWKRTVRMGDEELPIEKILXEETLDEDDSVDVSGRTWKVIEASGKTTSX

SEQ ID NO: 333973 - protein, 174 aa, Zea mays
  unsure (1)..(174): unsure at all Xaa locations
  Clone ID: MRT4577_67696C.1.pep
MRFSTVTACLTACLAPAAALSVLNGKAPELTISDDLKIPGDSPHEFCPGDHAADLIKIDRVDLAPNPPKAGQELLIKAKGSVKQKIEEGAYVLLTVKYGLIRLISTKADLCEQIGNVDLKCPVEKGEXEVVKTVDLPAEIPSXKYTVXXDVFTGDDVQITWLTTGFSRKFFSDL

SEQ ID NO: 333974 - protein, 50 aa, Zea mays
  Clone ID: MRT4577_67697C.1.pep
PALEEVYESGFLSPFPFYSPQHTCIYTHLSNVTYMSIYINENHKNIRTLY

SEQ ID NO: 333975 - protein, 115 aa, Zea mays
  Clone ID: MRT4577_67698C.1.pep
ENGTPTLKRFIYEFRSNRKTCPGKRECVTCYRIVVHSSQRFHSAKRMIHSDQHESPTRSPRFIYWKEVCFRAYMVQSSSGGAAILLGQQRQNVDMVPTVNRGRMDLMRPDPHRVL

SEQ ID NO: 333976 - protein, 74 aa, Zea mays
  Clone ID: MRT4577_67699C.1.pep
DHLEKKSLFLLADKTVLRSKSMPVNPRMVAVELCLFKPIRFCPDHHSQDHTRMVSPFAVLPSLEEAKGGHRFSQ

SEQ ID NO: 333977 - protein, 133 aa, Zea mays
  Clone ID: MRT4577_6769C.1.pep
GFPPFGWIPAFPPFGEPAPLGPGAFPGEGGPLSSPLFPGVFAFLLSRGVARFFFGPGPFGFPPVMLFVCPLGFPWVSPLVSPPPLLALLFRACFFPGLSPGPLFTPALVLAVAPPGRAPGGVAIAPATSGQGR

SEQ ID NO: 333978 - protein, 77 aa, Zea mays
  Clone ID: MRT4577_676C.1.pep
RAMGIHQRLGGKDQRTKFKKKRRKKKGVSIPSVKRWTPWRRPPRAASWHPRPRPLLTAQCSGQRVGHGSAHASADAM

SEQ ID NO: 333979 - protein, 159 aa, Zea mays
  unsure (1)..(159): unsure at all Xaa locations
  Clone ID: MRT4577_67700C.1.pep
PSLWWSFLVVPTPPPGPAEGGTSPPPGGNCEAPPPPXPRSRKGKRXPGGPKERANPPXSDAPTAQLPNPGPAKPGXKQINHRAGRGRLPKGNPSAPPLKKKPPPPGGGGGAVSAPSPAPIPLPPEPGDNGGKDGXQKPKGGQGPSKGPGGNPLKKVPPP

SEQ ID NO: 333980 - protein, 117 aa, Zea mays
  Clone ID: MRT4577_67701C.1.pep
EIPGETHGPGKLVKKNPPPPPEGVKGVATNRGGQRKTPRAKVPIGGGGNKGGGVFLGAKALRAGPGAQGPPKGFYLPNEALVGEANPKRGFPKGVWAFFFSPGWGMGLSQKEPIFFP

SEQ ID NO: 333981 - protein, 50 aa, Zea mays
  Clone ID: MRT4577_67702C.1.pep
VSNLGIRLEDTTIHYVDVFLRAHKHSTWPGANSKTVTISVLNMPDNKYML

SEQ ID NO: 333982 - protein, 70 aa, Zea mays
  unsure (1)..(70): unsure at all Xaa locations
  Clone ID: MRT4577_67703C.1.pep
HMPGPQPTVETCTPGRDAQLSLTNPRQISEDEYLRLPALPGRYQHTHXDWFPFPGDPVSPGGGGGSFFFL

SEQ ID NO: 333983 - protein, 125 aa, Zea mays
  unsure (1)..(125): unsure at all Xaa locations
  Clone ID: MRT4577_67704C.1.pep
AYSQYHQFLPVNHVAALKSAAYLQHHQPVSQXVVAYPQQFLPFTQVAAMNSGVYLQQHQLPPYRQIANVSRVAFLTQPQLSLLYPHAGHNAGPLLQMQQVVPFTPLVLTNTAVFYQQPISGGALL

SEQ ID NO: 333984 - protein, 74 aa, Zea mays
  Clone ID: MRT4577_67705C.1.pep
MAEEEQMAELVMAQCGVPSGGEGGAWPPGFAWDGGAADASRGMYREAVPPALNLFDAAGSVAGDPFHAVQQAPG

SEQ ID NO: 333985 - protein, 243 aa, Zea mays
  Clone ID: MRT4577_67706C.1.pep
EKLLVTDYMANGSLAHALHGGTRSSLPPLDWPKRLKIIKGVARGLAHLYEELPMLMVPHGHLKSSNVLLDATCEPLLSDYALAPVVTPQHAAQVMVAYKSPECAAQGGRPGRKSDVWSLGILILEVLTGKFPANYLRRGHADTDLAGWVNSVVREEWTGEVFDKDMRGTRSGEGEMVKLLQVGLGCCEPDVHRRWGLEEALARIEELRERDTGADDSSTASSFLSDGEAAASRPAGEQQSHSA

SEQ ID NO: 333986 - protein, 138 aa, Zea mays
  Clone ID: MRT4577_67707C.1.pep
MSATKEFTMQDVAEHNTSKDIYMVVHDKVYDCSKFLDEHPGGEEVMLDVAGQDATEAFEDVGHSDEAREVLEGLLVGELKRLPGDEGPKRRIANSNQGSGQDPTGSSLISYALVVAVGFAAYMGYNYLQKQNEAQGSA

SEQ ID NO: 333987 - protein, 105 aa, Zea mays
  Clone ID: MRT4577_67709C.1.pep
YKARRHAWATSFFFYLKPGPVPAFVPIPARPGGFFFSFLWRGHTHVPLPVAPKCMPCLFPNWGSSSPPLYVLHNQYSFFFGHNSPKKKKKKKKKKKKKKKKKKKK

SEQ ID NO: 333988 - protein, 142 aa, Zea mays
  Clone ID: MRT4577_6770C.1.pep
GGGQRFIKPLNPKKNGSFLPALGKKNKKNTPPPGGNWGQNPKGKQKNAPQKKKTGKNPFFFKSPPLVPFGPQKTRRGRHLNPKFSPHAYPTKGGHTLEAKKSSLKGSGGSAFSDAGGTRVGGAAEAPGPPRPWRKTKKAPPP

SEQ ID NO: 333989 - protein, 60 aa, Zea mays
  Clone ID: MRT4577_67710C.1.pep
PPVTAQNRCGAKPLSLGQSITPYPVNPETALISTSYVQTGTHTVVAARLMGGTHLLQSLL

SEQ ID NO: 333990 - protein, 254 aa, Zea mays
  Clone ID: MRT4577_67711C.1.pep
MMTASKKVRHIVRFHIPFSLPLSLSCYRDRERGYSERDPSPRRKWAPSPPTDQRFEGCPSEGFDSRLRALGLRAYYWSEVRRLAPRKGSTAASGHSGSAPTTDQGFVGWPPKGSTAASEHAERGMTLGTSDTWPRLGLRSRGTLGHFRDQQERFCNGIPPEGGLEPSDPVKRDRVRQITCRKATQGRMKKAESHLDRPLALCGGSGAALANPAPAKPLTASTYQPENSEPGYAPGLRPVCMREQPDRPRHHERH

SEQ ID NO: 333991 - protein, 101 aa, Zea mays
  unsure (1)..(101): unsure at all Xaa locations
  Clone ID: MRT4577_67712C.1.pep
ALYPHQLPTPTGPQKCYGPNKPPPPLTPPSNRTDPIPYPPTTTIIHDSSTKTNQDPLPQCHGPHQQTKQSTNQKNLDPRPLQPPDPLPEESQHYDHLTXTC

SEQ ID NO: 333992 - protein, 82 aa, Zea mays
  Clone ID: MRT4577_67713C.1.pep
CVEALGVGCNIRLNGDMSVSRGWVVRWSICPESRAQHAGTAGWHESSIEPQVAVTVRRIMFLHKVPCENVWPWKKDTEVYLC

SEQ ID NO: 333993 - protein, 307 aa, Zea mays
  Clone ID: MRT4577_67714C.1.pep
MACLGLGGRRKQTLQDNPILQARISIVEGSSSTLGVDYTFGEGLLQESGSSRRLGWSPRGLGQLSPEDISPAPAPARMMNILEAEGGTKIAARLASPHPGAGGTNSHGVAFLQQQRRKDCRCPPFGGTEGGKTRCIREREDMVAFQGGHPPFKGDSPYLRPQPSWAESSPTRSKVLPLRRGGWVPRVMQAGLEQKKPNRRARCMQPPSGYEHSSAFAQTSGRKSGQPCRRHATVPSGRARPTSNAPSMGAHAHASCNRRVGRYVQATAPPLAPLPRLLDCGTSTATRGNPAYDPAVPARRDGQYGQK

SEQ ID NO: 333994 - protein, 188 aa, Zea mays
  Clone ID: MRT4577_67715C.1.pep
MQAACNRTKGAHPFDFDASSMEAQAHTSCNRRAGYYVQETAPPLAPVPRLLDCGTGATTQGTGKGDTPKGILLREGSGPQAPLLIRGSKAGPSEGFNSRLRALGLHAHYWSEVRRLAPRKGSTTASGHSGSAPTTDQGFVGWPPKGSDSRFRARRARDDPGYVRYITKARAMLPRYPRTFLRPTGTIL

SEQ ID NO: 333995 - protein, 189 aa, Zea mays
  Clone ID: MRT4577_67716C.1.pep
MTMAQILTAEGSSGTLGVNYAFGEVRPSLGRRRGRRISTLKDDISTTPGPSLPGPPPGIRLEQTAQAGPDSRNEQDTGTQGAITNGTPVPPPQGPGKGDTPKGILLREGNGPRAPLLIRGSKAGPSEGFNSRLRALGFRAHYWSEVRGPAPWKGSTAASGHSGSAPTTDQGFVGWPTKGSQPPQTQSEG

SEQ ID NO: 333996 - protein, 118 aa, Zea mays
  unsure (1)..(118): unsure at all Xaa locations
  Clone ID: MRT4577_67717C.1.pep
HREILKMVAKLNSEMRKLGYVPRTEFVYHDLDEDVKEQLLSYHXQLLSYHSERLAIAFGLLNTSPGTRLVIIKNLRVCGDCHDAIKYILKIVDREIVVRDAKRFHHFKDGACSCGDYW

SEQ ID NO: 333997 - protein, 56 aa, Zea mays
  Clone ID: MRT4577_67718C.1.pep
YLEAVGDAGPKVEVSVRAEQLDLELVFPLGLGVSELLSLEWRTGEKGLSLSSTTQL

SEQ ID NO: 333998 - protein, 105 aa, Zea mays
  Clone ID: MRT4577_67719C.1.pep
MQAACNRTKGAHPFDFDASSMEAQAHTSCNRDRERGYLERDPSPRRKRAPSPPTDQRFKGWPLGRVQQPPQSTRAPRPLLIRDWKVGPSKGFNGRLRPLGLRANY

SEQ ID NO: 333999 - protein, 42 aa, Zea mays
  Clone ID: MRT4577_6771C.1.pep
LNLASIDLRWLASYCHRTTAKASPLLPPYPAATLVKMTGGYS

SEQ ID NO: 334000 - protein, 205 aa, Zea mays
  Clone ID: MRT4577_67720C.1.pep
MRRKDGGYPPSGGLEGGKTRCIREREDMVAFQGGHPPFKGDYPYLRPQPSRAESSPTRSKALPCGARAGSHMSCKPAQSRRSQTAVRGGASGRRSRRRFAFAVITAPKKGPGKGDTPKRILPCEGTRLRATLLIRGSKAGPLEGFDSRLRSRGPYTHYWSEVRRSAPRKGSTAASGYSGSAPITDQGFEGWPPKGSQPPQTPSEG

SEQ ID NO: 334001 - protein, 292 aa, Zea mays
  Clone ID: MRT4577_67721C.1.pep
MQMGSMEFVAPALEELLPELSLEEQPRLQNQSRERDRIRKRRNKHSPPPRPSLISVQYVMDMGSMGMDFVAPALEELLPDLSREEQLRLQNKSRGRDRISKPRNKHAPRPRPSPFSEWDGNIFKIPQVLHALAHYNARHPGGEFDVVKPLKQSRVGFRGQAWFHVNFWARPRSSSSSNNKTIKRFFAEVHYKPTPISSPSSSSSSLAITAVPIVEICIIIEEPLSQYRRSCAFCPSYRDILHPKGCRKFVCGNDKDRFEQRLDPCCCTGMGIGKMPFTARPDMSAFLNISPK

SEQ ID NO: 334002 - protein, 188 aa, Zea mays
  Clone ID: MRT4577_67722C.1.pep
MQAACNRTKGAHPFDFDVSSMEAQAHTSSNRHAGYYVRETAPPLAPVPRLLDCGTSAATQGDPAHDPTVPTEHIGHGSVSRGRRRDGRYGQKWAGSNGGGRRAEAAVKSSASSRPLLGQRENPLPRREDDAPVFRSSNGSRTHNGCPANHSSRRINSVVGQAAPLGPGKGILRKGSFSVKEAGPEPPY

SEQ ID NO: 334003 - protein, 151 aa, Zea mays
  Clone ID: MRT4577_67723C.1.pep
MAKGGPAVIAVAGGREQRSHRQPSSRPIREQQENPLSRREDDAPVIRPSNGSRTRNGHPANSSPRRINSTIGQAALPGPGKGDTPKRILPREGTRLRASLLIRGSKAGPPKGSTAASDRVGPTPTTGQRFEGRPPEGFHGRLRLLGLRDHY

SEQ ID NO: 334004 - protein, 151 aa, Zea mays
  Clone ID: MRT4577_67724C.1.pep
MQTACNRTQGAHPFDFDASSMEAQAHTSCNRRAGYYVQETAPPLAPVPRLLDCGTSATTRGDPAHDPTVPTEHIGHGDRERGYSERDPSPRTKRDPNPPTDQRFEGWPLGRVQQPPQSTRAPRPLLVRGSKAGPSEGFNGRLRPLGLRAHY

SEQ ID NO: 334005 - protein, 75 aa, Zea mays
  unsure (1)..(75): unsure at all Xaa locations
  Clone ID: MRT4577_67725C.1.pep
LLCHTPRDSLAAQSRLGTLRDRQEACTHAPSQQLTELHGKXDAPCGSALIASLAMVTRSVTRTFASSLRPDRFPI

SEQ ID NO: 334006 - protein, 51 aa, Zea mays
  Clone ID: MRT4577_67726C.1.pep
HTRLTPRPPRLARSGQGGGSSAGMGAMSASISSVNWLVEDDILLKNAVENY

SEQ ID NO: 334007 - protein, 74 aa, Zea mays
  Clone ID: MRT4577_67727C.1.pep
LFFLNKWTYCYYFHSPNILSQPSHLKSLLQLLCRIVVSLVVDSFVGHQHRCQPKQQPSSSCGYATSAACKTEWW

SEQ ID NO: 334008 - protein, 80 aa, Zea mays
  Clone ID: MRT4577_67728C.1.pep
SWSRGRRGQKKKKKKKKKKKKKKKKKKKKKKKKKKKNKKKKKKKKKKGVGCFRGSNFTSPSFQGVGFFFFFPNFIYLALV

SEQ ID NO: 334009 - protein, 91 aa, Zea mays
  Clone ID: MRT4577_67729C.1.pep
DWPKRVNWRSARQGFLESWNCSSTIPSECKKLDRPGHLPGGLPNSYGKERSKRHKRIKKVNVRIHRLVQAQTEQRAKTARAFKPAGYLLIL

SEQ ID NO: 334010 - protein, 41 aa, Zea mays
  Clone ID: MRT4577_6772C.1.pep
ASMLNIVTGSHIWVEDKDLSRVDGEVFRIDGQNAHVRTTKG

SEQ ID NO: 334011 - protein, 78 aa, Zea mays
  Clone ID: MRT4577_67730C.1.pep
ALSSRSFEGNSDGLHLHSPLSALSSAAAAHAVVAGDGEMRVVESAGRHPRLTASTSEARRAAPRRAFPRLAGVVVRLL

SEQ ID NO: 334012 - protein, 63 aa, Zea mays
  Clone ID: MRT4577_67731C.1.pep
TVAPFHTKKKKPRALFIDRGGLFPPDCAQSSPLLSLKKHVVLSLVMFNTCFHTRCIFVNRVSL

SEQ ID NO: 334013 - protein, 706 aa, Zea mays
  unsure (1)..(706): unsure at all Xaa locations
  Clone ID: MRT4577_67732C.1.pep
LNCLYKLITKVLTNRMEPFAQKLINEHQTAFLKGRSIMSGIVTLHEVMHETKRKNETGIFLKLDFEKAYDKVNWNFMFHCLEKRGFCEKWMNWMEKVVNDGTVRVKINDKVGNYIKSHKGVRQGDPLSPILFNFVADSLARILIKAQENNAITGLCSHIIPNGLIILQYADDTIICIGDDFEKARNLKLLLYMYELMSGLKINFLKSEIFVIICDEESTTNFADLFKCQIGTLPMKYLGVPVSPNRLRIADWIGLEEKFDKRLETWKGNCLSMAGRITLIDACLTNSPIYHMSMYLLPKTTIKKLDAKRRRFLWQGXWRKKKYHLVNWNKVCHTKKNGGLGIKNLEALNISLLCKWWWKIENESSLWQKIIVKKYFHGKDLYNIKVRNSDSPVWKDLMKIRAFYLKGRQITTKCGDKSRFWLDSWVNERPLCTIDPELYEICDDKFILVKDARIKNWQLSFRRWLNNENEIRWISICGDCENFEFQDSPDTVQWKWGGKKTFTVKSMYNSLSNNISDLGKKHIWKSKVPPKIKIFMWFLENNRLLTKDNLIRRKWSGDPSCCFCPHAENIEHLFFTCPIARVIWGTVAKCLDTHHIPNNVESCYRWLRKHLNCDNAVHVILISAICWAIWKARNKMCFDHVLVNSPNEIICHAGALVSSWAGLSKKELQDLLQEGAKMLVRAASARGNRILGSGDEMEGMLQPHGR

SEQ ID NO: 334014 - protein, 100 aa, Zea mays
  Clone ID: MRT4577_67733C.1.pep
GRFFFFFFIFFFFFFFFFFFFLYNIFCFFWKKKKPVNLFELRNPYYWLYQKRRPGHRFTWGDPTILLVGSLPFIWGASNSLSGAGHFFLYGVPAAKPSPP

SEQ ID NO: 334015 - protein, 75 aa, Zea mays
  Clone ID: MRT4577_67734C.1.pep
KTVEAERVVVALRRQLRAAHYFIFFLITRFYNLNSSSYKLSKTSLVVYKYLSSGTHSNSIQICTHATADAWADAW

SEQ ID NO: 334016 - protein, 47 aa, Zea mays
  Clone ID: MRT4577_67735C.1.pep
QLHKLRQRPILHGIVEVSPHQSVPVVHGHRPNNRGIASRMMSQSKKG

SEQ ID NO: 334017 - protein, 282 aa, Zea mays
  Clone ID: MRT4577_67736C.1.pep
MMESQPLQAPTATAPAPGSAEPAGAPPAVTPGKEFTRTCKGLVVVLIGGYVLLQLLPSSLNYLAIIPSKTIPYVWTVFTAGYIEQVLPGAIGSSLGLLFCGKDIEPAWGRKEFLKFIILINSICGILAFCFAIGLYYVTGKESFLVTPLSGFHGCLAGFLVALKQLLPNLELPMCFFWKIKAKWMPFFVVCFSSIMAFIVPDSINFLPTLVSGMYVSWLYLRYFQRNPLTGLKGDPSDDFSFPSLFPAAMRERGERVLEERLAADNAGDTEASPRGHGTAED

SEQ ID NO: 334018 - protein, 319 aa, Zea mays
  Clone ID: MRT4577_67737C.1.pep
MMESQPLQAPTATAPAPGSAEPAGAPPAVTPGKEFTRTCKGLVVVLIGGYVLLQLLPSSLNYLAIIPSKTIPYVWTVFTAGYIEQVLPGAIGSSLGLLFCGKDIEPAWGRKEFLKFIILINSICGILAFCFAIGLYYVTGKESFLVTPLSGFHGCLAGFLVALKQLLPNLELPMCFFWKIKAKWMPFFVVCFSSIMAFIVPDSINFLPTLVSGMYVSWLYLRYFQRNPLTGLKGDPSDDFSFPSLFPAAMRPVTDPVANLFDRLLCARSRTLEVALPISDPTKASRRRERGERVLEERLAADNAGDTEASPRGHGTAED

SEQ ID NO: 334019 - protein, 105 aa, Zea mays
  Clone ID: MRT4577_67738C.1.pep
RPSWGGGGPKKASVFFPRICFTVKQQEDFQAQGPFLGAPNFGPSSRADPPGNPHICPPVLEKNFPPGSGTNARGSGGNNAPWASQALWGSPRKGAPNCCPQTNIG

SEQ ID NO: 334020 - protein, 321 aa, Zea mays
  Clone ID: MRT4577_67739C.1.pep
MMESQPLQAPTATAPAPGSAEPAGAPPAVTPGKEFTRTCKGLVVVLIGGYVLLQLLPSSLNYLAIIPSKTIPYVWTVFTAGYIEQVLPGAIGSSLGLLFCGKDIEPAWGRKEFLKFIILINSICGILAFCFAIGLYYVTGKESFLVTPLSGFHGCLAGFLVALKQLLPNLELPMCFFWKIKAKWMPFFVVCFSSIMAFIVPDSINFLPTLVSGMYVSWLYLRYFQRNPLTGLKGDPSDDFSFPSLFPAAMRPVTDPVANLFDRMLCARSRPLEVALPISDPTKASRRRERGERVLEERLAADNAGDTEASPRGHGHGTAED

SEQ ID NO: 334021 - protein, 75 aa, Zea mays
  Clone ID: MRT4577_6773C.1.pep
GRLHTHTRAEMGAGSAAHLREVYSTSPLPILYLFDSAILNLYCDVYVLRGGKMIGWTPNEATMEGEGYELNERLI

SEQ ID NO: 334022 - protein, 96 aa, Zea mays
  Clone ID: MRT4577_67740C.1.pep
QYTFHSLRAGKTCIWGKESTVLHIPTRHYYLLGGAGYIYHSLHNIGQLKRGGLYSQTPAEQEQQFPNTSLFFLGGLALIEHACVLDNHKDQQTWAD

SEQ ID NO: 334023 - protein, 98 aa, Zea mays
  Clone ID: MRT4577_67741C.1.pep
TAQNKVQQLIDDNGVVVFSKSYCPYCNNTKRLLDGYGAKYATYELNQESDGDDLQQALLKITGQRTVPNVFINKQHIGGNSDFEAVIKNGKDGKKIEE

SEQ ID NO: 334024 - protein, 50 aa, Zea mays
  Clone ID: MRT4577_67742C.1.pep
KFKIKEKKVVGVGLLQKRGVPVIRNPLCFFPPPPKIFFKKKKKRFYFWPP

SEQ ID NO: 334025 - protein, 260 aa, Zea mays
  unsure (1)..(260): unsure at all Xaa locations
  Clone ID: MRT4577_67743C.1.pep
WVPRGRPGGLSSALVSDRDRVFTSALWKTLFSMAGVSLHMSSAYHPQSDGQTERVNQCLETFLRCFVHACPHKWSEWIHLAEFWYNTSWHSALTYSPFEVLYGYSPRHFGVDVLSACPVPSLSDWIQEKAIMTDLIQQHLKRAQHRMKQQADKNRVERQFSVGDLVFLKLQPYVQTSVARRSCQKLAFRYFGPYRVLAKIGSVAYKLELPATSAIHPIFHVSQLKRVVGPTVAVXQLPDQLEGCQIPVHVLKQRVGTDGQ

SEQ ID NO: 334026 - protein, 47 aa, Zea mays
  unsure (1)..(47): unsure at all Xaa locations
  Clone ID: MRT4577_67744C.1.pep
SLIFSTKGTEQIFEAIVAVMILSAIWIDNAHCGISLXTSYMPEGLHT

SEQ ID NO: 334027 - protein, 124 aa, Zea mays
  unsure (1)..(124): unsure at all Xaa locations
  Clone ID: MRT4577_67745C.1.pep
PGGAPFQAGGGRQERKGKEXAPAQGEQEGGAPHAPQPGLHKQGAGHGGGPVKKLGQPPRGPRKKKGAPHPQVPKKGGEKENLPPPPPPPVVSWGKLNPPPLKRTLKGGTGHNQGRATLRPETTN

SEQ ID NO: 334028 - protein, 100 aa, Zea mays
  unsure (1)..(100): unsure at all Xaa locations
  Clone ID: MRT4577_67746C.1.pep
RRDXAQARDRTKLFFFXXXXXXXXXETLRRGKRTPPPSMDPLKAGGGGVTCEAYRLLRRLMFARELWPVGWHRLCTGXWRLVAAAGVGPAGVPPLVGGGG

SEQ ID NO: 334029 - protein, 47 aa, Zea mays
  Clone ID: MRT4577_67747C.1.pep
PFGNKGGFNALTPLKFSPNRKKKGCHKASNFQTKFWTPSEGLNQSPF

SEQ ID NO: 334030 - protein, 89 aa, Zea mays
  Clone ID: MRT4577_67748C.1.pep
PPLPVFPFFYFLVAPPVFFNWIRLRWSKREFVERSLQFFFPSLFFPRILFWGPFVNFRKFPRVPPLKYPWSNPKEGPPLFKNKYPPLDS

SEQ ID NO: 334031 - protein, 46 aa, Zea mays
  Clone ID: MRT4577_67749C.1.pep
KVCHSMCRMEWPTGTNGLVWMYPNPRVPPPVGLVLGSYPHLIGRVG

SEQ ID NO: 334032 - protein, 59 aa, Zea mays
  Clone ID: MRT4577_6774C.1.pep
CGGRNLGQCKVHDYARGKPGGCREIGSFFKYGFWNTGPHGNVFVIKTLKKGPPLFKIRR

SEQ ID NO: 334033 - protein, 62 aa, Zea mays
  Clone ID: MRT4577_67750C.1.pep
LQRREARLAVTRASSKHTAFQAEASGPRALTSSRHGLLVSAAPAALSWALPCEPFRPSRSGW

SEQ ID NO: 334034 - protein, 195 aa, Zea mays
  Clone ID: MRT4577_67751C.1.pep
MTGKKRKAEAARLEETDQALYGAFRGAANSLSQLYTLAMGAQKASFNAGERHAMEKLYEWILRQHENGLRLTVADVASRIQLEIQYGGDNASASPRPQYPSQSTAPTVHIPNTSNQQPSPSLFAPGNPGLTQSKNSMVFSNALSSPIRRSLQPYHLEQDGDTGYFVNGASRDMNPTASNDSSMDMHSDSPVHDSY

SEQ ID NO: 334035 - protein, 37 aa, Zea mays
  Clone ID: MRT4577_67752C.1.pep
HGISVYKPTQLYSHSMLLVTNDMTIRLLETPDAWVTA

SEQ ID NO: 334036 - protein, 63 aa, Zea mays
  unsure (1)..(63): unsure at all Xaa locations
  Clone ID: MRT4577_67753C.1.pep
VPIWRANPRGCCDMTGKGAPGGRIVMELYTNEEPKTEENFRXLCTDEKGVGKFQKAIHYKGYT

SEQ ID NO: 334037 - protein, 60 aa, Zea mays
  unsure (1)..(60): unsure at all Xaa locations
  Clone ID: MRT4577_67754C.1.pep
MASGNARIGKPAPDFKATAVVXGAFKEVKLSDYKGKYVVLFFYPLDFTFVCPTEIIAFSN

SEQ ID NO: 334038 - protein, 120 aa, Zea mays
  unsure (1)..(120): unsure at all Xaa locations
  Clone ID: MRT4577_67755C.1.pep
SXLLVLXXCXXPLFCCXXFLXXXVSCXAFSFXAGFXXLAVVLCCAALRLLXXXXXXXXXLXFFLFPXPSSCXXXXAFSLLXLXXXCRXXXXLXXVXXVXXPPWLMXLAVXXXXXFXXPPP

SEQ ID NO: 334039 - protein, 55 aa, Zea mays
  Clone ID: MRT4577_67756C.1.pep
QTSSYKITGCSSEQTNCAILSLNDIPVKVPCILSSWGANIFYVFSRVENAIACIE

SEQ ID NO: 334040 - protein, 70 aa, Zea mays
  Clone ID: MRT4577_67757C.1.pep
GGHPPGNSPRLGVGGCIWCSCAAVKNHVIAQHGMLHSVSFATSKSRVQETSPRCVKQNVVQMRLVDAGPL

SEQ ID NO: 334041 - protein, 100 aa, Zea mays
  unsure (1)..(100): unsure at all Xaa locations
  Clone ID: MRT4577_67758C.1.pep
TRVRGRVATVVATRGRSSKATPKPPLPEPSRSSPQAPSLAPIAKEHMRVLVTGAADQLXICLVPMIARGVMLGADQPVILHMLDIPPAAEALNGVKMELV

SEQ ID NO: 334042 - protein, 115 aa, Zea mays
  unsure (1)..(115): unsure at all Xaa locations
  Clone ID: MRT4577_67759C.1.pep
RIEKLEPLLTPLFXPDTIRSFIRGFLPGVGLKSFLILLTRISMSTSNVEALPSISSLERKSASPPLSRIFFIVCLATIIAXICXEQMRIYIHXXANEIPRTIAAIMSMGGAFFIT

SEQ ID NO: 334043 - protein, 44 aa, Zea mays
  Clone ID: MRT4577_6775C.1.pep
VQMPSHVQSAVWLLMSLHGPLPQYWHPSSSLVQYTRSIGMRRRT

SEQ ID NO: 334044 - protein, 81 aa, Zea mays
  unsure (1)..(81): unsure at all Xaa locations
  Clone ID: MRT4577_67760C.1.pep
AAFFFFFFFSAAVPYFXNSXRVRLRVAGRGACLCLRAVVLVTHPLGLACLGPLAGPGAGCACVCLEYAPACVLVLSSFSPF

SEQ ID NO: 334045 - protein, 124 aa, Zea mays
  Clone ID: MRT4577_67761C.1.pep
VVLLLHRPPPPSTASASSPSAGITSCSRGKCDCRTSCSCGSSCICMSPNVETAAASSINITVVAAPTSKGSAGGFEAATDGGGCDCNTCNCGTSCGCSCCSCNWTGHAMAHESLEDEDESYKYN

SEQ ID NO: 334046 - protein, 117 aa, Zea mays
  unsure (1)..(117): unsure at all Xaa locations
  Clone ID: MRT4577_67762C.1.pep
PRPEKFGPPVGAPRASFFPGFXPNTLPVGQTGKIFAPXFFFAFGGSGTKHPLAGIKNPKVFLVFKKNVFAPLFRVSNFGLVFFFFKVLVWFFKKTPQKKKGAVFSFSPPDVFLPLGG

SEQ ID NO: 334047 - protein, 154 aa, Zea mays
  Clone ID: MRT4577_67763C.1.pep
MQQIISACKLPHTQRAAAFLPPRPSLRRLPVPAGGAPPPRRLVVRRRCQEENKQQQEAEEGSGADEQEQEQQKRTFLSLEEAGLVEMSGLSTHERFLCRLTISSLNLLRVISEQEGVPIEELNAGRVCDWFLKDKLKREQNVGTAVLQWDDPGF

SEQ ID NO: 334048 - protein, 226 aa, Zea mays
  unsure (1)..(226): unsure at all Xaa locations
  Clone ID: MRT4577_67764C.1.pep
DPGQAGXGGPTAXARLPGVGAGGPDVANCAASQPRRGRSGHGGVGRDPRRRGRPGCGAPWAGPSGAGSTPEGARAAAPVAPAXFGAAPRVGGPGGAAGRPWRGHYRPWYAGAGASXGVSARRGRSHSGXGERRPCGPCVGTVAARPENATPSRAGPIAAARSRKAPACASSATSISPCLVCACHRHPCMHMRETCNGRSYMRPKMGPSMKPLTLEMVATRLCRCGC

SEQ ID NO: 334049 - protein, 55 aa, Zea mays
  Clone ID: MRT4577_67765C.1.pep
GLCYSDGNERLLRVASSESPYAIQAPGGTRSAHRISLNTWHMLKTLITYHQPVDV

SEQ ID NO: 334050 - protein, 43 aa, Zea mays
  Clone ID: MRT4577_67766C.1.pep
RNSKIDVESSHEVCFMNLTQQVYVPPHLTIQLNHTTEHKCFTI

SEQ ID NO: 334051 - protein, 109 aa, Zea mays
  unsure (1)..(109): unsure at all Xaa locations
  Clone ID: MRT4577_67767C.1.pep
MASEELACTYAALILSDDGIVITAEKIATIVKAANIKGEAYCSALFSKLLEKPXVEDLILSGASAAXAAPAAAAAPAGGAAADHAPDDEEKKEEGKDHPDEDLCFRLFH

SEQ ID NO: 334052 - protein, 562 aa, Zea mays
  Clone ID: MRT4577_67768C.1.pep
MLEGFQGQYKYGDNSFEASASPSGASYSKCKDDAVKALKVDEACTHMKCSFGGIWNGGGGAGQNNLFVASFFFDRAAEAGFVNANAPVAKVKPSDFRQAAERACSLSVKNAEATFPGVQKDNIPYICMDLALVSLVLLLMPRSPAGATAGARRSGPPGADKYAVIFRAGSSGSRVHVFRFDANLDLVHIGSEIELFVQIKPGLSHYANDPREAAESLVSLLDDAKRVVPAELRDQTPVRVGATAGLRNLGAQKSEAILQAVRDILREKSSFKNQPDWVTVLDGTQEGAYEWVTINYLLGNLGKTYADTVGVVDLGGGSVQMAYAIAEKDAEKAPKPSEGEDAYVKKLFLKGTTYYLYVHSYLHYGLLAARAEVLKAGNGNGYSNCMLEGFQGKYKYGDDSFEASAPPSGASYSKCKDDAVKALKVDEACTHMKCSFGGIWNGGGGAGQKNLFVASFFFDRAAEAGFVNANAPVAKVKPSDFRQAAERACSLSVKNAEATFPGVQKDSIPYICMDLVYQYTLLVEGFGVDPDHEMTLVKKVPYSDAYVEAAWPLGSAIEVASS

SEQ ID NO: 334053 - protein, 277 aa, Zea mays
  unsure (1)..(277): unsure at all Xaa locations
  Clone ID: MRT4577_67769C.1.pep
GRDELVTINYLLGNLGKTYADTVGVVDLGEESARXAYAIAEKDAEKAPKPSDGEDAYVKKLFLKGTTYYLYVHSYLHYGLLAARAEVLKAGNGNGYSNCMLEGFQGQYKYGDNSFEASASPSGASYSKCKDDAVKALKVDEACTHMKCSFGGIWNGGGGAGQNNLFVASFFFDRAAEAGFVNANAPVAKVKPSDFRQAAERACSLSVKNAEATFPGVQKDNIPYICMDLVYQYTLLVHGLGIDPDHEMTLVKKVPYSGAYVEAAWPLGSAIEVAFSS

SEQ ID NO: 334054 - protein, 75 aa, Zea mays
  Clone ID: MRT4577_6776C.1.pep
IRLERHLTYVFSLAHVSSVTGCYKITQPYFVLLGRDSIGDHVMPNHRLPDRMVLGGLRPMHQWRQPRHIMQGGLH

SEQ ID NO: 334055 - protein, 252 aa, Zea mays
  Clone ID: MRT4577_67770C.1.pep
AASHTQQVLVEKSLLGWKEYELEVMRDMADNVVIICSIENIDPMGVHTGDSITVAPAQTLTDREYQRLRDYSVAIIREIGVECGGSNVQFAVNPADGEVMVIEMNPRVSRSSALASKATGFPIAKMAAKLSVGYTLDQIPNDITKKTPASFEPSIDYVVTKIPRFAFEKFPGSEPILTTQMKSVGEAMALGRTFQESFQKAVRSLETGFAGWGCGPIKELDWDWEKIKYSLRVPNPDRIHAIYAAFKKGMRV

SEQ ID NO: 334056 - protein, 34 aa, Zea mays
  Clone ID: MRT4577_67771C.1.pep
ASVSGFNHRLGKLSFMMSRTGAKDIPLCAGIEKY

SEQ ID NO: 334057 - protein, 137 aa, Zea mays
  Clone ID: MRT4577_67772C.1.pep
PHVRLFFVGKLSFQIMNGFGMTVPSQFIERNAVKEVLQIIQVARDRNIPIYYPTDLWCLKNGNSEISGVINSTGQLAGWTPADIGPSTLEKISSIITSYKKILWIGPTNYGLTEKNSVGGTQLGEILESASSDGCDV

SEQ ID NO: 334058 - protein, 70 aa, Zea mays
  Clone ID: MRT4577_67773C.1.pep
GRGRSRETNEEPPPPTVQVQGAGPQRGAKQKTKMAKFVIRPATAADCSDILRLIKELAKYEYMEEQVILT

SEQ ID NO: 334059 - protein, 111 aa, Zea mays
  unsure (1)..(111): unsure at all Xaa locations
  Clone ID: MRT4577_67774C.1.pep
VKQHAVTSWADDGEWDVPSAAAADEEGAGXRLPPPGPAGGRTTXAEVTIRITRKQLQQLMEKRAGGLHGLKRRRAAAQLLADVMDAGQVFHHCRAAHWKPALQSIPEAVES

SEQ ID NO: 334060 - protein, 60 aa, Zea mays
  Clone ID: MRT4577_67775C.1.pep
VPVDRTPYMMNLLMWIATPSHCTGMTPFKMLTTSYARCNIFRTAGTPPLYITMVNSCPLC

SEQ ID NO: 334061 - protein, 76 aa, Zea mays
  unsure (1)..(76): unsure at all Xaa locations
  Clone ID: MRT4577_67776C.1.pep
FFNFQRKNVQNKVPKQNGKPHLNPGKKRAKKLSGRQKSKNPVGFTLVEVLAWGSVGHIVAXNILAPSSKGNDPNFF

SEQ ID NO: 334062 - protein, 83 aa, Zea mays
  Clone ID: MRT4577_67777C.1.pep
LGTGFKDFKHAKPPGGCFLTRGHQKKHFQTKGSKSLPPHRQLLLTWFWSCKLQNVVKTIGTSYIIMYQVKLPCQYVVLPPTPS

SEQ ID NO: 334063 - protein, 39 aa, Zea mays
  Clone ID: MRT4577_67778C.1.pep
LAKFFEQPFALNMDMVSFTYGSVYFHCKYVNFVCVLSSE

SEQ ID NO: 334064 - protein, 115 aa, Zea mays
  unsure (1)..(115): unsure at all Xaa locations
  Clone ID: MRT4577_67779C.1.pep
MRFLFTGAKRQTGYALGDMIAKGVTLGAYQAVILHMXDIAPXTEALTGXLISXIDAAFTHLKGXTATTDVVEARTAVNVAIMVGXFSRNEGMERNXIFSXTVSIYKTQATCLENP

SEQ ID NO: 334065 - protein, 62 aa, Zea mays
  Clone ID: MRT4577_6777C.1.pep
KTGRIQSFTLIFPWRPFKKFWGIFLKVFLFPPITGGNHMYKGFFPQAKKIILLPPPFRYQWF

SEQ ID NO: 334066 - protein, 111 aa, Zea mays
  Clone ID: MRT4577_67780C.1.pep
LMPLLAVGEGAIMPTRRTPLTGQDFRSLQSTMKADFWLLFQYAFARLDLESPFLINLPHDSELASLCCGLNHLTLCPYSLQILCPPATRRCFLVSCQVMDTPTKRSAHMHP

SEQ ID NO: 334067 - protein, 226 aa, Zea mays
  Clone ID: MRT4577_67781C.1.pep
MGEQENNKIGGSGNNAMAVDESGAAANKGKSLGAAADPRLQAISDAIRVVPHFPKPGIMFNDITELLLRPGVFRDAVDMFVERYRGMGIAAVAGIEARGFIFGPAIALAIGAKFIPLRKPKKLPGEVFSESYVLEYGMDCLEMHVGAIEPGERVVVVDDLVATGGTLSAAIRLLERAGANVVECACLIGLPKFKVPKSKFVQKSYQMYISFFSRCTNMLLTCTSVS

SEQ ID NO: 334068 - protein, 53 aa, Zea mays
  Clone ID: MRT4577_67782C.1.pep
LILHILLGIEARGFIFGPAIALAIGAKFIPLRKPKKLPGDVGGEVNTNKTSIN

SEQ ID NO: 334069 - protein, 72 aa, Zea mays
  Clone ID: MRT4577_67783C.1.pep
YSQQLQLPFSQQLAAEPQQFLPFMEVAALTYPAYCQQYQLGPIKQLAGVNRSPLGSQRTECVRFLIMHVSRS

SEQ ID NO: 334070 - protein, 59 aa, Zea mays
  Clone ID: MRT4577_67785C.1.pep
ARPSWLPNIGIVWCVCKKKKNKVLQFAISLCMFGASLCAHVRGSTCMLVDPIGSAVPIY

SEQ ID NO: 334071 - protein, 167 aa, Zea mays
  unsure (1)..(167): unsure at all Xaa locations
  Clone ID: MRT4577_67786C.1.pep
PGLPAQARRGGVAHDDQAHVEALLSHRCDRTSECAWYTYNALMDVSNKSPGFGTTRDKQTLRXSSSHCFGQTFNKTTGGWATAPDGRVVWXYCHHERTQTPDPPYYGRGPIQLTYRDKYRLDEHAVRLDLASEPDLVAKDTAVGLKTDMGLWVTTWGDNDLGHAVMT

SEQ ID NO: 334072 - protein, 108 aa, Zea mays
  unsure (1)..(108): unsure at all Xaa locations
  Clone ID: MRT4577_67787C.1.pep
HYRAHCREKMKNLLYLHKGVNTKLFHGLIHLRXPSSILLXRTITXMMSHKTKKGEADVLSSYVKGAXDRLETNVXIHDPINVLRLHSGHKDWLLRELYKEVCWDYHDN

SEQ ID NO: 334073 - protein, 116 aa, Zea mays
  unsure (1)..(116): unsure at all Xaa locations
  Clone ID: MRT4577_67788C.1.pep
PSSGVGCVGLCVSRGRASFLASWWCCLSVPSARRRARLALRLGGGVSSSPPRVCPSGARVPSREGCSLPPLARVVAPGLALGSVVLPLARAGACLAAGRRXCRCVARRGRVRPWRG

SEQ ID NO: 334074 - protein, 92 aa, Zea mays
  Clone ID: MRT4577_67789C.1.pep
DSAPSHYNKIHLNLVDRCADTEAKDSTIDHASLNPVQDLLHAAVSSLMYCRLSYACRSLACTLVAPGSKDKKVSTSINGHYASRASDDNTPD

SEQ ID NO: 334075 - protein, 152 aa, Zea mays
  unsure (1)..(152): unsure at all Xaa locations
  Clone ID: MRT4577_6778C.1.pep
GREKADXIKRRSGTNMSQLKRDIXLPLPVVRATNXSYSGAGGVRXLXNXXSFAXPLVRLCPCPXXRPVLQNSRASNLVSVWRRTLQPSRNVAPXXPXDIXLRCACXPVCALXWPXXLAKSCXFVPRTIRXXHACXXVSPCETGKHXXCXXSR

SEQ ID NO: 334076 - protein, 51 aa, Zea mays
  Clone ID: MRT4577_67790C.1.pep
HASAWYHLHTQHLMSAGFSRLQRIEKQAKIRQMLCMQMVPCICFPEWLQMK

SEQ ID NO: 334077 - protein, 43 aa, Zea mays
  Clone ID: MRT4577_67791C.1.pep
TPTRKASPARSLRSARPIWTTPLSSSSLIVGQRVGFFLPSRPI

SEQ ID NO: 334078 - protein, 94 aa, Zea mays
  unsure (1)..(94): unsure at all Xaa locations
  Clone ID: MRT4577_67792C.1.pep
ESSINKINTRDHQFIVRDTNPXGIKGQSLAAXLSAGISAGXSGRELQAIDDEWLDAARLKTFSECVRDAIAGLGVAGHVNHRTLQEWDRATGGV

SEQ ID NO: 334079 - protein, 314 aa, Zea mays
  Clone ID: MRT4577_67793C.1.pep
RVKHWFTFNEPRIVALLGYDAGSIPPQRCTKCSAGGNSATEPYIVAHNFLLSHAAAVSRYRNKYQAAQKGKVGIVLDFNWYEALTNSTEDQAAAQRARDFHVGWFADPLINGHYPQIMQDIVKERLPKFTPEQAKLVKGSADYIGINQYTASYVKGQKLLQQKPTSYSADWQVQYVLERNGKPIGPQANSKWLYIVPEGMYGCVNYLKHKYGNPTVFITENGMDQPGNLTRGQYLHDTTRVQFYKGYLAELRKAIDDGADVAGYFAWSLLDNFEWQSGYTSKFGIVYVDFSTPKLERHPKASAYWFRDMLQKHL

SEQ ID NO: 334080 - protein, 160 aa, Zea mays
  Clone ID: MRT4577_67794C.1.pep
SLVLLNRSGRATALGGIRTGRLARSASTLVCCFARRPIAGSCRGPTAGGSPSLLSLLVATAVRRRGSRLSAPRQAARPLGCRCWWRRRRGVGGPGVSLTSSSLQDACWQRGGRAGTGGLRVAASGSASAAGGGPADWRECQRSVRGGIDRDVPAGLEGPN

SEQ ID NO: 334081 - protein, 86 aa, Zea mays
  unsure (1)..(86): unsure at all Xaa locations
  Clone ID: MRT4577_67795C.1.pep
PHEAQVPLLLLASPPLRTCRGGTPPRAGRYLAASPGLVLRVRSVTLRTKLRSRRSTSRRSLKCKRSTXEEXRXXEXFTXTEXXGPV

SEQ ID NO: 334082 - protein, 55 aa, Zea mays
  unsure (1)..(55): unsure at all Xaa locations
  Clone ID: MRT4577_67796C.1.pep
GSSLAVCPWFXFFSFSNNVLFFSIQKNPNKFKQAHEGHVTRRAKILYWALFFPNL

SEQ ID NO: 334083 - protein, 47 aa, Zea mays
  Clone ID: MRT4577_67797C.1.pep
SNKYLVENIVFYSGIEEGCINVHAFIMPDVHVKYWLTWNFWRSVASV

SEQ ID NO: 334084 - protein, 170 aa, Zea mays
  unsure (1)..(170): unsure at all Xaa locations
  Clone ID: MRT4577_67798C.1.pep
TVTVAKHPESGSSPRPTPPPQDTRARAPPTLVSTPCAARKMAPPRRVSSHRSPSSRKLSCIARFRPDYYLGHGNSQPFSSARLEEVGWLSGVGGLRSGGWCVQSSRTHAPGQSRVLGRGLGYKQQVRGWGHCEAVLGRLLRGRGRPGLAGGGGVAYLGFXRGPLRWSGGS

SEQ ID NO: 334085 - protein, 318 aa, Zea mays
  unsure (1)..(318): unsure at all Xaa locations
  Clone ID: MRT4577_67799C.1.pep
MTRRCSHCSHNGHNSRTCPNRGVKIFGVRLTDGSAIRKSASMGNLSLLSAGSTSGGASPADGPDXSPTAAXGYASDDFVQGSSSASRERKKGVPWTEEEHRRFLLGLQKLGKGDWRGISRNFVVSRTPTQVASHAQKYFIRQSNMSRRKRRSSLFDMVPDESMDLPPLPGSQEPETSVLNQPPLPPPVEEEEEVESMESDTSAVAESSAASALMPESLQPTYPMIVPAYFSPFLQFSVPFWPNQEDGGDLPQETHEIVKPVAVHSKNPINVDELVSMSKLSIGEPGQETVSTSLSLNLLVGQNRQSAFHANPQTRAQA

SEQ ID NO: 334086 - protein, 136 aa, Zea mays
  Clone ID: MRT4577_6779C.1.pep
CFKYSRDLTQVKPIRSQKLKYKISKKLKQTCLVPQSNAPQSFVMPVQRYSLAECRLPALRCRSTPSGSAAIFVRLPSFSATAPSFSGLRPAPSCSTTQRHRPALQRLHRPPSPTPPFHSPAANSRDKIPSWGFKDK

SEQ ID NO: 334087 - protein, 278 aa, Zea mays
  unsure (1)..(278): unsure at all Xaa locations
  Clone ID: MRT4577_677C.1.pep
MATALSFKALALAALLSVVVVTSGARAEQQLKRNATTASQDRSLLSYSSGWLPAKATWYGAPTGAGPVDNGGACGFKGTNQYPFSSMTSCGNEPIFKDGKGCGSCYQXIRCLKSNHPACSGVAQTVIITDMNYYPVAKYHFDLSGTAFGSMASWGLNDKLRHAGIIDMQFRRVPCNFPGLTITFRVQHGSNPMYLAVLIEHENKDGDVVQADIMQSNSGHWEPMHESWGSIWRIDPNRPLRGPFSMRITNESGRQLVAKNVIPANYIPDVDYRSFVQY

SEQ ID NO: 334088 - protein, 315 aa, Zea mays
  unsure (1)..(315): unsure at all Xaa locations
  Clone ID: MRT4577_67800C.1.pep
MTRRCSHCSHNGHNSRTCPNRGVKIFGVRLTDGSIRKSASMGNLSLLGGSTSGGGGASPADVGHDAAAEGYASDDFVQGSSSANREREKGVPWTEEEHRRFLLGLQKLGKGDWRGISRNFVVSRTPTQVASHAQKYFIRQANMSRRKRRSSLFDLVPDESDLPPLPGNQEPEAQILNHPPLPPPMEXEEEVESMESDTSVIAESSSASAIMPESLQPSYPMIVPAYFSPFLQFSVPFWPNQEDGGDLPQETHEIVKPVAVHSQNPINVDELVGMSKLSIWEHGQETVSTSLSLNLLGGQNRQSAFHANPQTRAQA

SEQ ID NO: 334089 - protein, 500 aa, Zea mays
  Clone ID: MRT4577_67801C.1.pep
MRRPTLSLALGLGLGLSLVALFAARGAHASIHEYGGGGFAPRANSFFFHGGSEGLYASDHSSNSSASFIRFDTVVFRRTLESASRHEEMQQKTGLVEAIIVEIQDRGKIGGSYLHSDAICCTPELDKEKSCRVGEVIIRPNPENPDWPKRIQTFFDGKNEETTMVTQIVSINKTGMYYLYFMFCDPQLKGLKITGRTVWRNPQGYLPGKMAPMMTFYGFMSLAYLVLGLLWFIQFVRCWKDILQLHYHITAVIALGMCEMAFWYFEYANFNSTGTRPMGITLWAVTFTAVKKTVSRLLLLVVSMGYGVVLPTLGGITSRVAALGFIYFVASEALELVENLGNINDFSGKTRLFLVLPVAVLDATFIIWIFSSLSRTLEKLQLRRSMAKLELYRKFTNSLAVSVLISIAWIGYELYFNATDPLSELWQRAWIIPSFWNVLSYALLGIICILWSPSRNPTGFAYSEDAGEGADEEGLSLVGSAVKGTGDMVNMHIFPEDKRA

SEQ ID NO: 334090 - protein, 316 aa, Zea mays
  unsure (1)..(316): unsure at all Xaa locations
  Clone ID: MRT4577_67802C.1.pep
MTRRCSHCSHNGHNSRTCPNRGVKIFGVHLTDGSAIRKSASMGNLSLLSAGSTSGGASPADGPDXSPTAAXGYASDDFVQGSSSASRDRKKGVPWTEEEHRRFLLGLQKLGKGDWRGISRNFVVSRTPTQVASHAQKYFIRQSNMSRRKRRSSLFDMVPDESMDLPPLPGSQEPETSMLNQPPLPPPVEEEVESMESDTSAVAESSGASALMPESLQPTYPMIVPAYFSPFLQFSVPFWPNQEDGGDLPQETHEIVKPVAVHSQNPINVDELVGMSKLSIWEHGQETVSTSLSLNLLGGQNRQSAFHANPQTRAQA

SEQ ID NO: 334091 - protein, 111 aa, Zea mays
  unsure (1)..(111): unsure at all Xaa locations
  Clone ID: MRT4577_67803C.1.pep
PCVFASWTMALWCTALPGXGGNVPARAALPYARPTIRTTGGNAKPAAASPSPXSTSDRVLYMRPVTXQPSSYLTTDVTPDYCSDTARLSARTETFRKNTQLGASYSRSAML

SEQ ID NO: 334092 - protein, 95 aa, Zea mays
  Clone ID: MRT4577_67804C.1.pep
MASWKNTYSYSYTPVPNAVAMLALALLVLAAPAACAVPDASASVHLEALLAFKKAVTADPNGTLTSWTVGSGGGGGGGGYPQHCNWTGVACDGAG

SEQ ID NO: 334093 - protein, 70 aa, Zea mays
  Clone ID: MRT4577_67805C.1.pep
TFFLNFAVQQEMFEREIGRLRTMYQQQQQQQAPALVRSNSRDLDVQFANLSLKHKDPNTGRDALSGPLRT

SEQ ID NO: 334094 - protein, 165 aa, Zea mays
  unsure (1)..(165): unsure at all Xaa locations
  Clone ID: MRT4577_67806C.1.pep
DPVTVGAHYNQLHRPRPARIHPRRSPDQPPRTAKPAADGTPTKSADRGSRPANSRGSVLIRPIDLIPETRIARKDGCMDGWKKKDGPPPDESITGRSSTAIDELPGPEDDEPESGEVTAGGVTGGDLERERMESLRPGGAQTGAWCERGDDLAWXCEQHPAKPEG

SEQ ID NO: 334095 - protein, 159 aa, Zea mays
  unsure (1)..(159): unsure at all Xaa locations
  Clone ID: MRT4577_67807C.1.pep
MSQTILTPPQRSLQIQSSMGNVDRTKEIARQSTGGKAPRTQLATKAARKAHPATRGLXKKPHRVTPAPPGTXEQIRKYQKSTELLIRKLPVQRLVRQIEHDFKTDLRFQSSAEAALHEAAEDYLVGLFEDTKLCDIHANEXTIMPNDIRLARRIRGERN

SEQ ID NO: 334096 - protein, 71 aa, Zea mays
  Clone ID: MRT4577_67808C.1.pep
KKSPSQISDGNAPGVPDRRRWCLQVVVRPDGFVPICITCFCCDTLYLTVLLFILNSRLLCRGVLITPSDWY

SEQ ID NO: 334097 - protein, 73 aa, Zea mays
  Clone ID: MRT4577_67809C.1.pep
PRRPHSSFSRATAHRHRQALELSPPIAGDGVVARRGNGPVSGRPGMHKPVRRHLVPSGYERLLFALWAKRGGH

SEQ ID NO: 334098 - protein, 44 aa, Zea mays
  Clone ID: MRT4577_6780C.1.pep
HPSFLKLNKISINMTITLVSSSIHPSKFYTTPPSSSSSLPSETF

SEQ ID NO: 334099 - protein, 99 aa, Zea mays
  Clone ID: MRT4577_67811C.1.pep
PYPSTCSHCCSQLYQALVLPDVTYRLMSMSKDKHVDQYCNSVTRVRLAHWYRTTIDYEPCVNPCYMDLTLLMYSKHPVLFFMTLTKKGPIRKGWCGTLL

SEQ ID NO: 334100 - protein, 46 aa, Zea mays
  unsure (1)..(46): unsure at all Xaa locations
  Clone ID: MRT4577_67812C.1.pep
MNDPDVAKQIQQMGRLIRQEADQKANXISVSAEEEFDIEKLHLAET

SEQ ID NO: 334101 - protein, 49 aa, Zea mays
  Clone ID: MRT4577_67813C.1.pep
SLSGLALQQQAQDAYCLMVTNKAYSHSPTNKFEANLLLVRLTNTLSVSF

SEQ ID NO: 334102 - protein, 188 aa, Zea mays
  unsure (1)..(188): unsure at all Xaa locations
  Clone ID: MRT4577_67814C.1.pep
TSPFSFLPKHSSEPPNTCYARSSPRTAQHAVPVRPWTRARPPPGASASAPTPTSPATXRRRRXAAAAAAAAAPVAVDEASDAEVEEFYAILRRIRDASRRLCGAGARPAPRAPAWRPSFSWEDFATPAPGAPAPETPTPAQQEPAQPRPDEPVAXSALPPRRRVPGXDLNAEPEPEAPATPRSARVQA

SEQ ID NO: 334103 - protein, 143 aa, Zea mays
  unsure (1)..(143): unsure at all Xaa locations
  Clone ID: MRT4577_67815C.1.pep
MDASAATARRKRKRPDADITAAAAAAAPVAVDEASDAEVEEFYAILRRIRDASRRLCGAGARPAPRAPAWRPSFSWEDFATPAPGAPAPETPTPAQQEPAQPRPDEPVAXSALPPRRRVPGXDLNAEPEPEAPATPRSARVQA

SEQ ID NO: 334104 - protein, 75 aa, Zea mays
  Clone ID: MRT4577_67816C.1.pep
VRISTESSSLTSRQFFRSLKAILSWAGLAQRYILCTTNAQCILSQHNAVLIFFLFFLYVSLFFMGHSISIQVYMW

SEQ ID NO: 334105 - protein, 320 aa, Zea mays
  Clone ID: MRT4577_67818C.1.pep
MSAQSASFAAKTLAVLSTPRPRRPPRDQIERAGPIQFDPRRRGRKEFRESPGKKALARSAMATHPASPTAGAGGDRSPSGPPPVRLSAAQAVAAIQPTSPRYFFSSLAAASAAASSPHRRIGIAVDLSDESAFAVKWAVQNYLRPGDAVVLLHVRPTSVLYGADWGSIPVSVDDDPDVDIAEGAVRAAAAEEEPEEAKKKREEEFDSFTSTKAQDLAQPLVGAQIPFKIHIVKDHDMKERLCLEAERLGLSAMIMGSRGFGASRRVGKGRLGSVSDYCVHHCVCPVVVVRYPDDAFGDELRTVPENEPVYHAAPEAQKEN

SEQ ID NO: 334106 - protein, 189 aa, Zea mays
  Clone ID: MRT4577_67819C.1.pep
PPRPATYAKLKQLFFWPGMKAAIKSYVQSCSICQQAKSDRAPYPGLLQPLTVPPQAWHTISLDFIEGLPKSAHYNCILVVIDKFSKYGHFLPLLHPFSASKVAHVFLDHIYKLHGLPVNIVSDRDRIFTSSFWQNLFKLTDTKLCMSTAYHPQSDGQTERLNQCLETFLRCFVHAAPTRWSQWLAVAEY

SEQ ID NO: 334107 - protein, 185 aa, Zea mays
  unsure (1)..(185): unsure at all Xaa locations
  Clone ID: MRT4577_6781C.1.pep
MATVASALQGQAPHHHHHHHLALPSSSQAADDHDDHDNAAGDDDNDGDDFALDTKSPQVRMLPAMSDSAAADNNNNPLFLPPPSMAGCMLSSLXRAAPRGPPRXPPASYFSGGGGKAAGLYDPSAXSPASMXATALLQKAXEMGATGYAGAGTGFGPMMGGPSVMGLFGPVKILGGFRWRGTMGC

SEQ ID NO: 334108 - protein, 94 aa, Zea mays
  Clone ID: MRT4577_67820C.1.pep
PAGLPTFVIPTVRTGVCVRRSGEARSSAAADLTPRRHPTSEIRPGASIESLGGHPRQSWADSIVGPPLIYHRSICVANNPPRFMGRHLPRSDHQ

SEQ ID NO: 334109 - protein, 116 aa, Zea mays
  Clone ID: MRT4577_67821C.1.pep
GNPPPGGSPPKKFCKFIPLANGSGPSPFNGGGPYPTPIFLVPSFPFFLGRGYPQEGGSFPGPVPLGFHLGKGFGPFPFLKFPTLRVAPPLGWVFNPPLVRKSGAKVYPFFGNQKRP

SEQ ID NO: 334110 - protein, 40 aa, Zea mays
  Clone ID: MRT4577_67822C.1.pep
YGEPTYFYDESHTEGRKQDPRFPITLHSVIRQKQSLATSF

SEQ ID NO: 334111 - protein, 104 aa, Zea mays
  unsure (1)..(104): unsure at all Xaa locations
  Clone ID: MRT4577_67823C.1.pep
PPGCTPKPKPXPPPPKGQNGPPRKVPPFPKPSRAKTAPPRGTPFPKASAPKTAPPGGPSPPKTAGPKTPPFNLKPPGFFTPKPPPPFFLKKXLPNPPSVSFLRN

SEQ ID NO: 334112 - protein, 54 aa, Zea mays
  unsure (1)..(54): unsure at all Xaa locations
  Clone ID: MRT4577_67824C.1.pep
LVKHNDTGEVGLVMRQAKTLKMXANHLVLETTKMQEHAASDKYCIXNALEFADG

SEQ ID NO: 334113 - protein, 159 aa, Zea mays
  unsure (1)..(159): unsure at all Xaa locations
  Clone ID: MRT4577_67825C.1.pep
ISLLVALTGTLSPRAEEEPXAEAEGAXLTSTRQFDEAVANHPLMAKPFYSPWSGHCKKLAPXIENAAIVLTKHDPPMDSSQGDAHKDNNRXPLATKSEIQGFPTTKIFRDQWKNIHEYKGTKEADCIEDYLEQQVRPSSKDIKSPEDATGLIDDKKNYI

SEQ ID NO: 334114 - protein, 120 aa, Zea mays
  Clone ID: MRT4577_67826C.1.pep
NHLFSGLTGSLLHFLNNFSSSPCNSPFLLLPLLSALVFSPDPPPSMSRPNKPPRLIKPLKPVRPSSLVLSLAATLTATLHTATTHTTVATTVATTGGNLWSFMAVISTPPRFRFFIAMCF

SEQ ID NO: 334115 - protein, 35 aa, Zea mays
  Clone ID: MRT4577_67827C.1.pep
AWISLTTVSGESTVCGLLIVHKRPVPLFICSWPMV

SEQ ID NO: 334116 - protein, 81 aa, Zea mays
  Clone ID: MRT4577_67828C.1.pep
AQAWGEPIDYWAKLPKNSLTTYQAVKWSSNKHGVPFIPGSSSGGPGYIPVSFGGLKETNTTLAAVKLKRGLHELVTDAMVK

SEQ ID NO: 334117 - protein, 92 aa, Zea mays
  Clone ID: MRT4577_67829C.1.pep
VIWWYDDTARTTSKSSASSSSAHRYAAELSRGRRRGGVRTEVDPRAAVRHKQRGDHAHLKPQSSQNTDRAPGTLKIGCDDVSRTLFNCLLRD

SEQ ID NO: 334118 - protein, 88 aa, Zea mays
  Clone ID: MRT4577_6782C.1.pep
KNYLLLIFFFFLTFTSILSVDRGVNYIHSTRSIQSCTSSIVLRIVVVFCSDLSLPTADILGDPYGHTETATQGMQDLKHTHAYTHLYL

SEQ ID NO: 334119 - protein, 58 aa, Zea mays
  Clone ID: MRT4577_67830C.1.pep
WAAIQAESLDHPKLAKLISVALALDNLIPQFKSLLQRIYAWRSLSLMIQLDRLKHTNN

SEQ ID NO: 334120 - protein, 76 aa, Zea mays
  unsure (1)..(76): unsure at all Xaa locations
  Clone ID: MRT4577_67831C.1.pep
FCAQQSPTFRGGGVIASFLAGSSTGLIAPHVGXAGPXNLQRLANQPALLSWSFDSSKRASFGVKYEIQGQQIEENH

SEQ ID NO: 334121 - protein, 66 aa, Zea mays
  Clone ID: MRT4577_67832C.1.pep
KLPLLRGPPGKFQTFFFFFFFSSGRPGRYKLFFFFFFFFFFFFFNSRVSFILVIIVLQICNTQCDD

SEQ ID NO: 334122 - protein, 65 aa, Zea mays
  unsure (1)..(65): unsure at all Xaa locations
  Clone ID: MRT4577_67833C.1.pep
QNQFPFPLINSFFSPSICLSADSPFFIFNLSSILWVCDRVCARGVSQHTFKFIHWVSRVKKIKFX

SEQ ID NO: 334123 - protein, 36 aa, Zea mays
  Clone ID: MRT4577_67834C.1.pep
SQQMNILGQSCNESNNGSYSCSSPETGSSSNIPHNI

SEQ ID NO: 334124 - protein, 136 aa, Zea mays
  unsure (1)..(136): unsure at all Xaa locations
  Clone ID: MRT4577_67835C.1.pep
GFPVALPAKPQGFKSIPVVSGIPVAPIAFSXGDPPGQTQFFGPWGGSGGETEPVIQLGDSGGLPELSGAIGNVAGPPVITPPKFVPSPKTLGPFGAWGGGSAPPFGIPGQQGGALVGFFARGGVSPPPLGVFGGSL

SEQ ID NO: 334125 - protein, 84 aa, Zea mays
  Clone ID: MRT4577_67836C.1.pep
RDTFPYPGNSLRGIPRFFWTTGVFIPNSGYFGGWKENKGGGPLFNTFLGTGHPGGLRFYAVFNNAEEKGTPFQGQQERLGPGPF

SEQ ID NO: 334126 - protein, 188 aa, Zea mays
  Clone ID: MRT4577_67837C.1.pep
ENAPVEEPVLVPPVTEVVSPPKSEVADTGDLLGLDDPNPAVSAIEESNALALAIVPTDGASTTGNTAFQDKGFDPTGWELALVTAPSNTTSSASVGQLGGGFDKLILDSLYDDGAYRQRQQQQVYGSAVPNPFMSNDPFVMSNQVAPPPQVGMGPATNNPFLDAGFGAFPVANNGHQQHNPFGSAQLL

SEQ ID NO: 334127 - protein, 69 aa, Zea mays
  Clone ID: MRT4577_67838C.1.pep
FESANPLVNFPRGFIRNGRRLQGDGAAPATFIKYQTSLSLDPWECSIFVGSQGFIPSLSDVPEAPSVNA

SEQ ID NO: 334128 - protein, 595 aa, Zea mays
  unsure (1)..(595): unsure at all Xaa locations
  Clone ID: MRT4577_67839C.1.pep
MASMQSWRKAYGAIKDTTTVSLANLNSDFXCAFDPDLDVAIVKATNHVECPPKERHLRRVVAATSITRPRADVAYCIHALARRLAKTRNWIVALKALVVIHRLLREGDPTFREELLNFTQRGRILQLSNFKDDSSPIAWDCSAWVRTYGLYLEERLECFRVLKYDVEAERLSKQGQGPEKGHSRTRELDSQDLLEQLPALQQLLYRLVGCRPEGAANNNYLVQYALALVLKESFKIYCAINDGIINLVDKFFEMPRHDALKALEIYRRAGQQAGNLSDFYENCRGLELARNFQFPTLREXGLVLCLVFAMCTGLCYDIFYMRKFXPPQTFLATMEDYVKEAPRMVPVREPLELPERLLLTYKPEESEEILEPAPVEEEKAPVEEPVLVPPVTEVVSPPPKAEVPDTGDLLGLDDTNPAVSAIEESNALALAIVPTDGASTTGNTAFQEKGFDPTGWELALVTAPSNTTSSTSVSQLGGGLDKLILESLYDDGAYRQRQQQQLYGSAAPNPFMANDPFAMSNQVAPPPSVQMAAMSQQHQQIPTMMQPNPFGPPMHPQVSMAPATNNPFLDAGFGAFPAANNGHQQHNPFGSAQLL

SEQ ID NO: 334129 - protein, 67 aa, Zea mays
  Clone ID: MRT4577_67840C.1.pep
RLLPPAVSHYVRDDGSSDHHHPTFYAARLRTPPLLSTPLQPTYISRYLKYPSRPIHRPNKHKGPSPF

SEQ ID NO: 334130 - protein, 563 aa, Zea mays
  Clone ID: MRT4577_67841C.1.pep
MASMQSWRKAYGAIKDTTTVSLANLNSDFKDLDVAIVKATNHVECPPKERHLRKVVAATSIARPRADVAYCIHALARRLAKTRNWIVALKALVVIHRLLREGDPTFREELLNFTQRGRILQLSNFKDDSSPIAWDCSAWVRTYGLFLEERLECFRVLKYDVEAERLSKQGQGPEKGHSRTRELDSQDLLEQLPALQQLLYRLVGCRPEGAANNNYLVQYALALVLKESFKIYCAINDGIINLVDKFFEMPRHEAHKALEIYRRAGQQAGNLSDFYENCRGLELARNFQFPTLREPPQTFLATMEEYVKEAPRMVPVREPLELPERLLLTYKPEESEDIPEPASVEEENAPVEEPVLVPPVTEVVSPPKTEVADTGDLLGLDDPNPAVSAIEESNALALAIVPTDGASTTGNTAFQDKGFDPTGWELALVTAPSNTTSSASVGQLGGGFDKLILDSLYDDGAYRQRQQQQVYGSAVPNPFMSNDPFVMSNQVAPPPSVQMAAMSQQHQQIPTMMQPNPFGPPMQPQVGMGPATNNPFLDAGFGAFPVANNGHQQHNPFGSAQLL

SEQ ID NO: 334131 - protein, 111 aa, Zea mays
  Clone ID: MRT4577_67842C.1.pep
MARQLVVLALLFVIAGVAHGAGECGRASADRVALRMAPCISAADDPQSTPTSSCCSAVHTIGQSPSCLCAVMLSGTARAAGIKPEVAITIPKRCNMADRPVGYKCGDYTLP

SEQ ID NO: 334132 - protein, 59 aa, Zea mays
  Clone ID: MRT4577_67843C.1.pep
VTRNMVSSQHGRISRVLKFYKAEPSIGRINHKRFCTHAKPGTPSLFKKKNRVTWISYHL

SEQ ID NO: 334133 - protein, 564 aa, Zea mays
  unsure (1)..(564): unsure at all Xaa locations
  Clone ID: MRT4577_67844C.1.pep
MASMQSWRKAYGAIKDTTTVSLANLNSDFKDLDVAIVKATNHVECPPKERHLRRVVAATSITRPRADVAYCIHALARRLAKTRNWIVALKALVVIHRLLREGDPTFREELLNFTQRGRILQLSNFKDDSSPIAWDCSAWVRTYGLYLEERLECFRVLKYDVEAERLSKQGQGPEKGHSRTRELDSQDLLEQLPALQQLLYRLVGCRPEGAANNNYLVQYALALVLKESFKIYCAINDGIINLVDKFFEMPRHDALKALEIYRRAGQQAGNLSDFYENCRGLELARNFQFPTLREPPQTFLATMEDYVKEAPRMVPVREPLELPERLLLTYKPEESEEILEPAPVEEEKVPVEEPVLVPPVTEVVSPPPKAEVPDTGDLLGLDDTNPAVSAIEESNALALAIVPTDGASTTGNTAFQDKGFDPTGWELALVTAPSNTTSSTSVGQLGGGLDKLILESLYDDGAYRQRQQQQLYGSAAPNPFMANDPFAMSNQVAPPPSVQMAAMSQQHQQIPTMMQPNPFGPPMHPQVSMAPATNNPFLDAGFGXFPAANNGHQQHNPFGSAQLL

SEQ ID NO: 334134 - protein, 285 aa, Zea mays
  unsure (1)..(285): unsure at all Xaa locations
  Clone ID: MRT4577_67845C.1.pep
LQLHLHCIALHAQVAPTISSGRRHAETRARPRGAGRGAGSDGPRCICIALHAQVAPTISSGRRHAETRARPRGAGRGRRGVGARPKAGQFNTFIRLLKSTGVASQIDNQVANGGNGVTVFAPTDNAFQSLPSGTLNSLSDQDKNALVQYHVVSAAIPMSQFDTVSNPLRTQAGSASPGEFPLNVTSSEGQQVNVTTGVVTATVDNSLYSGDSLVVYQVNKVLLPMKLFGAADAPAPAPLAPXKKKGKTPAXVADSXDAXEGSPDATTTSLAPARLTRGGLATALA

SEQ ID NO: 334135 - protein, 111 aa, Zea mays; identical to SEQ ID NO: 334131
  Clone ID: MRT4577_67846C.1.pep

SEQ ID NO: 334136 - protein, 288 aa, Zea mays
  unsure (1)..(288): unsure at all Xaa locations
  Clone ID: MRT4577_67847C.1.pep
MHRSRPPSVAVAAMQRLVRVLVVLGVAAAASAQGPTAAPTTPTPATPAAPGAWRASSNITGVLAKAGQFNTFIRLLKSTGVASQIDNQVXAPTDNAFQSLPSGTLNSLSDQDKNALVQYHVVSTAIPMSQFDTVSNPLRTQAGSASPGEFPLNVTSSEGQQVNVTTGVVTXTVDHPSCTGDTFVXRSRPPSVAVAAMQRLVRVLVVLGVAAAASAQGPTAAPTTPTPTPATPAAPAPTTASSNITAVADSPDAAGASPDATTTSLAPARLTRGGLATALALAVVWWGL

SEQ ID NO: 334137 - protein, 71 aa, Zea mays
  Clone ID: MRT4577_67848C.1.pep
PTRPEVSFTRLTRRETPDPTILCDISSAHNKKECGQELCSLDRSMSLQQGAHWRLVTCRDMPAVDTEAAAT

SEQ ID NO: 334138 - protein, 1031 aa, Zea mays
  unsure (1)..(1031): unsure at all Xaa locations
  Clone ID: MRT4577_67849C.1.pep
MICNVCVPGETLLRKMPSWTRAQDGASTSHGREATPNPPPVPPTLAEAFAALVNATADNTRFLREMAGQQLQQQGRWGYPQGPRETSYLDFSETRPPLFVKAEDPLEADEWIHVIEQKFGLLRCSKTQKPLFAAQQLRGPASTWWGNFVAVQPANHQIKWEEFKLTFREHYIPEGVLHMKQEEFMKLKQGGDTVTQYLNKFNHLSQYAIDQMQRKMATCIDLTYGRAVSIALAVESKYTSSGKTKGSGGNRPSQGPEKRQRIAQTINKVLGILLKLKEMRARILRRRDEFTTLKWPPHQTMNRVYEAIIPEIKDILVVCEFLDVFPEDLPGLPPERDVEFVIELKPGTAPISRRSYQMPPNELAELKIQLQDLLEKGFIRPSSSPWGCPAIFVKKKDQTLRMCMDYRPLNETNAPAHFTYLMNSVFMPELDKFVVVFIDDILIYSKNEEEHAQHLRIVVTRLREHQLYAKFSSGLGCVLMQEGRVIAYASRKLRRHEEHYPTHDLELVAVVHALMIWRHYLLGNVCHIYTDHKSLKYIFTQSELNMRQRRWLELIKDYELEIHYHPGKVNVVADALSRKVSCHCLTMRTSDITLCQEMENLNLGIIQHGTSNHLKLESVILQRIIDAQKNDEVVPKNEGVRQQILDEAHLSRYSIHPGSTKMYQDLKQHYWWTKMKIEIAHYVARCDTCKRVKAIHLKAAGPLQSLPIPTWKWEDISMDFIVGLPRTAKGYDSIWVIIDRLTKIAHFLPVNTDHPVTVYAKLYIARILSLHGVPKTIVSDRGPQFIAKFWEALHNSLGTKLLHSSAYHPQTSGQTERLSRKHQDAPFEALYGQRCRTPLNWSEPGERYFFRPDMVKETEEKVQRIIYNLKKAQARQKSYADKRRMPLYFLEGDYVYLKVSPMKGVSHFGVKGKLAPRYIGPFLILERYGPVVYRIQLPKTLSVVHNVFHVSQLKKCLRVPDRTIEVTDVVLEPDLTYFEHPNRVLDQKDRVTRRKTLKFYKIQWNQHSEDEATWETQDFLDXEFPRLFSLL

SEQ ID NO: 334139 - protein, 600 aa, Zea mays
  Clone ID: MRT4577_6784C.1.pep
MALSVSMEGIEARARDLGVDLSAVDLDSITLPAGEDFGIVSDDEEVLRGEDLPELEMGLSNIIVVDNLPVVPPEKFEKLENVIRKIYSQIGAIKENGLWMPVNPETKKTYGYCFIEYSTPQEAELAREKTNGYKLDKSHIFAVNLLDDFEKYMKVPDTWTPAEIKPYTAGENLLKWLTDEKARDQFVIRAGTLTEVYWNDARKLAPELVFQKQYWTDSFIQWSPLGTYMATVHRQGSQVWGGENGFERLMRFAHPLVKLIDFSPGERYLVTYSSHEPSNPRDTHRVVLNIFDVRTGKVMRDFKGSADDFTTGGNIGVSGVSWPIFRWGGGKDDKYFARLGKNIISVYETDTFSLLDKKSLKVENVVDFSWSPTDPIISLFVPEMGGGNQPARVSLVQIPGKEELRQKNLFSVSDCKMYWQNSGEYLAVQVDRYTKTKKSTYTGFELFRIKERDIPIEVLELENKNDKIIAFAWEPKGHRFAIIHGDGPKPDVSFYTMRTANNTSRVSKLTTLKSKQANTLYWSPAGRFIVLAGLKGFNGQLEFYNVDELETMATGEHFMATDIMWDPTGRYLATAVTSVHEMEEVVDVRQEVLAFDLDQE

SEQ ID NO: 334140 - protein, 63 aa, Zea mays
  Clone ID: MRT4577_67850C.1.pep
DYLDGSACSAPALCGVSRSRCLQILLDGSGDLECGYYYTLPPIIHQHIDSLKELLAGVWTVLV

SEQ ID NO: 334141 - protein, 51 aa, Zea mays
  Clone ID: MRT4577_67851C.1.pep
PMIDLAAVIMHVSAMFTVKVFKWTSQLVKKTLALTNRVQCKVWTHISQDAF

SEQ ID NO: 334142 - protein, 1282 aa, Zea mays
  Clone ID: MRT4577_67852C.1.pep
MSPRTRRTARKHTGPIGVPCHQLAPRHENSSSGSNDPIGDLEAEVSRLQAELRRRTAIWVVDCDCINELRRDVRHLRDQLTDRDLALDWVVQSRSLAWDKEQKAQARVAELNLAVEELQTYCNTLHEEMPSKTRAQDGAGTSRGRESTPNPPPVPPTLAEAIAALVNATADNTRFLREMAGQQLQQQGGRGYQQGPCETSYLDFSETRPPLFVKAEDPLEADEWLRVIEQKFGLLRCSETQKPLFAAQQLRGPASTWWGNFVAVQPANHQITWEEFKVAFREHYIPEGVLHMKQEEFMKLKQGGDTVNQYLNKFNHLSQYAIDQVKTDLKKKNCFMRGLNDRLQRKMATCIDHTYGRAVSIALAVEAKYAGAGKSKGFGDCPYPKQNQSNNQQGSGNSSQAKGNNMGKNTKKTGRIYYTQVATTPDGEPRIIRLSHNQDEILLPIPIPTKATGRAYEAIIPEIKDIPVVCEFPDVFPEDLPELPPEREVEFVIELKPGTAPVSRRSYRMPPNELAELKIQLQDLLEKGFIRPSSSPWGCPAIFVKKKDQTLWMCVDYRPLNEVTIKNKYPLPRIDILFDQLTGARVFSKIDLRSGYHQIHIRPEDITKTAFTTRGIAVDPSKVKDILEWKPPTMVHQVRSFLGLAGYYRRFIPDFSKLVKPITSLLKNDIKFNWSSKCNEAFEQLKTLLTTAPVLAQPDITKPFDVYCDASGSGLGCVLMQEGRVIAYASRQLRRHEEHYPTHDLELAAVVHALKIWRHYLLGNVCHIYTDHKSLKYIFTQSELNMRQRRWLELIKDYELEIHYHPGKANVVADALSRKVSCHCLTLESIILQRIIDAQKDDEGMKHIREKIMAGTAKCFKEDDQGVIWFNNRIVVPKNEELRQQILDEAHLSRYSIHPASTKMYHDLKQHYWWTKMKIEIARYVAKCDTCRRVKAIHMKTAAKGFDSIWVIIDRLTKIAHFLPVKAKYSVATYAALYIARILSLHGVPKTIVSDRGPQFVSKFWEELHRSLGTKLLHSSAYHPQTSGQTERVNQILEDMMRACVLEFPQKWDECLPLAEFSYNNSYQESIKMAPFEALYGRRCCIPLNWSKPGERYFFRPDMVKETEEKVQKIIHNMKKAQARQKSYADKQRMPLYFLEGDYVYLKVSPMKGVSRFGVKGKLAPRYIGPFLILERYGPVAYRLQLPETLFAMHNVFHVSQLKKCLRVPDRTIEVTDVVLEPDLTYSEHPIRVLDQKDRVTRRKTLKFYKIQWNQHSEDEATWETQDFLDKNFPRFLASCNL

SEQ ID NO: 334143 - protein, 391 aa, Zea mays
  unsure (1)..(391): unsure at all Xaa locations
  Clone ID: MRT4577_67853C.1.pep
MKIEIARYVARCDTCKRVKATYMKIAGPLQSLPIPTWKWEDISMDFIVGLPRTTKGYDSIWVIVDRLTKIAHFLSVKTYYLVLTYAELYIARILSLHGVLKTIVSDRGPQFISKLWEELHKSLGTKLLHSSTYRPQTSGQTERVNQILEDMLRACVLDFSQKWDECLPLAEFSYNNSYQESIKMAPFEALYGRRCRTPLNWSEPGERYFFRPDMVKETEEKVQKIIHNMKKAQARQKSYADKRRIPLYFLVGDYVYLKVLPMKGVSRFGVKGKLAPWYIGPFPILEQCGPVAYRLQLPETLSAVHNVFHVSRLKKCLRVPDRTIEVTDVVLEPDLTYSEHPIRVLDQKDRVTRRKTFKFYKIQWNQHSEDEATWETQDFLDXEFPRLFSLL

SEQ ID NO: 334144 - protein, 159 aa, Zea mays
  unsure (1)..(159): unsure at all Xaa locations
  Clone ID: MRT4577_67854C.1.pep
EEFKNEATLISKLQHRKLVRLLGCCTEGAERLLVYEYLANKGLDAILFXVNALALVRTDGAXKQCVMVVCFIIAVFTACADSERRSLLDWPTRLGIIKGVARGLLYLHQDSRLTVIHRDLKASNVLLDAEMRPKIADFGMAQIFGDNQQKANTRRVVGT

SEQ ID NO: 334145 - protein, 45 aa, Zea mays
  unsure (1)..(45): unsure at all Xaa locations
  Clone ID: MRT4577_67855C.1.pep
KHXXRRGWVKPSFAGTKNTTRVPRVAADSIPSFFIIFPPYYVFPN

SEQ ID NO: 334146 - protein, 32 aa, Zea mays
  Clone ID: MRT4577_67856C.1.pep
ENDYAIGSLQTKTTIRSAERHTNNIKSGELFR

SEQ ID NO: 334147 - protein, 215 aa, Zea mays
  Clone ID: MRT4577_67857C.1.pep
CELERTGQPVCIYEIYSGEGAWPFLHHGSLYRGVTLSKGGRRPRSDDVDAVTRLSVLDNPYYRDLLCEFGAIFAIANRVDTVHKLPWIGFQSWRAAGRKVSLSERAEETLEEITSGESNEDVIYYWSPMDMDQTSDFWLTCDSLNAGNCRSLFEDAFRAMYGLPENVLALPPMPNDGDHWSTLHSWVMPTPSFLKFIMFSRIFVDSLPSLNVNSS

SEQ ID NO: 334148 - protein, 327 aa, Zea mays
  Clone ID: MRT4577_67858C.1.pep
MADYVYGPGRTHLFVPGPVNIPDPVIRAMNRQNEDYRSPAVPALTKVLLEDVKKIFKTTTGTPFMIPTTGTGAWESALTNTLSPGDRVVSFLIGQFSLLVDGVSSICALDFRMDEWGVDVALTGSQKALSMPTGMGIVCASPRALEASKTARSVRVFFDWKDYLRFYDMGTYWPYTPSIQLLYGLRTALDLIFEEGLDNVVRRHNRLGTATRLAVEAWGLSNCCQKEEWFSDTVTAVVVPPNIDSAEVVRHAWKRYNLSLGLGLNKVAGKVFRIGHLGNLNELQLLGCLSGVEMVLKDVGYPVKLGSGVAAAAAYLSNSTPLIPSRI

SEQ ID NO: 334149 - protein, 97 aa, Zea mays
  unsure (1)..(97): unsure at all Xaa locations
  Clone ID: MRT4577_67859C.1.pep
MAGELMSLRVLERHFGVDEXAAVAPEELGALYRCLFTRFDRDGSGKVHRHEFRAEMKEVMLAVANGLGFLPVQMVVEEGSFLKVAVDRELGQVAKAA

SEQ ID NO: 334150 - protein, 96 aa, Zea mays
  Clone ID: MRT4577_6785C.1.pep
QAASATARAISDGLFFSTLVTPPPAADDPNCAVVAAHSKATYDEQWAAHKSSSKLMVIDFSASWCGPCRFIEPAFKELASRFTDAIFIKVDVDELA

SEQ ID NO: 334151 - protein, 403 aa, Zea mays
  Clone ID: MRT4577_67860C.1.pep
MADYVYGPGRTHLFVPGPVNIPDPVIRAMNRQNEDYRSPAVPALTKVLLEDVKKIFKTTTGTPFMIPTTGTGAWESALTNTLSPGDRVVSFLIGQFSLLWIDQQRRLGFDVDAVESEWGHGADLAALERRLREDAPRHAIKAVAIVHNETATGVTNDLAAVRALLDKHAHPALLLVDGVSSICALDFRMDEWGVDVALTGSQKALSMPTGMGIVCASPRALEANKTARSVRVFFDWKDYLRFYDMGTYWPYTPSIQLLYGLRTALDLIFEEGLDNVVRRHNRLGTATRLAVEAWGLSNCCQKEEWFSDTVTAVVVPPNIDSAEVVRHAWKRYNLSLGLGLNKVAGKVFRIGHLGNLNELQLLGCLSGVEMVLKDVGYPVKLGSGVAAAAAYLSNSTPLIPSRI

SEQ ID NO: 334152 - protein, 67 aa, Zea mays
  Clone ID: MRT4577_67861C.1.pep
PTHTHACMCMCCISSSSLVWPYVWRQTKAPFHLHHKMHQLKSIVNKQGCLAGWQLEMERASSLENPK

SEQ ID NO: 334153 - protein, 163 aa, Zea mays
  unsure (1)..(163): unsure at all Xaa locations
  Clone ID: MRT4577_67862C.1.pep
HAAEEQEDREHKSQERXKRHXXGHDEHTTRLQGAARXXQERKSDXKGTALLEXRPXGGPGRXXQRAXQEGGRDDAPATXGXHXDPAXPGGXXXXRPGPXAATXGRXQATXTGKGGHAAKPHEXNDPXGAAAXTGXSXQKNXXRENEPPQGAEPAREEKRTKAQ

SEQ ID NO: 334154 - protein, 59 aa, Zea mays
  Clone ID: MRT4577_67863C.1.pep
MVFVNPFFCVCKKQWNRFRPTPFCGTSLKGFPKKKKKKKKKKKKKKKKKKKKKKKKKKK

SEQ ID NO: 334155 - protein, 43 aa, Zea mays
  Clone ID: MRT4577_67864C.1.pep
SLKGFQCPVKVFLILRVDLHLLLLNPLHHRSQHIQQCPRYNLP

SEQ ID NO: 334156 - protein, 222 aa, Zea mays
  Clone ID: MRT4577_67865C.1.pep
MGPPSPPQRSCSQFCGGDNPLHSPPCHPHKISSAAAMALSSSRPKHLLRPLLRGFHASARALARVEPHEFSKPSEYLGSWEPAAEPREAWARLDRLRKGYASEVRELRRQYAYEVQLLQAERQRKADARAEAARAANQERKAAKLAAAQTRAAERRAFEEDFRQTLMKERAEKLESWRKKEKRKEEKKAIKKELLRRKSSMWLSEDKIEEQIQTAIMQTTPL

SEQ ID NO: 334157 - protein, 61 aa, Zea mays
  Clone ID: MRT4577_67866C.1.pep
SRWHYVFKYTMGFRKLQNNKKLFSDMHTRPVCLSSDSKTSLSTKQYIYFIDIEQKDVQLIL

SEQ ID NO: 334158 - protein, 109 aa, Zea mays
  Clone ID: MRT4577_67867C.1.pep
SVGQPSAASPGSRRHLGQCRSRAASPRRPRACTSCPWPGAPRTRSPRASRRPRTCELARRRMRLPAPWQPAVRAGGDVVMQIDRLPARHTVPKGKLFRNAAVETDAIAR

SEQ ID NO: 334159 - protein, 35 aa, Zea mays
  Clone ID: MRT4577_67868C.1.pep
ARPTSSRFCSGAAAAAATGAAGTLNRAERPQVYAA

SEQ ID NO: 334160 - protein, 109 aa, Zea mays
  unsure (1)..(109): unsure at all Xaa locations
  Clone ID: MRT4577_67869C.1.pep
PGFLFEGIGLNTKEFDMHVIIETNRTTARIFPAVLDVENPEFKRKLDRMVEINEKXIAVGESDDIAVVKNLKRIPLVAALVSELLATYLMPPIESGSVDLAEFEPQLVY

SEQ ID NO: 334161 - protein, 720 aa, Zea mays
  Clone ID: MRT4577_6786C.1.pep
MALSVSMEGIEARARDLGVDLSAVDLDSITLPAGEDFGIVSDDEEVLRGEDLPELEMGLSNIIVVDNLPVVPPEKFEKLENVIRKIYSQIGAIKENGLWMPVNPETKKTYGYCFIEYSTPQEAELAREKTNGYKLDKSHIFAVNLLDDFEKYMKVPDTWTPAEIKPYTAGENLLKWLTDEKARDQFVIRAGTLTEVYWNDARKLAPELVFQKQYWTDSFIQWSPLGTYMATVHRQGSQVWGGENGFERLMRFAHSMVKLIDFSPGERYLVTYSSHEPSNPRDTHRVVLNIFDVRTGKVMRDFKGSADDFTTGGNIGVSGVSWPIFRWGGGKDDKYFARLGKNIISVYETDTFSLLDKKSLKVENVVDFSWSPTDPIISLFVPEMGGGNQPARVSLVQIPGKEELRQKNLFSVSDCKMYWQNSGEYLAVQVDRYTKTKKSTYTGFELFRIKERDIPIEVLELENKNDKIIAFAWEPKGHRFAIIHGDGPKPDVSFYTMRTSNNTSRVSKLTTLKAKQANTLYWSPAGRFIVLAGLKGFNGQLEFYNVDELETMATGEHFMATDIMWDPTGRYLATAVTSVHEMENGFQIWSFSGKHLYKVSKDHFYQFIWRPRPPSLLTAEKEEEISRNLKKYSKKYEQEDQDAFNQLSEQDRKRRTQLQEEWDSWVAKWKQMHEEERAYRRELRDGEASDDEEEYEAKEVEVEEVVDVRQEVLAFDLDQE

SEQ ID NO: 334162 - protein, 37 aa, Zea mays
  unsure (1)..(37): unsure at all Xaa locations
  Clone ID: MRT4577_67870C.1.pep
EYRAXRMASLNPTLXTRKRLSAAFLPLLPLADLQKSD

SEQ ID NO: 334163 - protein, 99 aa, Zea mays
  Clone ID: MRT4577_67871C.1.pep
TVLPSFSSDEPPEPPSGSLVSTTSQNSSRSANFLLGSGSPANLSVFELVGPLTNTHSYYGPYSAKALTQGLFLRKKATIRGVSVGLFGVPVLCKLTHQS

SEQ ID NO: 334164 - protein, 92 aa, Zea mays
  Clone ID: MRT4577_67872C.1.pep
SNQIIQGQIGARAPAQGTVKNGPDRQIHSKGKGGSRLLTHDARSGAGASQSHRRWMDRQGYGMKRKEKHRLRLRLRTSKAEAWRGTETPRER

SEQ ID NO: 334165 - protein, 71 aa, Zea mays
  Clone ID: MRT4577_67873C.1.pep
FVLRPMTIQYTGGILNSCSIQAQPSCVDLPLGWKKPQSCLIFPNPLFRILGRHAGRRSVAFPFSGPYLQSR

SEQ ID NO: 334166 - protein, 140 aa, Zea mays
  unsure (1)..(140): unsure at all Xaa locations
  Clone ID: MRT4577_67874C.1.pep
RVRPASAPRRWAGAATIALVSAVVTLLIVLLIIAIALMVVRRRARGSGEVNCTAFSSSSSGRANRQLVVKGSARREFRWEAIMEATANLSDQFAIGSGGSGTVYRAELXTGETVAVKRIVHMDSDMLFHDKSFXREVKIL

SEQ ID NO: 334167 - protein, 81 aa, Zea mays
  Clone ID: MRT4577_67875C.1.pep
FFVPMRFLIHILVICVDLVSWVQQETTLSYLYVGPASVMMKGMPIWSSGLHMDPFSASEATVAVPAKSARIYRMDSRFFPA

SEQ ID NO: 334168 - protein, 119 aa, Zea mays
  unsure (1)..(119): unsure at all Xaa locations
  Clone ID: MRT4577_67876C.1.pep
SFPPPGWFLASWALAPGRAFLGCFPASWSVRSSGFLLAGVCPLVVAWRRAVLGLLVSFLCSSALPLLVRVISFSGAAAGGAPAGSAVAGGRFRVRRLLRRLALRRXPPPLPSLAGAALL

SEQ ID NO: 334169 - protein, 399 aa, Zea mays
  Clone ID: MRT4577_67877C.1.pep
MEDAGRQTEIEWGGGGGADAVLGLAGGASSVSLCYHQAFGPHDDLVLLEAADDLLPDLLQGRVTVRGRPDEDAVLCTPCATYSMKFVGTSNSMFLIPPGEPSAKCLRPDNTSGNANALAATIKLAPGSIELVRVAPRLDKLKSLLRERPYILDEDIGDDDLQHKNKEGLYTWQDLCKLIQASDGELLDALNALSAVDIDGFWRTVDASSVNTILDMILHNSVLRDWPLKAMPESDVLSVMGSDGFTHNIVTHCLNRFGTKVEQEARSFWSLDEKRVCLQFARRALGAGKMKLSNFMEKWKRSIPSGMCCPDLQMLEGEVLCEKLGAETWVHAFSVTDLPLAPAERFAALFRERAKWEWKDLQPYIRDLHVPGASSEGLLIKYTRRSQPNAEAEPIFTAR

SEQ ID NO: 334170 - protein, 340 aa, Zea mays
  unsure (1)..(340): unsure at all Xaa locations
  Clone ID: MRT4577_67878C.1.pep
MPGDVATSPAPAPPSVSSSSQNHHHHGPTTARGLLCHAVAGASAGVVAATFVCPLDVIKTRFQVHGWPKLTTGTIGGSVIIGSXQQIAQREGFRGMYRGLSPTVLALLPNWAVYFTVYEQLKSLLSSNDGSHQLSLGANVVAASCAGAATTTVTNPLWVVKTRFQTQGIRAGPMPYKGTLAALRRIAHEEGIRGLYSGLVPALAGISHVAIQFPAYEKIKAYLAERDNTTVEALSFGDVAVASSLAKVAASTLTYPHEVVRSRLQDQRAHSDARYKGVVDCIRKVYHKEGVAGFYSGCATNLLRTTPAAVITFTSFEMIHRFLLDLFPAESEPHIQPLKH

SEQ ID NO: 334171 - protein, 66 aa, Zea mays
  unsure (1)..(66): unsure at all Xaa locations
  Clone ID: MRT4577_67879C.1.pep
QVHGXPAGPRVCLGKEFAYRQMKIFAAVLVYAFRFEMWEANATMGYRPMLTLKMDGPLYVRASLRQ

SEQ ID NO: 334172 - protein, 49 aa, Zea mays
  unsure (1)..(49): unsure at all Xaa locations
  Clone ID: MRT4577_6787C.1.pep
MVIDFSASWCGPCRFIEPAFKELASRFTDAIXHQGRRRRARGTPRLLRP

SEQ ID NO: 334173 - protein, 88 aa, Zea mays
  Clone ID: MRT4577_67880C.1.pep
ALGSLISGVLSRRKGLGSRSSLVCLTASSARCICTGGAQSDLFSRIAAHILGCPPIRTRFGGRVKLVCRFRSCGWDRSSCTPGGAYWA

SEQ ID NO: 334174 - protein, 139 aa, Zea mays
  Clone ID: MRT4577_67881C.1.pep
VGAELGEHHEDTHDHEEFEFGEVFVHQLIHTIEFVLGAVSNTASYLRLWALSLAHSELSTVFYEKVLMTAYGFNNVFILIIGVVIFIFATIGVLLVMETLSAFLHALRLHWVEFQNKFYEGDGYKFAPFSFALIREEED

SEQ ID NO: 334175 - protein, 75 aa, Zea mays
  Clone ID: MRT4577_67882C.1.pep
DFHSFFFPRLCRRNLPPAHLPTPPTRLHDPNTTPSAFAPPSRQDQSTATTDGWTTSYQLGSINKRSNQKAPEGTC

SEQ ID NO: 334176 - protein, 284 aa, Zea mays
  Clone ID: MRT4577_67883C.1.pep
SSCNSLKMKMPILLGVAQMNLGIVISYFIAIIFWISPTVWHQFIPQLIFLNSLFGYLSLLIIIKWCTGSKAELFHFLIYMFLSPTDDISENQLFGGQKTVQLVLLLLALVSMPWMLIPKPLLLKKQHQQRHQGHQYAMLQGIDESVGAELGEHHEDAHDHEEFEFGEVFVHQLIHTIEFVLGAVSNTASYLRLWALSLAHSELSTVFYEKVLMMACGFNNVFILIIGIIVFIFATVGVLLVMETLSAFLHALRLHWVEFQNKFYEGDGYKFAPFSFALIREEED

SEQ ID NO: 334177 - protein, 51 aa, Zea mays
  Clone ID: MRT4577_67884C.1.pep
QKTRKVPAPEEPFMKGSFKAPEPGKLVLGVNNPGSRKKKLLSRFKVRSPPP

SEQ ID NO: 334178 - protein, 253 aa, Zea mays
  Clone ID: MRT4577_67885C.1.pep
MFGSTNPFGQSSTSPFGNNNSFGTPQGFGQSSTAANNPFAPKPFGSPTTPFGAQTGSSLFATTSTGAFGQQQSAPAFGTTSTGAFGQQQSTPTFGTPSSSQFGSSTPAFGASPTPAFGATSSGSLFGQKPSFGGFGSSPSQSSPFGSTFQQTQPTFGTTPAFGTMTTPAFGTSTPAFGTTTAPAFGATTTPAFGSTSTSLFGASSTPVFGSTAFGTSATGFGTSGTTAFGVSSTTTGFGSSSTPSFGTSASVF

SEQ ID NO: 334179 - protein, 93 aa, Zea mays
  unsure (1)..(93): unsure at all Xaa locations
  Clone ID: MRT4577_67886C.1.pep
FHTMPISSDPAPARRCVIHNRVVKXVISCSTPTSPARSKHDLVVVPRISNKSQESGEDEASSSIFLKRSTNCLDRKIITDLADSSQLLKRYVN

SEQ ID NO: 334180 - protein, 245 aa, Zea mays
  Clone ID: MRT4577_67887C.1.pep
MFGSTNPFGQSSTSPFGQTSFGTPQGFGQSSTAANNPFAPKPFGSPTTAFGAQTGSSLFATTSTGAFGQQQSTPAFGTTSTGAFGQQQSTPTFGTTSSSQFGSSTPAFGASPTPAFGATSSGSLFGQKPSFGGFGSSSSQSSPFGNTFQQTQPTFGSSTFGSSTPPAFGATAPAFGTTTPAFGTTTAPAFGATTSPAFGSTSTSLFGASSAPMFGSSAFGTSATGFGTSGTTAFGVSSTTPRVGS

SEQ ID NO: 334181 - protein, 99 aa, Zea mays
  unsure (1)..(99): unsure at all Xaa locations
  Clone ID: MRT4577_67888C.1.pep
DYRQDESYNFEGDIALLDLENSVTLXPNLLSICLADNDTFYDLDLMGYVTGFGVMEEKIAHDLRFGRLPVANPQACENXLRGKNRMDVFSHNMFCXGHP

SEQ ID NO: 334182 - protein, 51 aa, Zea mays
  unsure (1)..(51): unsure at all Xaa locations
  Clone ID: MRT4577_67889C.1.pep
PPSTPPLFFFFFFEELTVFIXLRPGILLALGPLXIYQFSSPQSSPPVSIPS

SEQ ID NO: 334183 - protein, 118 aa, Zea mays
  unsure (1)..(118): unsure at all Xaa locations
  Clone ID: MRT4577_6788C.1.pep
MAPRPRKRASRPKPRPGSRRGGGGGDDHPFFESEPKRRRGGRDEDIESEDSDDDGVAAFGGGFDEDGDERGREEEDEETVGEKKMRMTKEWLKKVTEVVKRGQEDDDXDEGGRRVGGD

SEQ ID NO: 334184 - protein, 61 aa, Zea mays
  Clone ID: MRT4577_67890C.1.pep
DLSAGCKSLDWALVIHAPPSVSPCSGCCKKRVSGHPLGMAPALHLVNVVFLQFANANANAT

SEQ ID NO: 334185 - protein, 176 aa, Zea mays
  unsure (1)..(176): unsure at all Xaa locations
  Clone ID: MRT4577_67891C.1.pep
MVSTLEQLLIAAAFLVVAAAASTVPVSPAAAATRPYHGGGCYSHFFAFGDSLIDTGNFXRLLHGETFFHRPTGRWSDGRLIVDFIVERLGYPRWPPYLDGKSKDDFRHGANFAVASGTALNQLLFKKHGLNVNGITPYSLGVQIGWFKKVLAMLASNEHGMRVYVHIASNYHVLHT

SEQ ID NO: 334186 - protein, 86 aa, Zea mays
  Clone ID: MRT4577_67892C.1.pep
PVAAFFFFFFFFFFFFFFLFFLDGGFNLIFSKSHNIFGPRNITAKINAVPRFKGKQHVWGGIIWQFYKQAYLENESTLHKKSGGQE

SEQ ID NO: 334187 - protein, 337 aa, Zea mays
  unsure (1)..(337): unsure at all Xaa locations
  Clone ID: MRT4577_67893C.1.pep
MVSTLEQLLIAAAFLTVAAASTVPVSPAAAATRPYHGGGCYSHFFAFGDSLIDTGNFIRYSTAPGPVAHSPYGETFFHRPTGRWSDGRLIVDFIVERLGYPRWPPYLDGKSKDDFRHGANFAVASGTALNQLLFKKHGLNVNGITPYSLGVQIGWFKKVLAMLASNEHERREIMASSLFLVGEIGANDYNHPFFQNRTLDFVDSLVPLVIRSIGRSLESLIQLGAKTVYVPGIFPLGCLPRYIFLFRDSGAAGCLRWLNDLTSRHNXRLLRDKLAGLRRAYRDVSVAYVHYYAEDTVIYPPPQSYGPNARTPSPYMLPPSGPAPPYYGQHYPTMYEP

SEQ ID NO: 334188 - protein, 65 aa, Zea mays
  Clone ID: MRT4577_67894C.1.pep
FMIVLAVNRFSYGFYWSYVSMHYHDACCMLCVRSPWITMPFSRLRLIGLSMISCLITTALSMHHG

SEQ ID NO: 334189 - protein, 50 aa, Zea mays
  Clone ID: MRT4577_67895C.1.pep
SLYASHSTSSWYACGDRTGSSGLARAFESSQTLGQKVVLPPFLFISRWMV

SEQ ID NO: 334190 - protein, 46 aa, Zea mays
  Clone ID: MRT4577_67896C.1.pep
RTTIVGLLAESFDDTINSLTSKLSPHWQVRQEGSLDWDFEYAELML

SEQ ID NO: 334191 - protein, 109 aa, Zea mays
  unsure (1)..(109): unsure at all Xaa locations
  Clone ID: MRT4577_67897C.1.pep
GIGGEGSGEDIMRERNGVHVAYGTPSRERDMNIRRTLGTRYINMVWLDEADETLRXRLKVQIHDRYQYLLQXHEVMLIHAHLXDEILEMTMNXMTEPKTMHGKRDQLTL

SEQ ID NO: 334192 - protein, 240 aa, Zea mays
  Clone ID: MRT4577_67898C.1.pep
MTLTTVAFTVRRGEPALVGPAAPTPRETKRLSDIDDQETLRGQMPFLFLYRGGVHVRADNDDDPACVIRRALGEALVPFYPLAGRLREVEGRKLVVDCTGEGVLFVEADADVRLDELEATGLRPPFPCMDQLLFDVDGSSGVLHCPLLLIQVTRLLGGGFVLALRLNHTICDAIGLAQFMSAVAELARGLPAPTVAPAWSRELLEARNPPKPAFPHREFDAAPPPPPPPPDDMVTRTFTS

SEQ ID NO: 334193 - protein, 92 aa, Zea mays
  Clone ID: MRT4577_67899C.1.pep
KAIVQHHSQTVFNGVSSVTQSTIEQRLAMLLYNGVFRAVFRAIVRVLSHYLHPFRAFHSQNSVHRFTLLWRSQHRYFISDCYLMAYLFFLFR

SEQ ID NO: 334194 - protein, 71 aa, Zea mays
  unsure (1)..(71): unsure at all Xaa locations
  Clone ID: MRT4577_6789C.1.pep
MADHHLGATGGGGGYGDLQRGGGMHGEAQQQQKQGAMMTALKAATAATFGGSMLVLYGLILAXGTVIALTA

SEQ ID NO: 334195 - protein, 96 aa, Zea mays
  Clone ID: MRT4577_678C.1.pep
LPSCIARFPVRKKNHLFSLSLYRFFLGFGRFVFSYGSAGFPVRNWAFSSSPFLSCLFSPLAPRSLRFLVRFREFLCIVSVSLFSPPPRFVHAFAWL

SEQ ID NO: 334196 - protein, 100 aa, Zea mays
  unsure (1)..(100): unsure at all Xaa locations
  Clone ID: MRT4577_67900C.1.pep
MASPRGLFDMTVGGAPAGRIVMELYAYEVPKTVENFRALCTGEKGEGKSLKPVHYKGSTLHRVIPEFMCQGGDITRGNSTGGXFIFCEKFHYVKFVRKHT

SEQ ID NO: 334197 - protein, 85 aa, Zea mays
  Clone ID: MRT4577_67901C.1.pep
KTILSPLWGGCNKKGAYSLSKISCLFEWVAEGPSFEMGGIPPRYMGRQPQVMEDTQEIGAYMFRGTVPAVHMAPENVRWMVSQFV

SEQ ID NO: 334198 - protein, 55 aa, Zea mays
  unsure (1)..(55): unsure at all Xaa locations
  Clone ID: MRT4577_67902C.1.pep
MASKRTLKELMQLQKDPSTSCSSSXDADDMLHXQATIMGPPYSPYAGGGSLGTIR

SEQ ID NO: 334199 - protein, 39 aa, Zea mays
  Clone ID: MRT4577_67903C.1.pep
IHYLSNYWLIQLLNIYCDNFLLDYHSASAIVKVVDFMHF

SEQ ID NO: 334200 - protein, 198 aa, Zea mays
  unsure (1)..(198): unsure at all Xaa locations
  Clone ID: MRT4577_67904C.1.pep
MTSILMVLQMIIPAIPYSLQHTIITRWCLFFIQQEVYVAVSIGLDVKPGSTVKCEPGYGFMLHLSQAALEESKNSDNALXLMYVKIDDQKLAIGILSVDKNPHIQFDLVFDKEFELSHTSKTTIVFLTGYKVEQPFKEDGMDLDSEDEDEELNVSLVKENGRAGGKIQKSEDKRRCLGWAKGKMVTDVGNDDLGGPYA

SEQ ID NO: 334201 - protein, 73 aa, Zea mays
  Clone ID: MRT4577_67905C.1.pep
PWPETTPDLPFKLLDSKPKQEDKGFSKANKSFWPPGSPKRKGAPPGPNNLCKTDWPFYVYLTPRKNTVASISC

SEQ ID NO: 334202 - protein, 62 aa, Zea mays
  Clone ID: MRT4577_67906C.1.pep
RQNFFLIFHSLAAPGYFSNTKGPPLKHKGHFQGETPFPTQGHLHSMEKKVGPHPNPLPTPPQ

SEQ ID NO: 334203 - protein, 71 aa, Zea mays
  Clone ID: MRT4577_67907C.1.pep
HVMQRNIPGPCIMDKLLAPTYELVSIIIQSRSAKRQCVERIVEQNSMKMVIVLDVCLALLADSTYAMQMPC

SEQ ID NO: 334204 - protein, 308 aa, Zea mays
  unsure (1)..(308): unsure at all Xaa locations
  Clone ID: MRT4577_67908C.1.pep
MEFWGLEVKPGSTVKCEPGYGFVLHLSQAALGESKKSDNALMYVKIDDQKLAIGTLSVDKNPHIQFDLIFDKEFELSHTSKTTSVFFTGYKVEQPFEEDEMDLDSEDEDEELNVPVVKENGKADGKKQKSQEKAVAAPSKSSPDSKKSKDDDDSDEDETDDSDEDETDDSDEGLSSEEGDDDSSDEDDTSDDEEEDTPTPKKPEVGKKRAAESSVLKTPLSDKKAKVATPSSQKTGGKKGAAVHVATPHPAKGKTIVNNDKSVKSPKSAPKSGGSVPCKSCSKSFISETALQAHSKAKXMGASESQVQ

SEQ ID NO: 334205 - protein, 104 aa, Zea mays
  Clone ID: MRT4577_67909C.1.pep
CCTAPPPSGTLVMKPVLPAKPALVGTSASLADSTAPTTRATTNVKARSCRTMDDTSNNPGRAGGPCSTLCELGYPWHHVWLEKLFGLAIFGEEFSHVENKQLKL

SEQ ID NO: 334206 - protein, 64 aa, Zea mays
  unsure (1)..(64): unsure at all Xaa locations
  Clone ID: MRT4577_6790C.1.pep
AAFSGGSDSCYDELVKHTDPRDVRSGMANDAYLGPVINPQAXDRICKLLQSGVNSDARILLDGR

SEQ ID NO: 334207 - protein, 83 aa, Zea mays
  Clone ID: MRT4577_67910C.1.pep
SSSASTSCTSPFVGVYLHMRDVLSMSGIGIVARIDVAQWYQVSYHLLSTSVSVDPCAIASAVCSTVWAMRTRSLPRAFGCCWS

SEQ ID NO: 334208 - protein, 72 aa, Zea mays
  Clone ID: MRT4577_67911C.1.pep
HIHSFGTNRAKKRSLIRPPLAYTRMNWNVSHHPGDVGLALRVLGAPEGYFRFYLHDVGGVQRPKIVIANRGL

SEQ ID NO: 334209 - protein, 44 aa, Zea mays
  Clone ID: MRT4577_67912C.1.pep
RESYKIKDKFYRVLNSFLGPESSLGNHYLNLKRTQGKFTIGLLQ

SEQ ID NO: 334210 - protein, 68 aa, Zea mays
  unsure (1)..(68): unsure at all Xaa locations
  Clone ID: MRT4577_67913C.1.pep
RYISTMLLKLQYVYGCFRNTIKRRFFDSVNPWWVLSFCISNELXGCANAADPQGIRACKLSYGESITV

SEQ ID NO: 334211 - protein, 90 aa, Zea mays
  unsure (1)..(90): unsure at all Xaa locations
  Clone ID: MRT4577_67914C.1.pep
ACARPRHRRITLVPDRATKTLFILDRGVGVTMSDXLVNNLSTIASSGTRERMEALAADADVPMIAQRGVCFYSGYLGGERVVETTKHNDD

SEQ ID NO: 334212 - protein, 45 aa, Zea mays
  Clone ID: MRT4577_67915C.1.pep
MAEADQSECFTRESKTSSSLPNCLIYDNHTLGLLPSTDRSLLRSN

SEQ ID NO: 334213 - protein, 55 aa, Zea mays
  Clone ID: MRT4577_67916C.1.pep
EFFPNFRGKIFSPKILNPNRSFKPLLLPLPCNFIFDPSFWAQLHNFPEGGGKGCV

SEQ ID NO: 334214 - protein, 104 aa, Zea mays
  Clone ID: MRT4577_67917C.1.pep
CADCRGLALGRGQLPVPVRLAACTSSTTIGLGLWASSTAAPGAGALDVVGPGRADGLWRCSLRGHLRRWPEPPCLGRRAATQWLTGCGGCRVLASDRGAATLAG

SEQ ID NO: 334215 - protein, 121 aa, Zea mays
  Clone ID: MRT4577_67918C.1.pep
SCSLEARGGGRGDSARPSRSRGPGSTSSRDASSCSYAGTTDQPLGSTPWGSFIQGRTSSDPSCLRLTTHRVPKFWGGSCWCHNGCRLLYIEGQYSVVLRQKEVVAVGFTLVFVVSVYRVIV

SEQ ID NO: 334216 - protein, 58 aa, Zea mays
  Clone ID: MRT4577_67919C.1.pep
RHMPWQNFDPMFFSKPGATRVIMPGLVLADSFFPKTRNVMLVGLSFIERKNLVKCWMF

SEQ ID NO: 334217 - protein, 62 aa, Zea mays
  Clone ID: MRT4577_6791C.1.pep
RGIFFIVSAVFSGASDMQGWHFLEGCVFASGILWRLASSCRVSYLSMVNHLSGVICGNGLER

SEQ ID NO: 334218 - protein, 48 aa, Zea mays
  Clone ID: MRT4577_67920C.1.pep
VCWSSNQYRVYYFGSNNRGVDIYSGANAGSGLKCHSKAIQSLCMGICV

SEQ ID NO: 334219 - protein, 95 aa, Zea mays
  Clone ID: MRT4577_67921C.1.pep
HLGTLAGLGPELLPGVTGSVAPGSHDLVVGWCDSHADSVGGGHLQYHVSVHLAPSTAPQALPAGAAPAGASGAAHPSSSQFHLQDLLEYNDQELI

SEQ ID NO: 334220 - protein, 42 aa, Zea mays
  Clone ID: MRT4577_67922C.1.pep
AKGSEQQHKKKKKKKKKKKKKKKKKKKKKKKKKKKKKKKKSL

SEQ ID NO: 334221 - protein, 77 aa, Zea mays
  Clone ID: MRT4577_67923C.1.pep
GINLFIASCTSRSPNRFSLDRCPSLSPPMYESSVARAYGRRHIRCHGHGPGALCPSGRPSSPCPCRTFKPPCKRQRV

SEQ ID NO: 334222 - protein, 132 aa, Zea mays
  unsure (1)..(132): unsure at all Xaa locations
  Clone ID: MRT4577_67924C.1.pep
MVRVRGLNDTLKCMYNPEKIGKRHDMIKAQFKDMMKLLTGMLSHGYMAEFXSLKTHRSCKMXVVPLNXVLNKXALLCPRYXDCSARDIVGWTARLLPDRLFGSIVLTTSAGIMDHEEARRKSVRGKVLGFFY

SEQ ID NO: 334223 - protein, 84 aa, Zea mays
  unsure (1)..(84): unsure at all Xaa locations
  Clone ID: MRT4577_67925C.1.pep
MGLSPNFGRSXAGRCVGGVSVXYPLMIAPVYAGEISCAHIAGSVTSGGEXVISFFILIGDVANYLLAXLPLGYGWGAMLGPRRA

SEQ ID NO: 334224 - protein, 62 aa, Zea mays
  Clone ID: MRT4577_67926C.1.pep
IPPPPLVSHSFLKRTKKIKILWVGMASPGQMTASNLLRTEGFPEKKKKKKKKTQSSALLPLL

SEQ ID NO: 334225 - protein, 54 aa, Zea mays
  Clone ID: MRT4577_67927C.1.pep
PNPIFGPFKPLYAEFERWNFRNGGLFHGTDEGCSPASKSPVITSERLTSPLTRG

SEQ ID NO: 334226 - protein, 63 aa, Zea mays
  Clone ID: MRT4577_67928C.1.pep
FGTRLAWPLDRGGIGEALQMGRNASRGPLPTVQQQEVFCLLILACFISHTYDYINRPVVAAPI

SEQ ID NO: 334227 - protein, 56 aa, Zea mays
  Clone ID: MRT4577_67929C.1.pep
DAIDTQPDWYYLACLARNGISTWACHISLLSPLVPNDYQIQLTGTTPLDQVPNKAK

SEQ ID NO: 334228 - protein, 328 aa, Zea mays
  Clone ID: MRT4577_6792C.1.pep
MEDLYSIHPGISRAGGAATAASEVSGVAGGPGSPPPPPSQPPPPPPADLTELVKAQIAGHPRYPSLLSAYIECRKVGAPPEVATLLEEIGRERCAAASAGGEVVGMDPELDEFMETYCRLLERYKEELSRPFDEAASFLSSVRTQLSSLCGGAASLSAIYYTTANPETTSSFNIALVYEMVGSSEEDEACSGGDTEATEPGQQEHSSRLADHELKEMLLKKYSGCLSRLRSEFLKKRKKGKLPKDARSALMDWWNTHYRWPYPTEEDKVRLAAATGLDPKQINNWFINQRKRHWKPSEDMRFALMEGVTGGGPSSGTTLYFDTGTIGP

SEQ ID NO: 334229 - protein, 79 aa, Zea mays
  Clone ID: MRT4577_67930C.1.pep
PTRPPTRPELAHLVICPILAKLKPGIVGQSINSSLKVSNLPLGRLGEKVRFCIQGFFVYFLGFLKIVFGGVYAQSMFYF

SEQ ID NO: 334230 - protein, 139 aa, Zea mays
  unsure (1)..(139): unsure at all Xaa locations
  Clone ID: MRT4577_67931C.1.pep
GRVGERVSTLQNEPVGLGLDGSGGPEPPATQAHDVPQHPQPEPEPRLPQQPEGPYVYQPPKQSSSSSSGTKRPAGASPTLIRRKEKAKKLLAVCLTLCCILFWLLVVCIGLAILVVYLLYHPKGPRIHVSTXTLNAGYI

SEQ ID NO: 334231 - protein, 52 aa, Zea mays
  Clone ID: MRT4577_67932C.1.pep
SLGSQGTAGKGAEMVALVALLAICASATHVTHILGPLPPIVPMGTMKPCLQD

SEQ ID NO: 334232 - protein, 259 aa, Zea mays
  unsure (1)..(259): unsure at all Xaa locations
  Clone ID: MRT4577_67933C.1.pep
MADAVRDGQTALALRLAKHLAEDGFGGKSENIAFSPLSIHAVLALLTAGARGATEAQLLSFLGAPSAADLAAFVRRVAETVLADQMEDESAPCVLFGGGVWVNASCGGLKKAFRDVATKSYKSQARTVNFADAPEEAVEIMNDWVKKATNNLINSLFSPSDIKADTALVVANAVYFKGLWRNPFHRANTAXATRQFHLLDGSCVKAKFMSKYSQSQFISLRXGFKVLKLPYLPWKTKADAAHAASLRSPRSQRRCSCRR

SEQ ID NO: 334233 - protein, 101 aa, Zea mays
  unsure (1)..(101): unsure at all Xaa locations
  Clone ID: MRT4577_67935C.1.pep
CFYKXRXXXKXXRXKXXNLDAKKXXXXRXXXRAXAGQAXXGEXDXXXQQXXEGXXXARPKTGXXTRXAXXXXEAXXPRXGXGXPKPETRXXKTQKGHGXGG

SEQ ID NO: 334234 - protein, 105 aa, Zea mays
  Clone ID: MRT4577_67936C.1.pep
WRRCLRFLFVGGWFAASLLKDVVGGCLRFDHVHLVDCFELSVGVLALLCMCPLWARSRSCASSMRPSPKEPTLMGVPAIAVEEIAMVEAAIARAERLSVKVWTGA

SEQ ID NO: 334235 - protein, 64 aa, Zea mays
  Clone ID: MRT4577_67937C.1.pep
DMSTSMPCHLDTTRLDQNTSIVDGLDHAILVDDSRQSELARVPFSKGKHEIKLCCDRVRADAWV

SEQ ID NO: 334236 - protein, 49 aa, Zea mays
  Clone ID: MRT4577_67938C.1.pep
DGLDLNCYGTYNRTRRSCNRKSRPDKARTPKCATHKARELKDDAEDRDD

SEQ ID NO: 334237 - protein, 97 aa, Zea mays
  Clone ID: MRT4577_67939C.1.pep
RLTRSHAWQARPCLRAPPSSPSLFQEPKMFSSPHIMVPRTRSAPCLLGAIHLCSFHGEALTLVNIEWNVLGHHTPGVWRKVQAKNRCGCTIYLVQGI

SEQ ID NO: 334238 - protein, 53 aa, Zea mays
  Clone ID: MRT4577_6793C.1.pep
VSVLRLSSSSPLVLGRSRGPLDSPVLSLLAVPVLPRRPGRGGSLGLPVSRLVA

SEQ ID NO: 334239 - protein, 89 aa, Zea mays
  Clone ID: MRT4577_67940C.1.pep
RIPVTTDLAAMLNQRRGWPSTQSTTRLAIVDTVKFPTRRELWQTFLRTPSTTFALLAHGSLRRAPQPSSCNRGGPRNPLTPAGLEGPNR

SEQ ID NO: 334240 - protein, 137 aa, Zea mays
  Clone ID: MRT4577_67941C.1.pep
LTEHVYGYNPVPYGAADNNVGRDKSNAGALAKALYTSIAIPMLLCCFIYSLLYRTYPRDRERARMDSLITPELQQIELERCHGQVDYYSGRKDGSTVFDMDYRGIDAYDDNDEKGLIDQQAKQSGNVKWHRSHSQNL

SEQ ID NO: 334241 - protein, 47 aa, Zea mays
  Clone ID: MRT4577_67942C.1.pep
EIKEKNVILRIHLNPPPTKTSEWCFFPTEPGECLNCLSDRDISISSI

SEQ ID NO: 334242 - protein, 35 aa, Zea mays
  Clone ID: MRT4577_67943C.1.pep
APPGCPNSWAPLSAPSIRFFERAFVSLLYQLESYL

SEQ ID NO: 334243 - protein, 248 aa, Zea mays
  unsure (1)..(248): unsure at all Xaa locations
  Clone ID: MRT4577_67944C.1.pep
MRGTMPATDSSSSSSPAAAPLSSIGRSIRSLRRDQNQIHSFPPPPDATDAFQRRAAQLLADLPAADDVLSLAWTRRLLESFLLCLEEFRALLFGSGDSPAARPPLDRLVADFSDRAVKALDLCNAVRDGLDLVRQWRKHLAIAAAVLASSSDSSSPLGEAQICRARKALTDLTILMLDDRDXGGVVGQRNRSFGRANEKPPRHHRRSSSGGSSGSGSGSHXRSLSXSVSRXWSXARQLQAIXGGLPVP

SEQ ID NO: 334244 - protein, 53 aa, Zea mays
  Clone ID: MRT4577_67945C.1.pep
INKIKKKKKKKKKKKKKKKKKKKKKKKKKKKKKTKKKPTRPRTRGRTRGRTRG

SEQ ID NO: 334245 - protein, 33 aa, Zea mays
  Clone ID: MRT4577_67946C.1.pep
VKSGLSQSGGCHTVRILFKSGDEIQQPLGAHAR

SEQ ID NO: 334246 - protein, 362 aa, Zea mays
  Clone ID: MRT4577_67947C.1.pep
MAAPCGRGGGTLTLVLVALSAAFLTYNVLISFHSSLQPLPSSFPTATASRRFGAAGSARRRAFHTAVTASGSAYNTWQCRVMYHWFKEARRAPGGDEMGGFTRILHSGKPDEFVDEIPTFVADPLPDGDQGYIVLNRPWAFVQWLQKADIKEDYILMAEPDHIIVKPIPNLSRDGQAAAFPFFYIEPKKYENVLRKFFPEDKGPITKIDPIGNSPVIIEKESLGRIAPTWMNVSLAMKKDPDADKSFGWVLEMYAYAVASALHGVGNILRKDFMIQPPWDLEVGDSFIIHYTYGCDYDMTGKLTYGKIGEWRFDKRSYTDKPPPRNLPLPPHGVAQSVVTLVKMVNEATANIPNWDSYAAAF

SEQ ID NO: 334247 - protein, 67 aa, Zea mays
  Clone ID: MRT4577_67948C.1.pep
DILSGRVPSREEVPDRVHKMLPVLDTSILWVNRVCGLKTGEYPKVKPALANMVSAIKLKRTHLESAE

SEQ ID NO: 334248 - protein, 122 aa, Zea mays
  Clone ID: MRT4577_67949C.1.pep
AVLPTSVTLVLMYFVDVHNPHERYEKKFLDAFSLIAVTVAGYLMILIIYGQVFPISSAVQSVCFVVLLLLVMSPIAVAAKAQTPESIAHQGSISEQRAGLLRKEVTEDSENASSSTTALGGS

SEQ ID NO: 334249 - protein, 56 aa, Zea mays
  Clone ID: MRT4577_6794C.1.pep
LRLIIFLVLCPNIYKYKYPSKSGLMLTYPDEMMCNLYWNIQPFSDSVCRDSILVIL

SEQ ID NO: 334250 - protein, 80 aa, Zea mays
  Clone ID: MRT4577_67950C.1.pep
PTQYIYLQTFQNLFIMGTSNFLHIFCTTPHTSKLVKLNLLCQCYPIFSLYKYFSKPSDLRVHLTSKIFLWEMEPPCGYLA

SEQ ID NO: 334251 - protein, 630 aa, Zea mays
  unsure (1)..(630): unsure at all Xaa locations
  Clone ID: MRT4577_67951C.1.pep
MATWRLRRAGAALAASSTLAAVLAASSASATDPSAAALEAARQRVARSGATPPLRDAQRAALAGSTPAEPLDVLVVGGGATGCGVALDAATRGLRVGLVEREDFASGTSSRSTKLIHGGVRYLEKAVFNLDYGQLKLVFHALKERKQVIENAPHLCHALPCMTPCFNWFEVVYYWFGLKLYDLVAGRRLLHLSRYYSVDESVELFPTLAKNGHNCSLKGTVVYYDGQMNDSRLNVGLACTAAVVGAAVLNYAEVVSLIKDESGERIIGARVRDTLSGXKEFETFAKVVVNAAGPFCDSVRKMADSTVAPMICPSSGVHIVLPDYYSPEGMGLIVPKTKDGRVVFMLPWLGRTVAGTTDSNTAITMLPEPHEDEIQFILDAISDYLNVQVRRSDVLSAWSGIRPLAMDPSAKNTESISRDHVVFEDYPGLITITGGKWTTYRSMAEDAVNAAVMSGNLKPANGCLTDNLHIVGGYGWDPASFTVLAQNYKRMKKTYGGKVIPGAMDSAVSKHLSHAYGSLAEQVATIAQNEGLGKRLAHGYPFLEAEVAYCARYEYCESAVDFVARRCRLAFLDTDAAGRALPRIIEILASEHKWDKARKKAELQKGREFLETFKSSKNAQFHDGKHNGRS

SEQ ID NO: 334252 - protein, 106 aa, Zea mays
  unsure (1)..(106): unsure at all Xaa locations
  Clone ID: MRT4577_67952C.1.pep
IRHEGDMEDGFNGDGPRTPLALRLHPARPAPCRSGTGGHTVEAAAARADVVVRQDPVEGEGGSYLHHDGGKDRMGGGWATXTEDTKTMLVWAXILTRAXWTSRACL

SEQ ID NO: 334253 - protein, 39 aa, Zea mays
  Clone ID: MRT4577_67953C.1.pep
KKNPKPQIFYRANTSHVLLGTVSTGLLQNILCYKASCGK

SEQ ID NO: 334254 - protein, 175 aa, Zea mays
  Clone ID: MRT4577_67954C.1.pep
SWSSSSSSFFRVTHLVSLTSSSLIPFHVPCRKNHQSGKPVVDDGMCGEEHEILVSSSCSSRSSTTCSPELLPALFSAVSNLLFLLLRKMLFRQHVLCFVLSIPFCAVLIVRIVIPASLLLRLSRCCGWVMDVFNAVHPDVQLPASSLVSSHLLGSLLSPATPAVQTGSLEGATGN

SEQ ID NO: 334255 - protein, 53 aa, Zea mays
  unsure (1)..(53): unsure at all Xaa locations
  Clone ID: MRT4577_67955C.1.pep
FRIILYEMMNTAKKKADVRSRDKSLXLIXCWGDPFVGPAGQHPRYYWAYGGLN

SEQ ID NO: 334256 - protein, 89 aa, Zea mays
  Clone ID: MRT4577_67956C.1.pep
MVVVWPLERVVHNVNCIEHVFVNKRKVVADIDNSGDHQEMKWYLHIEASNHMTGDMAIFSELNHGVIGSMCLTDGSLVKIVGRDMILFE

SEQ ID NO: 334257 - protein, 85 aa, Zea mays
  Clone ID: MRT4577_67957C.1.pep
QLVTCSWNIHISMVLLCKASPICNTIWFEPSGLCLIFQSQLCHYELSIILLPIPLKLYQLRVLCICVYDPYSFACAVMYASFQIV

SEQ ID NO: 334258 - protein, 85 aa, Zea mays
  Clone ID: MRT4577_67958C.1.pep
MKTLETQPLAPDCCSLDQDPAPAHPSPYASPMDKNADPELMPPSLEREDPPLLAPDPVAGSAVPHELGEGDPVSLFTPLETKFGA

SEQ ID NO: 334259 - protein, 85 aa, Zea mays
  unsure (1)..(85): unsure at all Xaa locations
  Clone ID: MRT4577_67959C.1.pep
MLQSLWSLQEHYPSGKKVRLYLERHDYVRAQMLXRTTTATVFDADPSKAKKNPKEGDNIAYDAPADMSCLLELKAIYYELMIWEL

SEQ ID NO: 334260 - protein, 56 aa, Zea mays
  Clone ID: MRT4577_6795C.1.pep
RKNRRRIRREPHLERIASCTETTLAHKIHDQAKERCTFTNKIHGLHEKFLFSLENI

SEQ ID NO: 334261 - protein, 68 aa, Zea mays
  Clone ID: MRT4577_67960C.1.pep
SWWRQNPVLLVGPLLHATENARIAHMLKDLDGSNRTFDNAQQAYVDVHDVNDAHLHVLESPRASGRHL

SEQ ID NO: 334262 - protein, 112 aa, Zea mays
  Clone ID: MRT4577_67961C.1.pep
VRRPRYGHLREEAQDTDVDRAILTLKTQLSAEDEEAVMAEFENLEAQLAVESLPDAPATEVRPEEKTKAPADTEAAPEDIDDVIELPDVPTKVPERPEAPEKNKVLEEPLPA

SEQ ID NO: 334263 - protein, 93 aa, Zea mays
  Clone ID: MRT4577_67962C.1.pep
NPPTYLIGRKLWPLPLRPDSVGRGRAFARDTVDETGSTCARTLQADPDTDPGSAIEICKDLRHYIASSSVTGRWTKKQTCFTGDMLTMSTSVE

SEQ ID NO: 334264 - protein, 51 aa, Zea mays
  Clone ID: MRT4577_67963C.1.pep
VGHDAHSAKHAHCCRCKLRVLSIVGIRRKRGRFFVKEESITHRHQNFSARA

SEQ ID NO: 334265 - protein, 73 aa, Zea mays
  Clone ID: MRT4577_67964C.1.pep
HHSSGPRTSQSIAFASTVSCRRHAWRCSGVAGWGARSATAMSREARLGVGVEGDQPRERTRPLTAAKGSGSGQ

SEQ ID NO: 334266 - protein, 229 aa, Zea mays
  Clone ID: MRT4577_67965C.1.pep
MGNIFVKKPKITDVDRAILTLKTQRRKLAQFQQQLEKVIEAEKEAARQLVQQKKRDRALIALKKKKAQEELLKQVDTWQMNVEQQLADIELASKQKAVFESLKAGNAALKSIQNEINIDDVQKLMDDTAEAKAYQDEINAVLGEQLSAEDEEAVMAEFENLEAQLAVESLPDAPATEVRPEEKTKAPADTEAAPEDIDDVIELPDVPTKVPERPEAPEKNKVLEEPLPA

SEQ ID NO: 334267 - protein, 84 aa, Zea mays
  Clone ID: MRT4577_67966C.1.pep
DIDDVIELPDVLRSSFCVSRSFRFLFRPYFGSRSVWQRLNGKLRTSMTLLSFLMCLRKCQRGLKLQKKTKFWRSRYLHKWMELR

SEQ ID NO: 334268 - protein, 229 aa, Zea mays
  Clone ID: MRT4577_67967C.1.pep
MGNIFVKKPKITEVDRAILTLKTQRRKLAQFQQQLEKVIEAEKEAARQLVQQKKRDRALIALKKKKAQEELLKQVDTWQMNVEQQLSDIELASKQKAVFESLKAGNAALKSIQNEINIDDVQKLMDDTAEAKAYQDEINAVLGEQLSAEDEEAVMAEFENLEAQLAVESLPDAPVTEVRPEEKMKAPADTEAAPEDIDDVIELPDVPTKVPERPEAPEKNKVLEEPLPA

SEQ ID NO: 334269 - protein, 75 aa, Zea mays
  Clone ID: MRT4577_67968C.1.pep
GSWNVFDALQVFLLLLFCPINVVYRSSRFQFLRILRNIVLSPLYKVVMVDFFMADQLCSQVPMLRSLEYLACYYI

SEQ ID NO: 334270 - protein, 101 aa, Zea mays
  Clone ID: MRT4577_67969C.1.pep
PHESTLDLSPLTAPLCSVPIFSGTYPATISSTIAPQNHRLNIMPTVTTLAVMKALLVSTTRGHALLKKKSDALTVQLRAILKKIAAAKESMTQTTRASYFS

SEQ ID NO: 334271 - protein, 94 aa, Zea mays
  unsure (1)..(94): unsure at all Xaa locations
  Clone ID: MRT4577_6796C.1.pep
RGIKGWTKLLADNAPNATNEAKNENYFGRXIGRETSMSIYQSLNEVLRAGMGTLTDDAGEDTSDLPGKLHRTIRLPVTVMEAGYEPDGEPYGMN

SEQ ID NO: 334272 - protein, 84 aa, Zea mays
  Clone ID: MRT4577_67970C.1.pep
IKQPAGVNRSPLGSQRTEVSELPAPCACANTVSQGQQCHPFNQRGMTNPEAFQAANPSCVVAPVVFNKDSSIINLLCERGLPTN

SEQ ID NO: 334273 - protein, 50 aa, Zea mays
  unsure (1)..(50): unsure at all Xaa locations
  Clone ID: MRT4577_67971C.1.pep
MASPIPREWVGLYQFSSATQTDLHELSXKLKEEVGSTLTILVIGXGGLGK

SEQ ID NO: 334274 - protein, 45 aa, Zea mays
  Clone ID: MRT4577_67972C.1.pep
RAQARALFSSKQIPKKQNLLLTLLPLILPARADEPTTYPTYPVRP

SEQ ID NO: 334275 - protein, 55 aa, Zea mays
  Clone ID: MRT4577_67973C.1.pep
HASAHASADAWFRLFSAGGFCFPHRKTSKKFRNPKIREIYQFGAFNRSVGWGLVP

SEQ ID NO: 334276 - protein, 102 aa, Zea mays
  Clone ID: MRT4577_67974C.1.pep
MLRRTRHGGVRLGRKLLGLWQRALCGGRRRRRGYRRLKQQQQQPCAGTPERAARKLAPALLPWGRSLARCLPLRWRASGGHRMLDGAEADVATTPKGQVAGV

SEQ ID NO: 334277 - protein, 99 aa, Zea mays
  Clone ID: MRT4577_67975C.1.pep
ACNAEQSFAFFCILVFPCESPQYPIDHTILLLLFFLMHAGQVLLQFHILSHDLHVDTDHEGTHTGRPPPQQLQLFSAGHQRFLVFLPDTPVLYICCLSV

SEQ ID NO: 334278 - protein, 68 aa, Zea mays
  unsure (1)..(68): unsure at all Xaa locations
  Clone ID: MRT4577_67976C.1.pep
AARHVVAVPYPGRCHVNPMLVVCRLHTAADAAFSVTVVVTYDWNXLLDATKVPGTLHYRVRLAMINNV

SEQ ID NO: 334279 - protein, 129 aa, Zea mays
  unsure (1)..(129): unsure at all Xaa locations
  Clone ID: MRT4577_67977C.1.pep
ADTIDIFKATIQDKXGMPPDQXGLIFDDKHLEDGRTLADYNIQXESTLYLVLRLKVGMQIFLKTLTGNTITLEEESCDTINNVKAKIQDKDGIRPDQQRLIFAGKPLEDGRTLADYNIQXXSTLHLVLR

SEQ ID NO: 334280 - protein, 92 aa, Zea mays
  unsure (1)..(92): unsure at all Xaa locations
  Clone ID: MRT4577_67978C.1.pep
RTHXCDKSHSSSTIRLKRMITMLCQKAPTQTDNNGSEKLYAEITHMVHPREHCITPYDLHCRVKPPESHALQEKMPLQSADMDMSEFKVTRA

SEQ ID NO: 334281 - protein, 80 aa, Zea mays
  Clone ID: MRT4577_67979C.1.pep
KLCNSAKPRRCYNSHKWYLVSGLCHLMFLALIQAFAFFYRFSSLGTEHFTIRVWHPRPFNRSTLLFLLFFSRLHFNIIFT

SEQ ID NO: 334282 - protein, 56 aa, Zea mays
  Clone ID: MRT4577_6797C.1.pep
IAGRDRTPLDSLSQRRSSAGSKALKTSPGSLTKRKQGTFQFPGFPGFRHTNLQAHG

SEQ ID NO: 334283 - protein, 77 aa, Zea mays
  Clone ID: MRT4577_67980C.1.pep
IEVLKFSFNYHHWLFYLDYKWLKIAKKAVKIYLARLEQGRSFVTIADWDWVDNCRRNTHNLTPPRPESRQKRSSQAA

SEQ ID NO: 334284 - protein, 75 aa, Zea mays
  Clone ID: MRT4577_67981C.1.pep
TQCMILSTKTAHSLLHVIYSRVRVSPNRGKEKQVPHISPAISATSEAFLHLLSASRIQSSWLCTLLATNLLPSIP

SEQ ID NO: 334285 - protein, 97 aa, Zea mays
  Clone ID: MRT4577_67982C.1.pep
IVNCRRRQGQPNVVVARGPRHLALLFLDLGRLRRMAEHEVARTRARAGHISIHRGRRSSATMPQYAQGGCRSTGAREGAGTRDISVRGRMTECPTGW

SEQ ID NO: 334286 - protein, 99 aa, Zea mays
  Clone ID: MRT4577_67983C.1.pep
MGDSSSSSAAYIKMVHHMIEKCICFNLSKEECMDALEKHANVKPVVTSTVWKELEKENKEFFETYNKDREERKVEAETMARIEKMLSEAAASKSSDDEG

SEQ ID NO: 334287 - protein, 169 aa, Zea mays
  unsure (1)..(169): unsure at all Xaa locations
  Clone ID: MRT4577_67984C.1.pep
KGLRDPVLPIAEGQHGTHTSSTAAGAFVPNASVFGNGLGTAAGMAPRAHIAFYQVCYEDKGCDRDDILAAVDDAIGDGVDILSLSLGHEDAIDFSDDPVSLAGYTAILNGVFICAAAGNTGPXPATLVNEAPWLLTVXAATTTXRRFLAFVKLGDTVHIDGDSLKDPNT

SEQ ID NO: 334288 - protein, 64 aa, Zea mays
  Clone ID: MRT4577_67985C.1.pep
PRLHRALLIMWRLFHHKVFRSQCLRPQDSHHKTTYMAQSQMIILTPVVQQVSTCNADRISDLIP

SEQ ID NO: 334289 - protein, 927 aa, Zea mays
  Clone ID: MRT4577_67986C.1.pep
MGILVEPHRVNWAQSRRRYPREPATSPTFPVSKTVLAHSTEINQRPFEENPSRAEFPFVGGDSPGDFSVSKPAQRQSSAAPIQRHSITPYILQSPSIGADSRSSRFIHYLVMKSVDRPPSNPKRLTIESSQEVFSIDISRRTRSSSSAHQGDIPQNQEQNEPQPAPIHRVRRKALACRLKRQPPAPAALSDDDFMDAPSLKRQFRSASPSPPDQISSKKLKVPSPQVPTVKRSPKYNIIAKKNSPKKKSPVKSQKLNIRCIPLDVIVSSWIMSDRQRDAVARLGFSSIFDLRTDALESRSLIRWLMDKLDPNDMTIRPGAGKELKITKDTVHLILGLPCAGGGREFTDWYGEIDAAANLRRHLNVCKEEFDVVKLQDKIVLGNDDELSIRCFFLILFNRLLFPSASWGITNNEVLMTSNMARMADIDWCQLVYTDLCDAATRWHKRNKTNITATIYGCSLIVLFRSRSETCYVIAPERPASAVFNIYVPRIKNLIGHKLQCLPSQQRPMFQSLFDAHDKEITPPPPTTSMPPTNDPVSTPTVPTPDKQQHDQESHVPTDHIKVSDDAPTTDKPADPKLTPKINSEGQKSVTHDTPVSGAPLFDKTPLTDATTDLVAKDSSCKDAVAEHPHVSREDCARNLLKFILSGQLDPSMSIINFGGFGGSVLDVVQSFGPNKCLENTFMQGFIDCIRQDDVLYNPDSVINTLILNVNVGTVLNIEEFEQHSSNPQPFTTTLLKEHLEPTLPSDDVLNQIKLILVPMLRRGHWTLYAINFERRRIDILDSNPYGTLLGGTTWKQIHNDQMMINGTKIPWSRLIMRRLSIALHEARPESTVPKFGNYKIGLLPNCPTMTPGSNDCGFFVANFLRYYDFDDGDLSEFYTPDEPLDQRAFVLHYLTFHRNNMVAPLPAELLPFKYSPRRRRCLKAKT

SEQ ID NO: 334290 - protein, 412 aa, Zea mays
  unsure (1)..(412): unsure at all Xaa locations
  Clone ID: MRT4577_67987C.1.pep
FRSRSEXCYVIAPERPASAVFNIYVPRIKNLIGHKLQCLPSQQRPMFQSLFDAHDKEVDKYCDSLQSSHQMIVSKQIELSETFGEMIDEVLRAATQRDSQPQDNPPTTSMPPTNDPVSTPTVPTPDKQQHDQESHVPTDHIKVSDDIVSGNVCKKXTAMDDPIFDKTPKSNAPTTDKPADPKLTPKINSEGQKSVTHDTPVSGAPLFDKTPLTDATTDLVAKDSSCKDAVAEHPHVSREDCARNLLKFILSGQLDPSMSIINFGGFGGSVLDVVQSFGPNKCLENTFMQGFIDCIRQDDVLYNPDSVINTLILNVNVGTVLNIEEFEQHSSNPQPFTTTLLKEHLEPTLPSDDVLNQIKLILVPMLRRGHWTLYAINXERRRIDILDSNLLCTLLGSTTWKQIHYDQMMING

SEQ ID NO: 334291 - protein, 59 aa, Zea mays
  Clone ID: MRT4577_67988C.1.pep
ASGRSAFMYYSMSAASWARPGAAQGRLSHGDEREPRYSLYMPLRFRCLTRYSSCSSFAL

SEQ ID NO: 334292 - protein, 81 aa, Zea mays
  Clone ID: MRT4577_67989C.1.pep
GPFASSLWLYPRRQETSTTTPGPPRACFPVGLWTTLCAQGGHALGGLWRDCPAAPGDDGTLEDLLLGLNGTFRGREGKCDA

SEQ ID NO: 334293 - protein, 214 aa, Zea mays
  Clone ID: MRT4577_6798C.1.pep
MELTFRGLPPFPSAARALLPSGTQDTTVDGFIATMGLDVMEIGMGADLSLDLRHFASKAVRQSKDDTPAPDMDACIRRLEEERGKIEMFKRDLPLCARLLADVIDVMKEEAGKKKTTTRRSDRRLASAAADEEEEEEDGATADKSKWMSTAQLWTGDSGREDGESEKQDKGRCSPEARSRGALLPFKADVGSGAPAFAPLCLRTDDKAAAARVG

SEQ ID NO: 334294 - protein, 33 aa, Zea mays
  Clone ID: MRT4577_67990C.1.pep
SSSRCQDPRRVFQSGCSPNYGTFVATRFVMVAE

SEQ ID NO: 334295 - protein, 63 aa, Zea mays
  unsure (1)..(63): unsure at all Xaa locations
  Clone ID: MRT4577_67991C.1.pep
PERXTRRDRRDGKAYTTPPPMTTTRRATXSSDHGIKGVPPHHQXQHXXHERGRRHRQGDGGGW

SEQ ID NO: 334296 - protein, 538 aa, Zea mays
  unsure (1)..(538): unsure at all Xaa locations
  Clone ID: MRT4577_67992C.1.pep
MAAGSPEQQQRSVVVKETVELTETEERIFRRLLEVVRHFSLGTQLRVAGGWVRDKLLGKDSADIDIALDNMTGQNFCEKVNEYSKLIGEQQKGIGVIQCNPDQSKHLETARMLILDIWIDFVNLRSETYKTENSRIPTMEIGTAKEDAYRRDLTINSFGIRLENNSVEDLTGRGIEDLKKGLIVTPLPAKATFLDDPLRVLRAIRFAARFNFTLDEDLKEAASDEKVKSELGTKISRERIGHEIDLMMSDKHPVKAMCDIRDLGLFYVVFSFPEKSNPPVFDKCDWQCVSHIEAAWDLAYSIGSCVFSSGSDSKSQDERRRLYLYSALFNPLRSMFYLDKRSKKAPVSSFIIKDSLKLKTSDAETVTTLHAASEKFAELIPLLESSADLXLSKRSWKXEYLEIPGDSVKRVFAGLILREIKEFWRVALLLSILFYRETETAAGTLDEQDELRRRKEKYIRVERSITDLDLDGVWKLKPILDGKSIMGVMQVKSGGPLIGKWQQRVLKWQLAHPDGTVDECVEWMKQSQSKRQKVEPST

SEQ ID NO: 334297 - protein, 119 aa, Zea mays
  unsure (1)..(119): unsure at all Xaa locations
  Clone ID: MRT4577_67993C.1.pep
DIPVTSGNVAFARLGKCLTGLIRSTQVPTVISLTHYHKSESNDTAMWNSEDLESLLQDAGAHKIGFNPVTTNSIKKILVRVCKEESCHASEELLHQIATSSGGDIRHAXVXLQXYCLDP

SEQ ID NO: 334298 - protein, 64 aa, Zea mays
  Clone ID: MRT4577_67994C.1.pep
FPELRPMLIGEGVSCLCPPSFRQPCVFQRLLIMVSSSVPYHDLLLMIVSSLCSLSFLIFPAIII

SEQ ID NO: 334299 - protein, 101 aa, Zea mays
  Clone ID: MRT4577_67995C.1.pep
RSYPSHPLSPRLHAPMNRCPDILSYKIMRCQPGPLVFQFEGTHNHFPGSMQPTAKETNKKSTNHDQKPVSSKENYVLDEIIFAHQNIILTSNNMALMLSFL

SEQ ID NO: 334300 - protein, 225 aa, Zea mays
  Clone ID: MRT4577_67996C.1.pep
MAAAANPPAALPSAPPPSYPATAAHCASSSSAAAEDDDDLYGRLKSLQRHMEFVEIQEEYVKDEQKNLKRELLRAQEEVKRIQSVPLVIGQFMEMVDGNNGIVGSTTGSNYYVRILSTINRELLKPSASVALHRHSNALVDVLPPEADSSISLLASSEKPNVLYSDIGGCDIQKQEIREAVELPLTHHELYKQIGIDPPRGVLLYGPPGTGKTMLAKAVAHHTTA

SEQ ID NO: 334301 - protein, 64 aa, Zea mays
  Clone ID: MRT4577_67997C.1.pep
KGVWCVSPLLANNTSGLVWPPGRPVEASDRPALFKVCAPCFYRVRPWLGNCLKKRKGFVSGLVP

SEQ ID NO: 334302 - protein, 46 aa, Zea mays
  Clone ID: MRT4577_67998C.1.pep
LLVLVLHLPQGQGRWPRCLSVGAEIEGELWPMKGNWDPRTKTMARG

SEQ ID NO: 334303 - protein, 81 aa, Zea mays
  unsure (1)..(81): unsure at all Xaa locations
  Clone ID: MRT4577_67999C.1.pep
ANKVFKPRFNFFTRAKRWVRNNYKKSRLAFCHISWRVAGPLLKNFIKKVPLVKSVFLKKKNNKIQKLKNRXHNYNIIKMIE

SEQ ID NO: 334304 - protein, 128 aa, Zea mays
  unsure (1)..(128): unsure at all Xaa locations
  Clone ID: MRT4577_6799C.1.pep
MKGKGGPVDRRSSARWRLLVLCAFSFGIGMIFTDRFWTAPDTSSHTMSQRWRQEQELQLVSEDCNTKRKHGEDKDIMGEVTKTHEAIXMELAAXRSTLELLRSSGSPVTSETSQPRKKAFVGIGVNTA

SEQ ID NO: 334305 - protein, 280 aa, Zea mays
  Clone ID: MRT4577_679C.1.pep
MATALSCKALAVAALLSVVSVVTYGARAQQQPSHNASDSESSQDRSLLSYSSGWLPAKATWYGAPTGAGPDDNGGACGFKGTNQYPFSSMTSCGNEPIFKDGKGCGSCYQIRCLKSNHPACSGVAQTVIITDMNYYPVAKYHFDLSGTAFGSMASWGLNDKLRHAGIIDMQFRRVPCNFPGLTITFRVQHGSNPMYLAVLIEHENKDGDVVQADIMQSNSGHWEPMHESWGSIWRIDPNRPLRGPFSMRITNESGRQLVAKNVIPANYIPDVDYRSFVQY

SEQ ID NO: 334306 - protein, 122 aa, Zea mays
  Clone ID: MRT4577_67C.1.pep
MARLNSKAVVAAVVLAAVVLMMAGREASAALSCGQVDSKLAPCVAYVTGRASSISKECCSGVQGLNGMARSSSDRKIACRCLKSLATSIKSINMGKVSGVPGKCGVSVPFPISMSTNCDTVN

SEQ ID NO: 334307 - protein, 81 aa, Zea mays
  Clone ID: MRT4577_68000C.1.pep
NPGLGLLDHQSVQVFFPTGAFLKFVGPFPDYYLWGEMSFFFRPSTVLDSLRRINLLSSVSCSCPFARMHPVGGFGLSSRQN

SEQ ID NO: 334308 - protein, 163 aa, Zea mays
  Clone ID: MRT4577_68001C.1.pep
VSYFVATYWYFAGFYIDGASGGIMLLGIVGFCILLPLMIAVIYLSRSSKYTGNYVMHQTLSTYYYFMKPSLAPSKVIDVFIKAAEYMEMPVRRSDDEPLQKLFVAVRSELNLDLKNIKTEQAKFWKQHPSLVKMELLIQAHLTCESFALTPALLKDYRKKKKK

SEQ ID NO: 334309 - protein, 142 aa, Zea mays
  unsure (1)..(142): unsure at all Xaa locations
  Clone ID: MRT4577_68002C.1.pep
AKHNRNNLTTISTYKLQPLPGHSAFFNNSYAYLIPQILLTSNTITSFLLPXLTQSTFNKXPIPSYIQHPTLNYSLQHTFITSFPPQFITHINLQTISSYILPQLFPSLIHLTLSNQSXYFHQQLLSSNPLALANLAAYHQQQ

SEQ ID NO: 334310 - protein, 76 aa, Zea mays
  Clone ID: MRT4577_68003C.1.pep
MAPIAVGDALPDGQLGWFDENDQLQQVSVHVLADGKKGIIFGVPPGFSPSCSKYDGTRINRKVLNQVRCQGRRLRA

SEQ ID NO: 334311 - protein, 256 aa, Zea mays
  unsure (1)..(256): unsure at all Xaa locations
  Clone ID: MRT4577_68004C.1.pep
MNTEDDKQTVLSTLPKDLPLDFLKTITDQFSDNRVIGKGAFGTVYTGTMPDGQTIAVKKLAENAPIARDKIFNNEVQNIMAYRHENIVKLVGFCHEGQKKVVLNNGRYIVADVYEGLLCYEYLPKGSLQKNLFDKPINMAWDTRFKIIKGVCDGLLFLHRIPIIHMDLKPQNILLANNMTPKIADFGLSRLFGQEQTRANTXEXVVGSYGYIAPEYLYRGEISTQSDIYSLGLLIIETTTGREEIXNRTNHQPREF

SEQ ID NO: 334312 - protein, 194 aa, Zea mays
  Clone ID: MRT4577_68006C.1.pep
MQVQCGGPSYQVQLGRRDGMVSQASMASILPGPNVDVPTAIDLFARKGLNSFEMVSLMGAHTVGVTHCSVIHDRLFNFNGTGSPDPAMDPMYVWILTTYACPRGQAFDNIVYLDDPSSILLVDRSYYSQIMKRHGVLSVDQALGDSSATAWMVKFLATTDFFPSMFSYALNKLAALDVLTGTDGEIRKSCRRTN

SEQ ID NO: 334313 - protein, 85 aa, Zea mays
  Clone ID: MRT4577_68007C.1.pep
ALCLLTNIDGKYPQIETVVSGCDDSVSIDDLLQLNVQHLEAVVSSCGDSVSIDDLLQLNIQHQIKLTFANIVPGDDDLVRLSLPI

SEQ ID NO: 334314 - protein, 147 aa, Zea mays
  unsure (1)..(147): unsure at all Xaa locations
  Clone ID: MRT4577_68008C.1.pep
SLTRGRTRGRVGPTAIQTDLWDNQPGSCVGPGGLGGPSRHASHRGSRCGPAASRTARWGGGPVSYQVPDSKGMPYGHWXLEKXNDDSGRRNTRNRGGPISSKPMKSKYQTDEHSGAINGWRNCRVTNDVFDYYSYGQAVPSSHTQCE

SEQ ID NO: 334315 - protein, 58 aa, Zea mays
  Clone ID: MRT4577_68009C.1.pep
HCGLLCKIVQEKVSNSSSKPPVHMTGSGRPNAPPYRLPVLPMDDDEISSKVLLAVELC

SEQ ID NO: 334316 - protein, 88 aa, Zea mays
  unsure (1)..(88): unsure at all Xaa locations
  Clone ID: MRT4577_6800C.1.pep
LAILELVRRPAXDTSGPCVXHTQQVNVPASFYMPPLFYLPPEQKSQPWXYPTQPPHLNPCHQFGSCGVCSDCSPFLGQRNEFLRHQCK

SEQ ID NO: 334317 - protein, 77 aa, Zea mays
  Clone ID: MRT4577_68010C.1.pep
RSSSISMMRSDLLSSRLYGRTAFSIRSSLTHTQVLAVITLHVEIVAFGVCSSGTRLWMGLLPLDDPFARLDQPCTSE

SEQ ID NO: 334318 - protein, 174 aa, Zea mays
  unsure (1)..(174): unsure at all Xaa locations
  Clone ID: MRT4577_68011C.1.pep
TRCTVVLVRSTVQMVTLHPMNEMLSGTCTILNXSLPPYVQPRLETXHQIALAXINKXAEVLEAXNIRPPYXGMAALTERLSFLMGAHASYFDWADHYLRLTNCXIQDHLHIHTLMFYSNLNDIINSIIAIDTTVIIIDXSLPNENLLSILLERQLYRACMKACIYYITLIQDHV

SEQ ID NO: 334319 - protein, 92 aa, Zea mays
  Clone ID: MRT4577_68012C.1.pep
SALVRSTGQSRPVESRAPSCPAAALGRRLQACPANRSSRLGCRPRVAVGPDLGRTPGREPGFSPLGAVGRPRPARGVVREAHGGERQHGRVG

SEQ ID NO: 334320 - protein, 52 aa, Zea mays
  Clone ID: MRT4577_68013C.1.pep
YIDILTIFMLPWSTSSINTFQRPSTVFGPEDIKRSILSLQYTGELAALFEST

SEQ ID NO: 334321 - protein, 72 aa, Zea mays
  Clone ID: MRT4577_68014C.1.pep
GCFPPPLGRPAQVGVGFHAEGTEAIVGAVDTAANAAGEVLIVRRREGGGVGGAGLGKRGRRGEGGKLPGRTT

SEQ ID NO: 334322 - protein, 62 aa, Zea mays
  Clone ID: MRT4577_68015C.1.pep
PTCRACFSKSYLICYHHRIRCVCFGSLLTDDLITDDLYYMNPNDLDMQHITIKHIEIQECYI

SEQ ID NO: 334323 - protein, 90 aa, Zea mays
  Clone ID: MRT4577_68016C.1.pep
RDPMVNLDTTGFPFFGFLPVTRDLHNLEALGLTMVITKDVRKEGRGEEHTQDSNHRTITHTSHNLRSKHNARRSQLKGRSRHYLKESNAR

SEQ ID NO: 334324 - protein, 44 aa, Zea mays
  unsure (1)..(44): unsure at all Xaa locations
  Clone ID: MRT4577_68017C.1.pep
MYAEQNKIISKSLFFVGEVGGNDYNHLIVRDKSXDELHXSVPNV

SEQ ID NO: 334325 - protein, 120 aa, Zea mays
  Clone ID: MRT4577_68018C.1.pep
RPPLWARVWLRRFLLECLWVFLRRECGYIPRCRSQSKGRSFCDRLGEGQFRVVAPPAKVLPGFFCGSLSRAWRSPPLPFRFVGLICAPLGVLHFLWNFPPRLPTFCVRPGRLPPYGFFLS

SEQ ID NO: 334326 - protein, 426 aa, Zea mays
  Clone ID: MRT4577_68019C.1.pep
MADLTDIGCCSCFSFLRKPSVPVRQHQDADGMLSEDLLKRQSAEDPDGSFYTGDDPDVSFYNGDDLDRSFYNGDDPDRSFYDRDDTDYIEGSDDGPPRKSSEDIVQLRTQNGFACREISVKETKKVFRSEDENGNKMVNQYVHLGKIGSGSYGKVVLYRNIKDGKLYAIKVLNKPYMMKVRVVRTETAMTDVLREVSIMKMLNHPNIVNLVEVIDDPNIDKFYMVLDYVEGKMVCDNGLEEGTARNYLRDIISGLMYLHSHNVIHGDIKPDNLLVTSAGNVKIGDFSVSQVFEDDDDMLWRSPGTPVFTAPECCQGSAYHGRASDTWAVGVTLYCMVSGHYPFLGDTLQETYDKIANDPVQIPGDMNPQLADLLLRLLCKDPGDRITLQAAAEHPWVAGDEGPVPEFICRCGFGRRKRNDVREEVQ

SEQ ID NO: 334327 - protein, 398 aa, Zea mays
  Clone ID: MRT4577_6801C.1.pep
MKGKGGPVDRRSSARWRLLVLCAFSFGIGMLFTDRFWTAPDTSSHTMSQRWRQEQELQLVSEDCNTKRKHGEDKDIMGEVTKTHEAIQSLDKSISTLQMELAAKRSTLELLRSSGSPVTSETNQPRKKAFVVIGVNTAFSSRKRRDSVRETWMPQGEKLQQLEEQKGIVIRFTIGHSATSNSILDKAIDSEDAQHHDFLRLDHVEGYHELSAKTKIFFSTAVGIWDADFYVKVDDDVHVNLGMLATTLARHKSKPRTYIGCMKSGPVLADKNVKYHEPEYWKFGEEGNKYFRHATGQIYAISKDLATYISINRPILHKYANEDVSLGSWFIGLEVNHIDERNMCCGTPPDCEWKGQAGNVCVASFDWSCSGICKSVERIKDVHARCGEGDSAVWSALV

SEQ ID NO: 334328 - protein, 82 aa, Zea mays
  Clone ID: MRT4577_68020C.1.pep
FSPERFKDGVSRGSKDSPGFFPFGWGPRICVGQKFALVEAKMGFSSILQHFWLALLQSYTHGPFPGSTLQPEHGGHFMLKKL

SEQ ID NO: 334329 - protein, 428 aa, Zea mays
  unsure (1)..(428): unsure at all Xaa locations
  Clone ID: MRT4577_68021C.1.pep
MADLTDIGCCSCFSFLRKPSVPVRQHQDADGMLSEDLLKRQSAEDPDGSFYTGDDPDVSFYNGDDLDRSFYNGDDPDRSFYDRDDTDYIEGSDDGPPRKSSEDIVQLRTQNGFACREISVKETKKVFRSEDENGNKMVNQYVHLGKIGSGSYGKVVLYRNIKDGKLYAVKVLNKPYMMKVRVVRXETAIDQMFFREVSLMKMLNHPNXIVNPGEVIDDPNMDKFYMVLEYVEGKMVCDNGLEEATARIFLRDIISGLLYLHSHNVIHGDIKPDNLLVTSTGNVKIGDFSVSQVFEDDDDMLWRSPGTPVFTAPECCQGSAYHGRASDTWAVGVTLYCMVSGHYPFLGDTLQETYDKIANDPVEIPGDVNPQLADLLLRLLCKDPGDRITLRAAAEHPWVAGDEGPVPEFICRCGFGRRKRNDVREEVQ

SEQ ID NO: 334330 - protein, 101 aa, Zea mays
  Clone ID: MRT4577_68022C.1.pep
MADLTDIGCCSCFSFLRKPSVPVRQHQDADGMLSEDLLKRESAEDPDGSFYTGDDPDVSFYNGDDLDRSFYNGDDPDRSSYDSDDTDYIEGSDDGPPMSYS

SEQ ID NO: 334331 - protein, 145 aa, Zea mays
  Clone ID: MRT4577_68023C.1.pep
MADLTDIGCCSCFSFLRKPSVPVRQHQDADGMLSEDLLKRQSAEDPDGSFYTGDDPDVSFYNGDDLDRSFYNGDDPDRSFYDRDDTDYIEGSDDGPPRKSSEDIVQLRTQNGFACREISVKETKKVFRSEDENGNKMVNQYVHLG

SEQ ID NO: 334332 - protein, 65 aa, Zea mays
  unsure (1)..(65): unsure at all Xaa locations
  Clone ID: MRT4577_68024C.1.pep
MTEQITLHGTLKVHNVLITHIATTPQLPHMILSSFQYNTIIICKLTSYETNYXISQLILHIHSHF

SEQ ID NO: 334333 - protein, 74 aa, Zea mays
  Clone ID: MRT4577_68025C.1.pep
SCGAPFRRALFASPATVPLVGLFFPFSSLGRLLHAGDFASCACLLFPFPSIVCRPCRLGRPFLRYSLFAYDPLV

SEQ ID NO: 334334 - protein, 109 aa, Zea mays
  unsure (1)..(109): unsure at all Xaa locations
  Clone ID: MRT4577_68026C.1.pep
MAFEHAVMIACHSKADFDAYMTNAQEARXLEVIDFTGDWCGACRAIDPLMREHSKKFTQVAFLKVDADYLXEVTVCYQVQAMPYXHLLKNSTTVATIVVARKDELLAQI

SEQ ID NO: 334335 - protein, 89 aa, Zea mays
  Clone ID: MRT4577_68027C.1.pep
TLQGGGDTSDRGTDRDTGSLVSITILFFRSATGCTVNARFLWSFWWPGTCLARVHLNGLPGHHCWNLNGPGGGVGGIVGGGCTDPWVDP

SEQ ID NO: 334336 - protein, 123 aa, Zea mays
  unsure (1)..(123): unsure at all Xaa locations
  Clone ID: MRT4577_68028C.1.pep
GKPFLXLTLLSKTLFWLIKLIGLSGIWRGLLPIKTGAWWAYVTMILTSVALQEGTLLVFRMLYKKMEDMLDALADRKSKPRLTLTDKTLISXAGGLCHGEAHAIFLRLRLLTTAFGRATFYTE

SEQ ID NO: 334337 - protein, 142 aa, Zea mays
  Clone ID: MRT4577_68029C.1.pep
ACKGKRKRHLSEDDVWLLLHRCRPPPARPPVLSPGGWLSSWVLLHRVACNPSPRRYHPGTILTALQEVAQHADGRRIDWRAVVAKSATGITSAREYQMLWRHFAYHHDVDESVDADDQPLVCNPTYSSKPRFCCPFQIGLRR

SEQ ID NO: 334338 - protein, 62 aa, Zea mays
  Clone ID: MRT4577_6802C.1.pep
FGSRYGNHATFYALGRGQADEGSHSITQRAGQDDPMSQNQCASDGIEKCSQYVDIEGRHLLS

SEQ ID NO: 334339 - protein, 103 aa, Zea mays
  unsure (1)..(103): unsure at all Xaa locations
  Clone ID: MRT4577_68030C.1.pep
LLSLPKGYFLGVQLYFTGPCXSDPTVQVDGNLLGTPHLSHVKVQCICIXILRGNYLVFTSRGNLDRHDPPLRGKNSCIKXYDCDILPTPLLMDFVNNXKVSGV

SEQ ID NO: 334340 - protein, 73 aa, Zea mays
  Clone ID: MRT4577_68031C.1.pep
MHPVTGTLKGYDQLLNLVLDEAVEYEREQDDPLKLSGKTRQLGLIVCRGTAVMLVSPTDGTDEIANPFLAEGA

SEQ ID NO: 334341 - protein, 254 aa, Zea mays
  unsure (1)..(254): unsure at all Xaa locations
  Clone ID: MRT4577_68032C.1.pep
MGAKSNKSLYFDKLKGLLEKYTSIFIVEIDNVSSQQMHEIRHALRNKGVVLMGKNTMVRRALKTFVADSPEYERLLPHVKGNVGFVFTNEDLKEVRDVILANKVAAPARAGALAPADVWVPAGNTGMEPGKTSFFQALGVPTKIARGTIEITTDLKLVEAGSKVGPSEATLLNMLNISPFTYGMGISQVYDQGQTFPPSVLDVGEEQLLKTLSQAIATIATISLALNFPTLPFVXHSLVTANRRXLAVALSPSQ

SEQ ID NO: 334342 - protein, 85 aa, Zea mays
  Clone ID: MRT4577_68033C.1.pep
HGREAACIAGVVRTQQQLAVAVHRSDDGEKDGAGGAGGGRRARRQRGGAVRGGVLRLVLATGGEDRQGVRGSAHPPTRATSGPGW

SEQ ID NO: 334343 - protein, 70 aa, Zea mays
  Clone ID: MRT4577_68034C.1.pep
QESKLIAKTKLFGKVNPDKRKVSHGAAKPSSSKVSSRSWAQLHTFIHTLFFTSCTILLILFIYISQCTKA

SEQ ID NO: 334344 - protein, 51 aa, Zea mays
  Clone ID: MRT4577_68035C.1.pep
ARGAYLLLRDSSNMAAILEIGENMDENCLQFDPSAKHTEPDMTRKTPDYFM

SEQ ID NO: 334345 - protein, 39 aa, Zea mays
  Clone ID: MRT4577_68036C.1.pep
IIIKHLHMSFPPQSTLQFLKELVCSPANNVTNPQLPPRA

SEQ ID NO: 334346 - protein, 67 aa, Zea mays
  Clone ID: MRT4577_68037C.1.pep
RPRVRPQFFPKTNTLWLTFATPGFFKNFFFYFLDATKWFTFSQTFLLKKQAWSRAFLKPTGVKQIFG

SEQ ID NO: 334347 - protein, 75 aa, Zea mays
  Clone ID: MRT4577_68038C.1.pep
QGGKAPSPSKATMAKVPQNLAWAGAKKKETLPIAPGGVLPQKNFPKTPSFSGGVRAPSPIFVGNNFLFLQRHGVF

SEQ ID NO: 334348 - protein, 89 aa, Zea mays
  unsure (1)..(89): unsure at all Xaa locations
  Clone ID: MRT4577_68039C.1.pep
PRAALTTTLTXQPTRTLARLQRLADLTDYTRSSSDEPGNEGSTPIRTSTTGPGRYYQTRALTAATTGHYTVANATSSTTAQRRAGFDAR

SEQ ID NO: 334349 - protein, 73 aa, Zea mays
  Clone ID: MRT4577_6803C.1.pep
VINLDLKRWREEHPCQRGKEGETDHIKIFFYPPLTFYWGGGDNNTTLFLPDNTKAGNFANHIQLSLFFVFKGH

SEQ ID NO: 334350 - protein, 37 aa, Zea mays
  Clone ID: MRT4577_68040C.1.pep
KSRAKPKSSSCIQPSLASRLGQGYIPAPDGMRYRWRA

SEQ ID NO: 334351 - protein, 58 aa, Zea mays
  Clone ID: MRT4577_68041C.1.pep
LRLKSHQGTTRNSNLSNTAKLAVLEAAQSDKNRDCCYTWVPMDQDGRTHTYTVLRELP

SEQ ID NO: 334352 - protein, 304 aa, Zea mays
  Clone ID: MRT4577_68042C.1.pep
MVGFFGASAASDHCRLLTRNGSVHHELIRRHHGRPRSAIRCCSSTARGRTRDYYYQVLGIAIHSTPQQIKEAYRKLQKQHHPDIAGYKGHDYTLLLNEAYKVLMRDVSSSRHADGRGRSRVGSGAGYTGDGYSSWEGPVRSQALFVDENKCIGCRECVHHAARTFAMDDVLGSAHVEVQFGDLEQQIQLAVESCPVDCIHWVESHDLPVLEFLSRPQPKEGHGVFGGGWERPGNVFAAAKNFARRLEREKQREELERDQPSGGLDGDAGREAETEAQAEARRSAWEELRWKPLLDAWNGLIGGR

SEQ ID NO: 334353 - protein, 145 aa, Zea mays
  Clone ID: MRT4577_68043C.1.pep
SFTSYDDTYCLITHGRKGAILSLAHPLFLQLQMLRVQLPALSFSSTSCTASTTTYQPIPSIKQGLPPELLPRAAPRLGLRLRLRLAVRIPCNQVSEARSREPRKAKDRYSGSLYRRGPRRADPVPAPPASSPSPVSWRSSSPPQT

SEQ ID NO: 334354 - protein, 83 aa, Zea mays
  Clone ID: MRT4577_68044C.1.pep
HLQKPYLRTSSLTLTTLRHPHAPPRQTRSLGPRGPCPAPASSPAPPAEALRGPPAARPPVRPLRRRQPLRAVPTAHHVSVLRV

SEQ ID NO: 334355 - protein, 104 aa, Zea mays
  Clone ID: MRT4577_68045C.1.pep
MLNFLLRLLVRSRLGSRFAILFFSQRSFTICYLFSLKIFWWLQVQKRFEALKKRKDPSAFTEEDLDERIMKQQQDEVERKRQRKEKKNEKKREQATQHEPEDVD

SEQ ID NO: 334356 - protein, 55 aa, Zea mays
  Clone ID: MRT4577_68046C.1.pep
KKLKKIRLVTRFPYLKDYKAPVHFCCASLSVILTMGPLFFFFPPFFNWFLYQKIF

SEQ ID NO: 334357 - protein, 85 aa, Zea mays
  Clone ID: MRT4577_68047C.1.pep
HHDGLVGRLGMSRLPRIIRFLHFVVCIIVARTQRTITDTFSLAYSVVGAEDFGRTVVTFQVSPRVRLTREVLRVPRRALLVQEVL

SEQ ID NO: 334358 - protein, 118 aa, Zea mays
  unsure (1)..(118): unsure at all Xaa locations
  Clone ID: MRT4577_68048C.1.pep
AAQPGATQRPPSDRETRPSERXNGSSRPRGERKKERKPTHQRSTRERQERDYRXAQKQNRHKGSTEQAQKHRQRDPTDTGQPRNTSRREATAAKRREKKRHQEGKAKKKEAEEKKRAE

SEQ ID NO: 334359 - protein, 62 aa, Zea mays
  Clone ID: MRT4577_68049C.1.pep
KNQGAKKKSPPPPAPVFRPQNRGVICLLKKKKKKKKKKKKKKKKKKKKKKKTKKKKKTKQPP

SEQ ID NO: 334360 - protein, 169 aa, Zea mays
  Clone ID: MRT4577_6804C.1.pep
ATCGAEDRKSEKSCGYKLHLQGMIMDPRPRDDPNLGARLPTPNPPAPHMISFSLQQPQLQFFPSYGFHGHSHSSPVSSHPSPPSAMPGCTTPSPASTTTTERDSVEDFSEKSADDAVLAYIMIIDPRDEDEESYPITSAPVEDSALLAVVESPFVDILESFPPIAAQGL

SEQ ID NO: 334361 - protein, 63 aa, Zea mays
  unsure (1)..(63): unsure at all Xaa locations
  Clone ID: MRT4577_68050C.1.pep
RFCKVTGLCNYTYGGAARTSLVATIGPYXQNRGXEITYTMMFGQSETLVDHMIEVMDYFDYTN

SEQ ID NO: 334362 - protein, 69 aa, Zea mays
  Clone ID: MRT4577_68051C.1.pep
MSCRGQGVRALRFTDEPSTEDLGVQQVETAEQELVEEIKDVVFALKHNSAPGPDGFPSEFYQEFWEVIK

SEQ ID NO: 334363 - protein, 248 aa, Zea mays
  Clone ID: MRT4577_68052C.1.pep
MGKAKYIMLDCDNTLVQSERYAFEACADLTNEVLSKHNIDARYTAETLLEDFVGHNFRGMLNGLQKKHNFQMPPEEMDDYVQQELGAVTRKLSQKAVECPGVTEQLKWLKEQGYPMAVVSTSAKSRVVASIEKAGIDHFFPNEHVYSAATSLNPPSSKPDPKIYLYAAEQLGVKPSEAVTVEDSKSGATAAMRAGIPCIGYVGIYGIEEGKEKMEEMAKLLTEETKCAAIMYDWEDFPECLKKVEGFM

SEQ ID NO: 334364 - protein, 82 aa, Zea mays
  unsure (1)..(82): unsure at all Xaa locations
  Clone ID: MRT4577_68053C.1.pep
NTFVSACAIEXVXLWLCGAXXGLVGEXXXRCCAGQIVRRRLSLFLVGGXRXARLDXFCYDMCCSDVXLPVNVXISEFLEYDL

SEQ ID NO: 334365 - protein, 163 aa, Zea mays
  Clone ID: MRT4577_68054C.1.pep
CMMMMRMMLRPSTTNYITRLCRRHHQLNTHASCTVDAWNRPHDDSCTHHPYVMHASLDSATDGYTTDREIDFPTGYIDEDDLQDAATLTYLNYPWCCAYSDNRSFFASVLVEPIITCPYAYTEAVCGEHILRVAKYEPVDSYADLHRCLSEKKRPLGAPTVEN

SEQ ID NO: 334366 - protein, 138 aa, Zea mays
  Clone ID: MRT4577_68055C.1.pep
MEAAASAEYGYYGPHETKTAGCGDHFVVDDLLALPPYDEEEEGATGETPLCLQPVKEEGGLGNFSADSSIVTAIDSCSNSFCRLADDDFPGEFYEPYDQLVELEWLSNYMGEGEETFASDELDKLKLISCGSSPAPCE

SEQ ID NO: 334367 - protein, 56 aa, Zea mays
  Clone ID: MRT4577_68056C.1.pep
VCCYDYPLGLKWPGPKPRRQTRHRKGSTRAGWDRKTLARQGCQRGTGVDLRLANRL

SEQ ID NO: 334368 - protein, 101 aa, Zea mays
  Clone ID: MRT4577_68057C.1.pep
RPGKKPTEKTGKKGEAGPRHSPGAPPGGAGTHSTIYPGGREEGQVTPSTKTRGTFKLTGPGGPPGKSRPGPAGAPTFPKGRRKKAGRKKGQSWSLGEIGIR

SEQ ID NO: 334369 - protein, 57 aa, Zea mays
  Clone ID: MRT4577_68058C.1.pep
AAVVLVGMDGVSHVGVTDDAVALKEMHLVDVSMRRRHRSLRVDRRSVKAIGRTDYGL

SEQ ID NO: 334370 - protein, 157 aa, Zea mays
  Clone ID: MRT4577_68059C.1.pep
GCGSPARPDEVNREEKTASRCSNRGAQVKSATAAATAGVPLVGLPPYLTRGLPGCRLLRTRRRGPPRPAVPAPPALPRHAAAPATVARCRRDPVVGWRRWSGDGWRQQGPTVARRRCFSGRRWKASGPRGEEEEVEASENRRGGSWGAGRARGERPG

SEQ ID NO: 334371 - protein, 121 aa, Zea mays
  unsure (1)..(121): unsure at all Xaa locations
  Clone ID: MRT4577_6805C.1.pep
RGRLALPLSVXXGLVFXXSPAPXXSPFFFXPRCWFPLGXXXXSGXXXFPLPPAVVXLPGPPLGXXVLARFPXXXCPXLXLLLLRXCXPXGLXLXLVPPXXCXWXXWCXXAAFFFCXGSRCA

SEQ ID NO: 334372 - protein, 61 aa, Zea mays
  unsure (1)..(61): unsure at all Xaa locations
  Clone ID: MRT4577_68060C.1.pep
YHYHFHNTEYALYSSTSIKSXRRYSYRVWQTIIHITCQSFCPLKTLSSHYCSNPDSHSMLL

SEQ ID NO: 334373 - protein, 62 aa, Zea mays
  unsure (1)..(62): unsure at all Xaa locations
  Clone ID: MRT4577_68061C.1.pep
ATFSTKWVFRNKQDEHGCVDKEQSXLVAKGYSQVEGLDFGETYAPVARLESIRILLAYATYH

SEQ ID NO: 334374 - protein, 72 aa, Zea mays
  Clone ID: MRT4577_68062C.1.pep
MEKTTTTAQPVCAQESLALLNCVASVPYDRDRCLALVDALRECIVRKRVKKFSLAEPSSTTTTEALKSDTKP

SEQ ID NO: 334375 - protein, 215 aa, Zea mays
  Clone ID: MRT4577_68063C.1.pep
MASGEGTGDSNAAGAGMEVPEVELCLDLTSCQLHDLSEVEIPPTLEELDLTANRLTAVDPRIGHLPRLRKLSFRQNLLDDDAVAPLFTWDAIAGLQEIVLRDNKLIKIPDASIFKGLLVFDVSFNELSSLNGLSKVSSTVKELYFSKNEVPKMEELEHFHALELLELGSNRLRVMENLETLTNLQELWLGRNRIRTINLCGLKSIKKISLQSNRL

SEQ ID NO: 334376 - protein, 118 aa, Zea mays
  Clone ID: MRT4577_68064C.1.pep
GRSSRLAGLIYSHFSSPPRCHRRAGYFSPLPAILFLLHSSPSPPSRAALKSASPPLLFCRPPLPHRATAGLRPAPWCPFTIHQPTRRRCSGRSSAATSPPAVNKSDSARHPARGKRGI

SEQ ID NO: 334377 - protein, 32 aa, Zea mays
  Clone ID: MRT4577_68065C.1.pep
SPRRRNHRSNKCCHSFRTQHNHVHLKRHTVDL

SEQ ID NO: 334378 - protein, 97 aa, Zea mays
  Clone ID: MRT4577_68066C.1.pep
PRLLHHQQANQVLHGSSGCSPTPLHVPHSPSSSSSSCLLLEKGKKNIVGHHGQRRRNSQLVGSGEQHLRGRKPWDSTSSASKIWFAGVELMGVQHHL

SEQ ID NO: 334379 - protein, 95 aa, Zea mays
  Clone ID: MRT4577_68067C.1.pep
KHSSPKNGGPPEKSSCPPPPSFPGNSKWRPLQGWGPLLPRFVNQNKNSVYSCTKLGKFFSSPRGKFKLLPVSPKVSPPLLSVGMLPKKGKFHFKI

SEQ ID NO: 334380 - protein, 137 aa, Zea mays
  Clone ID: MRT4577_68068C.1.pep
GHRPYLLPRWPDPTWCSQWGAPSCFFPTGSCSIPCALRKRTLCRFTSMTTNLRAVLLCSARAFPFPRSRKILTTRCISRADHKSANLLRHHRVASDKVRPCPPCKGRCSKRPTWAASYAHAAQLFILCTVAMLLGTS

SEQ ID NO: 334381 - protein, 73 aa, Zea mays
  Clone ID: MRT4577_68069C.1.pep
FFFLFVPLYVVRVSFAVRQIISVFALPSISSLNFLLTLTKDLNPEPFSEFVTCVPSFVYPGSRPGVDLSCGSF

SEQ ID NO: 334382 - protein, 66 aa, Zea mays
  Clone ID: MRT4577_6806C.1.pep
RQHPDSVCYRILGVKMMHPRWTYYWGLEDRDRKNKSETDTRSHRQADCRYQLSSRGRIKELGAEGD

SEQ ID NO: 334383 - protein, 73 aa, Zea mays
  unsure (1)..(73): unsure at all Xaa locations
  Clone ID: MRT4577_68070C.1.pep
PRDLAFAPKTSSSSSLSSALHAAXQAPPLLLRRMXSTATPRRRYDAGVVVTRAAAAAVTVPGAPPHAXRRQRL

SEQ ID NO: 334384 - protein, 32 aa, Zea mays
  Clone ID: MRT4577_68071C.1.pep
AFGILRTSLFTLLVWSYKPTQTIYMTLSAMPN

SEQ ID NO: 334385 - protein, 44 aa, Zea mays
  Clone ID: MRT4577_68072C.1.pep
KNVQNLKCLSAKRPMGKPNRVFKVSSFLKFVRFWPRVFFKINSF

SEQ ID NO: 334386 - protein, 76 aa, Zea mays
  Clone ID: MRT4577_68073C.1.pep
NIGHILSKHGMLPMTHLLCQVADPYIIDLYFSFCVSIPPPPASSNRRQLCLKCGCFVSCNIVYFMHSTVPNYFGTV

SEQ ID NO: 334387 - protein, 76 aa, Zea mays
  unsure (1)..(76): unsure at all Xaa locations
  Clone ID: MRT4577_68074C.1.pep
HCTSRSWNLEGGGTCRRSGFTSHGPKLQKRRVVERLGNSLRHRGRCLIALDGDLSLHDDYVAGLDAFHLEPDPXGS

SEQ ID NO: 334388 - protein, 165 aa, Zea mays
  unsure (1)..(165): unsure at all Xaa locations
  Clone ID: MRT4577_68075C.1.pep
MYSTLEDGTVVRGLAGVPQDGPVLLVGNHMLLGIELISLAAEFLRLKRVVVRGIAHPLLFPNKKRAWSEGHDFFDFLNLWGGVPMRYKSIYDLLRAGEFVLLYPGGHREALHCKGEEHRLFWPTQTEFVRLAAQFNATIVPFGVVXEDDLLELLCTFDDIRNAPF

SEQ ID NO: 334389 - protein, 85 aa, Zea mays
  Clone ID: MRT4577_68076C.1.pep
PPAGVGVSGVVEGSAGGYGFRGVGRIRDRRRPYVRVPIAIVGSALLVPRYDHLPSTTSLQHLRARVLLVQASSSDLRDPVRPPVF

SEQ ID NO: 334390 - protein, 234 aa, Zea mays
  unsure (1)..(234): unsure at all Xaa locations
  Clone ID: MRT4577_68077C.1.pep
MMLLMDSGSRGDCSPVCLDLSVGLSPPSPGSGPETTADAERLDRPATGCWGPRTSSLADGQDEAKTLEARLTQVSEENRRLTEIIAYMYASQVAARRSPDGRKRSRDSLEPSNSGDANAAVESAALSDEGTCRRIKLTRVCTKIDPSDTTLTVKDGYQWRKYGQKVTRDNPSPRAYFRCAYAPSCPVKKXGAEERGGQXMLVATYEGEXQPPEPDARRRAPQLHLHQLLRPHHA

SEQ ID NO: 334391 - protein, 90 aa, Zea mays
  Clone ID: MRT4577_68078C.1.pep
HQETPSCKHLKIPTPPPIWYLRCGLSMRRALALSKHRRPLPLVVLPVFLYTIPGTPSPRQVTHDPAENPSIYECPGKPSFSFQSNGENKT

SEQ ID NO: 334392 - protein, 96 aa, Zea mays
  Clone ID: MRT4577_68079C.1.pep
AMISVSRRFSSLTWVSLASRVLACHHHTALWPPMPIDFQDFRDDDDADRLWKPSGEEMVVGQLVTSSCPSARDDVRPPQQPVAGRSSLSASAVVSG

SEQ ID NO: 334393 - protein, 97 aa, Zea mays
  Clone ID: MRT4577_6807C.1.pep
NMEFSFGLSSAGLLECVWFLESTVYSQTLYFFFAVYPRFFSRPESSLCDLSLTLFPHMFFVVLGGFHTRLRESFAGLVKPFPFMSFDSKFSRPLRVG

SEQ ID NO: 334394 - protein, 58 aa, Zea mays
  Clone ID: MRT4577_68080C.1.pep
MAPLSSKAVALVALFSLLVTYAAGAGNFNDSAFTADPNWEDARATWYGAPTGAGPDDD

SEQ ID NO: 334395 - protein, 90 aa, Zea mays
  unsure (1)..(90): unsure at all Xaa locations
  Clone ID: MRT4577_68081C.1.pep
DASAKLWDVREGMCRQTFTGHESDINAICFFPNGNAFATGSDDATCRLFDLRADQELMTYSHDNIICGITSVSFSKXSGRILLAGYDDFN

SEQ ID NO: 334396 - protein, 97 aa, Zea mays
  unsure (1)..(97): unsure at all Xaa locations
  Clone ID: MRT4577_68082C.1.pep
QCNIIGAVVQLDFINHPVLRLIFFFFXDNRXRSMEEFPHCKSIRXXXXGCWGGKXPPHAXGEXPSGGGAQEPXAENKKTSXEXDAXHGQKXXPGCXS

SEQ ID NO: 334397 - protein, 68 aa, Zea mays
  Clone ID: MRT4577_68083C.1.pep
MLGPCLPYSQINFPIPLLLVDARSKKENCSFTQNPSSLICCGCNPMWPSVRQPLASRIVPRRIKFAIY

SEQ ID NO: 334398 - protein, 96 aa, Zea mays
  Clone ID: MRT4577_68084C.1.pep
FKFKGPFFYYNPNQTRFFFGRGQHATNCFLRTTFGKFYLKAVHDPCFWHKAKLENPIRFSFPSWGKGTPKGALPFLLGVGKGHFGTQGTKKQFGGG

SEQ ID NO: 334399 - protein, 115 aa, Zea mays
  Clone ID: MRT4577_68085C.1.pep
NTSGLTHVQVLCNLEGTRADNGSGGAGGAAGGRGRVQPDHDDRGGCANGAAEPRPVPAAGPGRGDDRRLCSGGCASRTTTTTTMCGCCGTRRPAVPRRRSRRRSGARTCMGGPAS

SEQ ID NO: 334400 - protein, 56 aa, Zea mays
  unsure (1)..(56): unsure at all Xaa locations
  Clone ID: MRT4577_68086C.1.pep
PLFQNLVDRSGGAGVGAGGTVVGCEVVLFEHLLWMLENARTRXPESLAELVEYYAC

SEQ ID NO: 334401 - protein, 90 aa, Zea mays
  Clone ID: MRT4577_68087C.1.pep
YFFWFFFFFFIFFFLLFFVLVALVFLTPPNAWLGRDFMLFSRSSWVYKLLETHYAFVWGGGPTPHWGALFIFWSGWLGGVFWVRSNPGAF

SEQ ID NO: 334402 - protein, 83 aa, Zea mays
  Clone ID: MRT4577_68088C.1.pep
VHNSPFEVSTEEETNPPTPGWISPHSNGRAGGGACLRWLLAGGPRPSAAAETGCPSPTCLLFPGSRLMFLPSLCVSYGFCRFA

SEQ ID NO: 334403 - protein, 189 aa, Zea mays
  unsure (1)..(189): unsure at all Xaa locations
  Clone ID: MRT4577_68089C.1.pep
MGLCFSKKKPPAKPGKVAAAVSDDKAKKSPAQQPKRAAAAAANKAAVSAKDAAVPGEEKRRRSGSQGPAAEKQLPVVLVPSAPVRTSSCTKEEVDAILIQCGRLSRSSSGAGRAASTGDTAACGGGHRRRRSGSKRSYDFDQDGGADEECDWERXRGARRPCPAAGRRRTEARXRKRSGSRERSGAGAG

SEQ ID NO: 334404 - protein, 63 aa, Zea mays
  Clone ID: MRT4577_6808C.1.pep
PSYCISITPLDAIPPQFVYEMSNPFFEELNNIPLNNPFFKGFSYFFRLFWIDYLVPNFKMHAL

SEQ ID NO: 334405 - protein, 61 aa, Zea mays
  Clone ID: MRT4577_68090C.1.pep
KKKKKKKKKNIKKKKKRQTVGDLQAPGLLPPTCYALLYCILTPIYCPLVDNVQHWEIPKPS

SEQ ID NO: 334406 - protein, 311 aa, Zea mays
  Clone ID: MRT4577_68091C.1.pep
PCVRRDDAIKDLNRAMEIGDENAIEKFSKRTVKVTGRHNDDCKRLLRLMGVPVVEAPGEAEAQCAALCENHQVYAVASEDMDTLTFGARRFLRHLTDLGYKKSPVTEFDVSKVLEELGLTMDQFIDLCILSGCDYCENIRGIGGQRALKLIRQHGCIEEVLQNLNQTRFSVPEDWPYQEVRTLFKEPNVCAGIPDFTWTSPDPEGLMDFLSTENSFSPDRVTKAVEKIKVARDRYSPGRMKHLTPVASLRGSHTEKEPQCILGSPGQTLKVMSSPQVCKSPSSGFRYGSSKPFMLGRQSGFHGMPYALSFI

SEQ ID NO: 334407 - protein, 82 aa, Zea mays
  Clone ID: MRT4577_68092C.1.pep
LDRSVQQHDHAKITWLSLTSEPSPRETDWRVRDSSTTRHGATESTVMCHSRVLCGCAHQRLKSCSAHDASHRSRRDSESKHE

SEQ ID NO: 334408 - protein, 180 aa, Zea mays
  Clone ID: MRT4577_68093C.1.pep
MPKDRSSRSVSHEGCRSRVSPYKLRSGSRRSEEAAAAAAAAAAKQAAEWEEVRCPVCMDHPHNAVMLVCSSHEKGCRPFICDTSYRHSNCLDQYRKASKESSKDSGAAECAECQQPVKLACPLCRGPVSHWTKDYDARKFMNSKDRACTMESCEFKGAYNQLRKHAREDHPAVRPTEVDP

SEQ ID NO: 334409 - protein, 60 aa, Zea mays
  Clone ID: MRT4577_68094C.1.pep
FFKRVLSTKKGFLAHWKPIAYRRHREPLILEDHFQTLMCSIQAAQGAGSNISLIRTPFHG

SEQ ID NO: 334410 - protein, 170 aa, Zea mays
  Clone ID: MRT4577_68095C.1.pep
MDPNDTEDSLYEAWEHRNLLLRRELIFDLRNGDHVGTEEEGDACSLDVGDGLGRGVGRGDSVSRGRRTTDVGRASTSLGRGVGRGSTCSLARGTTGATGVGCSSVSLESSTGAPTDSKMADDEFDRCDQDENYMPIPPSHHNAEGQLGEEEGDMNNFRDQIANALFDMRM

SEQ ID NO: 334411 - protein, 144 aa, Zea mays
  Clone ID: MRT4577_68096C.1.pep
MAAAMRLGGGALLRRTPVAEARRRLAHTTAEEMREVATRAAQIDKTKEELFDMVIDLNSNYNVPHSMKRKHLLLSQRLSSQIQPRPYDPAWRFCRRTERRNTFYKFVGVATCDLVGSAGLFLLLHGPHHRPKKWVVDWWDKLTS

SEQ ID NO: 334412 - protein, 101 aa, Zea mays
  Clone ID: MRT4577_68097C.1.pep
YLLNLHSSRRLMHPLFHRYRSYKIRSTLYAPYSYNRWFVCVKHILFYDISVLAILVVCIVYMQHILFGLILLVLVVCMCRAYILLLLNIVIMLLLVTGDFF

SEQ ID NO: 334413 - protein, 121 aa, Zea mays
  Clone ID: MRT4577_68098C.1.pep
HTDDMGPTQATGNRPPLEVHNTHITNARFYMTYHNKVRSPKHTIDTFTLGTRTQGSMQHLEHECLTANRQPYCRPTLPAEVVLWILLRVGGISVYTKQHLSLILGTVVAFILMGAFLALGG

SEQ ID NO: 334414 - protein, 85 aa, Zea mays
  Clone ID: MRT4577_68099C.1.pep
SPKKRGNVGPLLNFFFAKLFLPFKPWLVLKFPPPGNGWIPKLPVAQIFPPRLFPPPLCFFWDPQVPFSNPFSKKSGPFFHPNWFL

SEQ ID NO: 334415 - protein, 90 aa, Zea mays
  Clone ID: MRT4577_6809C.1.pep
MKATFFISIIAATVTLVNADPVGISLPEPECPAGPTSCADIIGMSNECYNLNGGDVECSEKAICECPEGCHLVEAPDPVTYPGGACVVIE

SEQ ID NO: 334416 - protein, 283 aa, Zea mays
  unsure (1)..(283): unsure at all Xaa locations
  Clone ID: MRT4577_680C.1.pep
MATALSCKALAVAALLSVVSVVTYGARAQQQPSHNASDSESSQDRSLLSYSSGWLPAKATWYGAPTGAGPDDNGGACGFKGTNQYPFSSMTSCGNEPIFKDGKGCGSCYQIRCLRSNHPACSGVPQTVIITDMNYYPVAKYHFDLSGTAFGAMASSGLNDRLRHAGIIDMQFRRVPCDFPGLTVTFRVQHGSNPMYLAALIEHANMDGDVVQADIMQNNSXGYWEPLHESWGAVWRIDPSRPLCGPFSVRITNQSGKQLVAQNVIPANYIADVDYRSFVQYTN

SEQ ID NO: 334417 - protein, 153 aa, Zea mays
  Clone ID: MRT4577_68100C.1.pep
AQRAGAAATLHPWIPGHATKRQRHHHHAISRRTSRSRRNRSRRSRTRRRRSRRNRSRRSSTPLFAAAQEINISSILIRLSAYIDASIVPSIYNRSYKIRSTLYASYSYNQWFVCVKHILFYDISVLAILGGLYCIRAAYLIRSYFTSTCGLYG

SEQ ID NO: 334418 - protein, 72 aa, Zea mays
  Clone ID: MRT4577_68101C.1.pep
TSIGQAWRTSTQQGATLRMASSRAGWIRRRGYVVRPDPPVPKRVAMLDRQNVQGPDPRMHHAAQQRETCPAP

SEQ ID NO: 334419 - protein, 156 aa, Zea mays
  unsure (1)..(156): unsure at all Xaa locations
  Clone ID: MRT4577_68102C.1.pep
KWGETQKKKWVILGKQRPLGGAQYGGHLKGKKKGGXNGGGGPKQGGGXKKNGGEGKNWGRGGRGXQGGSPRGGKKKPGALGGGPKKGPHKQGGERKQLLQGGNRGXQLGGTKREQTGAKTGGAGIKGQKPQGGPGGXNPENAGRGRGGGQALPKGG

SEQ ID NO: 334420 - protein, 56 aa, Zea mays
  Clone ID: MRT4577_68103C.1.pep
PPLQKWSEGRMVLESGLEKFIYWSFFICFLNFVIKKHVECLRDSLRKMLAMNFYKE

SEQ ID NO: 334421 - protein, 146 aa, Zea mays
  Clone ID: MRT4577_68104C.1.pep
PQPKIYLKRPFKKKGRQTRTGPEIHQLGPGPQQKNQKKGEGGTGKQQKEKGARHQKGKQGHNERLKGVFDLWPPPPEGRPLGAWPTPPGGRPRKKQRGPWGPNKPHNGLLFTGGPHFKQRGGVKGKEGNGTNRAGKEHHSYSILWG

SEQ ID NO: 334422 - protein, 136 aa, Zea mays
  unsure (1)..(136): unsure at all Xaa locations
  Clone ID: MRT4577_68105C.1.pep
SRVDPLVRPHVRPHISLNKMPVSNCDEHQRQPHPFSHLATDYQNQCLALNQLTDMNSAAHIQQQQLPPFSQLADMIHVAFLTQQHYATIYLHAAPNSHTLXQLLQYLPFNQLAMTNPTTFYQHPIIDGSLINIVYK

SEQ ID NO: 334423 - protein, 116 aa, Zea mays
  unsure (1)..(116): unsure at all Xaa locations
  Clone ID: MRT4577_68106C.1.pep
MAGIGPIRHDWKLSVARKKAPTVVVKKDEMAVNAARRASAEIDTMKKYNAGTNKAEFSGTSLNTKRLDDDTENLAHXRLXSDPKKNPMQARAXKKLTQRTTLLTMTNEKPQGIQEY

SEQ ID NO: 334424 - protein, 37 aa, Zea mays
  unsure (1)..(37): unsure at all Xaa locations
  Clone ID: MRT4577_68107C.1.pep
LNIHLYPNVXQXKNFKNLSPNFNKISYILKTFHNSLF

SEQ ID NO: 334425 - protein, 53 aa, Zea mays
  unsure (1)..(53): unsure at all Xaa locations
  Clone ID: MRT4577_68108C.1.pep
LGDAGFVVVVVVIMRVRVVIVLWLDQKLFALVDRSDALLVLACLFGACAAKLX

SEQ ID NO: 334426 - protein, 68 aa, Zea mays
  Clone ID: MRT4577_68109C.1.pep
AKKSFGLFLQMNTIKLFLFFLHMTQGEKNKGWAGKITSNHSWSKEVRFNLKTKKTNHAKTPLKRPPYF

SEQ ID NO: 334427 - protein, 154 aa, Zea mays
  Clone ID: MRT4577_6810C.1.pep
AFLQTNISLNAIKIVPGKYSAVTDHQFRAPYRIRCAAASPGKKRYNIALLPGDGIGPEVISGAKNVLQKAGSLEGLEFDFKEMPVGGAALDLVGVPLPEETFTAAKLSDAILLGAIGGYKWDKNEKHLRPEMALFYLRRDLKVFANLRPATVLP

SEQ ID NO: 334428 - protein, 169 aa, Zea mays
  Clone ID: MRT4577_68110C.1.pep
MSESTSPQKVWLASNDSANIEVDRVVAERSMLIKNMLEDVGDEITQGNPIPIPNVNEAVLRKVIEWCDHHRNDPPQAQDDESDARKKTTDIEEWDQKFMQVDQEMLFEIILASNYLDIKPLLDVGCKTVANMIKGKAPEEIRKTFNITNDFTPEEEEQIRRENEWAEDR

SEQ ID NO: 334429 - protein, 108 aa, Zea mays
  unsure (1)..(108): unsure at all Xaa locations
  Clone ID: MRT4577_68111C.1.pep
XRXRXSPXXXRLXSGSAAYXXXRXRXPIXHSGFGDXNPTPFRXAEXNGXYCPSXXNXXRTSLRYRLTHVXLLCTWNPSXXRPXXFXXXYLLLXPRSAPAXAXTXAXAS

SEQ ID NO: 334430 - protein, 118 aa, Zea mays
  Clone ID: MRT4577_68113C.1.pep
GTKVWPPENEGCKTLFCGDPIGKGREVVCGCVYPGSVECVRFHVAEWRLKLKHELGAAFYAWGFNRMGEEIALSWTDEEEASFKAAAQHSAASSGRNFWNRLHLFFQFKGRKELVSYY

SEQ ID NO: 334431 - protein, 97 aa, Zea mays
  Clone ID: MRT4577_68114C.1.pep
EDEDDKTVLDLAVVLFETATLRSGYLLPDTKAYGDRIERMLRLSLNIDPDAKVEEEPEEEPEETAEDTTEDTEQDEDEEMDVGTDEEEETAKESTAE

SEQ ID NO: 334432 - protein, 72 aa, Zea mays
  Clone ID: MRT4577_68115C.1.pep
SVSHSMINSHVRHEDRLRLPMSSHQHKVVIESLDPAHTTVVISSYINRHPVTDAVANKAGVYVIQFGPGFLS

SEQ ID NO: 334433 - protein, 132 aa, Zea mays
  unsure (1)..(132): unsure at all Xaa locations
  Clone ID: MRT4577_68116C.1.pep
MILSSVNTLTGXDISLGVERTDTLDXIRRLSXDHDSIPPEEDQLILTGKHYKDGLSLADYNFLSDSALHIELRLRRALHNVVKELTGTIITLYVDVYDTIRLVDGMIQDKVXIRLDKNMLSFGAKYLVDVRT

SEQ ID NO: 334434 - protein, 55 aa, Zea mays
  Clone ID: MRT4577_68117C.1.pep
PGISFFFFNIKKKRLTQQKRVLIWNQFVHVLASGLEPYYHDHIATTTARVLGGAI

SEQ ID NO: 334435 - protein, 55 aa, Zea mays
  Clone ID: MRT4577_68118C.1.pep
GETRPPVALELAVQGTDKVLRLTGVAHPRRNIGTEGGHPWRCGRHHACALQSNKG

SEQ ID NO: 334436 - protein, 521 aa, Zea mays
  Clone ID: MRT4577_68119C.1.pep
PTRPSWVTQLEEHLKAGSLKVYMYHGERTRDKKELLKYDLVLTTYSILGTEFEQEDSPVKDIEWFRVILDEAHVIKNSAARQTKAVIALNAERRWVVTGTPIQNSSFDLYPLMAFLRFQPFSIKSYWQSLIQRPLEKGSKAGLSRLQNLLGAISLRRIKEMDDGNKSMVELPSKTVLACYIDLSAEEREYYDQMEQEGRNKMQEFGDRDSILSNYSTVLYFILRLRQLCDDVALCPLDMKAWFPASSIEDVSKHPELLKKLALLVDDGDDFDCPICLSPPTKTVITSCTHIYCQTCILKILKSSSSRCPICRRTLSKEDLFLAPEVKHPDEDGSGNLESDRPLSSKVQALLKLLTASQNEDPSSKSVVFSQFRKMLILLEAPLRRAGFKTLRLDGSMSAKKRLQVIQEFSHGGSDSPTVLLASLKAAGAGVNLTAASTVYLFDPWWNPGVEEQAMDRVHRIGQKKEVKVIRLIVKGSIEERILALQERKKRLISGAFGKKGGKNEKEMRVEELRMMLGLGK

SEQ ID NO: 334437 - protein, 141 aa, Zea mays
  Clone ID: MRT4577_6811C.1.pep
VTSSSLLYPMMSAMLYSRLLYWMVECIQEPCCNKCRQALYMQYGLLCLGREQNMMLPLLRIHFIFVWPLYGYEDHVSVHVSGSLPQQSLCRPLAYRHPVACISVPIKHDSGVLQWAFQSESSIRLSHSGMQQCLQIAVVRS

SEQ ID NO: 334438 - protein, 67 aa, Zea mays
  unsure (1)..(67): unsure at all Xaa locations
  Clone ID: MRT4577_68120C.1.pep
MADQLTDDQIAEFKEAFSLFDKDGDGCITTKELGTVMRSLGQNPXEADVDGDGQINYEEFVKVMMAK

SEQ ID NO: 334439 - protein, 95 aa, Zea mays
  unsure (1)..(95): unsure at all Xaa locations
  Clone ID: MRT4577_68121C.1.pep
STIFILWXAKSWALPALLALFATXTHASITPQCSLAPIIIISQFLPPYTIMASLHPFVLAHRLQQAFSLNILQQPIALFQQQFLPHLTILTILTQ

SEQ ID NO: 334440 - protein, 149 aa, Zea mays; identical to SEQ ID NO: 215200
  Clone ID: MRT4577_68122C.1.pep

SEQ ID NO: 334441 - protein, 149 aa, Zea mays; identical to SEQ ID NO: 215200
  Clone ID: MRT4577_68123C.1.pep

SEQ ID NO: 334442 - protein, 144 aa, Zea mays
  Clone ID: MRT4577_68124C.1.pep
GGKPIPQSGRTPREGAGKWGGPAESTPRKKGGLMQGYRGGPTPVFPAQRVGKAGGGVFKAPPQGGERAPKSKAKKPARGREFPKNAPKGRRAGKKNFFLYRVYWALYMYVLFFFQCLCIFFFFFLFFFFFFLFFFFFFFFFFFF

SEQ ID NO: 334443 - protein, 149 aa, Zea mays; identical to SEQ ID NO: 215200
  Clone ID: MRT4577_68125C.1.pep

SEQ ID NO: 334444 - protein, 90 aa, Zea mays
  unsure (1)..(90): unsure at all Xaa locations
  Clone ID: MRT4577_68126C.1.pep
GATLTLAHTDMTRSSTYATMPNMSXLMLALGTGPYQADLFHKVTHAPSKALLXIXSVCVIHSMEPHVGYSPNNRQNMDLMGEXRKYVPRT

SEQ ID NO: 334445 - protein, 41 aa, Zea mays
  Clone ID: MRT4577_68127C.1.pep
REWGREQSMDTTRKARPRGAMMALCVVMRYKQPPFRLEKET

SEQ ID NO: 334446 - protein, 93 aa, Zea mays
  Clone ID: MRT4577_68128C.1.pep
HIQYLKLSHHKGVENRKARELLQIKTTEMTLTRRDGDYSAPEHVLHLAHTMKTAEDNLKRTALYELHIHPPRIESTQPRLEHAHSVQRLHTGL

SEQ ID NO: 334447 - protein, 62 aa, Zea mays
  unsure (1)..(62): unsure at all Xaa locations
  Clone ID: MRT4577_68129C.1.pep
GPFKGGSMNPARSFGPPFPGGDFSGNWFYWVGPFFGGGLVGFFXGKFFIGGSYKKFGDQDYA

SEQ ID NO: 334448 - protein, 127 aa, Zea mays
  Clone ID: MRT4577_6812C.1.pep
MNAPDRFELFLLGEGEKKIEEKAFSGMSNTSDFVLMKEDHTLGNLLSEHLKMHPNVHMAGYKIAHPNVPELFIRVQTDGTITPRDVFTSVCEKLINQLEMLHQEFTREWELRRITTAGEQGNMQNGH

SEQ ID NO: 334449 - protein, 107 aa, Zea mays
  Clone ID: MRT4577_68130C.1.pep
MKGYDRLNPPQSIQSNLIIVFTLCIRSSSSLASLYLESSPLFHYMSTRGVLGGYPPQSIQSNLIIVFTLCIRSSSSLASLYLESSPLFHYMSTRGVLGGLPSPRHTL

SEQ ID NO: 334450 - protein, 231 aa, Zea mays
  unsure (1)..(231): unsure at all Xaa locations
  Clone ID: MRT4577_68131C.1.pep
HPSIPCAPPPCTAIARESPARSPPPSMRRRRESSAAPSSRSPRAAREEQSPAPPDPPRTRPRRLAPPPPRQPAAARRARSPSPRAPPPPRNHAPSPLRSASPGRAALPDLLRPWPCRPAPPPPXAPAPRRRXSSSPSPTRRDHDPISCVRPASLLLCSTRPSWSSSASPSHLPLGSGRIEPARVHHHHYLAPSPASPATWALIPVFSASSVPLAASVRFEQQQLVAQRHAT

SEQ ID NO: 334451 - protein, 119 aa, Zea mays
  Clone ID: MRT4577_68132C.1.pep
MRSKFKDEHPFEKRKAEAERIRQKYNDRIPVICEKVEKSDIATIDKKKYLVPADLTVGQFVYVIRKRIKLSPEKAIFIFVDEVLPPTAALMSSIYEEHKDEDGFLYITYSGENTFGEAI

SEQ ID NO: 334452 - protein, 239 aa, Zea mays
  Clone ID: MRT4577_68133C.1.pep
LHGLGIAAIGLDWASISSYLGSPLVSPWFATANVAAGFFIVMYIIVPIGYWFDFYKAQTFPIYSSGLFTSAGQKYNISAIVDDHFHLDIEAYEKNGPLYLSTLFAVTYGIGFASLTATIVHVILFHGREILQLSRSAFQGKSVDIHTKLMRRYKQVPEWWFICILVVNIAVTVFACEYYIEQLQLPWWGVLLACSIAFFFTLPIGIITATTNQTPGLNIITEYIIGYLYPGRPVANMCF

SEQ ID NO: 334453 - protein, 188 aa, Zea mays
  unsure (1)..(188): unsure at all Xaa locations
  Clone ID: MRT4577_68134C.1.pep
LIIRLDLGKECVQDSFPDLVSSILREKGPKEALQFLNVLEPLLMEHLLLDGLSLSLRDFNVPKALLEEAQKDIRNQSLILEQSRCSTSQFVEFRVENNLKNVKQDNSDSVGKFSDLGLLIDPKKEASMLKVVYQVGFVGLQLYXEGKLYLRRLVEDLLTNFVNKHLSMEMSILRSVWSLSRLYFSWPH

SEQ ID NO: 334454 - protein, 318 aa, Zea mays
  unsure (1)..(318): unsure at all Xaa locations
  Clone ID: MRT4577_68135C.1.pep
HPRLFMGMTAHPKKDPVTGEVFAFRYGPVPPFVTYFRFDPAGNKGPDVPIFSVQQPSFLHDFAVTERYAIFPEIQIVMQPMGMVTGGAPVGSDSGKVPRLGVLPXKYATDESEMRWFEVPGFNMMHSLNAWEEADGEELVLVAPNVLSVEHALERMELVHSCVEKVRMNLRTGAVSRTPLSAGNLDFGVIHPGYLGRRNRYGYLGIGDPMPKISGVAKLDLDRAGTGDCTVARRDFGPGCFAGEPFFVPDDVEGDGNEDDGYLVCYVHNERTGENQFVVMDARSPQLDIVAEVQLPARVPYGFHGMFVTQAELQAQQQ

SEQ ID NO: 334455 - protein, 129 aa, Zea mays
  Clone ID: MRT4577_68136C.1.pep
WEGLCFPFPPVLFPRAPFSQVFGRIPPRSFFGSLKTFPFPVLGTGFFILSGRFGVRNLKPGPFLFFLPAFAFLFNHLGSRFFFVFLYLRREEKNFLLFLQNIFFFFFVKKIFFTKNKFILLLYLSPFHF

SEQ ID NO: 334456 - protein, 194 aa, Zea mays
  Clone ID: MRT4577_68137C.1.pep
PRVRKGPHPNEVKNEGYSAGTQCNPADSLTILYNNLCQEAIKFAKEGSVTEEIYHVAVSALKEAAEKVAEVKRSRPTLSHCGFVRESKHDVLQEKSMSALQCSNQVELTRTSPGSRPLQDSASNLLLIPTDILTDSRLYSGVDTAPLTGGFPTNESESTHASESSFMHYKNTKKTSSEKSQNTCFNQLVHGKEA

SEQ ID NO: 334457 - protein, 102 aa, Zea mays
  Clone ID: MRT4577_68138C.1.pep
SLHANGLHQRTEYRQHEPCEGPPMGSLLTGINCYYGDRNQNYGGASRISIAAISNRASEPRFSATYAHMDAPWGGSISFNGKNSFATNARGAIFVGTRNQRS

SEQ ID NO: 334458 - protein, 83 aa, Zea mays
  Clone ID: MRT4577_68139C.1.pep
TFGARAVEAGVLEHELYALSGRDSPGYLGVFVVGLRGRFSLRNGNISLCCTITSFECTVESTHSYNFFDPEGCVPKAGVISST

SEQ ID NO: 334459 - protein, 228 aa, Zea mays
  unsure (1)..(228): unsure at all Xaa locations
  Clone ID: MRT4577_6813C.1.pep
MVLTFLPSPPSSSPSPPHLGHNSSPXPAGGSPDRPTASSGRSPPPPPGASPSXGAASSAAQLSXSRDIPMATSKKGPXIPAGTGPPGWPPTSSPPAASSPPPATARXARSVPSSPDRKLGPSAAAAAAAAPSASPDMCRPSLSHAGRSISSRTMSGSGPSIHGSKPASKPALARAKSDKVTANSQRPHALAGPLSSSFKDTANSSSTLLKNKLSPRPTPGKGVASPKP

SEQ ID NO: 334460 - protein, 88 aa, Zea mays
  Clone ID: MRT4577_68140C.1.pep
DHVPTHTNNGIIDQAARCLDMSTRAWDKIEETRKRRIRSRTVCTASMAAPPSLAASTPLRHHVHGRRPLQQVLTTRASQRQVTAGRVG

SEQ ID NO: 334461 - protein, 52 aa, Zea mays
  Clone ID: MRT4577_68141C.1.pep
RFMYDKFVFYLPPTIGFESLSKTTYLEHRSVRLQLWDTARQDTFRTPIPSYI

SEQ ID NO: 334462 - protein, 487 aa, Zea mays
  Clone ID: MRT4577_68142C.1.pep
PTRDASNPFGDPTPFKAVLDESPALPQTHAAPAGSFQPTGPGTDVNPFQPASAASFGFGDTLGDLTFAPNAAPELQDMFANTASLPSEVAPANPSVVLQQPVPTNFSSQVSQPVAGTLHAAPTAFAPSQAPPTSFAHSQAPQAAPAFSYSQGPHPGAAIQSQFPQTVAPSFPPSQVPQSVTPNLPPGQSNFFLQSASGSGIDSLSGVPTQNGAPSYIPPQNSQFTAPANQQPLQPSFIPQTSTPALQPALISRGASQPLGVPNSVPTSGSFPLQSSSSAPPETIVSALQVNQTEPVKKFEPRSKLWSDTLSRGLVNLDISGPKANPHADIGVDFDSINRKEKRQEKKINQAPVVSTVTMGKAMGAGSGIGRAGVGAMAPPPNQMGAGRGMGPGAGAGYGGGMGMNRPMGMGMGMNQQQMRMGMNQQPMGMGMGMNQQPMGGMNMGMGMNQGMPMRPPMGMGPGGMPGAGYNQMGAAYGGQQPYGGYR

SEQ ID NO: 334463 - protein, 42 aa, Zea mays
  Clone ID: MRT4577_68143C.1.pep
RLNRFEGQMGICSSLFSQCVADILLIITVAESADELYMSYTS

SEQ ID NO: 334464 - protein, 102 aa, Zea mays
  Clone ID: MRT4577_68144C.1.pep
MFTATTEAEVRESLGTKFGRLKVQAKDMASRHPVAGDVCDIAVSAVGAYFLWPVAAPAEYMMNAPGAGAALVSRVAALAKKDLYFKLLHTVGAAELLPALRV

SEQ ID NO: 334465 - protein, 71 aa, Zea mays
  Clone ID: MRT4577_68145C.1.pep
GGVLLFRAVVVLDLFLSWLFGVWGAFGLFWVILCRFFWEAGVFVFPVIISPSPHGFGLGVFVYNEKGFAQK

SEQ ID NO: 334466 - protein, 84 aa, Zea mays
  Clone ID: MRT4577_68146C.1.pep
EQNLLLFIGILKFVLTASGNFFFFGGSKQSFQGKRENLGFIPDEDRKLGDPTSTEKKNGGNKTKFGGPCKLGCTIKQILGGMLY

SEQ ID NO: 334467 - protein, 69 aa, Zea mays
  Clone ID: MRT4577_68147C.1.pep
SHNVYTRNTIASPGGVLCCLELILLPFTYAGLRARRSNTCLTTVYALLASLLNFIRCYGTDYHSPTPCP

SEQ ID NO: 334468 - protein, 167 aa, Zea mays
  unsure (1)..(167): unsure at all Xaa locations
  Clone ID: MRT4577_68148C.1.pep
VCALGQSKTMDITYQAMVLXRRVEPAIDLDAGEPXDCHTHPAIVKAAMDAIRNGCSTYTTNAVTMELRKAIDTKLYXDNGDSYLPHDVLKSNGTKPCITQACALHISSLWXEGLIAAYXQPPERLTXADATPGILPTNILQNLYGRSYALTDKINERIELLILCSPS

SEQ ID NO: 334469 - protein, 89 aa, Zea mays
  unsure (1)..(89): unsure at all Xaa locations
  Clone ID: MRT4577_68149C.1.pep
NLHRXAAIPXSWARSTLXXXVHQVVHFRDHEXGFFDIXXGXAPXMXLXTSGRXPQQRQLXXXXXWKGGPSARCAGATPWSXARVSSXRG

SEQ ID NO: 334470 - protein, 102 aa, Zea mays
  unsure (1)..(102): unsure at all Xaa locations
  Clone ID: MRT4577_6814C.1.pep
FGTRQKPIWIMTPEDITTEDXVAFYKSVPNLREDHLGANHFCGRDRLRLLDQVQAQIRAPFQLSDXRRQAAANKVYQRQFLILEISLKLTPERLSLGMGIAA

SEQ ID NO: 334471 - protein, 72 aa, Zea mays
  Clone ID: MRT4577_68150C.1.pep
RQDGEGILRGMLPLLSAGHILEGTVTTDSERQSVRCVRLHFICGWLEFLWCVIVLGLVIIGRNNVITPCGKP

SEQ ID NO: 334472 - protein, 45 aa, Zea mays
  Clone ID: MRT4577_68151C.1.pep
KTIRPLQALQNVQENPNKVCPPGWNPGERSIKPPPKGNKKYFPAI

SEQ ID NO: 334473 - protein, 100 aa, Zea mays
  unsure (1)..(100): unsure at all Xaa locations
  Clone ID: MRT4577_68152C.1.pep
AIALWSQIRVLYQHSCHCHCPNTGLPPGYAPKLSEPISGPQGEPASSKICPFPGLVRCHSNQQWHRXLCPQLVPPQPAFMGQMSAMHLLRLRPCQPVCVC

SEQ ID NO: 334474 - protein, 88 aa, Zea mays
  Clone ID: MRT4577_68153C.1.pep
KAVTGGDTFFSLKKRCLGVSRQLFYLTAGFPWAVDTFLVFSKQKRDNWVIRRGGCFTIYGTTFFSVGQSFFLRGLVCGHGLSLGRTLG

SEQ ID NO: 334475 - protein, 126 aa, Zea mays
  unsure (1)..(126): unsure at all Xaa locations
  Clone ID: MRT4577_68154C.1.pep
GRDAGHSPRXRHAAGHAGGHGHGPARRGXRRRSGRCRGGGGGGGRERRGLRLGGHGGVEGLRERRGGLGLEEGLHLRRRRRLVAPAREVPQAVGLRPRREQGSRAERQQQAFCFARHRSLSAVSEL

SEQ ID NO: 334476 - protein, 136 aa, Zea mays
  unsure (1)..(136): unsure at all Xaa locations
  Clone ID: MRT4577_68155C.1.pep
MACKTKGLLLALCVAALLAARSECHGLGDFTSGSGEATTTPEMQTFFKPQAAAALPEALDASMPAKPEAAAAALPATTTAGTAPSATPRRPVSVAAGVACGVAAVAVAGIAAAVAYVVXARRAARDGGAARLAPPP

SEQ ID NO: 334477 - protein, 108 aa, Zea mays
  unsure (1)..(108): unsure at all Xaa locations
  Clone ID: MRT4577_68156C.1.pep
LAVARGVXFVNPRRXVGWLTGLLXGWGPTVSAPHGFFXFXXXGGGGGEFFFFSSXXLVAXGRVARGRAAHQVSLVXLFVLPPXAGGFLPRVGRCGRSGGLGVALYFVT

SEQ ID NO: 334478 - protein, 311 aa, Zea mays
  Clone ID: MRT4577_68157C.1.pep
HASAPPPAPAPAAAPVPVPAPAPAAPPAPVPAPAAAPSLIPAPAPVSGDALASADGNAFWTVCPYCCHVYQYQRALVGRALRCQSAGCRRAFEATEIPNAPPIVPGTDMYYCAWGFFPMGFPKAADLSTNWRPFCPMFPGNSESPLQPAPAVTVNVDVQNLENNGGTDVQNVENNGIDDNSTPASVQPPGKSGDIDRAAGPSRGRMKKTTARKKVGAVSKKHGSSGVDSGIEPSMLGADSLNGNAGSGQTVGTREININEVAMPTDSATMLNFGGDEDIRFDLDVDATDAILGNLHNLPFLREDGNNRRMF

SEQ ID NO: 334479 - protein, 142 aa, Zea mays
  Clone ID: MRT4577_68158C.1.pep
SFNHLIGHSFDKYLILKTIVTPSKKRWTGKTRGCRTGKQGSHRGGVQASCGGWADWAAAGEGATAGDERILQGSLDASRVAGMVDTVFSSLLFTIFNFSPLVGGSNHQLVEFVTLSQYYLNLWNLRFTLVQPSGKELHTVYI

SEQ ID NO: 334480 - protein, 50 aa, Zea mays
  Clone ID: MRT4577_68159C.1.pep
PRRTASALQEVKATENRDHGFGRCVRLEHQGPTHPRFDDSFKVHLVDIRQ

SEQ ID NO: 334481 - protein, 229 aa, Zea mays
  Clone ID: MRT4577_6815C.1.pep
MGDTGANMAHWGGLYGRGGAPATTEAVTTAGGGGSVSSPTSGGSGGSPSRAQLQPGVGVEGGRVGKPARRRSRASRRAPVTLLNTDTSNFRAMVQQFTGVPPGPYGPGPGGGGGPVISFGAEYGGAQLVRPSPTSAVMSFDPQHHHHRPTAASSLQSQLFRPQQQQQYGADVGGYGVHGMAMAAPSSFLHGGFEASSEDRLLLQSMMQASTMPTGHPPPTNNGNGYHFG

SEQ ID NO: 334482 - protein, 67 aa, Zea mays
  Clone ID: MRT4577_68160C.1.pep
GRPSLPRVTPPPAPVGGVTRTRDGRHCFFKPALHLQLLPSRRQQQPSTHRICHSFPRLSQLTNTASR

SEQ ID NO: 334483 - protein, 111 aa, Zea mays
  unsure (1)..(111): unsure at all Xaa locations
  Clone ID: MRT4577_68161C.1.pep
MFIIIMLHLHMDFSFLEMNPFTMVNGETYPLDIRGELDDTTGFKNFKKXQIPRDTISCCHCWIYSYQLCRWGGIEFPLPFGRVLSPTESFIHELDEKVLISGLYFYLSFFP

SEQ ID NO: 334484 - protein, 196 aa, Zea mays
  unsure (1)..(196): unsure at all Xaa locations
  Clone ID: MRT4577_68162C.1.pep
RAEKKNSSHTKLGPNCCRIPWLDSPPPSVRPIGGPLPRGDGRSTAAAEWGLGGDDRPPDTAAGVMRGTSAEKHTTIMGHDHMCRVKMRMGEGAFGDRNRGQQPGCNEVVDGRGVYCKTHRGECGCEQVXHLQSGLGSAXPCAEQXVHGKHEGDDRGELKERSGDTLGQTAQFVFPGAGMFCKNDRCCERAHENSIY

SEQ ID NO: 334485 - protein, 87 aa, Zea mays
  unsure (1)..(87): unsure at all Xaa locations
  Clone ID: MRT4577_68163C.1.pep
ETEKEQGGGGRQIHAIDCLPHRQRPLLLCSPRTGEARLHLLAAGTYLRGKPHTSLNPVGGGDHXEKSGNAPKEGQDLYSDLGLKEEN

SEQ ID NO: 334486 - protein, 156 aa, Zea mays
  Clone ID: MRT4577_68164C.1.pep
PSPPKPPAPKPPPFPSTPPVFFPPRPPPPFFLKAIPSLPPFCQFLGPFGGLDPWKGFFLAPRQKLASYGNYYYKRPLFPFFGPSSFFAAPRPRLTIQERITQSFFLPACFFPSRPFYFLVCLSHMFNPPPFFFRVCYGFSPLLGVNPLLIWANLPG

SEQ ID NO: 334487 - protein, 263 aa, Zea mays
  unsure (1)..(263): unsure at all Xaa locations
  Clone ID: MRT4577_68165C.1.pep
MWRRALAMVLFMAGAALLAGAAGASAQQGVWSIITRPMFQSMLSHRGDSGCQGAFYTYDAFIEAASKFPGFGTTGDEQTRRRELAAFFGQTSHETTGGWXATAPDGPFAWGYCRVKEQKQTDPPYYGRGPIQLXLISTTTGSPGXLNLNLVGDPDLVARDPVVAFKTAIWFWMTPQSPKPSCHAVMTGDWRPSATDRAAGRLPGYGLTTNIINGGLECGEDRSTDGAKAAKDRVGYYKRYCGMLRXVGYGDNMAWRXQKPYGG

SEQ ID NO: 334488 - protein, 102 aa, Zea mays
  Clone ID: MRT4577_68166C.1.pep
MSGINNVFSLLLSPAWVQPFVMPFLGEWGDRSQIATVAMAPGSDYWWVTGGATAGHAICTAGAVIAGRAIAGKISMPNVPLGGAIAFLVLGIIYSFERYSPK

SEQ ID NO: 334489 - protein, 60 aa, Zea mays
  Clone ID: MRT4577_68167C.1.pep
KKKPPQWMAYNLRPDFSNVNREIKVSETQKKLKRRLKKRKMSFFPPWKVFPVPQSNVWRF

SEQ ID NO: 334490 - protein, 84 aa, Zea mays
  Clone ID: MRT4577_68168C.1.pep
SILTKGHQTCLGQAKERHAGGPDEAGITKQGGEISTTTNTRGNRTRTRTHTNRFYSRPNGETAQYTSGDRRSHSMHLRQQRREN

SEQ ID NO: 334491 - protein, 255 aa, Zea mays
  Clone ID: MRT4577_68169C.1.pep
MALLAAATLNPTTHLSLRSRAGRNSENLWLRSAASSQKSKGRFCNLTVRAGTPSKPAEPIGPVFTKLKPWQIPKRDWFDKDFLFGASTSAYQIEGAWDEDGKGPSTWDHFCHKYPERISDRTNGDVAADSYHLYEEDVKALKDMGMKVYRFSISWSRILPNGTGEVNQAGIDYYNKLINSLISHDIVPYVTIWHWDTPQALEDKYGGFLDLQIVDDYKQFAKVCFESFGDRVKNWFTFNEPHTYCCFSYGEGDHG

SEQ ID NO: 334492 - protein, 140 aa, Zea mays
  Clone ID: MRT4577_6816C.1.pep
FQRSSPPPYSHGAAVLQLCLVATRFPVPPRPWSSLCPVWCPALHDGRPRREPAPASSSRDARLLHAQILPASPSRPSRRINDCQTSPPVKLCPGRDVLAHPCFPSPLIVSTSSSTNPAVASSSLVGRRAPCSVSSFHVGS

SEQ ID NO: 334493 - protein, 236 aa, Zea mays
  Clone ID: MRT4577_68170C.1.pep
GGNAWGQYDEDEYVGAYDEKATYKELFSDIEESGSEYIPDSDDEDHDDCVVDDNGDPLFVTTTDLENPNIAVGVRFEDGPTFKKAIRQWAILHEVEIGAHYSESSRYRGFCKAKKCNWRIHASQLPDGKTWQVKKMSKRHYCRSRSKMEKNCMANQYWVRDKVVPMLRENPNLGAGALVKKLQEKYLIQVSYCVAWKGKELALDELMGKWEDSFDHIYAFKAAIEKESSGSVVEIQ

SEQ ID NO: 334494 - protein, 587 aa, Zea mays
  unsure (1)..(587): unsure at all Xaa locations
  Clone ID: MRT4577_68171C.1.pep
PSSRIYHGFRPGGFCKAKKCNWRIHASQLPDGKTWQVKKMSKRHYCRSRSKMEKNCMANQYWVRDKVVPMLRENPNLGAGALVKKLQEKYLIQVSYCVAWKGKELALDELMGKWEDSFDHIYAFKAAIEKESPGSVVEIQTEKVGEKIRFCKMFVAFKACIDGFLQGCRPYLGIDSTVLTGRWKGQLASAVAIDGHNWMFPVALGLFESESKDSWKWFMEKLQTAIGSPHGLVISTDAGKGIDSALTNAFNNGVEHRECVRHLFKNFQKRFHGEVFERNLWPAARAYRRTVHDKHYNIMKIASPAAIKWLEDTHKHLWARCYFSTASKCDYVTNNIAETFNCWIKDEKSLPPVELIDRIRQKILEKFFVRKNLADKLTGTILPSVMKQLHDAGRGLVGYVVHKGPDHTAEVSGVHKDLTPWRHTIDLVNRECSCKKWQLTGLPCTHALSVIGCFRNLKLEDYVDSYYSVEKFKTAYVGKIPTLTDKTEWEQPEVGYKVWPPILKRAAGXPRTRRFIGVEXXGSGKKRHKCKRCGQFGHQMRTCNEPVYDSDAPPPTAPKPKRVRQKKKKVVVVEDDPLSLPAPSSPV

SEQ ID NO: 334495 - protein, 68 aa, Zea mays
  Clone ID: MRT4577_68172C.1.pep
PRVRGPSKAMIAPAVAIRVRSLSLRGPSMSLTASSMSVKEDQTFSHRSHDATESVPMNLSARQITLSV

SEQ ID NO: 334496 - protein, 172 aa, Zea mays
  unsure (1)..(172): unsure at all Xaa locations
  Clone ID: MRT4577_68173C.1.pep
MERRRKAMWLYPKVVGFNPPERWGHSACFFEGFVYVFGFPVKGASPGVRAGHAAMSVGSKVYIIGGVGDKHYYSDVWVLDVTNRSWSQLEVCGQXPQGRFSHTAVAMNTDIAIYGGCGEDERPLNELLILQLGSEHPNGRYNISMCKVLSNHWSQERRKFLRSEARDASVSN

SEQ ID NO: 334497 - protein, 587 aa, Zea mays
  Clone ID: MRT4577_68174C.1.pep
MCDASLAPSWQISSATETAGVTACEENAGSLARSPSLSPRCISFLCRLLSPSSLSLQSSSPPCFLPLPLLFHQREKKLDLARADRRRSRSNRDMERRRKAMWLYPKVVGFNPPERWGHSACFFEGFVYVFGGCCGGLHFGDVLKLNVETMAWSLVATTGQCPGTRDSHGAALVGHRMLVFGGTNGGRKVNDLHVLDLRTGEWTRPQCKGAPPPSPRESHTVTVVGGDRLVVFGGSGEGEGNYLCDVHVLDVPTMTWSSPEVRGGHAPAPRDSHSAVAVGRRLFVFGGDCGDRYHGDVDVLDVDTMAWSMFPVKGASPGVRAGHAAMSVGSKVYIIGGVGDKHYYSDVWVLDVTNRSWSQLEVCGQRPQGRFSHTAVAMNTDIAIYGGCGEDERPLNELLILQLGSEHPNGRYNISMCKVLSNHWSQEKRKFLRSEARDASVSNGEMAQKPREAETEQRNPFLRGLENGRVKRRRTGEARPKEAESEQEEHSLSLSQHSSPSQSDQEQTGAHKLPASANTSPSALQPFARLNGNGAQLRAAGPGGVSSRPLKADQLLRTIAPQHRREVQFLSSDHQPQPRGPPGPPHL

SEQ ID NO: 334498 - protein, 42 aa, Zea mays
  Clone ID: MRT4577_68175C.1.pep
AYQHVLIHGRKVFSDVSTLDEDLGTDNNVVVIMLRQNKGSSS

SEQ ID NO: 334499 - protein, 58 aa, Zea mays
  Clone ID: MRT4577_68176C.1.pep
WISSLSSQLFIAVLCALLLFMEVVKGSAVSLITLDSVCLKICPLFSVCVPFLLIMNPF

SEQ ID NO: 334500 - protein, 78 aa, Zea mays
  Clone ID: MRT4577_68177C.1.pep
TSTLSPAHAGQAPRRCFVDVIVLSLTPLACCNTLILGETFSFLIFPKFRGYPLFSLLFFSFFKKRRGILLCISISLLN

SEQ ID NO: 334501 - protein, 49 aa, Zea mays
  Clone ID: MRT4577_68178C.1.pep
VPLSSYRASLQYRRFVATRSWTCMHCRSDRTTSIVCEAAVTFILGHYLR

SEQ ID NO: 334502 - protein, 115 aa, Zea mays
  unsure (1)..(115): unsure at all Xaa locations
  Clone ID: MRT4577_68179C.1.pep
QGPQRESWCQFPPPPLVFPPCKGYPPKKVNGSXVKVGIPPPKVFVLKLKLPKDPKALLDPKARGRPPHKAKGNFSPEEVPPPPPGGPPPGPSFPGNKLGFSRSFNGCGTPFSPSL

SEQ ID NO: 334503 - protein, 231 aa, Zea mays
  Clone ID: MRT4577_6817C.1.pep
MGDTGANMAHWGGLYGGVAAAGVVAVTTAGGGGSVSSPTSGFFFCSPSRAQLQPGVGVEGGRVGKPARRRSRASRRAPVTLLNTDTSNFRAMVQQFTGVPPGPYGPGPGGGGGGPVISFGAEYGGAQLVRPSPTSAVMSFDPQHHHHRPTAASSLQSQLFRPQQQQQQQYGADVGGYGVHGMAMAAPSSFLHGGFEASPEDRLLLQSMMQASTMPTGHPPPTNNGNGYHFG

SEQ ID NO: 334504 - protein, 39 aa, Zea mays
  Clone ID: MRT4577_68180C.1.pep
KKKTRDIEISKLKNTNIRPDYFDVPSSSTQSFDLIAPIS

SEQ ID NO: 334505 - protein, 159 aa, Zea mays
  Clone ID: MRT4577_68181C.1.pep
SGPCAERGSRILSPSPPLRRYFPVAGISRVGSRGIKRCGRPARIRCLRCSPHSLPFEPPLPSPPGTPPSPVPIVSSIVLVVVILVVVIVINLCVPSVAHAPRLGPHLRISVLVWLCSIRGLLWLCGFSPCRSLLSGFDLQIGRKQGGHYHLQDKRNFSL

SEQ ID NO: 334506 - protein, 75 aa, Zea mays
  unsure (1)..(75): unsure at all Xaa locations
  Clone ID: MRT4577_68182C.1.pep
TAXKPSYLAELSRPHRRXXTGCVTVYGAERVYDYLVRSLSPGAQTLFACGSRSPPPHLRSSRLIRTCRRLPTLST

SEQ ID NO: 334507 - protein, 42 aa, Zea mays
  Clone ID: MRT4577_68183C.1.pep
SLLYISVQTVNVGAVIYNKDLRKIYKLLSISAPTHASADAWA

SEQ ID NO: 334508 - protein, 61 aa, Zea mays
  unsure (1)..(61): unsure at all Xaa locations
  Clone ID: MRT4577_68184C.1.pep
WPPFFFFNXTSKAHTVVFVGFYVKPHKYSRKIQRLHTCTLFWANKIKPLCTQLKRSPLLKI

SEQ ID NO: 334509 - protein, 54 aa, Zea mays
  Clone ID: MRT4577_68185C.1.pep
VNNILRLLQVIIKAPQFVCNIDQPYRNYQFNTKNKINPWKLKARLCLKTLLMSI

SEQ ID NO: 334510 - protein, 87 aa, Zea mays
  Clone ID: MRT4577_68186C.1.pep
SSDNSSRPCRPPLRPPNFAPPMAVVAHAGLPRPRLFLPFSFHGSPIYSSCLSLALPSVAVDYDHGNPWCRPDTPHNGASREHIQCHS

SEQ ID NO: 334511 - protein, 223 aa, Zea mays
  Clone ID: MRT4577_68187C.1.pep
PPRLAGPSSPWRLPPNAIHLHALNLARLSPHLYYFWPATEVLLLDLCLCAHQPFIAAASSHLLSTTASSPSPSSSPALATGRHQPQAPTWNARAQPPVDLPRRLLLRSPAFPPAPAIQQLAHPTREFSASRCPSHGRCPARAGIALGPLPTSSRQLGISPRFPASPDPAAPVSTWLTLLPARPLLVCLLCYLTGELGFSSVARPWTPEHTPASCCGTFGSPEP

SEQ ID NO: 334512 - protein, 46 aa, Zea mays
  Clone ID: MRT4577_68188C.1.pep
VSTVDFPRKTTLYYAVQRSHKSYNAHVLKDHTKNSLISIFTFGQNG

SEQ ID NO: 334513 - protein, 91 aa, Zea mays
  Clone ID: MRT4577_68189C.1.pep
RNGRCGRRSVRGNQDTQFSIFCAHKYWVQGYIFTRPWVPKCLSGLPYIYLADPYILHRKIVVVWSQQPACATLFFSLRFILLHLKPLTWGA

SEQ ID NO: 334514 - protein, 90 aa, Zea mays
  Clone ID: MRT4577_6818C.1.pep
GRSFPVRLPAVVCCVLRLQFGLFLASSATNRIITAKDHASVQINIGHLDANGLYDGHFTTFALSGFVRAQGDADSSLDRLWQKKKADIKQ

SEQ ID NO: 334515 - protein, 77 aa, Zea mays
  Clone ID: MRT4577_68190C.1.pep
DVVLLALISVLIPGDSSSPKSEHSLARWATPELHDIDALPNMVGPRLEGLYPEKSLSRLADDIALCVHAEPEFRPAM

SEQ ID NO: 334516 - protein, 84 aa, Zea mays
  Clone ID: MRT4577_68191C.1.pep
HLSYVHQTAVSYPLQIHCGDCLVKRSLISTVWQHPPFFSSTVEAWWLQPATLAAECSRRAGAERRLGRHARDGAGVSDSGPRVR

SEQ ID NO: 334517 - protein, 60 aa, Zea mays
  Clone ID: MRT4577_68192C.1.pep
QPFFFFLFLFFFFFFFFFFFFFFFFNLSRMHLSYKEFHKQHLCLHVSMSNAVFVQWSARS

SEQ ID NO: 334518 - protein, 87 aa, Zea mays
  unsure (1)..(87): unsure at all Xaa locations
  Clone ID: MRT4577_68193C.1.pep
MGKAGALCRLRSCIAGAIHAFAALNSPAYIQXKPLLSYSQLADWEPCYLIVHXRSLPDYQHAAPLAGSLLQVQQLLPFNQLAITNPA

SEQ ID NO: 334519 - protein, 47 aa, Zea mays
  Clone ID: MRT4577_68194C.1.pep
LTSKTASRGPRSRSHSYTPTLRHGGSRRGCLFGIIIHLDYIIQQFLN

SEQ ID NO: 334520 - protein, 103 aa, Zea mays
  Clone ID: MRT4577_68195C.1.pep
RRAVLAGARVHDLRRRLQAVEEQLSLGGGFARGENELAEAPPPNHAKRLHTSHQNSSDDQIQIADPASAMGRTQTQGAMTPEKSVGDDSTKQGATRSDKSSPI

SEQ ID NO: 334521 - protein, 45 aa, Zea mays
  unsure (1)..(45): unsure at all Xaa locations
  Clone ID: MRT4577_68196C.1.pep
YINXTAMHTYLIFYPLDLSSYFLVNFFFFLRVRGLFPYNIFFYSN

SEQ ID NO: 334522 - protein, 91 aa, Zea mays
  unsure (1)..(91): unsure at all Xaa locations
  Clone ID: MRT4577_68197C.1.pep
MLVTTLLGLSAYSVAEASFSRNIIYYDQWHTKDLPPKDVTHSVTHVMMSFANSLLFTTKPAGKYEPLQPLKEVRALFDHDIKVCLXAVGGW

SEQ ID NO: 334523 - protein, 325 aa, Zea mays
  unsure (1)..(325): unsure at all Xaa locations
  Clone ID: MRT4577_68198C.1.pep
MATRNRTPLYRKYRDALRHVRAPPGAPSSSGGGGGGGGPVIEMASLLRSDRPYAPLSTDDPSASSRGAATVGLPPAWVDVSEEISANMQRARTKMAELGXKAHAKALXMPSFGDGRDDQRAIEVLTHEVTDLLKRSEKRLQKLSMKDSSEDSNVRKNVQRSLATDLQNLSMEFRKKQSSYLKQLRQQKEGQDGVDLEMNINGAKSTFEDDEFDDVGFTEVQMSKLKKSEAFTREREREIEQVVESVNELAQIMKDLSVLVIDQGTIIDRIDYNIQNVAASVEEGYKQLQKAERTQKKGGMVMCATVLVILIFIMIVLLILKEIIF

SEQ ID NO: 334524 - protein, 48 aa, Zea mays
  Clone ID: MRT4577_68199C.1.pep
FVGGMILQVIFWARKWLRTIYFIKNDALYGSEKFLYCLFELIPVWELH

SEQ ID NO: 334525 - protein, 89 aa, Zea mays
  unsure (1)..(89): unsure at all Xaa locations
  Clone ID: MRT4577_6819C.1.pep
RRSVQLSSDDHACIYGLRQDARLYPWDQKDMTPANRPNKNGNPTPIAAEVETYARDYTPXQQRTLLLTELGVLTPSVDKEERMQLDRST

SEQ ID NO: 334526 - protein, 76 aa, Zea mays
  Clone ID: MRT4577_681C.1.pep
LIQTLSLHLNRQEASYSFDLSTIMRLSLLLLALLAGVMAAPVPDTAANPVMLAYDAGDDPLDKTPVMLAYDVQGRA

SEQ ID NO: 334527 - protein, 125 aa, Zea mays
  Clone ID: MRT4577_68200C.1.pep
SGPCRRRLKAVVFCRSGSSSCMNKVRRSSMDRAVIRRRRGVHGMAMAGRVGTPEATERHRLRFTVCVVGIAELTSEPPVYRLIDNSFYVCTTSNQRTVFTVQYGHACMAPLQATDCSSCRSLRTC

SEQ ID NO: 334528 - protein, 94 aa, Zea mays
  unsure (1)..(94): unsure at all Xaa locations
  Clone ID: MRT4577_68201C.1.pep
MARMQQMAMATAAAVALVLLAAFTSEASINCNQMAWAIVLCISYTRGQTLEPSIGCCTGFWSLNNAIRTTDYRQAVCNXLKNVDTGVSRHNAGN

SEQ ID NO: 334529 - protein, 51 aa, Zea mays
  Clone ID: MRT4577_68202C.1.pep
MPSHKTFRIKKKLAKKMRQNRPIPYWIRMRTDNTIRYNAKRRHWRRTKVGF

SEQ ID NO: 334530 - protein, 202 aa, Zea mays
  Clone ID: MRT4577_68203C.1.pep
MSRCFPYPPPGYVRNPVAVAEPESTAKLLKEKEKAEKKKEKRSDRKAPKQCETSKHSKHSHKKRKLEDVIKAEQGPKRVPKESVEQLEKSGLSEEHGAPSFVHTIRDSPESSQDSGKRRKVVLSSPSQPKNGNILRFKIKSSQDPQSAVLEKPRVLEQPLVQQMGSGSSPSGKQNSIHHKMNVRSTSGQRRVDGDSQQYKNV

SEQ ID NO: 334531 - protein, 427 aa, Zea mays
  unsure (1)..(427): unsure at all Xaa locations
  Clone ID: MRT4577_68204C.1.pep
RLLWWLKLLKEKEKAEKKKEKRSDRKAPKQCETSKHSKHSHKKRKLEDVIKAEQGPKRVPKESVEQLEKSGLSEEHGAPSFVHTIRDSPESSQDSGKRRKVVLSSPSQPKNGNILRFKIKSSQDPQSAVLEKPRVLEQPLVQQMGSGSSLSGKQNSIHHKMNVRSTSGQRRVNGDSQAVQKCLITESPAKTMQRLVPQPAAKVTHPVDPQSAVKVPVGRSGLPLKSSGSVDPSPARVMRRFDPPPVKMMSQRVHHPASMVSQKVDPPFPKVLHKETGSVVRLPEATRPTVLQKPKDLPAIKQQDIRTSSSKEEPCFSGRNAEAVQVQDTKLSRSDMKKIRKAEKKDKKFRDLFVTWNPVLIENEGSDLGDEDWLFSXKGTPMLSXQSRATDSSVPIHPMVQQKPSLQPRATFLPDLNMYQLPYVVPF

SEQ ID NO: 334532 - protein, 109 aa, Zea mays
  Clone ID: MRT4577_68205C.1.pep
GIWAPPFAPHSVGFSYGLSVFLVSPFSGLGSLALFVAPSGGPPCGLGKMKGILSGRYSGAGGISNPLVPWAGPGGFSAPIVKSPFGGSQCFWCPIGSPLEAIFGWKHHK

SEQ ID NO: 334533 - protein, 37 aa, Zea mays
  Clone ID: MRT4577_68206C.1.pep
RFKGHRINIVPPLLNSLVCILIFHSFLLLITVSKENL

SEQ ID NO: 334534 - protein, 89 aa, Zea mays
  unsure (1)..(89): unsure at all Xaa locations
  Clone ID: MRT4577_68207C.1.pep
FICLPGRGPSATVFVCFFSPASHGRPCMAILGLDLHGVPVPCCWGDGSIKSSSALLRCMTSFVPKRWFISSPGSDVKPPEINPXXXXGG

SEQ ID NO: 334535 - protein, 48 aa, Zea mays
  Clone ID: MRT4577_68208C.1.pep
ATRVERSRLRSGLMQDEEGASRLGLRVVPTPKLQASIHMPALQLATLT

SEQ ID NO: 334536 - protein, 47 aa, Zea mays
  Clone ID: MRT4577_68209C.1.pep
SDVKSEQLVSVNALDGVKGSFLRVEGGKTPPTGTVHPQSEDDIGKEL

SEQ ID NO: 334537 - protein, 81 aa, Zea mays; identical to SEQ ID NO: 291091
  Clone ID: MRT4577_6820C.1.pep

SEQ ID NO: 334538 - protein, 55 aa, Zea mays
  Clone ID: MRT4577_68210C.1.pep
LRNAILQETEVPPSMVSSISLHPSCLTYYTHVASSVIANSYDPTISPPAIRALRS

SEQ ID NO: 334539 - protein, 69 aa, Zea mays
  Clone ID: MRT4577_68211C.1.pep
PSGILGLLAHAVLLHTRNPMGYACTWQFTHCCLLCSQELPTQAPSCICRPFTWSMSGRSTIPNLKMHAV

SEQ ID NO: 334540 - protein, 211 aa, Zea mays
  Clone ID: MRT4577_68212C.1.pep
YIFLPTFSFASLYIHLSSAANNFQEDKTVLLLQPAREFLPVIDKAYKALVEKTKDTTGARVENNKFCLSVHFRCVDEKSWSSLAEKVKAVLRDFPELELTEGRKVVEVRPSIMWDKGKAVEFLLRSLGFDDDRTNVLPVYIGDDRTDEDAFKVLRERGQGIGILVSKCPKETDATYSLQDPTEVMEFLVRLGQWNPLRSPSPAARPRGRKQ

SEQ ID NO: 334541 - protein, 123 aa, Zea mays
  Clone ID: MRT4577_68213C.1.pep
ERGSGAWAAASTCGHGGPTTAARARSPARTSAGSASRQTTGVRPSANAASGQSAARRPTAPYGGNARVGTRKTRSLLFVHEDDAIEYEQKFKSNILQENPLLHAVAIQVYVHPNKKLSPSLFL

SEQ ID NO: 334542 - protein, 75 aa, Zea mays
  Clone ID: MRT4577_68214C.1.pep
RVIACKKKKKKKKKKKKKKKKNKKNKKKKKKKKKGTLRCYHCLRANFGNIHKNGGRSRIHIKGPISPIGSRITIK

SEQ ID NO: 334543 - protein, 698 aa, Zea mays
  Clone ID: MRT4577_68215C.1.pep
MPGAISSSSSAFLLPVASSSPRRRRGSVGAALRSYGYSGAELRLHWARRGPPQDGAASVRAAAAPAGGESEEAAKSSSSSQAGAVQGSTAKAVDSASPPNPLTSAPKQSQSAAMQNGTSGGSSASTAAPVSGPKADHPSAPVTKREIDASAVKPEPAGDDARPVESIGIAEPVDAKADAAPATDAAASAPYDREDNEPGPLAGPNVMNVVVVASECAPFCKTGGLGDVVGALPKALARRGHRVMVVIPRYGEYAEARDLGVRRRYKVAGQDSEVTYFHSYIDGVDFVFVEAPPFRHRHNNIYGGERLDILKRMILFCKAAVEVPWYAPCGGTVYGDGNLVFIANDWHTALLPVYLKAYYRDNGLMQYARSVLVIHNIAHQGRGPVDDFVNFDLPEHYIDHFKLYDNIGGDHSNVFAAGLKTADRVVTVSNGYMWELKTSEGGWGLHDIINQNDWKLQGIVNGIDMSEWNPAVDVHLHSDDYTNYTFETLDTGKRQCKAALQRQLGLQVRDDVPLIGFIGRLDHQKGVDIIADAIHWIAGQDVQLVMLGTGRADLEDMLRRFESEHSDKVRAWVGFSVPLAHRITAGADILLMPSRFEPCGLNQLYAMAYGTVPVVHAVGGLRDTVAPFDPFNDTGLGWTFDRAEANRMIDALSHCLTTYRNYKESWRGLQARGMAQDLSWDHAAVLYEDVLVKAKYQW

SEQ ID NO: 334544 - protein, 77 aa, Zea mays
  Clone ID: MRT4577_68216C.1.pep
LHPFFIPFFAPVAVTVCVLIVTTMPRHCLFSMSSGSCHFCLYPRSFPALVFLCALGFFQIVCPLCPVLREAVPRTRR

SEQ ID NO: 334545 - protein, 46 aa, Zea mays
  unsure (1)..(46): unsure at all Xaa locations
  Clone ID: MRT4577_68217C.1.pep
RAGRGAHGLRAGDRREQMKLRAXERERQRMATQRSCVRQRTCSRHG

SEQ ID NO: 334546 - protein, 133 aa, Zea mays
  Clone ID: MRT4577_68218C.1.pep
PSYPARYGEVPRNVFYVMRRVSAPHLDNSRRRQSLPSLSEITVIYRSQIKAAPGAFLIPVGDHIIQPSCAVTITMPGSTRVLMSPSRTQLTNRGEQNDSEVQFKHFIEHRKRRALNLVLHLILQGFYSIYDTL

SEQ ID NO: 334547 - protein, 77 aa, Zea mays
  Clone ID: MRT4577_68219C.1.pep
RTLEHLSDYDLQKDASLHGGLLLTAGTLIRVNAAHADETAIRIEATDSTRGDHRSCLKITNAFLLLDIGSLYAVDQV

SEQ ID NO: 334548 - protein, 86 aa, Zea mays
  Clone ID: MRT4577_68220C.1.pep
CRLAMPAHARWMAAWPSAASGRRGRPSRCPSCVCVLRLPLWLLVNKLLMLPLVVTLSSPSVRCRRRRRHRRRRVPRPSHAVARTLA

SEQ ID NO: 334549 - protein, 108 aa, Zea mays
  unsure (1)..(108): unsure at all Xaa locations
  Clone ID: MRT4577_68221C.1.pep
IVGIPFDKVHFDSTDAVYEVMFDFDTSRNYVVEQXDSLCXMKKWFNEAKLSVPVVGAFSAQFINECHDSSRQEPSELVDRXNEAVESVNNPGWCIAKAVVLLMMGTAI

SEQ ID NO: 334550 - protein, 190 aa, Zea mays
  unsure (1)..(190): unsure at all Xaa locations
  Clone ID: MRT4577_68222C.1.pep
PGFRHGFQADRSLDLLHCHHRSRLPSLRIRRAHGRWLVQQRCHLVPSNQRRCIPRNYMSQTLWRPSMSVIGDNNGPEMTTRSXANAPADKGGKKLLIDFMMGRDSAAVANTAAAPIECVKLVIQKQXDMINSGRLSEPNQGIADCFKRTINDEGFSSLWRGNTTNGIRYFPSQAFNIAFNGYCKTMINFK

SEQ ID NO: 334551 - protein, 199 aa, Zea mays
  unsure (1)..(199): unsure at all Xaa locations
  Clone ID: MRT4577_68223C.1.pep
VSGHCGSSPSSHQXAVSHEYLNRYVCSDEGYEDGHLKKSQTLVNMLEKDHGQDSSESSDVDVTNHEHKYDPSNXKRSENRGESSKLYRLKNEDDFDAXSDLISHHFCEPLCDHTGDXDSHHDMPYYQSNLPRSQSAIFYNDCTSDPKGSADCEILWCISVDRLCSLTDDKSDYLIGCQMYHCKSNWDVYCAPYSKCTEH

SEQ ID NO: 334552 - protein, 62 aa, Zea mays
  Clone ID: MRT4577_68224C.1.pep
GNKILCIGDVLRHPCSTTSVKYTWVSSHGKAARPDVLALCLKERLARLAVSSMVRLASIISY

SEQ ID NO: 334553 - protein, 91 aa, Zea mays
  unsure (1)..(91): unsure at all Xaa locations
  Clone ID: MRT4577_68225C.1.pep
RFSKLTGGGPTTSAGLIAAAVAHAFALFVAVSVGTNISGGHVNPAVTFGAFVGGNITLFRGLLDWVAHLLGSTXVACFLLXRFSTVGQATG

SEQ ID NO: 334554 - protein, 74 aa, Zea mays
  unsure (1)..(74): unsure at all Xaa locations
  Clone ID: MRT4577_68226C.1.pep
YLQQHHVPFVQLVLSYLQQFIAFTVMAALNFHAYRQQQLLFPFSQLVGVSRVALLGHPQLXPFYAXAVPKEGTL

SEQ ID NO: 334555 - protein, 71 aa, Zea mays
  Clone ID: MRT4577_68227C.1.pep
LMLPFCPDILSCMLVHVFFCMPHNLITVDAMTTFNLLLLSIRSLEESCRAAPAVLRFGLSSVSPSGEPTRP

SEQ ID NO: 334556 - protein, 59 aa, Zea mays
  Clone ID: MRT4577_68228C.1.pep
RTGGQAPSPGHPKAPVLGNNFPHQGAGLRTRPTSFSRQTDRPKSSRTRCNNPPFNSKGS

SEQ ID NO: 334557 - protein, 111 aa, Zea mays
  Clone ID: MRT4577_68229C.1.pep
LEQEGAMALKVPSCNPAHYIHTWLAGRSRSGVPGFHLAFDQIALCVTLPFGSSEPVVMVDTAGLSLVLECSFSNVRQWFSRGCFRCRGAVESWPSRFCLYIAANCCWHIQY

SEQ ID NO: 334558 - protein, 81 aa, Zea mays; identical to SEQ ID NO: 291091
  Clone ID: MRT4577_6822C.1.pep

SEQ ID NO: 334559 - protein, 94 aa, Zea mays
  unsure (1)..(94): unsure at all Xaa locations
  Clone ID: MRT4577_68230C.1.pep
QTRPHRARPRXSQPPPQTRPPPPTTTKRTPSPPRRHRHQPPPTTTTKRTPTPPRRHRQPTAERTASPPCRRPPPSRSRPPAPAPPPTTRAWWTR

SEQ ID NO: 334560 - protein, 165 aa, Zea mays
  Clone ID: MRT4577_68231C.1.pep
SDSRSTPRVRARVRLGPEDYCQILRGLGDRDKSALRAFEVFYAALPLVGGGAVDKGKLLTAAIGALGKMGRPDLARRAFDTGIAGSYGNTVFAHSALISAYARSGLATEAMGVLESMKGAGLRPTTVSYNAVIDACGKGGVDLRFTLGYFRQMLADGLCPDRKTF

SEQ ID NO: 334561 - protein, 71 aa, Zea mays
  Clone ID: MRT4577_68232C.1.pep
PHLLPSRCPIFSPAQPPPPMCGLSPSSPQNNPCTTNAISGVSQFKHCVPLPVILIYRCQPMKAPYFIMFAL

SEQ ID NO: 334562 - protein, 159 aa, Zea mays
  Clone ID: MRT4577_68233C.1.pep
MAAALRAVLRGIKEKGLTNFIRDVRDEGYFKCLLDGNLLQTKIHNIGATLVGVDKFGNKYYEKLHDTQYGRHRWVEYAEKGRYNASQVPPEWHGWLHHITDSTGDKLLNQKTARYLVEHKQNYSGEGEELIYHSKGHALNPGQRDWTRYQPWEPKKEQA

SEQ ID NO: 334563 - protein, 159 aa, Zea mays
  Clone ID: MRT4577_68234C.1.pep
MAAVVRGVLRGIKEKGLTNFIRDVRDEGYFKCLLDGNLLQTKIHNIGATLVGVDKFGNKYYEKLHDTQYGRHRWVEYAEKGRYNASQVPAEWHGWLHHITDSTGDKLLNQKTARYLVEHKQNYSGEGEELIYHSKGHALNPGQRDWTRYQPWEPKKEQA

SEQ ID NO: 334564 - protein, 75 aa, Zea mays
  Clone ID: MRT4577_68235C.1.pep
NTLSFFNSLLHLFYKNQLQPLSTIHILSITNSILYVHLAFYNIPKQAFLFYQGVQAKKLTSPPPIEPHYIFCNPF

SEQ ID NO: 334565 - protein, 108 aa, Zea mays
  Clone ID: MRT4577_68236C.1.pep
RCDGLTGRLAPRCGRPCECYAHRLLKTARRSPWLSRRSRPWRWRDTLARCLHARGMSLGRLQSASSGFKPDAVSTFRLRLPDRRVAVFDRWIPSMPTSTHSIACSSTR

SEQ ID NO: 334566 - protein, 60 aa, Zea mays
  Clone ID: MRT4577_68237C.1.pep
ALYTFNARYNRSMRARQCIDANDAADHCSDNATRKQSVLSYDLILPPNTEQLSLAVIIEI

SEQ ID NO: 334567 - protein, 65 aa, Zea mays
  Clone ID: MRT4577_68238C.1.pep
ILSPHVFGNGTTYKIKYIFDNVKNKSPHLWHYIKRPGAARVGRVGRSLSQGREYLDVTSNSRASR

SEQ ID NO: 334568 - protein, 106 aa, Zea mays
  Clone ID: MRT4577_68239C.1.pep
NLASPPRQVWVFFQGRFFPISPLFARGGSGFWSLCPPELEGLFFFFFLTNFFFLKIPKIPNPFFWGGFFFLRRFWGDHFGVQKPIGTVKCILIKWGRFPRPKKNLC

SEQ ID NO: 334569 - protein, 69 aa, Zea mays
  Clone ID: MRT4577_6823C.1.pep
QYHCVHARLGGTAAEHISTSNDRVFTSSFALTSYFLGCRLQYIHGPNQNPGMRIQGALTLTTNIDWRQT

SEQ ID NO: 334570 - protein, 73 aa, Zea mays
  Clone ID: MRT4577_68240C.1.pep
MDPDGRITGERKNYDIITGEKNKIRKKKDYRRTWEALASRADQFPDFTSKFKSLFNLSWYFHFNPNAQPKFPT

SEQ ID NO: 334571 - protein, 102 aa, Zea mays
  Clone ID: MRT4577_68241C.1.pep
GTLVCRPGTASGRTSNCPCTPMTPWCCSGLQDGAGELPLHPHDSVVLLRFAEDGARGLPLQPIYTMVLLRFAEDGAGELPLHPHDSILLLWRRQCCHKLKSS

SEQ ID NO: 334572 - protein, 141 aa, Zea mays
  Clone ID: MRT4577_68242C.1.pep
SAAAPPLNDGSPSKHVFYGREGWPKLAPFEALPVGVAAPQIPEALIDQFKPGGKMVFPVGPVFQEFKVLAKKLDGPVRIKNETPVRFVPPPSKDAPLPPSWVFFLVQKKSFPPLPRWGLPSNRPPCKCFNPPVPVNALAWK

SEQ ID NO: 334573 - protein, 58 aa, Zea mays
  Clone ID: MRT4577_68243C.1.pep
HVRRTNPLHGQAGYLSCANGQYNTKCSDFTVASMNLCSKAATPPKVSIPIVKTHIDRR

SEQ ID NO: 334574 - protein, 140 aa, Zea mays
  Clone ID: MRT4577_68244C.1.pep
MASALKMTAICMLILTTGQLMATAGAKAPLVQADAAPTARRLLSADHERSASGRTSNCPCTAMTPWCCFGLQRTATENCPCTARTPWCCSGLQKTALEDCPCSPFTPWCCSGLQKTALENCPCTPMTPFCCFGAGSAATN

SEQ ID NO: 334575 - protein, 66 aa, Zea mays
  Clone ID: MRT4577_68245C.1.pep
FNQSTRRWTGLYEAWQLRSNLKKANMVSEYRCTCNGIIELRASNSNCKMVISGEESTRYKMPPKGP

SEQ ID NO: 334576 - protein, 108 aa, Zea mays
  unsure (1)..(108): unsure at all Xaa locations
  Clone ID: MRT4577_68246C.1.pep
LASCVYTFVCCNNSGQRTSNQNYGXIETSSDTTYQLQRRLSTADCGDYCDYGVQMFFSMVTPSYVIFQVIVCAAHLGXSMASGGASSCSAASASAATEATKAGPTEAD

SEQ ID NO: 334577 - protein, 87 aa, Zea mays
  Clone ID: MRT4577_68247C.1.pep
LGFGRRWLVALRLGGHWLPLPFAASAAAASFSSRSSTLLSTPVGRRGELDPATSAGGGHVRAQHQSRGGWSPSWCSPWFAGSLPRVL

SEQ ID NO: 334578 - protein, 97 aa, Zea mays
  unsure (1)..(97): unsure at all Xaa locations
  Clone ID: MRT4577_68248C.1.pep
QSLPTKNLKPGWVTPIFFCVLKXXSNNFSQHIKTNPHNQTNQPLLIICTISMLVHHPISFTYNRILPFLMKNDISAHECNTVKIPKTPQLKTSSTQK

SEQ ID NO: 334579 - protein, 67 aa, Zea mays
  Clone ID: MRT4577_68249C.1.pep
GSPGRRCRWPTDDVVRSGRHIHRERDDSRGRRPPELALAAALRLPPAIPSHREEAATPVRQVIGNLV

SEQ ID NO: 334580 - protein, 81 aa, Zea mays; identical to SEQ ID NO: 291091
  Clone ID: MRT4577_6824C.1.pep

SEQ ID NO: 334581 - protein, 93 aa, Zea mays
  unsure (1)..(93): unsure at all Xaa locations
  Clone ID: MRT4577_68250C.1.pep
LYPSVLAVGGGIIPSGFVLAACESRPPPSVNITRVLTDARGFIVAVHMXEAFCGASEVEADXHGAGITVFVPTEXAFAGLPDTDRLQILPDER

SEQ ID NO: 334582 - protein, 84 aa, Zea mays
  unsure (1)..(84): unsure at all Xaa locations
  Clone ID: MRT4577_68251C.1.pep
EFEAXKEQRERAQTSESPQRRRAPXDQAXSRARTDETARTXKENSQRXQAKEAEQRTAXEDXPXNXQNAAQXQDDRRGDTRSST

SEQ ID NO: 334583 - protein, 51 aa, Zea mays
  unsure (1)..(51): unsure at all Xaa locations
  Clone ID: MRT4577_68252C.1.pep
FLVLTLLVGATAHDCXPTXSRPVVPTTPVLTTPSSHSHATXPIDAIKIKWG

SEQ ID NO: 334584 - protein, 286 aa, Zea mays
  Clone ID: MRT4577_68253C.1.pep
MLPCLLFCRACFSPLLPLRAASWLGKGRRRRRLCASCADNAMVSIVTEVWALAGCGPASKAAAVAVAAQELPAQHPSPAAAGGGKAKKRAVPVSFRGVSSGGGQDHQREAAAVVVGRRRGLASCALAAVAASFSARAGRPARALVLEEDDDIELLERVKEDRKKRLQKQGIISSSGAETGYLQDLIYRLSKVGQAIDNDDLPAASSVLGPSSDAQWVQNINAAFSKLSSSPEQRNVVDSFNSSLATLFTSVSKLDPESSKSAFVSSATALEKWIALAGLGGQLKGY

SEQ ID NO: 334585 - protein, 124 aa, Zea mays
  unsure (1)..(124): unsure at all Xaa locations
  Clone ID: MRT4577_68254C.1.pep
PDDDGGGLTLVVLATAAADASERHWHGSLLGLPSSRCGRRRMLRRQLLRRYRYRRRLGRRAASSERPYLGDNGHHRVIGAGRTQPSPSPSLPQPGSSTKRQEGGEAGATAPLLHERPGRPXXGT

SEQ ID NO: 334586 - protein, 62 aa, Zea mays
  Clone ID: MRT4577_68255C.1.pep
AGRPVQLTRSISPTPSRTTRTPTWRIQGRACSLEKTRGSTKPVRFIHTTGTKQDRPSAHVTT

SEQ ID NO: 334587 - protein, 62 aa, Zea mays
  Clone ID: MRT4577_68256C.1.pep
LIPLIRISALAPLCIHKCHYSSSASLPVYHQLPLPTLNYMNFTSPPIQLGLSSRRLHRSCSQ

SEQ ID NO: 334588 - protein, 261 aa, Zea mays
  Clone ID: MRT4577_68257C.1.pep
LEKKEDDLSKSIALCNVESNGGKIWIGFLEDSWKLQSSYNEQKDNKTCDELEKCVSDFLKLTKHHLSAFKEVLSQLIENIETYVGNLAVLTSREEEKEHGDDEASERTDPRKSLEEEYLETEKKIIIAFSIVDHIKKLFYSGEGADSRRDDPEVKSLIEEIEKMRESFESIERPTLSIESEKAKPLPVEGSKLSPSPLQAPATPKAAHVDSPKSPMKPEQHFDSDAELATLGSEIGKEDKEYSVEEISGWEFDELEEDLKS

SEQ ID NO: 334589 - protein, 143 aa, Zea mays
  Clone ID: MRT4577_68258C.1.pep
YHDAITTENIEVHGEEVRIQRPEHRVDCKMSPEVEREWHRVQATEDMSAARAAAEVGAFSQAVAILEARRRILEAQAAQSSDDQFLALMAELTEMQQRVENRRKYEESGRAFMLAGLSSDSWQRASARGDSSEITTTIHTYQT

SEQ ID NO: 334590 - protein, 101 aa, Zea mays
  Clone ID: MRT4577_68259C.1.pep
LWLSWPCSGGSLFRVVPLGPVSGARLVCVVLLVLVGVLALFGRVWSVCSVFRLCAFSGLWWCVSFFLSIAPRALWWCAVVGPRAFLFLSAPGLALRAVLRR

SEQ ID NO: 334591 - protein, 81 aa, Zea mays; identical to SEQ ID NO: 291091
  Clone ID: MRT4577_6825C.1.pep

SEQ ID NO: 334592 - protein, 402 aa, Zea mays
  unsure (1)..(402): unsure at all Xaa locations
  Clone ID: MRT4577_68260C.1.pep
YVSSEFGSCEPPSGXEVSLLLEIFSICLTGGKEVNKEIMSNVQDLAKAFSEYKDEVLVKREELLEYAQSIISGLKRNADIVRIDAETLELQRKLDEKQKSRGQSPEYQDKTSDKIAAANLEVFKEALGELRLCSRVEELLLKKKSITLGDSLEIHSQKVDKLKVLADSLACSSSKAEQRILEHRRQKEDALNFRVKKENEVSVSEKELLDEITELEKQRDELEAQLKKVNISLNAAAGRLKQTREERDQFDEANNQIIFSLKKKEDDLSKSIALCNVESNVVKIWIXSLRTRGSCSPHTMNRRIIKRXDELEKCVSDFLKLTKHHLSAFKEVLSQLIENIETYVGNLAVLTSREEEKEHGDDEASERTDPRKSLEEEYLETEKKVILSHLTLTWSHTWFLKR

SEQ ID NO: 334593 - protein, 95 aa, Zea mays
  unsure (1)..(95): unsure at all Xaa locations
  Clone ID: MRT4577_68261C.1.pep
GVPPSHKGWAETQLSAAWRFPFWGGLRSCHLVLCPHRNQRXDGRGNEXSFSPEPPAQACXIRAPGPXLCRARGASPVPSGRSVVSLFPPGSLSSV

SEQ ID NO: 334594 - protein, 81 aa, Zea mays
  Clone ID: MRT4577_68262C.1.pep
QDFATQTCFFFLTGGLSQIYRRLPGARLKPENHRAETNFSKCLFRGRLLFTTGAFPLFGPRFIQPGPFKNHVNQLGFWAWK

SEQ ID NO: 334595 - protein, 66 aa, Zea mays
  Clone ID: MRT4577_68263C.1.pep
RLLPALSPVSLPCEEKSSPASSLMKSSSHLQLSLLLSFGSHAFSYPTSFNLALLFHCSKLIVPFFL

SEQ ID NO: 334596 - protein, 87 aa, Zea mays
  Clone ID: MRT4577_68264C.1.pep
PRVRSYDGGSQSTSSGKGIADLPSYESFDLNRSAVLDEETFSMEPGIVFFEDGSYSRGPVDIAIGEYDESKYFLSPTYKFEQCLVKG

SEQ ID NO: 334597 - protein, 61 aa, Zea mays
  Clone ID: MRT4577_68265C.1.pep
LEPELWSFKRREPELWSFKRRGVTLRCLLIYFKVATLRKPDRFWWKAIPTNVPYLCPPFFS

SEQ ID NO: 334598 - protein, 72 aa, Zea mays
  Clone ID: MRT4577_68266C.1.pep
YFSLYIFDRHGTLREHSAMCGIPTYADQPRLHSPRLTILLKERLLLQSDSTTSRKYNTDTAHSLMHTGVMDM

SEQ ID NO: 334599 - protein, 59 aa, Zea mays
  Clone ID: MRT4577_68267C.1.pep
LSTVVSSVNSVVHATSYTGAYARVYFRRPVSQVPFLYSIHRVGAPPPPQNPAGDCIFCL

SEQ ID NO: 334600 - protein, 96 aa, Zea mays
  Clone ID: MRT4577_68268C.1.pep
LRVYGVMATQVGVMLWRNPTGVARATTITRRTIETAAFLVDPAIGTSRRIQPMHLEGNGTAGSTHSSGTASIGDRMGGIKLAVAGDEMTNGVHGTR

SEQ ID NO: 334601 - protein, 81 aa, Zea mays
  unsure (1)..(81): unsure at all Xaa locations
  Clone ID: MRT4577_68269C.1.pep
TXKGGMRVTCISSVSAPPCYMLTYHFTGTSREGRSEXYFIKXKKIKKKKRGRRASXRESKALRYRVAIADVISFFLLGVHL

SEQ ID NO: 334602 - protein, 207 aa, Zea mays; identical to SEQ ID NO: 291651
  Clone ID: MRT4577_6826C.1.pep

SEQ ID NO: 334603 - protein, 94 aa, Zea mays
  Clone ID: MRT4577_68270C.1.pep
VKKRPMGSQIVPGKLNKLWEGVKHGCMGTSFLEHVKFQVHMVDSRLTMGASSLCPKTCTERKSRNDPGSFRKPCQVLYDRNLYFEEMWAYKILP

SEQ ID NO: 334604 - protein, 69 aa, Zea mays
  unsure (1)..(69): unsure at all Xaa locations
  Clone ID: MRT4577_68271C.1.pep
MPKQIHEIKVLLLTATRKDARSVKIEMSKVFVKFKVRCSKYLYTLCVFDAEXAXKLKQSLPPCXIVDEV

SEQ ID NO: 334605 - protein, 81 aa, Zea mays
  Clone ID: MRT4577_68272C.1.pep
HTISCIDYGRFFNLMHTIRTERVACIMGALATSATCTHTRRGCRWHPDPKVDLPKRLHQPATFDISNAENVTTMVNLTTTM

SEQ ID NO: 334606 - protein, 54 aa, Zea mays
  Clone ID: MRT4577_68273C.1.pep
HLTMLHQNVDYLSNLNASHDASYICDFREYEVQRDFPQSTVKSGFEDKMQSVSS

SEQ ID NO: 334607 - protein, 112 aa, Zea mays
  Clone ID: MRT4577_68274C.1.pep
QKNIAHRPGLYAGKQTAAVHATGPRRTTYYCAPSSDMPSLLFSSFIARITGPLEPAVSSINGVQILRFSSSIPINLATNLPLLPPIKSEPSLFSSPLLAPVVLMLQIFAPLR

SEQ ID NO: 334608 - protein, 88 aa, Zea mays
  Clone ID: MRT4577_68275C.1.pep
IPLKEPFHQARLVVPQQVGLHHPRGRPDPPHVQDPVKKNISPPPTRVVPNGLWCPTHLCGLFMLKKNVTGAPGPWIHGFWPLCPFGFN

SEQ ID NO: 334609 - protein, 36 aa, Zea mays
  Clone ID: MRT4577_68276C.1.pep
NGLIQNKATIELKHNAQALNFYQYILFRVHLNTAIQ

SEQ ID NO: 334610 - protein, 34 aa, Zea mays
  Clone ID: MRT4577_68277C.1.pep
FSFFLYCYIYFFQFPLCILFFLKLKLVFFFERVG

SEQ ID NO: 334611 - protein, 65 aa, Zea mays
  unsure (1)..(65): unsure at all Xaa locations
  Clone ID: MRT4577_68278C.1.pep
MGRRPAICYRQIKNMPYPTYRYXRGVPDHKIRIYDIGMKRKVVDKFPYCVHLVYGNKKMASRKPL

SEQ ID NO: 334612 - protein, 66 aa, Zea mays
  Clone ID: MRT4577_68279C.1.pep
TVRRRMMMQSGRKATEIIYKSTIHCWATIAKQEGTGAFFKGAFSNVLRGTGGAFVLVLYDEIKKVL

SEQ ID NO: 334613 - protein, 81 aa, Zea mays; identical to SEQ ID NO: 291091
  Clone ID: MRT4577_6827C.1.pep

SEQ ID NO: 334614 - protein, 67 aa, Zea mays
  Clone ID: MRT4577_68280C.1.pep
HQQVWPLAPQACVRVLERWPSHRPAPVWPGPKGPVGPGPVCTSRVPQISLVNASVTYRPAFWPAVNL

SEQ ID NO: 334615 - protein, 43 aa, Zea mays
  Clone ID: MRT4577_68281C.1.pep
GVELNGVSGRTQRRNQHTVPLKKGVTGGITGCTNKSRTCLELC

SEQ ID NO: 334616 - protein, 71 aa, Zea mays
  Clone ID: MRT4577_68282C.1.pep
NPPVSWVWHGRTSMKWVLVVWKPAQSPPHCRACQGLKEAQPLQYWSQRVRMAKSASPQIACSPRLGPRRGR

SEQ ID NO: 334617 - protein, 207 aa, Zea mays
  unsure (1)..(207): unsure at all Xaa locations
  Clone ID: MRT4577_68283C.1.pep
SRRPGIHTKEWFASFLSPSISRLLLDQRRVRCCRSTNRHLSCQYASEHACYVNCHYCXTILVVNVPXSCSYNXLTAKRALRTKGLLLDLSPFHHPPLTVPHNEVAHNXEASNNLSLVLTTHKPANLSTRPPSVIHXVRTHLPQLPPLRPXRKHPLLHHXYNSFLXANXRRLKTSHPEISHREAFRAATKNWPHLPXLHFRLIVCDHR

SEQ ID NO: 334618 - protein, 68 aa, Zea mays
  Clone ID: MRT4577_68284C.1.pep
GGGNAHAGGATALAKRGTHGDGHRDGQCECRRGSEGRGRDGARGEGRHAHQVDSDRWIDLGTYVRPGA

SEQ ID NO: 334619 - protein, 45 aa, Zea mays
  Clone ID: MRT4577_68285C.1.pep
HFYRKHNLLHCIIKIGHAGLESNNFNLAPSYFYFFSFYNYYVLEI

SEQ ID NO: 334620 - protein, 82 aa, Zea mays
  Clone ID: MRT4577_68286C.1.pep
FPSPGRPMGLNKIIPRTCPSGVKWCGKVQLFRLYVRVHRSPCSCVPSPVRASSGPVAYKKLGRFFPKKKKKKKKKKKKKKKK

SEQ ID NO: 334621 - protein, 91 aa, Zea mays
  Clone ID: MRT4577_68287C.1.pep
SSGNNAEYFFFFFFFFFFLFFFFFFFFFFFFFFFFGKKTPKLFLSNWSGARTDWTGDPTTGGSVGPAGQSESLGLGTPLYAGRTGLGDGFI

SEQ ID NO: 334622 - protein, 99 aa, Zea mays
  unsure (1)..(99): unsure at all Xaa locations
  Clone ID: MRT4577_68288C.1.pep
SVHWFHRQTASMEAAEWSNPLASRHCXWACFVGRIWERGAYRGIQWTTSSGAILLDPDPSVLSTLASAFVWRGDSSGLSRDFFSLGLGDTTSTDPMATY

SEQ ID NO: 334623 - protein, 43 aa, Zea mays
  Clone ID: MRT4577_68289C.1.pep
DLLIPRSGRWNFRTDICSLSLQGSVSMKVNRLRGTTYDSVKYV

SEQ ID NO: 334624 - protein, 81 aa, Zea mays; identical to SEQ ID NO: 291091
  Clone ID: MRT4577_6828C.1.pep

SEQ ID NO: 334625 - protein, 200 aa, Zea mays
  unsure (1)..(200): unsure at all Xaa locations
  Clone ID: MRT4577_68290C.1.pep
MREIISIHIGQAGIQVGNSCWELYCLEHGIQPDGLMPSDTSVGIARDAFNTFFSETGAGKHVPRALFVDLEPTVIDEXRLGLTASFSILSSSSHTRKMQRTTSPVDITQISTAVVEPYNSVLSTHSLIEHTDVVVLLDNEAIYDICKRSLDIERPTYTNLNRLISQVISSLTTSLRFEGAINVDITEFQTNLVPYPRIHF

SEQ ID NO: 334626 - protein, 96 aa, Zea mays
  unsure (1)..(96): unsure at all Xaa locations
  Clone ID: MRT4577_68291C.1.pep
AHASAHASVLLIQLVAADQLVTSAIKRKGTAPTAKIDCGGAXAARSRLLXTPHLRKRAYGTCCSRGNCIPPRTVSNQEXCPCYDILTTDARTRTCS

SEQ ID NO: 334627 - protein, 64 aa, Zea mays
  unsure (1)..(64): unsure at all Xaa locations
  Clone ID: MRT4577_68292C.1.pep
NPFPLLTYXHLTNENFLSSPNLXXXPPPITQTYIYLFTSNSTQYYHIQHLHIINLTTTQNPTLK

SEQ ID NO: 334628 - protein, 120 aa, Zea mays
  Clone ID: MRT4577_68293C.1.pep
SCDKLPVSVSNSPISQHPNSQPWPFACSDTSVGIARDAFNTFFSETGAGKHVPRALFVDLEPTVIDEVKTGAYRQLFHPEQLISHKEDAANNFARGHYTGVTCSPHPELFPGEQKMFLQF

SEQ ID NO: 334629 - protein, 116 aa, Zea mays
  Clone ID: MRT4577_68295C.1.pep
TTLFYVQSGGPGFYVYLAHVFLSTFFSSAPAHRCGWTRSGIYMCFQVVGDSKRTSDVDLFHLNICYSSKKKKKKKKKRRKKKKNKAHEEKKMKKQKHGKKDTKKQEHRKMNSKNVD

SEQ ID NO: 334630 - protein, 58 aa, Zea mays
  Clone ID: MRT4577_68296C.1.pep
MSVNDIGGVGAKLLCFLDYYATSKLDVDLAEKVIKGIRDGCEQSDCALLGGEVRCFWN

SEQ ID NO: 334631 - protein, 147 aa, Zea mays
  Clone ID: MRT4577_68297C.1.pep
RRSVLVDNERGGGTAPCQMMNSQKLQLPVQDLMSLRGRSFIISKVMMHQCTAAASSSSSPAPAARGLQVAAHPSSSRRRRPRGLVAAAGSDDDECASAGGESESSSSGGKDDGGAGLSREDLERLVGSDEDAKFNGLDLANSSGRIR

SEQ ID NO: 334632 - protein, 88 aa, Zea mays
  Clone ID: MRT4577_68298C.1.pep
DDAWSLDNNPAHWMKQEEFWLERALVGDLLVEANGYDFRHLRFDDGIRRCPGSIAALPILAITLGQLSHNSELLPPPGQSQIDTSEKG

SEQ ID NO: 334633 - protein, 84 aa, Zea mays
  Clone ID: MRT4577_68299C.1.pep
MGRGGGMGNPVNVGIAVQADWENREFISNISLNVRRLFDFLLRFEATTKSKLASLNEKLDILERKLEMLEVQVGSATTNPSVFN

SEQ ID NO: 334634 - protein, 81 aa, Zea mays; identical to SEQ ID NO: 291091
  Clone ID: MRT4577_6829C.1.pep

SEQ ID NO: 334635 - protein, 278 aa, Zea mays
  Clone ID: MRT4577_682C.1.pep
MATALSFKALALAALLSVVVVVTSGARAEQQLKRNATTASQDRSLLSYSSGWLPAKATWYGAPTGAGPVDNGGACGFKGTNQYPFSSMTSCGNEPIFKDGKGCGSCYQIRCLKSNHPACSGVAQTVIITDMNYYPVAKYHFDLSGTAFGSMASWGLNDKLRHAGIIDMQFRRVPCNFPGLTITFRVQHGSNPMYLAVLIEHENKDGDVVQADIMQSNSGHWEPMHESWGSIWRIDPNRPLRGPFSMRITNESGRQLVAKNVIPANYIPDVDYRSFVQY

SEQ ID NO: 334636 - protein, 84 aa, Zea mays
  Clone ID: MRT4577_68300C.1.pep
MGRGGGMGNPVNVGIAVQADWENREFISNISLNVRRLFDFLLRFEATTKSKLASLNEKLDILERKLEVLEVQVGSATTNPSVFN

SEQ ID NO: 334637 - protein, 331 aa, Zea mays
  Clone ID: MRT4577_68301C.1.pep
FIIATKRQMSAMHPIHKLLEPHFKDNMQINTLARSILLSAGGILERTMYPGKYAMEMSSAIYSEWRFTEQSLPNELVKRGMASKMGGGAIALHVEDYPYAVDGMDVWRAIEGWVRTYCAHFYHSDAAVAADAELQAWWDDVRRVGHGDRQRDPACWLDLDSVANLAESLSTLIWIASALHAAVNFGQYGYAGYMPNRPTRCRRFVPLPDSPEMAQLEADPDRFFLDTVPDRFTATLGLTLIEVLSNHTSDELYLGQRATAAWTDDGEVLQLLDRFREELRRVEKRITERNRDPRLKNRKGPAKVPYTLLFPDVGGKEKGITGKGIPNSVSI

SEQ ID NO: 334638 - protein, 45 aa, Zea mays
  Clone ID: MRT4577_68302C.1.pep
PSTEVMVTENIYSMNKCYLKKRHSSDICMRTQRYCLARMRGRTCG

SEQ ID NO: 334639 - protein, 225 aa, Zea mays
  Clone ID: MRT4577_68303C.1.pep
MMNSQKLQLPVQDLMSLRGRSFIISKVMMHQCTAAVSSSSSPAPAARGLQVAAHPSPSRRRRPRGLVAAAGSDDDECASDGGESESSSSGGKDDGGGGLSREDLERLVGSDDDAKFNGLDLANLIRKKYGRSYDVTLIKKEFMGRNLLAMNVMWKYREQRSFPLSEEEYLLRLDDVANTLKCWGAVAHVRNTLEKLKERPRIGKAVSIFIDMDQTGGRSNEWIYK

SEQ ID NO: 334640 - protein, 73 aa, Zea mays
  Clone ID: MRT4577_68304C.1.pep
WLWTFGLIYVLEKGLELNLRRIVFLLFISCWCCCEDLGERCFVLFWVLLVVVLVLYQVLQGATYTLEVIIANP

SEQ ID NO: 334641 - protein, 65 aa, Zea mays
  unsure (1)..(65): unsure at all Xaa locations
  Clone ID: MRT4577_68305C.1.pep
RXARASGAQSRKLPISLRHARAAVRRPPLLRVPCVARRRSASTLVLVFAFAFSRTGVXSTPXRGE

SEQ ID NO: 334642 - protein, 224 aa, Zea mays
  Clone ID: MRT4577_68306C.1.pep
MMNSQKLQLPVQDLMSLRGRSFIISKVMMHQCTAAASSSSSPAPAARGLQVAAHPSPSRRRRPRGLVAAAGSDDDECASDGGESESSSSGGKDDGGGLSREDLERLVGSDDDAKFNGLDLANLIRKKYGRSYDVTLIKKEFMGRNLLAMNVMWKYREQRSFPLSEEEYLLRLDDVANTLKCWGAVAHVRNTLEKLKERPRIGKAVSIFIDMDQTGGRSNEWIYK

SEQ ID NO: 334643 - protein, 66 aa, Zea mays
  Clone ID: MRT4577_68307C.1.pep
KFAPFFLGPEFSGGGFRRPTFLKKIPKGPNALRILSSPTSSPLKKKGAGLFGFLNRPLPFWINFPP

SEQ ID NO: 334644 - protein, 246 aa, Zea mays
  unsure (1)..(246): unsure at all Xaa locations
  Clone ID: MRT4577_68308C.1.pep
PASKVPSFDFISDPPCATTASTAAPAAPRTSASRAASASASSSSPWSPSSSCSSSATATRRSPGSRSTTPRSRASPSPXSPSGGSATAISYNLTXSRWACATPTGPWAPPSGPSRPTTSSRTSASTASTSSPRPPTSCPPGRPPCSASPAAPTPSASCSGAPASGRTGGRAPRGCSTSRRSSPARSSTNCTPRGAGWRPSAHSVCSSGRRTVAPPSSSRRQPARCSDHRRRDAKLFAASRRCDFLL

SEQ ID NO: 334645 - protein, 91 aa, Zea mays
  Clone ID: MRT4577_68309C.1.pep
YDGRAGGLDIQTYKAGAINPLNTNLFDRWRSPTSDHICVAWIRGSHACIATLLFDPWGGGLTIMQRHYERWAGSCTLYLGTLAGLHRLETG

SEQ ID NO: 334646 - protein, 71 aa, Zea mays
  Clone ID: MRT4577_6830C.1.pep
RKEEDDEEREMVIGYPTDVQHVGHIGWDGHNSKAGAAAAMAGMVNAFSLPSSLSLRHLDMAMDRAVAHASA

SEQ ID NO: 334647 - protein, 64 aa, Zea mays
  Clone ID: MRT4577_68310C.1.pep
NRETHHFIYCMHDKARLNWNNAPSTTPPGRVCLQNLSRRRQTENIQLQTTPPTSMGCTHIMRPP

SEQ ID NO: 334648 - protein, 49 aa, Zea mays
  Clone ID: MRT4577_68311C.1.pep
LRLSACCFGPPMYRPLVIFELIACLVSGFDKPNGFLILKKKKKKKKKKN

SEQ ID NO: 334649 - protein, 218 aa, Zea mays
  unsure (1)..(218): unsure at all Xaa locations
  Clone ID: MRT4577_68312C.1.pep
MEDTLKSLSMDYLNLLINGQAFSDVTFNVEGRLVHAHRCILAARSLFFRKFFCGADQAAAGPGALLLDHLSPRSPSGTSSPRGASAAAPGAVIPVNSVSYEVFLLLLQFLYSGQVSLVPQKGEPRPGCGERACWHTHCAAAVDLALDTLAAARSFGVEELALLTQKQLAGMVEKASIEDVMKVLMASRKQDLHQLWTTCSHLVAKSGLXPPEVLAKPP

SEQ ID NO: 334650 - protein, 208 aa, Zea mays
  unsure (1)..(208): unsure at all Xaa locations
  Clone ID: MRT4577_68313C.1.pep
MEAAGGGQHETRRRAGLALLGVVYSSLLLNAIFVAHHFLXAVPAAAPXDGCGCGLTWSLQAAREAEAVAAVECSGHGQVFVDGVAGEDGRPGCECNSCFGGPDCSLRTPNCTADADSGNPLFLEPYWRRHAAASAVVFSGWHRMSYTTTGGFQSVELERQIRRLHGAVGNAVADDKHLVFASGSLQLINALVHALSPDATAASPPSRV

SEQ ID NO: 334651 - protein, 207 aa, Zea mays
  Clone ID: MRT4577_68314C.1.pep
QFQFGTDGILVSEKPQNRGKRRFLYGISMGGSVALLLHRKAPGYWDGAILLAPMCKISDDMRPHPIVVSALTMVCAVAPGWKVIPTPDIIDKVCKDPEMRKEVRSNPYIYRGKLPLKTCHELLMVSLDIEKNLDQVTMPFLVLHGGDDVVTDPSVSKLLFEKASSKDKTFKLYPGMWHALTAELPDDVERVYADIITWLEERAVVCS

SEQ ID NO: 334652 - protein, 62 aa, Zea mays
  Clone ID: MRT4577_68315C.1.pep
MGNLPGVVQKPFLHFPIRYREHHSHTLQEMLDARMHQPRHLFCDNKQEQDKAKHLMVCLDLP

SEQ ID NO: 334653 - protein, 96 aa, Zea mays
  Clone ID: MRT4577_68316C.1.pep
RRSSATSSSQDTSSSAGHELGRRTAWLSWDVPEVGRGLRSAPTSPARSRAGSRRSSWWRLRPQQRHPVVSPASSFGGIYGPMVGDHHQRVCPRITS

SEQ ID NO: 334654 - protein, 432 aa, Zea mays
  Clone ID: MRT4577_68317C.1.pep
MDSFEGSDHITQRKVVPAKHIALVDGKNEPAGEGLPNGWLKECRPRKNRYGSRAKSDTFYIDPINGYEFHSLKDVHRYLESGDISKCIRSPNKRKIGDLHTKEDQSHHTGKLSDHTQLDTADESNRYDLPEGTNALGYALQNPESEENNENIALSKPDNISSIQIEAGQVEATEDKSIQSGSIEYTPGEAKSVTRKGTDVKEKPKGKQYKTKPAKGIAIPLRSSPRLAALKISQEANNATRDGHIGTQTDTINVPEPKQVQKPRRKTNSSVIPERKDGEPTRSCAETLPSLPNQIQGASFPHSSGDAGCQNAPAEAPVLRQQAGAGQGETSDGLPGSALTSLFQHVWSDPCLVFAFRTLLGDIPVLDDARAYRSSAYDGNRDYYLPPQNMNKNAAANWSALAYDGNRNHAQVDHVMPRPSDTFYISGWFPPQ

SEQ ID NO: 334655 - protein, 98 aa, Zea mays
  unsure (1)..(98): unsure at all Xaa locations
  Clone ID: MRT4577_68318C.1.pep
IAKVAEDTGTYYEIGKRDGDLLYKDYHTDQNCTLTTYNNNGAAITATGTRKDQXVLKERQSQTIHIIVTVDVNATVESDAITTVTTYELGTPRLKAIL

SEQ ID NO: 334656 - protein, 47 aa, Zea mays
  Clone ID: MRT4577_68319C.1.pep
IQDKLAALHAEGCRAEKGAPVAAGDVSLWSLRLYSHTYYRYVGSFTT

SEQ ID NO: 334657 - protein, 52 aa, Zea mays
  Clone ID: MRT4577_6831C.1.pep
GHRLSHARRCKFRSPKKAPHFLYRNLYYVDFSSHVIFIFFFFLAFDLLFVFI

SEQ ID NO: 334658 - protein, 97 aa, Zea mays
  unsure (1)..(97): unsure at all Xaa locations
  Clone ID: MRT4577_68320C.1.pep
IGYSSGRDYYQWARIGTLLRCGRPEVLQWSRSRTGPWELPPGFRFHPTDEELITHYTXRQXRRRRFARXAVAEXDLNKCEPWDCHAGEMGREEXTSS

SEQ ID NO: 334659 - protein, 96 aa, Zea mays
  unsure (1)..(96): unsure at all Xaa locations
  Clone ID: MRT4577_68321C.1.pep
SRYSPGVVQGTLAPEYAYTLKEDEKSDVYSFGVVLLELKVCSSPXGEFGDGVDIVHWVRTVTGPSKEGVMNIARPRFLTVPLYEVTHGFYIATLCA

SEQ ID NO: 334660 - protein, 53 aa, Zea mays
  Clone ID: MRT4577_68322C.1.pep
RYKSRARQLRSQSTFLRKIPPFLWPAGYRSVMWQQQVMTSKPRNLTNHAAELS

SEQ ID NO: 334661 - protein, 40 aa, Zea mays
  Clone ID: MRT4577_68323C.1.pep
YTQNMVPQQASWLGIGESRGAGGRTPSRPAVGRGRSPRVR

SEQ ID NO: 334662 - protein, 105 aa, Zea mays
  unsure (1)..(105): unsure at all Xaa locations
  Clone ID: MRT4577_68324C.1.pep
NIVYTPCGIRPLLHAWYDQFVFGTFIRGYSLLHLLLPSADLVPHQIVVQSRPASIFSRVNNKIKTTCXVEENNPHIYKKKQQKXXGPAPPTCNXLVDPRINSGRT

SEQ ID NO: 334663 - protein, 76 aa, Zea mays
  Clone ID: MRT4577_68325C.1.pep
MANGNTSHRFKLLLFLLTLHSSFAEIFFEERFEDGWKSRWVLSDWKRSEGKAGTFKHTAGKWFGDPDDKGLQTYND

SEQ ID NO: 334664 - protein, 118 aa, Zea mays
  Clone ID: MRT4577_68326C.1.pep
MTALWYRRGAARLAHHGTTLAKGDVGQPADGGEDATDFSVLLQGVKHNGRTPRAVEKGFSGSKEHLALQLAVEVTVQVHVGALGFGQRRLAVDCGITAAGLSKDVHIASQSCRSSFRN

SEQ ID NO: 334665 - protein, 259 aa, Zea mays
  unsure (1)..(259): unsure at all Xaa locations
  Clone ID: MRT4577_68327C.1.pep
MDDYAREMMELKTLVTRTLEKKGVLAKIRAELRASVFEAIEEEDRVMENDDGGNPALLGSCNDRAKQLHASPSGRLLTALVCEYLEWAQLSHTMKVYLPECNLPKDFWKNELKDFSNKSGAEGSRSAESGPLLLDVLEGYLKYENLSQARMGGRRMMSSESDPSLNAEHRSMRRAPSASVGNLPPMGRPISSSQQASDRRGGSSASNTRKDEYNWRYDTTDDISEEVLRASTALESVQLDRKSRNLPTSWRXHSGDGAE

SEQ ID NO: 334666 - protein, 122 aa, Zea mays
  Clone ID: MRT4577_68328C.1.pep
PGLIFYTTVPSLSFVTGRGIEQRPTTMFYVYLAIVLGTLLILAVLEVKWAGVTVFEWYSFGTWIKRSLVSKKKKKKKKKKKKKKKKKKKKKKKKKKKKKKKKKKKKKKKKKLKKSFNQKNFF

SEQ ID NO: 334667 - protein, 224 aa, Zea mays
  Clone ID: MRT4577_68329C.1.pep
LGFLSVPLQYPQLYQEGVQNILFSWRRILGWMFNGVMNAVLIFFFCITAFEDQAFRRDGQVAGLDALGVVMYTCIVWVVNCQMALSVNYFTIIQHIFIWGSIAVWYLFLLVYGAINPRFSTTAYMVFIEQLAPALSFWLVTLFVVVATLVPYFSYAAIQIRFFPMFHNKIQWKRYLGKAEDPEVARQLSSKHRTSLQHRMVGISARRDGKAVQITKETELQVQE

SEQ ID NO: 334668 - protein, 111 aa, Zea mays
  Clone ID: MRT4577_6832C.1.pep
MINLCTICFNLVEDIVITKSDVKGMIKSFIMLILQQSSDILTLINSVIFERHRFRTILDVAGSLQPWMRSKTAEFSSFTMLASKISAYPSRRVGVMAVQQVRLPGGHRSNT

SEQ ID NO: 334669 - protein, 95 aa, Zea mays
  Clone ID: MRT4577_68330C.1.pep
CPSPCACSLGSHSWPLNRASLLHAAPDLCLLLGSAVAFRFLVVELALVVSPWPTPNFTDQFLPQRPTAKYLRTLSAPSALIPTSSSTHVVPTTYS

SEQ ID NO: 334670 - protein, 63 aa, Zea mays
  Clone ID: MRT4577_68331C.1.pep
QNNNKLPRAGVKKKQPNSIVYYNRPPIPFHPILKHTHRTHIHLLSPYRYRFYSIPDPLLMTPL

SEQ ID NO: 334671 - protein, 156 aa, Zea mays
  Clone ID: MRT4577_68332C.1.pep
MQDLPQPPPQPRNRARRRRGTSSPVVRKNNSFLVKQFGNGNAKVQFTKEPNNLYNIHSFKHSGLANKKTVTIQPAAKDSAVVLSTTKTKKQNAPAKLSHKSVMRKEFRKMAKAVKNQVSDNYYRPDLTKPALARLSSVYRSLQVAKSGVKKKNRQS

SEQ ID NO: 334672 - protein, 61 aa, Zea mays
  unsure (1)..(61): unsure at all Xaa locations
  Clone ID: MRT4577_68333C.1.pep
MASITMGVSLTALGGKPXNLPTYTSFGXSRLTILKTASKAKPVSASGSPLYRPDRLLYLVP

SEQ ID NO: 334673 - protein, 80 aa, Zea mays
  Clone ID: MRT4577_68334C.1.pep
PTRPKTVTIQPAAKDSAVVLSTTKTKKQNAPVKLSHKSVMRKEFPKMAKAVKNQPPGCQVRCQEKEQAVLSAKFVFCQRA

SEQ ID NO: 334674 - protein, 104 aa, Zea mays
  Clone ID: MRT4577_68335C.1.pep
SYLDFPKRANFGAQTGKTTFPTKFHFSVLKGGSDPSQQVFGSRPPKMHMPAMSNGLASRGGKSLPITRQPALLKLHCTYEIFPLENKELLQLGVAEQMHYSKLG

SEQ ID NO: 334675 - protein, 94 aa, Zea mays
  Clone ID: MRT4577_68336C.1.pep
RKFSKIAPLNGPPGKDLFFFFFFFFFFPFFFFFFFFFFFFLITKCKAIFLRNDTQQHLNMVCSVLTSLNCWNIDKYKLGLRAPTCPLTEHKLSA

SEQ ID NO: 334676 - protein, 94 aa, Zea mays
  unsure (1)..(94): unsure at all Xaa locations
  Clone ID: MRT4577_68337C.1.pep
PLRRIKQAIFLLPPGGRESAFRNIKTIAEGLANXLINAPKGLFNSLALKKKGEIWGVSKAPRLTELVFWCPLRWKLFFFWQLDRFLFFQCLKFF

SEQ ID NO: 334677 - protein, 112 aa, Zea mays
  unsure (1)..(112): unsure at all Xaa locations
  Clone ID: MRT4577_68338C.1.pep
SHVDPFHIFESFFKPSFTLRGKSIMXIMQTMGEDVFNPLKVSLENLYKGTLNKLFLIRNVICYNCNDNAXNSCTSIMFPYYHFSHIKFTIPNLDPSMIHXMQHPYNEFNETV

SEQ ID NO: 334678 - protein, 143 aa, Zea mays
  Clone ID: MRT4577_68339C.1.pep
MATVPGDLIWQVVRKNNSFLVKQFGNGNAKVQFTKEPNNLYNIHSFKHSGLANKKTVTIQPAAKDSAVVLSTTKTKKQNAPAKLSHKSVMRKEFRKMAKAVKNQVSDNYYRPDLTKPALARLSSVYRSLQVAKSGVKKKNRQS

SEQ ID NO: 334679 - protein, 83 aa, Zea mays
  Clone ID: MRT4577_6833C.1.pep
MAAAGSYAALSSCLLALALLAATASAQEKETHLRVFWHDVVTGGPNVSTIVQVAEAPSSNASATGFGTVIVIDDPLTEGPNLT

SEQ ID NO: 334680 - protein, 54 aa, Zea mays
  Clone ID: MRT4577_68340C.1.pep
IWDFCEGKENPVIFQAHFFSSTKRFQNLGTTHKGLPPPPSNPSPGKRFFFTGKG

SEQ ID NO: 334681 - protein, 85 aa, Zea mays
  Clone ID: MRT4577_68341C.1.pep
ELAFIKFILENADALQEMAIVCVNGSFSSWDEAAAKVTKDLTCVKRASQNCNVEVLESSNSRGSSSWSCQVASDPCVIDPFEYCY

SEQ ID NO: 334682 - protein, 143 aa, Zea mays; identical to SEQ ID NO: 334678
  Clone ID: MRT4577_68342C.1.pep

SEQ ID NO: 334683 - protein, 92 aa, Zea mays
  unsure (1)..(92): unsure at all Xaa locations
  Clone ID: MRT4577_68343C.1.pep
SLFSFLFSLACMVFFLRSGATVACHCFLVLYCARFFYPPXCCTLLVSLSRLLFLFSCAGLFVCVGLSPWFRAFSLALVYTCDSGPGSPVAWV

SEQ ID NO: 334684 - protein, 113 aa, Zea mays
  unsure (1)..(113): unsure at all Xaa locations
  Clone ID: MRT4577_68344C.1.pep
AITPQAIGEPGSQMTXQTFHFAXVDAMSITQGVPCIKALINTCSTIXAPVWVGALXHDLRVRRRRIVKARVEKTYLRDVVWHVMHIGDLNHDYIDMRIDWDTINRMLVDGQPY

SEQ ID NO: 334685 - protein, 109 aa, Zea mays
  unsure (1)..(109): unsure at all Xaa locations
  Clone ID: MRT4577_68345C.1.pep
FAARVRVRFQTGLKREPMALNKKLRNAKKDAPAGEKAXPVWSHLRDMLIVPAMLGSCAGVYCGQCFGQVELNPEMVGHHPGEFPLPPKPVKHGRSGVGATHSWRFFPPQ

SEQ ID NO: 334686 - protein, 54 aa, Zea mays
  Clone ID: MRT4577_68346C.1.pep
THKSHHTSRSYFIDNKSVNNQIKHFRLSLTAYPYPYSIFTLRPVQSTVQNSAYG

SEQ ID NO: 334687 - protein, 110 aa, Zea mays
  unsure (1)..(110): unsure at all Xaa locations
  Clone ID: MRT4577_68347C.1.pep
QCLEESLSPSLLRFGILDLWEVHTLKFPSLSDMAKDILAIPSIWLPVXRSIFYAAPGGPMGDDYKSSFRXKLCSALVCAKGWLQYSPPATSVLGYQMTEAGTLLLPALHP

SEQ ID NO: 334688 - protein, 274 aa, Zea mays
  Clone ID: MRT4577_68348C.1.pep
SRSKKSRLLLICYHFHVEFDTTSRAGKTDPYVIMIIDDQVIKSKKNSQTTVIGLPGEPIWNQDFHMLVANPRKQKLTIQVKDSIGLTDITIGTGEVELGSLKDTVPTDKIVTLYGGWGLFGKREAGEVLLRLTYKAYVEDEEEEDEAVRSEIGAGYASDEDVLDYVSGMSKGTDFVGKERETFMDLLAALLVSEEFQGIVSSETGSSSREGEQAGSGPEGTDSVTVPTSAAAADTEASTVPNSSTDTALVWLAAITSVMVLVSSNLGGSGYFNP

SEQ ID NO: 334689 - protein, 55 aa, Zea mays
  Clone ID: MRT4577_68349C.1.pep
KKIFYNKKKKKKKKKKKKKKKGEKKGKVRGAGLLFKSKLTYSRMHPKIYFIGGPK

SEQ ID NO: 334690 - protein, 104 aa, Zea mays
  Clone ID: MRT4577_6834C.1.pep
LCRKSWCPSQQSSRLQLRVRDGLRVQKQGRLYPRGGVVVSISQKIINLAQVVVVPDGTRDDSGHGQIYSRVHSLGIHSSSGRQYTDSSIRVRCSEIHDFKPLCM

SEQ ID NO: 334691 - protein, 52 aa, Zea mays
  Clone ID: MRT4577_68350C.1.pep
TCNKPVLTVERLYKPRLVVSVKLQGTPPYIEPDAQMLWLFRDQCSKERTSML

SEQ ID NO: 334692 - protein, 85 aa, Zea mays
  Clone ID: MRT4577_68351C.1.pep
DKGVESVFDIMEMEDEERNALLQLTDSQIADVARFCNRYPNIELSYEVVDKDSIRSGGPVVVLVQLEREEELTGPVIAPLFPQKR

SEQ ID NO: 334693 - protein, 82 aa, Zea mays
  unsure (1)..(82): unsure at all Xaa locations
  Clone ID: MRT4577_68352C.1.pep
MSWELLLWLLALCXVILPLVQFLRFLRADADLTLLWAEWQGRRPEWELTDMVVWITGASSGIGEELAFQLSKLGVCLVLSAR

SEQ ID NO: 334694 - protein, 74 aa, Zea mays
  Clone ID: MRT4577_68353C.1.pep
KHLFGGALRKVHRQHLLVKQRFARGRPELFTGLKKKNSPKTNLWFSGGPEKKNPFLVRRLKKGKAGVENPTKRG

SEQ ID NO: 334695 - protein, 624 aa, Zea mays
  unsure (1)..(624): unsure at all Xaa locations
  Clone ID: MRT4577_68354C.1.pep
MAMNVIALLGLLALASVVRTASGAGGHDYASALKKTILYFEAQRSGVLPPNQRITWRENSGLFDGKANGVDLVGGYYDAGDNVKFGLPMAFTVTMMSWGILEYGRQMAAAGELRNAMDAVKWGTDYFIKAHPEPEVLYGEVGDGDTDHGCWQRPEDMSTSRQAFRIDPQNPGSDLAGETAAAMAAASLVFRSTYPGYANLLLQHAKELFQFADKYRGKYDASITVARNYYGSFSGYGDELLWAAAWLYEATDEGCYLEYMARNGDALGGTGWSINQFGWDVKYPGVQVLAAKFLLQGRAGAHAATLQRYRQNAEFFVCSCVGKGAVNVPRTPGGMMYHQRWNNLQFVTSASFLLTVYADYATALPGSGGGALRCPAGAARPFEILAFVRSQVNYILGDNPRGTSYMVGYGASFPRQVHHRGASIVSVRTDPSFVSCQEGYSAWYPRQAGNPNVLEGAIVGGPDEYDDFADERNNYEQTEAATYNSAPLLGVLARLAGACGXRARGVPAASAGGGXANQTSSSRLRQPSTSPIEIEQNVTRTWAMRRATYYRYSVTLTNRSRKTVRGLHLGVSELRGRLWGLDKARYGYVPPKWLPALRTGKSLRFVYVQRGTPANVRVIGYKLL

SEQ ID NO: 334696 - protein, 65 aa, Zea mays
  unsure (1)..(65): unsure at all Xaa locations
  Clone ID: MRT4577_68355C.1.pep
PTRSSSWSTPVSTRKMANYAXARLTQRKLCYQLYALLTCRSFVXLGYNLQRLIXPYSSWLPTKTP

SEQ ID NO: 334697 - protein, 63 aa, Zea mays
  Clone ID: MRT4577_68356C.1.pep
APNEATLTVNIQRNTFCKPKEHTLQSGGRILGAGLLLHVPPSQQKHELRRHPHPPKKSLASRP

SEQ ID NO: 334698 - protein, 59 aa, Zea mays
  Clone ID: MRT4577_68357C.1.pep
PAGPGFRSWLSQPYCCVECWNVFRLLYCLSSCCYPNIHLEEYQSVSALILQLLKLRVLS

SEQ ID NO: 334699 - protein, 97 aa, Zea mays
  Clone ID: MRT4577_68358C.1.pep
PFLWFSQAPKKDKAPPPSSKPAKSGGGKQKKKKWSKGKQKEKVNNAVLFDQATYDKLLSEVPKYKQITPSVLSERLRVMYIAFSASHGGNYVSVPDD

SEQ ID NO: 334700 - protein, 39 aa, Zea mays
  Clone ID: MRT4577_68359C.1.pep
MAPKKDKAPPPSSKPAKSGGGKQKKEKWSKGKAKEKGHN

SEQ ID NO: 334701 - protein, 82 aa, Zea mays
  Clone ID: MRT4577_6835C.1.pep
KCVHNFFVAHKLCLGLTKNLESCFLLNPFPCLLVQADVPYLVCLFLRIAMLLYQPNLEKTCPIIFFKFDAFGFLISLGGIPT

SEQ ID NO: 334702 - protein, 69 aa, Zea mays
  Clone ID: MRT4577_68360C.1.pep
YILNQYSKIYPQKVPNKPTLKLNHFNNPLIIRIKQLPQLTLNRQLLTPNIKYIKGNPCLTIIHNLTYTS

SEQ ID NO: 334703 - protein, 108 aa, Zea mays
  Clone ID: MRT4577_68361C.1.pep
MAPKKDKAPPPSSKPAKSGGGKQKKKKWSKGKQKEKVNNAVLFDQATYDKLLSEVPKYKQITPSVLSERLRINGSLARRAIKDLMARGFIRMISVHSSQQIYTRATNT

SEQ ID NO: 334704 - protein, 406 aa, Zea mays
  Clone ID: MRT4577_68362C.1.pep
SEFRCCRGKTFTAAKLTRYLRWLGHETKHFNVGKYRRLKHGTNQTADFFRGDNREGVEARNEVAALAMEDMLSWMQEGGQVGIFDATNSTRIRRNMLMKMAEGKCKIIFLETLCNDQDVLERNIRLKVQQSPDYAEQTDFEAGVQDFKERLTYYEKVYEPVEEGSYIKMIDMVSGKGGQLKINDISGYLPGRIVFFLVNCHLTPRPILLTRHGESMDNVRGRIGGDSSLSEAGELYSRKLASFVEKRLKSERTASIWTSTLQRTILTAHPIIGFPKIQWRALDEINAGVCDGMTYDEIKKSKPEEYESRRKDKLRYRYPRGESYLDVIQRLEPVIIELERQRAPVVVIAHQAVLRALYAYFADKPLEEVPNIEIPLHTIIEIQMGVAGVQEKRYKLMDAIHPTAGL

SEQ ID NO: 334705 - protein, 108 aa, Zea mays
  Clone ID: MRT4577_68363C.1.pep
MAPKKDKAPPPSSKPAKSGGGKQKKKKWSKGKQKEKVNNAVLFDQATYDKLLSEVPKYKQITPSVLSERLRINGSLARRAIKDLMARGLIRMISVHSSQQIYTRATNT

SEQ ID NO: 334706 - protein, 538 aa, Zea mays
  Clone ID: MRT4577_68364C.1.pep
MGRGSCAQRRRTREVGGHTAVVRGFGGMGEKRRFFSVIEGRKSHLIRLGYQLEYRRLKHGTNQLALPVSLWSYITLSNKIFLIASCYFEQTADFFRGDNREGVEARNEVAALAMEDMLSWMQEGGQVGIFDATNSTRIRRNMLMKMAEGKCKPPEPRMCMVGEVIRCQLGLVGLQSALTPEKLLAAVEPPQRVTATVVDGEGEGCCSRRHGSSGEGRRQGMIQGVTTTGGCRGWSVVVKKAFELQRLQESCAPFNIEEKKIIFLETLCNDQDVLERNIRLKVQQSPDYAEQTDFEAGVQDFKERLAYYEKVYEPVEEGSYIKMIDMVSGKGGQLKINDISGYLPGRIVFFLVNCHLTPRPILLTRHGESMDNVRGRIGGDSSLSEAGELYSRKLASFVEKRLKSERTASIWTSTLQRTILTAHPIIGFPKIQWRALDEINAGVCDGMTYDEIKKSKPEEYESRRKDKLRYRYPRGESYLDVIQRLEPVIIELERQRAPVVVIAHQIPLHTIIEIQMGVAGVQEKRYKLMDAIHPTAGL

SEQ ID NO: 334707 - protein, 63 aa, Zea mays
  Clone ID: MRT4577_68365C.1.pep
YNSNLTTQVLLSIPFKIILIINLKNLNLYTLFIIYTTSFSLQHTSSKLHLYSTYLLNTSPTFL

SEQ ID NO: 334708 - protein, 182 aa, Zea mays
  unsure (1)..(182): unsure at all Xaa locations
  Clone ID: MRT4577_68366C.1.pep
TQEPLQPQPPRGRGRGAQNPPARGGTKRGXNGTGTTTATPSDNRPXAAAAPRDKPXAERDPTGGGPHXGEAGGTGDDGRPGRRRTGHAHXDQDGGRXXDGQDGXAGARDGEXRXRDPHTGPTTRRXGGHDKDGTDAARPGDNRQSGPAGRGKTAKPGNXXGEXERTXGGDPGXGGEGHDREG

SEQ ID NO: 334709 - protein, 98 aa, Zea mays
  Clone ID: MRT4577_68367C.1.pep
GGVNFYPGVHSQRGLNGRHPGNRRTLRAPQKTQKKKLCERETHKPRTASARLDTGGQRRGETKTTPRKGSAPATKNTRGGGRTDLTAANPQTKGKAPP

SEQ ID NO: 334710 - protein, 79 aa, Zea mays
  unsure (1)..(79): unsure at all Xaa locations
  Clone ID: MRT4577_68368C.1.pep
SRCFAAWKNXKCMQVRRVQSNCCLNGAQDLSCLTRSQLSACVSAHTWKKGRENFPEDINVYETTXILVTLFQMWEHLVP

SEQ ID NO: 334711 - protein, 368 aa, Zea mays
  unsure (1)..(368): unsure at all Xaa locations
  Clone ID: MRT4577_68369C.1.pep
MSSSGAPAPAAAMAVDDAEDDQLASMSTEDIIRASRLLDNEIRVLKDELQRTNLELESFKEKIKENQEKIKLNKQLPYLVGNIVEILEMNPEDEAEEDGANIDLDSQRKGKCVVLKTSTRQIQELVEAIVLPMTHKDRFQKLGIRPPKGVLLYGPPGTGKTLMARACAAQTNATFLKLAGPQLVQMFIGDGAKLVRDAFQLAKEKAPCIIFIDEIDAIGTXRFDSEVTXXDREVQRTMXLELLNQLDGFSSDERIKVIAATNRADILDPALMRSGRLDRKIEFPHPSEEARARILQIHSRKMNVNPDVNFEELARSTDDFNGAQLKAVCVEAGMLALRRDATEVTHEDFNEGIVQVQAKKKSSLNYYA

SEQ ID NO: 334712 - protein, 392 aa, Zea mays
  Clone ID: MRT4577_6836C.1.pep
MASSLVSRPHLTQRPVRAATLASATRPRLAAGALSGRCQAQAAGDLDDAHYMRRCVELARKAAGHTSPNPMVGCVIVRDGRVVGEGFHPKAGQPHAEVFALRDAGNLAENATAYVSLEPCNHYGRTPPCTEALIGAKVKEVVVGMTDPNPIVASKGIEKLQGAGISVRVGVEEALCRKLNEAYIHRMLTGKAFATLRATLSMNGIITNQIGKGADQSGGYYSQLMKEYDGVIISSDLAKMSALPLSREAGTNQPLCIIIAQGESSRLHIPSLSQEHASRAIVLADSPVTVEPAGVEVAVFRQIDLESILQLLAQRGLCSVLVDFREAGESFASLLNDFQEDKLVQKVVVEVLPFWLASDGLSNLAFGGSQSFPLKNLELRDVNGSVLLEGYV

SEQ ID NO: 334713 - protein, 179 aa, Zea mays
  unsure (1)..(179): unsure at all Xaa locations
  Clone ID: MRT4577_68370C.1.pep
KTANSAPPDPXARTRAQPRKTVNSAPPDPXARTRAQPRKTANSTPPDXRARTRARTRKIANSASPDPRARTWAQPRKTTNSASPDPRARTWAQPWKTANSTPPDPXARTWAQPRKTTXLRLARPQGSDMGSTPEDDELRLARPQGSNMGSTPEDDELRLARPGGSTSTSTSEEPPPRPA

SEQ ID NO: 334714 - protein, 269 aa, Zea mays
  Clone ID: MRT4577_68372C.1.pep
MSSSTAPAPAAAMAVDDAEDDQLASMSTEDDIRASRLLDNEIRVLKDELQRTNLELESFKEKIKENQEKIKLNKQLPYLVGNFVEILEMNPEDEAKEDGANIDLDSQRKGKCVVLKTSTRQDPKAENPNEMVTAGVLSSLQNFLRKCLIASLSYGPMPKHIAFIMDGNRRYAKFRSMQEGAGHRMGFSTLIASLMYCYEMGVKYITVYAFSIDNFKRDPSEVESLMQLMEEKINELLENWPVSFSIKKDFGRMQCYCKGKLVSNFHSGH

SEQ ID NO: 334715 - protein, 108 aa, Zea mays
  Clone ID: MRT4577_68374C.1.pep
MAGAQCAATAGPRAAAPPPLLLALLLLCAFLCAVLVLLAPAARQHGDDSDETEELHAASSPWGRRDLPRPAAAAAWRPRPRGRWNSAGQGLRDGKHEVPSGPNPDSNR

SEQ ID NO: 334716 - protein, 98 aa, Zea mays
  Clone ID: MRT4577_68375C.1.pep
FGKAGTKHFCSQSTTLLSNINCALRTITAYRSQKTLNIGIFKSRYACQLHKSFQPRVLQRYKLSSSDGLAITLNLILLLDGVPVALALASVDTAHKQG

SEQ ID NO: 334717 - protein, 118 aa, Zea mays
  Clone ID: MRT4577_68376C.1.pep
GKLRARLNADAAPEAPPRLASSKRARSRSGLPPPRRPHPTHPLPSVAHRPRRRRCPPTHPPPHVSSCAPPRISPSPPRRRRPHPSKQPRRPRTVASLSLLAEATARLLYPAAFMRRLS

SEQ ID NO: 334718 - protein, 81 aa, Zea mays
  Clone ID: MRT4577_68377C.1.pep
PGIILLPGLKHGLGCPTPKFFPLFFFSQFFIPHLLFLWLGNCNTPGQFPFLECRNFFFYPPKLGVLRLPILLAKIKPNETR

SEQ ID NO: 334719 - protein, 164 aa, Zea mays
  Clone ID: MRT4577_68378C.1.pep
MWGSTDGGTPEVTLETSMGAVSVEMYYRHAPKTCRNFVELARRGYYDNVIFHRIIKDFIVQGGDPTGTGRGGESIYGAKFEDEIKTELKHTGAGILSMANAGPNTNGSQFFITLAPCQSLDGKHTIFGRVCRGMEIVKRLGSVQTDKNDRPIHEVKILRAVVKD

SEQ ID NO: 334720 - protein, 206 aa, Zea mays
  unsure (1)..(206): unsure at all Xaa locations
  Clone ID: MRT4577_68379C.1.pep
RKKQWRSCSARAAALLVAAGVCSDGACTFYYFDPNLASARVRLHTNSDDFEXGCFPHVAPRTAXHIFKLVRIGCVSTDHYLRLDKGXMDKLVLLCXGRTAPINEEQRKEAEKTIDGECRRVKHGKGILCMGRHSDAHRARSCLFILLGNSPHLDGQCAAFGRVTKGDYTWTNLERLTTGRERIRVMPIDRINMLSTYYNDIDLESC

SEQ ID NO: 334721 - protein, 69 aa, Zea mays
  Clone ID: MRT4577_6837C.1.pep
LWNLWADLCACLCACGDELPELPTLEKDGTSLLPVWCVKVPEEVPNSPEGTIRNKVEGVTHSPLCSYPF

SEQ ID NO: 334722 - protein, 105 aa, Zea mays
  Clone ID: MRT4577_68381C.1.pep
VVTGSWLIRFVTPNGAGDYVSSSAIRSSQEDMVKSGGHGCHLRSEASRRDRSSLEQRHDAQAGDGGVAEHHKIKYESACHTRARISRWNERGDSAGTARIFPAGL

SEQ ID NO: 334723 - protein, 88 aa, Zea mays
  Clone ID: MRT4577_68382C.1.pep
LAASAPAGPAIYPGKCGNYSSCSVRLVATATGVQLRVELPAPPPAAAVCVAIPHEQLRRPHRDQHAGRPRGRWRAAIRSHRSNSMSGA

SEQ ID NO: 334724 - protein, 93 aa, Zea mays
  Clone ID: MRT4577_68383C.1.pep
VLLAAPLCAKRHKRTKPGNNTGPTISNTTHDICDTEQSARIQRTVLKIPIYIHRRAKQENKNARDWVFKIQTVRSSSSFTDSPGRTVPSDEQD

SEQ ID NO: 334725 - protein, 62 aa, Zea mays
  Clone ID: MRT4577_68384C.1.pep
MGTVFDSAELLAPTSRHSDTTMFVHFERSAHAAEDGCQVSQDAYAPAPFVLPHYNRDLHDDA

SEQ ID NO: 334726 - protein, 91 aa, Zea mays
  Clone ID: MRT4577_68385C.1.pep
QARELRLSQQPQLKHVRHQLIRRFVARRHRQGDRLAHREHRRSVRSSRAVQGIGRGLLDLMGGHEQDHEAATSPKVAAWHRYGGRLGVDRQ

SEQ ID NO: 334727 - protein, 99 aa, Zea mays
  unsure (1)..(99): unsure at all Xaa locations
  Clone ID: MRT4577_68386C.1.pep
MSRGGSAGGGQXSLACLFGSGEPPKPGVARAATAPPVEKPSAPKTDAAKHVAAGATRQTNNYHTAHGQNTGNFLTDRPXTNVHTAFDGGYNLCYLIRGN

SEQ ID NO: 334728 - protein, 84 aa, Zea mays
  Clone ID: MRT4577_68387C.1.pep
MCMVIFAPLFAIFAFATCGGYSGGLRLSVDCVNKTESNLSIDIAFAYPFRLQQVTFEVPTCEGKERQKLALTGDSSSSAEFFVT

SEQ ID NO: 334729 - protein, 82 aa, Zea mays
  unsure (1)..(82): unsure at all Xaa locations
  Clone ID: MRT4577_68388C.1.pep
PPSWPPRSARAAFVVGAXRTVVLMLLRAAVSTLGDMQLHELPQEQLEPQSHLPLLQDMITGEGKQALAVLGGGGRRRRGVVH

SEQ ID NO: 334730 - protein, 72 aa, Zea mays
  unsure (1)..(72): unsure at all Xaa locations
  Clone ID: MRT4577_68389C.1.pep
GVLSTKVLCDDSLLSLVNLLFTRPFVIYIFVPLFFFLFVCMYVFLFFYFFLFLFFFFFIFFLXFFFFFFFLF

SEQ ID NO: 334731 - protein, 41 aa, Zea mays
  unsure (1)..(41): unsure at all Xaa locations
  Clone ID: MRT4577_6838C.1.pep
HLRRSXXTNRLNYXXRHXPXPHGPXHXYXSFTXXXXSTSLP

SEQ ID NO: 334732 - protein, 118 aa, Zea mays
  Clone ID: MRT4577_68390C.1.pep
PVPNLVLKSVPRGAAIPCFLALPPNVKGGFGKYFPDSNEPPPPSVPKNSNLAKRFWSFTKNLVKFFFFFSQPPQASEKGEPPVSKNFFQTKKGNICCWVFSFLSMSSWARMASAFKSP

SEQ ID NO: 334733 - protein, 67 aa, Zea mays
  Clone ID: MRT4577_68391C.1.pep
MPETTTPQVPASLGENRGIKFSFKTGNARYQCVLQDRSVYERKKASRQNSSDSVSSTESTQTEKSSH

SEQ ID NO: 334734 - protein, 62 aa, Zea mays
  Clone ID: MRT4577_68392C.1.pep
FAIAAVGLLSWPAFHAKVPEHHLAGWRVPLYSASASMTIYEFYRPQRCASRVVGERLVTSRA

SEQ ID NO: 334735 - protein, 104 aa, Zea mays
  unsure (1)..(104): unsure at all Xaa locations
  Clone ID: MRT4577_68393C.1.pep
LRVLVDPLNKARFHICPPVKNPFKPGESLISLAAKVENXHKRLLARKSLIXKRKKELERQILGKEKEEEKKGMGRQKKTADXERVRLLNXQRQREQARIRKEIE

SEQ ID NO: 334736 - protein, 93 aa, Zea mays
  Clone ID: MRT4577_68394C.1.pep
GGGFFDQVFIILANLFFFSPWLGGIGRVQNSVKKLVFPRPCLKRGEGGREKSDPILYQPPPPWVSKWGPRLSFSWGKQSKKVLPGSNLRLGTF

SEQ ID NO: 334737 - protein, 86 aa, Zea mays
  Clone ID: MRT4577_68395C.1.pep
VVGTDGYWYAGLQVRGNPQLFEGHMSRCMARDLRAEPSVLNVCADEGQLMKGREIHGRMARCLAFSSDTVVGNADIDMYGKCGQDG

SEQ ID NO: 334738 - protein, 57 aa, Zea mays
  Clone ID: MRT4577_68396C.1.pep
PTSPLSFFFKGIIPFHIESDIRSWSTTCLLVFLPKPNENYKQKMDRARKGVLQINDI

SEQ ID NO: 334739 - protein, 42 aa, Zea mays
  Clone ID: MRT4577_68397C.1.pep
CPCNKTCNVLCSPTQVFLFYPIIFGVLNEWLNNPKKFVMVFK

SEQ ID NO: 334740 - protein, 383 aa, Zea mays
  unsure (1)..(383): unsure at all Xaa locations
  Clone ID: MRT4577_68398C.1.pep
MQVTPAATLRPAAAHALRLSTDHCREGPKIRVRFGSRKLSWTETLDDATSLTRATGRQRRHSSILKVSCWAAAHHQHNSNPQHFKATGIRIAKTLHAFYQFCRPHTIFGTIIGITSVSLLPVKSLDDFTLIAIWGFLEALVAALCMNVYVVGADQIFDIEIDKVNKPTLPLASGEFSVPTAVLLVVAFLVMSISIGIRSKCAPLMCALLVSFLLGSAYSIDVPLLRWKRHAFLAAFCIIFVRAVVVRXHVLKRPLAPTRXVVFATCFMCCFAAVIALFKDIPDVDGDRDFGIQSMTVRLGXQQRVHRLCINILMTAYAAAILVGASSTNLYQKIVIVSGHGLLASTLWQRAQQFDIENKDCITQFYMFIWKLFYAEYFLIPFV

SEQ ID NO: 334741 - protein, 77 aa, Zea mays
  Clone ID: MRT4577_68399C.1.pep
EHGRCSRERHVGSAARTHVGFACERGPAIAGDGVATRLQLQCDGAELLVVHTVLSVAGGGGASGCIHGCADVCSDVC

SEQ ID NO: 334742 - protein, 124 aa, Zea mays
  unsure (1)..(124): unsure at all Xaa locations
  Clone ID: MRT4577_6839C.1.pep
RGPVISEHCRRVQTVEQQAVSDSCEQQNTPAVRALGFLPEEGHGVYVXMILNYSSFRYVWEXTXTMILFRWCHGSPVHRYGLYALQWIIEINGQPTTDLETFIKVVKGLEDGEFVRVRTVHLNG

SEQ ID NO: 334743 - protein, 122 aa, Zea mays
  Clone ID: MRT4577_683C.1.pep
NEFFFFSFGYFGLHVFTIGRPNSNHKDKSYKRGKKGNPQRPQKQGERTKRWITHVCQGPWGLPIQDQEQMKETIMRGKHPNSAWQARIPPRSGPGESYTAQDGSGNGPHGAKTQRPKPLPHA

SEQ ID NO: 334744 - protein, 122 aa, Zea mays
  Clone ID: MRT4577_68400C.1.pep
MAAPTPTTTTRRDYRLRPRCFSSPRSCPMAKRLAGIDKEVLVEVVRFTHKSGLRGCDGGWKDFLARNDRKFGASVSDPRKRSRDVLFAFLQTFPKDFQKKHLMPLVRREPPEGNAGIPQSPK

SEQ ID NO: 334745 - protein, 183 aa, Zea mays
  Clone ID: MRT4577_68401C.1.pep
RFVKEAKYRRIRLEEKGEAKQPARASDRSPRPVVNNIPSNAYPVEGPSECHKKPGFIYASGEKGHLSDKNLDVPSTRAGGLEKDRTELLRMLDELRDQVQRSYEIADKSSVNASTNRMVDPASSYNPHERLSRLRYGSPQLQRNGSQRSPSLNGQAPVVPPAYPSVSVQQDLHGYGQSCAHMG

SEQ ID NO: 334746 - protein, 155 aa, Zea mays
  unsure (1)..(155): unsure at all Xaa locations
  Clone ID: MRT4577_68402C.1.pep
KTAPPFFYYFLFFYFFFIFFFFFFFFFSDPGADPGADPGAEPGADPGGDPGGQPGNPEPDPEGLQVFPKESGIKTGKNKAKSKFQGKNXPAKKPTKNKNRKPXGKPGGPKKKKNKNKRGSAKGPKPKRKTGXQKEKKKGKSRGKRRLQNGAPWGF

SEQ ID NO: 334747 - protein, 201 aa, Zea mays
  Clone ID: MRT4577_68403C.1.pep
MGTTGDAPAPAGDPQDRHRTHPPATKQRTTLVFTYGTLKRGFSNHRLLEELFASGDASLVGPAVTSARLPLVCGPYRVPFLLNLPGAGAGAHRVRGEAYAVTARGLARLDELEGVETGHYERLAVAVDLEGGGAVDAIAYFAHRSYANDMWRRSGEKGVPEYTHGVAAGYVRRKDRPQGQTFLEQIRIFNSSPPNPLNNPS

SEQ ID NO: 334748 - protein, 113 aa, Zea mays
  unsure (1)..(113): unsure at all Xaa locations
  Clone ID: MRT4577_68404C.1.pep
PIIIPGMKPPMTIMPMPNKRPSIMVXTMMSPITIASMMPQIMMPNMVSPMMXPSMMPSAMTPSMMPPIMMPSMIPPMMIPSMVSSMIMPNMMPPPPTMYSSRHKQRPLYSLTT

SEQ ID NO: 334749 - protein, 92 aa, Zea mays
  unsure (1)..(92): unsure at all Xaa locations
  Clone ID: MRT4577_68405C.1.pep
IMSPLLKEFITSVAXVGGQSGFGLGLGTGFGGIGGFDILGLGTGVPGPNPGMPSDDKWRQQQILELEVYLKRIELVREQVTAALEDLRSSEG

SEQ ID NO: 334750 - protein, 86 aa, Zea mays
  Clone ID: MRT4577_68406C.1.pep
THHSPLSTTLHQLLTTHTPTQQHMVTFKHFMPSLKPLTTTIFPNHYHKPILTIINNTYNLNINNTTNNITHLLSSIPITNQTKNSI

SEQ ID NO: 334751 - protein, 45 aa, Zea mays
  Clone ID: MRT4577_68407C.1.pep
PVLVKFSLTNEFGFSPQKKKKKKKKKKKKKKKKKKKKKKKKKKKK

SEQ ID NO: 334752 - protein, 145 aa, Zea mays
  Clone ID: MRT4577_68408C.1.pep
VIWGSEALCGSTVPRTVSRGGGGKKKTGRSSGAGSRPRIGASRSTSSRIQASRWSVAALGAPEALDLDGLVAVLAGQRRVHGGSPAHPGPLRLCASAIDRFCGPVPLGGKSQEGGKRRGEVRRAELRERRLSLAAPITAGLERRT

SEQ ID NO: 334753 - protein, 121 aa, Zea mays
  unsure (1)..(121): unsure at all Xaa locations
  Clone ID: MRT4577_68409C.1.pep
AQRHXRMGLGFIFKFQTNQYLQNFCGPHPTTKRTRVKNPPLQTTKYASTPTDRPKRQTTKTGPAPEGAPAPSKNKSSNRPNKINTSGPQAHRNSTTNTAFSYLPPASGPKTSRPHSGINPT

SEQ ID NO: 334754 - protein, 85 aa, Zea mays
  unsure (1)..(85): unsure at all Xaa locations
  Clone ID: MRT4577_6840C.1.pep
KYMDERIKNAVYIGTPDKKMGAADESTGTIGFRLFNINEDNVXENRRALRELLLSCPFAVPKXKGVILNHDTLFYMTGRVPTLGH

SEQ ID NO: 334755 - protein, 50 aa, Zea mays
  Clone ID: MRT4577_68410C.1.pep
AYTNELENKVSRLEEENKKLTTLKELENILFSEPLPEPKYQLRRTGSATF

SEQ ID NO: 334756 - protein, 50 aa, Zea mays
  Clone ID: MRT4577_68411C.1.pep
LTYKHLFPITLTDNFRSRDFCTQLLVLIQPKTSLNGISCNGADILGVLIY

SEQ ID NO: 334757 - protein, 120 aa, Zea mays
  unsure (1)..(120): unsure at all Xaa locations
  Clone ID: MRT4577_68412C.1.pep
LPPHPLXRSPAPARPAPRAASPARGPRSPPPSPPQLAAAAPAPPPPLSPSPLPASPXSPNPPPPQTPMDSCSCMVAGWLCGGAAGVRGATPYSATPGAPRPTTPLPDGGMSCSSRLCPPR

SEQ ID NO: 334758 - protein, 119 aa, Zea mays
  unsure (1)..(119): unsure at all Xaa locations
  Clone ID: MRT4577_68413C.1.pep
LKSTRMSGETFSWHXYYMNLTNHGSEHLRTYLNLPTDGVPATLNNXTKTPSTNISVPGSXPRGPLQEEPATPETADKXRLAVLDAYPGSPPGATVNLAVYERGTSSEFHPTIMKSAFWR

SEQ ID NO: 334759 - protein, 86 aa, Zea mays
  Clone ID: MRT4577_68414C.1.pep
ARCVRVHTVHHVLSLGRILCLKADWKPQLKGPDARGINIPMAQLLSLVCMHHAIYIALLLVWTWLVDCKLNEAHNQVGGAIYLHLF

SEQ ID NO: 334760 - protein, 129 aa, Zea mays
  unsure (1)..(129): unsure at all Xaa locations
  Clone ID: MRT4577_68415C.1.pep
HACVDSYALSESRLSEYTRRAEITTWGTTNLLLTRARMLELAARLTLPLSSAKESGGTLSLPGTQSAPNXSLSDERSALNXYYGNLKISGICXMIGEPSXSNAKGHEYYSTYEPERSMTTLDMCMAELD

SEQ ID NO: 334761 - protein, 93 aa, Zea mays
  unsure (1)..(93): unsure at all Xaa locations
  Clone ID: MRT4577_68416C.1.pep
MSVAITTSQRCRCNIDDITNPTILTLEKRAVVKSISGXLIYDETLCALKIFRENCIRDCCTYIXQARRKTVTAMNLLYALKCQRACTLYSFRG

SEQ ID NO: 334762 - protein, 81 aa, Zea mays
  unsure (1)..(81): unsure at all Xaa locations
  Clone ID: MRT4577_68417C.1.pep
AGTLDQGAGCLXILEDSKTEXIFAPTLQTIXNVGKVVYSLYVRSAKIMALKPASFTRFDLISFAVPSMSTNIYSFNIDSLL

SEQ ID NO: 334763 - protein, 66 aa, Zea mays
  unsure (1)..(66): unsure at all Xaa locations
  Clone ID: MRT4577_68418C.1.pep
VHRLTMATATDEVSTGENDXDEYYSDEHERSRYQHLGHADGIGGYGFGLYYKHEAKNDPEHAHLHK

SEQ ID NO: 334764 - protein, 84 aa, Zea mays
  Clone ID: MRT4577_68419C.1.pep
TGIIAHVGGRQRRSCEVTQWWRGGGYHTLHLLKRSGASTACTLPGCSLSLIAWEEHTVYSHKTCWLYNLDPPYCMKTSTHGRSW

SEQ ID NO: 334765 - protein, 79 aa, Zea mays
  Clone ID: MRT4577_6841C.1.pep
AGKKKKKKKKKLVVFICFSFSFLLWLFFVLFFCYINKCVLACAICLRNYNGTTSIYLCQFCLLCFSSMHTRFARCLGED

SEQ ID NO: 334766 - protein, 50 aa, Zea mays
  Clone ID: MRT4577_68420C.1.pep
KRKRHISWPANHILLIQIYDKRAGRAQNLRDYPLNYGVAPQTNPVSGAFL

SEQ ID NO: 334767 - protein, 121 aa, Zea mays
  Clone ID: MRT4577_68421C.1.pep
SCCLGSHSVRAPGGLLRLVWSSVVIWSALVVVRMGAVSLVPFPVASGPLCPPSLAWFFWLSVLRVVRVLRFGRRFPVWLRPLAVFLGVAGAVASPLSVAAKVGVTGDKAPPGRFAGGCVSA

SEQ ID NO: 334768 - protein, 75 aa, Zea mays
  unsure (1)..(75): unsure at all Xaa locations
  Clone ID: MRT4577_68422C.1.pep
LPSPHPVLSPPHXSSPTKCRWLDKHCLLFPPDLIRVIGHGPYVYATMMFFHESRSVGMGGSPLLIKPLLVYGFPP

SEQ ID NO: 334769 - protein, 50 aa, Zea mays
  Clone ID: MRT4577_68423C.1.pep
LNSTRLACIDGYRDLGPAHLLWILQVRLVAAAPPPYLGNMGCGVRRRDSS

SEQ ID NO: 334770 - protein, 62 aa, Zea mays
  Clone ID: MRT4577_68424C.1.pep
MDKKKQVKGTKGDLKQRRCINQAIIKKARGPNSFEQINIMARLKKFEQLFGTTPAFSLGKNR

SEQ ID NO: 334771 - protein, 82 aa, Zea mays
  unsure (1)..(82): unsure at all Xaa locations
  Clone ID: MRT4577_68425C.1.pep
RGGAESKMKASXNSSCSCLPDASGCAXQXXXAPARXXXWRMXRKKMAPEASRRTQKKSKTSAMAASIRSRLLAALSAIRTHP

SEQ ID NO: 334772 - protein, 92 aa, Zea mays
  unsure (1)..(92): unsure at all Xaa locations
  Clone ID: MRT4577_68426C.1.pep
PPPPGPKRPRMPSPLPETPWGLYLAPPPPSPXSPVKKKDTPKFLARPYVXPPRAPPKRPNDPPCTPNPRRXYEGRLSPPPPRPNVPLFSPPP

SEQ ID NO: 334773 - protein, 100 aa, Zea mays
  unsure (1)..(100): unsure at all Xaa locations
  Clone ID: MRT4577_68427C.1.pep
MLSALARPVSAALRRSFSTSAQATADLAGRRAAGGVGLPLSLRLESPPCLARPAPSGFAPTPGVAADLSHIETKAAVKGYXGPEQLXDCLMRAATMSSST

SEQ ID NO: 334774 - protein, 238 aa, Zea mays
  Clone ID: MRT4577_68428C.1.pep
MAGGDDLKLLGLWASPYVLRVKLALSLKGLSYENVEEDLRDKSELLLKSNPVHQKVPVLIHGGKPVCESQVILQYIDEAFAGTGPSLLPADPYERAVARFWAAYIDDKMLPAWNQSTMGKTEEERAEGKKQSVLTVETLEGALRDCGGQGKPFFGGDSVGYVDVVLGGLLGWVRASEELHGVRPFDPERTPLLAAWSERFGALDAVQTVMPDVGRLLEFGKALMARLAAAAAAGASNN

SEQ ID NO: 334775 - protein, 69 aa, Zea mays
  Clone ID: MRT4577_68429C.1.pep
RSTMVFYDHRPPPARMRREQRRRVLVLGARRAPMPTPLRAVAAPAGDGRITMGHDLWYGPYRVKYLASF

SEQ ID NO: 334776 - protein, 67 aa, Zea mays
  unsure (1)..(67): unsure at all Xaa locations
  Clone ID: MRT4577_6842C.1.pep
VKKRKLARENPHIAAXKGSKRAQRVSDREMASVAITQRESATAEEDYLMEHERVCFTYRKRKVSKGN

SEQ ID NO: 334777 - protein, 84 aa, Zea mays
  Clone ID: MRT4577_68430C.1.pep
PAGVALEKSTGRAPSYSQPPRETKEAETERECCCREGVRQVTHWTSRYFLCVRCGADRASSPSVEDCASASLSALKDRRRAADF

SEQ ID NO: 334778 - protein, 86 aa, Zea mays
  Clone ID: MRT4577_68432C.1.pep
SIPLLVRRPSSCFLCHGFLSPGKDWFGFNPMSLELFENPGPHFYRFPLWKRRAGFLPCEKGLLGIRFPLWGPVFFYLASFGGSTLF

SEQ ID NO: 334779 - protein, 68 aa, Zea mays
  unsure (1)..(68): unsure at all Xaa locations
  Clone ID: MRT4577_68433C.1.pep
MAFVRRSYRFEPISLYRWDPFEGTTLGSGGSSSLFRSITRTISETVALAGKRXDRKETPEAHVFKADV

SEQ ID NO: 334780 - protein, 580 aa, Zea mays
  unsure (1)..(580): unsure at all Xaa locations
  Clone ID: MRT4577_68434C.1.pep
MVKASFRILFGRSTLQEPAFQELILLYTDEVFQCEILHNVFFSLSKPLKKPGKWLNXSWQALKRSTDNQGFQIWIDKLRLWLKEQTYADNSLLLKENPPRDKLSSDQLPDADVPIWIASQRAASRHEGIMSPVCPHARLLRRLLKWTGLIPSLPEATIKSNNETKHLEGHVRPNFLPRITLANIWEPASRESCNNNIWEMVKASFRILFGRSTFEEPAFQELILLYTDEVVPSESXEEMGPLQLKIYERIPIPDLPVXTESQINRKRKIYGFPRCLRKTMFPRSKYISLISSQSEGLLSIAVTQMRNLLSXYFSTNEALINNLHTVLCFVIIVTVMVKFVCXVFPHKKLSFRILDTVILSNLIFFSLVTCCLCGPLLYDSFLFLHIGLLIVCFXQVRLDIATVIGLLAYVVNYKFESLASSPSAFLLDIVAGTALVILVFRVALGYKQTRDRYQLLVNKTLYEKTLASGFGSVYFLLDASEQQQYKEALLAYAMLLCRKKYEVSSRASIRDACEQFMHEKFEAKIEMPIDKAMETLLRLGLVIELPTDGGSSVIGLPCSEAYRILKSRWDGLLEQDTEQG

SEQ ID NO: 334781 - protein, 85 aa, Zea mays
  Clone ID: MRT4577_68435C.1.pep
LLDYETPCFDCRNRGSRQQKGYLESKSGISFWYYGSDQMGYDVTCAVVLDAWCVLLPCSTRRPGGSVVSGMDDVFGVQHHWCLLF

SEQ ID NO: 334782 - protein, 84 aa, Zea mays
  unsure (1)..(84): unsure at all Xaa locations
  Clone ID: MRT4577_68436C.1.pep
MAGKGDGPQMGIYFVTTHCXLGVWQDDRAXMIVYHQRKGTTRLYGVFTDSQRLIGDADMNQVVMNATNTVFDDXRLMGRRMSDA

SEQ ID NO: 334783 - protein, 270 aa, Zea mays
  unsure (1)..(270): unsure at all Xaa locations
  Clone ID: MRT4577_68437C.1.pep
MKRSADAMTEPVKPVFLTKAERERLALERRQAAVSDQRRTALDLIQSLPRPPPPPTSGGPPPSGSNPARRDSSNSNRDSDRDRDRDQDRERRRDDDSRRDRDRDRDRDRDRDRDDSSRRDRDRDRRDRDRDRDRDRDRDRGDRERDRLEKIAEREREKELDAIKEQYLGSKKPKKRVIKPSEKFRFSFDWENTEDTSRDMNALYQSPHEARLLFGRGFLAGIDRREQKKAAAVHEKETRAELRXQXXVEDRPXEDDAVXDKKEAAAAEIM

SEQ ID NO: 334784 - protein, 253 aa, Zea mays
  unsure (1)..(253): unsure at all Xaa locations
  Clone ID: MRT4577_68438C.1.pep
MKRSADAMTEPAKPVFLTKAERERLALERRQAAVSDQRRTALDLLQSLPRAPPPPPPSGAPPSGSNPAPRDSSNSHRDSSDRDRDRDRDRDRDRERRRDDDSRRDRDRDRDRDRDRDRDDSSRRDRDRDRDRRDRDRDRDRDRDMERERDRDRERGDRGDRERDRLEKMAEREREKELDAIKEQYLGSKKPKKRVIKPSEKFRFSFDWENTEDTSRDMNALYQSPHEARLLFGRGXFLAGIDRREQKRXAAAH

SEQ ID NO: 334785 - protein, 759 aa, Zea mays
  unsure (1)..(759): unsure at all Xaa locations
  Clone ID: MRT4577_68439C.1.pep
MKRSADAMTEPAKPVFLTKAERERLALERRRGAVSDQRRTALDLLQSLARAPPTSPPSGAPPSGSNPAPRDSSNSHRDSSDRDRDRDRDRDRDRDRDRDRERRREGDSRRVGDRDRDRDRDRDRDRDDSSRRDRDRDRDRRDRDRDRDRDMERERDRDRERGDRGDRERDRLEKMAEREREKELDAIKEQYLGSKKPKKRVIKPSEKFRFSFDWENTEDTSRDMNALYQSPHEARLLFGRGFLAGIDRREQKKAAAAHEKETRAELRRKAGVEDRPEDDAVDKKKAAAAEMYDAFDMRVDRHWSEKALEEMTERDWRIFREDFNISYKGSRIPRPMRKWSESKLGTELLRAIDKAGYEKPSPIQMAAIPLGLQQRDVIGIAETGSGKTAAFVLPMLSYITRLPPISEENEAEGPYAVVMAPTRELAQQIEEETVKFATYLGIKVVSIVGGQSIEEQGFKIRQGCEIVIATPGRLLDCLERRYAVLNQCNYVVLDEADRMIDMGFEPQVVGVLDAMPSSNLKPENEDEELDEKRIYRTTYMFSATMPPAVERLARKYLRNPVVVTIGTAGKATDLITQNVIMVKESEKMPRLQKXILTDLGDKTAIVFCNTKKTADMRAKDLDKSGFRVTTLHGGKSQDQREISLDGFRNRRFNVLVATDVAGRGIDIPDVAHVINYEMPSSVDTYTHRIGRTGRAGKKGVATSFLTLENTDIFFDLKQMLIQSNSPVPPELARHEASKFKPGSIPDRPPRRNDTVFANH

SEQ ID NO: 334786 - protein, 67 aa, Zea mays
  Clone ID: MRT4577_6843C.1.pep
MMEVEAVVAVKGVEADQVKDPNTIFVFKFRTHFGGGKSTGFGLIYDNLQVVKKFEPKYLLIRNGLAY

SEQ ID NO: 334787 - protein, 94 aa, Zea mays
  Clone ID: MRT4577_68440C.1.pep
LSAVAWGAFFRRGAPSPWLLAPLRLPSSCSSSASRLCVGRPVRARARVLWRRSLSSPLRLRRARRSPGCGWRFSFVGLGAFLGPVASRRAVRRR

SEQ ID NO: 334788 - protein, 180 aa, Zea mays
  unsure (1)..(180): unsure at all Xaa locations
  Clone ID: MRT4577_68441C.1.pep
LGTSSRPGKKKKSTHHKSQFTPARRXKKSFSAAVAEPPGAEALGALASPPPAWHRSARPPPRDRRPRHPTRRRTRATTSHHPRLRPRRRRRPTLTLSPPPLAPPRRRRTPPRLDPAPRPPTTLTRTTAPRPVTRRRPRASPGAPGPARAPAPAPRTPPRIPTAWPQTXRRPXRRRRRRLR

SEQ ID NO: 334789 - protein, 41 aa, Zea mays
  Clone ID: MRT4577_68442C.1.pep
QSIQSLLIAHTDYTLDEYLTIGELTTHDAIKHYDTVTQTIY

SEQ ID NO: 334790 - protein, 133 aa, Zea mays
  Clone ID: MRT4577_68443C.1.pep
WFPETKTLWGGDPGFFRFLKGAAPVLKWGVLKTQLLLGRGGFLPQKKKLPLGLLKKKGFFLGPPPWPPLRWLSPRAFFWGVPWFPPPVSKTLCLEKKKRVGSFWALGPPLEVAFAFFQPNREGGVFFLKFKSF

SEQ ID NO: 334791 - protein, 70 aa, Zea mays
  Clone ID: MRT4577_68444C.1.pep
MVPSPYPSLDSAGSYSLGSGHGSRDGQKLYPAKPAGGWTVDGTCPYHRCHAPEPYGSRGTAPRARSGSAL

SEQ ID NO: 334792 - protein, 121 aa, Zea mays
  Clone ID: MRT4577_68445C.1.pep
RETRMNWAVRCRPYCWLCMSCQLHRLAWPSARRAEPCRMVPSTPHPTRLCCPPRCATQRRHENTLPASVLFGPATVLIGSATSYLLLLLEVMPFRQDSYLTCMRRAKTTTLPLVRFCSSEA

SEQ ID NO: 334793 - protein, 111 aa, Zea mays
  Clone ID: MRT4577_68446C.1.pep
NAERMVTLPEILAMCRKIGISQKVGQTYPSASSGDVSVQQNLGDNISLIEMYFLSIDHDGRGFLDFEQFRAIVKMIRSNPDVADVWRKLSSTDGISRQARNHIANFRAMAA

SEQ ID NO: 334794 - protein, 77 aa, Zea mays
  unsure (1)..(77): unsure at all Xaa locations
  Clone ID: MRT4577_68447C.1.pep
MTEKTPVFTHLNHLATHPPFASWLYSXXAHTHRPSXLLLFLNVPLNSPCIGSLNTATVMTTLIATLSLSTXLSPVPF

SEQ ID NO: 334795 - protein, 151 aa, Zea mays
  unsure (1)..(151): unsure at all Xaa locations
  Clone ID: MRT4577_68448C.1.pep
AAPSLALSFSLAPPPXSLAPPPPXPRPSPSPPWPSPASLTPPPTPHSPPPSTLPSSPPTPTPSSPSPTSHPSHPSPSRPPPRSPSPRSRPSARAPATPPRSPXPPRRRXPTSGPTTPQRSRPAPGALSTSRSGSWPLPSSTEVAGARAGGS

SEQ ID NO: 334796 - protein, 206 aa, Zea mays
  unsure (1)..(206): unsure at all Xaa locations
  Clone ID: MRT4577_68449C.1.pep
SSCPNRCRLRRCLNLLGAVHPATSTQAWVTTNKLKLSANVRESTSGGSTNNTARVRCGGGRCFDLPQEPIVPLCGHLFCWPCIYRWLHIHTHSPESPVSTDLVEEDTLVPLYGXRGKDRVDSRYKEHAHXEINNRPTGQRPDLAPQXPLLHNNXHCQVQCDSRLIGTRMHLANARWRNYAFXAAVWGLYPMLSFQXHVFPHTATYA

SEQ ID NO: 334797 - protein, 130 aa, Zea mays
  Clone ID: MRT4577_6844C.1.pep
GEPPELGLRKVLGLFTSEGVPHHDFPAECWHHRFLRDSGRHRLRVHLPLRPHAHARHHRSVPRPNSGETNPGRPAGERAERGGRSRSRPGGRRREIGNAGKGRERGRSPKPRERSGAAVRGQVVCAGRAR

SEQ ID NO: 334798 - protein, 116 aa, Zea mays
  Clone ID: MRT4577_68450C.1.pep
RMPVVRAPYPEMGGAFRPLGWGRMAFSPPFKETRAPLGFWARAPPLTWVKPGGDVSMFIPPPRPVGVEEKFFFPLWSLPQPAVFFPVGFLGVRPPPILPLGGNGVPIVFWGVFFGF

SEQ ID NO: 334799 - protein, 97 aa, Zea mays
  Clone ID: MRT4577_68451C.1.pep
LHKNIYPPVIEKKTLFLSLTPNKGGPPIKKARPRAFGKAASMIWGERFFSRGRPPPLAGPIPLFGESVLKEHNLPWGKGEAPFPSAPSGVGGPPCAK

SEQ ID NO: 334800 - protein, 190 aa, Zea mays
  Clone ID: MRT4577_68452C.1.pep
MLDFCAPHGPAKLPVASVAGVRVAGRWLWRSAAVGAVRHGVSARASSFGSRIGLDSQNFHTRDLSQLLWIGPVPGDIAEIEAYCRIFRAAEQLHTAVMSALCDPETGECPVRYDVESEDLPVLEDKVAAVLGCMLALLNRGRNEVLSGRSGVASAFQGSEDSTADRIPPLALFRGDMKRCCESMQVALAS

SEQ ID NO: 334801 - protein, 58 aa, Zea mays
  Clone ID: MRT4577_68453C.1.pep
VHLSAHPSVGLHHPSPAALYDVSYFYPYHLAAQYGPQQASLQHCRIGPQIAACPHALY

SEQ ID NO: 334802 - protein, 121 aa, Zea mays
  Clone ID: MRT4577_68454C.1.pep
GSLSLDKEMSDKETQSKQQQQSKLQQNKQKTVLLYSTRKRKLGQVVAVGNLISRDTTHEIGGTVLGDGYYAVAVHYLNNVEDERLPRPHGDLKTLEDAVGMCVAWPRTHLKRVKPTTEKRT

SEQ ID NO: 334803 - protein, 67 aa, Zea mays
  Clone ID: MRT4577_68455C.1.pep
PSFLFFFSLGQYPPVPSPYFIPQGRSPQTPRFLFGGFPPLLHVSFVLPPHFVVPRILTAVFSSPSNF

SEQ ID NO: 334804 - protein, 55 aa, Zea mays
  Clone ID: MRT4577_68456C.1.pep
GQHTGLMLRNQQTFLGLVTLGAILALIELRTRLLVVLFERPQVLKGLRELTFLHT

SEQ ID NO: 334805 - protein, 78 aa, Zea mays
  Clone ID: MRT4577_68457C.1.pep
MVTGLMKELCPLKMLDKFPAIDVSKNAHLLEVLYYLLVPKPALDGCAADADDAAHGSRREDRYDIEVQLVDRGSDCGD

SEQ ID NO: 334806 - protein, 81 aa, Zea mays
  Clone ID: MRT4577_68458C.1.pep
MVCVACLLPLFLIPLVNALPYLVDLIISKVYRLFGWEYRRPERAPPACPYKPAAQKNDEGASESKPLVNPHGAAAEDKKEE

SEQ ID NO: 334807 - protein, 188 aa, Zea mays
  unsure (1)..(188): unsure at all Xaa locations
  Clone ID: MRT4577_68459C.1.pep
DAPRPAVPPSCHIPWPSHFPRAPPPEPNRASSARASNIPTSPPATLFPATGSHRAAPTPVAPALAPGHEELPPVALRHLLEMSGDHHASGCYDGLCARLDQRAELRCCFTXGSSISASRLGLPDVALISYGEMIXDQARLITEAFSSLAIRDAYNGHGTVXNVTRTEPGFINAEFAGNILEDPVPPKA

SEQ ID NO: 334808 - protein, 157 aa, Zea mays
  Clone ID: MRT4577_6845C.1.pep
PRVISFFFFFFFFFFFFFFFFSPPKEKTNKPKTGKPGPFIKTLEINLFFPNLKETGGGFFLPQGGPRRGFPLAPKFPKKKGPAQASRPETTQIWGWTQISQPPGRGGEKKTPWLGENPKGPKAKDWPPTVNPPFFLNPPGPWQKKNGSFKPPQTLKG

SEQ ID NO: 334809 - protein, 83 aa, Zea mays
  Clone ID: MRT4577_68460C.1.pep
MRHLLHGLHRSGRWNELRAPPTPTSSGSWMSINGPSSPCASMFGCFGQCIGIGKGPLDNLSDHSADPVNNNARDYDYNFDPEK

SEQ ID NO: 334810 - protein, 220 aa, Zea mays
  Clone ID: MRT4577_68461C.1.pep
MEFFYLYTLISSILIVSSLYLHFFFARSRHNLPPGPRPLPLVGNLLDLGSRPHRSLARLAARHGPLMALRLGVVTTVVASSADAARDVLQRHDAVFSTRSVPDAARACAHDHRSMGWLPPGSPLWRALRKVCSAELFAPQRLDAHQALRRDKVQRLVSHVAGLAREGAAVDVRRVAFTTALNLLSCTIFSDDLADLDDRGASGEFMAVIEEFPMAVGAPN

SEQ ID NO: 334811 - protein, 92 aa, Zea mays
  unsure (1)..(92): unsure at all Xaa locations
  Clone ID: MRT4577_68462C.1.pep
MDGCDGIEPIWXGGGLLVKYQYMXDLLIALAYFCIPLERICFVKKEYFFPYRWELIQFGAFIGVCGXTHMINLWTLITHTKTVGMGMTIGEV

SEQ ID NO: 334812 - protein, 82 aa, Zea mays
  Clone ID: MRT4577_68463C.1.pep
KKSPTMSGEAGKHPPRAQTLGPNPPFCLIVIRGVLNHPFFNIPASSQCIRLRRPVCNYCLPVHHSFVPSIKELSLLKLSCRK

SEQ ID NO: 334813 - protein, 115 aa, Zea mays
  unsure (1)..(115): unsure at all Xaa locations
  Clone ID: MRT4577_68464C.1.pep
FXXSAFVPPCAAXVCVRLGXGLVLXPVFWPFWXGPLSVFCPAPPAPAPFWVXGVVVSFVXRRLRGXVPGAVGLGPGGALRFAVALFRLSALAWFGACCLFCPPPVVXAWVGYLGW

SEQ ID NO: 334814 - protein, 44 aa, Zea mays
  Clone ID: MRT4577_68465C.1.pep
FENFFFLPSTPKTPLNFSHHMHTLCFITTTLLKFYFPTPRIFTK

SEQ ID NO: 334815 - protein, 140 aa, Zea mays
  unsure (1)..(140): unsure at all Xaa locations
  Clone ID: MRT4577_68466C.1.pep
MELLQCIATLLILLISSSLAAATSPVGTIERVTKQQILASIPPGGGPPVLFLTSPSGKYAAYFVRTHTVPGAGGIGADFCYVEIIXHDGRRRTWRHRLGRGXGEGEAEAAGATAGGTSVWESESRPISTVNTCALLLSWH

SEQ ID NO: 334816 - protein, 95 aa, Zea mays
  Clone ID: MRT4577_68467C.1.pep
ETSRFGNAFHLCREILRLTKLAIDANIQFRLGNVDAFQLADGLHYIFSHVGQLTGMYRYKYRLTRRSMGRATVTRTTMGKAVTRRMMMRRWMVMR

SEQ ID NO: 334817 - protein, 41 aa, Zea mays
  Clone ID: MRT4577_68468C.1.pep
TNSNLLSAPINLNILLPHLQILRCCLFRYIAFTEYLDIMYI

SEQ ID NO: 334818 - protein, 159 aa, Zea mays
  Clone ID: MRT4577_68469C.1.pep
GNLIDNFPAQRIRQTVPPHRGLLLTAFIAVLAAPPHGLYHRPDLIRQTVHLAPQMVGHGGGIGAADPASLAQHAAAPLHDLVRLPVDQDLDPLRRVARACCYCAIAASVRRRIRRRLGRSASGQLCPVLFPFEVLVQVGLAGRAHLADCAAPFPRTRVL

SEQ ID NO: 334819 - protein, 61 aa, Zea mays
  Clone ID: MRT4577_6846C.1.pep
MFFARWFTAACVYEKKKKKKKKKKKKKKKKKKKKKKKKKKKKKKKKKKKKKKKKKKKGRPF

SEQ ID NO: 334820 - protein, 71 aa, Zea mays
  unsure (1)..(71): unsure at all Xaa locations
  Clone ID: MRT4577_68470C.1.pep
GAYVLLSNIYAXKGDWGAVAIVRLKMRGRRVKKEVGFSWVDAGGANDSLHLHKFSSDDSTHPQREEIYRVA

SEQ ID NO: 334821 - protein, 412 aa, Zea mays
  unsure (1)..(412): unsure at all Xaa locations
  Clone ID: MRT4577_68471C.1.pep
GSAGQQGTVSTDAQSADGSAGKCKWGRAFSVRRRKKLADIKVEAISSVPDNQLDHSLCSPFATVGSHDNSSSGFVPDNAEGHPPDVSMTDSSPVIDETETGPPLGLGVDRSCPGLLNTGDSDNHLNMSSLDRQPPSVNNEVADNSKAKDDGEEEEKDPGTEPAFLWTADNEKNVMDLGYSETERSRRLETLMVKRKSRKNIQFELDGVGGLADGLSRFRPKVHPVSVPARRMNPFTSDDAEIPGSAPPILHPRDDPFSFLTDEQPDDNSGHPAHHSLGPQEPMPALHQDALFRRHESFSFGRPPXTRARXSHALPWRNPASXEASASGFQRQFSDRSVSSRLSVVSECDTVSSAGDQEHNELVRNYIRGVRESPGLLGQDVDGDAVCTSTAGNECSDGIGFVENETLNAVIC

SEQ ID NO: 334822 - protein, 88 aa, Zea mays
  Clone ID: MRT4577_68472C.1.pep
WVYIYQTSARIYIYASALHSSGRGRGPMSPTRAPACARKRGALERARARARAQVRGGGHPGGLRAPHARGHNKAPLQKSMVGPVGGPR

SEQ ID NO: 334823 - protein, 109 aa, Zea mays
  Clone ID: MRT4577_68473C.1.pep
FPRHYFLRGLLARALVSGLSPRAPPAACFAAARAPPSSPSRHHLDSRRCRSEVDLVEQLARHFSRPLTKEQMEAIMELATQGKEKEGIKKKGSKVTPLKAPIIEAAEML

SEQ ID NO: 334824 - protein, 81 aa, Zea mays
  unsure (1)..(81): unsure at all Xaa locations
  Clone ID: MRT4577_68474C.1.pep
MNRGGVLVVCLALSAASASAMQMPCPCAGLQGLYGAGAGLTTMMGAGRLYPYAXYLRQPHCTPLAAVPYYSFCVPQLTLIV

SEQ ID NO: 334825 - protein, 149 aa, Zea mays
  Clone ID: MRT4577_68475C.1.pep
GAGWIISTSLFLEGSLSTSSRIRSLAPRAAGGLLRRCPCATVLPVAASSRLEAMQIGAVVGEPGGEISLKPASRSTPGDLAVQQPLFAAPSKVDLVEQLARHFSRPLTKEQMEAIMELATQGKEKEGIKKKGSKVTPLKAPIIEAAEML

SEQ ID NO: 334826 - protein, 171 aa, Zea mays
  Clone ID: MRT4577_68476C.1.pep
PPPLGPRCFHKNFVLVPPPPGAFKSPPSRGKLKKKKNWVPKLPKAPGPKKGPLGFSEKGPPRGPGGALRKPPPFLGPLKGPRETWKKFTPHWVFPLFLKGPSWSQTSPPFFFFSKNPIFGPKPRGPVSPLWVQRKPPFFPLSRGPRVKPKPIFFFQGGTFYYEKISQRDSA

SEQ ID NO: 334827 - protein, 136 aa, Zea mays
  unsure (1)..(136): unsure at all Xaa locations
  Clone ID: MRT4577_68477C.1.pep
IIGNDXQCNRTTPSYGVFTDTERLIGDARKNQVXMNPINTAFDAKRLIGRRFSDASVQSDIKLRPFKVIPGPGEKPMIVVQHKGEEKQLAAEEISSMVLIKMREIAEAYLGSTIKNAVVTVPAYFNDSQRQATKDA

SEQ ID NO: 334828 - protein, 231 aa, Zea mays
  unsure (1)..(231): unsure at all Xaa locations
  Clone ID: MRT4577_68478C.1.pep
SLHCYDTVTFHLVADFLSLSNARYSRIGARATRLLDTQEDRAVREDGTPIDIDLDTTYSXCVPARQHKXRVKIVTDDQGNRSTPSHVAFTDSKRLIXDASWNQGAMNPINTAFDGKRLIDRRVRDASVQSDIKLWTFKVIPGPGEKPMIVVQHKGEEKQFAAEEISSMVLIKMREIAEAYLGSTIKNAVVTVPAYFNDSQRQATKDAGGIAGLNVLRIITEPTAAAIAYAL

SEQ ID NO: 334829 - protein, 39 aa, Zea mays
  Clone ID: MRT4577_68479C.1.pep
GSGDIHCAPVIISLPITIFNLIWSNFTTFFTSSFQSYHF

SEQ ID NO: 334830 - protein, 57 aa, Zea mays
  Clone ID: MRT4577_6847C.1.pep
KLESTATREPRSTTGHAAEQLGRSAEGHTTSPDKRDSLSLIGHGGSGLVRGVTLVRR

SEQ ID NO: 334831 - protein, 192 aa, Zea mays
  Clone ID: MRT4577_68480C.1.pep
MASKGDGPPIDIYLGTTYSCVGVWQHDRVQITAKGQGNLFFSWYAAFTDSERLIGDASKNQVGMNPINTVFDAKRLIGRRFSDAYVQSDIKLWPFKDIPGPGEKPMIVAQHKGEEKQCADEEISSMALIKKREIAEAYLGSTIKNAVVTVPAYFNDSQRHATKDAGVIAGLNVLGIINEPTAAAIAYGLDKK

SEQ ID NO: 334832 - protein, 262 aa, Zea mays
  unsure (1)..(262): unsure at all Xaa locations
  Clone ID: MRT4577_68481C.1.pep
ITADGEHYRTTPSDRDFTDYDRLIGDADNNQVAMNPINTVFDAKRLIGRRFSDASVQSDIKLWPFKVIPGPGEKPMXVVVQHMXEEKQFAAEEISSMVLIKMREIAEAYLGSTIKNAVVTVPAYFNDSQRQATKDAGVIAGLNVLRIINEPTAAAIAYGLDKKATSVGEKNVLIFDLGGGTFDVSLLTIEEGIFEVKATAGDTHLGGEDFDNRMVNHFVQEFRRKIKKGITGXNPRALREXLRPLCERAKRTXLFSLAQTTI

SEQ ID NO: 334833 - protein, 50 aa, Zea mays
  unsure (1)..(50): unsure at all Xaa locations
  Clone ID: MRT4577_68482C.1.pep
SFFRTAHEMSTSTLXXLAKDKRAVVGLRERHACGLKVGQGTLLRSCVGSX

SEQ ID NO: 334834 - protein, 128 aa, Zea mays
  unsure (1)..(128): unsure at all Xaa locations
  Clone ID: MRT4577_68484C.1.pep
MAPTILGFLMRFVLPAGPATAAIIPHCSQAPIAAFISPYLSPSVSPVCENPFLQPYRIQQAIPAGILPXSPSLLQQPLDLLQELPLEHPLAHNMTAHLLQQLVLRHLAAYSDEQYQLPFNQLAALNSA

SEQ ID NO: 334835 - protein, 106 aa, Zea mays
  Clone ID: MRT4577_68485C.1.pep
ETDRKYFFFPSFDLRKGLKLHCCRTAEGFWCKICNLLLVGVPVRLALICFYNVFVFMYCSCNSLSSRDGNRGKQLNELVLLLSFRTLKDHLSLLALPRKEEFCINN

SEQ ID NO: 334836 - protein, 100 aa, Zea mays
  Clone ID: MRT4577_68486C.1.pep
KTKRAKSDRLQLQRQKPKQVNKGRGKETPKHYPGHKQRVLKTTTGLDGQKESGKQNKIPPPRRRDNWRPRGGPPRSPSPGGAGPRGPRKTPPAPSPRRRA

SEQ ID NO: 334837 - protein, 212 aa, Zea mays
  Clone ID: MRT4577_68487C.1.pep
RVGIEPNGVTFVAALNACITCGLVSGCFKYFDLMRSMGIRPMIQHYGCLVDLLGRAGFLKEAFNLASNLPEDPGFVIWSSLLAACHSHGDVEMAELTASKLADAKPSHGSSYVLLSNTYARAKQWEDLRRTHRRMEEHGLKEAFNLGWIEVDEPVHSFWSSLLLHMRSDGNVQMLEDLKHNLTSAAYEHGRFALQLSKQYARAEQWEDSKRT

SEQ ID NO: 334838 - protein, 41 aa, Zea mays
  Clone ID: MRT4577_68488C.1.pep
PCHKYYMRLTLKVKVISDPKAYAITQLLTPSILLSRNTSCL

SEQ ID NO: 334839 - protein, 61 aa, Zea mays
  unsure (1)..(61): unsure at all Xaa locations
  Clone ID: MRT4577_68489C.1.pep
SLXWWDGMLXFXVSCCXSXILXFEXVVXKPXXLVICFXCVPFSNFIKNGCALDKKKKKKAA

SEQ ID NO: 334840 - protein, 67 aa, Zea mays
  Clone ID: MRT4577_6848C.1.pep
ISWLPATKGEQKLAADVHASEREKRGRALRRRRGGGGGPRRRGTPFAGVLTAAAAACGGGRGSAPAG

SEQ ID NO: 334841 - protein, 102 aa, Zea mays
  Clone ID: MRT4577_68490C.1.pep
EKEFLSDALPCKLIGMNAELMCQNIEFVADRLIERLGNEKFYNATNPFDFMEMISLSGKTNFFEKRVSDYAKAGVMTRSRGEDGAEAKEAGGGGLFSLDEDF

SEQ ID NO: 334842 - protein, 186 aa, Zea mays
  unsure (1)..(186): unsure at all Xaa locations
  Clone ID: MRT4577_68491C.1.pep
GAGTGLRVHAMYGVTVVADASVADCADASYDLVVLPGGVPGADNLGGCAALEGIVRRHALGGGLCAAICAAPPLALARWGLLDGVKXDVVCLSLIVVRAARASSYMLFRSYLAYIHVRAXATAHPEFVDKFPAEVAGVDANVVVDGRVVTGRGPAAAMEFALALVDQLYGKGKVDEIAKPMMVRYE

SEQ ID NO: 334843 - protein, 101 aa, Zea mays
  Clone ID: MRT4577_68492C.1.pep
NRSCNFLGRSLNIHFFQSSGTETSLPDPLPAKFFYVAKKQVSVNFAFFVLKDCPLRVGQRGFRQNKCFFPAPMRPPPWVVYVELFSPQSFAFDKPEPKPFL

SEQ ID NO: 334844 - protein, 64 aa, Zea mays
  Clone ID: MRT4577_68493C.1.pep
QTGNVSFLIKHIMYVLNRYISIQHIEPPSSLQHFFSALESYSHRSFLNCICIHCRLVKINIHVG

SEQ ID NO: 334845 - protein, 64 aa, Zea mays
  Clone ID: MRT4577_68494C.1.pep
LRLYTISCIYSRAQETPIGRMRVMLYAPPRTALAASATYTHTNIGCGFHSPNTFHILPLKHLPP

SEQ ID NO: 334846 - protein, 39 aa, Zea mays
  Clone ID: MRT4577_68495C.1.pep
ISYVKPSFKPKRFKTNLGGKKIITLDIQLKCSLSKSQNV

SEQ ID NO: 334847 - protein, 31 aa, Zea mays
  Clone ID: MRT4577_68496C.1.pep
SIPHPLINKKASYSSYKCGIGMLSRKADLIS

SEQ ID NO: 334848 - protein, 87 aa, Zea mays
  Clone ID: MRT4577_68497C.1.pep
PPPVVSVAQQDRSPEHVRHNLKMPLRKKGPRVPRRHAEDTEPTPTDYEKQRAITIMKNNQMRQRLGLSQLRSMMASILSGRINDAPP

SEQ ID NO: 334849 - protein, 85 aa, Zea mays
  unsure (1)..(85): unsure at all Xaa locations
  Clone ID: MRT4577_68498C.1.pep
TPNLRQRGAHXATNQTAPKXDKQTLPQGRASNMNSFLFSCSQIHSIRPSSLKWATSCDGYWARGRLVGLLLGICQNLVLVNQREE

SEQ ID NO: 334850 - protein, 34 aa, Zea mays
  Clone ID: MRT4577_68499C.1.pep
RTLDHNTTVCLLAQGKLYIFLITLTYHIVKNKKI

SEQ ID NO: 334851 - protein, 156 aa, Zea mays
  Clone ID: MRT4577_6849C.1.pep
LLRGVKTLKVRMDQQQSNAQRIAEFLEGHGFKVRYPGLRSHPQYELHNSMARGAGAVLSFETGDVNVSERIVESAKIWAISVSFGCVNSLISMPCRMSHASIDAKTRAERALPEDLIRLCVGIEDVDDLIDDLQRALVQSGAVNVTLDGFQAQGSS

SEQ ID NO: 334852 - protein, 92 aa, Zea mays
  Clone ID: MRT4577_684C.1.pep
RDALGPLASSLSSWSRRSTTTTRSWGHPQLCYCVWRLRHLIRRHPCRWRQRSSSTTGTATCEYRTRGTVLMSTLHGSILPEWADTGPKQGLG

SEQ ID NO: 334853 - protein, 70 aa, Zea mays
  unsure (1)..(70): unsure at all Xaa locations
  Clone ID: MRT4577_68500C.1.pep
LGPSRAGQXKKKKKNPKKKKKKKKKKKKKKSNLPPVVSGAQQDRSPEHVRHNLKMPLRKKGPGVPRRHAG

SEQ ID NO: 334854 - protein, 58 aa, Zea mays
  Clone ID: MRT4577_68501C.1.pep
ALIIRTSSSRLNNINILGNANCPSSLLILIASIAATACLVVILHQHPSRGASTEWARQ

SEQ ID NO: 334855 - protein, 55 aa, Zea mays
  Clone ID: MRT4577_68502C.1.pep
GTWPPWCPFMDTIGPATYLAPCLPLEGALKAISLFDALFGDLEGIGPPEFGDFFL

SEQ ID NO: 334856 - protein, 166 aa, Zea mays
  unsure (1)..(166): unsure at all Xaa locations
  Clone ID: MRT4577_68503C.1.pep
MADVEYRCFVGGLAWATDDQSLQNAFSKYGDVIDSKIITDRETGRSRGFGFVTFASDEAMRQAIEAMNGQDLDGRNITVNEAQSRRSGGGGGGFGGGGGGGGYGGQRREGGGGGGYGGGGGGYGGGRSGGGGGYGSREGGGGYGSGGGRGGYRGSRGGSGGXNWRE

SEQ ID NO: 334857 - protein, 40 aa, Zea mays
  Clone ID: MRT4577_68504C.1.pep
SCHLSFSCWCDYAKGRKVGGEKDSKDEQQALHEHEGAHAW

SEQ ID NO: 334858 - protein, 168 aa, Zea mays
  unsure (1)..(168): unsure at all Xaa locations
  Clone ID: MRT4577_68505C.1.pep
YVVYQDLLSGDQLLSDSFTYKELENGVLXYVEGKRITPGPVDADIGANPSAEGAEDESADDTGAKVLDIVDTFRLQEQPPFDKKSFVAYIQKYIKNLTAELEAQKXHEFKKXVQGATKFLLSELKDLQFFVGESXMKDDASVLFAYYKDAAXNPTFLYFSXXLKEIKC

SEQ ID NO: 334859 - protein, 74 aa, Zea mays
  Clone ID: MRT4577_68506C.1.pep
KQDGTLVLNPKNGGLPSWGETGNTTLGKGYFSTGKGQLEPVGGSIILTIHFQRGVKAFNHSKTLVGGLNTHSPF

SEQ ID NO: 334860 - protein, 48 aa, Zea mays
  Clone ID: MRT4577_68507C.1.pep
KIKKKKKKKKKKKKKKKKKKKKKKKKKIKKKKKKKKKKACTPARAAAR

SEQ ID NO: 334861 - protein, 88 aa, Zea mays
  Clone ID: MRT4577_68508C.1.pep
SGRWTIAYAYALHDESCRLQAIIEHVLILYKIVHDTLCNHNKHHLVQSTLAVALNKEFLCMLNMTESEPIASTCVCQSNITVVLLLCP

SEQ ID NO: 334862 - protein, 51 aa, Zea mays
  Clone ID: MRT4577_68509C.1.pep
TPDRTGTEWVGPNPRVLFVIRGMTQGGEGFLFECTRINGVVLEALRVTHVR

SEQ ID NO: 334863 - protein, 56 aa, Zea mays
  Clone ID: MRT4577_6850C.1.pep
RSCSRPSPGSFSKVQQLLMPLEELRVSSRRIWPSSGSSSSVPGLTVGRSCYSYLSR

SEQ ID NO: 334864 - protein, 339 aa, Zea mays
  unsure (1)..(339): unsure at all Xaa locations
  Clone ID: MRT4577_68510C.1.pep
MGKEVVDMSTDEESDCVVMCPPNRNADHEEAVSGSHDEDSSGRQENPYAVNSHMKTRGQEDVSVNPDLLKLIHQQESSVSNSPSKPAGARQQGSSHTVPESCTIAPESRSSGAGTCAPISYPTSSGEKLSDISSSSPRSMTKSPSVTCRKPLQSDNTSHSQEEDSYSVTSSTVTSARAGKTKKTTVAVAPTFVCDNRAEKRGEFYTKLEEKRKALEEEKLQAEARKQEEEEEALRQLRKNLVVRAKPVPSFYQEPPPKVELKKVPPTRAKSPKLTRRKSCSDTPHTPXEETAAAQCAAXHRHSVGNSKDIGGKAQCSPKTGPAAKSRAPPNPGKTRGLP

SEQ ID NO: 334865 - protein, 53 aa, Zea mays
  Clone ID: MRT4577_68511C.1.pep
KGVRPRDEKPLTLGLKGNLVLKKGPRFFNPQPALGEGLKCFRRGLFNEGHPFF

SEQ ID NO: 334866 - protein, 94 aa, Zea mays
  Clone ID: MRT4577_68512C.1.pep
ASICWLDCGRPGTGALKNFGIGGIGSVTVVDGSQVEASDLGAHYYVLFLCYVIPPVLLKRTPGIDGTHFLALYICIQWMKDFWGNQELHLYVRT

SEQ ID NO: 334867 - protein, 50 aa, Zea mays
  Clone ID: MRT4577_68513C.1.pep
QQNMPSWLILGKNLRMPCGKTVNNIILMHHESVNHLCTILCVLLYVPFSL

SEQ ID NO: 334868 - protein, 139 aa, Zea mays
  unsure (1)..(139): unsure at all Xaa locations
  Clone ID: MRT4577_68514C.1.pep
HHQLGGQAQGKGGXSCGGGKKPPIKVVFVGNPVRVKTSVAGFRALVQELTGRHADPYKHSVGDADADDSSSGGSGSPVELQVGGALSSDSASAAGVAQVISVPAYDDDDDDGFAPQLIDNSYSVFSPPTFLYGPHGGEL

SEQ ID NO: 334869 - protein, 75 aa, Zea mays
  Clone ID: MRT4577_68515C.1.pep
TWVCPGCSADAYECGSIPCHAKTLIGKLVLMHGMIDENLHFWHTVRLINPLVAKGKPDETFLCSDERRMLRCLDG

SEQ ID NO: 334870 - protein, 86 aa, Zea mays
  Clone ID: MRT4577_68516C.1.pep
LTRHMHRITHPINNLSILGITTMRLRPPLPLFHHQMQPIMHHLPTRRPIRRRPIAASTIIIRTTTTEHHHRRSRTTTHRGSRHRPS

SEQ ID NO: 334871 - protein, 44 aa, Zea mays
  Clone ID: MRT4577_68517C.1.pep
CYEPRYHIIISYVFLAFVLYDTFMTKIYIAAHVHQQLKLYYFVF

SEQ ID NO: 334872 - protein, 438 aa, Zea mays
  Clone ID: MRT4577_68518C.1.pep
MSGGGGGSPNNTEWRFNQTLRNVQGMLKGRSFPGKVLLTRRSEPLSPPDYSPSFESEHDEDERKEGSRQEGEGQASGNSFDNASSKKSNILSTSSSNSLPDAQGLVSGARATDSARIAKFTTELSRPAVILDKLRELSWSGVPPYMRPNVWRLLLGYAPPNKDRREGVLTRKRLEYVECVSQYYDIPDSERSDEEITMLRQIAVDCPRTVPDVTFFQNHQIQKSLERILYTWAIRHPASGYVQGINDLVTPFLVVFLSEHLDGNMDTWSVDNLSAQAISNIEADCYWCLSKFLDGMQDHYTFAQPGIQRLVFRLKELVRRIDEPVSKHIEEQGLEFLQFAFRWFNCLLIREVPFHLVTRLWDTYLAEGDYLPDFLVYISASFLLTWSDKLQKLDFQEMVMFLQHLPTRTWAHHELEMVLSRAYMWHTMFKSSPSHLAG

SEQ ID NO: 334873 - protein, 62 aa, Zea mays
  Clone ID: MRT4577_68519C.1.pep
LNPSYHTLYRSRHCLHTFLYRCAHRYWFRAPKQVLDILLKGQRDGGWSIKTQNAPIRVSPQL

SEQ ID NO: 334874 - protein, 91 aa, Zea mays
  Clone ID: MRT4577_6851C.1.pep
KPTCKYLYSASWFFLSMCMSYQVFLVTGHFDTTKVLHAMFTNVSTSLSFILPSTCPAPCPSSDQTTDAQRVLSGCTGKPAERVRSNRYLRA

SEQ ID NO: 334875 - protein, 85 aa, Zea mays
  Clone ID: MRT4577_68520C.1.pep
PTRSTTRAHYRSSAGAGPAGMGVLRSTQSLEAEVDEMSAALMTGGWRQSDGHSNANGSCCWDLCRTHACSIIRKYHYIYTCVCVL

SEQ ID NO: 334876 - protein, 65 aa, Zea mays
  unsure (1)..(65): unsure at all Xaa locations
  Clone ID: MRT4577_68521C.1.pep
VDKGLVPLAGSNNESWCQGLDGLASREAXYYQQGAXRSAKCPTVARILNGPSKFAVKEAPWGLER

SEQ ID NO: 334877 - protein, 61 aa, Zea mays
  Clone ID: MRT4577_68522C.1.pep
GSCLVARYQTHLNRKNSATGRITEPNLGLSQLVNIFHFFFDTHSQIDRYTGQPHNIICFQF

SEQ ID NO: 334878 - protein, 59 aa, Zea mays
  Clone ID: MRT4577_68523C.1.pep
HVWLPSKLSSDLQENIKSNQICIDDHPSVLPCTHGHTPSIIIWVEIFRTNLKRYFTLCL

SEQ ID NO: 334879 - protein, 91 aa, Zea mays
  Clone ID: MRT4577_68524C.1.pep
RFSCAPVGHQADLRLRQHESHSGFCDFLHNTKIAPPSSSESWNQRVASTTRALVCSGNTETQPGPLAALRIICASWLCSDPLTGKSRVFCA

SEQ ID NO: 334880 - protein, 49 aa, Zea mays
  Clone ID: MRT4577_68525C.1.pep
GGRGATSRAACSCTPVLGSFLCWRLYLCSVISESGVHVWPQKKKKRGGP

SEQ ID NO: 334881 - protein, 189 aa, Zea mays
  Clone ID: MRT4577_68526C.1.pep
MYDGFNSNTLGHFDAWVEVADEFVAHAFAGEPRVAKCPCTRCQNLIRLNKFDLSIHIYKYDFKPDYLVWREHGEVNAPSESDVDRMDDMLDDIRHEYPALETDQPPLEEVVTRLVMMKSKYNFSNNYYKDIVKLIIDLLEPVYYLSYHHPSLKVWWVVYKVNPEVHPERYDNYNKMVIRETMIKKIILI

SEQ ID NO: 334882 - protein, 103 aa, Zea mays
  Clone ID: MRT4577_68527C.1.pep
PAVAAMPIPPAYAFSCHKQVTMCIARSPAGLIRASNSAQPERASSLPTARDGANEQLAFCSKSSLVGPIKQPYLSTRKNTGGHLSGVEGWVEFTLPFLAQRRP

SEQ ID NO: 334883 - protein, 77 aa, Zea mays
  Clone ID: MRT4577_68528C.1.pep
MSDMESVAALMNSTSSKIQQLQEAFAELESQSTVSMNLKWKQLEDHFRGLEQSLKKKFDELKEQEKEFQETVAKSDL

SEQ ID NO: 334884 - protein, 161 aa, Zea mays
  Clone ID: MRT4577_68529C.1.pep
SVLTISRAFDDYYIKDCGVISTPENEMNERELSALKSVIKCIEEHKLEQQYPVDPLQKRVLQLEKAKADKRMAVEAAKPQSKRPRANGSAFATRATGFADKSFYSATPERHPFNPCERQFVYGAEVHLPPMMTSASYTMQPAHGPYYGNGYPVQYQVSYIH

SEQ ID NO: 334885 - protein, 149 aa, Zea mays
  unsure (1)..(149): unsure at all Xaa locations
  Clone ID: MRT4577_6852C.1.pep
XRISGAAPPSARLIRVAAEGFTKVMAPEEGPEQDWQMHPLRFNNPGEGVPQYSHPVKNLINKPGKFDLFPLEKVKVGRSTTQPPGSTKKGPVKANTIDFHPFWQRPEVVVLIVVPDFDSTLDYHQSVNTMSKVPVVDQSTVGQASPGPF

SEQ ID NO: 334886 - protein, 178 aa, Zea mays
  unsure (1)..(178): unsure at all Xaa locations
  Clone ID: MRT4577_68530C.1.pep
LHGPCAAVYGKLRRIRRLDVVQSGCTALSIIKHGDLMVVANVDDSRVVLGTATGHEFLCTGMTTIVVXVSVLEQDVCRGVAXRWCNDQVYYLADEPGVHFIWQPSQEXIGXLTISRAFDDYYIKDCGVISTPEVSRGGPTTMITRHRRGTFCAGLPLILFANTHLYFLFKQACMVVRA

SEQ ID NO: 334887 - protein, 178 aa, Zea mays
  unsure (1)..(178): unsure at all Xaa locations
  Clone ID: MRT4577_68531C.1.pep
AFGPIYRVMXRLCNGKRDGISNYGFICHCKSCGQSQTFGFDELGQISCGCTDTTDADSITVGGGLWTGPLHDASFLTEMLGLANEWGWACTIENGVSLEKLLGMMIEESDPRLPPGYIRLDEISRRAKVNSPPLGTLINSLRKEGFSACRSHISANTIKTNCSMASCIDVARGIRNSR

SEQ ID NO: 334888 - protein, 45 aa, Zea mays
  Clone ID: MRT4577_68532C.1.pep
MASGHCCRSTSAHLRCRDDATILDIIVVERARYGEYRSLLAGMAG

SEQ ID NO: 334889 - protein, 105 aa, Zea mays
  Clone ID: MRT4577_68533C.1.pep
PLSLCLSVCLNLCNARRAGQGKGTATGACEVLWPGKRLGPVRSTVLVGAGEKHLGRRRCSRMGRLVIRLRNGLQTAGYTWGMNERKQGPKASPTLVYKSAGSGSP

SEQ ID NO: 334890 - protein, 105 aa, Zea mays
  Clone ID: MRT4577_68534C.1.pep
RVLQLEKAKADKRRAVEAAKPQSKRPRANGSAFAHRATGFADKSFYPAAATPERHPSNPYERQFVYGAEAHLPPMVSSASYTMQPAHGPYYGNGYPVQYQVPYIH

SEQ ID NO: 334891 - protein, 475 aa, Zea mays
  unsure (1)..(475): unsure at all Xaa locations
  Clone ID: MRT4577_68535C.1.pep
MEEYTALLANHTWDPVSHLPGTNVVTSKWIFRHKLTLDGSLDHYKPRWVLRGFTQRTEVDYDETFSPVIKFATVRIVLTLACSWDCAIHQLDVKNAFLHDTLTETVYYSQPTGFVDSACSDLVCRLNRSLYDLKQTSWAWYSRFASYLASIGFGEAKSDTSLFIYRRGXDIVYLLLYVDDXSQYTIDILERVGMSGCKPCSTPVDTDGPPVADATSYRSLTGALQYMTFSRPDIAYDVQQVCLHMHTPQEPHLTTLKRILRYLRVSLDYDLLLRPSPTLELVVYTDADWAGCPNTRQSTSGYTMFLGANLVSWAAKREPVVYRFGAEAEYRAVANSVTEASWLRXQLLQELHRPFQRATLVXTMGSKFYTIRFKDRIRLGSRPICPYHFVKKYLDRDPLPLLGYNISAVYLSTNPVQHQHTKHVEIDLHFVRGYVVVGNVRVLSVLITLQFANIFTKGLLSSVFTDFRSSLNICT

SEQ ID NO: 334892 - protein, 534 aa, Zea mays
  unsure (1)..(534): unsure at all Xaa locations
  Clone ID: MRT4577_68536C.1.pep
MSDMESVAALMNSTSSKIQQLQEAFAELESQSTVSMNLKWKQLEDHFRGLEQSLKKKFDELKEQEKEFQETVAKSEQILEQREAAVVAKELTSLEKLQEKREAALAMIFSKSRLSLPVPTINPMNKALNNLGVKWPKPASEESVHLQVDNAVVTPRSELVALCEEMNVKGLHKFISDNRKNLAAIREEIPSALKKTSHPYGLVLDSLEDFYSGDNLVLDGKKDGDLLGVRRTCLMLMESLGQLHTADITWFSLXVHMLTTNIIERAMNIAFEWKSRIDNLETDASNGNCLEAHAFLQLLATFGISAEYNEDDLCKLLPYVSRRRQTPELCRLLGLSQKMPGVIEVLVKSGRTIDAINLAYVFELTEQFEPVQLLKAYLRDVKELSHARNVKISPXAQNEMNERELCALKSVIKCIEDHKLEEQYPVDPLQKRVLQLEKAKADKRRAVEAAKPQSKRPRANGSTFAPRATGFADKSFYPATPERHPSNPYERQFVYGAEAHLPPMMSSASYPMQPAHGPYYGNGYPVQYQVPYIH

SEQ ID NO: 334893 - protein, 505 aa, Zea mays
  Clone ID: MRT4577_68537C.1.pep
MSEMESVAALMDSTSSKIQQLQEAFAELESQSAFCMNFKWKQLEDHFRGLEQSLKKKFDELKEQEKEFQETVAKSEQMLEQREAAVVAKELTSLERLQEKREAALAMIFSKSRLSLPVPSINPMNKALDNLGVKWPKPASEESVHLQVDNAAVRPRSELVALCEEMNVNGLHKFISDNRKNLAAIREEIPSALKKTSHPYGLVLDSLEDFYSGDNLVLDGKKDGDLLGVRRTCLMLMESLGQLHSNDITCSSLERHMLTTNIIERAKTIAFKWKSKLDNLDIDASNGNCLEAHAFLQLLATFGISAEFNEDDLCKLLPYVSRRRQTPELCRLLGLSQKMPGVIEVLVESGRPIDAINLAYVFELTEQFEPVHLLKAYLRDVKKMSHARNVKTSPGAQMNPCFLLGNPEQTPLARGARVGVAHRRREETWRLPFRPLEAVLHGPCAAVYGKLRRSRRLDVVQSGCTALSIVKHGDLMAVANVDDSRVVLGITTYDDAITPSSSLST

SEQ ID NO: 334894 - protein, 76 aa, Zea mays
  Clone ID: MRT4577_68538C.1.pep
DQKSKSLLLVVCHVGVVHLIPSSWPCFRAGAPKLEEPASKGAILWCPHHRMAPLGASLLSGRVGRPGNSGPDLQAY

SEQ ID NO: 334895 - protein, 62 aa, Zea mays
  Clone ID: MRT4577_68539C.1.pep
HGEYCPCCPAIAPLGALSIRLPLLPSGAVYKRHSAPLILNSFTPCGPSLCLLPSWTSYFSCL

SEQ ID NO: 334896 - protein, 101 aa, Zea mays
  Clone ID: MRT4577_6853C.1.pep
GRVGGRVGGRVGRPPRYSPHRARAGAEKGNSPPPLRRHPRLRPHPLLLRPHPLRLRPSHCLPSPRHSERSSSLRHRCQEWITNQKGDHLGAHQTSTIKFHV

SEQ ID NO: 334897 - protein, 112 aa, Zea mays
  unsure (1)..(112): unsure at all Xaa locations
  Clone ID: MRT4577_68540C.1.pep
QPPLQQPQTGRKGSQLAKAVTGSLVVIITRGPRHVINVGXLGRYRDHKELNDITVRXCVLKNTNNGVRNKSYVNPDSVLTDSHRTFDIIMMEDVAKPIVIHQYFCPHNVCPG

SEQ ID NO: 334898 - protein, 85 aa, Zea mays
  Clone ID: MRT4577_68541C.1.pep
KDHLLALLRSNNLQDLHVCASNLRDPPADVPSPRRLRAQLAFKNLMVRGILQFPPGIAFCYVLHRCGNRDIRFRESCLFFFFFFF

SEQ ID NO: 334899 - protein, 85 aa, Zea mays
  Clone ID: MRT4577_68542C.1.pep
PQQQPGWPHQSLQQIVFSPVEPLTLGAMLGWGGSRLPKKYPKDFCPPRPFPPGLILIIEKRNERQRRGDGGRPAAGSVGLRLLRI

SEQ ID NO: 334900 - protein, 77 aa, Zea mays
  unsure (1)..(77): unsure at all Xaa locations
  Clone ID: MRT4577_68543C.1.pep
TGDTFYIGILCTLRTTSKXSSLXCXKMGTXSVFSXRXSLKHIHSXALXAMIXTFGKKTXXXXXXXXXXXXXCTHARV

SEQ ID NO: 334901 - protein, 67 aa, Zea mays
  Clone ID: MRT4577_68544C.1.pep
NPSIKAQSLGLLWPSSLFWLTTPFFPFLGSKYNCLVQFRSFGENKTVGVPGIFVFCNHFINKSRNVS

SEQ ID NO: 334902 - protein, 93 aa, Zea mays
  Clone ID: MRT4577_68545C.1.pep
SGGYKGCRDCFISIYHLSRWVLFCAKKKKKKKKKKKKKKKKKKKKKKKKKKKKKKKKKKKKKKKKRGGPFKRTKFNYPGLGRKNFFFGAPKIK

SEQ ID NO: 334903 - protein, 81 aa, Zea mays
  Clone ID: MRT4577_68546C.1.pep
FVNFQFHHPFLLCFEKKKKKKKKKKKKKKKKKKKKKKKKKKKKKKKKKKKKKKKKGRPLLKKPKLTTPSFQLKTFFIGPPK

SEQ ID NO: 334904 - protein, 117 aa, Zea mays
  Clone ID: MRT4577_68547C.1.pep
SSEVAAHRTKFGNLHLWFLHSQLCSLDICKSYGLATSPFDGLEKKKKKKKKKKKKKKKKKKKKKKKKKKKKKKKKKKKKKKGGPFLKDQSLLPRACNVKVFFWGPQNKINWPCFKNV

SEQ ID NO: 334905 - protein, 66 aa, Zea mays
  Clone ID: MRT4577_68548C.1.pep
SQWVAFSFLYLKKKKKKKKKKKKKKKKKKKKKKKKKKKKKKKKKKKKKKGGARFKKTKVNYPGHAT

SEQ ID NO: 334906 - protein, 69 aa, Zea mays
  Clone ID: MRT4577_68549C.1.pep
MASKSVELRMTLLGVALLGLLLLSQHAAPVDAAESDGPRKEKTSFSMNSAYSEKKPSSKGASATDPAHG

SEQ ID NO: 334907 - protein, 366 aa, Zea mays
  Clone ID: MRT4577_6854C.1.pep
MRWRLQPAPAPALLLVLATIAAVVVVRAEPQVPCYFVFGDSLVDNGNNNDIASLARANYPPYGIDFAAGPTGRFSNGLTTVDAISRLLGFDDYIPAYAGASGDQLLTGVNFASAAAGIRDETGQQLGQRISFGGQLQNYQAAVQQLVSILGDEDSAASHLSQCIFTVGMGSNDYLNNYFMPAVYSTSQQYTPEQYADVLINQYSQQLRTLYSYGARKVALMGVGQVGCSPNELAQRSTDGTTCVPQINGAIDIFNRKLVALVDQFNALPGAHFTYINVYRIFEDILANAGSHGFTVTNAGCCGVGRNNGQVTCLPYQAPCANRDQHIFWDAFHQSEAANIIVGRRSYRAESPNDVYPMDISTLASI

SEQ ID NO: 334908 - protein, 88 aa, Zea mays
  Clone ID: MRT4577_68550C.1.pep
MLYRYFQHCILNCTGVSCICQLKKKKKKKKKKKKKKKKKKKKKKKKKKKKKKKKKKKKKKKKGGGLFKEPNFTTPGLKSKIFFLGPPK

SEQ ID NO: 334909 - protein, 553 aa, Zea mays
  unsure (1)..(553): unsure at all Xaa locations
  Clone ID: MRT4577_68551C.1.pep
MKTSVVVAALAAVLFAAQSYASLAGASGPRVIIVGAGMSGISAGKTLWEAGVRDLLILEATGRVGGRMHKHNFGGINVEIGANWVEGLGGDQLNPIWPLVNSTLKLRNFYSDFDSVVGNVYKENGGGLYDEEYVQKRMDRAYEVEELGANLTKKMHPSGRDDISVLAMQRLFNHQPNGPTTPVDMALDYFIYDYEFAEPPRVTSLQNTQPTPTNADFGEDNYFVADQRGYESIIHSIGSSYLSTDGNGKLKDRRILLNKVVRQITYNKQGVVVKTEDGSSYRADYVVVSTSLGVLQTDLIQFKPQLPXFTCISLLCYTCLINXYNTMEEWQLIEXRMDNNIXYIYTNKQKHRIVXWKIAAIYSFDMGVYTKIFLKFPERFWPVGEGKQFFMYASSRRGYYALWQSFEREYPGANVLLATVTDDESRRIERQSDDQTKAEVAEVLRDMFPGADVPGPDQIDIYVPRWWSDRFFKGSYSNWPVGVSRYEYDQLRAPVGRVYFTGEHTSERYNGYVHGAYLAGIDSANILINYIFKNEEYKVRGKYDVDDLIAQAR

SEQ ID NO: 334910 - protein, 66 aa, Zea mays
  Clone ID: MRT4577_68552C.1.pep
ENLVKKKKKKKKKKREKKKKKKKKKKNKKKKKKKKKKKKKKKKKKGGAVLKDQSLLPRACKVIVFF

SEQ ID NO: 334911 - protein, 91 aa, Zea mays
  Clone ID: MRT4577_68553C.1.pep
GLEHQRIMASRTCDMVVAIHSVEQFHAPPVSSSPDEVMGVPHETRGRPPANRRGHNAGEPDLHPPCMVALHLLPSYSPQRRALRRGSTPAG

SEQ ID NO: 334912 - protein, 109 aa, Zea mays
  Clone ID: MRT4577_68554C.1.pep
PEQAGAEPGRDRSGAAGTGQGGARAGRSSATRPGGGSAVPASAGRSSPSRPAGRAGERPRRLAKLGSAARWPGRGLRAGPLDPGSRTRSRWPGAGGPGLWSSEARGREG

SEQ ID NO: 334913 - protein, 103 aa, Zea mays
  Clone ID: MRT4577_68555C.1.pep
MLSCLMTHQSSYRKVQFEEALNTPDPKEGLQRLIDPALGEDYPIDSILKMTVLARACTQEDPKARPTMRSIVVALMTLSSTSEFWDMNAIQENQGVVNLMSGR

SEQ ID NO: 334914 - protein, 82 aa, Zea mays
  unsure (1)..(82): unsure at all Xaa locations
  Clone ID: MRT4577_68556C.1.pep
KRGNWKNLGFPKLNRFEKNPLFPSWGKSKKARTDRLSKNLPTLNGKWNPPFRGXINPGGXVFTPRVTFTFASALGPVLFVFF

SEQ ID NO: 334915 - protein, 44 aa, Zea mays
  Clone ID: MRT4577_68557C.1.pep
KKKKKKKKKKKKKKKKKKKKKKKKKKKKKKKKKKKKKKKRGRPF

SEQ ID NO: 334916 - protein, 113 aa, Zea mays
  Clone ID: MRT4577_68558C.1.pep
AGVSSRDIVHIQNAKGLGYAMNTSEELNFVKEVAATTGVVLDPVYSGKAAYAMLKDMSENPKKWERRKILFIHTGGLLGLYDKVDQLASFVGNWQRMDVNESVPRQDGIGKMF

SEQ ID NO: 334917 - protein, 256 aa, Zea mays
  Clone ID: MRT4577_68559C.1.pep
MSTNHVYVFKKRQPNKFAYVAEVRSMAENQNRPASGMFVRMLSRAGAKGCVGEDIDDLQYTPKPEFEGYFRVKNVQTELDLLKAWFSHMQEVKPGIYVTYNDDFFDWPFLEKRAAHHGIKMNEEIGFQCDNNQGECRAKFSCHLDCFAWVKRDSYLPQGSQGLKAVTKAKLRYDPLEVNPEDMVRFAMEQPQTMASYSVSDDVATYYLYMTYVHPFIFSLATIIPMLPDEVLWKGSGTLCEILLMVQAFKAGGTQL

SEQ ID NO: 334918 - protein, 84 aa, Zea mays
  Clone ID: MRT4577_6855C.1.pep
LLGLSCGRQHRIIPPDPYTSKKLITRILLCHTRSFAGRGWLFLLLRFCRIVLLRYLVREFVRRLIFFTAPLRMTFAIGHPPPDA

SEQ ID NO: 334919 - protein, 81 aa, Zea mays
  Clone ID: MRT4577_68560C.1.pep
RNKKLDKHKITCNTEYHIQYIFQTHGVFGSNRQSTRTCMIYYLNKECTADLRTRMILSQFLSVSLRANIVYFLFLSLPASV

SEQ ID NO: 334920 - protein, 98 aa, Zea mays
  unsure (1)..(98): unsure at all Xaa locations
  Clone ID: MRT4577_68561C.1.pep
CPPCPSGLPLPSGSPCRVCPRRARGRRLCPVSLAALRPGALWLAWLGVSGRAGARFSAAPWPVGACPPALLGRPFALPSGCGPLAGSAARRSXAWVGP

SEQ ID NO: 334921 - protein, 211 aa, Zea mays
  unsure (1)..(211): unsure at all Xaa locations
  Clone ID: MRT4577_68562C.1.pep
CVGEDIDDLQYTPKPEFEGYFRVKNVQTEVSGTIVILFSIISTVCIILILLXPFIFVVYXDLLKAWFSHMQEVKPGIYVTYNGDFFDWPFLEKRAAHHGIKMNEEIGFQCDNNQGECRAKFSCHLDCFAWVKRDSYLPQGSQGLKAVTKAKLGYDPLEVNPEDMVRFAMEQPQTMASYSVSDAVATYYLYMTYVHPFIFSLATIIPMSPDE

SEQ ID NO: 334922 - protein, 84 aa, Zea mays
  Clone ID: MRT4577_68563C.1.pep
EQTYWAHGKKKNFLEAKPQVYYWDWIAESRVPLTLKLLVHVLLEIRRLPRAAHGGGYLASNAREAKGSRSADQLLKDAGAMEEQ

SEQ ID NO: 334923 - protein, 42 aa, Zea mays
  Clone ID: MRT4577_68564C.1.pep
MFTKWNDVNLFPIVIQVLIWDVEVQPNRHAVLGASESRPDLV

SEQ ID NO: 334924 - protein, 60 aa, Zea mays
  unsure (1)..(60): unsure at all Xaa locations
  Clone ID: MRT4577_68565C.1.pep
GGFNRRLLEDGIGQTXLTLPLEDQRSFLLGWFGRFFKLGPNCPNFQRGFKVWWRRTFVRP

SEQ ID NO: 334925 - protein, 94 aa, Zea mays
  unsure (1)..(94): unsure at all Xaa locations
  Clone ID: MRT4577_68566C.1.pep
GGPPFNFLVDAKSGQGTFLDARKGKISWGSPPPIFGVTWAXXAPINHKIAEKFCTWLQLMLNPVCPKKXLLQKKKKKKKNKKTKIHNPXTPLLP

SEQ ID NO: 334926 - protein, 621 aa, Zea mays
  Clone ID: MRT4577_68567C.1.pep
MAAPWGNKSISEYTTPTSVHRPNQCLDIVAMVQEEQQGGNQLASDASTHTKSATAVDAITPPAALRAPGVDDQTIFEASRMTVNQGGQHLNTMRTIGDHEQDTPVILQRHEVTIDPRLVPKVGMTFSGVDEAYKFYSRYAYEVGFPLKSIGNEKIDTEKNQLQCNKTHDPEYMEFISSMQESRIPQHCIMDYVSEMHSGPESVPVTTQGMYNLYMPFLNELYARFEEMDFKTQFQSIIHHPLTELELETAWSMLLEDFHLHDNITLDKLYGIRKDWVPPFFKNHYCGLMLSTQRSESMNRLVKSAHVNANTPLHQFAKQMMKLLHSRKMKESKEAVGSMGQKETNTLYMFEIRVARAYTRAVMDKFQESLKYATAFKIMHDEEGGANDWVVQHTTRSNKIVWGQHQFKVTTDEDVGKYTCECKHWEHTGLFCVHVLRAFMHLQIDRIPKEYILQRYTYSARQDVPFSRDDRNLKGKDGETKSYRQKMLLKKAMKVVHHASLSKAGNDRALTVMDELLEVLSRLETDIEVEETCGTSGGDGIQDDDEDNRDNEKDGEFDERNNKEIQDVSNILEQGVANDQIPIPIRPLEEVNLHDHTIMNVSGVNEQNDHARKKLDFASMG

SEQ ID NO: 334927 - protein, 42 aa, Zea mays
  Clone ID: MRT4577_68568C.1.pep
YDKLSTKLSSKHAHQPYCLGEPASYKARELHDLKHDGDALGV

SEQ ID NO: 334928 - protein, 41 aa, Zea mays
  Clone ID: MRT4577_68569C.1.pep
FSPHTLTHCNFALGTLLIYCPTSFSTKSNQRRINLEEGTIK

SEQ ID NO: 334929 - protein, 369 aa, Zea mays
  Clone ID: MRT4577_6856C.1.pep
MRWRLQPAPAPTLLLVLLVATVAAVVVVVRAEPQVPCYFVFGDSLVDNGNNNDIASLARANYPPYGIDFAAGPTGRFSNGLTTVDAISRLLGFDDYIPAYAGASGDQLLTGVNFASAAAGIRAETGQQLGGRISFAGQVQNYQAAVQQLVSILGDQDTASSHLSRCIFSVGMGSNDYLNNYFMPAFYNTGSRYTPEQFADSLIADYRRHLRVLYNYGARKVVMIGVGQVGCSPNELARYSADGVTCVDRIDDAIQMFNRRLVGLVDEFNALPGAHFTFINAYNIFDDILANAASYGFTVTNAGCCGVGRNNGQVTCLPYQAPCANRDQHIFWDAFHPSEAANIIVGRRSYRAESPNDVYPMDISTLASI

SEQ ID NO: 334930 - protein, 76 aa, Zea mays
  Clone ID: MRT4577_68570C.1.pep
IRLDLSAWGEKVRRMLVHVSALIPICLHGVKGTPTNMFLCARSRLKCGVWLGPLTELDETNPTSYLCPMFGSRDNK

SEQ ID NO: 334931 - protein, 74 aa, Zea mays
  Clone ID: MRT4577_68571C.1.pep
TSTDHCRLSRHVSACHTFTRYNCSSSQLCIISLCYNYSFNIVTVGYQCSLQTIVTILYQNTVSDSSTIVNDCCP

SEQ ID NO: 334932 - protein, 58 aa, Zea mays
  Clone ID: MRT4577_68572C.1.pep
FSITHTAIINLITLYYSILFLNVLCSELTTSLQTHTVPNTFVLITPFITLIYSHMLPN

SEQ ID NO: 334933 - protein, 178 aa, Zea mays
  Clone ID: MRT4577_68573C.1.pep
APLKEWETVPLRYHDFRLINVMVDAYCRKGLVEKAVALVDGAIKKGRTPYANTWYKLAGGFFKTGQVPEAVDMTRKALDSATPPWRPDLANVLMSLNPFVDQKDVGAAEEMVSTLQKLVPLTRDVYHCLLKTYVRAGKPPSDLLERMKEDGLEADEETERILAGECERVDMHPLSITK

SEQ ID NO: 334934 - protein, 59 aa, Zea mays
  Clone ID: MRT4577_68574C.1.pep
KKKHIKIKMIYLSLRKKKTISEGLIHHTGRRQKVKKHSQCNANFGLKRILDLTKLVHES

SEQ ID NO: 334935 - protein, 86 aa, Zea mays
  Clone ID: MRT4577_68575C.1.pep
RLCSPQSLFSRIIICTEEICVKKKKKKKKKKKKKKKKKKKKKKKKKKKKKKKKKKKKKKGGRLKEPNLTTPGLQGKSFFIGHPKLN

SEQ ID NO: 334936 - protein, 519 aa, Zea mays
  unsure (1)..(519): unsure at all Xaa locations
  Clone ID: MRT4577_68576C.1.pep
MYRLFRRSFSMAAEGSAAAASSSPPXPPPPXSTPRQHLPDELYRRIMNVGRPSIPLSPVLEQWNQEGHTAKKFVIQAIVKKLVGLRRFAHALELSFWMTDRRHLHLSVGDVAYRLDLISKVHGLEKAVEYFGMVPKQLRKPQCYGSLLKCYVEAKAVDKAEEHFAKMQEMGMTSSYAYTWMMKLYLQTGQLERVHAMFQDMEEKGVKPDTFSVEAMLAAYIAAEDVQGVGKVLDKANPHEKLVTWHGHASAASLFMKSGMQVGAVMALVEAERRISPKSSRIAYAFLLKTYTELGMHAEAGRIWSVYKSKVPPCKFGSMYMSRLSALLRTNDTDGAEATLKEWETVPLRYHDFRLINVMVDAYCREGLVEKAVALVDGAIKKGRTPYANTWYKLAGGFFKTGQVPEAVDMTRKALDSATPPWRPDLANVLMSLNHFVDQKDVGAAEEMVSTLQKLVPLTRDVYHCLLKTYVRAGKPPSDLLERMKEDGLEADEETERILAGECERVDMHPLSITNHLIG

SEQ ID NO: 334937 - protein, 84 aa, Zea mays
  unsure (1)..(84): unsure at all Xaa locations
  Clone ID: MRT4577_68577C.1.pep
STHSTIYQQIQRSPXXAHSKAPIHKETSEVSTPPQSFLGREIEYPKHTEKKAVSQPDRSDYPAILPVKQGLVQILIRSNRGFCN

SEQ ID NO: 334938 - protein, 263 aa, Zea mays
  Clone ID: MRT4577_68578C.1.pep
MDPHQFAPSQQSALTMESAESTAAAAARASNGAARAVVEDDDEDDDVPEVAACISTMLDRGGSVESHRLFLARRTALEMLRDRGYAVPEEELARTLPEFRAWWEYRPELERLAFSTTLTSDPSSKVKVVFCPPGPVKIAAIRLIYTEVKDENLSRLILILQGKIMSTTRESIKEIFRFKVDTFQITELLVNITKHVLKPKHEVLTAEGKAKLLKEYNVVDSQLPRMLENDAVARYYGLGKGTVVKVIYDSELTGNHVTYRCIT

SEQ ID NO: 334939 - protein, 87 aa, Zea mays
  unsure (1)..(87): unsure at all Xaa locations
  Clone ID: MRT4577_68579C.1.pep
KKKKGGARLKEPKLTSPGMQRKSFFIGPPKLNXTGRRLXRRNGKNPGVTKLNRLEKNPLFPSGRKTKKAPPNRPSKQWPTLNGKGNP

SEQ ID NO: 334940 - protein, 379 aa, Zea mays
  unsure (1)..(379): unsure at all Xaa locations
  Clone ID: MRT4577_6857C.1.pep
VHSIGAGPRARHGGGEAKAAAVPVPAGGGRELGAAGGGGAXDPQVPCYFIFGDSLVDNGNNNYIVSLARANYPPYGIDFAAGPSGRFTNGLTTVDVIAQLLGFDNFIPPFAATSADQLLAGVNFASAAAGIRDETGQQLGQRISFGGQLQNYQAAVQQLVSILGDEDSAASHLSQCIFTVGMGSNDYLNNYFMPAVYSTSQQYTPEQYADVLINQYSQQLRTLYSYGARKVALMGVGQVGCSPNELAQRSTDGTTCVPQINGAIDIFNRKLVALVDQFNALPGAHFTYINVYGIFQDILRAPGSHGLTVTNQGCCGVGRNNGQVTCLPFQTPCANRNEYLFWDAFHPTEAANILVGRRAYSAALPSDVHPMDLRTLARI

SEQ ID NO: 334941 - protein, 98 aa, Zea mays
  Clone ID: MRT4577_68580C.1.pep
MAGRKETALDLAKFVDKGVQVKLTGGRQVTGTLKGYDQLLNLVLDEAVENEREQDDPLKLSGKTRQLGLIVCRGTAVMLVSPTDGTDEIANPFLADGA

SEQ ID NO: 334942 - protein, 65 aa, Zea mays
  Clone ID: MRT4577_68581C.1.pep
DAPQVAGELEGPDAPSAVDERATPGWQKKTAGLYAWRWRSQREPGERGQRSTTLMVSIGFFCALQ

SEQ ID NO: 334943 - protein, 550 aa, Zea mays
  Clone ID: MRT4577_68582C.1.pep
MTPPTGSSVNISFTCGCHTFPNSDATYLGGSFPHKVVTGDTYGGIAQNYNNLTSAAWLAVTNPYPTNNIPDTNTVVNVTVNCTCGDPKISSDYGFFLTYPLMGQTLAAVAANYSFNSSSQLDLLRKYNPGMDTATSGLVFIPVKDGNGSYHPLKPPGNGGSIGAIVGGVVGGVAILVLGVLLYIMFYRRKKANKAALLPSSEDSTQLATTSMDKSALSTSQADSSSGVPGITVDKSVEFSYEELFNATEGFSMSNKIGQGGFGAVYYAELRGEKAAIKKMDMQASHEFLAELKVLTHVHHLNLVRLIGFCTESSLFLVYEFIENGNLSQHLRGTGYEPLSWAARVQIALDSARGLEYIHEHTVPVYIHRDIKSANILIDKNYRAKVADFGLTKLTEVGNTSLPTRGIVGTFDYMPPEYARYGDVSPKVDVYAFGVVLYELISAKDAIVRSTESSSDSKGLVYLFEEALNTPDPKEGLQRLIDPALGEDYPIDSILKMTVLARACTQEDPKARPTMRSIVVALMTLSSTSEFWDMNAIQENQGVVNLMSGR

SEQ ID NO: 334944 - protein, 55 aa, Zea mays
  Clone ID: MRT4577_68583C.1.pep
NKSSFCFYFLYQRAPPRAKKKRFLNPQGGRPKCLGPPFLEGKNCRLTLKKGFINK

SEQ ID NO: 334945 - protein, 375 aa, Zea mays
  Clone ID: MRT4577_68584C.1.pep
PRVRAEQRPLQSYSTPRPGIQGADMLILDLSTLRVATDDFAESKMLGKGGFGMVYKGVLPDGQEIAVKRLCQSSRQGIGELKSELVLVAKLHHKNLVRLIGVCLQEQEKILVYEYMPNRSLDTILFDSERNRELDWGKRFKIITGIAKGLQYLHEDSQLKVVHRDLKASNVLLDLDYVPKISDFGLAKIFGGDESKCVTHRVAGTYGYMAPEYAMRGLYSIKSDVFSFGVLVLEIVTGRRNGGLYNSDQDVDLLNLVWEHWDRGNVIELIDPSLSDHHHHPPIEQMLKCLHIGLLCVQRKPAARPMMSWVSVMLCSSTVRLPSLSRPALCVQEVVTATDDDSSSGASALLCAAESSVMTTIMSCNDASITELLPR

SEQ ID NO: 334946 - protein, 482 aa, Zea mays
  unsure (1)..(482): unsure at all Xaa locations
  Clone ID: MRT4577_68585C.1.pep
MAPPPAMQSPGELNDGAYDAPHILFIPSAGIGHLTPVFRVIAGFSSRGIDVSVVTVLPTVSAAETDYFNGLFADYPAVRRVDMHLLPLDASEFTREDPFFLRWEALRRSVHLLRPIITDAAPRITAIITDITLTSCVIPIAKELDVPCHVLFPTAAXALAQRLLPRLSREAQGWTGARRDXGDAVDIPGVFRVPRSALPPALLDVNKLFTKQFIDNGRAIVKADGVLVNTFDAVEPAPLAALRGGKIVPGYPPVYTIGPLKSHATKAGDKPGDALLDEWLGKQRARSVVYVAFGNRSAARLDQIREIAAGLEDSGYPFLWVLKTTKVDREDDAELAEVLGDGYLERVKGRGIVTKGWVEQEELLKHPAVGMFVSHGGWNSALEASSAGVPLLVWPQLGDHRVNAMAAVRXHRGVGGALEXWDGEDTLVTRQEIADKVKEVMADGKLRASVAVAREEAAKAVAEGGTSYRNMHDFIAKLKGGA

SEQ ID NO: 334947 - protein, 52 aa, Zea mays
  Clone ID: MRT4577_68586C.1.pep
APEVRNSVDRASLGLRVRFKQDLPLDVLKSLCKQEFAPCPPKSIMSVCHSMV

SEQ ID NO: 334948 - protein, 118 aa, Zea mays
  unsure (1)..(118): unsure at all Xaa locations
  Clone ID: MRT4577_68587C.1.pep
MRLVAGGQWQXAQLDATHAGTGTENYTGSDADVYXRPXQRARGTWYGQPNGAGPDNNGGARGIKQTNQYAFMSMSPCGDQSLFKDSKGCHLXYKICTRKDPSCSGRTETRIITDMNYY

SEQ ID NO: 334949 - protein, 136 aa, Zea mays
  Clone ID: MRT4577_68588C.1.pep
PFFAYRCSAPSCLVCTSSSSSGSGCASNSGRTPLPSFGPSPSPLSPVTLDFSSPVIGSVGTQPLVPPTPAVTTAAVAVSVTTSAPTNPASQPQPESVPAPASTIDPGSETDSDPQLAFALLPRPDAPLPPPSSSGL

SEQ ID NO: 334950 - protein, 196 aa, Zea mays
  unsure (1)..(196): unsure at all Xaa locations
  Clone ID: MRT4577_68589C.1.pep
SYSGYQDELLWAAAWLHMATAAQGNSSSSDMYLSYIYSNGHILGAEQDDFTFSWDDKRVGTKVLLSKAFLQGKGKGKGHADDDALRLYKAHADAYVCSLVPGAAGFQPSQFTPGGLLFKEGDSNMQYVTSTAFLLLAHAKSLAGARVSCGGGGAGVPASALVAAAKRQVDYILGANPAGMSYMVGXFGARYPRHVH

SEQ ID NO: 334951 - protein, 147 aa, Zea mays
  Clone ID: MRT4577_6858C.1.pep
GRGTRLLPPQATISSLLSHLPSQHLAAAGIPLTLRDPAQIEALPCTNARALLPRRNPLNFMCTSNSPKHSPPHAYDAVVWDAEGSVAEELRRVRRGGHTKPTQCALPSARRGSSRGLSCRCPTSSPSMHTIRRYSLSIPVATSRTTT

SEQ ID NO: 334952 - protein, 79 aa, Zea mays
  Clone ID: MRT4577_68590C.1.pep
TVHRSQSWAKADFECQSLFSSSGFLCTCKFFSQTHMCIFIIRERKKEARTHTNTPPTPTHSTHVYLFSYFVYNYYIIKM

SEQ ID NO: 334953 - protein, 156 aa, Zea mays
  unsure (1)..(156): unsure at all Xaa locations
  Clone ID: MRT4577_68591C.1.pep
RPPRVNAAYAGGVTETRXHLINLDFYIPPDERFSPTKLAEVLALAVQAVTHFVVPESNALFHGNVNSFRSFDQLKDDLYXGDRRSPXDGQVMDKLKTSVPSHKTYKQVSKMVKETPVKFPIPXVIEHDQEAWRSDEEFVREMLAGLNSGVISRLEV

SEQ ID NO: 334954 - protein, 83 aa, Zea mays
  Clone ID: MRT4577_68592C.1.pep
AAGLAPRHSLQLTPPRHPWMPRAARYAAAHTRVLAAATAVRSWVALAGPLVRAKRLGRRSPLLRDPGLRRSPRLHDLVRRWDS

SEQ ID NO: 334955 - protein, 83 aa, Zea mays
  Clone ID: MRT4577_68593C.1.pep
RWPVSRQSHNSNTHPRSLAPSSNLGPNYPRPKVGPSRSNLLPTCHDDPTLEHAPQTWYRYRTPPLLHSLPRQSLVTRTSLLSP

SEQ ID NO: 334956 - protein, 34 aa, Zea mays
  Clone ID: MRT4577_68594C.1.pep
MGPHTRWVELKTPYRGVVEKKKKKGRPLSRRSTV

SEQ ID NO: 334957 - protein, 75 aa, Zea mays
  Clone ID: MRT4577_68595C.1.pep
QLECVSPWNLNVTNTSDKDVADENQDIYPGLQDFMQFLSLEEHDSRSESGREERLTQWIVTELQQCYSAIKRMLS

SEQ ID NO: 334958 - protein, 347 aa, Zea mays
  Clone ID: MRT4577_68596C.1.pep
LTYRILCSDESLLFQALGLNDELQRVVQRHDDIAKGILPPGTGAPVPVPASANVNQGTTPPRPTAVSFSPLLNVHEDDEPEDEFVVLFRRPARDGTVARNNLPYARRNERPYRSPLLPPPPASKRPVYTEASSIDYLSGGSYKSSEKVPDDFINPTAPANVTTSPHSKPEAYPPPSYSSRPDSVSDDFINPTAPSFSAPSRPTDEEPTRSPVKRQESIPDDDLINPTALPGFSSSSATKEFSEDLPKAPWEEVQAAAAGSLPPPPERYGQRQQYFEQNVYSGGSNGGGYDELLTRTENLSLNPEKNASRPTASCQAKPEDSLFKDLADFAKTKPSSPSKSANSRRTR

SEQ ID NO: 334959 - protein, 61 aa, Zea mays
  Clone ID: MRT4577_68597C.1.pep
AAVGSRQLFSPRKGAPPLRISNPKTSCKPRHQQPNQAEGLINRLCSWQQPMLKTVRTRPKK

SEQ ID NO: 334960 - protein, 111 aa, Zea mays
  Clone ID: MRT4577_68598C.1.pep
GGASGRGRVCARRAPRGGPPVRGGLPRLVSAPAGVRSARAVAPPGVPLLARLPLAACSVCGALPPVVVVSSGPLPRAALLPRRPFPPSGFQCPLRGGGENAVSKPGKGSGR

SEQ ID NO: 334961 - protein, 80 aa, Zea mays
  Clone ID: MRT4577_68599C.1.pep
LLTNSKCFDQVKTHLHSTLCIRSWSMQLICIAFAITTKISAQLNPFPQKRPGSRMSTQAKAFKTMSMESIWSLILIITIG

SEQ ID NO: 334962 - protein, 239 aa, Zea mays
  unsure (1)..(239): unsure at all Xaa locations
  Clone ID: MRT4577_6859C.1.pep
MMAYVRGDMSLDARAHRHVLMCRFSARLLGFDDYIPAYAGASGDQLLTGVNFASAAAGIRDETGQQLGQRISFGGQLQNYQAAVQQLVSILGDEDSAASHLSQCIFTVGMGSNDYLNNYFMPAVYSTSQQYTPEQYADVLINQYSQQLRTLYSYGARKVALIGVGQVGCSPNELAQRSTDGVTCVXRSTGAIGMFNRRLVALVDSFNRILPGAHFTYVNVYGIFEDIIKSPGAHGGGVN

SEQ ID NO: 334963 - protein, 39 aa, Zea mays
  Clone ID: MRT4577_685C.1.pep
GPHRDFMIDGQALWTLHSSAFVRAFSNDRASWISFSIED

SEQ ID NO: 334964 - protein, 124 aa, Zea mays
  unsure (1)..(124): unsure at all Xaa locations
  Clone ID: MRT4577_68600C.1.pep
PDGRIGRSXKKGRYAQXRVGPGAPVYLAPVLENLPPKGQERTGNPPKANKKTRIVPRHLLXATPNDQELGRLLSGVTIAHGGVIPNTNPVLLPKKAPEKAEKAEKTAPKSPKKATKSPKKATKA

SEQ ID NO: 334965 - protein, 280 aa, Zea mays
  Clone ID: MRT4577_68601C.1.pep
SRADSARAILFIVEIWQLIQLDKPYTCGLTSLDILLERLDMSVRRMKYCYIGLNRVLEVQVLELSLIAHLCRLSKIAVCTKVVLGKVLWVINRLEDLCADGSCELSDFSGEIKKACDTNRIGDNLIGNINNLFQLFHLKPTTDFGMLKVISAMLRVCDNDSENPLQYICGLPVGVSFKISLWNISGHHRLWLRMTIGESVQHTFLEFSRFEGNDEVRSGSMAVPLYATPKACSFVLRVCLVMECPSAGISTHQGGHGGPSDCVVQLSDELNVYFVSASQW

SEQ ID NO: 334966 - protein, 393 aa, Zea mays
  unsure (1)..(393): unsure at all Xaa locations
  Clone ID: MRT4577_68602C.1.pep
MSGFGDGYVGTAQDAVKIRRLEKQREAERRKIEELKNKSADGQPGLLQFGSSTSEILETAFKKETVGLVTREQYVEKRVNIRTKIEEEEKEKLQKLQQEEEELQMQKRKKRRVKSDPRLSFCDDIENGSDEDDFENQETKKNGPAKLGKDPTVETSFLPDREREAEEQAERERLKKQWSHEQELIKNEPLSITYSYWDGTGHRRAIQVRKGDTIGEFLRAVQQQLAPEFREVRTTSVENLLYVKEDLIIPHQHSFYELIINKARGKSGPLFHFDVHEDVRTIADATKEKDESHAGKVVERHWYEKNKHIFPASRWEIXPNEEVGTLHNPWGLAWNIIHRELNYFVLWMSEITSTQEYENGTSDDLNSINYYCCLQKKKKKKKKKTRGDSIMHK

SEQ ID NO: 334967 - protein, 43 aa, Zea mays
  Clone ID: MRT4577_68603C.1.pep
YNGKWLLKLKGFLFYEKSKGLDTIFKTCGQIKRFVGKNLQKSM

SEQ ID NO: 334968 - protein, 382 aa, Zea mays
  Clone ID: MRT4577_68604C.1.pep
MLSVLESAIKRDYLSSNFETTTELLNSSTQDFATQNSAGGSGSATALPWVPDTTAAVALRLLDLDASISYTLHPKLGSNKEQESGDFMKLPPRYPSMNKGKQEIEQFRPIGFDQQDGTLLPNSNGRRGRGRGGRGGSRGGRSRGRGGRVPRGIGSSSRIQFRDDNSMLYGRAPRKNARGGRGRGRGRGRGLRTVRPRQPSELSARSIPKANLLGSFSMLSKTNHTGTTHSPESSGAEEWAFERREYVKDDENNLVSQSDESEENVEPMNEEYGEHISGYPRDNSDSRPVQMMGDGSDDNDEDAEGDEGEEDGEDYEAEDPGDEDDDVEMDGDDDVEVDEDDDIEMDEDDDIEDGDDDDGGDGAANGDEDGGGTSSYSSEYSE

SEQ ID NO: 334969 - protein, 78 aa, Zea mays
  Clone ID: MRT4577_68605C.1.pep
IYGIKPPYVHVFIGLQYHNAPVVFSPPLGLFLISPPYLVIWQTVWFCLPQVMHSNPVKGVISLYFQVISRPKVNLAFL

SEQ ID NO: 334970 - protein, 48 aa, Zea mays
  unsure (1)..(48): unsure at all Xaa locations
  Clone ID: MRT4577_68606C.1.pep
KLLEVLVVGFGKQEICLGGPGXNRNFQVLLGQFFPLILIGLVIICMPV

SEQ ID NO: 334971 - protein, 152 aa, Zea mays
  unsure (1)..(152): unsure at all Xaa locations
  Clone ID: MRT4577_68607C.1.pep
RDLKSSNLLVDKNWTVKVADFGLSRLKRETFLTTXKTGKGTPQWMAPEVLRNEPSDEKSDVYSYGVILWELVTQKIPWENLNSMQVIGAVGFMNQRLDIPSEVDPQWRSIILNCWESDPQQRPSFQELLERLRELQRRYAIQQRNAKNSVEE

SEQ ID NO: 334972 - protein, 84 aa, Zea mays
  Clone ID: MRT4577_68608C.1.pep
RHDRDTILPCVGIHAQMSHPSPPTPLDMSPVAPLENPHFNKASIGLSIYIHSVVIRQITQPCCEPTMMEMYLLLISTYLLGYDE

SEQ ID NO: 334973 - protein, 720 aa, Zea mays
  Clone ID: MRT4577_68609C.1.pep
MARKGNQSKSGPNHASPKWKNTTDGDALSTPERGAADSENPSSHVQGRSKGPEGSSEKKGRGSKRNSTNNGISSSGKKQQMDTGCDISSSEEKEIPVRGTKNRRGSQKPSRRGFGRSFLIEQTTSSGLAGNVLEKTRCIACMAASIIRASMIYLVEEGKRFIDKRMPTINTYMAFVNKGHAYVLSKIAYVYPIVRAWMLNAGRVMLLLFTVWLDCNVRGFDSLLRLGTNSLLAVLWCSTLSTFAMIGIKKMLIFMAIAASAFAFIGLGFAILLISVLAVVILWVYGSFWTTTCVMILGGVLFFLKRERITLLVACLYSMYCARCYVGWLGLLLGLNLSFFSSDILVQFLRDNADNKKFNGSSRYSERSSGRQGNIFEEFQPSADSTSQARYARASDRDPGDPSTSGPEKELTSEDEVARLLNCTDHYSALGFRRYENIDVSSLKREYKKKAMLVHPDKNMGNDKAADAFKKLQNAYEILLDSLKRKTYDDELRREDLLNYFRQSVSQKNGRNSTFQHGFSPSEGVDEGPYGLSRRIACKKCSDFHLWIYTGRAKSQARWCQDCKEFHQAKDGDGWVEQSFQPVLFGMLQKPDLPHAYVCAESYIFDVTEWFNCQGMRCPANTHKATFHVNANMAKQSSGKASTSTQRAGKAPSGVNMDGGGLNEEEFFEWFQNAVNSGMFETTFGAQGDPTSPGNGSNAKSSGSSSNNSSRKKKKGKKQW

SEQ ID NO: 334974 - protein, 441 aa, Zea mays
  unsure (1)..(441): unsure at all Xaa locations
  Clone ID: MRT4577_6860C.1.pep
MDAKDILGLPKTPFSSSQEKKSRPPKEPQRKPDGVSREVYALTGGVGMPPLMPTIEASHLKRRPAAEKEKVAWQWLPFTSSARTDNLQLYHWVRVVNGIQPTGDYQFAKYNKRADVLKYTDEEYEKYLVDPVXWSKEETDQLFELCERFDLRFIVIADRFPTARSVEDLKSRYYSASRALLIHRARSFEDVSGNPLVKDAYDAAHETERKRALSALLSQTKQQERKDAETLAEAKRIMESRAASKNVDVAVMPPNSDNAMVPVDGVSPSSSTHPSLAHPNTSANILIPNSLRTLRVYLRTHALDQMVQAVGASAGLRVIKRVDQTLQELAVNLKPKVPTKAVCIEHIELRNELLTLLNLQKQLQNKEAEVSANRESSFTEAPSTPKRSNRDIDRPFIPDTSGFTGERAGKRDHKRKSTGRFIDAPPSPPQSKRPRKLKGSD

SEQ ID NO: 334975 - protein, 66 aa, Zea mays
  Clone ID: MRT4577_68610C.1.pep
SMSKVSSPSHFHTHARTHANQGRRSKERFETLCSAVLPEACRLGGTGGGGGAGPAGAGEAAVAGGR

SEQ ID NO: 334976 - protein, 105 aa, Zea mays
  Clone ID: MRT4577_68611C.1.pep
MAAPCRDLTGLRRGLAAARLAPGRRGANKLCLAPFHHRAPSPQQQQGRRRQRQGLKVVAAISEDLPRLAAPGTGKGAPEGKRPEKVLVRAALTVRRKHKGDLKEA

SEQ ID NO: 334977 - protein, 63 aa, Zea mays
  Clone ID: MRT4577_68612C.1.pep
LGTSRPAGPNPYAREDSASIPLPGHPIASIQGTKKTLELKMEKKYMLVVYVAAAHMLLSMMAC

SEQ ID NO: 334978 - protein, 75 aa, Zea mays
  unsure (1)..(75): unsure at all Xaa locations
  Clone ID: MRT4577_68613C.1.pep
SDFTLXTXAXTRAREQXRMVGNTQTLPRTQTKVFQHHNLARQPNRFMQADQDSSSSLPTSLPPSAATSXETFNRA

SEQ ID NO: 334979 - protein, 92 aa, Zea mays
  Clone ID: MRT4577_68614C.1.pep
PSVRSCCWMEIVVILMCDVILNRCSGLDVYCYLKQIFRTENVESVKVHMLLVSVIVHRLQMFNTCGRNVHRFQMSQLDLALTDGSAQDLSIY

SEQ ID NO: 334980 - protein, 574 aa, Zea mays
  Clone ID: MRT4577_68615C.1.pep
MAAAKSGVDVETRDGGGGSFSEERFVDKLNKLNNTTASIQTLSHWCIFHRKRARRIVDTWEKHFSTATNDKKISFLFLSNDILQNSKRKGGDYVHEFWRVLPRLLKHFYENGGEEAKKLVARLIGIWDDRKVFGTRIESLKDGIFGDNPPIFDHSGNTNNSNPSSNPLNSKVGRKDSSTVLKKLTVGGMPEKIVTAYQSVLDQHFDEDTALNKCKSTVSVLEKLKKDIDDASTEGDPPASTMISDLQEQETILKHCIAQLGSVDAARISLINQLKEALTEQESKSEVLRSQLQVARAEAEHAIQLRQRFGGAVVANGTGSSSSPLLMSPQLQSLNPAPSLAPPIGAAGDEPKRTAAAMADKLASLSAPVQVLSSIFSSFVATHGASLSSMNSGSPPRDQLSGAPPGFQVEKRPRLERTVLASDMGAPPFSVQAPRLQQPVGAMPTQAAAQMNQAPGPFAPPPPPPPLPPLLPPLLQQFGQSAGGMMGMGPFGMMAGSMPPPPPMSSIMPAGFPAPSGPPPPPLPPAQTQPQQQQQQSPPQPPAPQQSAGFFQPSAGMGYFPAVQVQQSPSAQRQ

SEQ ID NO: 334981 - protein, 157 aa, Zea mays
  unsure (1)..(157): unsure at all Xaa locations
  Clone ID: MRT4577_68616C.1.pep
MAAAKSGVDVETRDGGGGSFSEERFVDKLNKLNNTTASIQTLSHWCIFHRKRARRIVDTWEKHFSTATNDKKISFLFLSNDILQNSKRKGGDYVHEFWRVLPRLLKHFYENGGEEAXKLVARLIGXWDDRKVFGTRTESLKTAFLVTPYIRSQREIL

SEQ ID NO: 334982 - protein, 84 aa, Zea mays
  Clone ID: MRT4577_68617C.1.pep
AKKLKGLGLRLWASVPLTLCCTLHTGQRLMCQYRVCPFAIQPGHLIGRAFGPELIPRTTAGQRRMPNKASKIGKRQGSSRSLAV

SEQ ID NO: 334983 - protein, 84 aa, Zea mays
  unsure (1)..(84): unsure at all Xaa locations
  Clone ID: MRT4577_68618C.1.pep
WRQQGQDVAALPHVSDRCIAGAAHEGKAERREPRGHRRGPPRWRSPSSPTSGPSTCWLAXVHNELQSTVSILFSLLFFAHASPF

SEQ ID NO: 334984 - protein, 44 aa, Zea mays
  Clone ID: MRT4577_68619C.1.pep
SRLLFSLAVDIGADTVLVDSLHRRAPTPGLPRKLVRSSHMAGTQ

SEQ ID NO: 334985 - protein, 144 aa, Zea mays
  Clone ID: MRT4577_6861C.1.pep
MDAKDILGLPKTPFSSSQEKKSRPPKEPQRKPDGVSREVYALTGGVGMPPLMPTIEASHLKRRPAAEKEKVAWQWLPFTSSARTDNLQLYHWVRVANGIQPTGDYQSAKYNKRADVLKYTDEEYEKYLVDPAWSKEETDQLFEL

SEQ ID NO: 334986 - protein, 67 aa, Zea mays
  Clone ID: MRT4577_68620C.1.pep
AHLWSWLPAPCLLGRSSCSLNVLEVDPKLSSPQLSHVSLWEHRQFRYSQPWQFFTWPFTSSHVSKGK

SEQ ID NO: 334987 - protein, 104 aa, Zea mays
  Clone ID: MRT4577_68621C.1.pep
IRSSRSPTDPAGGRPSSSCRCLLFLFSIIKMSRGGSARGGQSSLGYLFGSREPPKPTVAPASSASPVEKPFASKTDSGQQVASWVTRPTNYFHKAYCQNTCNFL

SEQ ID NO: 334988 - protein, 104 aa, Zea mays
  Clone ID: MRT4577_68622C.1.pep
TTRKKGHRRTSHQLRRARMGPTRQPAVGDCRAGATDKWVPDGHVRICRWLRLGPHDCGPDRAHRGRKKRKERKKKEKKRKEKKKRAVRSRLCITSLVPPTPCLF

SEQ ID NO: 334989 - protein, 90 aa, Zea mays
  Clone ID: MRT4577_68623C.1.pep
MAKNSYVVNVLVLLVAGYTAGLASATTTTFIVGDDQGWMTGVDYVAWVKGKTFAIGDKLGEWSALLCSLNAGFIASPCAAAAHGLARRGK

SEQ ID NO: 334990 - protein, 110 aa, Zea mays
  unsure (1)..(110): unsure at all Xaa locations
  Clone ID: MRT4577_68624C.1.pep
MAMIAAAAGAALCFLALVAEADWQGQVDRQRLRDQHCCQEVQESALDACRQVLDRQLTAGGCGGGVGPFLWRTGLRMRCFQQLQDVSRXAACAASRXMHSGYEEAMPALE

SEQ ID NO: 334991 - protein, 116 aa, Zea mays
  unsure (1)..(116): unsure at all Xaa locations
  Clone ID: MRT4577_68625C.1.pep
MTYNLTAMAANILYVVALIGLRARARKAFIIEQCSLATSSIITHGLRLVTSMGVEQPAAHDYRLQHAIAASVLRXTMXQLADELLGDLKIQSIGAEQHQQLLPGLRHLVKGNPVFY

SEQ ID NO: 334992 - protein, 363 aa, Zea mays
  Clone ID: MRT4577_68626C.1.pep
VDQASAPKYHKHPQSHPESGGSQANLRPPSMGEQSLSQPKAQPLSPFPSPPASAALPPPASASASASAASTSRTTSAAASRPKKKVTNPSPDRNPAKKHRLTFSIPGRPLSAAGEVGVAIRHLRAVDPALAAVIDAHEPPVFQCPHRPFHSLVRSILYQQLAFKAAASVYSRFLALLGGEASVAPDAVLALSPHQLRQIGVSPRKASYLHDLARKYASGILSDASIVNMDDRSLAAMLTMVKGIGAWSVHMFMIFSLARPDVLPSADLGVRKGVQMLYALEDVPRPSQMDKLCERWRPYRSVGAWYMWRLIESKVPQPAPAIPVGSLAFPSPDGQSMLQQQEQQQQQTVIQMIDPLQMLPGMG

SEQ ID NO: 334993 - protein, 284 aa, Zea mays
  Clone ID: MRT4577_68627C.1.pep
RFHPMVQEQDAPNALASDADHPAPPPRLLSKHRPRRRAAAPRPPLPPPAPPLPARRLPDLSQCHCCGFRFRTPQPGARPKRRPLCPLSSLWRVVLLCAECLSLVRCGAVCSYCLSLDNLPPEDSAVVCRRCNRYVHRSCIPAEHRTAVIQPVDVEDFLCVDCRPTVRSKNGGFNLGLNLDACIWDRTSVARENALRKAVEVKPASKRGNDAVGGSGLVGRGSDVPVLPDEELALQLHLAMNGSQRISRSGGASADPAKGKNDGVASRICNTNQDISRNKYDGSA

SEQ ID NO: 334994 - protein, 68 aa, Zea mays
  unsure (1)..(68): unsure at all Xaa locations
  Clone ID: MRT4577_68628C.1.pep
LLRWLSLGSCSVQLCPCGALPKLSSPACCVLCLNRDNRCHFMCVPVQCFVXWLFLCATSRPAGVVSCL

SEQ ID NO: 334995 - protein, 323 aa, Zea mays
  Clone ID: MRT4577_68629C.1.pep
RVGVEDEEEVDEDLDELISRIKPEDGNTEFWKRRFLGETRNYLCEEDSKEDGQDLDDELEDDDDNDDDEDDDESVKEAEEDEIDDEEVVEQTENQVGDDTKDKPAKEPNHHLQMIGVQLLKDMERTPVSSKKLKRMPEIDDDEDWFPEDPIEAFKVMREERMFDVSDMYTTADAWGWTWEREIKNKMPRKWSQEWEVELAIKIMHKVIELGGTPTIGDCAIILRAAMRAPLPSAFIPILQTTHSLGYKFGSPLYDEVVLLCLDLEEIDAAIAVVAEMETCGVKVPDETLDKVLASKRSGNSALPPPTEVINLDMRDFCCSCLT

SEQ ID NO: 334996 - protein, 115 aa, Zea mays
  Clone ID: MRT4577_6862C.1.pep
ENPNQSRLRSREGVRGNSLSQPPVTRRSIVRARGSRGGDRGHGRRTRSSRWCTSGTTPTSTMPPAPPPRWHAHSPAPASAREGDKENHRPEPDVEAEVDDVEAEIYHIEAEILRL

SEQ ID NO: 334997 - protein, 33 aa, Zea mays
  Clone ID: MRT4577_68630C.1.pep
AQQQQQLLPALSHLVMENPADYLQQQLLAANPL

SEQ ID NO: 334998 - protein, 56 aa, Zea mays
  Clone ID: MRT4577_68631C.1.pep
SIPDSSCRTTLACLLFHWPGGDRRQPGTEGRRWSLKPVPSLTLSNRIPHTLNSTPP

SEQ ID NO: 334999 - protein, 81 aa, Zea mays
  Clone ID: MRT4577_68632C.1.pep
ADDDINSCSVRHYNFATASDAASPVTARTRASFFHSSYGSVSKVGRMQEPRNPVERRATSTRGQPQSSRRRAGCSGRATER

SEQ ID NO: 335000 - protein, 105 aa, Zea mays
  unsure (1)..(105): unsure at all Xaa locations
  Clone ID: MRT4577_68633C.1.pep
TIXELWRRMHAYVSSEFGSSVFYTPKNPTGESYYFRGPNIKYQYNISPNYSKHPIQKEPPTIFIYILTKHFHINPRYRRLYYQIIVHGITFHNTSYKKDSLYTPS

SEQ ID NO: 335001 - protein, 231 aa, Zea mays
  unsure (1)..(231): unsure at all Xaa locations
  Clone ID: MRT4577_68634C.1.pep
MLGGGDEAHKFMGRPRLDRADFANMMNPGSRQIYLTFPADSTFREEDVSNYFSIYGPVHDVRIPYQQKRMFGFVTFVYPETVKLILAKGNPHFICDARVLVKPYKEKGKVPDKCRKPQQGDFSGCTTPTGGLDAXTPFDLHQLGGRMLQHSSSANELLLRRKLEEQQQAIELQSRRLMGLQLLDLKARAAAAAASPLPTPIGDAFASSQPVSTTAVESPSPPESGQQLLKL

SEQ ID NO: 335002 - protein, 42 aa, Zea mays
  Clone ID: MRT4577_68635C.1.pep
ARMDLMAIANYIYNVTGGNKPFLLTLNVWGGLLFNPPPKEKV

SEQ ID NO: 335003 - protein, 314 aa, Zea mays
  Clone ID: MRT4577_68636C.1.pep
SRPAASLLLGGGDEAHKFMARPRLDRADFASMMNPGSRQIYLTFPADSTFREEDVSNYFSIYGPVHDVRIPYQQKRMFGFVTFVYPETVKLILAKGNPHFICDARVLVKPYKEKGKVPDKYRKQQQGDFSGCTTPTGGLDARDPFDLHQLGARMLQHSNSANELLLRRKLEEQQQAAELQHAIELQSRRLMGLQLLDLKARAAATAAAASALPTPIANAFASSHPLSTMAVESPLESGEQLKLSSGFALEGKLNGGDKEESACEASPDAADSDQSGDHNLPDSPFASPTKSAALVHDSFAATEPENTASCVGSK

SEQ ID NO: 335004 - protein, 53 aa, Zea mays
  Clone ID: MRT4577_68637C.1.pep
TEVRHRPPDYPLPIRRSGNVDASRALRALLSGPSSGTSKTKVVRLYAVVAVAT

SEQ ID NO: 335005 - protein, 119 aa, Zea mays
  Clone ID: MRT4577_68638C.1.pep
MRVLSVAVALVVVVAAACLAAPRGADGAGECGATPPDTVALRLAPCASAAEDPGSAPSGSCCSAVHAIGKQSPRCLCAVMLSNTARSAGIKAEVAITIPKRCNLADRPVGYKCGDYTLP

SEQ ID NO: 335006 - protein, 105 aa, Zea mays
  Clone ID: MRT4577_68639C.1.pep
RTRGVEDPTLKRSAGALFSRVWGPHGREMVRERSDRAIDQMAHDEEVEDLGDLDGTLPDSMLPEASGVELAPPSDAGKGPLATPAPTGASEDPAPAPAPTGEDAS

SEQ ID NO: 335007 - protein, 59 aa, Zea mays
  Clone ID: MRT4577_6863C.1.pep
STPKRSNRDIDRPFIPDTSGFTGERAGKRDHKRKSTGRFIDAPPSPPQSKRPRKLKGSD

SEQ ID NO: 335008 - protein, 337 aa, Zea mays
  Clone ID: MRT4577_68640C.1.pep
MNEKASHTPDFRSSVGSDRKKLKISSNRYVSRGSRNEDVHTRHSPQDYSHSKQERSSHNMNYEYRRHKRDSSAADKHRRQDVGDTNDRQFSTMGNDSKSHRHKHEERHRSDHGNGEKEDDSKTRPRKHCSVRRGSLEVGYSDWSPDFTGTDISKGPSGEKSTSRYDDAKGSRRGSSEYYNLERHHSTAQKQSRNEHSTTRRRRHDIEDYHDEKNDGRGESRKHNRHESNDRWVATNSDVDSDVDRYQSSSCKGTRLGRKDDDPGIEVRHQRSGRSTKDDKRRKHHSGNRWHSGTEEGTSDSSGGDLSSDSWSGRSRNSENFSAHRSKRKRSRSKESG

SEQ ID NO: 335009 - protein, 119 aa, Zea mays; identical to SEQ ID NO: 335005
  Clone ID: MRT4577_68641C.1.pep

SEQ ID NO: 335010 - protein, 484 aa, Zea mays
  Clone ID: MRT4577_68642C.1.pep
SAHFTDEEIEQSYEEFYEDVHTEFLKFGELVNFKVCRNGSFHLRGNVYVHYKSLDSALLAYSSMNGRYFAGKQITCEFVAVTRWKAAICGEYMRSRYKTCSHGVACNFIHCFRNPGGDYEWADWDNHPPRYWIRKMVALFGPSVDEMNEKASHTPDFRSSVGSDRKKLKISSNRYVSRGSRNEDVHTRHSPQDYSHSKQERSSHNMNYEYRRHKRDSSAADKHRRQDVGDTNDRQFSTMGNDSKSHRHKHEERHRSDHGNGEKEDDSKTRPRKHCSVRRGSLEVGYSDWSPDFTGTDISKGPSGEKSTSRYDDAKGSRRGSSEYYNLERHHSTAQKQSRNEHSTTRRRRHDIEDYHDEKNDGRGESRKHNRHESNDRWVATNSDVDSDVDRYQSSSCKGTRLGRKDDDPGIEVRHQRSGRSTKDDKRRKHHSGNRWHSGTEEGTSDSSGGDLSSDSWSGRSRNSENFSAHRSKRKRSRSKESGY

SEQ ID NO: 335011 - protein, 143 aa, Zea mays
  Clone ID: MRT4577_68643C.1.pep
MRGLSVAVALVVVVAAACLAAPRVADGAGECGATPPDTVALRLAPCASAAEDPGSAPSGSCCSAVHAIGKQSPRCLCAVMLSNTARSAGIKAEVAITIPKRCNLADRPVGYKCGGSLQNSFLLLLLLLLFTLSLFAWSACTNR

SEQ ID NO: 335012 - protein, 67 aa, Zea mays
  unsure (1)..(67): unsure at all Xaa locations
  Clone ID: MRT4577_68644C.1.pep
DAEDPVQDFAAGEVRDGRGHXXXEQKNHXAPPECXCXXGEEGERRGGGKTDAAEDRRTERLPPPFLG

SEQ ID NO: 335013 - protein, 278 aa, Zea mays
  Clone ID: MRT4577_68645C.1.pep
RGRCNCFNGSNHEESDEEFDFLPSAHASATAAAGAGDALEALKGLVQSASVAERNLLADASRLADKCGKGCKGKAECRRAVADGLRSLGYDASVCTSRWEKAPSHPAGEHEYIDAVVGKGKEQEEEEVRLIVEVDFRSQFELARSTKAYRAALQALPPLFVGTPDRLGQIVAVVAEAARQSLKKKGLHFPPCRPPPPPRRRPSRRRVFPASSSSCSTGSVAAAAPPRRAAPSAARRSRWWCRRGARRRRRARSSCRPRRRSSRGSPPSSERGVVMDRE

SEQ ID NO: 335014 - protein, 158 aa, Zea mays
  unsure (1)..(158): unsure at all Xaa locations
  Clone ID: MRT4577_68646C.1.pep
GRPRVRENXNAKNTLTLARKQKAGREGEAENTDEATTTKKLKAAGEGTKQARAARKAGTRTNSRVEYEYLSGRAALDHEAADKKVNAAQARAQALKAAEKEPAARAEATERETAELRTREAEAGAEAESAAGEQKAPEQEPYDLNAAAERDGLLGAYP

SEQ ID NO: 335015 - protein, 205 aa, Zea mays
  unsure (1)..(205): unsure at all Xaa locations
  Clone ID: MRT4577_68647C.1.pep
PSSRLSRAMFISTKTAFGFITAAILVAAAPVEERATCNKYILISTRGSGQAQGQCPTLEPMIKTTLSSLSGGVEYDTVYAASWDQNSAAGTKDIINKITTVLASCPSTKFGLLGYSQGAYATVDALKQISTTSTTGTAIKAVFLIGDPQHTPGKKSNIDNLGGTSNANAYGIEATSGSRIPSAWDASGKVTDXLLKGDGVCSGSS

SEQ ID NO: 335016 - protein, 101 aa, Zea mays
  Clone ID: MRT4577_68648C.1.pep
MRAKWLSPHVRCGGVGGDMVAVPAAAAAAATPVQAASFSGEFELVFDRKRSSAGAGAAAEGGAVGGEKITVVVSPWRPTEEASKKQLPPKAKVVTGLAAVL

SEQ ID NO: 335017 - protein, 55 aa, Zea mays
  Clone ID: MRT4577_68649C.1.pep
HERSYNMLSSFSPSTSSIPCLIHKRSSSSFPREHTVHPLFAFSSILSFDSIELVQ

SEQ ID NO: 335018 - protein, 113 aa, Zea mays
  Clone ID: MRT4577_68650C.1.pep
AVSYNSQSIKLYQPFANSEEVIVPKAEKKPVFKIPSEDEPVAPADKAPAVNKPNADKLLPAGKSDGKECRVDKNVRKNAKKSVETYKIYIFKVLKHVHPDIGISSKAMSIMNS

SEQ ID NO: 335019 - protein, 165 aa, Zea mays
  Clone ID: MRT4577_68651C.1.pep
MTGSLRYRDVVASCHVVRCAGEMLRWLPTCTFHYVRADVTSKSRGLCLVYEQEQSDMGSWRLYEQEQRDVTKKETEKEALALASLIDDEKKLGDCQFDLSKQYYVATCVAVFGKLRRCRYLDAVQSGCTALSIFKHRDLMVVANADDSRVVLGTTSDNVREPRGG

SEQ ID NO: 335020 - protein, 148 aa, Zea mays
  Clone ID: MRT4577_68652C.1.pep
MASKRILKELKDLQKDPPTSCSAGPVGEDMFHWQATIMGPSDSPFAGGVFLVNIHFPPDYPFKPPKVSFRTKVFHPNINSNGSICLDILKEQWSPALTISKVLLSICSLLTDPNPDDPLVPEIAHMYKTDRAKYESTARSWTQKYAMG

SEQ ID NO: 335021 - protein, 148 aa, Zea mays; identical to SEQ ID NO: 335020
  Clone ID: MRT4577_68653C.1.pep

SEQ ID NO: 335022 - protein, 153 aa, Zea mays
  Clone ID: MRT4577_68654C.1.pep
MADADYDPEAAAALKAKRAFRKFSYRGVDLDQLLDLGSEELRDLVHARARRRFNRGLKRKPMGLIKKLRKSKQEARPNEKPDLVKTHLRDMIVVPEMIGSVIGVYSGKEFNQVEIKPEMVGHYLAEFSISYRPVKHGRPGIGATHSSRFIPLK

SEQ ID NO: 335023 - protein, 138 aa, Zea mays
  unsure (1)..(138): unsure at all Xaa locations
  Clone ID: MRT4577_68655C.1.pep
XXPQPQMPRDKCVEFMRGHPLVFAHSADPMDAEDWLRTVERELHTAQCDDREKVLYGPRLLRGAAQSWWESYLSTHANSDTITDSGEAATPARGRGLSLAEGNFGEKQPCSHPPTSPYEVTNVRALETCLDHLSSPER

SEQ ID NO: 335024 - protein, 66 aa, Zea mays
  Clone ID: MRT4577_68656C.1.pep
MAFANTLYRSLFSTNYLMLATVFSAGFAWEIGFNNVMDKVWDNHNRGRQWKDIRHKFIEGGDEDEE

SEQ ID NO: 335025 - protein, 95 aa, Zea mays
  Clone ID: MRT4577_68657C.1.pep
KEKKNGKGGKKNKGAIFNGKHKARSKKPFLENLRGTPPTLRIKKKNLGQGGGKKKYPTRENQKKQGPRKKTQFLLSQENLGAQVKGFYNPKEFWG

SEQ ID NO: 335026 - protein, 62 aa, Zea mays
  Clone ID: MRT4577_68658C.1.pep
WEKRCGVLVGTYVIRKRYQKPRGKFWFEHCGVNSAFSRSHLGSYPKAIRKMINRSEHTLKKR

SEQ ID NO: 335027 - protein, 66 aa, Zea mays
  Clone ID: MRT4577_68659C.1.pep
MALPAPPIRLALLLLVALPFCAAHPGPGAFNAPRHFQRPALHSGSCSPTSRVSCSHITLCFFLSGA

SEQ ID NO: 335028 - protein, 361 aa, Zea mays
  Clone ID: MRT4577_6865C.1.pep
RLGQRLSRRRFQHHGDDPSFLRLGDRLWCLLPHHSHYRNALSLPSPHSSHPSSIVVENGSTLPVTSVGASVLPGPFYLNDVLVAHHITHNLLSVRRFTTDNSCSIEFDPSGFSVKDLATRTPLARCDSSRPLYTLWPSTSGASPPPALVSTTWHRRLGHPGPDIMTKITSSLDLSCSRGHFEGLCHACQLGRHTRLPFTTSSSRAEQAFDLVHCDLWTSPILSISDYKYYLVILDDFFHFLWTFPLRLKSDTFTTLTHFFAWVSTQFHRPASLPASYWAEALHMATHLLNRLPSKAVRHPTPYFALYGTTPTYDHLRVFGCACYPNTSATAPHKLSPRSTRCLFLVYSSDHKGYQCLDLAS

SEQ ID NO: 335029 - protein, 65 aa, Zea mays
  Clone ID: MRT4577_68660C.1.pep
HSICSNETNNTTLRGASNIRRYYTYSFTVINCWVVQVTIRVYLYLHEKIPGTTGFGPHASGTMTR

SEQ ID NO: 335030 - protein, 653 aa, Zea mays
  Clone ID: MRT4577_68661C.1.pep
MSARLRVADVRAELQRRGLDVSGTKPALVRRLDAAICEAEKAVVAAAPTSVANGYDVAVDGKRNCGNNKRKRSGDGGEEGNGDTCTDVTKLEGMSYRELQGLAKARGVAANGGKKDVIQRLLSATAGPAAVADGGPLGAKEVIKGGDEEVPVKKEKMVTATKKGAAVLDQHIPDHIKVNYHVLQVGDEIYDATLNQTNVGDNNNKFYIIQVLESDAGGSFMVYNRWGRVGVRGQDKLHGPFPTRDQAIYEFEGKFHNKTNNHWSDRKNFKCYAKKYTWLEMDYGETEKEIEKGSITDQIKETKLETRIAQFISLICNISMMKQRMVEIGYNAEKLPLGKLRKATILKGYHVLKRISDVISKADRRHLEQLTGEFYTVIPHDFGFRKMREFIIDTPQKLKAKLEMVEALGEIEIATKLLEDDSSDQDDPLYARYKQLHCDFTPLEADSDEYSMIKSYLRNTHGKTHSGYTVDIVQIFKVSRHGETERFQKFASTRNRMLLWHGSRLSNWAGILSQGLRIAPPEAPVTGYMFGKGVYFADMFSKSANYCYASEACRSGVLLLCEVALGDMNELLNADYDANNLPKGKLSTKGVGQTAPNMVESKVADDGVVVPLGEPKQEPSKRGGLLYNEYIVYNVDQIRMRYVLHVNFNFKRR

SEQ ID NO: 335031 - protein, 124 aa, Zea mays
  unsure (1)..(124): unsure at all Xaa locations
  Clone ID: MRT4577_68662C.1.pep
MALCTNQACMCHLHLQNATAYHPFSEGNAGNARVXARLNDYVRVHIQQRKGPKSLTTLQAHNNECSYXEILKDIKKEVCCNATVTPNTXLAQVIQLQGDHRKNGSRFIPPSGIAKNEHIKIHAF

SEQ ID NO: 335032 - protein, 126 aa, Zea mays
  Clone ID: MRT4577_68663C.1.pep
SSQPACALIPIPIDSRQPEPEEARGGAVLELATRRPLSLSRLRSILHDCEDRTRSARDRIDQGARTTARAAVGSFSAGGGTTRRAAAQVVLWSALLRWCRRDQSLLHVCTWCFKFLPTKSLVQTSN

SEQ ID NO: 335033 - protein, 80 aa, Zea mays
  Clone ID: MRT4577_68664C.1.pep
KIIRGPKISEKCVSPPSPGDKVCRYVVPGPTGPFGYARGFPGRFPFSPTIMDGWFHPLFPNLTILLRRQLASKKAGRPWK

SEQ ID NO: 335034 - protein, 48 aa, Zea mays
  Clone ID: MRT4577_68665C.1.pep
KDYATKAMAKKKELAGLQCTQWFLDGKTLLNTDRKNSINLQYRLADKP

SEQ ID NO: 335035 - protein, 122 aa, Zea mays
  unsure (1)..(122): unsure at all Xaa locations
  Clone ID: MRT4577_68666C.1.pep
AEMGLTFTKLFMRLFTQKDMRILMVGLDDIGKTTILYKLKLGEIETTIHTIGFNGETDEYKNISFTVWDDGGQDKIPPLXRHYFQNTQGLICVVYSYDRERVGDDRDDLHRMLNDDELRDAE

SEQ ID NO: 335036 - protein, 104 aa, Zea mays
  Clone ID: MRT4577_68667C.1.pep
TLQLLVVSCFRIELKDVSVFLTPLWLHVFHVMVQHRQLVLLSDTFALCQIEVARHQYVVAHHTVCGVDGSFVFVATAWALRTVFILLPFGAWCSSSHARPGHDQ

SEQ ID NO: 335037 - protein, 74 aa, Zea mays
  unsure (1)..(74): unsure at all Xaa locations
  Clone ID: MRT4577_68668C.1.pep
GCPXLPGGLPVSLXGLGLFGFVVFCCLVPRVVSCVRLLCPVLVSPVCGSVFFLGPPGVWRVLFFGCVWCGLLPF

SEQ ID NO: 335038 - protein, 61 aa, Zea mays
  Clone ID: MRT4577_68669C.1.pep
GVQKIETGRGLTFRDGTYNGTVPSLDRKKKVQLYTLTAANSGREEWLPEPNRLLYFLKSVN

SEQ ID NO: 335039 - protein, 259 aa, Zea mays
  unsure (1)..(259): unsure at all Xaa locations
  Clone ID: MRT4577_6866C.1.pep
SEDWLRRTLKKHIWVLXSLSRSIAXRLRSRINWLKEGXRSILPLFHAQARLRKKKNFIGSLSTSEGLILTSHEDKADDLFHFYDALLGTALGRENSLNLDALGMPSFNLNELDVPFSEEEVWGTVKSMPSDKAPGPDGFTGRFYKVCWVTIKDDVMAAISCVWARKFRNMGLLNSAFITLLPKVEGAAQVKDFRPISLVHSFAKLVTKMMANRLARHLNDMVSPNQTTFIKKRFILDNFMLVQHTARFLHRQRQASCRI

SEQ ID NO: 335040 - protein, 114 aa, Zea mays
  unsure (1)..(114): unsure at all Xaa locations
  Clone ID: MRT4577_68670C.1.pep
SVFAQPFRPFHSSIPIQMSVLGMSTASDVTKCKEYIVLATPLAKDQMEQFKKAHARFLQATSQVVARLQQVDLAEIIAHEQTTDNHMTSTTTSPSIVDLEKLLHAQALXIQNVS

SEQ ID NO: 335041 - protein, 70 aa, Zea mays
  Clone ID: MRT4577_68671C.1.pep
MSHSHSTKTSWPEVEGMPAEVAKRKIQEDRPDIQVILVPVDSAVTDDFNTKRVRVFFDKAGNVAQVPKIG

SEQ ID NO: 335042 - protein, 162 aa, Zea mays
  unsure (1)..(162): unsure at all Xaa locations
  Clone ID: MRT4577_68672C.1.pep
FPDXSRLSLEAKDLICRLLCDVDHRIGSGGADQIKAHPWFRGVEWDKLYEMEAAFKPLVNDELDTQNFMKFPDLNPAPARASSGASRKMMLNSKDLSFVGYTYKNFEAVKGLHQFADLQRSSSFTRHSAGSPSDTADMDASMEANGTDTHMRTGSAGDPMAP

SEQ ID NO: 335043 - protein, 125 aa, Zea mays
  Clone ID: MRT4577_68673C.1.pep
MKLSDFGLCKPIDCSKLSTLNENEPMTDENLRESMDIDHSLSDTANGRRWRSPNEQLQHWQNNRRKLAFSTVGTPDYIAPEVLLKKGYGLECDWWTLGAIMYEMLAGYPPFYSDDPLVTCQKIVH

SEQ ID NO: 335044 - protein, 451 aa, Zea mays
  unsure (1)..(451): unsure at all Xaa locations
  Clone ID: MRT4577_68674C.1.pep
GRLIEVSDLQPGDWRRLILEQQLASSQVPREEQINLIKDLERKETEYMRLKRHRICVDDFDLLTIIGKGAYGQVQLCREKSTGNIYAMKKLKKTDMLVRGQFKSLRQVKICLIKGAEEALXRWRSPNEQLQHWQNNRRKLAFSTVGTPDYIAPEVLLKKGYGLECDWWSLGAIMYEMLVGYPPFYSDDPLVTCQKIVHWRSYLNFPDNPRLSLEAKDLICRLLCDVDHRIGSGGADQIKAHPWFRGVEWDKLYEMEAAFKPLVNDELDTQNFMKFPDLNPAPARASSGASRKMMLNSKDLSFVGYTYKNFEAVKGLHQFAGSSCHNILNTESFSDPHFLFSAIFREVPHLQGTLLAPHLIQQIWTPQWKLTGPTHTCALVQLATLWRHNLPCCFREVPCPTPASCMHLDNMATSEETWLWTCIYSGLVPFYYLASTFVVVQTRGICVVCFR

SEQ ID NO: 335045 - protein, 48 aa, Zea mays
  Clone ID: MRT4577_68675C.1.pep
ENGIFSSIRRGVKIFIRLFEILLELILLIALGFNVEVSKVDVSMFYKI

SEQ ID NO: 335046 - protein, 290 aa, Zea mays
  Clone ID: MRT4577_68676C.1.pep
VKFISRAPARRVLQTYNGTMMPNVELPFRLNWASAGEKRDDTPDYTIFVGDLAADVTDYVLQETFRAHYPSVKGAKVVTDKLTMRTKGYGFVKFGDPNEQARAMTEMNGMLCSSRPMRIGPAANKKATVVQEKVPSAQGVQSDNDPNNTTIFVGGLDPNVTEDMLKQVFTPYGDVVHVKIPVGKRCGFVQYANRSSAEEALVILQGTLVGGQNVRLSWGRSPSNKQVQPQQDSNQWAGANAGYYGYGQGYEAYGYPQSQDPNMYNYGAGAYAGYPNYQQQPVAQQPPQQQ

SEQ ID NO: 335047 - protein, 57 aa, Zea mays
  unsure (1)..(57): unsure at all Xaa locations
  Clone ID: MRT4577_68677C.1.pep
MHHHQQLLAAQGSHXPWPLMMAQNXLPAMGGLYQYQYQLPSYRTNPCGVSAAIPPYY

SEQ ID NO: 335048 - protein, 115 aa, Zea mays
  Clone ID: MRT4577_68678C.1.pep
MRGRRRRPWLPASARLFCSSATTPAGCAENATSRRRSSSGGISIGSSPRATGRTDGTLLALPGKGEENSAKNQKNGKLPPRFNLVTHLKLLARDASPNVNRSYLINIWPPGTWWG

SEQ ID NO: 335049 - protein, 440 aa, Zea mays
  unsure (1)..(440): unsure at all Xaa locations
  Clone ID: MRT4577_68679C.1.pep
MMPQQQQPGMAPPPPQAAPGAPPHWGGIPPPMAPQHQYAPPPTHQAPPPPQMWGQAPPPPPPPQAAYGQAPPPPQAAYGQALPPPQAAYGQAPPPPQAAYYGAVPAPAAVAAAPVGPSEVRTLWIGDLQYWMDDNYIYGCFASTGEVQNVKLIRDKHTGQLQGYGFIEFISRAAAERVLQTYNGTMMPNVELPFRLNWASAGEKRDDTPDYTIFVGDLAADVTDYVLQETFRAHYPSVKGAKVVTDKLTMRTKGYGFVKFGDPNEQARAMTEMNGMLCSSRPMRIGPAANKKATVVQEKGGFWNTRKTAVVLMLNTNRLFVXGLELRCVSFVIHSLIXPGLLVKLEFNTFTHVSLLLYAFRSSAEEALVILQGTLVGGQNVRLSWGRSPSNKQVQPQQDSNQWAGANAGYYGYGQGYEAYGYPQSQDPNMYNYGAGAYAG

SEQ ID NO: 335050 - protein, 83 aa, Zea mays
  Clone ID: MRT4577_6867C.1.pep
GCILLSRRPFVLLKRKTFSCLYCISIMNIYIRTSLFFMWLHNIFGDIKRATNHDMTTVVPPWRNHLDVNSLYLIYILLVDAMN

SEQ ID NO: 335051 - protein, 71 aa, Zea mays
  Clone ID: MRT4577_68680C.1.pep
VLKFYYYRTTCLMSQILKYRKVTKGIQARIQFLFPHLLNSRPQDPSCCKSPKPKDSLQFRLIKGERSRQRG

SEQ ID NO: 335052 - protein, 867 aa, Zea mays
  Clone ID: MRT4577_68681C.1.pep
MSEEKKVAAEMKLSLSEEMHLGFLESIAKTNTKKITREILEGLSEDTGDSDSYDADSGGEDSEDRPWRPSHSVFGKSTIGQSHLENKRGRYFRDMSFVRADVREKTVPTPEDDEAVIFRSFLKAGLRFPISRFVVEVLKIYQVRQDIKDVIMCPIWQRFRLRKPKVEMDEVAEECQRAFGVVCSFIGTRDLIQEHIAFRVWPLADNWEMPKETVKETNEGGLVRLKYTFKYGDKFVEPDDDWLKSIETVSDELLGVYSKAEDTALSAAFGGRKKKRLNRVFDAIGFVYPDYHYPVRGQKRKGTASAKETASAAPSEPAPKRKRVKVLTHRSRYIELATVPEFGSETSSAPEIKESTLLPGAEELAEVPTTKELEELKTLLPETKELAEAPSTEKMEEAKASTEGAKISEILSPLEEIEAAKIKKGPTVTPKRKRMVNVLDVLETIKLPSTTPKKTAETSEALAEVSVAKALKQQTGVETGPSEPTKVIPLEAEEAKIAKATEEMKVSEPTLVEEIDIAAPEASSKICDFIVRHASGKKLSEEEVFEANHYAKELKYPKGTLVFNGTNEEDFLYRLPDNKELSVCREMARSMGFPKLEAGLCAITKEDLADSLAYNSLKGLILSNALRAQKNAEDESYEIAFNNLRSEVIKLRNEALEKDKILLTLVDKVKKDEAASKAQAEAQKHEIKDLQKQLARAKEERILEETKRELSDQLANHLEISVKELRASQRKCYVKSIECVKKIKSSFASVGAFSSEENFSRGNPEGPMEWISHEAEAFEEILSSRGDICAFSGARGIAAVLERKGCEHVKSLAQSEATLSSEDIKDPSPEASMVGGKFFTDIWDNDGRELAQEIIQIVKKASTMLEK

SEQ ID NO: 335053 - protein, 178 aa, Zea mays
  unsure (1)..(178): unsure at all Xaa locations
  Clone ID: MRT4577_68682C.1.pep
CASSLPALGLVSAGGVVLTXISACAXPYXPILSCXDAAXNSLXREVXXLXSKPXWSPAYFYLWDEPLGVALFDLFCXISYELRSYXPDVRILTTYYCGPRGSVLAPSTFEAFAXVPNVLRPXPPIFCSREWVLDXRDDLVXDIVAVLRPDLGEGWWPYVCLGPSDALPNWPLGMRGTH

SEQ ID NO: 335054 - protein, 99 aa, Zea mays
  Clone ID: MRT4577_68683C.1.pep
LETNLLLSVYDMKFHGPACSPCANSAAQCNHDVIQPSADCHIVHGFMFTFGRLGFHSFIFRGNYVNAGNFQVDQFRVLDYFQKCSILKWNMITYYLCWN

SEQ ID NO: 335055 - protein, 89 aa, Zea mays
  Clone ID: MRT4577_68684C.1.pep
RWSPPPSRRPRPARRLPRRSSSSRVGDPAWLGTLPRDHHRLRRSLPLLIHRPPLRLLHRVHLDKGHHCWVGMRNIGFGLGLLLLFGWRA

SEQ ID NO: 335056 - protein, 31 aa, Zea mays
  Clone ID: MRT4577_68685C.1.pep
PTLTSNSDSGQTFTLCFALRGGLKYFVKPLL

SEQ ID NO: 335057 - protein, 92 aa, Zea mays
  Clone ID: MRT4577_68686C.1.pep
MAARSSSMVAEDDYETDQKKQAAADVLFHYSQFVMVCIGEDVRPTDLRLHLMKEVSGMSTSLKEPQQAAASPASSGEPSSSGTMKGDKNEIS

SEQ ID NO: 335058 - protein, 81 aa, Zea mays
  Clone ID: MRT4577_68687C.1.pep
TKKVIGQKKNGGGQHTRVSLGFTRVPQHGDELSRHLLAPPWAYKLNPSKRFSPLAMYMTGKNLGEPFGFIGKKNCQRVFFS

SEQ ID NO: 335059 - protein, 70 aa, Zea mays
  Clone ID: MRT4577_68688C.1.pep
MAARSSSMVAEDDYETDQKKQAAADVLFHYSQFVMVCIGEDVRPTDLRLHVMKEVAGMSTCLKEPEQAAG

SEQ ID NO: 335060 - protein, 181 aa, Zea mays
  Clone ID: MRT4577_68689C.1.pep
MREGMRERDRGGSPDASGPPPFRGPAYKTKLCALWRGRGGCPRPNCGFAHGEAELRRPPPRASFQPRPRPGRRDYRDHEFRLRPDRRHSPHGRYSPERDIRRRSFHDKRPSSEDRGSSHSRSPIRKSERKHSKSPDGGETDSSVSVRSPDNEDRGKDERYLSSDEKNGHEDHLKQMHLDME

SEQ ID NO: 335061 - protein, 123 aa, Zea mays
  Clone ID: MRT4577_6868C.1.pep
MAAPKGATLALAVLLAATVVAPPAAVRAAMSCSTVYSTLMPCLPFVQMGGAMPPQPCCGGIRSLLAQANNTPDRRTICGCLKNVANGANGSDTYINRAAALPSKCGVSLPYKISTNVNCNTIN

SEQ ID NO: 335062 - protein, 81 aa, Zea mays
  Clone ID: MRT4577_68690C.1.pep
FGGPFFLAFGDAPLLRVNFGSKKLMGFYVFWGKCFKMGWVENIKKKFWGKKFPGCPWGVKKPRFLNKIFFFWWGLGTRFLF

SEQ ID NO: 335063 - protein, 151 aa, Zea mays
  unsure (1)..(151): unsure at all Xaa locations
  Clone ID: MRT4577_68691C.1.pep
MPNMEPEEPVGGFDTVGQLILLTRMPMLTVLGKEEGARADVTDSIRMHLHVAXVGCTFSLAPRAHYYRRAMLHGGAKDRPTRTKTVVFHASCTENYELESRSQSVRGYEMILRSIGYHIFRRSYADNDAHVTIIYSTWIMAVAWLLTRFIY

SEQ ID NO: 335064 - protein, 56 aa, Zea mays
  Clone ID: MRT4577_68692C.1.pep
MLIPFVWSRSFHATDHRCSKHKDYYKILGVPKDASQDDIKKAFHSLAKKYHPDTNR

SEQ ID NO: 335065 - protein, 100 aa, Zea mays
  Clone ID: MRT4577_68693C.1.pep
GWVVFFFFFFPFQTMLASLGMLGWPAFPKNKWAKKNGNLGPDIPHFFGNGHGSKQRGGCTKGGNAFYKIVKTNPETKGAQFWVPRLKTTGPTKLMRGKGG

SEQ ID NO: 335066 - protein, 82 aa, Zea mays
  Clone ID: MRT4577_68694C.1.pep
SYLPIFLTSRYIAGKQCASLVGTSSLLQPSAYSTSFLAHKMEDDNTSPNNLVHLRGLHLQNPRIHRRQPGRPDSARDRARSQ

SEQ ID NO: 335067 - protein, 71 aa, Zea mays
  Clone ID: MRT4577_68695C.1.pep
VRPTLRCSPPRFAPVCRTRARFGCCRSSYWYCRPPGSSSMLTGPSLVSTWCRPSSTCPRRCVPLWFKFHWS

SEQ ID NO: 335068 - protein, 182 aa, Zea mays
  Clone ID: MRT4577_68696C.1.pep
MAATAVTTPVGTGGAAAARSRFAAACGALSQYVKAAESERMHARPPAPLRPLPLMPGADLAASPADLDLPQAAPAPAPAQLTIVYGGRVLVLADVPADKAAGLLRLAAGAAAERAETEAIGAKRRDHVSGSASAGADLPVARKASLQRFMEKRKARVAAVRTEPYRRPDVSDSCPDNLKLAL

SEQ ID NO: 335069 - protein, 45 aa, Zea mays
  Clone ID: MRT4577_68697C.1.pep
YDFEDNTNHKHMLSSCSSTSRSSPAPEISIDHGSKLQPATKWRPL

SEQ ID NO: 335070 - protein, 99 aa, Zea mays
  unsure (1)..(99): unsure at all Xaa locations
  Clone ID: MRT4577_68698C.1.pep
GXPRRQSMAYLILSGLFAISGIDLCSRAWPCTRKKGRSQGPLSLFWIMMHPIVLLVQRPAWLKNLCCLAWPLVFLYVKNSGDWARXXXVKKKKKKXTRA

SEQ ID NO: 335071 - protein, 143 aa, Zea mays
  Clone ID: MRT4577_68699C.1.pep
SQGTTIDRSMLPLPYLKVGYLTAPPANNSIAPHGDWEVSQFILNHEGLQQADASDQPPSQSPGHLDRGRKPVRINVADIVSVSACADLTLPSGAGLCIETIHGPTFLVAHSWEALDGWLDAIRLVYTIFARGKSDVLAGIITG

SEQ ID NO: 335072 - protein, 122 aa, Zea mays
  Clone ID: MRT4577_6869C.1.pep
ASYALGCGFKPLQLHIFKKKKKKKKKKKKKKKKKKKKKKKKKKKKKKKKKKKTKKQKKKETEAQKKRKTKRGGRGKKNGAPRGPAPPQTGGPPGAPGPGKNTAKPRPPRGGAPPYPPRGGAL

SEQ ID NO: 335073 - protein, 121 aa, Zea mays
  Clone ID: MRT4577_686C.1.pep
LHQQFGFLGGFFFLLARFLVGRARNRRGGGAGQLKAAQRSSLQQKLRSLSGGFLSSPFLISPSPRLLCASLFRGGERIGDPHPLAFLLFSIAALLPTPPGAWEKRRPVGARFDLLRLPSTC

SEQ ID NO: 335074 - protein, 144 aa, Zea mays
  unsure (1)..(144): unsure at all Xaa locations
  Clone ID: MRT4577_68700C.1.pep
MDRFITQTEGRRDRKHIPSVSREFAGASAARASPGMERSIAKSEVRWDRFVETGKGEMVQDPLTTETGGKMEHDLLMYSPRSAARATATGIPIGDQGVAVLRXPLIVGAGPAGLACXAMLTMGLVPYVIPERDMCIASTWHHRT

SEQ ID NO: 335075 - protein, 39 aa, Zea mays
  Clone ID: MRT4577_68701C.1.pep
MSAGVVLNGQMLPLTSSLPLSLLLLLQLSCSCTSWGWST

SEQ ID NO: 335076 - protein, 53 aa, Zea mays
  Clone ID: MRT4577_68702C.1.pep
MVWSTVIHPIPFSLPQQVAHSWEALDGWLDAIRLVYTIFARGKSDVLAGIITG

SEQ ID NO: 335077 - protein, 61 aa, Zea mays
  Clone ID: MRT4577_68703C.1.pep
ALPHDGLFFRWKAPWVGACNFYNLLLPMGSLLRVTAPRAHLCTFQLSFTGVRNPLNIGMHP

SEQ ID NO: 335078 - protein, 49 aa, Zea mays
  Clone ID: MRT4577_68704C.1.pep
TLPPTPFSITPLPTSISSYEKSITHYPHIYTHNSTIPHYSIHTHKLIKL

SEQ ID NO: 335079 - protein, 93 aa, Zea mays
  Clone ID: MRT4577_68705C.1.pep
GTAGITQVRLNSIFRKRALSELLGVLHGAVSGLRHRRPAPGAHVEGISPISLPSWALVNGGATGLPSLAVFARNGLSRALTVFVVSLVQVMCS

SEQ ID NO: 335080 - protein, 74 aa, Zea mays
  Clone ID: MRT4577_68706C.1.pep
VGGVIFFFFFFFFFFFFFFFFFFLLVGQGVKGPPNPNLGSLLGFGAMQKRARKAQRTLEPQSGLKATDFNYKCK

SEQ ID NO: 335081 - protein, 87 aa, Zea mays
  Clone ID: MRT4577_68707C.1.pep
RNSCNNFIYGGCRGNKNSYRSEEACMLRCFRQQENPPLPLGSKVVVLAGLFVMVLILFLGASMVYLIRVARRNQERALRTVWSSGDD

SEQ ID NO: 335082 - protein, 37 aa, Zea mays
  Clone ID: MRT4577_68708C.1.pep
RARSRNVFKFGSILVTPVGSPCHVSQYIIGSWHASAD

SEQ ID NO: 335083 - protein, 157 aa, Zea mays
  Clone ID: MRT4577_68709C.1.pep
MRYVAATPTMPSLVAESAAEPPLVDSYLELLRRGGGGGGIAAATEGCVQERELPLIDLTCLQGSAGEAARTTCADAMARAASEWGFFQVTGHGVSRALLERLRAEQARMFRLPFETKAKAGLLNGFYRWGAPTATSLRHLSWSEAFHVPLASISGTA

SEQ ID NO: 335084 - protein, 123 aa, Zea mays; identical to SEQ ID NO: 187309
  Clone ID: MRT4577_6870C.1.pep

SEQ ID NO: 335085 - protein, 55 aa, Zea mays
  Clone ID: MRT4577_68710C.1.pep
VKMYCEPVFIMDNSDGPYVGNEPNLQSSIDDAEHTEKRCHTKQHIPFLCTACLSN

SEQ ID NO: 335086 - protein, 55 aa, Zea mays
  Clone ID: MRT4577_68711C.1.pep
VRKIVYRWVYMPSLCLIVFTEAMIVLVSCGAECLIVGWICYEEIIVRARSKGPVI

SEQ ID NO: 335087 - protein, 49 aa, Zea mays
  Clone ID: MRT4577_68712C.1.pep
LRSRSTTLGAEAESVACCTCTEGVYVACTLALTFRMQTPAAYTHARTHN

SEQ ID NO: 335088 - protein, 231 aa, Zea mays
  unsure (1)..(231): unsure at all Xaa locations
  Clone ID: MRT4577_68713C.1.pep
AKYLGPVSAQTPSYLTGEFPGDYGWDTAGLSADPEAFAVRVARNRTLDLEVIHWRXAMLRALGCVTPEVLQSWVRVDFREPVWXFKARAQIFSEGGLDYLGNPNPVHAQSILAVLGSQVVLMGLVEGFRVNGHDGVGDGDGLYPGGQYFDPXGLADDPVTFAELKVKEIKNGRLVMFSMFGFFVQAIVTGKGPLENLLDDPVANNAWVYATKFAPGSCELAGHVRRAHILD

SEQ ID NO: 335089 - protein, 272 aa, Zea mays
  Clone ID: MRT4577_68714C.1.pep
MASTIMAATSRIVAAKTPFLGQGRAAAAAANASPLRDVAAAAAGGRITMGNDLWYGPDRVKYLGPFSAQTPSYLTGEFPGDYGWDTAGLSADPEAFARNRALEVIHGRWAMLGALGCITPEVLEKWVRVDFKEPVWFKAGAQIFSEGGLDYLGNPNLVHAQSILAVLGFQVILMGLVEGFRINGLDGVGEGNNLYPGGQYFDPLGLADDPVTFAELKVKEIKNGRLAMFSMFGFFVQAIVTGKGPLENLLDHLDDPVANNAWVYATKFAPGS

SEQ ID NO: 335090 - protein, 76 aa, Zea mays
  Clone ID: MRT4577_68715C.1.pep
WVFLNRVSHLYDPWCELQIWAGNGILRLTKEQPCGDEPSRLLGLPGRLCQEASENCGWSICYTNGTLCKHGGRWKI

SEQ ID NO: 335091 - protein, 90 aa, Zea mays
  unsure (1)..(90): unsure at all Xaa locations
  Clone ID: MRT4577_68716C.1.pep
NIIQPFVLGGLKGGKIVFFLFFCRVFFVPLVFLLIFSIDVAFLALCWFFFLVFLAPLFFCVFXFXSPXGGKTGYFLKIYKKKKFKKKNFX

SEQ ID NO: 335092 - protein, 113 aa, Zea mays
  Clone ID: MRT4577_68717C.1.pep
SEIYLIRANLSQADLVKANLSRTVLYEANLDGADLKGTRLFYGTWDQASPRSRNHIPNYETGEYTGAVVENANFSKTKNMSEEQRCYCCAWGGTLTRKTIPGGCEGIENRLDR

SEQ ID NO: 335093 - protein, 103 aa, Zea mays
  unsure (1)..(103): unsure at all Xaa locations
  Clone ID: MRT4577_68718C.1.pep
PPKTSNFRRLSKPPKIKHTFWRFYRDXRKKPIFFCSQPKFIVQSPFPDMYAAGILYLRWKGKGSEKDRRERDQASDEDEAATCNPCILDCLFLRYAVVGFLAS

SEQ ID NO: 335094 - protein, 77 aa, Zea mays
  Clone ID: MRT4577_68719C.1.pep
TKTSTCPMLEAYVRACFTFECHKSEHLQHLAIRISMWSNVMMDFIERLPKVDYKLMILNLDWSRTSQGRWQIIDSQP

SEQ ID NO: 335095 - protein, 123 aa, Zea mays; identical to SEQ ID NO: 187309
  Clone ID: MRT4577_6871C.1.pep

SEQ ID NO: 335096 - protein, 164 aa, Zea mays
  unsure (1)..(164): unsure at all Xaa locations
  Clone ID: MRT4577_68720C.1.pep
MGDFWVRGGGYPVPPGGDPPLFRGPFRPMVGGPPPPKIGGEPPSKLKKGXGGKGPPSPREGPWGGLSPPPPPEPGVGPPPPXFPPPAFGVSPPPPXRPGGLVLLKGPFSQXPPPIKPLGLNGGPPPRGKEKTPSFLGGLFVPPPVFFCKNWGPLGGAAFLVQTP

SEQ ID NO: 335097 - protein, 119 aa, Zea mays
  unsure (1)..(119): unsure at all Xaa locations
  Clone ID: MRT4577_68721C.1.pep
TTRPRTPRRTRGFGQVCHDQLPIDRHSGRCKSFGFVQFARHQDAHAVQSLSGQLDIAGRVIKVSPVTQQPCIQLSGSTGDLGHDKSXCVAQNASSRARRMQKLRRNGITTTLTGGKGSA

SEQ ID NO: 335098 - protein, 56 aa, Zea mays
  Clone ID: MRT4577_68722C.1.pep
RALSVSEERASLLQCSSSSHWLLRSSKSPLYKTRLSLLRENNVRGGLAAGQLDENT

SEQ ID NO: 335099 - protein, 54 aa, Zea mays
  Clone ID: MRT4577_68723C.1.pep
RMHCVDFYIHICTPLQWRGRDMCNTLWMNGPGCCLGVIYPIHPWIIKKFVDCCF

SEQ ID NO: 335100 - protein, 433 aa, Zea mays
  Clone ID: MRT4577_68724C.1.pep
MQAQRSPAMAGGGGAATAVAAGAAVGMPSQATLPVRRRCEGTAMGAITLDLRPGLGVGPFTLGMPISDAFTQIERQPNIYDVVHVKYFDEEPLKLDFVISFPDHGFHLRFDPWSQRLRLVEIYDVKRLQLRYATSLIGGPSTLATFAAVYALFGPTFPGIYDKERGIYTLFYPGLSFAFPIPSQYTNLFTNGEVADLPLEFPDGTTPVTCRVCIYDSSTDSKVGVGSLMDKAMVPALPAGSLYMEEVHAKLGEELWFTIGGQHIPFGASPQDVWTDLGRPCGIHQKQVDQMVIHSASEARPRTTLCGDYFYNYFSRGIDILFNGQTHRIKKFVLHTNFPGHSDFNSYKKCNFVIYDAEAEGTCQPNNASKNCITPSTKWEQVKEILGDCGRAAIQTQGSMNNPFGSTFVYGYQNIAFEVMKNGYIATVTLFQS

SEQ ID NO: 335101 - protein, 50 aa, Zea mays
  Clone ID: MRT4577_68725C.1.pep
EILGDCGRAAIQTQGSMNNPFGSTFVYGYQNIAFEVMKNGYIATVTLFQS

SEQ ID NO: 335102 - protein, 56 aa, Zea mays
  Clone ID: MRT4577_68726C.1.pep
SLILSGGRPGVLRDHPKAFLFTQAVRIATKAFLYERFIFKVTHLMGDLRFGGFRYP

SEQ ID NO: 335103 - protein, 37 aa, Zea mays
  Clone ID: MRT4577_68727C.1.pep
AYGTFCVACINTDCTPHHIGSGGYMSIALRARGRQRP

SEQ ID NO: 335104 - protein, 55 aa, Zea mays
  Clone ID: MRT4577_68728C.1.pep
KKKKGLLIKADSKTNFNYSEHIYTPYFFKIAYSSPNNMGVPLSELFDHSSLTRPF

SEQ ID NO: 335105 - protein, 131 aa, Zea mays
  Clone ID: MRT4577_68729C.1.pep
QANDELQKNIYTLTEQSQRDKAEMQDELKAIQEDKDAVLTQLKQSETSVQNLEDELTRLKEELSVQLENNSTLDKQFAEARSNLHAEISDLHTEKDTSLRELQTSQACVRNLEIVVEKQTENISTLQQAND

SEQ ID NO: 335106 - protein, 39 aa, Zea mays
  Clone ID: MRT4577_6872C.1.pep
RVHAHDAFQDVAQPRAEPLEHLLRLGVRRPLVGVALADV

SEQ ID NO: 335107 - protein, 58 aa, Zea mays
  Clone ID: MRT4577_68730C.1.pep
FHNIGYKTKPKNICHALGPYNLLIWRGLFPWRELGKGAVPGQQRGGDFGPRFHRFGKG

SEQ ID NO: 335108 - protein, 98 aa, Zea mays
  Clone ID: MRT4577_68731C.1.pep
MDAVASSRNTVALAAPAAVPLEAHAQNPSIAIANPPSPEMEATAEALTQEEVLRRRRRRAARLAGVYRRLYWAMAEEVRARHRQYVWDLARSPLEAEQ

SEQ ID NO: 335109 - protein, 64 aa, Zea mays
  unsure (1)..(64): unsure at all Xaa locations
  Clone ID: MRT4577_68732C.1.pep
SALCFSWVVAAASSSGGRCSCFRRSRFGFFAGGRGLSVXGXGGSRRPRGSRKRILAYEAAVYVK

SEQ ID NO: 335110 - protein, 59 aa, Zea mays
  Clone ID: MRT4577_68733C.1.pep
PVTQQPLTRKYINYIFFLQQAALDEALANDTTLPFPPLATDRHPPLAASWNPSSNRHPS

SEQ ID NO: 335111 - protein, 52 aa, Zea mays
  Clone ID: MRT4577_68734C.1.pep
SLVWYPFIVIFLYHPYQIYSLFIFDADFYFFCTGILFLRHTSCYYRSIIQLH

SEQ ID NO: 335112 - protein, 31 aa, Zea mays
  Clone ID: MRT4577_68735C.1.pep
RVGQLVAARAVKTMLISYTYIYMCAIGYPPF

SEQ ID NO: 335113 - protein, 58 aa, Zea mays
  Clone ID: MRT4577_68736C.1.pep
LMLIDLTISSDLDSKSVNSMLIHQNKVIINLIMKPLPYTRIPVRLWNRAKKKKDARVG

SEQ ID NO: 335114 - protein, 78 aa, Zea mays
  Clone ID: MRT4577_68737C.1.pep
FEHRLSQIWDTMTPCTPESAKAAYPYPYLNYTLRIIQSTVQNMFFVTIRVNYCTLHLYDHKKHRFASFYIVDCTGYRV

SEQ ID NO: 335115 - protein, 40 aa, Zea mays
  Clone ID: MRT4577_68738C.1.pep
ETFDSSFRCHSKEVGEVRITDYDVIPVKGTKNTIAVFIIL

SEQ ID NO: 335116 - protein, 166 aa, Zea mays
  Clone ID: MRT4577_68739C.1.pep
KKTKGLGPNAATTMGIKSSHFFWGAQGPFIYQPPRGVQGCTPTFWVIGSEKTSFEFLTTPKSTNAPFFMKKPTFRSLSAKGGPHNLHYHTQRHNRGWDWEPYSQTAGLVLCKGVFEQKNSNEGCHHGRHPPGRFPLKNILNLSTGPEKNPLEAAMLLPILSNIRVW

SEQ ID NO: 335117 - protein, 582 aa, Zea mays
  Clone ID: MRT4577_6873C.1.pep
MEALPADDQRPFEDLVMREEKEVMRQWNEQRDKEEAELLHKLSERSKEAADKYLSHFTVDRHQKIVRQGEIDMESLLPPLQGPAPQPLGTRQALDATGPSEHHLRQSGYTADRPTYFAGPSDQMQARTQNTQVAPYMAGPSGYNPEHFGPITDRPVHHAGPSGYVADRPPSYAGPSGYDMNRPTYYAGPSDSTRVHAQTAQVTPYMADPSGYNPGPFGSIADRPVLYDRRSGYETTHVAPYTTGQSGYTFRPFGQVADHSASYARPSGYAYAEPRAAQYAQFPHSSQQHYGAPPATHYNHAIPPHGHRAEYYSATREPEGYKAGAGDINRTPNTHLKHTWEESRQSNVRQPEISTHKLNGWSPDMAERVRDEVAGMFRDKLGVSVSGTGQSYRKPYSHRFDTVPYPQGTRIPDFSKFSGESGKSTHEHISQFIAHLGELADGEAYRVRLFSLSLTDTAFAWYAALPPNSINSWEELEQKFHEHFFSGEHELEMADLASIQSAINEGRLAFQEMQVDTQPFPVNTIELTCKKVLVRPEMADKGKGKGIVISNPRMSDISQKEIVRKASDEKAKRSEDAGGRHS

SEQ ID NO: 335118 - protein, 100 aa, Zea mays
  Clone ID: MRT4577_68740C.1.pep
TPLHLRSTGPLPMEDEDTGPGDGGEGSTPEQVDATQRPGQQHGGVPDQLAVCEAHGGTTPTSSGCRGNPSLREWRMGKTLRSRRFTMSGYTRPIYLYPDG

SEQ ID NO: 335119 - protein, 56 aa, Zea mays
  Clone ID: MRT4577_68741C.1.pep
MAGRGRLIAVIGDEDTVTGFLLGGIGELNKNRHPNFLVVEKDTTINEIEDTFRQFL

SEQ ID NO: 335120 - protein, 113 aa, Zea mays
  unsure (1)..(113): unsure at all Xaa locations
  Clone ID: MRT4577_68742C.1.pep
RAGQDARNAITAHPTLCSRRQRRRTRRPARSRVRARLDPETRTRTPHAHRPHNTPGRPRAPQPNTPERARXHTRTGHAHPRADARADXRAHPATPHRYPQATSLXTATLPRPA

SEQ ID NO: 335121 - protein, 247 aa, Zea mays
  unsure (1)..(247): unsure at all Xaa locations
  Clone ID: MRT4577_68743C.1.pep
MASKSLYAIIAGVGPGTGRSVALRFAQKYPVVLFARXAQRAMRVLSQTSRKQVAKXIGITADVADPASLKKAFDDIXTSNFPTVISQQQSTTSAAVDSPKSXFLEQTEKDLDASIDGSIRSFFHFAQATIPHLLEAVPESHYPPTLILTGATASIKGSPQFSTFAAGKWGQRAMHQSLAREFGPKGVHIAHAIIDGVINIPRTKEWAANDGADDGKXSPDAIAEAYWDLXTQHRSAFTQEIDIRPLC

SEQ ID NO: 335122 - protein, 93 aa, Zea mays
  unsure (1)..(93): unsure at all Xaa locations
  Clone ID: MRT4577_68744C.1.pep
SFSQSLPIKELGFLEATVVHXSLQDSSSLPQASRQINLATCAPLTKLFLQLITQIPPIKKAFPASISISSKFTADPSKSYCSDILYPSNTIKM

SEQ ID NO: 335123 - protein, 79 aa, Zea mays
  unsure (1)..(79): unsure at all Xaa locations
  Clone ID: MRT4577_68745C.1.pep
RLRTKRQPDLTEYHQWAHEVEARILCKSLTGQTMXYDVDSSDNIDNVTAKIQYNEGIRMDQQRLIFTDIQFEDGRTLTD

SEQ ID NO: 335124 - protein, 69 aa, Zea mays
  Clone ID: MRT4577_68746C.1.pep
MRALALTPTWSVNTVLTLLVVDSLLMERSIHRLINWLKKTHRNPLYKAMEKMKEEMMLLGFISLIVAAT

SEQ ID NO: 335125 - protein, 70 aa, Zea mays
  unsure (1)..(70): unsure at all Xaa locations
  Clone ID: MRT4577_68747C.1.pep
LLGGGLLVHQSFWVGEFGVVSSLKSVFQYFDVYIVERGPPPMKKRENLDDLMCWXEKADAIQENGQVLDQ

SEQ ID NO: 335126 - protein, 47 aa, Zea mays
  Clone ID: MRT4577_68748C.1.pep
PRVRASRMCNLKALVTSLLCISALSSSPWPCTATGQLGRKPLVTGVT

SEQ ID NO: 335127 - protein, 107 aa, Zea mays
  Clone ID: MRT4577_68749C.1.pep
PISDADCNEIRCMESPPLSLRYFSFSWPLKKERRREPVPELEENQTMLCWATRLLFSELRPVSFPSFHKMRPKRTLSPSESENTASDSPIRIHTDTAALVDDKDRLS

SEQ ID NO: 335128 - protein, 123 aa, Zea mays; identical to SEQ ID NO: 187301
  Clone ID: MRT4577_6874C.1.pep

SEQ ID NO: 335129 - protein, 138 aa, Zea mays
  Clone ID: MRT4577_68750C.1.pep
NHPPGFKFLAFLRQRLAGNPQNPKMVKKPGNRFNQTFNPKNSKPTKNQGPANLQPTWEKALDPVPKGNPTKLHPKGGPPPETKNGGILKTPPGPLPKGAPGKLATPNPGPAWTGPPGAQKIARDPQKTSGYKLKKGGG

SEQ ID NO: 335130 - protein, 107 aa, Zea mays; identical to SEQ ID NO: 335127
  Clone ID: MRT4577_68751C.1.pep

SEQ ID NO: 335131 - protein, 59 aa, Zea mays
  unsure (1)..(59): unsure at all Xaa locations
  Clone ID: MRT4577_68752C.1.pep
KGPPPSRVSPPPPLSKXFPPKKKPAGLVKLNPASEAPPALENPLLPPLKGIPPGMKNPG

SEQ ID NO: 335132 - protein, 120 aa, Zea mays
  unsure (1)..(120): unsure at all Xaa locations
  Clone ID: MRT4577_68753C.1.pep
NNCSRGFFWEFWRGTSWPKKEAYKEGEEKRGKEGAEENPEQKRIPQKLGQKRKKGKSKGKNRXQKKKKKDKREGERTNRKPAKKAAKKKKLKNRQRRREKXETGGAPWLKKRPPKGGGAV

SEQ ID NO: 335133 - protein, 456 aa, Zea mays
  Clone ID: MRT4577_68754C.1.pep
MGMGTEWPPTPAQQRKAVVSAGSALKLVLFVILAGLALRLLVGPPAYLLPPTAAPEGAARLFAVPERERTAGGGGGGIPSVETDDAVFTLTDSEPLTALGKKEGSTKPEESCDLFHGEWVPNSSGPAYTNASCRFIESPQNCMTNGRPDTDYLNWRWKPYGCEVSPFDGKKFLDGMKGKHWALIGDSILRNHVQSLLCLLSKVEDATEVYHDDTFRSRRWHFPSYNFTISLVWAPFLVKAKIFEDDDGVSTADLQLHLDVLETDWTSQWEKFDYAVISTGQWFFKTAVYWENGAAIGCHSCQNKTLEERPPEYSFRRALRVAFQFITSSPHKPVVFYRTWAPSHFENGEWFSGGTCNRTAPFKPGEAGDREWDNSMWRIEREEFHNAVPIGGDRLKLLDTFELSLLRPDGHPGPYRAYHPYEKGVTAKVQNDCLHWCLPGPIDAWNDVIMKMVAKD

SEQ ID NO: 335134 - protein, 34 aa, Zea mays
  Clone ID: MRT4577_68755C.1.pep
IYPVEVCLVRLLYRVISNSYIVLKLNSIYVILSY

SEQ ID NO: 335135 - protein, 72 aa, Zea mays
  Clone ID: MRT4577_68756C.1.pep
QRVPRMPHLEYNHICTMPLMYETIARRRHDKSDESFWMTRHDQMEHMSNCHPLLNTLCIREACCGPIIYTVK

SEQ ID NO: 335136 - protein, 116 aa, Zea mays
  unsure (1)..(116): unsure at all Xaa locations
  Clone ID: MRT4577_68757C.1.pep
NKKTNQKTKNKTREKTPPPAERGGKTPPPPKHPPTPPPRRPPPPPPPQQPPPPPPPPAPPKPPEAPRSPLPPXPPPPHRPTKPRFFPKRPKIWGMRRKTSGPQSRKGGAGGQDPPP

SEQ ID NO: 335137 - protein, 48 aa, Zea mays
  Clone ID: MRT4577_68758C.1.pep
GRGTGGEKSGMLVQDPTLRNDVDAIFEQARQAGIKGMPPPLDGESSSS

SEQ ID NO: 335138 - protein, 376 aa, Zea mays
  Clone ID: MRT4577_68759C.1.pep
PGLCSACPSSRVGARSPFSLRRWDSKKLLVWLVVLLTLLVLAVLGARKAHEAWREAARRRSGAWKMTAFQKLDFSADDVVECLKEDNIIGKGGAGIVYHGVTRGGAELAIKRLVGRGCGDHDRGFTAEVTTLGRIRHRNIVRLLGFVSNREANLLLYEYMPNGSLGEMLHGGKGGHLGWEARARVAAEAARGLCYLHHDCAPRIIHRDVKSNNILLDSAFEAHVADFGLAKFLGGGGATSECMSAIAGSYGYIAPEYAYTLRVDEKSDVYSFGVVLLELITGRRPVGSFGDGVDIVHWVRKVTADAAAAEEPVLLVADRRLAPEPVPLLADLYRVAMACVEEASTARPTMREVVHMLSTSATAQPDVPHALCKVVD

SEQ ID NO: 335139 - protein, 65 aa, Zea mays
  Clone ID: MRT4577_6875C.1.pep
RSHRTEGEMAFPPSLGQCVNCLSAIQTSPWFLHETLWFHHSFLVDLHSLVRPRFNPKVRCWGIER

SEQ ID NO: 335140 - protein, 63 aa, Zea mays
  Clone ID: MRT4577_68760C.1.pep
HASGGRLYFFFFFFFFFFFLVFFFFFFFFFFWGTYFSFEQYNLWLKNFDILSWKLFNPIKWNI

SEQ ID NO: 335141 - protein, 293 aa, Zea mays
  Clone ID: MRT4577_68761C.1.pep
KATTASSTSSATSCACAGGGGTNKADRYNNNNLPNTDNKTVYNTSNSFMGNGSSYAKNNNNNADMLAFDKMGSYGYNGGGNTNNNSNGVEVKSYFNKSAGRAASNNNNSSHAGGGNKKGGAGEYGRKKHAKSEGAAAATDKQRFKTLPASEALPRGQAIGGYIFVCNNDTMDENLRRELFGLPSRYRDSVRAIRPGLPLFLYNYSTHQLHGIFEAVSFGGTNIDPTAWEDKKCPGESRFPAQVRVATRKIYDPLEEDAFRPILHHYDGPKFRLELSVTEALALLDIFADKDDA

SEQ ID NO: 335142 - protein, 65 aa, Zea mays
  Clone ID: MRT4577_68762C.1.pep
ASSRKSTRPCCFRYHPFAKSPWGPISRNSEYTPAMRLPQYDEPEALIETVDNGNYPYASNLLPWR

SEQ ID NO: 335143 - protein, 70 aa, Zea mays
  Clone ID: MRT4577_68763C.1.pep
GRSSRSSSSPSHRIALPEATILTTKEARTITAATAKPLVHAKYQKGGQTQVDETSKKAIRMSNLQLCQHE

SEQ ID NO: 335144 - protein, 60 aa, Zea mays
  Clone ID: MRT4577_68764C.1.pep
NDNNWNFRPDQANNIYPMTSMIFSMEQLPLLMNMLYINFLDAFNGNKLEMISLLRVNHLS

SEQ ID NO: 335145 - protein, 363 aa, Zea mays
  unsure (1)..(363): unsure at all Xaa locations
  Clone ID: MRT4577_68765C.1.pep
MEGYDREFYQFSDQLRLQTAAFSGLSLGDSIWSPAGRRNNSNDVLFAASASPADAAAKSNAVVGLKLNDGGPGLIGSGKLAFGGGAGGGGTNKADRYNNNNLPNTDNKTVYNTSSSSFMGNGSSYAKNNNNNADMLAFDKMGSYGYNGGGNTNNNSNGVEVKSYFNKSARRAASNNNNSSHAGGGNKKGGAGEYGRKXHAKSEGAAAATDKQRFKTLPASEALPRGQAIGGYCFVCNDDTMDENLRRELFGLPSRYRDSVRAIRPGLPLFLYNYSTHQLHGIFEAASFGGTNIDPTAWEDKKCPGESRFPAQVRVATRKIYDPLEEDAFRPILHHYDGPKFRLELSVTEALALLDIFADKDDA

SEQ ID NO: 335146 - protein, 337 aa, Zea mays
  unsure (1)..(337): unsure at all Xaa locations
  Clone ID: MRT4577_68766C.1.pep
MEGYDREFYQFSDQLRLQTAAFSGLSLGDSIWSPAGRRNNSNDVLFAASASPADAAKSNAVVGLKLNDGGPGLIGSGKLAFGGAGGGGTKADRYNNNNNLPNTDNKTVYNSSSSFMGNGSSYAKNNNNNAGMLAFDKMGSYGYNSNNGGGNTNNNSNGVEVKSYFNKSAGRAASNNNNNNNSHAGGGNKKGGAGEYGRKKHAKSEGAAAATDKQRFKTLPASEALPRGQAIGGYIFVCNNDTMDENLRRELFGLPSRYRDSVRAIRPGLPLFLYNYSTHSLHSLFXVRVATRKIYDPLEEDALRPILHHYDGPKFRLEPSVAETLALLDIFADKDDA

SEQ ID NO: 335147 - protein, 80 aa, Zea mays
  Clone ID: MRT4577_68767C.1.pep
ILRSRRQRTGTEALRTTTTTNGPQMGEQFCDAETGLHILRVYAAPMTAVAALTDGRDGMKRSPSQSMRWDYMGCDTDLSM

SEQ ID NO: 335148 - protein, 144 aa, Zea mays
  unsure (1)..(144): unsure at all Xaa locations
  Clone ID: MRT4577_68768C.1.pep
EGYDREFYLFSDQLRLQTAAFSGLSLGDSIWSPAGRRNNSNDVLFAASASPADAAKTNAVVGLKLNDGGPGLIGSAKLAFXGGGGTKADRYNNNNLNTSSSFTGNGSSYAKNNNNNNAGMLAFDKMGSYGYNGGGNTNNTARRG

SEQ ID NO: 335149 - protein, 366 aa, Zea mays
  Clone ID: MRT4577_68769C.1.pep
MEGYDREFYQFSDQLRLQTAAFSGLSLGDSIWSPAGRRNNSNDVLFAASASPADAAKSNAVVGLKLNDGGPGLIGSGKLAFGGAGTGGTKADRYNNNNLPNTDNKTVYNTSNSFMGNGSSYAKNNNNNAGMLAFDKMGSYGYNSNNGGGNTNNNSNGVEVKSYFNKSAGRAASNNNNNNNSHAGGGNKKGGAGEYGRKKHAKSEGAAAAAATDKQRFKTLPASEALPRGQAIGGYIFVCNNDTMGRDLRRELFGLPSRYRDSVRAIRPGLPLFLYNYSTHQLHGIFEAASFGGTNIDPTAWEDKKCPGESRFPAQVRVATRKIYDPLEEDAFRPILHHYDGPKFRLELSVTEALALLDIFADKDDA

SEQ ID NO: 335150 - protein, 686 aa, Zea mays
  Clone ID: MRT4577_6876C.1.pep
MHDEKEVMRQWNEQRDKKEAELLHKLSERRKEAADKYLSHFTVDRHQKIVRQGEIDMESLLPPLQGPAGTTLNTSAPSRTVRYITPDRPPSYAGPSGYGMNRPTYYAGPSDSTRVHAQTAQVAPYMVDPSGYNPGPFGPITDCPVLYDRRSGYETTHVAPYTAGQSGYTFGPFGQVADHPASYAGPSRYAYAEPRAAQYAQFPHSSQQHYGAPPATHYNHAIPPHGHRAKYYSATREPERYRAGACDINRTPNTHLKHPWEESRQSDVRQPEISTHKLNGWSPDMAERVRDEVAGMFRDKLGVSVSGTGQSYRKPYSHRFDTVPYPQGTRIPDFSKFSGEGGKSTHEHISQFIAHLGELADGEAYRVRLFSLSLTDTAFAWYTALPPNSINSWEELEQKFHEHFFSGEHELELADLASVRQGPEESVNEYIRRFRDTRNRCFQIHVAEKQLTGLAFNGLRPYLKEKLDGTQFFSLVHLHQRAMTCESRSKETSKLASHKMHLVGYDNSDDESTDVYTAELVWPGQAKPSACSALQSIRKNRQEEVKFTFNVAKYDKIFDELLKNSNIKLTHTIPPPDELKRRAYCKWHNSFSHATNDCNVFRRQIQSAINEGRLAFQEMQVDTQPFPVNTIELTCKKVLVRPEMADKGKGIVIGDPRTSDKSQKEIARKASDEKAKKSEDAGGRHS

SEQ ID NO: 335151 - protein, 64 aa, Zea mays
  Clone ID: MRT4577_68770C.1.pep
MVQNFGLQAKYKSARIMYPDFYSAVYDMVKNPSSYGVNTAFHTCWRFGSGKYNYQNNARCDMPG

SEQ ID NO: 335152 - protein, 130 aa, Zea mays
  unsure (1)..(130): unsure at all Xaa locations
  Clone ID: MRT4577_68771C.1.pep
LAPSSAASRAXSGRGSWGXRPPPRPCLLXLRLPCXSSRRSPWGCPWWFAPXWGCFFGRFSPSLXFCGSCFLPFLRLXLVALRLVPGLXLFPFVLXPLWPRXLXVGLLSCAFLGPXLFAALPVAQFPPVFF

SEQ ID NO: 335153 - protein, 69 aa, Zea mays
  Clone ID: MRT4577_68772C.1.pep
NKIPSLGFFTFPLALVGRRLISRGFALKNYIASFSLVGWPGQGLSTRLNVAGPLAGFVAVFLGKVAVNC

SEQ ID NO: 335154 - protein, 64 aa, Zea mays
  Clone ID: MRT4577_68773C.1.pep
MVAVNRPLVSVKALEGDMVSDARGIALPCGMTPGIARLEVQPNAREVLVGLYERTFQEINAAPQ

SEQ ID NO: 335155 - protein, 62 aa, Zea mays
  Clone ID: MRT4577_68774C.1.pep
SACQGLDPSMNTDVRYICSITSKRTGTMATPPKMSDLLSCQRQLITQLPSHHKTNLLASQTC

SEQ ID NO: 335156 - protein, 148 aa, Zea mays
  unsure (1)..(148): unsure at all Xaa locations
  Clone ID: MRT4577_68775C.1.pep
KMLMLIRGAAAHNHVXPPELMXFGSWXNXIXSNWDPFXXSPXSXXWWGRXGRDSPXAVVSXIRPXAXXAXXXXXIIXLAAAFRRLGAXNAVEAVVLXGRGRAYLLRGXPNGGGXGVKGQCKERRXXPRRXSXALPXASRRRSRRVRRX

SEQ ID NO: 335157 - protein, 46 aa, Zea mays
  Clone ID: MRT4577_68776C.1.pep
SPPPMSMTQFMYLATSVTSASSASFLYHFTFILPVSSSGLHPSSVG

SEQ ID NO: 335158 - protein, 121 aa, Zea mays
  Clone ID: MRT4577_68777C.1.pep
MAGTGRSMLLSLLLFAVTLSLLEMYRGWFAASELKTIAGGFVSSLLFLLLLTFIGNYQEASGVRTGWGAVVVAQLVALIVAGTVHRVCITTCFLFSAGILYEVDKLSGMILARSESKARRY

SEQ ID NO: 335159 - protein, 117 aa, Zea mays
  Clone ID: MRT4577_68778C.1.pep
IFSSLNPSIGAVPILNMGAFSPGFLVDLWEALEMPIFGPPIQNSQETGHEKQLATSSSSVQVSSVRQKRNAKDTANRWSNVLHKITGKFNDSKEGTLSDSILFSHESNDDALTSWDI

SEQ ID NO: 335160 - protein, 70 aa, Zea mays
  Clone ID: MRT4577_68779C.1.pep
VISAVHAFGRPNHKKNKEEADVRTKLVSLPSLEPTDLAPLVVITMPSLLLHLQVFYCEPVCAVTRSRLSL

SEQ ID NO: 335161 - protein, 123 aa, Zea mays
  unsure (1)..(123): unsure at all Xaa locations
  Clone ID: MRT4577_6877C.1.pep
MAAPKLATLALAVLLAATVVAPPXAVRAAMSCSTVYSTLMPCLPFVQMGGAMPPQPCCGGIRSLLQQANNTPDRRTICGCLKNVANGANGSGTYISRAAALPSKCGVALPYKISTNVNCNTIN

SEQ ID NO: 335162 - protein, 99 aa, Zea mays
  Clone ID: MRT4577_68780C.1.pep
LVHRRKKKTPPKLLCLCKTRRNKPPACRVFFSNANMQMECRKTKLAILAVPESESERQDLYHVTKKTIVVKRKSDCFVCGHAQGSLILCPTPNSGGGLS

SEQ ID NO: 335163 - protein, 117 aa, Zea mays
  Clone ID: MRT4577_68781C.1.pep
VLGLRGTLANRKTEWDVMTDLYFYRDPEAKENKDSAGVEKAKVPGADEVGPGAVVDGFTSEWEVSGASDGAFTAQAAAAPGTSWDADTPDWAASGDAQTGNEGWGAETAAPATPTQW

SEQ ID NO: 335164 - protein, 70 aa, Zea mays
  Clone ID: MRT4577_68782C.1.pep
SDDQPQQNHQLIGFISTKNSSLQNLRISTNDTKHIHNVMPCLLFTQLPIHMTKSSNTKNLFQCSEQKQLR

SEQ ID NO: 335165 - protein, 221 aa, Zea mays
  Clone ID: MRT4577_68783C.1.pep
AHAIATLAGAAARWAPPATSGSLATAPWAATQRRGAKMLGSDVKLGNVIQRRGHIYQVIKAQHSHQGRGGATIQVELRDVDTGNKITERFRTDEALERVFVEEKSFTYLYQEGDAVTLMEPETFEQLEVSKELFGKAAAYLKDEMKVNLQYFDGRPMSGTVPQRVTCTVVEAQPNTKGLTAQPQYKRVLLDNGLTVLAPPFIEAGENIVISTADDSYMTRA

SEQ ID NO: 335166 - protein, 57 aa, Zea mays
  unsure (1)..(57): unsure at all Xaa locations
  Clone ID: MRT4577_68784C.1.pep
MDPXTGNCSFSPLGILIFPLLAFFHMLPCLELSERLASRSHRMSFVXTPFKLAPLPS

SEQ ID NO: 335167 - protein, 104 aa, Zea mays
  Clone ID: MRT4577_68785C.1.pep
SGLAEVEAGNGGGWRRGKSYCSALLAARSQSLIQTPRWCHADAPSPQLTILLFCSVSRPRDARAKLFSLLCAPLSSSSSSIFLRSVFTAFTLQSTRTRASHFSV

SEQ ID NO: 335168 - protein, 365 aa, Zea mays
  Clone ID: MRT4577_68786C.1.pep
SIKSINGKSPIVVGPWGGTGGYPWDDGVYSTIRQIVIGHGAAIDSIRIEYDLKGRSVWSETHGGTDGGSETDKVKLDFPDEVLVSVSGHYGSVCGTPVIIRSLTFQSNSSTYGPFGTEDGTPFSLPVSSGKIIGFHGRSGSYLNSIGFYLKQVHFPTPVNPSPASPLSLPSPQSRNSAYGLTGGDARPDMVLAVRDRGDSYAVYASNHPKQQYTNPSPDGAIWNKMVSVPSYYGDTTGAAAVGGSPQTYGPWGGSGGTIFDDGVYTGVWQINLTRAVGISSIKVLYDRNGQAVWGNKHGFSSGVIPDKIIFDFPSEVLTHITGFYDSAIIWGPTVVRSLTFHTNKRTYWPYGDKYSTYFFTSFTN

SEQ ID NO: 335169 - protein, 107 aa, Zea mays
  Clone ID: MRT4577_68787C.1.pep
GQGAPTRAHRVELEPLLFLGKLIASLVSSGQFMQKQAPFQLVFGRPAGRLVGCFSLLCVLNKESAVEVDKKEGEAELFRFRFFWLEFLSCSGSRLLIQSGEKYVGHG

SEQ ID NO: 335170 - protein, 83 aa, Zea mays
  Clone ID: MRT4577_68788C.1.pep
ETCNTDAGVTCLHLQSIAPGLNSFLFCPLSFLVFTYTFFCAVNTVTHVHDPGLSVLTIITLVSRPVCISILPAHVHDLPYSIR

SEQ ID NO: 335171 - protein, 106 aa, Zea mays
  Clone ID: MRT4577_68789C.1.pep
MAADTPAKSGLAVGLNKGHKTTPRVVKPRVSRTKGHLSKRTAFVREVVKEVAGLAPYERRVIELLRNSKDKRARKLAKKRLGTFGRAKAKVDELQRVIAESRRAGH

SEQ ID NO: 335172 - protein, 187 aa, Zea mays
  Clone ID: MRT4577_6878C.1.pep
KKKKKKKKKKKKKKKKKKKKKKKKKKKKKKKKKNHPGPCYIFSKGGGKPSGGPPFLATLNKGFFVPGALGPPSPGGQFFQGPNNPFGRFPFNPFFALEYPPGGAKPKPGPPQGGNHPVWEPGNLAPPRGGLLKALPPNRPVMGGLGGQRGPEIGKGFFPPTLGETGGAHPRNVFKGLIKKARLDRGD

SEQ ID NO: 335173 - protein, 169 aa, Zea mays
  Clone ID: MRT4577_68790C.1.pep
MASQSSKTADTAAPPPEVAATGEAAPGAASSTPAQNPNAAATAVAGATDLEKKMRRAERFGMPVLMSEEEKRSSRAERFGTGSSSVKEEEKKKSRAERFGLASPSSSDEEAKKKARLERFGQSANVDKAEEEKRKARAARFAEASGGSAARENGKDSSKPDAAAVTGTA

SEQ ID NO: 335174 - protein, 77 aa, Zea mays
  Clone ID: MRT4577_68791C.1.pep
FDAYMSSALSLAMLSQWDRQGSLSAFCGYYYREVGRQVAAARLGRRRVAHDPRWYGQARFRYKLFRPSVCPGLKGPV

SEQ ID NO: 335175 - protein, 124 aa, Zea mays
  unsure (1)..(124): unsure at all Xaa locations
  Clone ID: MRT4577_68792C.1.pep
IGLIPAHRRARRGGPGGAPSGGQGGPQXGGGETQSRAQPGKPGDPQTQGENTGKPNEGAKKKXGKSKKKTGQPKKQKNQXGPKEGPKPQKKAGDKKGAIPGKNPPAPXGPRNPPPPPGPPPPTG

SEQ ID NO: 335176 - protein, 76 aa, Zea mays
  Clone ID: MRT4577_68793C.1.pep
KFQSSITSYNRSAIIITPSHSNDDTPQKSQANTSPEGEWKRREICVILLTSLKRVRDRDRDHREREICVILLTPER

SEQ ID NO: 335177 - protein, 36 aa, Zea mays
  Clone ID: MRT4577_68794C.1.pep
QQVNSQMQTWVSSGGPQILTHTHTTHSNTFLDPTQE

SEQ ID NO: 335178 - protein, 105 aa, Zea mays
  unsure (1)..(105): unsure at all Xaa locations
  Clone ID: MRT4577_68795C.1.pep
PLYLLLSCSSRHRLVGCARLAEFKTQATTLASLQHPNLCKLIGYYAKEDSNERMLVYERLYHGSLDKLLFGRSDGHFMDWSKRLKVALXAARGLXFLHDERPFSA

SEQ ID NO: 335179 - protein, 51 aa, Zea mays
  Clone ID: MRT4577_68796C.1.pep
SLQCPIADRALVKHVVQSSSFPRLAPVVHSPHSSSDQSQGQNKEPALARAE

SEQ ID NO: 335180 - protein, 249 aa, Zea mays
  Clone ID: MRT4577_68797C.1.pep
LPENRGRNRYTDVLPFDQSRVQLESSTGNDYINASHIEIAGRNLTKFISTQGPLANTIEDFWQMVYENHCPVIVMLTKFDGLKCDEYLPLSKGQAVFGKFTIKITKFRKDGQLLLRGVEIRQDESDEVRSLLHIEYPEWPDHGVPNSSADVRRILKRLYHIPRERPIVAHCSAGIGRTGAYTTIHNTIERILLGEQGAADLVETVKKFRSQRPGMVQTEEQYKCCHHAIRDELEDLVSSSKIEPLSRNG

SEQ ID NO: 335181 - protein, 548 aa, Zea mays
  Clone ID: MRT4577_68798C.1.pep
MMGCFTVLRSKKKKSHFDNPLVPSKKSVDARESTSSRLPEPEVHVPSLQSAPPSFRNRVKISESSNEVSNRNSRARVLSAPSALIVVDQFGFPYSEYRDQDDSRDKEGLTKGHRFSNPLPLPLPSREGHSFRNSGSFKASNVSGPLEMSGPLPLPLKKCDGLRIFSYEEISSACQRFSSDQCVSETLGSTSYKATFRDEFIDTRTTEATVARLLPSTQSLKEFKTQATTLASLQHPNLCKLIGYYAKEDSNERMLVYERLYHGSLDKLLFGRSDGRFMDWSKRLKVALGAARGLAFLHDEGPFQAMYSEFSTLNIQIDKGFTAKLSGYGCVGFNTEEISNAPVSAANLSVETLEKGLLTPKSNVWSFGVVLLELITGRKNLDPNYSKEERNIVSWSRPFLTDDSRLSLIMDSRIKGRFPTKAARIVADIILKCLRKDPSERPTMRDVVEALARVQEIKVPCRYPLQEPSAAPRKVMLKSTSLNGIVPHHPVITFSPSPPSHNQHLISPRSSTSALFHPRACSSTLDDPSVSSIKKTPPIMRRSSVEGF

SEQ ID NO: 335182 - protein, 128 aa, Zea mays
  unsure (1)..(128): unsure at all Xaa locations
  Clone ID: MRT4577_68799C.1.pep
HRARGAGRSFARAQLRTRNTAIWLPGRTPPPXLHPGLPGDFLFDPCGLRSDPERLXWNAEGXLEHCXRWTMLGAVXILMPELLADIHGLDTAFLYTGRHHDDFTDTXTLFMMELIIISCXEGRRWADV

SEQ ID NO: 335183 - protein, 428 aa, Zea mays
  Clone ID: MRT4577_6879C.1.pep
MEALPADDQRPFEDLIMRDEKEVMRQWNEQCDKEEEELLHKLSERRKEAAKKSSAILRRTVRIWHESTGVLRRTIRLYTSPRADRPSRAIYDRIIRAAPYTSGQSGHTFGPFGPVADHPAPYAGPSGYAYAEPRAAQPFPHSSQQQYGAPPATHYNHAMPLHGHRAEYCSATREPERYPWESRQSDVRQLEISTHKLNGWSPDMAERIRDEVAGMFRDKLGVSMSSTGQSYRKPYNHRFDTVPYPQGTRIPDFSKFFGEGGKSTHEHISQFIAHLGELANGEAYHVRLFSLSLTDTAFAWYAALPPNSINSWEELERKFHEHFFLGEHELELADLAFVQQGPEESIQLAINEGQLAFQEMQVDTQPFPVNTIELTCKKVLVRPEMTDKGKGKDIVIGDPHMSNISQKEIARKAPDEKAKKSEGTGGQA

SEQ ID NO: 335184 - protein, 470 aa, Zea mays
  Clone ID: MRT4577_687C.1.pep
MSCWAAGRRSSASAMAENAGARGAKEAVVTSGKRVALGNISNVFRGSWGSGAANSASDAKLSSTKPDDVKKGSYACLRNVNTERGSSRRLASEQFDQAVSLLQKNTSLPSVPDVVSTGCSSPGLSQDCSVSMEDAMSTCNSTESSDVEYLNNNDDPSMTSSSHWWASDRPHFSDSMDVAEFNWRKHSPNHYTYKDPRLSTTLACEIYESLREAETRKMPPTNFLETTQTDMSKTMRAILIDWLVEVTEEYRLVPETLYLTVNYIDRYLSVKEISRHRLQLVGVACLLIAAKYEEICPPLVEELCYITDYSYTKEEVLQMEASVLNNLKFEMTVPTAKCFLRRFVRVAQVPDKGSSLHLEFLVNYICELSLLEYSLLCYLPSMVAASSVFLAKFILMPIKNPWNSSLSYYTRYTPSELRGCVRVLHRLFRLGPGSNLPAIREKYSQHKYKFVAKKYCPQSIPTKFFQDLTS

SEQ ID NO: 335185 - protein, 71 aa, Zea mays
  Clone ID: MRT4577_68800C.1.pep
IHLALSHALTHSCDSVSNFMTTTLLLSHCIWSIKSLHYSTRQSFFLLHLAGKTHLSHGSPTPLKDEADFNS

SEQ ID NO: 335186 - protein, 160 aa, Zea mays
  Clone ID: MRT4577_68801C.1.pep
SCIGLGLLHTRRYDERRQPARLTTRWELRPSEPRGHAGEQETARAQHETMPCLAELKEARTRDRVGTWGEFTATDTLDNYRRSRITKNTVTAKNRLGDDDRHAREELDAETRHAIASREFSCARQTKKERVVRAQRARQPAAGASRARATRRRATTTGSN

SEQ ID NO: 335187 - protein, 69 aa, Zea mays
  Clone ID: MRT4577_68802C.1.pep
EGYQVLEATPNWVGYPFSIFFSDVLWTACSYNGPMDLINRLALLPSTAVTATVIQNPIYKTFYDNVILC

SEQ ID NO: 335188 - protein, 76 aa, Zea mays
  Clone ID: MRT4577_68803C.1.pep
DALSECLKRNLYVPTTSSSNEDGDIKCIICLEEYSSGVEVAKMACEHYYHTTCIQQWLQQKNWCPICKCDASAISS

SEQ ID NO: 335189 - protein, 83 aa, Zea mays
  unsure (1)..(83): unsure at all Xaa locations
  Clone ID: MRT4577_68804C.1.pep
SKRLAPPSDGVAANDKAGVSSKEILDXMASNMLLLIGQVSDXNGFMPPLSGLSKLYVAVVSVRSQKFVHRSCCVEMEVKLLSS

SEQ ID NO: 335190 - protein, 42 aa, Zea mays
  Clone ID: MRT4577_68805C.1.pep
FLFFFFWGRKRKQILIHNIRIPRGVLQTRQPPGGVPGPAAAC

SEQ ID NO: 335191 - protein, 75 aa, Zea mays
  Clone ID: MRT4577_68806C.1.pep
SHFNPSAFRQPTAITKIPIPFPISNIFAAFIAHATHPIANLHARLSFPLTSASPLHYVTPSDPLLYLHYFPFSPP

SEQ ID NO: 335192 - protein, 108 aa, Zea mays
  unsure (1)..(108): unsure at all Xaa locations
  Clone ID: MRT4577_68807C.1.pep
CLQNHAATLNGHIVHGFVEFMPRDKDSIKCAPCGCHRSFHRKDYXRARSHHQLMLPVTTTASRILLFLPAPHPNYAPTSSLPYHGTPSGGGCTATDSSIGTGRSRFED

SEQ ID NO: 335193 - protein, 171 aa, Zea mays
  unsure (1)..(171): unsure at all Xaa locations
  Clone ID: MRT4577_68808C.1.pep
NKQIKGNKREIIQLGVPLFQPTTEDANCHTEPIPLVLQAVIDHLVLWRLIPESRKPNSVVINFFDEDEHSQPYFKPPHLDNPICTLLLSETTMAFGRSLVTDSNXADMARHVVCPSSNRRVSITFARVRPSTPVDMSPLPSPTKAMTPWQPQPVTASQVPSPVSMTQKPPS

SEQ ID NO: 335194 - protein, 127 aa, Zea mays
  unsure (1)..(127): unsure at all Xaa locations
  Clone ID: MRT4577_68809C.1.pep
PSTHASGGLGFPLRKRECKKQXHXXTPPXXXSXXPHXRRXEEQEAAGLPPPAHHQAYSXPFFHGYDRXQILYSQTNSXXXFXQXYFLXKXXXXIXXXTXXXXNXILPXXXXXXFSIXLPXLXFPXXS

SEQ ID NO: 335195 - protein, 123 aa, Zea mays
  unsure (1)..(123): unsure at all Xaa locations
  Clone ID: MRT4577_6880C.1.pep
MAAPKLATLALAVLLAATVVAPPAAVRAAMSCSTVYSTLMPCLPFVQMGGAMPXSPCCGGIRSLLQQANNTPDRRTICGCLKNVANGANGSGTYISRAAALPSKCGVALPYKISTNVNCNTIN

SEQ ID NO: 335196 - protein, 182 aa, Zea mays
  unsure (1)..(182): unsure at all Xaa locations
  Clone ID: MRT4577_68810C.1.pep
ECIARAGRMQDPEGFVAKESVKGHMVNVVKGLKIYEDAFTTSEIMRVXDFINEIRQAGRNGELSGETFIFFNKQIKGNKREIIQLGVPLFQPTTEDANCHTEPIPLVLQAVIDHLVLWRLIPESRKPNSVVINFFDXRSLVTDSNGNYKGPLTLSLKQGSLLVMRGNSADMARHVVCPSSNR

SEQ ID NO: 335197 - protein, 100 aa, Zea mays
  Clone ID: MRT4577_68811C.1.pep
HKQMSASWDYSVKQPSQRIGQQNSGNWEVYKEQQDQASNRGEQTNLCSTNWVMDGSQDAWKHGYGWGPAAIQTDPWDNCQYSYQVPDSQGSYGHWTHWRR

SEQ ID NO: 335198 - protein, 258 aa, Zea mays
  unsure (1)..(258): unsure at all Xaa locations
  Clone ID: MRT4577_68812C.1.pep
SASQDEHSQPYFKPPHLDNPICTLLLSETTMAFGRSLVTDSNGNYKGPLTLSLKQGXRNNCVIYLIILLYKMKHKAYGHGIAFQKSXSLLVMRGNSADMARHVVCPSSNRRVSITFARVRPSTPVDMSPLPSPTKAMTPWQPQPVTASQVPAPACMTQKPPVSGAIIGYAPTPQTVXRPRPGAXMRAPVMMVAAAPARPMVMASLGTGGGNISKRMSRSGTGVFLPWTVGPKRYNKHLPPRIQKRRFSAMMSPIEAQG

SEQ ID NO: 335199 - protein, 79 aa, Zea mays
  unsure (1)..(79): unsure at all Xaa locations
  Clone ID: MRT4577_68813C.1.pep
RILKKDPFVGLHRRGEAQLGKMVTARGHNVRPNXRXGVFREHGGETPCVAISKNAGRCYVXRSAIRVPLARRAAASALG

SEQ ID NO: 335200 - protein, 288 aa, Zea mays
  unsure (1)..(288): unsure at all Xaa locations
  Clone ID: MRT4577_68814C.1.pep
RLTPNENALQWQHRIGITGPPTRPANCHTEPIPLVLQAVIDHLVLWRLIPESRKPNSVVINFFDEDEHSQPYFKPPHLDNPICTLLLSETTMAFGRSLVTDSNGNYKGPLTLSLKQGSLLVMRGNSADMARHVVCPSSNRRVSITFARVRPSTPVDMSPLPSPTKAMTPWQPQPVTASQVPSPVSMTQKPPVSGAIIGYAPTPQAVXRPQPGAXMRAPVMMVAAAPARPMVMASSGTGGGNISKRMGRSGTGVFLPWTVGPKRYNKHLPPRIQKRRFSAMMSPIEAQG

SEQ ID NO: 335201 - protein, 560 aa, Zea mays
  unsure (1)..(560): unsure at all Xaa locations
  Clone ID: MRT4577_68815C.1.pep
QQRQLQGTSHTLTRARVPSGDARLLPRRGPPRNAMIDALCGHLAHFGGGGPEYDPVFAAIHRRRANWFPVLHMQKFYPVADVAAELRRVADARAAAGSCCYSEEAASTVIHEPMEEAEAEAEAEPEPEQEHEQDPAPAAELADGAVEYHEPDVEVDSSGDSSERKPPSTEDDTVADGHHTDQXLKGNTAYQRXPICSDHEECIARPERIKIQKGFVAKESVKGHMVNVVKGLKIYEDAFTTSEIMKVADFINEIRQAGRNGELSGETFIFFNKQIKGNKREIIQLGVPLFQPTTEDANCHTEPIPLVLQAVIDHLVLWRLIPESRKPNSVVINFFDEDEHSQPYFKPPHLDNPICTLLLSETTMAFGRSLVTDSNGNYKGPLTLSLKQGSLLVMRGNSADMARHVVCPSSNRRVSITFARVRPSTPVDMSPLPSPTKAMTPWQPQPVTASQVPSPVSMTQKPPVSGAIIGYAPTPQAVXRPQPGAXMRAPVMMVAAAPARPMVMASSGTGGGNISKRMGRSGTGVFLPWTVGPKRYNKHLPPRIQKRRFSAMMSPIEAQG

SEQ ID NO: 335202 - protein, 51 aa, Zea mays
  Clone ID: MRT4577_68816C.1.pep
ELQAFQPDKNKLQTQIHIVEINKLVGIMVQTVGTNLLARGGEGESRGRDPR

SEQ ID NO: 335203 - protein, 143 aa, Zea mays
  Clone ID: MRT4577_68817C.1.pep
MTRSSPVVSEGAVAEGETAEAEQIVVEDRSDDENEEDNSILNTSKLSHIEFGKPKTSLVDVESKSLEMAIMTRFFPLRNSSIRRYGWGNLVHMEIESRKTLSLSGSRERGWELFLVPVLRIPAPDRNEELFPDEKFPVTLYVT

SEQ ID NO: 335204 - protein, 71 aa, Zea mays
  Clone ID: MRT4577_68818C.1.pep
VSQPVIFIDMDDNNATSFMTSVVCNVSDDTDMFWGVKVSNDSMIRAGTLGNAQSHSACPQALSVCMAGRVG

SEQ ID NO: 335205 - protein, 86 aa, Zea mays
  unsure (1)..(86): unsure at all Xaa locations
  Clone ID: MRT4577_68819C.1.pep
TQRTKRATVDNTIMHSMPRLARVNHLTDLSELLVRNKRLXQLVNLNAVCRYHGIPSKDKEEQTXFTMMLDLIEQYNLNRHICWIST

SEQ ID NO: 335206 - protein, 551 aa, Zea mays
  Clone ID: MRT4577_6881C.1.pep
MEALPAEDQRPFEDLVMHDEKEVMRQWNEQRDKEEAELLHKLSERRKEAADKDPPHFTVDRHQKIIRQGEIDMESLLPPLQGSAPQPLGTRQVLDATGPSEHHLRQSGYTADRPAYFAGPSDEMQARTQNTQVAPYMARPPRYNPEQFGPITDRPVHHAGPSRYVADRPPSYVGPSGYGMNRPTYYAGPSDSTRVHAQTAQVAPYMTDPSGYSPGPFGPIADRPILYDRRSRYETTHVAPYTAGQSGYTFGPFGLVTDHPASYAGPSGYAYAEPRAVQYAQFPHSSQQHYGAPPATHYNHTIPPHGHRAEYCSATREPERYRAGAGTRIPDFSKFSGEGGKSTHEHISQFIAHLGELADGEAYRVRLFSLSLTDTAFAWYAALPPNSINSWEELEQKFHEHFFSGEHELELADLASVRQGPEESVNDYIRRFRDTRNRCFQIHVAEKQLTGLAFNGLGPYLKEKLDGTQFFSLVHLHQRAMTYESRKLTCKKVLVRPEMADKGKGKGIVIGDPRMSDISQKEIARKASDEKAKKSEDAGGTGTVNEPNTSA

SEQ ID NO: 335207 - protein, 338 aa, Zea mays
  unsure (1)..(338): unsure at all Xaa locations
  Clone ID: MRT4577_68820C.1.pep
WTVPMFHCNGWCLVWGVXAQXGTNVCLRKVNSGAIFAAAPAHGVTPLCGAPTVLSMVVNATAEERAPLGAGRKRPVTVMTGGAPPAPQVLFRMEELGFLVIHSYGLTETYGPATVCTWRPEWDALPAAERAAIKARQGLHHLGLEVDVKDPATMASVPADGRTMGEVMFRGNTVMGGYYKDAAATAEAMAGGWLRSGDLAVRHAGDGYVRILDRSKDIIISGGENISTIEVEAALFAHPAVAEAAVVGRPDEYWGETPCAFVTLREGAAGSVRAEEVVAFCQARLPRYMAPRTVVFVAELPKTATGKVQKFALREQARAMGSISSSEQQDGAGTRSKL

SEQ ID NO: 335208 - protein, 102 aa, Zea mays
  Clone ID: MRT4577_68821C.1.pep
MLVYQDLLSGDELLSDSFTYKELENGVLWEVEGKRATQGPVDVDIGANPYVEGGEAQSGADTSATAGDIGETFTTPEQPAFATKLVASYITNYINTSTAALD

SEQ ID NO: 335209 - protein, 92 aa, Zea mays
  unsure (1)..(92): unsure at all Xaa locations
  Clone ID: MRT4577_68822C.1.pep
SQNLTRHFKESIRFIHECRLRGESXLVHCLAGVSRSVTLVIAYIMTVTDFGWEDALHTVRAGRSCANPNVGFQRQLQEFDKHDVHQYRQWLK

SEQ ID NO: 335210 - protein, 241 aa, Zea mays
  unsure (1)..(241): unsure at all Xaa locations
  Clone ID: MRT4577_68823C.1.pep
PWRWSWTGARWAPCWRPSWCSAPRCVTSCRRRPRCSCAASSRGSPPRSARPATPSSSTRRTGPRGAPTTSTSRRSSTSARAASPXARRAPAQAAPVAAPRGVAPXRTPPTTPSAGSASSGPPPRAPSTAAAAAAAVTRTTYSAAAATSAASSSSSRASTGTSSTTTTSRTSSTRPPGCGSSRGSAASTPTAPRGPATTTPPXRRTPSRTRPRSTRWRSTRRFARRGPRRPAALRRAPGPLR

SEQ ID NO: 335211 - protein, 392 aa, Zea mays
  Clone ID: MRT4577_68824C.1.pep
MAIPPRITAAGGGGRKTRVPPLPPARTLLTAFAAAVALAILCFLSSSPTATLSGSWRSGARSGDKYLYWGSRVDCPGKHCGSCAGLGHQESSLRCALEEALFLGRIFVMPSRMCLSSLHNTKGIIQSGATTKQRWEESSCAMESLYDIDQISRTVPVILDNSKNWHDIVSRSMKLEVGGVAHVQGISRGELKQNSIYSTALIINRTASPLAWFMECKDRKNRSSVMLSYNFLPSMPAEKLRNAANKMKEILGDYDAIHVRRGDLLKNRKDRFGVERSLHPHLDRDTRPEYIRKRIAQWIPPGRTLFIASNERTPGFFSPLSDRYKLAYSSNFSSILEPIIENNYQLFMVERLMMQGAKTFIKTMREFGSDLTLCDDPKKNTKVWQKPVYTDD

SEQ ID NO: 335212 - protein, 93 aa, Zea mays
  Clone ID: MRT4577_68825C.1.pep
KRPAPGKGPKLQKGFGKTGIRGGINNGGRNRGRYLAIGLGGKNNKRPPQMGGLSPLGRGIKPPGRGGAPWSGGGGTFFFQGGILKTGGRAIFI

SEQ ID NO: 335213 - protein, 105 aa, Zea mays
  Clone ID: MRT4577_68826C.1.pep
MAIPPRITAAGGGGRKMRVPPLPPARTLLTAFAAAVALAILCFLSSSPTATLSGSWRSGARSGDKYLYWGSRVDCPGKHCGSCAGLGHQESSLRCALEEALFLGR

SEQ ID NO: 335214 - protein, 97 aa, Zea mays
  Clone ID: MRT4577_68827C.1.pep
GSYSRPGSRICGPKKAAGFAHPRDTYPLCLCSLKTSGSEKDPSYGLKELYTHTDKLCRHTSRKTLRITGYPAVNTYLLYYTKEPTELLFDKCVVIHK

SEQ ID NO: 335215 - protein, 62 aa, Zea mays
  Clone ID: MRT4577_68828C.1.pep
GRWRCPIRCSSRRLSPVWCSVAFPAASPFEQQRAVGSCQLCPEFLGGRVWRFFRRINLGMFF

SEQ ID NO: 335216 - protein, 130 aa, Zea mays
  unsure (1)..(130): unsure at all Xaa locations
  Clone ID: MRT4577_68829C.1.pep
MSSLQEAISVPWNSIPMNTARSYSAMRVLEDHELSEGRNPGXTALSDIDAVLARRMDMRDKMSLNESRMTTTLEERLLXDXGKTEHAPVCAILGGIVGHEAIKSISCKGDPCMNLFYIDVADGKSVIDDI

SEQ ID NO: 335217 - protein, 45 aa, Zea mays
  Clone ID: MRT4577_6882C.1.pep
NSYLLSPLLSFHRGLVQPYQVLLTQLGWAGGTGSRVASDHRSVVA

SEQ ID NO: 335218 - protein, 43 aa, Zea mays
  Clone ID: MRT4577_68830C.1.pep
KKKKYHSGMVCFPCDLVPSYLNYGCCPVLLACTNKVLICMLAS

SEQ ID NO: 335219 - protein, 79 aa, Zea mays
  Clone ID: MRT4577_68831C.1.pep
YLFELHLRIEFAGLNARQGAHAAHETIREAHADREGRAPKARPRAIRLIPRHRMPQVPIVLSRTTDGPGPSARIKELGL

SEQ ID NO: 335220 - protein, 39 aa, Zea mays
  unsure (1)..(39): unsure at all Xaa locations
  Clone ID: MRT4577_68832C.1.pep
XLYSQTIFISXXXHNSHVLGKIMSVAWVNLANLHSIPII

SEQ ID NO: 335221 - protein, 676 aa, Zea mays
  unsure (1)..(676): unsure at all Xaa locations
  Clone ID: MRT4577_68833C.1.pep
PPPLRGAPDRRRRPLLLLRIQCSGCRSAGAADLRRRRRRRRRRWRRWDRDVVCAGGGGGVRAVSAARRWRPRGGXGNTVFKSGPLFISSKGIGWKSWKKRWFILTRTSLVFFKSDPSTLPQRGGEVNVTLGGIDLNNSGSVVVREDKKLLTVLFPDGRDGRAFTLKAETSEDLFEWKTALEEALAQAPNAALVMGHNGIFRNDTADTYEGAIPIWREKRPIKSLVTGRPILLALEDIDGSPSFLEKALRFLEKHGIKVEGILRQSADVEEVDRRLQEYEQGRTEFSADEDAHVVGDCVKHVLRELPSSPVPASCCTALLEAFRLETKDARINAMRSAISETFPEPNRRLLQRILKMMHTVASHTSENRMTASAVAACMAPLLLRPLLAGECEMDEVFDMDGDDSAQLLAAANAANSAQGIVATLLEEYEGIFHDEHLRCSLSPESQIEDSGTEASTDDGNLEAKGNGFHDAENDVDQEMDDDNGVERILSGKLSESSGYAGSDLYDYKAVNAEESDAERPVKMLEGNLNLSKVQNSLSTENGSANVDSLLSENNPSNPTVGHETLSMGEILSSFDPGISVPTHSPEYSVERQTNKTNGSHPHVKRSNFWGRNNARKGQNSESVDSSGEEELAIQRLEIAKNDLQNRIAKEARGNAILQASLERRKQALHERRLALE

SEQ ID NO: 335222 - protein, 99 aa, Zea mays
  Clone ID: MRT4577_68834C.1.pep
RPDSGRIGPAPSQLGRNAACRRSMTAGKKHWRLGELGLWPGSYHRLYTATAAAAEKHMKQSVPTDWPVGRLTMHPEQRLKGYDHDHRSDAKGSLPRRIR

SEQ ID NO: 335223 - protein, 75 aa, Zea mays
  Clone ID: MRT4577_68835C.1.pep
AAPGSRRSPPPRPCTTARWFSRSHPATAPPYRHVTGVDMAAATGRAERRRRGVEEPTSWRSGQSRVGGAGRVQSR

SEQ ID NO: 335224 - protein, 80 aa, Zea mays
  Clone ID: MRT4577_68836C.1.pep
STCSETPWRLSENNNNLVTLLKANLLRNNIDYLWHKATGCFSNGKNSIDFLGRRYGKSMEVRRTTVPRAIVNDGARSTTT

SEQ ID NO: 335225 - protein, 71 aa, Zea mays
  Clone ID: MRT4577_68837C.1.pep
FALSFFCDCPLRWFKLTKPNFLCLDYIPDCKLPSDHWGPILLGTYFTPIIATKSSRPIKYSNIFTLHLFLN

SEQ ID NO: 335226 - protein, 235 aa, Zea mays
  Clone ID: MRT4577_68838C.1.pep
MANTGGSDSQALQDSRSQRPSSNRSSATPTNVAASSNVVAAATPTSNAHSSSAANATPCSSAQAQPPTEEVMEYQGSMEGMATTDGVGATNRNVVLNEGDDLVFGMFDKYLSEETKESSTFVRTELDLYLEEPTMLRTQELDIIHWWQYVGVKYPTLRNIAQDIMAIPVTTMASESVFNTGGRVISPHRSRLAPKTVEGLMCMQAWSRADMLGDKSCFINALMTCLEDEEDEMVT

SEQ ID NO: 335227 - protein, 112 aa, Zea mays
  Clone ID: MRT4577_68839C.1.pep
KQVGPEMVQQRSPVSGFTPKNQLPGGTPNFSGGPCDPKPGGGPFNLFNQKLGSGNKKGAVKRWKKLFPPGGKFQGPRGGKILARLGVKQEKCPQFFLDKKFFPPKQGKFFLV

SEQ ID NO: 335228 - protein, 123 aa, Zea mays
  Clone ID: MRT4577_6883C.1.pep
GARITDSGTNHLRNLKKLQSLEICGGGLTDTGVKNIKDLSSLTLLNLSQNSNLTDKTLELISGLTGLVSLNVSNSRVSSSGLRHLKPLKNLRSLTLESCKLSANDIRKLQATDLPNLVNFRPE

SEQ ID NO: 335229 - protein, 166 aa, Zea mays
  Clone ID: MRT4577_68840C.1.pep
MSGLSAPPFDGLASGPDPWDVVVKVKYGDTLKRFNGYVNGTHFTLNLSALRSKIASAFKFAPDADFILTYTDEDGDVVMLDDDEDLHDAAIHQKLNPLRINVQLKNSHAGASHINRQDSSPKPLEATTQDPIAQIKSVIDEALKPISKPLRSTAREDPLAPLKSAL

SEQ ID NO: 335230 - protein, 247 aa, Zea mays
  unsure (1)..(247): unsure at all Xaa locations
  Clone ID: MRT4577_68841C.1.pep
MVAVKAFLISTVLALPFAGAATVHVARDSHEHASRSALPDQWYHDDSHPAHLLFKRGPDDGTGFAPIGSPTWSAGFPKTTPDPNQLPKPWVDALNAAVNAGKIPNIPQTTSINVGVPQYPAGYDPNGPQVCSAYYKTCRNKADIWDAPDGYLGTSFDDGPLPDQVTLNNFLAQNNEKTTYFFXIGVNMLANPQVLQDTINQGNXIAVHTWTHPQMTTWXXLDVLGQLGWTVELIRNSTGGKIPKYWR

SEQ ID NO: 335231 - protein, 133 aa, Zea mays
  Clone ID: MRT4577_68842C.1.pep
MPATPTIIGALLGLGTQMYSNALRKLPYMRHPWEHVLGMGLGAVFVNQLVKFDEKLKEDLDKMLERARLANEQRYIGTVLTCLWHLNNSKDFAQVRSLHRIYPNNLNSQLVLDKLFFNWCYLYSCISSFEATN

SEQ ID NO: 335232 - protein, 76 aa, Zea mays
  Clone ID: MRT4577_68843C.1.pep
MIAGEHRLDPATISLGVDQTDDHQQPTHSRIRKKRVSPTSVWFQPYFCILKTLCTTLDTVQDDATSSWMLICHVDF

SEQ ID NO: 335233 - protein, 48 aa, Zea mays
  Clone ID: MRT4577_68844C.1.pep
YCWKGATPGRGNFITSGGRTNKDRDKLIIDKNANRNGMSSMKRNEETT

SEQ ID NO: 335234 - protein, 102 aa, Zea mays
  Clone ID: MRT4577_68845C.1.pep
NRKKSRRHNGVFDKKTTPVVHSVWPFPTNRRRWGCNPSGRFFQSIGRVIPFKCSRFQVLYPGRGAHTKRRVQLFGIFLYKSRYAYHGSLDPVRKNLNEHACS

SEQ ID NO: 335235 - protein, 63 aa, Zea mays
  Clone ID: MRT4577_68846C.1.pep
NLIKSNSSKLPTPFSLAFLNPLTNLNIFTLLNQIYMNCKSIYKPFNLNLPILIISTHLKFSLP

SEQ ID NO: 335236 - protein, 52 aa, Zea mays
  Clone ID: MRT4577_68847C.1.pep
QCSSRDNHKNTTTSSYDNMRHLAASIEIPFITPSHHRGSTKSFLFGPVQEAV

SEQ ID NO: 335237 - protein, 110 aa, Zea mays
  Clone ID: MRT4577_68848C.1.pep
SLHQMQLYSRLTTHPTGLHDPLILHYEPYLLLFRLLNATPRPLIAHDLNKTLKGISMKKNMDLNYFQSTNRTLILTSSRLNTMIELEYRLLTAHFVCLLLFKHPTHLFPL

SEQ ID NO: 335238 - protein, 138 aa, Zea mays
  Clone ID: MRT4577_68849C.1.pep
VAAGAGARHRRGRRGYGGRVGGHGVRRRVWMQVRAHPGPQGAGAAPRGSAGARCSQRAALESVLWGRRMLARTNDAEKDALAAELVKEQERRRHSPLPNVAIKQVATPRLSSATATSGTATARTASTMPSPASWDSRR

SEQ ID NO: 335239 - protein, 123 aa, Zea mays
  Clone ID: MRT4577_6884C.1.pep
VSSSSYAVTVMHACPALANGSTWLTSSVPWQLIIATRWWQWQQPRECTRCCGPPAGGVSRGLRTTTWGEPSCTSVVCGQHDSVIQGQVHHGAGAWLGSYLPLLAPSVWIRSGGLVLEILTDDG

SEQ ID NO: 335240 - protein, 65 aa, Zea mays
  Clone ID: MRT4577_68850C.1.pep
GLGCRLGKLARLVFVGPFFFFFFFSVIVLNIITQPKLISLSFIQYGRRLDHPHTQTHFATTTSSR

SEQ ID NO: 335241 - protein, 58 aa, Zea mays
  Clone ID: MRT4577_68851C.1.pep
WLWNLWADLCACATSTLGNPRLDKKLVVANRTDGCGKLAAREVATKEEAAKKASKINA

SEQ ID NO: 335242 - protein, 86 aa, Zea mays
  Clone ID: MRT4577_68852C.1.pep
LLPPFFFFFLGVFFRDEGLALNLKAFIRSKAKPPCTHIWTHHLYSTSGEMETNCSREMMHPRHIHHTWAAKQSSQVLWAHMTEGLH

SEQ ID NO: 335243 - protein, 103 aa, Zea mays
  Clone ID: MRT4577_68853C.1.pep
KSHCVQSMQLRELFTCSYRFVSNVLWLFLSQDVSLLQSLEYSQVWNLGGSTDNLWRFFTCFRQYQWVQHNASMDSASLLKMVRRPLLEAPTFIPGADPSPCSR

SEQ ID NO: 335244 - protein, 121 aa, Zea mays
  Clone ID: MRT4577_68854C.1.pep
KGYSGAKKLQGVRGQIRGVFLLIANAFCALTRIQIYIPEGFFFFLPRGEPFKKIPPGQKTIFWEGQTIRPFYKTKTGGVKHTLLGCYPNWTTWEFTAKQPFIADAGPNPQGSLWGTKSAHP

SEQ ID NO: 335245 - protein, 64 aa, Zea mays
  unsure (1)..(64): unsure at all Xaa locations
  Clone ID: MRT4577_68855C.1.pep
RTLTRTKHTARKSTGCKASRKQIATNAARKSAPTTGGVKKXHRYMSGTVGLRXIRKYQKGTELL

SEQ ID NO: 335246 - protein, 84 aa, Zea mays
  Clone ID: MRT4577_68856C.1.pep
THASEKKKKKKKKKKKKKKKKKKKKKKKKDKKKKKKRKKKKKNKKKKKKKKGGAPQRVQALFPVAGDFKPLQRFPQISFQGPSF

SEQ ID NO: 335247 - protein, 98 aa, Zea mays
  Clone ID: MRT4577_68857C.1.pep
QQPKFKRGPKSGAKINPTETPLTNTTGKQEDYLQGGGEKKKPTPGKGKKTPPAPRKPKPTKRGRQHERTEKNSLLLGPRESTPKKKTKRRRRRRGKNR

SEQ ID NO: 335248 - protein, 151 aa, Zea mays
  Clone ID: MRT4577_68858C.1.pep
MSCVNMYNPEQHQAAPPFMAPRMSFSSDSAVEPPPPAAARGGAAGPGDADFEFSVGSHPMMAADQLFSKGRLLPLREAPQQAGGGARPVTLREELRADERHGRVPRAPNIRWKELLGLKKAPKKQAAADAAAGTSADAHMDLGGQQGSTRD

SEQ ID NO: 335249 - protein, 47 aa, Zea mays
  unsure (1)..(47): unsure at all Xaa locations
  Clone ID: MRT4577_68859C.1.pep
KNLTLRPNILQNYLRVYIFRVPILVFMLHPXTQLETFPRSXTPDAWV

SEQ ID NO: 335250 - protein, 1015 aa, Zea mays
  Clone ID: MRT4577_6885C.1.pep
MEALPADDRRPFEDLVMRDEKEVMRQWNEQRDKEEAELLHKLSERRKEAADKYLSHFTVDRHQKIVRQGEIDMESLLPPLQGPAVSTPDLSLTTFMDQRGDQLKQYVDESIKMHLRAYEKSTAPNFPSRESNTVPPTSNTSALNGSPLTQPSYGMPMHAFVSPSQPQPLGTRQVLDATGPSEHHLRQSGYTADRPAYFAGPSDQMQARTQNTQVAPYMAGPSGYNPEHFGPITDRPVHHAGPSGYVADRPPSYAGPSGYGMNRMTYYAGPSDSTRVHAQTAQVTPYMADPSGYSPGPFGPIADRPVLYDRRSGYETTHVAPYTAGQSGYTFRPFGQVADHSASYAGPSGYAYAEPRAAQYAQFPHSSQQHYGAPPATHYNHAIPPHGHRAEYYSATREPEGYRAGAGDINRTPNTHLKHTWEESRQSNVRQPEISTHKLNGWSPDMAERVRDEVAGMFRDKLGVSVSGTGQSYRKPYSHRFDTVQYPQGTRIPDFSKFSGESGKSTHEHISQFIALLGELADGEAYRVRLFSLSLTDTAFAWYAALPPNSINSWEELEQKFHEHFFSGKHELELADLASVRQGPEESVNDYIRRFRDTRNRCFQIHVAEKQLTGLAFNGLRPYLKEKLDGTQFFSLVHLHQRAMTCESRNKETSKSASHKMHLVGYDNSDDESTDVYTAELVWPGQAKPSACSALQSIRKNRQEEVKFTFNVAKCDKIFDELLKNGNIKLTHTIPPPDELKRRAYCKWHNSFSHATNDCNVFRRQIQSAINEGRLAFQEMQVDTQPFPVNTIELTCKKVLVRPEMADKGKGKGIVISNPRMSDISQKEIARKASDEKAKRSEDAGGQAQLIKQTHQPSPSIVDGPTPTYGQSGAQTNGPANSAGQSTYDQRRQPLHKARSRKKTQGQSKYNRRIKADPTFDPLLSKNTSKKTVPRDRSTKTPRSPAKTKQSNKTTRSAAQQASPIHYMRPGYFPPIYSSSVYYPVQTGNGTMMNPWYMYSPFVYPDWGAPPFYSF

SEQ ID NO: 335251 - protein, 110 aa, Zea mays
  unsure (1)..(110): unsure at all Xaa locations
  Clone ID: MRT4577_68860C.1.pep
RTARPPAGAEQGGGRPPPGRRSRQXSARPRAXRQQRRAXAGPKENPPPPPPPALXXTKASEDSTXRXTVGPARVTTKIRNMDPRGRGDRAGRXCGPAPPPXRRADVEKIV

SEQ ID NO: 335252 - protein, 236 aa, Zea mays
  Clone ID: MRT4577_68861C.1.pep
MAGRVADKDPELKVLGVWSSPFVIRARVALNLKGLAYRYVEDNLDSKSELLLASNPVHGKVPVLLHDGRPVCESWVIVEYIDEAFPASGPCLLPADPYRRAVDRFWASYADDKLFPTWIPVYNGRTSEDRVAAARQVVAVLEKFERAFDECSGSGGKAFFGGDAAGLVDVVLGGFLGWLRASEAMCGVRVIDPAKTPLLAAWADRFAALDGVREVIPDVQRLLEYNKIRRARRGLP

SEQ ID NO: 335253 - protein, 123 aa, Zea mays
  unsure (1)..(123): unsure at all Xaa locations
  Clone ID: MRT4577_68862C.1.pep
RWEDPREKKNPPASAAPGLNNTNGAGRAPNHRXTDRRRKTTXTGEDVKHKSTKDACQQTRKKEGHKRQNKGAGANKQRANEGAGEQTGNNQIKNHGYGKKNGTGGAKKEKKEDEQEQRAPGPA

SEQ ID NO: 335254 - protein, 270 aa, Zea mays
  unsure (1)..(270): unsure at all Xaa locations
  Clone ID: MRT4577_68863C.1.pep
REKLRAIQEVDGPPSPSPPPPRVCVTGGGGFIASWLVKLLLSRGYAVHATLRDPSDPKNAHLMQLDGAAESLSLFKADVLDRAALAAAVAGCQGVFHVASPVPAEKIVDPESEVMVPAVKGTLNILEVCSSLKVQKVVVVSSTAAVHYDPNWPQGKPKDESCWSDRKVCKDNEIWYSLAKTVAEETVWEYAEKYRLNAVAVCPCIVLGPQLQCAVNTTSELLLYVITGGPNALNDVLWHIVDVRDVADALLLLYEKPESSXRYICAPNTL

SEQ ID NO: 335255 - protein, 73 aa, Zea mays
  Clone ID: MRT4577_68864C.1.pep
IRLELKLGLYCLLFRLLAHPPAVLLWTHWAIPIHLTTLAILIHGARATVQLYTHYAELVTPLCTIRPQVQNLP

SEQ ID NO: 335256 - protein, 87 aa, Zea mays
  Clone ID: MRT4577_68865C.1.pep
NGLLKTLANAESAVAECVKARESLISGLEKMLDSNRAALESEQKTAHEFSTRKREIEDKKQQVEVAIMRALGPAENNGSLAEGESGS

SEQ ID NO: 335257 - protein, 236 aa, Zea mays
  Clone ID: MRT4577_68866C.1.pep
SAGQSLSHLISMLEFAAMCLRRGLAVTVAVPDPSLTAPAFRSTIGRYASRLPTLSVHSLPPPPALDAASAAAHPFIRMQAASRSQAPVLRDFLHSLPDVHALVADMLAVCDLDVATELGIPGHLFFSTGAASLSVFLQLPLFCSGRAGNLKDLGDTPVSFPGMSPMPASHLVDAVLDRGTDLYATVLDVFGRIAGARGILVNTFDALEGSAVSALRDGRCLRGRATPPVYCVGALI

SEQ ID NO: 335258 - protein, 79 aa, Zea mays
  Clone ID: MRT4577_68867C.1.pep
LLYTRNMVLNIGKIAHHRASLRDMNIQCSAQGKLGGSQRKYRARASTCTNILHIPPRLYLIQPQPSQHLANNHYHGIQP

SEQ ID NO: 335259 - protein, 85 aa, Zea mays
  unsure (1)..(85): unsure at all Xaa locations
  Clone ID: MRT4577_68868C.1.pep
MSMRGKGGKGLCKGXTKPHRKVLRDNIQGITKPAILTLARKGGVKRISELIYXETRGVLKILLENVILYSYTLHLARAHRRPTPT

SEQ ID NO: 335260 - protein, 52 aa, Zea mays
  Clone ID: MRT4577_68869C.1.pep
TDEFPSPLACGPIIQGSITCYKGSPPPGLLIFVQPHTVIFVKFAQTRLFVRC

SEQ ID NO: 335261 - protein, 42 aa, Zea mays
  Clone ID: MRT4577_6886C.1.pep
FERTGSCFHDQFSFRKTGKTPFYFLKKEGGLNHGIVILPPPP

SEQ ID NO: 335262 - protein, 102 aa, Zea mays
  Clone ID: MRT4577_68870C.1.pep
ALFPHPGWVKEKGFPPLENFHRFRFPPPFQGSLSRTPPRILGAFPPSWFNKRVFPGGKNLNRFRGRPPSPKPVGNFFSRFFGPLKNVFKLLFFFQSFWVSRF

SEQ ID NO: 335263 - protein, 81 aa, Zea mays
  Clone ID: MRT4577_68871C.1.pep
NPPELFHKILNIPKDTFPKDLPASYKSLDKKWHPDKHPPVSRPEAEARFKAISEVYEALLDQQENSALFGPRNCHRAGGSS

SEQ ID NO: 335264 - protein, 73 aa, Zea mays
  Clone ID: MRT4577_68872C.1.pep
DAWAVKRKMVEKKKKKQKRKKLTERCGISNILSDPTYVIFHPMCYLIYTVHLTMSTGRIVTTTPFLKPLIYLN

SEQ ID NO: 335265 - protein, 95 aa, Zea mays
  Clone ID: MRT4577_68873C.1.pep
MAKCSSFQGLFWLLSMILLASFVAHARTTSGHTKEDSNARNMTMTKTRASGNILVSRNDDGPCYLDSGLNEYVCRKTNKCYKSLVLCVASCQPSS

SEQ ID NO: 335266 - protein, 65 aa, Zea mays
  Clone ID: MRT4577_68874C.1.pep
KGPHKGGTGYVWPSSFGSWVALDRQQPNFYFKRVLLGRQALGLFEFVGGRDSVLSLKRAPRKFNP

SEQ ID NO: 335267 - protein, 92 aa, Zea mays
  Clone ID: MRT4577_68875C.1.pep
SSEFGSRFTWQGLYLFRVPKVKNGIMRSCSNYQPPTAAQKGYTNNIRCPSLYLITENDLLKVHREKLIKACVYTFVILKLKDHTVTTLKDKR

SEQ ID NO: 335268 - protein, 67 aa, Zea mays
  Clone ID: MRT4577_68876C.1.pep
ETTPLGSEPSSTASSSDGSRASLFLMKASKSKSLVRVPIVRSRCYEHHCPQKFLKTWQWEDTVLLCF

SEQ ID NO: 335269 - protein, 55 aa, Zea mays
  unsure (1)..(55): unsure at all Xaa locations
  Clone ID: MRT4577_68877C.1.pep
IQLALICGTYYSTERFNIPYRCWRMPSWYVTLAMCCAXAVIEDTWHYLLHRLLHH

SEQ ID NO: 335270 - protein, 75 aa, Zea mays
  Clone ID: MRT4577_68878C.1.pep
MAAAPADAKAEAAKMDLLEDDDEFEEFEIDQEWDDQEEGNEAVQQWEDDWDDDDVNDDFSLQLKEELDGSNGQKS

SEQ ID NO: 335271 - protein, 55 aa, Zea mays
  Clone ID: MRT4577_68879C.1.pep
MAVTITWVKARQIFDSRGNPTVEVDVGLIDGSYTRGAVPSCAYIGIYVALLMMFG

SEQ ID NO: 335272 - protein, 975 aa, Zea mays
  Clone ID: MRT4577_6887C.1.pep
MEALPTDDQRPFEDLVMRDEKEVMRQWNEQRDKEEAELLHKLSERRKEAADKYLSHFTVDRHQKIVRQGEIDMESLLPPLQGPAVSTPDLSLTTFMDQRGDQLKQYVDESIKMHLRAYEKSAAPNFPSRESNTVPPTSNTSAMNGSPLTQPSYGMPMHTFVSPSQPQPLGTRQVLDATGPSGHHLRQSGYTADRPAYFAGPSDQMQARTQNTQVAPYMAGPSGYNPEHFSPITDRPVHHAGPSGYVADRPPSYAGPSGYGMNRPTYYAGPSDSTRVHAQTAQVTPYMADPSGYSPGPFGPIADRPVLYDRRSGYETTHVAPYTAGQSGYTFRPFGQVADHSASYAGPSGYAYAESRAAQYAQFPHSSQQHYGAPPATHYNHAIPPHGHRAEYYSATKEPEGYRAGADMAERVRDEVAGMFRDKLGVSVSGTGQSYRKPYSHRFDTVPYPQGTRIPDFSKFSGESGKSTHEHISQFIAHLGELADGEAYRVRLFSLSLTDTAFAWYAALPPNSINSWEELEQKFHEHFFSGEHELELADLASVRQGPEESVNDYIRRFRDTRNRCFQIHVAEKQLTGLAFNGLRPYLKEKLDGTQFFSLVHLHQRAMTCESQSKETSKSASHKMHLVGYDNSDDESTDVYTAELVWPGQAKPSVCSALQSIRKNRQEEVKFTFNVAKCDKIFDELLKNGNIKLTHTIPPPDELKRRAYCKWHNSFSHATNDCNVFRRQIQSAINEGRLAFQEMQVDTQPFPVNTIELTCKKVLVRPEMADKGKGKGIVISNPRMSDISQKEIARKASDVKAKRSEDAGGQAQLINQTHQPSPSIVDGPTPTCGQSGAQTNGPANSAGQSTYDQRRQPLHKARKKTQGQSTYNRLIKADPTFDQLLSKNTSKKTVPRDRSTKKPRSPAKTKRSNKTTRKATQQASPIHSMRPGYFPPIYSSSVYYPVQTWNGMTMNLWYMYSPFVYPGWGAPPFYSF

SEQ ID NO: 335273 - protein, 102 aa, Zea mays
  unsure (1)..(102): unsure at all Xaa locations
  Clone ID: MRT4577_68880C.1.pep
PSPPRTRPPTGPPNGGGPCAMPPPPGXPPPLGTRERAPPGQTTPSFGSPPWHQRIVSLVPKDKPVAXPPPAGGPPSFFRTPLLETPMGVFSKKKEKGGFTLV

SEQ ID NO: 335274 - protein, 106 aa, Zea mays
  unsure (1)..(106): unsure at all Xaa locations
  Clone ID: MRT4577_68881C.1.pep
MXLAARLGSRSRQQYSDQANLGKGGVTQARSFAKEAAPADRPPVGGDDLLKGIFLEVKKKXETDLEDLKKEKTTIDPDDPPEENXYAQAMKTARENADPLPCTSKA

SEQ ID NO: 335275 - protein, 200 aa, Zea mays
  unsure (1)..(200): unsure at all Xaa locations
  Clone ID: MRT4577_68882C.1.pep
WAFGKEEHHLLAELVLAQRNXAQLACGSXGASGPSVASTSPXTNNQDIAEVVEWSENDYXEAMSVWFDDDKTRMESPAQKRGHIXTPIRDALRAKLHHXLAKLVTVEMXGTCLPEGIGEVQEIPDVCDYAVEVTHRLSGSMIPSDRPNHMMMDVRNPLVVAGVITTCNFPXAVLGCDACIALVCGHCVXWIGAPTTPLIT

SEQ ID NO: 335276 - protein, 104 aa, Zea mays
  Clone ID: MRT4577_68883C.1.pep
MEIFASLFRQNVKSKFPEKVCSGFLWIQDRHNKRAHNCYSYMGILRSLFRQNVELKFPEKVRSHVLRIQHRPNMRTHNCSSKMSIYASLYLANRGSGSHREDPL

SEQ ID NO: 335277 - protein, 54 aa, Zea mays
  Clone ID: MRT4577_68884C.1.pep
FWSICFSQKTGQWQGEARLLNSTKTHLTVNHHQCKSLLSLGNLKIIAINWKTNF

SEQ ID NO: 335278 - protein, 145 aa, Zea mays
  Clone ID: MRT4577_68885C.1.pep
SRPSSYCQCSCYMPLARPIPPLSRRPFPRVVRLLRPHLCSSPSSHVVPDLRKIRLQCMLACRFFLFRRPPPSVVPKVCCAWRGVSSPRRRPFVGRSCRWTRAIREPEARAATPATELRVVSASYRSGDERRIRCRKAESEAFVAG

SEQ ID NO: 335279 - protein, 94 aa, Zea mays
  unsure (1)..(94): unsure at all Xaa locations
  Clone ID: MRT4577_68886C.1.pep
RNESKHSFYLFFSWPSTRGGTFYITFGLTKIGKQTQVGGVGNFPRGMLSLELLGLLSSANVCLXFHKLRPEVGWGSSVKPQKFSLAAPDPCLNQ

SEQ ID NO: 335280 - protein, 64 aa, Zea mays
  Clone ID: MRT4577_68887C.1.pep
AGEKIAEPNRPFDPMLFLLCKNFTLDHNHKRMRSWCLRRKIADASLKELRLLGDTHILRGGSQT

SEQ ID NO: 335281 - protein, 354 aa, Zea mays
  unsure (1)..(354): unsure at all Xaa locations
  Clone ID: MRT4577_68888C.1.pep
YDDLPPXKRLTKLSLPTEQEQRKAYLEELDYREKLFYQKQLKEXKKRRKLMKKXAAEASARANDFSNSNLEDDATTPTNVSVPMPDMVLPSSFDSDYPSHRYRFLXDTPSEWLVRPVLETQGWDHDVGYEGLNVEIFFAVKGKVPLSVSGQLTKDKKDCSLQMEVASSIKHAEGKTTSLGLDLQSVGRDMAYTIRGESRFKNFRRNNTSAGISATLLGDSVSAGMKIEDKLIVNKQLRVLVSSGAMSGRGDMAYGGRLEATMRDKDYPIGRMLSTVALSVVDWHGDLAIGCNIQSQIPAGRASNLVGHANLSNKGTGQVGIRLNSSEHLEIALVALVPIFQNIMKLLQNYSESG

SEQ ID NO: 335282 - protein, 96 aa, Zea mays
  Clone ID: MRT4577_68889C.1.pep
RCRHGRATLVVSSYTTQVCNRITACWRRGVVDVVPCIGRGCGERRQQLNSMKRPARCPSWCCGCGVQVTCIDIHVLNYIYLLYNSFISVSKPCKTL

SEQ ID NO: 335283 - protein, 564 aa, Zea mays
  Clone ID: MRT4577_6888C.1.pep
MEALPADDRRPFEDLVMRDEKEVMRQWNEQRDKEEAELLHKLSERRKEAADKYLSHFTVDRHQKIVRQGEIDMESLLPPLQGPAVSTPDLSLTTFMDQRGDQLKQYVDESIKMHLRAYEKSTAPNFPSRESNTVPPTSNTSAVNGSPLTQPSYGMPMHAFVSPSQPQPLGTRQVLDATGPSEHHLRQSGYTADRPAYFAGPSDQMQARTQNTQVAPYMAGPSGYNPEHFGPITDRPVHHAGPSGYVADRPPSYAGPSGYGMNRMTYYAGPSDSTRVHAQTTQVTPYMADPSGYSPGPFGPIADRPVLYDRRSGAEYYSATREPEGYRAGAGDINRTPNTHLKHTWEESRQSNVRQPEISTHKLNGWSPDMAERVRDEVAGMFRDKLGVSVSGTGQSYRKPYSHRFDIVPYPQGTRIPDFSKFSGESGKSTHEHISQFIAHLGELADGEAYRVRLFSLSLTDTAFAWYAALPPNSINSWEELEQKFHEHFFSGKHELELADLASVRQGPEESVNDYIRRFRDTRNRCFQIHVAEKQLTGLAFNGLRPYLKEKLDGTQFFSLVHLH

SEQ ID NO: 335284 - protein, 92 aa, Zea mays
  Clone ID: MRT4577_68890C.1.pep
SGTKGSTNPSILLACGGVLNQCKEKQSRESRAPSCIARTSRTSPRRRRLRKQLDPRHRIDRAIRKESSGGGWQLTETRGEDNNRFSSRSVSA

SEQ ID NO: 335285 - protein, 40 aa, Zea mays
  Clone ID: MRT4577_68891C.1.pep
PTTIINQQLRSTRPLPRTGLLPLLTTSPPLLSVTWRGRPG

SEQ ID NO: 335286 - protein, 90 aa, Zea mays
  unsure (1)..(90): unsure at all Xaa locations
  Clone ID: MRT4577_68892C.1.pep
GLGFVPDRLGWNVQAELVHLRGAMLGAGGIFIPEFLTKIGVLNTPFWDPGGEQHYFTDTTPLFIIHLILIGWAXGRRWAGLLWPGXVAPV

SEQ ID NO: 335287 - protein, 48 aa, Zea mays
  Clone ID: MRT4577_68893C.1.pep
LWVGLRRAVNRDGNGEIPVGFWLPVPVPATKKPREDPHELLRGAFLPH

SEQ ID NO: 335288 - protein, 57 aa, Zea mays
  Clone ID: MRT4577_68894C.1.pep
SLQPFFSQQLPCARPGDAPTTMAANSNLFRDYIGAIFNGDQLSDETMNTDATKKHVE

SEQ ID NO: 335289 - protein, 53 aa, Zea mays
  Clone ID: MRT4577_68895C.1.pep
RPFIQSGIRASLRSVHVLESRQHDSTAALGYVTLRTGDRPAAYSTQARGVTRP

SEQ ID NO: 335290 - protein, 151 aa, Zea mays
  unsure (1)..(151): unsure at all Xaa locations
  Clone ID: MRT4577_68896C.1.pep
MVCCYLQVSPGDSFIDVKQLLLDAPETCFYAXYNLILHTKDGLAHQLEDYKEISEIADITSSGCSLEMVASXTTSSFFSIVIYTYIVLXSGAKVKVLSATYNERSIRSHLRRVKGLLSLSSLYVSLSTSLALLQESAQGKFAGLIYVFSVH

SEQ ID NO: 335291 - protein, 56 aa, Zea mays
  unsure (1)..(56): unsure at all Xaa locations
  Clone ID: MRT4577_68897C.1.pep
MGKRKSAAKPPPTKRMDKLNTVYILPFCNHGSSAECRIDMKNLIGEXSCIICPGNF

SEQ ID NO: 335292 - protein, 83 aa, Zea mays
  unsure (1)..(83): unsure at all Xaa locations
  Clone ID: MRT4577_68898C.1.pep
QASVTGAERTPRRSSTAASALLWXGGPSFFFSVSALAACGFWWRPVLGAGAGDRVLSRLHSVRGEHCWTHYSDRPPMSLDRPS

SEQ ID NO: 335293 - protein, 164 aa, Zea mays
  Clone ID: MRT4577_68899C.1.pep
PPKKNPRFFPPKGKGFSKGPEKEKKRAPPFPRKKKKIFRGEKSPPKQENWGAPGFPPGGENKKHPPPPPQIRSIFLFFWNWARAIAQSKIACPSALNYKQYTVNFGPLLGRVQFLGDDDPPQFGVDQTPPSRKQIFRIFFRRRGGSILCHVGKTHNINTGSPCL

SEQ ID NO: 335294 - protein, 500 aa, Zea mays
  Clone ID: MRT4577_6889C.1.pep
METLPADDQRPFEDLIMRDEKEVMRQWNEQRDKEEAELLHKLSERRKEAADKYLSHFTVDRHQKIVRQGEIDMESLLPSLQGPAPQPLGTRQVLDATGPSEHHLRQSGYTADRPAYFAGPSDQMQARTQNTQVAPYMAGPSGYNPEHFGPITDRPVHHAGPSGYVADRPPSYAGPSGYGMNRPTYYAGPSDSTRVHAQTAQVTPYMADPSGYSPGPFGPIADRPVLYDRRSGYETTHVAPYTAGQSGYTFRPFGQVADHSASYAGPSGYAYAEPRAAQYAQFPHSSQQHYGAPPATHYNHAIPPHGHRAEYYSATREPEGYRAGAGDINRTPNTHLKHTWEESRQSNVKQPEISTHKLNGWSPDMAERVRDEVAGMFRDKLGVSVSGTGQSYRKPYSHRFDIVPYPQGTRIPDFSKFSGESGKSTHEHISQFVAHLGELADGEAYRVRLFSLSLTDTAFAWYAALPPNSINSWEELEQKFHEHFFSGEHELELADLASVR

SEQ ID NO: 335295 - protein, 390 aa, Zea mays
  Clone ID: MRT4577_688C.1.pep
MEMESTPLLTPYKMGDFNLAHRVVLAPLTRCRAFGNVPQPEHMALYYRQRATPGGFLIAEACAVSESARGYPDVPGLWTHQQVVAWKPIVDAVHASGAVFFAQLWHTGRASPSAHRPVILWPSASGHCWLQQFQPNGQAPISSTDKQIPAQVNHSGDVNTFAVPRRLETEEIPHVVNDFRVAARNAIKAGFDGVEIHAANGYLFDQFMKDSTNDRDDSYGGSLENRCRFTAEVMAAVADEVGANRLGVRLSPFADYMDCHDSNPEALALHVIDETLNPLGVLYCHMVEPRMRVNPDDGIMTLEHMLLPFRRAFRGTFIANGGYDREEGNDAIARGRGYADLIAYGRIFLANPDLPMRFAKNAPLNKYDRSTFYTSDPVVGYTDYPFLDQL

SEQ ID NO: 335296 - protein, 92 aa, Zea mays
  Clone ID: MRT4577_68900C.1.pep
QKLVVPATVKCRRQKTSRTSSYVVISTGIGKNGEKKSHSCGDGNLKMIKYKRINKNTKLPLQQLQLKQIQHSKILYDCPQLFERIDSNGIRA

SEQ ID NO: 335297 - protein, 94 aa, Zea mays
  unsure (1)..(94): unsure at all Xaa locations
  Clone ID: MRT4577_68901C.1.pep
RPPKNGLSTQQNTVLRDYMGRAQATGEKHCKXLTTAVTTVLNEMNGRTLALIGLVTTITAPSTRRATKTGHAVSHSKQNAACAETSVSSIERYF

SEQ ID NO: 335298 - protein, 69 aa, Zea mays
  Clone ID: MRT4577_68902C.1.pep
MAIGTAVGGTSIALFTGVSCWLGMKAYRDGRFSRGWWRMRVCTLGGVTTLGQALAYDCAMCGRSLDQRE

SEQ ID NO: 335299 - protein, 94 aa, Zea mays
  unsure (1)..(94): unsure at all Xaa locations
  Clone ID: MRT4577_68903C.1.pep
RQLGIRLVVWVLNVSDSMPDDVKEWLRESLADKQCLVVRGWAPEVAILAHRALRGLLTHXXCDWTIEAVAVGMPMGSCDVSAEQLINEWLALDL

SEQ ID NO: 335300 - protein, 81 aa, Zea mays
  Clone ID: MRT4577_68904C.1.pep
QPQGARCWASHRPGRTPHQVLLLVRLGIVHFCVCENSGLSHERDHLTNLIYHTPVALPRGPSLPQMRQRLHFSFFRCPSQV

SEQ ID NO: 335301 - protein, 196 aa, Zea mays
  Clone ID: MRT4577_68905C.1.pep
PRTATANFEFRLQTPSMLYIVKREKKLKKIGKYLSPTARHHSISLIQLSSYPLQPSTSSVAGFFLPRRSSAVLIPTPLSSEEKSRRSSTWILQPSHWIFLPRGASSASPLVRLLYLSLSALPGRALLVPRPAPWLAGAPSPLKLANANGAGPSLPCFSLSSPKRPRFLPLSARQAPNPWRTQSRPWPSARPRASLL

SEQ ID NO: 335302 - protein, 66 aa, Zea mays
  Clone ID: MRT4577_68906C.1.pep
KKKKKKKNFFFFFFFFFFYFFNLKFSLKLGGNLGLFGNSLMGPIVALFGFNLRECHFFFTGINLEK

SEQ ID NO: 335303 - protein, 79 aa, Zea mays
  Clone ID: MRT4577_68907C.1.pep
ALERATPRLEQSVVFQAVELFSRLSLYQLNLLRHRAGSSGLSWSHSSPWSAHLFSSPPPNGQFNLGWPITSNLLARARP

SEQ ID NO: 335304 - protein, 128 aa, Zea mays
  Clone ID: MRT4577_68908C.1.pep
SYLAGPVGEDIFHWQATIMGPSDSPYSGGVFLVTIHFPPDYPFKPPKVAFRTKVFHPNINSNGSICLDILKDQWSPALTISKVLLSICSLLTDPNPDDPLVPEIAHMYKTDRNKYENTARTWTQRYAM

SEQ ID NO: 335305 - protein, 160 aa, Zea mays
  unsure (1)..(160): unsure at all Xaa locations
  Clone ID: MRT4577_68909C.1.pep
SSLTGPVGEDMFHWQATIMGPSDSPYSGGVFLVTIHFPPDYPFKPPKVAFRTKVFHPNINSNGSICLDILKDQWSPALTISKVXTALTDSIIFSTVVCRFGSYLPTSNLSLLGFXLLSICSLLTDPNPDDPLVPEIAHMYKTDRNKYENTARTWTQRYAM

SEQ ID NO: 335306 - protein, 74 aa, Zea mays
  Clone ID: MRT4577_6890C.1.pep
MAAKLAQLRAQAARAAEFASKHGGAYYKEVMEKNKQYVVQPPTVEKCQELSKQLFYTRLASLPGRYEAFWKEFD

SEQ ID NO: 335307 - protein, 51 aa, Zea mays
  Clone ID: MRT4577_68910C.1.pep
LARSAEQSESSKKQSNGEPCECASSTSAVHHTHVRKSVASAGSGRAAGIYP

SEQ ID NO: 335308 - protein, 67 aa, Zea mays
  Clone ID: MRT4577_68911C.1.pep
EKVVAAFANEVGVIGPKKSAGIKILTGNFRGAPGKLIGINGFAGIVGLSQTYEVKILKRGILAQRAP

SEQ ID NO: 335309 - protein, 84 aa, Zea mays
  Clone ID: MRT4577_68912C.1.pep
RGTGSVRSPSLTSTGTRIAIYVNCRRRLSIPISISCALLCTGTGACDHSTSGWLALWVLRYRVTTAHIISRGANRRCASSAATV

SEQ ID NO: 335310 - protein, 128 aa, Zea mays
  unsure (1)..(128): unsure at all Xaa locations
  Clone ID: MRT4577_68913C.1.pep
MPVARSWVCRKTYVTPRRPFDKSRLDQELKLIGEYGLRNKREVWRVKFTLAKIRKAARELLTLDEKDPRRLFEGNALLRRLVRIGVLDEGKMKLDYILGLKIEDFLERRLQTQVFRLGLAKSXHHARV

SEQ ID NO: 335311 - protein, 174 aa, Zea mays
  Clone ID: MRT4577_68914C.1.pep
DAWVPLGFPNAADLGANWKPFYKAFPWNTAPSGQGADGRSHGNRGGRQAQNDSARGGSSRGRIKKTTARKKVGAGLRRRSLGGGVESGIDSSMLGQEGWAGDEDGGDGRTEEVRGININEAAQATDGTGRVNVSGAGGVEDMGNFHIDVDATEDILGNLHNLPFLRVDNLGRMI

SEQ ID NO: 335312 - protein, 102 aa, Zea mays
  unsure (1)..(102): unsure at all Xaa locations
  Clone ID: MRT4577_68915C.1.pep
PGEPPKPAGTKKKPPTPPPEIKTPGGPAPPGELPKKAXPREPSPPPSSPAIEQPAGPRDLLGPPFSQGFLVGPPTPPREGXFFKWLRPPPGGQRPPPPPPVS

SEQ ID NO: 335313 - protein, 94 aa, Zea mays
  Clone ID: MRT4577_68916C.1.pep
TEGGQIKRGPLTFKKGAPRSMGEKSPCQGREFNFWKQKFQPTPRQKKKKTFFFPPRKGKKKKKGRGKKHNLPGAPFPLWRDRAWGPGAQFLGGG

SEQ ID NO: 335314 - protein, 156 aa, Zea mays
  unsure (1)..(156): unsure at all Xaa locations
  Clone ID: MRT4577_68917C.1.pep
HWVPRGRPGLRHQRQQLRRHQSTPVDPRPSSPPPPQSTRSSPPPPSPQWKGVCTIRFPGIPSFRGSLPPPAITVMPPFLPXVXPATSAPPPNRKARSTASSALRAPRQPSXCDVAQVGEGRSRESPSGYLRPPPRHPGLPPAQPPPCPRXXAXXXP

SEQ ID NO: 335315 - protein, 57 aa, Zea mays
  Clone ID: MRT4577_68918C.1.pep
RSCAATKVTAAESAVTSVSRTLESYRARHMASADSALMGLRLQSRTHTSIRTAPTGE

SEQ ID NO: 335316 - protein, 132 aa, Zea mays
  Clone ID: MRT4577_68919C.1.pep
DLHPGLSRVRSRGRSWPPATRFRGRDGNILNCTKCLLQSEFLVVQQSTGSYRVGDVMTKREELHVVKPTTSVDDALEMLVKHRISGFPVIDDDWNLVGVVSDYDLLALDTISGAGPAEADIFPEVDSTWKEC

SEQ ID NO: 335317 - protein, 622 aa, Zea mays
  Clone ID: MRT4577_6891C.1.pep
MAGSKDHTKISTTNIIKPSMEALPADDQRPFEDLVMRDEKEVMRQWNEQRDKEEAELLHKLSEWRKEAADKYLSHFTVDRHQKIVHQGEIDMESLLPPLQGPAVSTPDLSLTTFMDQRGDQLKQYVDESIKMHLRAHEKSVAPSFPSRESNTEPPASNTSTINESPLTQPSYGMPMHAFVSPSQPQLLGTRQVLDATGPSEHHLRQSGYTADRPACFAGPSDPMQIRTQNTQVAPYMAGPSGYNPEQFGPITDRPAHHVGPSGYVADRPPSYVGPSGYGMNRPTYYVGPSDSTRVHVQTAQVAPYMTDPSGYNPGPFGPIADRPVLYDRRSGYETTHVTPYTAGHSGYTFGPFGQVADHPTSYAGPSGYAYAEPRTAQYAQFPHSSQQHYGAPPATHYNHTIPPHGHRVEYCSATREPERYRAGAGDINRTPNTHLKHPWEESRQSDVRQPEISTHKLNGWSPDMAERIRDEVAGVFRDKLGVSVSGTGQSYRKPYSHRFDTVPYPQGTRTPDFSKFSSEGGKSTHEHISQFIAHLGELADGEAYRVRLFSLSLTDTTFAWYAALPPNSINSWEELEQKFHEHFFSGEHELELADLASVRQGPEESVNDYIRRFRDTRNRCF

SEQ ID NO: 335318 - protein, 36 aa, Zea mays
  Clone ID: MRT4577_68920C.1.pep
ESTFLKILKNPLYQPLQESTRTFLQHIININLDSST

SEQ ID NO: 335319 - protein, 233 aa, Zea mays
  unsure (1)..(233): unsure at all Xaa locations
  Clone ID: MRT4577_68921C.1.pep
MDATLLLLPANCTAAASGRMRPRLPAGPHVASPGPSARPRTSIRASAVSAALAVRGLPQHASVAGQSTGSYRVGDVMTKREELXHVVKPTTSVDDALEMLVKHRISGFPVIDDDWNLVGVVSDYDLLALDTISGAGPAEADIFPEVDSTWKTFHEIQKLLSKTNGKVIADVMTPAPLVVRETTNLEDAARLLLVTKYRRLPVVDSSGKLVGIITRGNVVQAALEIKKKVEGTL

SEQ ID NO: 335320 - protein, 73 aa, Zea mays
  unsure (1)..(73): unsure at all Xaa locations
  Clone ID: MRT4577_68922C.1.pep
MAMASSSGLRSCSAAGVPSLLAPRFRTGRLAPFCANGTSSGRVTMXREGMRVQARPADFVRCSAADSPQEHAG

SEQ ID NO: 335321 - protein, 101 aa, Zea mays
  Clone ID: MRT4577_68923C.1.pep
NDQKSAKGIQPSGVSPSNEPDDNLPFHGDICGPVAATLNEDMFNIVISRWRETYEALKETNDYKTLSAAGSLMKNMIDMIYLVLKVLPEDSRESQTARVLL

SEQ ID NO: 335322 - protein, 85 aa, Zea mays
  unsure (1)..(85): unsure at all Xaa locations
  Clone ID: MRT4577_68924C.1.pep
LIYSREGAKDMRDXLRGGXLPKHVHPEDDGKNIEITEDAEGVNVLNIPSYMGGVHMRHNDYDHNDDFRQQLIKDKIIVGVRIYST

SEQ ID NO: 335323 - protein, 65 aa, Zea mays
  Clone ID: MRT4577_68925C.1.pep
KSPPGSTPWLFATAFPFKKKSSFSPTFCFSTHAPFCILRGLFCCNYVRDVPNCLVLWKRENVIHL

SEQ ID NO: 335324 - protein, 48 aa, Zea mays
  Clone ID: MRT4577_68926C.1.pep
ILQGGTRRALLMNPWIGPSHAGPLKSEQNAGTIEHFRRHVSKALISIT

SEQ ID NO: 335325 - protein, 54 aa, Zea mays
  unsure (1)..(54): unsure at all Xaa locations
  Clone ID: MRT4577_68927C.1.pep
GYVXGRXYISXWRYYXSEWWYYYKXPSGXSIAXKXQYNLRLIPATXXXXXXKXX

SEQ ID NO: 335326 - protein, 107 aa, Zea mays
  unsure (1)..(107): unsure at all Xaa locations
  Clone ID: MRT4577_68928C.1.pep
SSASSTAQTWLAGRSGHLGLDQCHSLLVARVQVELMMWVLRVRARRRVRLLQGGRARRGAVPTADDGHGARRQVRGEAQRRPHRLXRQCALYTAHSRDSLASAQAXN

SEQ ID NO: 335327 - protein, 77 aa, Zea mays
  Clone ID: MRT4577_68929C.1.pep
PSPQGLSSLVSCVLVSFCVLHCKVALCLVVSPVFIVGWIQIHASNSIHAGLMDAVTVVRVFPYDCLIIKVWCPHAVQ

SEQ ID NO: 335328 - protein, 80 aa, Zea mays
  unsure (1)..(80): unsure at all Xaa locations
  Clone ID: MRT4577_6892C.1.pep
MADGEDIPSLACDNGTGMNKAGFAGDDAPKADFPSIDGRPCHTGVMVWMGQKDAYAGDEAQSNEGILTLXYPIEHGIGSN

SEQ ID NO: 335329 - protein, 371 aa, Zea mays
  Clone ID: MRT4577_68930C.1.pep
MRRRRMGALHVVGEPRISFRQQPAAVVAKNGGHGAVVEEIHGLIRVYKDGHVERLPAIPAVPCTWGGTAAPDAPGGVVARDVVVDPATGVWARLYAPTSAGDGARRPVVVYFYGGGFCVGSAAWSCYHEFLAQLAARAGCAVMSVDYRLAPEHRLPAAFDDGLAAVRWLRHQAAASASASACSNDDLSWWRARCGFDRVFLMGDSAGASIALHVAARLGQGQLGALPPLTVRGAVLIQPFLGGEGRTASEKNVAQPPRSALTLPTSDCYWRLALPAGASREHPWCNPLSGRAAPRLETTPLPPLLVCVSETDILRDRNLELCRALREAGKRVEQAVYGGVGHAFQVLHNCHLSQPRTQEMLAHIKAFVSAR

SEQ ID NO: 335330 - protein, 88 aa, Zea mays
  unsure (1)..(88): unsure at all Xaa locations
  Clone ID: MRT4577_68931C.1.pep
MASSVAATVSTFLGTRLAVPEPQNGCIVVRFGFGLVGRAKPAPKNVATISNSSDRPLXFPRAVAPEYLDGSLVSNYGFDPFGLGKPVG

SEQ ID NO: 335331 - protein, 114 aa, Zea mays
  Clone ID: MRT4577_68932C.1.pep
RGVDPLSGRVYTPGCNPRRKRGQPGAIFQDTHQFSQKQWSNRGLITLVVLTRKREGERDKRAHLNEAGIKRRKDRPWKPGCYTDEHRRAGGRAARYCRGRPQDSRQMGNEGTRE

SEQ ID NO: 335332 - protein, 61 aa, Zea mays
  Clone ID: MRT4577_68933C.1.pep
VPEIPGRPHLLCRALREAGKRVEQAVYGGVGHAFQVLHNCHLSQPRTQEMLAHIKAFVSAR

SEQ ID NO: 335333 - protein, 40 aa, Zea mays
  Clone ID: MRT4577_68934C.1.pep
LTHALALAAGSIQRCVDCQGASQSVDCVLGSVMCTNLYSM

SEQ ID NO: 335334 - protein, 117 aa, Zea mays
  Clone ID: MRT4577_68935C.1.pep
MAAQRRRSGAADVASWCALLALVMVVGSLAGSGKEEEQQYNRARLVVVRGPRLAARPCDELYVVAEGETLHSISARCGDPYILERNPHVHDPDDVFPGLVIKITPRAGGSPNSGDAN

SEQ ID NO: 335335 - protein, 227 aa, Zea mays
  unsure (1)..(227): unsure at all Xaa locations
  Clone ID: MRT4577_68936C.1.pep
SSGNNAEYFFFFFFFFFCFYSXSEPTSCRDVLSRPEWQLAMVEEIAALERTGTWYLVPLSXASPITCKWFYKINTRSDGSIERYKAXLVARGFQQEYGRDYETXTPVAHRTIVHTLVVVASDRRWAISQIDMKNAFLHGELXEEVYMHPPLGYFVPDGHVCQLRRSLYGLKQAPRAWFEHFTSVVTFVGFVASQHDLALFVHTSSRGRTLILLYVDDIPRTLRCYHC

SEQ ID NO: 335336 - protein, 58 aa, Zea mays
  Clone ID: MRT4577_68937C.1.pep
RSGTNSLNGSRFSRSRIGKVPAALFPPSRPCPAWQSISVLSVPSVHLSICQYGSMYNP

SEQ ID NO: 335337 - protein, 81 aa, Zea mays
  Clone ID: MRT4577_68938C.1.pep
FIFFWNQSLHAPVTVKLVYDLKLKPLGSCFLGRFSSHLTSLICRCSFTFDPIILYLVKGLMKEKRLMFSKHIRSADGAVLM

SEQ ID NO: 335338 - protein, 55 aa, Zea mays
  Clone ID: MRT4577_68939C.1.pep
MQWPGSFCDTRQGCCFPDGAGKPAAALGIHGLWPNYAKCRGRHHREGGGLARAVL

SEQ ID NO: 335339 - protein, 179 aa, Zea mays
  unsure (1)..(179): unsure at all Xaa locations
  Clone ID: MRT4577_6893C.1.pep
VKLKGPGPNEGPRRTRAGRGEPRKAPQYRNPPPRGADPANKAGGPEXTPTGNQAEKEPPIREAPPPARRPRHKRRGPGRVPXGKGXVSPTQQRRGSAHDRPPRXPRQDSGEKAARERERAPSADRDQVPXASARPGPRGGSTGNAPQCGGNRPWERPPAPPPHIQGESGSPCVLQQLCW

SEQ ID NO: 335340 - protein, 54 aa, Zea mays
  unsure (1)..(54): unsure at all Xaa locations
  Clone ID: MRT4577_68940C.1.pep
RTRGRERPPFFFFFFFXXGRVFFYPPFLTKGASMTHHITGKHNFPLIEVKLVKN

SEQ ID NO: 335341 - protein, 195 aa, Zea mays
  unsure (1)..(195): unsure at all Xaa locations
  Clone ID: MRT4577_68941C.1.pep
MATANRTPPRTTTAPTPANTSPPRSPRNPAMPAAPCSSTTLSTRSRRSRSWTGVIRPQRPTAAASTTIPXRXTTRTTTATRPTRKPTRKPTARRRRTRTAPAATMVTAAAAAGAASSTRPTRRPTRRRKRRSSWAGATAPAPAGPSSGAHPAAHEQQAPARTWNVWMRCESGLVDATRWFMGTIANSNNNLQVTT

SEQ ID NO: 335342 - protein, 112 aa, Zea mays
  unsure (1)..(112): unsure at all Xaa locations
  Clone ID: MRT4577_68942C.1.pep
ASVXGARESGVSRGATXEXRKHGSGGGGAELPRAAAAHATRXMLRNRRRRRGGRRCSRRRAPPHVNLLSYGRCVHAMRHATTRSSRLKKNVALRYMIIYKIILCARDVMQCK

SEQ ID NO: 335343 - protein, 216 aa, Zea mays
  Clone ID: MRT4577_68943C.1.pep
DIILGVARGLQYLHEDSRFRIVHRDLKASNVLLDTNMVPKISDFGIARMFGGDQTTAYTLKVIGTYGYMSPEYAMDGVFSMKSDVYSFGVLVLEIITGKRTRGFYEEELDLNLLRYAWMMWKEGRGADLLDPVMDGGGSVNHSEVLRCVQVALLCVEVLPRNRPLMSSAVMMLASENATVAEPNEPGVNVGKNTSDTESSHGFTANSVTITAIDAR

SEQ ID NO: 335344 - protein, 130 aa, Zea mays
  Clone ID: MRT4577_68944C.1.pep
PTALLFDLSMHIFIPLIVNLYTSTTYLFPFFFSLIFFSPSSSPLCSPFIITLISFSHSLSNQPLYHISTYLTYPITSLPSHFILLSLSFIFLSFTAYLFFILLTHIYLQYTPYFPPYPSLIPIPPTFTFL

SEQ ID NO: 335345 - protein, 127 aa, Zea mays
  unsure (1)..(127): unsure at all Xaa locations
  Clone ID: MRT4577_68945C.1.pep
PPPRGGRGLCEFKSIVGGGCNNMIMGARAFGSAAGNWTGPPVDYAGHGXYTVSTAAYNFVENANIRGNADGTDSEMCPDAHLYIYMVCSRSRCSIMDIIAWLDAAIIDGFDMLPFSMGAYSXTQFKY

SEQ ID NO: 335346 - protein, 84 aa, Zea mays
  Clone ID: MRT4577_68946C.1.pep
PKKEPKPLAKNFSVSPPIGMFYFSFWRAKTETPPRWRPWRGVPPPVWGVCGGSPLPPNKGPSLSLNSCFHGGHHGLTLSKCQFG

SEQ ID NO: 335347 - protein, 85 aa, Zea mays
  Clone ID: MRT4577_68947C.1.pep
QVGRRRPRATGALPIPAWLEEVPVGLRDAILPQARGKKKQSTHAGAAPRLASSFILAWMTKILEAEGGVEAAAWLAFPTIKPEVA

SEQ ID NO: 335348 - protein, 85 aa, Zea mays
  Clone ID: MRT4577_68948C.1.pep
MTEWETAAPAVAETPDIKLFGKWSTDDVQINDISLQDYIAVKEKYAKYLPHSAGRYAAKRFRKAQCPIVERLTNSMMMRRSNNGK

SEQ ID NO: 335349 - protein, 129 aa, Zea mays
  unsure (1)..(129): unsure at all Xaa locations
  Clone ID: MRT4577_68949C.1.pep
APARTPPQKTRGSHTRADHGKHHRVPAVVLKIMSARMLLGLSECAVTGTIHPHWSQAPMASCLSTYLSPTVXSVCENPILQPYRIHTGXSVGIXTTSPLKPATIHQALLHKXTLVHLLAQNTMVKRLQK

SEQ ID NO: 335350 - protein, 109 aa, Zea mays
  unsure (1)..(109): unsure at all Xaa locations
  Clone ID: MRT4577_6894C.1.pep
HDYLIPILALALYGNWTGRPKSQRRGGPSALSRLLFVLAGRAPPSPSSTPRGSDTPHALRLCLWIFCYGSLIWNPVFYFDDKILRFIKGYKPTYNLACIVHXGTPLSFF

SEQ ID NO: 335351 - protein, 85 aa, Zea mays
  unsure (1)..(85): unsure at all Xaa locations
  Clone ID: MRT4577_68950C.1.pep
SPIGRRTSLVRSATGRSTEFDLGTQRAGVHSTSVYRCGAVRPRLTSRLESMXEPCSSVKDRIGXXMITDAEEKGLITPGVSVLIE

SEQ ID NO: 335352 - protein, 77 aa, Zea mays
  Clone ID: MRT4577_68951C.1.pep
IQYFSLTKHALQDQLQDIQYTLLSTCSGALNGYFATTPEHLLAEGLIYRANTSQTTATFFLLQKEHMLQNSHKQNYV

SEQ ID NO: 335353 - protein, 92 aa, Zea mays
  Clone ID: MRT4577_68952C.1.pep
RKTQIWFKQPINSHLLLPHHEVNVLSPNMVWACIVQAGCQLTREHQREPSLCDPSKHPLGSRVDQTKPYRRRRVNKVDPPPHKWSSPCSNAW

SEQ ID NO: 335354 - protein, 29 aa, Zea mays
  Clone ID: MRT4577_68953C.1.pep
APGQPLSLFYRVKRLMLNSEVKIPFIYLQ

SEQ ID NO: 335355 - protein, 65 aa, Zea mays
  Clone ID: MRT4577_68954C.1.pep
LAACAQVNGLIAVTSNTKTDPSLGLRAATVDKNHDLTMDSPHSVTMKHGAKSTQFRSSSTDQDQT

SEQ ID NO: 335356 - protein, 183 aa, Zea mays
  unsure (1)..(183): unsure at all Xaa locations
  Clone ID: MRT4577_68955C.1.pep
TLTLSYRSWVSKKRWSSEXVPHSSKGSRRYPGSSMAFSYSNGRTLPSKWEDAERWIFSPNSSDMRGRTTVAHGRRPKSKSGPLGPPGRLGGQYSSVSSVSLLDSGRVGPITSNSHFSAGVLMPGHVCGGKNTNGAYSGRPIGDEINIGERVRICPLNGGSHPIRTPRGRKRLESAVGSSASLA

SEQ ID NO: 335357 - protein, 214 aa, Zea mays
  unsure (1)..(214): unsure at all Xaa locations
  Clone ID: MRT4577_68956C.1.pep
RPGRALSLPVSPFTSSRLRAPSPPNPTFLDGRPTPPLIFPSRSTSSSCPFGQCGDQIGAIFWQAIXHEHGHAQHTSEYCRDSSPPFYPINAYYNEAHYGXRFHPRARLMHLEPRILXTMDSSPSNEXFRPDXFLLGHDCICSNWAKDHYTEGVXLINSVXLDALSKEAENXCNCLQCLQVCHSLRGGTGSRMLTLLISKITQDHQNRMMLTFSV

SEQ ID NO: 335358 - protein, 455 aa, Zea mays
  Clone ID: MRT4577_68957C.1.pep
MANGDAAVEVGGNGEQEAAARQASTFAELGICAELVEACDAMGWKEPTRIQAEAIPHALQGKDLIALAQTGSGKTGAFALPILQELLSNRQAEQSFFACVLSPTRELAIQIAEQFEALGSAIGLRCSVLVGGVDRVQQVLSIGKRPHIVVGTPGRLLDHLTETKGFSLKKIKYLVLDEADKLLNVEFEKSLDDILSEMPKDRRTFLFSATMTKKVNKLQRACLRNPAKVEVSSKYSTVDSLKQEFYFVPADDKDCYLLHVLNERLESMIMIFVRTCESTRLLALMLRNLGLKAMSISGQMSQDKRLGALNRFKAKDCNILICTDVASRGLDIQGVDMVINYDIPMNSKDYVHRVGRTARAGRSGYAVSLVNQYEAQWFVLIEQLLGKKIDQCKVDRDEVLILKGPISDAKRIALTKLKDSGGHKKRRNVGDDDEEVEDHSSHSRRPKSLKRSNRR

SEQ ID NO: 335359 - protein, 106 aa, Zea mays
  unsure (1)..(106): unsure at all Xaa locations
  Clone ID: MRT4577_68958C.1.pep
EQLNRPKKLSYRVVYPLELKLNSNSADADCXYSLFAVVVHLGNGPNQGHYGAMIKSHDHWVSFDDDNVEMIPGFTLQTFYGSSCENSGNPDHGYILFYGGIGWSGN

SEQ ID NO: 335360 - protein, 76 aa, Zea mays
  unsure (1)..(76): unsure at all Xaa locations
  Clone ID: MRT4577_68959C.1.pep
PRVRAATQARSVALERDLCTVDCYNAVLRARHAELAGRLQSLGGVLXVLQMAGADGDMHEMVTDDDMLLLDRRATA

SEQ ID NO: 335361 - protein, 127 aa, Zea mays
  unsure (1)..(127): unsure at all Xaa locations
  Clone ID: MRT4577_6895C.1.pep
MRRGARPAMEMGGDEMMMTSGATGRIVPVFRSVMSRRALLRLAVALHSLFLWLLLLVGRRRRPDAASPAEPGRLGKARSRRRAAEEEDVRRRRALAEEVPMAEDDADVDRRTRDTFXISRKRRNALI

SEQ ID NO: 335362 - protein, 397 aa, Zea mays
  Clone ID: MRT4577_68960C.1.pep
RTRPPTRPPTRPPTRPRTRGGGIHTSFLKDLWPDSRYTYRLGHRLMNGTRVWSKSYSFRASPYPGQDSLQRVVIFGDMGKAEADGSNEFNNFQPGSLNTTYQITSDIENIDMVVHIGDICYANGYLSQWDQFTAQIEPIASTVPYMIGIGNHERDWPGTGSFYGNLDSGGECGVPAQTVFYTPAENRAKFWYATDYGMFRFCIANTEEDWRPGTEQYKFIEQCLSSVDRQKQPWLIFLAHRVLGYSSCTYYESEGTFEEPMGREALQELWQKYKVDIAFYGHVHSYERTCPVYQSQCVVDGSDHYSGPFQATTHVVVGGAGASILDSEFTTSKIQWSHFTDFDHGFVKLTALNHSSLLFEYKKSRDGNVYDHFTVSRDYRDILACSIDNCPRSTLAS

SEQ ID NO: 335363 - protein, 66 aa, Zea mays
  Clone ID: MRT4577_68961C.1.pep
MSAYCGKYIDELIKNAAYIGTLAKGILAAEESTGTIGKRLFRINALIVAENRRALPELLLCPPGAL

SEQ ID NO: 335364 - protein, 121 aa, Zea mays
  Clone ID: MRT4577_68962C.1.pep
CRSSDGKGCPFPLHRRQVYAGWLPCLTPPSFAELRGHCSSRCVSTSAMFSQVSEFCRFMPSRSTAKECRLETPMLGALCLFPVTRSMAWRLWPWFSVVRASELVYVRKPPALLRRPQSSYS

SEQ ID NO: 335365 - protein, 485 aa, Zea mays
  Clone ID: MRT4577_68963C.1.pep
MPGSQNGGPRPRPVKAETIHDLARAGDLAGVQRKLLENPSLLNDKNPVMCQTPLHVAAGYNNTEIVKFLLNQQGTETVDLEAKNMYGETPLHMAVKNSSCGSTNLLLEHGAHIEAKANNGMTPLHLAVWHAIQAGDFSTVSVLLSYNPDCFVKDDEGKMPLNHIPGGAGSEKLLKLLTHHMEEQRKRKALMSCLEGKAMSEFEEAMSQIVGLQELKMQLRRWARGMFFDEKRRAMGLGIAKRRAPHMAFLGNPGTGKTMVARILGKLLHMVGILPTDKVTEVQRTDLVGEFVGHTGPKTRRKIHDAEGGILFVDEAYRLIPMQKSDDKDYGLEALEEIMSVMDSGKIVVVFAGYCEPMKRVIASNDGFCRRVTKFFYFDDFSTTELAEILHMKMKIPSDCSLLYGFKLHPSCSIEAIGELIAREITEEQRKQMNGGLVDTLLINARENLDSRLDFSCNDADTMITITLEDLEAGLRQISRQRQLQ

SEQ ID NO: 335366 - protein, 104 aa, Zea mays
  Clone ID: MRT4577_68964C.1.pep
LREVILKIGLFCARGYQTTGQLSLTYIELLQQQPIANKKNRGSFIFRPRDGYKPITSEGEEILTPPPVRSMHMSAWNFRRRAGTTTRDLEKPPCRRPKRRPLPG

SEQ ID NO: 335367 - protein, 115 aa, Zea mays
  Clone ID: MRT4577_68965C.1.pep
VVWQDNIEPDNMTYEELLDLGEAVGTQSRGLSQERISSLPVTKYKCGFFSRKKTRRERCVICQMEYRRGNLQMTLPCKHVYHASCVTRWLGINKVCPVCFAEVPGEDPEAMSQQL

SEQ ID NO: 335368 - protein, 160 aa, Zea mays
  unsure (1)..(160): unsure at all Xaa locations
  Clone ID: MRT4577_68966C.1.pep
RIWDNTTPVNNVDSANVVLQGGEAPRTTANTINKECIQQVHQSPGSPQVXSARGNIDPDNMTYEELLDLGEAVGTQSRGLSQECISLLPITKYKCGFFSRKKTRRERCVICQMEYRRGNLQITLPCKHVYHASCVTRWLSINKVCPVCFAEVPGEDSQRQ

SEQ ID NO: 335369 - protein, 70 aa, Zea mays
  Clone ID: MRT4577_68967C.1.pep
EIRRSHWLYVTMSLTRFLSVTKIMCVYDMINHLFPKISCLTNFAHLQVTTTDNHSIYTTTQFFEVNYHSL

SEQ ID NO: 335370 - protein, 56 aa, Zea mays
  Clone ID: MRT4577_68968C.1.pep
QGSKLPELSLWKDLELDWKNLVGLWFLEGLSLFELPPLLGGIHVKLPPLDGPTRTG

SEQ ID NO: 335371 - protein, 59 aa, Zea mays
  Clone ID: MRT4577_68969C.1.pep
TQSPRVLLVPSLKSPVHSAASDSVTGVSCILRVSASMTQDSDLLAQALPASQVPLRTHK

SEQ ID NO: 335372 - protein, 74 aa, Zea mays
  Clone ID: MRT4577_6896C.1.pep
AGRAGSSERTGKKERPRSALAIRLVHPLLPKILELVGLGYTGWFVYRYLLFKESRKELVDDIETLKKKIAGTAE

SEQ ID NO: 335373 - protein, 45 aa, Zea mays
  Clone ID: MRT4577_68970C.1.pep
DAWADAWGYTDFISTLVYSQNAKLLCEETSVLIKSVYQFAYAPAY

SEQ ID NO: 335374 - protein, 121 aa, Zea mays
  unsure (1)..(121): unsure at all Xaa locations
  Clone ID: MRT4577_68971C.1.pep
ASDFQFQILRLRKSAPAPGGVKKPHRFRPGTVAFREIRKYQKSPELFIRKLPFQRVVGEIAQKFKTDLWFQSSPVPPLQEAPQGYLVGFFXDTNLWAIPAKRVPLMPKDIQLARRIRGERA

SEQ ID NO: 335375 - protein, 231 aa, Zea mays
  unsure (1)..(231): unsure at all Xaa locations
  Clone ID: MRT4577_68972C.1.pep
MNTTLLRTSALRSAARAAAPVASRAGLAGATFVRGKATLPDLPYDYGALEPSISGKIMELHHKNHHNTYVTSFNNFSEQIAEAKQKQDIQAQIALQPLINFHGGGHINHTLFWENLAPTNXXGGEPPSGALAAAINTNYGSLDAFKEKFNTALAGIQGSGWAWLVQDTQTGGIQIKTYANQDPXVVGQFRPILXVDAWEHAYYLDHQNRKAEYFKAIWNVINWKAAEKRFK

SEQ ID NO: 335376 - protein, 78 aa, Zea mays
  unsure (1)..(78): unsure at all Xaa locations
  Clone ID: MRT4577_68973C.1.pep
RRRHKDAGLDTEATHFHPYKDGVEXVFEEAPPFRHRHNNTHGGERLDILKRMTSSCKAAAEDPWNAPCGGTAHGARQP

SEQ ID NO: 335377 - protein, 41 aa, Zea mays
  Clone ID: MRT4577_68974C.1.pep
KPKLSSAFRKFNMTYAHYIILLHSHNHIQTTTKKSYKFLIN

SEQ ID NO: 335378 - protein, 165 aa, Zea mays
  Clone ID: MRT4577_68975C.1.pep
GTEQAAKSSCSSTRGSLKYQPNVIRQRRSCFLPPRLELCLRVLSRKSVVVFPAAFTSIPPTHTAAIASPRTYGYPGPRPPHLSLTHLGLFFQSPLILRSTPPPPPPPPLRRLGDSSSTSSENGELISFPPMELPYSGPSDPVLLRGLGQLQLRHRRLVLAPPDAW

SEQ ID NO: 335379 - protein, 615 aa, Zea mays
  unsure (1)..(615): unsure at all Xaa locations
  Clone ID: MRT4577_68976C.1.pep
MQTSKPRSGSSDAPQRTSPRTPRASRVAKTGGNETDSTGVTPTRTPTERSPKVTERRSPRSPITEKKRPSRLSELESKVSQLQDELKKAKEQLSSSEARRRHAQQEAEEAKTQEQAAAASKLEELQRQLDEFSAAEESRLQELRKISQERDRAWWAELEAVQRQKSADAAALGSAMSEIQRLKQQLEASAESDAARAKQCEYVEAEIEGLKQEMEIRLATIEGLKVNVSESDRAAAEANATVNETKQQLETAKATIDSLVAEGVRMQECLRSKDMELNESKALVASLQEDMKKSHDTDNAKAKANTDVRSETEALQKVLVTTSAADANGSCGSYDPEIEQLRTALEVAEIRYQEQQTRMTIETGGLYETLESVRAECARELCELRLELKNKNDALMEAMAGAAADPHRPDAMQQPELEAKLMRSITDAAELKACLMDKENALQSLAEENEALKAGAGRAEAELRRKYEAAVAELELAKAAEQDVRMRLGLVTDEADRSSRRAARASEQLDAAQAAXAEMEAELRRLRVQSDQWRKAAEAAAAALGGGGGKDGNGGTVERTGSLGPEYGSSIGGKLMSSPFSDDVDEESPKRRNGGGGGGGGVLRRMSGLWKKSPK

SEQ ID NO: 335380 - protein, 182 aa, Zea mays
  Clone ID: MRT4577_68977C.1.pep
TTCKISRRSSSKLVFKYHFCTNLYIPCPWFSCSRVRRYHEGSMEKHLDVIEVVRYMFVRCPASIVSGNGAAIETICIISIQIFRNSGAGYKCHKNPLPHCLLHMQSSKGCSLSCSADTVATSAWSVFCRSGSSSMISSYRRVRGVPLLSWISEAIVHEIAFWHLVLCRRWNRRCKRRSRSWR

SEQ ID NO: 335381 - protein, 93 aa, Zea mays
  Clone ID: MRT4577_68978C.1.pep
GGSGTPVDDLDRCCQTHDHCYNQAKKLESCKFLIDNPYTNTYSYKCSGNVITCSEKNNDCESFICNCDRQAAICFSKVPYNKEYKDLDTKIHC

SEQ ID NO: 335382 - protein, 58 aa, Zea mays
  Clone ID: MRT4577_68979C.1.pep
LYCTAYANTCMPPPAPIPMELIALSSSAVHCSKGRLKRHLTLAEFDALFDSDYDKYGP

SEQ ID NO: 335383 - protein, 53 aa, Zea mays
  Clone ID: MRT4577_6897C.1.pep
LIDPGVPTLLQGLHCIVNLRRTFFLKRKVNVGLRSVKDMEIEPYVTCYTILID

SEQ ID NO: 335384 - protein, 69 aa, Zea mays
  Clone ID: MRT4577_68980C.1.pep
GRKRILDWASGQSTQPYYHGGNLNDKLVTKTTPDEGACTPLALRSRRSLMTHTVREVRVPYEMTKDDHH

SEQ ID NO: 335385 - protein, 255 aa, Zea mays
  Clone ID: MRT4577_68981C.1.pep
MASRDLRAVRRAIVVKKKTSVLAAALISELDITAKTEYNNALLAKMQPPAKKGVVITPDIIDKLYLFWDNFLGSYEKEGETSKQTSFFGQELAHLHRTIRNLESHFPNQKGGKALIAKQAVIPLLCKAKRKEAGFIKEVVATTPLFIRLYQSPIPDTKEAVPVPIPCKASSKPSNKNQYQPRTFTKTHSSQGRFLYLSITSKKIAIMIALPFKEPTINNTCTNTYQACKARINDATLLPFPERSITGYHYWLPLL

SEQ ID NO: 335386 - protein, 160 aa, Zea mays
  unsure (1)..(160): unsure at all Xaa locations
  Clone ID: MRT4577_68982C.1.pep
PAGXKKKKKKKKKKKKKKKKNPPNPFPPPAAGSRPRCQRPGKGPSRRRRQRGGTLGRSSRATTSPRRGPSSPVPGIPTSSRGAEKVAAKRALYLKELGVYAKAGPMGKENHAVAGAGKKLNCSPKGNESLKNRLAVTKEAQRLRFHMLSKNGKVHEQEIK

SEQ ID NO: 335387 - protein, 69 aa, Zea mays
  unsure (1)..(69): unsure at all Xaa locations
  Clone ID: MRT4577_68983C.1.pep
LAAAPFVGEFMKNLEYKXPIRFSLTSKLMRVVFQYLMNVVPIISVWTMEFFFCMGKQLLRNTMDEIKKR

SEQ ID NO: 335388 - protein, 88 aa, Zea mays
  Clone ID: MRT4577_68984C.1.pep
HEVLSLQMQRATHDESAADLWWNEITRTVASVEGLFDCALGLRGHRFPLNLVLICDPYLSDMESTIDLSQMQTGNHTEWNDTLTITVS

SEQ ID NO: 335389 - protein, 68 aa, Zea mays
  Clone ID: MRT4577_68985C.1.pep
NIETLTMDYHRGGGVEVRIGRISNTYGPSMCLDDSPVDRNIVAQVLRKPPLTVHGDRKQTRILQYVAD
